United States Patent Application Publication US 2006/0134663 A1 - sequence listing, part 41

SEQ ID NO: 75924 - DNA, 1042 bp, Homo Sapiens
ccagacacacataggagtgtgctccattggtcttgtggagagtgctgcacattaacccctccctcaactgtgcaatccacttgagactggcttctctaagccacagttgttatctgctgtgtaaagtcctggatgccagcactgtggcttcttagagagggcagatgctttgtatatcgagctgcagcattcatcgtagaaaatgctacaaagctgtctctcttccccttctctcatgtttccctcttttcatcaagatgaaggctgttgggtaagaaaaactaagtgatttaacaaatcattatgatttaaacttagaaataaacctagaattttttgggtgtcccttttatcataggtgtttaatgtatattttaatgattgtagaacttgaattgctctagaatgtgaatgactacccttgtgttttactccttttggcttttgttttgtaaagaatctcctgtgaggagttctgtttttagaatttaatattgtttggttacttccctgactttagtgaaagatattagagtatttactatgccagtatctaacttaaactattagtattaaataagtatatcttttacatttagtacaggtaccataaccaagagatttcttagttttgatggattaagagagagcattctgctgtatattatggcaggtacagatatgatcataactgaaccagaatttggattatagaagtgcacttcctagctgttttttatttaggtataggaacacacaatgagaaccttatgtttagaatgtagcagtaacaacagagggtaactacactgcaagacttaaatggtttgagcatgtgacactatccttttgttggggggagcagggtataaaaatatacatacaggagattagtttaatagtaaagttttatatgtatgtttaacttccatgatatttattattttgtagagacatttgtgattgtttagagttcttgtttttattctatttatgtataaggttgactttttttaaataaataagccaaaaattctttttg

SEQ ID NO: 75925 - DNA, 1253 bp, Homo Sapiens
  misc_feature (1091)..(1099): n is a, c, g, or t
ctttcactgctgcctttagatgaagtaaaggattctttggcacagatgcgctggctgactgctggtgagtgctgttctcgccctgcctttgtctttgatcatacgctgctttcagctccctctgaagttcagcaggaagggcagcaaatacctcagggtccacctgtgaaaatgctggaagggctattaaatttattcctgcgtcactgttcgattcttgaggttctggtatttgcaacaagactgtcccaactggttgtggcaaaattcctgtattacagccatttactggttctttctttttgtcgccatgtgactctgcttgctggacagcacagacttgctctacttgttcccggagatcaggtggaagtgcttctaaaacagactgatccagctgggaaggtgacgggacctctatactcaggttaagtctcgactgcacactgacaggagtatgtagaccattccatttccctgaagactcagccttgttagtatcaggactggtcggcagatgtgcaggaaaaggtggcaagaaagtgcaagttctagaagcagatgatatttccagatccacagcagcccgaaatacttcttggtgctcctcttcggtggtatttcttagctattctggaactgggaagacatcacggacagagtatgacccactaggaaagtggctttgactgaactgatgggcgactgggacatgtggaagggttcagattagttggaaccaactgattcacgtgaatcccaacctagaacccagaataaagagtatgcttctaggaaaactaaagtgaaaatatgaattcagctaagcaaaatcctcagcaaatccttgttcactatctcctggatcctgtttctagaataaaggtaaatgaaagtattcaaacagcattctatatgacttattacaaaaacaatttctaaagtagctagtgagtggtcattcatctcaaacttcagagtatccaattctcccaaaatataccaaaagatctttaaaatcagaaaatccaaacaagtggaatactgtattccactgatgttctcgtcaactaaggttttaaattaggatnnnnnnnnnttaagagaggacagtctacttggaaacttcactatttttatcttttttaaatgaaatacttctcaaaaaatattggcgggagtgatgaacagcaggtacactgccccggccgtaatggccgaattcccgggcatatgtccggtaccgtcgactg

SEQ ID NO: 75926 - DNA, 639 bp, Homo Sapiens
  misc_feature (23)..(23): n is a, c, g, or t
ctggatcattcagagctctcttntagcctacccttggatgagtacaattaatgaaattcatattttcaaggacctgggagccttccttggggctgggttgagggtggggggttggggagtcctggtagaggccagctttgtggtagctggagaggaagggatgaaaccagctgctgttgcaaaggctgcttgtcattgatagaaggactcacgggcttggattgattaagactaaacatggagttggcaaactttcttcaagtattgagttctgttcaatgcattggacatgtgatttaagggaaaagtgtgaatgcttatagatgatgaaaacctggtgggctgcagagcccagtttagaagaagtgagttgggggttggggacagatttggtggtggtatttcccaactgtttcctcccctaaattcagaggaatgcagctatgccagaagccagagaagagccactcgtagcttctgctttcgggacaactggtcagttgaaagtcccaggagttcctttgtggctttctgtatacttttgcctggttaaagtctgtggctaaaaaatagtcgaacctttcttgagaactctgtaacaaagtatgtttttgattaaaagagaaagccaactaaaaa

SEQ ID NO: 75927 - DNA, 1235 bp, Homo Sapiens
  misc_feature (692)..(729): n is a, c, g, or t
agtctaaagaaagttctgaacagaatatcaattaagcttacatcacaaaaactttaaatgtatttacagagtgaataagttacatagataaactctgaatatgtttctgcagtgcaacaagttcacatgcacacatctaacacttgacagcattaagtttaaggagagaacttaagaatggccctttacatatatattacacataaaatatgacatcgaagaaacaaagtaacaactcatattttacctttatgattctacttctgactatccaaacagatattaaaatatgcatgcctgacaggtgaaaagacttggaatttatcttgtgaatagttttctctacaaaacggcaaagttaattaaaattaacactcagccttcagcagtataaatatgctcataaaagcaaccttctagtaaaaagcagccaagatccttaaaaagagtctatctggaccatttttggtgcaaagagatccagggctttcagaaacagtagcctagcaacataagaaaggtacttcatagcagctccttttagatacagtaattgtattcaaattacagtgtacattacattgcagtccatttacaattcccttgttcacatacacaggctgtcagcttttgaccatcttacagttttcagtggccagcttcattttgcctgcccctttctcagcccacgnnnnnnnnnnnnnnnnnnnnnnnnnnnnnnnnnnnnnntggaacaagacagggaaagaatatacatgtttgagaatataaaattttttgagtgaagaaaacattgcacttttgccaatctaaaattgtttctagaaaggaaggtactgttcagtgtagtcggctttggtatgcaacggaagtcacttcttcagtagcgagttgcatatgctcggtcaaatgtaacacatttgtgccacacagcatgatgagtggagtctgtccaggacgttctaagctaccttggttcttatagtattgctacacgttggaagttctgccatcctctttagaaaaagccctacaggtaacaagagggagaacagtctgtccaagccttttgaaggccgagaagacactgaatgacgttgccccagcatggcagcactgccagtttggaacccagtggggacaggaggctcctgtcagagactagtgccagaaacactggagtcccccggccgtaatggccgaattcccgggcatatgtccggtaccgtcgactg

SEQ ID NO: 75928 - DNA, 837 bp, Homo Sapiens
aaggctagtacgaggcctgggtgttgaattcggcacgagggatcttcgagatgtcctcttcaacctgtgtgaaaacctggtgaagtccagtgagcaaactctccagcccatgaggagttcaagacgatgctgctgatcgctcattactatgccacgcgctctgcagcccagagtgtcaaacagctggaaaccgtggctgccaggctttctgtttcactcttgcgtcacacccagctactacctgtagacaaagccttctatgaagcaggcattgctgccaaggcagttggctgggataacatggcattcatcttcctcaatcgctttttggacctgaccgatgcaatcgaggaagggactctagatggccttgaccactctgattttcaggatacagacattccctttgaggtgccactcccagctaagcagcatgtaccggaggctgagagagaagaggttcgagactgggtgcttacagtctccatggaccagcggctggagcaggttctgcctcgggatgagcgtggcgcctacgaggcctccctagtggcagcgagcactggtgttcgagccctgccctgccttattacaggataccccattctgaggaacaaaattgaatttaagcggccagggaaggctgctaacaaggacaactggaataaattccttatggccatcaagacctcccacagcccagtgtgccaggacgtgctgaaattcatcagtcagtggtgtggagggctccccagcaccagcttttcctttcagtagttggtagagctgaggaagagttagggcctctccctcattaaagttttataaataaaaaaa

SEQ ID NO: 75929 - DNA, 454 bp, Homo Sapiens
gcagttggctgggataacatggcattcatcttcctcaatcgctttatggacctgaccgatgaggctgagagagaagaggttcgagactgggtgcttacagtctccatggaccagcggctggagcaggttctgcctcgggatgagcgtggcgcctacgaggcctccctagtggcagcgagcactggtgttcgagccctgccctgccttattacaggataccccattctgaggaacaaaattgaatttaagcggccagggaaggctgctaacaaggacaactggaataaattccttatggccatcaagacctcccacagcccagtgtgccaggacgtgctgaaattcatcagtcagtggtgtggagggctccccagcaccagcttttcctttcagtagttggtagagctgaggaagagttagggcctctccctcattaaagttttataaataattg

SEQ ID NO: 75930 - DNA, 1222 bp, Homo Sapiens
  misc_feature (626)..(626): n is a, c, g, or t
atcatttgaacagggaaagtttaatgttaagaattattaactactaagtgttataacaaaaagtgaaactcaaaagaatacagcaataacagatatagagtgtctctagggctgaggcagaacatcaaaggtaagaacaaatttgcaggagggtgccacaacttcccctttcctgccaggtcttagatccaggccttgttggagagggcacagccacagcccactggatggagatgccactgcagtgctgagctggcagaactcactgaggagccacactctggggtgctagaagctccccatggggagctgacctggtacagaacttgctgggaagctacccatagggatggggcctttggaactcattgggatgtgcactgctgggtgtcccatgtgctacagaaacaaacacaaagaacatgccagaaccaggaagaaaagccctttcttccagttcctctgcaacccctctattgataaagctcacagcatgccagctggcaaatagtccagtatcacagacagggcaatgaagcgtagatttgaaactgaggcaataaattgatagctgtcacagatgccagggattagaactgaaaggactttgattatgttattgcaanaatcatccttatgggcagcagatatatcaggtataccagcttgttctcattaatcttttgttaaatctgactacccttctgattttgtcttcaccaagcaatcttattaacttcctgtgaagcttagctgtaataagaaaattgcatttgttcagtctggtccatgtgatggttacattactcattaattctcattctgtttttattactgagtttcacgggcttagttattaagagtctaccccaagagataaatctattttttgtatgatgataaaattaggtatatgaggacctaagcccaaaggccagaccctggacctcggcagttcaccaaaggaatccataccatccatccactgaattcttctgggaaactgcttcccaaccttccccaggcatcataccctgatactaccattagccaagcaggccctcttaagtatcttctgcaccaagcaggtgctacattaaaacgggttttgaaaattcatctcaaggaaatcaagctgtctctatttgcagataatatgatcccatgtctagaaaaccctatcgtctcagccccaaagcttcttaagccaagaagcaactcc

SEQ ID NO: 75931 - DNA, 1242 bp, Homo Sapiens
gtcagccaggtgtcgctgtcctccctgacgtccgacaagccatctcggcacagcgctgcagcagacgatgatggggacaagtggtctctgctcctgaatggcagggatgaggagcagtacatctgatgacttcaggcaggcgggccggggcagggacttgcctccactcaccacaagctgagcaggacagccagcagcaggatgggctgagctagcctccagctttggggacttccgctccctggatatgtccagtcatcctgccctgcagcacgcggccttgtctgggtgcagctgggcttggcctgaagaggacgcccctgcctgcctcttggcctcacgggaccgtcagcatgggctttgtcttggactctagtccttggctggactgtagaaggtgagaggcgagtcaccctcctcacagacctctgcttggagtatttaggatgactgctgtgaaatggagaacagtttcatcaggaccaaaaaacctcactgggcctttccagagaactgcagacctcactgtcagggtctttctgatgacgcctgtctgtgtgcatcatgtttctgagaccacagtttacctcaggcaaggaaacaggctccaagaggctgaggactttgcccaggatgacatagccaatggacaagcagtgtctgtcagctgtgaaggcttcactcttattgtccttctaccttgaatagaagttttcctgataagaataaacgaggaaaaggtccttgcctcctggaagaacaaatctaccaggtgatctattcattgtttcaactcagaatgcacttgattcaggaggtcatctgaccttcaccttggatggttagtttcactttttacatatagtttttgcagggttttattttataaaatccaagcgcgctgttgattgtgttttccttgttttcagccccccgactccagcccgcagcacatttccgctgtccgtcagtaattgtgtcctctctttatgcttgcttggggaatgttgttttctgactaggctgatcattatctaaagaatctaattctgttgatttttaaaacttttaggaccataaacgttgtgttcatatatggacatggaaatatttatataattttatagaaaataaccttttagatggtcaaagtgtaaggagtttttttgtcagataatcatttctacttcaaaaacatttcatgcaatattagaataaagttcctgtcattcctctaaaaaa

SEQ ID NO: 75932 - DNA, 739 bp, Homo Sapiens
cggaggcgccgggggatttggaatatgaacagtggtacagaaagcaggctggtacggtccggaattcccgggatatcgtcgaaccacgcgtcgctggaagacatggccactccagtcggtgttgagcacggcgagcagtctcaggcctttagtgatgatggtgcagtcagcctcagtttccaaagccggaaaaggatcctctagtagccacggtgtggcagctgctctgaaccaggacctggacccggacccaaagtgccatgtctttaatgttagctcccagcgatgccagatgggatcagcacagccctgcctctgctgctaattgttcctctaaagtaatcgccatgcgttcttcgggcttcatctttaaaggaatgaagcaactgagattattctggaaaaccttttggcagttagtgaaattagagtacaactaagaacattttcagacctccactgtggatgacctgggtataatctcacaaatcgatgggactgcaaggattgtaaactgaaatgaacatgattatactctgttggaagagcctaagaggaaactgatgccatgagtttcagagagtaatgcttaaccccagttacacaggatgccgtcttgtgtttcctctgtgtttagttacccactacagtgattttgtgatcgtgctaaatgggttgccaaccaaaaagcattgctttagcacttttacttcaaatcaatgaaggattgataaaagtt

SEQ ID NO: 75933 - DNA, 948 bp, Homo Sapiens
  misc_feature (157)..(157): n is a, c, g, or t
aaaaagaagctgatgcctgggtgagtcaacactgggtattttttgaccactatttgaaaccaaaaaaggaaaccactgatattctatgcaaagatctgttcctggaaggcactctgcggagacaccaggagaacttttatcaatccttcatgatttngaagtaaaagtgctaaagcaatggttgtgggtggcaacccattagcagatcacaaaatcactgtagtgggtaactaaacaagaggaaacacaagacggcatcctgtgtaactggggttaagcattactctctgaaactcatggcatcagtttcctcttaggctcttccaacagagtataatcatgttcatttcagtttacaatccttgcagtcccatcgatttgtgagattatacccaggtcatccacagtggaggtctgaaaatgttcttagttgtactctaatttcactaactgccaaaaggttttccagaataatctcagttgcttcattcctttaaagatgaagcccaaagaacgcatggcgattactttagaggaacaattagcagcagaggcagggctgtgctgatcccatctggcatcgctgggagctaacattaaagacatggcactttgggtccgggtccaggtcctggttcagagcagctgccacaccgtggctactagaggatccttttccggctttggaaactgaggctgactgcaccatttacagaaatttcatcatgaagatccttacacttaacaccttaaggtgatgagttttcacatgactgttttcaaggccacagccaccacctttaatcatcatcactaaaggcctgagactgctcgccgtgctcaacaccgactggagtggccatgtcttccagccacgcggccgacctcgaaaagaacccccggccgtaatggccgaattcccgggcatatgtccggtaccgtcgactg

SEQ ID NO: 75934 - DNA, 1310 bp, Homo Sapiens
  misc_feature (944)..(1036): n is a, c, g, or t
  misc_feature (1059)..(1168): n is a, c, g, or t
agcatagtgaatatagaacccagtggttcaaaaaagcaggctggtacggccggaattccgggatatcgtcgacccacgcgtcccatggccactccagtcggtgttgagcacggcgagcagtctcaggcctttagtgatgatgattaaaggtggtggctgtggccttgaaaacagtcatgtgaaaactcatcaccttaaggtgttaagtgtaaggatcttcatgatgaaatttctgtaaatggtgcagtcagcctcagtttccaaagccggaaaaggatcctctagtagccacggtgtggcagctgctctgaaccaggacctggacccggacccaaagtgccatgtctttaatgttagctcccagcgatgccagatgggatcagcacagccctgcctctgctgctaattgttcctctaaagtaatcgccatgcgttctttgggcttcatctttaaaggaatgaagcaactgagattattctggaaaaccttttggcagttagtgaaattagagtacaactaagaacattttcagacctccactgtggatgacctgggtataatctcacaaatcgatgggactgcaaggattgtaaactgaaatgaacatgattatactctgttggaagagcctaagaggaaactgatgccatgagtttcagagagtaatgcttaaccccagttacacaggatgccgtcttgtgtttcctcttgtttagttacccactacagtgattttgtgatctgctaatgggttgccacccacaaccattgctttagcacttttacttcaaatcaatgaaggattgataaaagttctcctggtgtctccgcagagtgccttccaggaacagatctttgcatagaatatcagtggtttccttttttgtttcaaatagtggtcagaaaatacccagtgttgactcaccaaggcaatcagcttccnnnnnnnnnnnnnnnnnnnnnnnnnnnnnnnnnnnnnnnnnnnnnnnnnnnnnnnnnnnnnnnnnnnnnnnnnnnnnnnnnnnnnnnnnnnnngagacggagttccactctgtcgnnnnnnnnnnnnnnnnnnnnnnnnnnnnnnnnnnnnnnnnnnnnnnnnnnnnnnnnnnnnnnnnnnnnnnnnnnnnnnnnnnnnnnnnnnnnnnnnnnnnnnnnnnnnnnttctttaagtagaaactgggtttcaccatgttgggccaggatggtctctatctcctgaaccttggggatcttgcctgccctcagccttcccaaagtggctgaaaatggacaggggggggagccccatccagaaccccggcaa

SEQ ID NO: 75935 - DNA, 1054 bp, Homo Sapiens
tgtttatcgatgccactgggtttcaaaactcataataaaggaactttcagagattggttgaaacccagtggtatccctgtaaattagctcctgtgactggaaaagaccccaaaaaggcagtagaggagattagtgtttacttgctgtggttgtggtgtgctgctacttaattataggtagtgacacactgaaattcttatttgtccaataatctgaagtagtttcctatatttatctgtactaaattgactataaattgagtctgcaaagaggaaactttttgactgtactgtatttaggagcctttgtacagcttggtcaaaatttccatgatatgaagtatttgaggtttaaaatatactgttattaaaaggaaaaagacatggccattattccatgtgcttaaatgataatttccttattcagtttcagaagaaaaagaatgaaattgggtaactgtcattgcgttagctttatgttgaattgggaaattgtggcataaagcttaaattcgtgtttatcaaatgtgaaccatagtagtataatgctgctttgtatataatgtaagtgctacaaatagtctcagcactgaaaatgtattgatacctcttaaatgaatgcaacttttgatgtaggtgttttgctatgcctcagaaactatctgtctgagaatttgttaatctgtttgataatgaagatacttcctgttttcttgtttcatattttcatgttcaaaatttaagttttacatttttactactgttaatttaaataaaatttgttctgtggataaaatgaggttggcagtgaagaaaattaaaaacagcctcattcatgtaactggttaagtaaaaatacattttcactatgtgttcataaacttttaatgaagctgtttgtctttcagttcaaatataagtgatgtttaggctttatttctgttaataaggctttttaccattgattaaatgaaggaatgtatctttttgaagagatttatattctgtaaataaaaattcgttgtaacaataaagttgagttctaactacaaaaa

SEQ ID NO: 75936 - DNA, 837 bp, Homo Sapiens
ctctccttcctcacacagttcatcataacccaaccccccacccccgggtcatgaaaatcacagaacttataaacacattgaaccctagatctcaggcttcctgacctacccgccagtggccccttgctggccaccctatagggtcctccttcccttggcagccccccatgtgggagaaatacctgattctcccaatctgcagtgggagagctttgctgaattccatcccaaagtcaaacatgggcaagaggtgaggatttcacttttaccctcaagtccgatttgtctgtgattttaaactaactgtgtatgtattgatgtttggaagattgtttgaattttaaagtgataatagtacttaatgttatccagtattgttcattaaatggtgttatcctaaagctgcacttgggatttttacctaacgctttactgattctctcaagcacatggcaaagtttgatttgcactccgttcatttctgacacgttttgctgcctcctacctttctaagcgtcatgcaaattcgagaatggagaaggacgctgccggtccctgagcggtgtggagagggcggaaggtggactccagcgcagcttgaggggctgaggacggaggctgcagcatctgtgtcgttctactgagcacgcttctctgcctcgctcctgactcagcactttgttcactggctcagcagttatgtttacacatcatttttatgttcctgctttgtaattcatgtttgagatgggtggccactgtacagatatttattacgctttccagactttctgaatagatttttttgaataaacatggttttatgaagtgtaaaaa

SEQ ID NO: 75937 - DNA, 336 bp, Homo Sapiens
accgtaaaaacctgtaaaggagtggtcagtttttagatgaaaggtcataggaagaagagcattaaaagttgagatataaagaagagaaaaaacccaacatcgaggaattagaaaaataaggcgtgacagcatttccacattcatttcgaagtgaaaggaaagtcgaagggacattaagggaaaagggctccttgcgtagtttcccctcacagctctcgtcttaagaacgcttaagggtcggtgcggtcgttgactaaccacttcattaggctcgtcccaccttcaacctcaaggctttcgccaaattagacgcaacgccgccggttccaacagaga

SEQ ID NO: 75938 - DNA, 908 bp, Homo Sapiens
ggagtggagtggagcggctgtggttgccgactctttcctcttccccacggtccagtcagcgggttaattaggccatcggccctcgagccgagacttgtctcttatttagttctggggagcgcctcgtcgacatgagtgatgtggaggaaaacaacttcgagggcagagagtctcgctctcagtcaaaatctccaacgggaactcctgctcgtgtaaaatcggagagcaggtcaggatctcgtagtccatcaagggtttccaaacactctgaatcccattctcgatcaagatcaaaatccaggtcgaggtcaaggagacattctcatagacgttacactcgatccagatcccactctcactctcataggagacgatctcgaagtagatcatatacaccagaataccggcggcgaaggagccgaagccattctccaatgtctaaccggagaagacatactggcagcagggcaaacccagatcccaacacttgccttggagtgtttggcctcagtttgtacacaacagagagggatcttcgtgaagtattttctcgatatggaccattgagtggtgtcaatgtggtttatgatcagcgaactgggcgatctcgaggatttgcttttgtgtattttgagagaatagatgactcaaaggaggctatggaaagggcaaatggaatggagctggatggtagaagaattcgggtggattattctataaccaagagagcgcacacaccaacaccaggcatctacatgggcagaccaactcagtaagagttcaagtttcctaagctaaactatgaaatccaccagaaatatgtgcaaaattttgattactcagaaacttttttcctataattagaattgattctggcaaggggcaacatggcaaaaccctgcttctac

SEQ ID NO: 75939 - DNA, 1253 bp, Homo Sapiens
ctcaacctcacctcgcgggcgctcgacccggcaggtaatgagagtgcatacccgcccaacggcgtggagtgctacagctgtgtgggcctgagccgggaggcgtgccagggtacatcgccgccggtcgtgagctgctacaacgccagcgatcatgtctacaagggctgcttcgacggcaacgtcaccttgacggcagctaatgtgactgtgtccttgcctgtccggggctgtgtccaggatgaattctgcactcgggatggagtaacaggcccagggttcacgctcagtggctcctgttgccaggggtcccgctgtaactctgacctccgcaacaagacctacttctcccctcgaatcccaccccttgtccggctgccccctccagagcccacgactgtggcctcaaccacatctgtcaccacttctacctcggccccagtgagacccacatccaccaccaaacccatgccagcgccaaccagtcagactccgagacagggagtagaacacgaggcctcccgggatgaggagcccaggttgactggaggcgccgctggccaccaggaccgcagcaattcagggcagtatcctgcaaaaggggggccccagcagccccataataaaggctgtgtggctcccacagctggattggcagcccttctgttggccgtggctgctggtgtcctactgtgagcttctccacctggaaatttccctctcacctacttctctggccctgggtacccctcttctcatcacttcctgttcccaccactggactgggctggcccagcccctgtttttccaacattccccagtatccccagcttctgctgcgctggtttgcggctttgggaaataaaataccgttgtatatattctgccaggggtgttctagctttttgaggacagctcctgtatccttctcatccttgtctctccgcttgtcctcttgtgatgttaggacagagtgagagaagtcagctgtcacggggaaggtgagagagaggatgctaagcttcctactcactttctcctagccagcctggactttggagcgtggggtgggtgggacaatggctccccactctaagcactgcctcccctactccccgcatctttggggaatcggttccccatatgtcttccttactagactgtgagctcctcgagggcagggaccgtgccttatgtctgtgtgtgatcagtttctggcacataaatgcctcaataaagatttaattactttgaaa

SEQ ID NO: 75940 - DNA, 1202 bp, Homo Sapiens
  misc_feature (40)..(40): n is a, c, g, or t
  misc_feature (43)..(77): n is a, c, g, or t
cgaacgacgagcgcacggagtttgtgagcgaggaagcggncgnnnnnnnnnnnnnnnnnnnnnnnnnnnnnnnnnnncagtcgacggtaccggacatatgcccgggaattcggccattacggccgggggttgctcaaaccgagttctggagaacgccatcagctcgctgcttaaaattaaaccacaggttccattatgggtcgacttgatgggaaagtcatcatcctgacggccgctgctcaggggattggccaagcagctgccttagcttttgcaagagaaggtgccaaagtcatagccacagacattaatgagtccaaacttcaggaactggaaaagtacccgggtattcaaactcgtgtccttgatgtcacaaagaagaaacaaattgatcagtttgccaatgaagttgagagacttgatgttctctttaatgttgctggttttgtccatcatggaactgtcctggattgtgaggagaaagactgggacttctcgatgaatctcaatgtgcgcagcatgtacctgatgatcaaggcattccttcctaaaatgcttgctcagaaatctggcaatattatcaacatgtcttctgtggcttccagcgtcaaaggagttgtgaacagatgtgtgtacagcacaaccaaggcagccgtgattggcctcacaaaatctgtggctgcagatttcatccagcagggcatcaggtgcaactgtgtgtgcccaggaacagttgatacgccatctctacaagaaagaatacaagccagaggaaatcctgaagaggcacggaatgatttcctgaagagacaaaagacgggaagattcgcaactgcagaagaaatagccatgctctgcgtgtatttggcttctgatgaatctgcttatgtaactggtaaccctgtcatcattgatggaggctggagcttgtgattttaggatctccatggtgggaaggaaggcaggcccttcctatccacagtgaacctggttacgaagaaaactcaccaatcatctccttcctgttaatcacatgttaatgaaaataagctctttttaatgatgtcactgtttgcaagagtctgattctttaagtatattaatctctttgtaatctcttctgaaatcattgtaaagaaataaaaatattgaactcatagcaggagaatagtttttaaaataaatctcgatttgttagcatc

SEQ ID NO: 75941 - DNA, 1123 bp, Homo Sapiens
gttgctcaaaccgagttctggagaacgccatcagctcgctgcttaaaattaaaccacaggttccattatgggtcgacttgatgggaaagtcatcatcctgacggccgctgctcaggggattggccaagcagctgccttagcttttgcaagagaaggtgccaaagtcatagccacagacattaatgagtccaaacttcaggaactggaaaagtacccgggtattcaaactcgtgtccttgatgtcacaaagaagaaacaaattgatcagtttgccaatgaagttgagagacttgatgttctctttaatgttgctggttttgtccatcatggaactgtcctggattgtgaggagaaagactgggacttctcgatgaatctcaatgtgcgcagcatgtacctgatgatcaaggcattccttcctaaaatgcttgctcagaaatctggcaatattatcaacatgtcttctgtggcttccagcgtcaaaggtgggtctgtctccttccgaggactgcgatgctcatacacgcacatcattaagagctctgcgtttgggaacaggcatagcagagattataatttcaagtattgaaatgatttcaaaactgcttttttcaaaattggtattaagttccttaaccacagatcttttgctctcgatgtgagccagtggtaaaattaaattaaaatgtggggtatttttgccctcccttttattctttctaatggacatggaaatgaacatcaaactgggagaaagaaccatttaacatttaattaatttaaaatagtgtattgagcaccggtatgtgctctggccataaaagaattcacagtccaaaactaggaacaaggcagcaaacatcatcttctccagtgtgatgatatataacagaggtttgtacaaagcgctgtcaaaatacagggaaataactgcctgtgagtttgtggaatgcttcacaaagacagttgatctgagccatcagcaagaagtcaagttgaaggacaaggacagcagtacaatatgtggattaatgtcacaatctggcatagttggatctgtgagtttaaaatgaaatagttactgctgagataccatcttctccttgcaagatacacgtcgcga

SEQ ID NO: 75942 - DNA, 1170 bp, Homo Sapiens
  misc_feature (812)..(986): n is a, c, g, or t
  misc_feature (992)..(1042): n is a, c, g, or t
  misc_feature (1056)..(1118): n is a, c, g, or t
cctcttccacccctgccaggcccagcagccaccacagcgcctgcttcctcggccctgaaatcatgcccctaggtctcctgtggctgggcctagccctgttgggggctctgcatgcccaggcccaggactccacctcagacctgatcccagccccacctctgagcaaggtccctctgcagcagaacttccaggacaaccaattccaggggaagtggtatgtggtaggcctggcagggaatgcaattctcagagaagacaaagacccgcaaaagatgtatgccaccatctatgagctgaaagaagacaagagctacaatgtcacctccgtcctgtttaggaaaaagaagtgtgactactggatcaggacttttgttccaggttgccagcccggcgagttcacgctgggcaacattaagagttaccctggattaacgagttacctcgtccgagtggtgagcaccaactacaaccagcatgctatggtgttcttcaagaaagtttctcaaaacagggagtacttcaagatcaccctctacgggagaaccaaggagctgacttcggaactaaaggagaacttcatccgcttctccaaatctctgggcctccctgaaaaccacatcgtcttccctgtcccaatcgaccagtgtatcgacggctgagtgcacaggtgccgccagctgccgcaccagcccgaacaccattgagggagctgggagaccctccccacagtgccacccatgcagctgctccccaggccaccccgctgatggagccccaccttgtctgctaaataaacatgtgccctcaggccnnnnnnnnnnnnnnnnnnnnnnnnnnnnnnnnnnnnnnnnnnnnnnnnnnnnnnnnnnnnnnnnnnnnnnnnnnnnnnnnnnnnnnnnnnnnnnnnnnnnnnnnnnnnnnnnnnnnnnnnnnnnnnnnnnnnnnnnnnnnnnnnnnnnnnnnnnnnnnnnnnnnnnnnnnnnnnnaggggnnnnnnnnnnnnnnnnnnnnnnnnnnnnnnnnnnnnnnnnnnnnnnnnnnntttttttgaaaaannnnnnnnnnnnnnnnnnnnnnnnnnnnnnnnnnnnnnnnnnnnnnnnnnnnnnnnnnnnnnnagggaggaaaaaacaccccccggggggaattttaggaaaaaaacccctcttt

SEQ ID NO: 75943 - DNA, 707 bp, Homo Sapiens
agcccagtcccagtttattgtggaggaaaatgggggacatggagctgagcagaacagacccttccctctcctctcacaggcccctagggagatgggtgtcaggactcagtgaagtgaaatggggccgaggaagccagagactgacaagagagcaagagaggacaggaggcagaacaacactaggacaggcgggggttggtggagacagtgaggcagggacacaaaattgccaagtcaggacatctgcacagaattctattcctctcctggcggaatccctactcacccatcacccctcaactcaccccgtaaggcctcgggccccttcccaagggcgtccagcctgccctctcttcaccccacatctttctctccaccacggccctagccctgatgcactgcaggcctctctgtccccctgcctcacactagaggtccaccaagagcgggcactgtcgcccttttcacccatgtatctatcctccaagccaagccgcagcctggtataaacctggttcctcaatcagtgtggactgaattggatgcgcatcctttcagtcttcaaaagcaggtgtggggcagcgtggccggagaacatggtggtgcagtttgtggacaatccgaggcagcaggggaaacgtgtttccccaacttcccccaggaaattgtttttcagtgggaagtgcaataaaattgctcaaagcaaa

SEQ ID NO: 75944 - DNA, 1121 bp, Homo Sapiens
  misc_feature (473)..(473): n is a, c, g, or t
gaatttgccgcaactcaaagaactttatatttccagaaataagttgatgactctaccagatgcctccctcttacccatgttactagtattgaaaatcagtaggaatgcaataactacgttttctaaggagcaacttgactcatttcacacactgaagactttggaagctggtggcaataacttcatttgctcctgtgaattcctctccttcactcaggagcagcaagcactggccaaagtcttgattgattggccagcaaattacctgtgtgactctccatcccatgtgcgtggccagcaggttcaggatgtccgcctctcggtgtcggaatgtcacaggacagcactggtgtctggcatgtgctgtgctcttgttcctgctgatcctgctcacgggggtcctgtgccaccgtttccatggcctgtggtatatgaaaatgatgtgggcctggctccaggccaaaaggaagccncaggaaagctcccagcaggaacatctgctatgatgcatttgtttcttacagtgagcgggatgcctactgggtggagaaccttatggtccaggagctggagaacttcaatccccccttcaagttgtgtcttcataagcgggacttcattcctggcaagtggatcattgacaatatcattgactccattgaaaagagccacaaaactgtctttgtgctttctgaaaactttgtgaagagtgagtggtgcaagtatgaactggacttctcccatttccgtctttttgatgagaacaatgatgctgccattctcattcttctggagcccattgagaaaaaagccattccccagcgcttctgcaagctgcggaagataatgaacaccaagacctacctggagtggcccatggacgaggctcagcgggaaggattttgggtaaatctgagagctgcgataaagtcctaggttcccatatttaagaccagtctttgtctagttgggatctttatgtcactagttatagttaagttcattcagacataattatataaaaactacgtggatgtaccgtcatttgaggacttgcttactaaaactacaaaacttcaaattttgtctggggtgctgttttataaacatatgccagattt

SEQ ID NO: 75945 - DNA, 570 bp, Homo Sapiens
tgaaaggcccagaggaggcctccgggcaaatggccggagctggaccgaccatgctgctacgagaagagaatggctgttgcagtcggcgtcagagcagctccagtgctggggttagcacgggctctggttctgggactgaggggcagtcaagcagcaagatggagctgtggttccgcgggcgggcagcctgggctgcgcggtctgagcgcttgttacaccccgcgcaggattcggacggagagcgcgaggactcggcggctgagcgcgcccgacagcagctagaggcgctgctcaacaagactatgcgcattcgcatgacagatggacggacactggtcggctgcttcctctgcactgaccgtgactgcaatgtcatcctgggctcggcgcaggagttcctcaagccgtcggattccttctctgccggggagccccgtgtgctgggcctggccatggtacccggacaccacatcgtttccattgaggtgcagagggagagtctgaccgggcctccgtatctctgaccacgatggcgcttacctttcagacttcattaaacttatgacctcg

SEQ ID NO: 75946 - DNA, 1048 bp, Homo Sapiens
  misc_feature (530)..(605): n is a, c, g, or t
ggcacgagggcgaaaggaaagaggtcgggagcgctcgcgagatctcggaccacccaacctgaaaggtgcttaggaagttgaaaggcccagaggaggcctccgggcaaatggccggagctggaccgaccatgctgctacgagaagagaatggctgttgcagtcggcgtcagagcagctccagtgctggggattcggacggagagcgcgaggactcggcggctgagcgcgcccgacagcagctagaggcgctgctcaacaagactatgcgcattcgcatgacagatggacggacactggtcggctgcttcctctgcactgaccgtgactgcaatgtcatcctgggctcggcgcaggagttcctcaagccgtcggattccttctctgccggggagccccgtgtgctgggcctggccatggtacccggacaccacatcgtttccattgaggtgcagagggagagtctgaccgggcctccgtatctctgaccacgatggcgcttacctttcagacttcattaaacttatgaccgnnnnnnnnnnnnnnnnnnnnnnnnnnnnnnnnnnnnnnnnnnnnnnnnnnnnnnnnnnnnnnnnnnnnnnnnnnnngggggggccgccctaaagtttccctcggggggcccaggtttacccgtccccagttttttggtacaaaggggcccctatagggggccgtattataacctaggccctggccctctttttacaaccccgggattgggaaaactgctacctggggattttttgggaggaaccttccttctggggggggaactattggggacaaactcccctcggaaattttaacgcctctagggaaaataaaaaattttttaaggggataagggggtaaaactacccggctaagcttggccgccttaaaaagatttggtttaacgggaaatggttttttggaaatttttttcccccgggggccttggggtttcaaattgggttgggggatttttaaaattcccccggccccggggggctttttttgggggccccctggttcccacaggaaggggttt

SEQ ID NO: 75947 - DNA, 419 bp, Homo Sapiens
gaagtctgaaaggtaagcgccatcgtggtcagagatacggaggcccggtcagactctccctctgcacctcaatggaaacgatgtggtgtccgggtaccatggccaggcccagcacacgtggctccccggcagagaaggaatccgacggcttgaggaactcctgcgccgagcccaggatgacattgcagtcacggtcagtgcagaggaagcagccgaccagtgtccgtccatctgtcatgcgaatgcgcatagtcttgttgagcagcgcctctagctgctgtcgggcgcgctcagccgccgagtcctcgcgctctccgtccgaatcctctgctttttctcagttccagctcctttctctttcacggtacctcagttgcttctactttatcggatagtgttggagatcatggagggaaggc

SEQ ID NO: 75948 - DNA, 553 bp, Homo Sapiens
  misc_feature (34)..(34): n is a, c, g, or t
  misc_feature (112)..(112): n is a, c, g, or t
cgcgaaaggaaagaggtcgggagcgctcgagagnatctcggaccacccaaactgaaaggtgcttaggaagttgaaaggcccagaggaggcctccgggcaaatggccggagcntggaccgaccatgctgctacgagaagagaatggctgttgcagtcggcgtcagagcagctccagtgctggggattcggacggagagcgcgaggactcggcggctgagcgcgcccgacagcagctagaggcgctgctcaacaagactatgcgcattcgcatgacagatggacggacactggtcggctgcttcctctgcactgaccgtgactgcaatgtcatcctgggctcggcgcaggagttcctcaagccgtcgggtcagtgcccggggaatgcacacccgcctgattccttctctgccggggagccccgtgtgctgggcctggccatggtacccggacaccacatcgtttccattgaggtgcagagggagagtctgaccgggcctccgtatctctgaccacgatggcgcttacctttcagacttcattaaacttatgacca

SEQ ID NO: 75949 - DNA, 684 bp, Homo Sapiens
gatgctgaactgttgtaaaatgccccaaactccaaggcagattgtctgtatatacgctatagcttttcaccatgtggttttaccagctgttactctgtatttaaaaaagccagagattcttctgtctaaactgtttctatagcattttctaaacaaaaaaaatggtttttttctttgccttgtaataagattgtaaatccatttcctgcttgtgttcttagtgggcatgattgtgagtgtgtgtggggtgctcacacgcgtgccagtctttttgtactgtaactacctcatggtttgaatgatgattgtactgctggttgtgttaacagagcacattttgttgggtgagtcctatgtgatttttttcatgtttgttttatctgggggttgttcatgaaactgacagatgtttttctaaaaaggactattatcagtttccaaatacaatacttctctcttctggtttttcctgaatgagcctgattttgttgctggttttcatcatctatgagggtaaaacgagtacccttaaaatccctgtggccagtttgaacacccctgttgtattcttttctctgttcagtgtgtcagctattttgtgaagatgcttagatgtatagttttgataaccacagttttaaatcttttatctgtgcataataaaaagatatatatcagttaaaa

SEQ ID NO: 75950 - DNA, 863 bp, Homo Sapiens
  misc_feature (79)..(113): n is a, c, g, or t
aagatgatagatcactatagggcgctagctcgcgagcgaacgacgagcgcaggagtccagtgagcgaggaagcggccgnnnnnnnnnnnnnnnnnnnnnnnnnnnnnnnnnnncagtcgacggtaccggacatatgcccgggaattcggccattacggccggggtaaacgctaatcttccacggactggagctggcatggtggaagtcacgtcactacttaaaaagcctgcctccattacagaaacttcattttctctactaatggccgaagcagcttcatagaaccaggaaaccttttaaatagccagtttgaattggatgtaaattggaaattcttttttttaagccacattaaattatctgtttataaatactaaagcaggaaaatggggggaaagtgaattacagtgacatcagagcaaattgaatacttaaaacagtaagtagtctatatattttatatagggtggaagatgtgttcttaaggtttatgaagtttggttggttaactgtgttcactcagtaaaagagcagtacatgtaagcagccattaataaactgttgcacatggatacttatagacagacttatgggacaattatgttttttgcagtgttaccagaatcaaggctctgtttattccccaaaagacttgcatagaaaaataagatattatatttcgtcgtatgtatttaggtgtcttgtataataccaagaaccgctgactaaatttactcaaaattagggcattaaatatcatgtacttcatagttggagactgttcactcaaatagggcagagtactattctatctagatgtgtaagtgtttttttaaaatcacatggaacggtttttatacta

SEQ ID NO: 75951 - DNA, 1195 bp, Homo Sapiens
  misc_feature (44)..(78): n is a, c, g, or t
ccgaacgacgagcgcagcgagtcagtgatgcgaggaagcggcgnnnnnnnnnnnnnnnnnnnnnnnnnnnnnnnnnnncagtcgacggtaccggacatatgcccgggaattcggccattacggccgggcaagaaccgctgactaaatttactcaaattagggcattaaatatcatgtacttcatagtttgagactgttcactcaaatagggcagagtactattctatctagatgtgtaagtgttttttttaaaatcacatggaacggttttttttatactaaaaagtggagggagatttgtttaaacaagtatttctaaaagaaatatgtacatagttctggaaattattctcgtggtaaggaaatattctttactccagttgcatttctcagacaataaagtggtgcatccatgctacctcctactttgtcaacaaagttgctatttaccctttacatctctgtatcataatagattttaaaaatctaatgttctttattgcaagacattcttttgttaacaggttcgtttctttttaatgttttacctaaaatttgacatgcttacaggacaggttggcctcttactttatttaacattgtagaaatgtaattaataaacaatgctcactacacagtttagaatagacgttctcatttatattatcttccaaatttgatcagttagcaaaacttaatacaccaattaaaatatttctacatatgagaatgtttacaatttaaattttagaacttgttttggatgtgattatatgtacgaaaatcgtgtaacactatgctcatgctaagaaccgacataacagaattactgaaataaatgtgctgtgaggaatggaaaatatggtgcaggtgtcttggtcatgataaattgtgattctttttaaaaattttttccaaaaacaattaggtattttaatctgaaatcagattcctttacaaacaacaagtttttgtatgcaagcaccattttatttcatgtagtatggctaatactatagttgaaccaaggatatgcattgattctttgcttcgtatgtaaataaagttaaaaacagttaaaataaggagtattttggtagagtatatacatacctcactgccagtgaaattgctttcctatggtatatctccttaccagaaaaatctctaaataaaaaaaggtttaaagaaaatt

SEQ ID NO: 75952 - DNA, 1308 bp, Homo Sapiens
  misc_feature (69)..(103): n is a, c, g, or t
  misc_feature (865)..(873): n is a, c, g, or t
  misc_feature (1188)..(1188): n is a, c, g, or t
  misc_feature (1202)..(1202): n is a, c, g, or t
tgatgtcatataggggctagtctagtagcgaacgacgagcgcagcgagtagtgagcgaggaagcggcgnnnnnnnnnnnnnnnnnnnnnnnnnnnnnnnnnnncagtcgacggtaccggacatatgcccgggaattcggccattacggtccgggtcttgcatcaagtgatgactttatatctcaaaatgttatacctcttgaagcataccgtaatggtcgctaaagactgaagctctgtcagtgtctgcatcagaagaagaagggctgaatttcttaaatgaatatgatgaaacaaaaccagaactgcccagtgggaaaaagaatcagtctcttacactcatagaacttcttaaaaataaaaggatgggagaagaaaggaattctgctatttctcctcaaaagatccataatcagacagcaagaaagagattcgttcagaaatgcgttcttccattaaatgaggatagtccgttgatgtatcagccacaaaaaatggacttgactatgcactcagccttagattgtaagcaaaagaaatcaaggtcaagatctggaagcaagaagaaaatgctaacattacctcatggtgctgacgaggtttacattctccgatgcaggttttgtggcctagtctttcgaggacccttgtctgttcaggaagactggattaagcacttacaacgacatattgtaaacgctaatcttccacggactggagctggcatggtggaagtcacgtcactacttaaaaagcctgcctccattacagaaacttcattttctctactaatggccgaagcagcttcatagaaccaggaaaccttttaaatagccagtttgaattggatgtaaatttgaaattcnnnnnnnnnaagccacattaaattatctgtttataaatactaaagcaggaaaatggggggaaagtgaattacagtgacatcagagcaaattgaatacttaaaacagtaagtagtctatatattttatatagggtggaagatgtgtttttaaggtttatgaagttttgttggttaactgtgttcactcagtaaaagagcagtacatgtaagcagccattaataaactgttgcacatggatacttatagacagacttattggacaattatgttttttgcagtgttaccagaatcaagggctctgtttattccccacaagacttgcntagaaaaatagaanattatattttggttggaagggaatttaagggttttggaataaaaccaaggaaccgcttgactaaatttaactcaaattagggcatttaaaatcatggaacctcccc

SEQ ID NO: 75953 - DNA, 827 bp, Homo Sapiens
  misc_feature (383)..(397): n is a, c, g, or t
  misc_feature (675)..(685): n is a, c, g, or t
aagtaatctagagatgattcagtgtaagggttgtgctgtgtgtcagttatatgatttgatgtatggagtgtgctgtgcgtcagttatatgcaagtactacaccattttatatcagagacttgagcatctgtggatttgggtatctgtaggaagatctaaccattgcccactgatactgaggggtgactgttggcatggctgtcacaaatcccagaattcactgtgtatttgttgtcttagtcttcatcttaatcagtattctaggatttttttctacatttttgcttgtggtcttcactaaaatattttaacttttctgccctgtatcttatcttattttgacatttttaatattatgtataatatctcattttgaaaacttnnnnnnnnnnnnnnnctatgtgatttatatatgtagttctctgggtaaaaaagaacctttctcctttttgaatttttgagatgttacctaccagtaatgttggtactattataaggcaatcgtcttataaactttttcactaaatagtcattttgttttctttgttttcaacacagtttttacgtaacagaactgttttcctcatcactattagaaatcagttgttaatgtgcatgctagtgttttgaattttaatattgattataaattcacatgtagattagtaatttgtnnnnnnnnnnntgtaaatttatgtaactcatttttcagatactttggtactaatgttattttatcgttaccaattcttacaacaaatataccaaactatggatttaaatgttttggcattaaaaactatttgataataaaatcaggaaatttt

SEQ ID NO: 75954 - DNA, 558 bp, Homo Sapiens
  misc_feature (95)..(95): n is a, c, g, or t
agaagagatctgagtcccaccttagaaatgaaagggaaaccctcagggagccatgacccagggaccttcacactcccccatgtttgttacttgtntgcccagccagtcctcagcccctgacagtgccacagatagccagctccagagcagcgtctgaccaccgcccgcgcccacccggccacggcgggcactcagcatttcctgatgacagaacagtgccgttgggtgatgcaatcacacgggaacttctatttgacctgcaaccttctacttaacctgtggtttaaagtcggctgtgacctcctgtccccagagctgtacggccctgcagtgggtgggaggaacttgcataaatatatatttatggacacacagtttgcatcagaacgtgtttatagaatgtgttttatacccgatcgtgtgtggtgtgcgtgaggacaaactccgcaggggctgtgaatcccactgggagggcggtgggcctgcagcccgaggaaggcttgtgtgtcctcagttaaaactgtgcatatcgaaatatattttgttatttaagcctga

SEQ ID NO: 75955 - DNA, 671 bp, Homo Sapiens
  misc_feature (34)..(34): n is a, c, g, or t
  misc_feature (54)..(54): n is a, c, g, or t
  misc_feature (57)..(57): n is a, c, g, or t
  misc_feature (89)..(89): n is a, c, g, or t
  misc_feature (93)..(93): n is a, c, g, or t
aaggagagccccatttagagtgagggagagagantgagaaaccctaacctattngangaagatcttcagcatcttttgctgctaccttnaccncaagcccttcatcccactttggagaatggttttgtatagcctctgaagtcaggatctcaggaagtcctgaggagggactctggaataaaaacccttgcctctttccaggccaatttctcgtgttggaaagtcagaagacccagtcttggctttactttcttggggtgaaagagaaatagggtaggctcagaacatgctcatgttattaaggcagcagtccccctggcctttgaggaagtacttatgagatgggtgtcactgtctgaaggttctccaaattgtctgtgaactgcttaggtaggagtgcactgcagtttcctgctagttcccacctgttgtgccccaactttgcttctagatctctggggtgggaggagtgaccttctcaatggaaggggcctccttggtctggagaagagatctgaggtcccaccttagaaatgaaagggaaaccctcagggagccatgacccagggaccttcacactcccccatgtttgttacttgttatccctcccccaacctgcctctgttttccccagagtgattagcagtaaaacccttcaatgaaaataaaaa

SEQ ID NO: 75956 - DNA, 665 bp, Homo Sapiens
tttgcaaactgtgtgtccataaatatatatttatgcaagggcctcccacccactgcagggccgtacagctctggggacaggaggtcacagccgactttaaaccacaggttaagtagaaggttgcaggtcaaatagaagttcccgtgtgattgcatcacccaacggcactgttctgtcatcaggaaatgctgagtgcccgccgtggccgggtgggcgcgggcggtggtcaaacactgctctggagctggctatctgtggcactgtcaggggctgaggactggctgggcagacaagtttccaggccatctgaagactccgacaggggcttgtataagaagcaggctatggcaaaaaagagaacgcccagcacctggggagagaggagcccgctggacctcgtggggagctcggccagagcctttggatactggtgggcctgtcccagtcctgtccctgccccagcctgcagcaccctcaccaggtccacggaaacccatccgcctagtgagagggatctctcccatataaccgggtcgtagagcagacgccaataatgctagcgggaatgatacacacgcattccaccgtgataacagagacacaggactgaagggccttgtcacagagttgagcagtgcacagacaaccagcgaaccgggacctta

SEQ ID NO: 75957 - DNA, 1560 bp, Homo Sapiens
  misc_feature (59)..(59): n is a, c, g, or t
  misc_feature (65)..(65): n is a, c, g, or t
  misc_feature (109)..(109): n is a, c, g, or t
  misc_feature (125)..(125): n is a, c, g, or t
  misc_feature (132)..(132): n is a, c, g, or t
  misc_feature (141)..(141): n is a, c, g, or t
  misc_feature (222)..(222): n is a, c, g, or t
  misc_feature (1237)..(1247): n is a, c, g, or t
tatcgaccctttagaattgcctcgagccagaatcgcacgagagagctgtgactggaatnggcctngatctgtctcccatccacacatgagatgtagttgtgaatgactntccagcatgagatccntccatcntaaagtacntgccccttcccagccatccctgacacatccagcccagttgaatctcacagcacagctatccacagggagactgggatgtcnacgcagcactccattactcagtacctccatacccagccctatacgcagacccacaggtggggaaactgaggcaggaacagggttctgccctcccagagcctccactctgggatgccagaatggaaagccagagggaacctgagaatcatccagtcttactgtctcaatgtacatacggggaaactgaagccaggagaagaagagggagaaactgtccagggcctcacagggaggcattcatggagctggagaaaccagggatcctgaccgcagggcccatcaattgctacatagagatacacatggaaagagggtttaacagaccctctctaggacacaactgtttctgctttgagcaataatttctaacctgaggccaacatgtcccactgccccttgggttggctggggttgtttcctgagccaagcatccaatatcatgccccactcaatggcctagaagctgcctgtactttggggaaacagatggagctcttgggcccagccagctgggcctgggacttctgcctctgccgcctccagagtggcctggcagctttgccagaggctgtggagcgagggtagtaggagcttttcccagagtgctgtgacttgcatgatggattctaggctgtggcaagggctgatttctgggatagggggagggttggaaaatttatttttatgaaacagagggaagactttattgttgttatttttggtaaaataaaaggcaaacctaaagcaaaaaaacgctcatacagcacgtcaatcaaaaataaggggggggccggctcctaaagtatcccctcggggggggccccaagcttaccgcggaacccccagctttctttggacaaaaggggggtcccctaataagtggaagtccgtaataataaagcttagggacactggggccggtcggtattttccaaacgtctccggggacctggggaaaaaacatggctaaacctggggggaactctctgggggagaggaaaaccttcacttcctnnnnnnnnnnnaacataaatttgggaacaaacctaatccttacagagagaattttcaacggctccttaagggcgaaacctttaaagaacttttttagacggggccaaacaggggggtcacagactaaggctgcccattcggctcttgcggcgccactgaagaagatcttggcctctactggggggaaaggaactttcttgccaaaacacattcttttaccccgggcgggacccacgcgggaatctcccaaatgggagtgtgggggcgaaacctgtagaaaatttcccacagggccgcccgagggggtctatctttttccggggg

SEQ ID NO: 75958 - DNA, 801 bp, Homo Sapiens
  misc_feature (686)..(694): n is a, c, g, or t
gggccctgtaaggattttgcccactgggcaactcagaaatacttcgatctcccaagatataagaggcagcagcaaacgtgcctattgacgtctgtttcatagttaccacttacgcgagtagacagaactcggcttttcagaaaataggtgtcaagtccactttataagaacctttttttctaaaataagataaaaggtggctttgcattttctgattaaacgactgtgtctttgtcacctctgcttaactttaggagtatccattcctgtgattgtagacttttgttgatattcttcctggaagaatatcattcttttcttgaagggttggtttactagaatattcaaaatcaatcatgaaggcagttactattttgagtctaaaggttttctaaaaattaacctcacatcccttctgttagggtctttcagaatatcttttataaacagaagcatttgaagtcattgcttttgctacatgatttgtgtgtgtgaaggacataccacgtttaaatcattaattgaaaaacatcatataagccccaactttgtttggaggaagagacggaggttgaggtttttccttctgtataagcacctactgacaaaatgtagaggccattcaaccgtcaaacaccatttggttatatagcagaggagacggatgtgtaaattactgcattgcnnnnnnnnncagtttgtataacctctaatctccgtttgcatgatacgctttgttagaaacattaattgtagtttggaagcaagtgtgtatgaataaagataatgatcattcctttg

SEQ ID NO: 75959 - DNA, 1533 bp, Homo Sapiens
  misc_feature (33)..(33): n is a, c, g, or t
  misc_feature (57)..(57): n is a, c, g, or t
  misc_feature (80)..(80): n is a, c, g, or t
  misc_feature (101)..(101): n is a, c, g, or t
  misc_feature (111)..(111): n is a, c, g, or t
  misc_feature (114)..(114): n is a, c, g, or t
  misc_feature (203)..(203): n is a, c, g, or t
  misc_feature (210)..(210): n is a, c, g, or t
tcttatttctttttaggtaaaccagaacatcgntagtagtgtaaaacttgcacatgnaaatccgaagccagggatgaganggagagagtctacagactgcnttcaaaaaantanggagtggatgcatcagggtctgtagcatctctgtctgttggagaaaggcacaggtgtcagagcaccagtcagaacagcaacagatgatnccaaacntaaaaaccacatgtgcatctaaagacagttggcacggtctacaaaggaagtcttcacgaggagcagtgagactcagcgtcgtcgacgtctaagtctcctgtcctcatcctccaaagttatacattgcagtacaatagcgtttcttccagcagtcaactcaagcacaaaagccagactgactcacctgatggcagcagtgggctgggaattcatcccctaaagagttcagtgcaggagaaagctctacttctctcgatgctaatcacaacaggggcagtcgttgagcctttgagaacttctgttccaaggctcccatcagagagtaagaaggaagactcctctgacgctacccaagtcccccaagcaagtctcaaagccagtgatctctctgactttcaatcagtttccaagctaaaccagggcaagccatgcacatgcataggcaaggaatgccagtgtaagagatggcatgatatggaagtgtattccttttcaggcctgcagagtgtccctcccttggctccagaacgaagatccacacttgaggactactctcagtcgctgcacgccagaactctgtctggctctccccgatcctgttctgagcaagctcgagtcttcgtggatgatgtgaccattgaggacctgtcaggctacatggagtattacttgtatattcccaagaaaatgtcccacatggcagaaatgatgtacacctgatagcaagaagctaattcatatgctttaaaccaatgaaggcttgtcaaagagatttagttaatggcagaccttgtggccactttgtgtgagaagacatctctttctgctcactgtgcttgcaataaaaacttttcttggcatctcagttaatcttcattctttcaacttactctcttgagttcttacatacacttcaaggcgagcggatcaaagaaaaatcccccttatttagaaatgttcctgggggatgaagaaaccataattacttgagactggcagcagtgggtatatggtaaaagcctttgtaaaacagtgcatttttcagatttgtttaaggtttgctagccaaggaaagtaaaatgtgattttgtaactgcactaaacatttgtcatgctgtagttgccagcccagaatattagaagttacaagactgatttaaaccgtctctgatttaatgcaagatatattgtgtctataaaggtttctcttgttattgttaagccagagatctaaggtttagattcaatttgaataaactagctggcctgccctctattgtttgagagagttattaaccatcactaaataagcccctgctggtg

SEQ ID NO: 75960 - DNA, 1094 bp, Homo Sapiens
ggggcgcaggcgcaacgcgactcccgaggcgcgggccgcccccttggctggtttggatccgggtcagtcgggtgccgagatttgggagagacgctctgaactgactgccccgcatcaccggagcgtcccagctgcgaggagtgtaaacaggaacatcgataagtagtgtaaaaacttgcacaatgaaatccgaagccaaggatggagaggaggagagtctacagactgctttcaaaaaattaagagtggatgcatcagggtctgtagcatctctgtctgttggagaaggcacaggtgtcagagcaccagtcagaacagcaacagatgataccaaacctaaaaccacatgtgcatctaaagacagttggcacggatctacaaggaagtcttcacgaggagcagggagaactcagcgtcgtcgacgttctaagtctcctgtccttcatcctccaaagtttatacattgcagtacaatagcgtcttcttccagcagtcaactcaagcacaaaagccagactgactcacctgatggcagcagtgggctgggaatttcatcccctaaagagttcagtgcaggagaaagctctacttctctcgatgctaatcacacaggggcagtcgttgagcctttgagaacttctgttccaaggctcccatcagagagtaagaaggaagactcctctgacgctacccaagtcccccaagcaagtctcaaagccagtgatctctctgactttcaatcagtttccaagctaaaccagggcaagccatgcacatgcataggcaaggaatgccagtgtaagagatggcatgatatggaagtatatgccttttcaggcctgcagagtgtccctcccttgggctccagaacgaagatccacacttgaggactactctcagtcgctgcacgccagaactctgtctggctctccccgatcctgttctgagcaagctcgagtcttcgtgaatgatgtggaccattgaggaactggtcagctacagggaggattacttgggaatttcccagaaaatggcccccatggcagaaaagatgtacccctggttgccagaagcctaattcctatggctttaaa

SEQ ID NO: 75961 - DNA, 961 bp, Homo Sapiens
  misc_feature (812)..(812): n is a, c, g, or t
  misc_feature (842)..(842): n is a, c, g, or t
  misc_feature (897)..(898): n is a, c, g, or t
  misc_feature (911)..(919): n is a, c, g, or t
cagtcgacggtaccggacatatgcccgggaattcggccattacggccggggtggctggtttggatccgggtcagtcgggtgccgagatttgggagagacgctctgaactgactgccccgcatcaccggagcgtcccagctgcgaggagtgtaaacaggaacatcgataagtagtgtaaaaacttgcacaatgaaatccgaagccaaggatggagaggaggagagtctacagactgctttcaaaaaattaagagtggatgcatcagggtctgtagcatctctgtctgttggagaaggcacaggtgtcagagcaccagtcagaacagcaacagatgataccaaacctaaaaccacatgtgcatctaaagacagttggcacggatctacaaggaagtcttcacgaggagcagggagaactcagcgtcgtcgacgttctaagtctcctgtccttcatcctccaaagtttatacattgcagtacaatagcgtcttcttccagcagtcaactcaagcacaaaagccagactgactcacctgatggcagcagtgggctgggaatttcatcccctaaagagttcagtgcaggagaaagctctacttctctcgatgctaatcacacaggggcagtcgttgagcctttgagaacttctgttccaaggctcccatcagagagtaagaaggaagactcctctgacgctacccaagtccccccagcaagtctcaaagccagtgatctctctgactttcaatcagttttccaagctaaaccaggggcaaacccatgccacatggcataggccaagggaatgcccgntgtaagaagatgggcatggatatgggaaanggtatttccttttttccaggcctggcagaagtggtccctcccctttggcctcccnnaaaccgaaagatnnnnnnnnntttgaagggacctacctccttcaatttcccttggcaccgccc

SEQ ID NO: 75962 - DNA, 601 bp, Homo Sapiens
actcttactgtagaactatccatttcttcctttgattctgtcaattgtttgtttcatatattttgggctctgatgtttggtgcatatatattacatcttggtgaattttcaaactttttaaatttcaacatgaagatgaaattataggatgtctgggatttcctttgaatccgtggggctgggagtaactataaatgaaacaagattggccgggaatttgaggctgcaaggataggtacacacaggggagtgaagcagggcttggagcagatggtaaagattgttggcttttccagccatggggctctcttgccacttggcagtagtggcatgaagccgccaccagggggccacgcaccagtgcatgtggctgtgttccaaactttttggacaataaaatctgaatttcacatacttttcttatgtcattagatattacccttttacatcttttcactatttaaaaatgtaaaaatcattcttaacatttgggctgtgcaaaaacagctggtgggcccaattttggcctgtatttcacttgccaacctgatttatacttttgtatctatttgacattttccattaaaagttatataacact

SEQ ID NO: 75963 - DNA, 1117 bp, Homo Sapiens
aaccctctttgagggtctccatcctgattatgtaatgcctatttctttttaggactccttctccctctatgattgctcttacacagctactgacatttatactttcgtgtaattcaagtcttctgcatattttccccttttgtgaacaggtactggtggagaatggaacaaaagctgggcacagccttctcatggatgccagggatctggtccttaagggaaaagagaagtcacctttggaccctcgacctggttttgtctttgccccggtgagtattacttctgcctgtcccaccacacggatctgaacttaggcgtggccgggaaatgtaagatggtaaagctaagccactctccactactttgtgttcctatccagttcctacctaatgattcccctggctcttcctacccactgctcctgtcctcccttctccctggccccttttgactctattattctcagtttttaagttttgtgattgatggctcttttgtcttacctcatttttttatgtgttcacagtgtccccatgaactcccttgtccccagttgaccaacctggcctgtagcttctcacaggcgtaccatcccatccccttcagctggaacaagaaaccaaaggaagaaaagttctctatggtgatccttgctcgggggtctccagaggaggctcatcgctggccccgtatcactcagcctgtccttaaacggcctcgccatgtgcattgtcacttgtgctgtccagatgggcacatgcagcatgctgtgctcacagcccgccggcacggcaggtatggggggtgtgaccaaaatcagtgggatgtggcaggaagctgcagcccacgccagcatctgtttccacagggatttgtatcgttgtgcccgtgtcagctcctggggagatcttttacctgtgcttactccgtctgcgtttcctccatctacggctcaggatccctctgagagttgatgaggatgtgtaacaagtattttcttctatcgtgcctgccagggctgaagctgcctggtatccaggaggggaatgctggtatccccatatgtctgtgtttgtttgagatttttaataataaataataaatttttgaagaatgg

SEQ ID NO: 75964 - DNA, 508 bp, Homo Sapiens
  misc_feature (135)..(135): n is a, c, g, or t
acctggttttgtctttgccccgtgtccccatgaactcccttgtccccagttgaccaacctggcctgtagcttctcacaggcgtaccatcccatccccttcagctggaacaagaaaccaaaggaagaaaagttctntatggtgatccttgctcgggggtctccagaggaggctcatcgctggccccgtatcactcagcctgtccttaaacggcctcgccatgtgcattgtcacttgtgctgtccagatgggcacatgcagcatgctgtgctcacagcccgccggcacggcagctcctggggagatcttttacctgtgcttactccgtctgcgtttcctccatctacggctcaggatccctctgagagttgatgaggatgtgtaacaagtattttcttctatcgtgcctgccagggctgaagctgcctggtatccaggaggggaatgctggtatccccatatgtctgtgtttgtttgagatttttaataataaataataaatttttgaag

SEQ ID NO: 75965 - DNA, 2042 bp, Homo Sapiens
agccttcaagtcggcccaaacacggtttctgcctcaaggattatttatataaccattgcttattggctgctggcaaacactcgctcttctcgttggctgaaactgtcgggagaagttctgcgaaggctgctccttgcggcggcgttgggactgagggtcacaggcacctatatttccgtttccggttcgcctccggagccatggcggcggcactgaagtgtctactgacattaggaagatggtgccccggccttggagtggctccccaggcccgggcgctcgccgccttagtacccggagtgacccaggtagataacaagtccggtttcctgcagaagaggcctcatcgccagcaccctggcatcctaaagctgccgcacgtgcggctgccacaggcactggctaacggtgcccagttattgctacttgggagcgctgggcccactatggagaatcaggtgcaaacactgaccagttatctctggagcagacatttgcctgtagagccagaggagttgcaaagacgggctaggcatcttgagaaaaaattcctggaaaacccagacttatctcagacagaggagaaacttcgtggagcagtgctacacgcactacgtaaaactacctaccattggcaagaactgagctacactgagggactgagcctggtgtatatggcagcaagactggatggtggctttgcagcagtctccagagcattccatgagatccgggctcgaaatccagcatttcagccacaaactttgatggactttggctcaggtactggttctgtcacctgggctgctcacagtatttggggccagagcctacgtgaatatatgtgtgtggacagatcagctgccatgttggttttggcagaaaaactactgaaaggtggttcagaatctggggagccttatattcccaggtgtctttttcagacagtttctaccctgtatcacccaaggtgcagtttgatgtagtagtgtcagctttttccctaagtgaactgcccagcaaggctgaccgcactgaggtagttcaaaccttatggcgtaagacaggtcatttcctggtactggtgggagaatggaacaaaagctgggcacagccttctcatggatgccagggatctggtccttaagggaaaagagaagtcacctttggaccctcgacctggttttgtctttgccccgtgtccccatgaactcccttgtccccagttgaccaacctggcctgtagcttctcacaggcgtaccatcccatccccttcagctggaacaagaaaccaaaggaagaaaagttctctatggtgatccttgctcgggggtctccagaggaggctcatcgctggccccgtatcactcagcctgtccttaaacggcctcgccatgtgcattgtcacttgtgctgtccagatgggcacatgcagcatgctgtgctcacagcccgccggcacggcagggatttgtatcgttgtgcccgtgtcagctcctggggagatcttttacctgtgcttactccgtctgcgtttcctccatctacggctcaggatccctctgagagttgatgaggatgtgtaacaagtattttcttctatcgtgcctgccagggctgaagctgcctggtatccaggaggggaatgctggtatccccatatgtctgtgtttgtttgagatttttaataataaataataaatttttgaagaaccccccgcaacccctccccgcctacccacgacaccgatacaacatacgcttccccacccggcgcgaccctcgcatccgatgccctaatacccgcccgtttgtcctgttcccctcgcccccccgaattattttccccccttttcttccttgtgcgtgcgccccccctatggttttgcttcgtgtgccccgcgcgggccgcgataaaatgccgccgcggcgcggccccacgcttttttgcccccaccacacccaaaaacacgccccccggcgcgcaaacaacccggcggcgggtggttcgagcgccacacccccctaggcgcggcgctcc

SEQ ID NO: 75966 - DNA, 847 bp, Homo Sapiens
atccctctttgagggtctccatcctgattatgtaatgcctatttctttttaggactccttctccctctatgattgctcttacacagctactgacatttatactttcgtgtaattcaagtcttctgcatattttccccttttgtgaacaggtactggtggagaatggaacaaaagctgggcacagccttctcatggatgccagggatctggtccttaagggaaaagagaagtcacctttggaccctcgacctggttttgtctttgccccggtgagtattacttctgcctgtcccaccacacggatctgaacttaggcgtggccgggaaatgtaagatggtaaagctaagccactctccactactttgtgttcctatccagttcctacctaatgattcccctggctcttcctacccactgctcctgtcctcccttctccctggccccttttgactctattattctcagtttttaagttttgtgattgatggctcttttgtcttacctcatttttttatgtgttcacagtgtccccatgaactcccttgtccccagttgaccaacctggcctgtagcttctcacaggcgtaccatcccatccccttcagctggaacaagaaaccaaaggaagaaaagttctctatggtgatccttgctcgggggtctccagaggaggctcatcgctggccccgtatcactcagcctgtccttaaacggcctcgccatgtgcattgtcacttgtgctgtccagatgggcacatgcagcatgctgtgctcacagcccgcccgcacggcaaggatttgtatcggtttgcccgtgttagctccttgggagatcttatacctgtg

SEQ ID NO: 75967 - DNA, 1456 bp, Homo Sapiens
  misc_feature (123)..(410): n is a, c, g, or t
  misc_feature (973)..(997): n is a, c, g, or t
  misc_feature (1015)..(1283): n is a, c, g, or t
ggacgctgttgccaagtccaagctaccatactcctgcctgagctatgacaacagcctcctcactgatctcccctttcttccctttgcctcctccagctcatttttcacagtgtagaatgacannnnnnnnnnnnnnnnnnnnnnnnnnnnnnnnnnnnnnnnnnnnnnnnnnnnnnnnnnnnnnnnnnnnnnnnnnnnnnnnnnnnnnnnnnnnnnnnnnnnnnnnnnnnnnnnnnnnnnnnnnnnnnnnnnnnnnnnnnnnnnnnnnnnnnnnnnnnnnnnnnnnnnnnnnnnnnnnnnnnnnnnnnnnnnnnnnnnnnnnnnnnnnnnnnnnnnnnnnnnnnnnnnnnnnnnnnnnnnnnnnnnnnnnnnnnnnnnnnnnnnnnnnnnnnnnnnnnnnnnnnnnnnnntgagccacccggcctggcctagaatgacttttaaaagatcaaattaaatcaggtcactcctttgcttacaacgcagtgcgtttagaggtacaccccatgtctccacagggcacacagcatccgatttaatctggatccattccggcgccttcctctcccagtcacccagagggccccaaccccggcggccctttcttcctcagatgtcctcggctctataccgtgcctgggtcttttctctttctctctgcctggaacattccttctttccccttttgtcttgcccactcctgtttacccttcaagtttcaagttcatgtcactgtctcagagaggttttcctgtgctcgccctgtttctctcaggaagccttgctcttttccatcatgcctctaatcacagcttataatcggatatttatttctgtgtctacagtcttgccctgccagactgtaagccccatgtgggcaggcgctcatgattgtttctgattgtttcacgcatgctgctaacccagagcctgggcccaaagctagttagtactcaataaacaatgcattggnnnnnnnnnnnnnnnnnnnnnnnnncctcgtgccgaattcttnnnnnnnnnnnnnnnnnnnnnnnnnnnnnnnnnnnnnnnnnnnnnnnnnnnnnnnnnnnnnnnnnnnnnnnnnnnnnnnnnnnnnnnnnnnnnnnnnnnnnnnnnnnnnnnnnnnnnnnnnnnnnnnnnnnnnnnnnnnnnnnnnnnnnnnnnnnnnnnnnnnnnnnnnnnnnnnnnnnnnnnnnnnnnnnnnnnnnnnnnnnnnnnnnnnnnnnnnnnnnnnnnnnnnnnnnnnnnnnnnnnnnnnnnnnnnnnnnnnnnnnnnnnnncctcttccgtttccccgccaaggactcgctgggctcggtccttccggtgggggaatgggtatagctcacccaagggggtaaagggtttcaccgaacagggggaaagcggaaaaacttgggcaaaggcacaaagggaggaccgtaaaggggcgtgcgggggtttcaaaggccgc

SEQ ID NO: 75968 - DNA, 985 bp, Homo Sapiens
  misc_feature (17)..(17): n is a, c, g, or t
  misc_feature (477)..(496): n is a, c, g, or t
  misc_feature (746)..(757): n is a, c, g, or t
  misc_feature (759)..(760): n is a, c, g, or t
  misc_feature (762)..(764): n is a, c, g, or t
  misc_feature (766)..(767): n is a, c, g, or t
  misc_feature (770)..(771): n is a, c, g, or t
  misc_feature (773)..(775): n is a, c, g, or t
  misc_feature (777)..(781): n is a, c, g, or t
  misc_feature (811)..(829): n is a, c, g, or t
  misc_feature (882)..(914): n is a, c, g, or t
agtctaagaatatgtantagatggaagtaggaccattagcccacagatgcgtgtatctctcagacataccggtgtagatgccatatttctgatgtcttcttaatgtctgtgaaagcaactggcatctacaataaatcacacttagaactggttagaggactccctcacttttgttgtccatgtggttcccttccgtggaccagccgtaataaagagccaaggtagtgatggtggccacgtgcctcgttgctatttttaaagtaatattcagatgtggttttaaatttagattatgtattccttttgaaacataagaaaaacatttaaacctatgctgaaaatacgataaaagaaaaacaactccaatatgctaaaagttaaatatggtatttaagaaaatagtcatgtatgcaattgagaaagtctataatttattttacagaaaagctggaagattatgactagatatggaaatannnnnnnnnnnnnnnnnnnnatatttcctccgacttacctctttttgaaaagagagtttttattaaatgaaccatcatgatattggctgaaaagttctacattctattattgtattgtaacacacatgtattgatgattttcattaagagtttcagattaactttgaaaaatattccacatggtaatcttataaattctgtttaattacatctgtaaatattatgtgtgtgatagtattcaataaagtaaaatcaaattgtctttggaannnnnnnnnnnncnnannncnncannannncnnnnntaaacacaacccccggaacaaacaacaacnnnnnnnnnnnnnnnnnnnttgtgggccggcccccgcccctccaaaaaaatttttttacaccatttgttttnnnnnnnnnnnnnnnnnnnnnnnnnnnnnnnnnaaaacagggcccataaacctgtttttccatagaaaaaacctgggggccttgaaaaaaggggcttgggaatt

SEQ ID NO: 75969 - DNA, 889 bp, Homo Sapiens
acggtggcatcgagtcacaggttctgtttccatcaatattaacagagatggctttggactgaatcaaggtgcagaaaagactgactcattttatcattcttctggtgggctggagttatatggagaaccaagacatactacgtatcgctcaagatcagatctggactatattaggtcccctttaccatttcagaataggtacccaggcactccagctgatttcaatcctggttctttagcatgttctcagcttcagaattacgatcctgacagagccctaacagattatatcactcggctagaggcactgcaaagacgacttggaactatacagtcaggttcaactactcaatttcatgctggcatgagaagataatcctttgaaacatcattaattgaagtgattttaaatagatttccttttgtaaatcaatggttcttttgtgcttttgtattgtgaatattcaatgggaccaatatgaacacagcttatgattgtatacaaatcccttgccagcacatgaaaacaaactggaatttgtatatataagcattgtgtatgtattcatgcacaataattattgaattacctgtatatttgtggaatgctaatttaaaacattaaattataaaccttgtgtatttatcaaatgggtgaaaagattaaacttttacgcattacaatactgctgaatgtgtagctcgaggtgtcctgcacttttcttataaggctactgaagttacatgttttgcctaatatattctactggtgatgaagacagataatatcacttgtagagacctatttttgtataatggtagaagttttgaattttatggggtattttgtcaagtactgaaataaaaatgaaatcaccattttccccac

SEQ ID NO: 75970 - DNA, 715 bp, Homo Sapiens
atatatagtccccttaccattcagaatagtacccagcactccagctgattcaatcctgttctttagcatttctcagcttcagaattacgatcctgacagagccctaacagattatatcactcggctagaggcactgcaaagacgacttggaactatacagtcaggttcaactactcaatttcatgctggcatgagaagataatcctttgaaacatcattaattgaagtgattttaaatagatttccttttgtaaatcaatggttcttttgtgcttttgtattgtgaatattcaatgggaccaatatgaacacagcttatgattgtatacaaatcccttgccagcacatgaaaacaaactggaatttgtatatataagcattgtgtatgtattcatgcacaataattattgaattacctgtatatttgtggaatgctaatttaaaacattaaattataaaccttgtgtatttatcaaatgggtgaaaagattaaacttttacgcattacaatactgctgaatgtgtagctcgaggtgtcctgcacttttcttataaggctactgaagttacatgttttgcctaatatattctactggtgatgaagacagataatatcacttgtagagacctatttttgtataatggtagaagttttgaattttatggggtattttgtcaagtactgaaataaaaatgacttcaccattttcaccac

SEQ ID NO: 75971 - DNA, 448 bp, Homo Sapiens
  misc_feature (25)..(25): n is a, c, g, or t
ttgaatactcataaatacctcatanttcaaaagtaaacaaagataacattttgaaagcgcgaatttttgtttgtactgttttctcctttagcaagaataatagaaaatgactataaataggagattgtataatatagtataatagtcttttgagcagttacctattttgtagaaattttttaaggtcttgggattttatttttctttacaaggaaatattttgggttactttaggtgcagaaaagactgactcattttatcattcttctggtgggctggagttatatggagaaccaagacatactacgtatcgctcaagatcagatctggactatattaggtcccctttaccatttcagaataggtaagaatatgagaaaacctgcctggaattgttaaatgtattaatatttaacagagaaaaatggacatttttagcctcgtgcca

SEQ ID NO: 75972 - DNA, 559 bp, Homo Sapiens
aggtacccaggcactccagctgatttcaatcctggttctttagcatgttctcagcttcagaattacgatcctgacagagccctaacagattatatcactcggctagaggcaccgcaaagacgacttggaactatacagtcaggtgctctgagtttaaccacatcttggcagcaccacagtgcgagacccacagctcccctttctttgaaattctttcacactcattaggataatcaaagcttccagtttagtgcatgagctaattattaagttagccaaagcttaaactcttgtaaccagcagagaaactgactttaaataatttaagtgaaaatatgatttatcaccccagatcccactcctcccaaaaatgatttcctactatgttcattcagcggactgatgacacaaaatgcacaatgagcaccagtgtgcaaggtactctgagtctacagagcctaactggagaacgtattcctaagtagcgcatggcagaaagtggtaaggccgtgccgcagcactccagcctgggcagcagagcgagaccctgtctcaaaga

SEQ ID NO: 75973 - DNA, 1489 bp, Homo Sapiens
  misc_feature (56)..(101): n is a, c, g, or t
  misc_feature (291)..(321): n is a, c, g, or t
  misc_feature (422)..(436): n is a, c, g, or t
  misc_feature (600)..(634): n is a, c, g, or t
  misc_feature (895)..(905): n is a, c, g, or t
  misc_feature (1085)..(1222): n is a, c, g, or t
aatgctgcagctatgtgtacagtcgcaaaaaatttccccgctgcgacctacaactnnnnnnnnnnnnnnnnnnnnnnnnnnnnnnnnnnnnnnnnnnnnnngctacccatacagtttcatcttggtaacacatggtaaaataacatcttttaaatagtaaaataaagtaacaaacttttactcataatgattccaaaaatctacaaagaagaaatattcagaatctgacaatttttttgtaatattcatggtataaaaggattgctcctgcgaaaaataagccaaatatannnnnnnnnnnnnnnnnnnnnnnnnnnnnnncctactagggtgtactacagtctattttatagcaaaagagcactagacaaacaaagctttataacaaaaagccaggcactgatacatggtaaatctctgcnnnnnnnnnnnnnnncttatcttcacttaattgcatcacaagtaacaagaatgaaaaaggccacagttcatatattttcaccattacatatgtctataatacttgaaatgagtatggcaaaaccagcactgcacaaagatgagtccacttcaagtcccatgagaaagagcatgtctctnnnnnnnnnnnnnnnnnnnnnnnnnnnnnnnnnnngagaggcctaaaggccttggtgccccattgtgttggaattcatcatattccatcttgacttttttgcttccagtcagccagcagactaaatttttgtgcttgtttatgctgaaattgattcattcctgactcaagttcacttttggacacagatcatattctgcctgttggatgcaaaagatgaaaatcctcttaactccaagtcttggttcgactccctccccactccccaacccctcatcaaaatcaagatcacaaatnnnnnnnnnnnttcagaaataggaaaaagtgaaaaataaaaaggaatcggaagactgaatcagaaccagttgcaccactgggtggactgacagttgtataaacattagtgttccttgcagctacacagaagacaaatggtaaaaatttctagatgaaccctcgtgccgaattcttgggctcgagggccacnnnnnnnnnnnnnnnnnnnnnnnnnnnnnnnnnnnnnnnnnnnnnnnnnnnnnnnnnnnnnnnnnnnnnnnnnnnnnnnnnnnnnnnnnnnnnnnnnnnnnnnnnnnnnnnnnnnnnnnnnnnnnnnnnnnnnnnnnncactcacattacttgcgttgcgctcatgcccgcctttcattctggattctttctggctattgtataatgatcggccactcctcgtgagaggcgctgcctttaggccgctgtcggttctcgtcatgaccgctgcgtcggcttctgtgtgggactgattactactcatgtgtattgtttccacaatcgggaatgctgatacattataatgctataagcagtcctacagccgtgtggttttcaagtcctcctgaacacatatttgtattg

SEQ ID NO: 75974 - DNA, 1303 bp, Homo Sapiens
  misc_feature (33)..(33): n is a, c, g, or t
  misc_feature (48)..(49): n is a, c, g, or t
  misc_feature (57)..(57): n is a, c, g, or t
  misc_feature (63)..(63): n is a, c, g, or t
  misc_feature (84)..(84): n is a, c, g, or t
  misc_feature (143)..(144): n is a, c, g, or t
  misc_feature (180)..(180): n is a, c, g, or t
cattgacgtacaatcaaccggacagttgactgntggaattatagatcnnttggggantgcctngagccagaatcgcacgaggtntgggagaggtcttggcccagtatgtacgcgacacgaggagacgcgttgacagcctccannactgcacgagttatgtctgttgctatcgtatgccgngcccgtgcgtgcagaccgctgccaagagagcaccccaaacatctgacctgaaccagagaagagatcatgccgagactatgacgatgatcctgtgactacgagccaccaggtgggaggcctaccaccaagctggtacaaggtgttcgacccttcctgcgggctcccttactactggaatgcagacacagaccttgtatcctggctctccccacatgaccccaactccgtggttaccaaatcggccaagaagctcagaagcagtaatgcagatgctgaagaaaagttggaccggagccatgacaagtcggacaggggccatgacaagtcggaccgcagccatgagaaactagacaggggccacgacaagtcagaccggggccacgacaagtctgacagggatcgagagcgtggctatgacaaggtagacagagagagagagcgagacagggaacgggatcgggaccgcgggtatgacaaggcagaccgggaagagggcaaagaacggcgccaccatcgccgggaggagctggctccctatcccaagagcaagaaggcagtaagccgaaaggatgaagagttagaccccatggaccctagctcatactcagacgccccccggggcacgtggtcaacaggactccccaagcggaatgaggccaagactggcgctgacaccacagcagctgggcccctcttccagcagcggccgtatccatccccaggggctgtgctccgggccaatgcagaggcctcccgaaccaagcagcaggattgaagcttcggcctccctggccctgggttaaaataaaagctttctggtgatcctgcccaccatacctgagtgcttcctttgaggctgcccaaccaagtcggcaagatacacaacacatcatattgcaaaaactcagctaagaagataggtgtggacgctggcaaggggctcgccggcgctgaccttgaggttggccccatgcagagaagcttaagtccatggtaggcccatggcatgggagcagggggtgagaggggcacatgggagtcccagaggacaacatcattataaccattataagggatcacaggtcgggcccaggtgggccaagcgcaagacacacaacgagga

SEQ ID NO: 75975 - DNA, 881 bp, Homo Sapiens
  misc_feature (868)..(868): n is a, c, g, or t
tactttcaggctcggggagtgaaggcctcgttgagagaaggtctcattcggtgttttgggaagagagtcgtgtgggcccaggtctgtctgctatcagctatgccgctgcccgttgcgctgcagacccgcttggccaagagaggcatcctcaaacatctggagcctgaaccagaggaagagatcattgccgaggactatgacgatgatcctgtggactacgaggccaccaggttggagggcctaccaccaagctggtacaaggtgttcgacccttcctgcgggctcccttactactggaatgcagacacagaccttgtatcctggctctccccacatgaccccaactccgtggttaccaaatcggccaagaagctcagaagcagtaatgcagatgctgaagaaaagttggaccggagccatgacaagtcggacaggggccatgacaagtcggaccgcagccatgagaaactagacaggggccacgacaagtcagaccggggccacgacaagtctgacagggatcgagagcgtggctatgacaaggtagacagagagagagagcgagacagggaacgggatcgggaccgcgggtatgacaaggcagaccgggaagagggcaaagaacggcgccaccatcgccgggaggagctggctccctatcccaagagcaagaaggcagtaagccgaaaggatgaagagttagaccccatggaccctagctcatactcagacgcccccccggggcacgtgggtcacaggactccccaagcggaaatgaggccagactggcgctgacaccacagcagctgggccccctctttccagcagcggccggtatccatcccccaaggggctgttgctccggggnccaatgcaaaagg

SEQ ID NO: 75976 - DNA, 1039 bp, Homo Sapiens
aatatacggctaggtagcgaggcctgggtgtcgaattcggcacgaggggagtgaaggcctccgttgagagaaggtctcattcggtgttttgggaagagagtcgtgtgggcccaggtatcgtagcggcgacacgagagagacgggcggtgtgacagccttccactacctgcacgagtgtattggtctgtctgctatcagctatgccgctgcccgttgcgctgcagacccgcttggccaagagaggcatcctcaaacatctggagcctgaaccagaggaagagatcattgccgaggactatgacgatgatcctgtggactacgaggccaccaggttggagggcctaccaccaagctggtacaaggtgttcgacccttcctgcgggctcccttactactggaatgcagacacagaccttgtatcctggctctccccacatgaccccaactccgtggttaccaaatcggccaagaagctcagaagcagtaatgcagatgctgaagaaaagttggaccggagccatgacaagtcggacaggggccatgacaagtcggaccgcagccatgagaaactagacaggggccacgacaagtcagaccggggccacgacaagtctgacagggatcgagagcgtggctatgacaaggtagacagagagagagagcgagacagggaacgggatcgggaccgcgggtatgaccaaggcagaccgggaagagggcaaaggaacggcgccaccatcgccgggaggagctggctcactatcccaagagcaagaaggcagtaagccgaaaggatgaagagttagaccccgatggaccctaactcataactcagacgcacccgggcaccgtggtcaacaggactccccaagcggaatgaggccagaaatggcggctaacagcacagcagctgggccctcttacaacagcggcgaatccatccccaggggcggtgcccgggcaatgcaagaggctccgaaacaagcagcaggattgagttcggctcctgcccgggtagataaaggacggtgactggcac

SEQ ID NO: 75977 - DNA, 1062 bp, Homo Sapiens
gacagtaactctaacggttctaaggtagcgaggcctgggtggcgaattcggcacgaggcctcgttgagagaaggtctcattcggtgttttgggaagagagtcgtgtgggcccaggtatcgtagcggcgacacgagagagacgggcggtgtgacagccttccactacctgcacgagtgtattggtaacgttggggtctgtctgctatcagctatgccgctgcccgttgcgctgcagacccgcttggccaagagaggcatcctcaaacatctggagcctgaaccagaggaagagatcattgccgaggactatgacgatgatcctgtggactacgaggccaccaggttggagggcctaccaccaagctggtacaaggtgttcgacccttcctgcgggctcccttactactggaatgcagacacagaccttgtatcctggctctccccacatgaccccaactccgtggttaccaaatcggccaagaagctcagaagcagtaatgcagatgctgaagaaaagttggaccggagccatgacaagtcggacaggggccatgacaagtcggaccgcagccatgagaaactagacaggggccacgacaagtcagaccggggccacgaacaagtctgacagggatcgagagcgtggctatgacaaggtagacagagagagagagcgagacaggcaaccgggatcgggaccgcgggtatgacaaggcagaccgggacgagggcaaagaacgggcgccaccatcgccgcgaggagcctgggtcccctatgccaagcagcacgaaggcagctaagccgactggatgaacgagttagaccccgatggaaccgtagtcatactgcggacgcccccggggcacgtgggtcaacaggagtcccccacgcggcaatgaggccaggactggcgcctgaaccacaagcagctggagccctcttcccagcagcggcgcgtatccatccccagggctgaggcccgagccaatgcaaaggcctccgaacaagcggcagatcgaggtctggctgcaggggctgggttaacataagcgtcgaggaac

SEQ ID NO: 75978 - DNA, 967 bp, Homo Sapiens
acacctccaccccgcatagtgaatatagaacagtttgtaccaaaagcaggctggtaccggtccggcaattcccgggatatcgtcgacccacgcgctcggaaggcctcgttgagagaaggtctcattcggtgtttagggaagagagtcgtgtgggcccaggtatcgtagcggcgacacgagagagacgggcggtgtgacagccttccactacctgcacgagtgtattggtctgtctgctatcagctatgccgctgcccgttgcgctgcagacccgcttggccaatgagaggcatcctcaaacatctggagcctgaaccagaggaagagatcattgccgaggactatgacgatgatcctgtggactacgaggccaccaggttggagggcctaccaccaagctggtacaaggtgttcgacccttcctgcgggctcccttactactggaatgcagacacagaccttgtatcctggctctccccacatgaccccaactccgtggttaccaaatcggccaagaagctcagaagcagtaatgcagatgctgaagaaaagttggaccggagccatgacaagtcggacaggggccatgacaagtcggaccgcagccatgagaaactagacaggggccacgacaaagtcagaccggggccacgacaagtctgacagggatcgagagcgtggtatgacaaggtagacgagagagagaggcgagacagggaacgggatcgggacgcggttatgaaccaggccagacggggaagagggaaagaacgggcacatcgcgggagagctggtcctatccagaagaaggggtaagcgaaggatgaaagttaccatggctagtatatagaggcccggggggtgtaggatcccaggataggcgatgggtgacagggagtggcccttaacaggggttccgggggttgggagaagcgcaaaaggaatgctgccgtaaaaagggtggcgg

SEQ ID NO: 75979 - DNA, 1546 bp, Homo Sapiens
  misc_feature (345)..(379): n is a, c, g, or t
  misc_feature (444)..(453): n is a, c, g, or t
ttgttcataggggagagagtgatggcgtctcgcggcggtggtaagctttgttattcaggcgcacgccagaggatgtgttgagaagggggacggggcacacgggggacggtgtgctgtgtagagaggacgccggctcccggggaggaggcgcaccgccttttttagagaaagatgagcgtgagacgcggataaaaacggcagcccgccgtcgaggggggttgttgtgtagggaggaccggcgaccgtgcgggagatatggggacacaaatgagtaggaggggtagagggaggaaggggaggccgtgatgggggagagacgcggagggttaggaatgttagtaggannnnnnnnnnnnnnnnnnnnnnnnnnnnnnnnnnntgtgttccggggagatgggtggtgcgaaaggcggggaagaggaaaagaagctggtttgtcattcnnnnnnnnnngtagattgcagcacacatacaataagtgaattttatcaaaatacagcacatttcttctactatatccataaaaatcaattcctatgtaaatagtactgaaaatcaactaaaatgagttaaaatttacaaagagttgttaaagggtttcaatcaaaattattaaaactatacagtacaataaccaattgataacatcttgaaagaagtgcaatatttgagttcacatatttttaaaagtgctgcctacttactctgactagcaagaatggaaagtgagtccaactcacttttgcaaaaataatgttggttggtgttttaagctagtcttataaaagtcttaattaaaatcaaggttgataaacaaagcataacagattaaaaattcccaaattgcatttcttagtaaataaaaatgaagtgcaataaccaaatattgctctaatgaaaggttccagactagcctcaactaaacagttattggtcttctatggcacttttttctggtccaaataaccatgcattaatccttaccattacatgttactcaaattttatttgattacatagaacaaaaacaaataaaattaatggtctggataaacaaaattaataaacctctatcatcaaatatttgttacagtaactaggaacaaagaaaggcagttggtggtaaaacactattacactgatacacatagaaaccctttaaagactctggaagtgttgagttcacatttaatgttacctgtagaaacagccctttatttgaacacctttacacactggcaggcctcaaggacccatccctttgctctataactctccacagcaattctctatcactgtgccagtttcacaaagcttgctttggtttcctagctccaagtgtactgtttccttttactttaccaaggcaatgcaaggccaaacaaaaatcaaagaggctttcctaaaccttcgtaacattttgtgttacaggcaacacaatcttaaaactggccatttttgtttcatttgctgcttaaaataaaaattataaattagatttaaatggagcactaattataaaacagattgcaagtaccaccatttg

SEQ ID NO: 75980 - DNA, 550 bp, Homo Sapiens
ccatgtctgtttgatgagtctgagtgacacagaatagaaatagggacatagagatatctatttagactaaatctgtaatatgttctattctaaatggaattatactccaaaagaaaataaactgatttaaaatagcttgttacagcacttcaggtgttttttcttacactaatgattttgttttacggctgaaaagtaaaatggccaacttgagaagcctaggtataatatgccttagattatatttttgaatggaattattgttctttacctgataatttatattggttacttggcctttaaatctttcttcttacctaactttctattctactatttaaggggaaagataaagggtcattataagagggctgtggaatgatttaaaatggtgggtgaagggtaaaactgaaagtgtttattaggaaagtaaagctattcatgtttttacaggtaactgaagatcaaagtaaagcaacagaggaatgtacatctacctaataactatctaaaatttaaatatgtataataaaataaatgttttaaatat

SEQ ID NO: 75981 - DNA, 1248 bp, Homo Sapiens
  misc_feature (79)..(113): n is a, c, g, or t
ttgataactcatatagggcggctagcgtcgcttagtcgaacgacgagcgcagcgaagtagtgagcgaggaagcggccgnnnnnnnnnnnnnnnnnnnnnnnnnnnnnnnnnnncagtcgacggtaccggacatatgcccgggaattcggccattacggccggggggttctcaccgctgctatggaggcgctggccatgggttcccgggcgctgcggctctggctggtcgcacccggtggcgggatcaaatggagatttatagcaacatcgccagcttctcagctgtcaccgacagaattgacagaaatgcggaatgatctctttaataaagagaaagccaggcagttatcattaactccccgaactgagaagatagaagttaagcatgttgggaaaactgaccccggtactgtcttcgtgatgaataaaaacatttcaactccctacagttgtgccatgcatttaagcgagtggtattgcaggaagtccattctggctctggtggatggacagccttgggacatgtataagcctttaacaaagtcctgtgaaattaaatttcttactttcaaagattgtgatccaggagaagtgaataaggcatattggcgttcctgtgctatgatgatgggctgtgtgatagagagggcattcaaagatgaatatatggtcaatttggtcagagctccagaagttcctgtaatttctggtgccttctgttatgacgtagttttggatagcaaacttgatgagtggatgccaacaaaagagaacttacgttccttcacaaaggatgctcatgctttaatttataaagatcttccatttgaaactctggaagttgaagcaaaagtggcattggaaatatttcaacacagcaagtacaaagtagatttcatagaagagaaggcatctcagaaccctgagagaatagtcaagctacacagaataggtgacttcattgatgtgagtgagggccctcttattccaagaacaagtatttgtttccagtatgaagtgtcagcagttcacaatcttcaacccacccagccaagtctcatacgaagattccagggtgtgtctttacctgttcacttaagagcacattttacaatatgggataagctattggaaagatctcggaaaatggtaactgaagatcaaagtaaagcaacagaggaatgtacatctacctaataactttctaaaatttaaatatgtataataaaataaatgttttaaatataa

SEQ ID NO: 75982 - DNA, 511 bp, Homo Sapiens
taggcggccttgcgagcgtgtatcaaaactacgtcaatttggtcagagctccagaaggtcctgtaatttctggtgccttctgttatgacgtagttttggatagcaaacttgatgagtggatgccaacaaaagagaacttacgttccttcacaaaggatgctcatgctttaatttataaagatcttccatttgaaactctggaagttgaagcaaaagtggcattggaaatatttcaacacagcaagtacaaagtagatttcatagaagagaaggcatctcagaaccctgagagaatagtcaagctacacagaataggtgacttcattgatgtgagtgagggccctcttattccaagaacaagtatttgtttccagtatgaagtgtcagcagttcacaatcttcaacccacccagccaagtctcatacgaagattccagggtgtgtctttacctgttcacttaagagcacattttacaatatgggataacacgttcgcgagggggatcctcta

SEQ ID NO: 75983 - DNA, 488 bp, Homo Sapiens
gcctactactactactatacggctgcgagaagacgacagaaggcccgagagcatgtccgcatggtcatcattaaccagctccaaccctttgcagaaatctgcaatgatgccaaggtgccagccaaagacagcagcattcccaagcgcaagagaaagcgggtctcggaaggaaattccgtctcctcttcctcctcgtcttcctcttcctcgtcctctaacccggattcagtggcatcggccaaccagatctcactcgtgcaatggccaatgtacatggtggactatgccggcctgaacgtgcagctcccgggacctcttaattactagacctcagtactgaatcaggacctcactcagaaagactaaaggaaatgtaatttatgtacaaaatgtatattcggatatgtatcgatgccttttagtttttccaatgatttttacactatattcctgccaccaaggcctttttaaataagtaaaaaaagaaa

SEQ ID NO: 75984 - DNA, 694 bp, Homo Sapiens
  misc_feature (17)..(17): n is a, c, g, or t
attcggcacgagggctntggggaagatgaggtaaggaaagatgactcgtgaagttaataggatgtctctaatttctagatgtgcctgagcttctgttcttttcctctttctttgtgtctctcttgaatatatttactttgtgtctcttaactctgtttaaggttctgtgtctatgcatctctctctttcttttttcaaccttctcattctcctatccagggatttaatcagcagaattactttttgataggggaggtataaggtttggcctgtaaggttctaactgccttcttttttctcacagaggtggcttatggcagatttttcctccttcaaactccaaacataatttttaagactatgtgccagtggactcttcccttatatctctgcaccacaagttgttggatgtttcctcttcctcccttatgtctacctcaccaacctcgctcatcatttggcccttatccttccttgtacacctaccttcagatttctgcttacactttgatttcagagctttattccccagtctgttcttactcctttgtcgcttatccagaatgatgctatgtgtagcatcttgctgtaaatcctgtacaatgattctgtgtaaatagctgtggcctatgccaataatgaagagcaagcctttcaggtaagcaaattaaagttcagtttgctcatcgaaaaa

SEQ ID NO: 75985 - DNA, 493 bp, Homo Sapiens
ctgaaagggttgtcccacacgaaaagagagaaaaggataatgaggttcttttgatgctgtagtttttcctgggaagactaggaaggactctgaatttcaaaagaggtgatttctcgcatgagcatctcttccatcctccctccctccacaagctacagtgatgcatgtagcagacacggcacctacagagtacgtggtccaagccaataaagctcaacaaaacccaagcaaagatggagcttatggcccttaccctttggaaatatccccagattggtttagattgaacctgaatttgaataaagagaagcaaaatgtagggggaagaaggattataaaatattgggattgatattggtatcagtgatttgaagttgatttccaagctattctgttcagtcagaggctttcttagcctttaacgggagaagagaaatccgtccaggcgctgtattaacaggtttcccatcaacacccgctctcacgtacaatc

SEQ ID NO: 75986 - DNA, 1215 bp, Homo Sapiens
  misc_feature (1049)..(1049): n is a, c, g, or t
  misc_feature (1072)..(1072): n is a, c, g, or t
  misc_feature (1098)..(1098): n is a, c, g, or t
  misc_feature (1114)..(1114): n is a, c, g, or t
  misc_feature (1143)..(1143): n is a, c, g, or t
  misc_feature (1168)..(1168): n is a, c, g, or t
  misc_feature (1197)..(1197): n is a, c, g, or t
gggacgcccgggctgtgggaataagatggcggggaagaagaatgttctgtcgtctctcgcagtttacgcggaagattcagagcccgagtctgatggcgaggctggaatcgaggcggtgggcagcgcggctgaggagaaaggcggattggtatctgatgcctatggggaggatgacttttctcgtctagggggtgatgaagatggttatgaagaagaagaagatgagaacagtagacagtcggaagatgacgattcagagactgaaaaacctgaggctgatgacccaaaggataatacagaagcagaaaagcgagacccccaggaactcgtggcctccttttctgaaagagttcggaacatgtcgcctgatgaaatcaagatcccgccagaaccccctggcagatgttcaaatcacttgcaagacaagatccagaagctttatgaacgaaagataaaggagggaatggatatgaactacattatccaaaggaagaaagaatttcggaaccctagcatctacgagaagctgatccagttctgtgccattgacgagcttggcaccaactacccaaaggatatgtttgatccccatggctggtctgaggactcctactatgaggcattagccaaggcccagaaaattgagatggacaaattggaaaaggccaaaaaggagcgaacaaaaattgagtttgtgacgggcaccaaaaaaggcaccacgaccaacgccacgtccaccaccactaccactgccagcacagctgttgcagatgctcagaagagaaagagcaagtgggattcggctatcccagtgacaacgattagcccagcccaccatcctcaccaccacagccaccctgccagctgttgtcacggtcaccaccagcgccagacggctccaaggaccaccgtcatctcttgctgtggggcaccattgtgaaagaaggccaagcagtggacctgaggggcccaccctaaggactttgaaaagggaccgttgcagccccagtggaccacttggcccagttgggagggcggccatttttgtnttatttttcagggatttggggancttatttccccaggttgcccaacttnaggagggagttttttntttttgggcttttccaggttgggaagggncaagggcagcaaggggagccagggngttttttggaacagggtttttttcaaggntacccacttggggttctt

SEQ ID NO: 75987 - DNA, 1240 bp, Homo Sapiens
cggcagtaactataacggttttaaggtagcgaggcctgggtggcgaattcggcacgaggcggggaagaagaatgttctgtcgtctctcgcagtttacgcggaagattcagagcccgagtctgatggcgaggctggaatcgaggcggtgggcagcgcggctgaggagaaaggcggattggtatctgatgcctatggggaggatgacttttctcgtctagggggtgatgaagatggttatgaagaagaagaagatgagaacagtagacagtcggaagatgacgattcagagactgaaaaacctgaggctgatgacccaaaggataatacagaagcagaaaagcgagacccccaggaactcgtggcctccttttctgaaagagttcggaacatgtcgcctgatgaaatcaagatcccgccagaaccccctggcagatgttcaaatcacttgcaagacaagatccagaagctttatgaacgaaagataaaggagggaatggatatgaactacattatccaaaggaagaaagaatttcggaaccctagcatctacgagaagctgatccagttctgtgccattgacgagcttggcaccaactacccaaaggatatgtttgatccccatggctggtctgaggactcctactatgaggcattagccaaggcccagaaaattgagatggacaaattggaaaaggccaaaaaggagcgaacaaaaattgagtttgtgacgggcaccaaaaaaggcaccacgaccaacgccacgtccaccaccactaccactgccagcacagctgttgcagatgctcagaagagaaagagcaagtgggattcggctatcccagtgacaacgatagcccagcccaccatcctcaccaccacagccaccctgccagctgttgtcacggtcaccaccagcgccagcggctccaagaccaccgtcatctctgctgtgggcaccattgtgaagaaggccaagcagtgacctgaggggccaccctaggacttgaaaggaccgtgcagcccagtgaccactgcccagtgggaggcgccactttgtatatttcaggactgggacctactccccagatgccacctgagaggagcttctgtttggcattccagatggaaggacaggcagcacgggagccaggcgctgtggacagggtctgtccacgcaccacctggggtctgccgcctattaaaagtgccgtattcttaaacctcgtgccgagtaagccac

SEQ ID NO: 75988 - DNA, 1379 bp, Homo Sapiens
  misc_feature (483)..(572): n is a, c, g, or t
  misc_feature (1288)..(1320): n is a, c, g, or t
ggcctgggtggcgaattcggcacgaggatctcagacatactaaggctgcccttaaagctgccctgctcaagtctttgaggagccggctcagagatggccccagcgcacccctggaggctcctgagcctcggaagccggtgacagcccaggagcgccagcgggagcgggaggagaagcggcggaggcggcaagaacgagccaaggagcgggagaaacggcggcaggagcgggagcgaaaggaacggggggctggggcctctgggggcccctccactgaccccttggctggactagtgctcagtgacaatgacagaagcctgttggaacgctggactcgaatggcccggcccgcagccccagccctcacctctgtgccggcccctgccccagcgccaacgccaaccccaaccccagtccaacctaccagtcctcctcctggccctgtagcccagcccactggcccgcaaccacaatctgcgggcnnnnnnnnnnnnnnnnnnnnnnnnnnnnnnnnnnnnnnnnnnnnnnnnnnnnnnnnnnnnnnnnnnnnnnnnnnnnnnnnnnnnnnnnnngcgccaccccagattgccacctccaccagcctcctggctgcccagtcacttgtgccaccccctgggctgcctggctccagcaccccaggagttttgccttacttcccacctggcctgccgcccccagacgccgggggagcccctcagtcttccatgtcaaagtcacctgatgtcaaccttgtgacccagcagctatctaagtcacaggtggaggaccccctgccccctgtgttctcaggcacaccaaagggcagtggggctggctacggtgttggctttgacctggaggaattcttaaaccagtctttcgacatgggcgtggctgatgggccacaggatggccaggcagattcagcctctctctcagcctccctgcttgctgactggctcgaaggccatggcatgaaccctgccgatattgagtccctgcagcgtgagatccagatggactccccaatgctgctggctgacctgcctgacctccaggacccctgaggcccccagcctgtgccttgctgccacagtagacctagttccaggatccatgggagcattctcaaaggctttagccctggacccagcaggtgaggctcggcttggattattctgcaggttcatctcagacccacctttcagccttaagcagccacctgagccaccaccgagccatggcaggatcgggagaccccaactccccctgaacaatccttttcagnnnnnnnnnnnnnnnnnnnnnnnnnnnnnnnnncactgtctttttgccatcaaaatgaggcctgtgaaatacaaggttcccttttgaaaaaa

SEQ ID NO: 75989 - DNA, 879 bp, Homo Sapiens
  misc_feature (59)..(68): n is a, c, g, or t
  misc_feature (70)..(70): n is a, c, g, or t
tatctcctcatcgaggcatgagtgcatgatgataaagtgtgcaacagaaaggaccaccnnnnnnnnnncncagcaaatgttaccaaaaactcaaacaaatagcagtcctgtcaattcacagtctctgtgagtcagtgtaaaatgttcaaatgacatttcttgggaaaaaaatctctacaacattgtagaatgtgaggggtaactacatcccaggcataggtttctcaaagctgcagtagattatgtcttcatcaagctgttaatttgtgcttatatcatatagaacttttagcatcctgggaagagctgcccccacctcaatgatatttctctgagaacaacttttgtaggactgtgtgtttctttagatacatttagtacaactgtaggtgacgagtagtcagttattgcttgctagctacacaccagggttgatccattttaaaacttttggcattttgtcctcatgggccataaatacagaaccttgtattttaattaaatttttttacaaaaggaggcacatgcacaatctccatgtaacaaacctttagcagtaggatgtattatacgacagttacttaatttctagagttcaggcctctgggatcaaccccagactgggccagaatgttagtgaaggttttattgtgcccggttggaggataacgttctttgggtactttttgtgggttgcaaatgaactcaattgccacaagttttaaactggtgtaaatcaagcttgacttaatgtgattgttactgttatatccagcctatactgctagcagctgctcatactgcagtcaattactggaagcggatatatttcctatgcaaaaactgtttaaacaataaaatgagctatgctacagaaaa

SEQ ID NO: 75990 - DNA, 643 bp, Homo Sapiens
ccacctccccatctgtaaaacgaggcagctgcccggacagccttggggtccttagtggccctgcaggtcctctggcagctctgctgaccccaccctctcccggactgcccttctgtcccagaggggtcaccctgacccggcccaccttgccactgggctttggactccagccctgacagggcccagccacactggctctgcccctcgaaggggctatgagcaaggtaggagggagctggtctcctttcttcgggccccacccaggccctgagcaccccccacccctgtgagggccccaggccttaagtccctggcggggtcatgggtttgcgacttgagcagagcggaggaacagggcactggaaggccgacgagctcagcatgcgactcggtgacggaccaggctcggcagggccggtgtactttttgtggttgtcattggtgtgttgttgcacattccaggacgtcagtattttaacaggttctaagtgcctttctatcgtagcttatgttttcctcctcttggctccattgctgttagcatagagttttaaaaaaagagataagctaatgactataacaatatattcctccatgggagaggaagtttataaagaaacaataaaagtgagttgcaaagatg

SEQ ID NO: 75991 - DNA, 1019 bp, Homo Sapiens
  misc_feature (37)..(37): n is a, c, g, or t
  misc_feature (60)..(60): n is a, c, g, or t
  misc_feature (73)..(73): n is a, c, g, or t
  misc_feature (89)..(89): n is a, c, g, or t
  misc_feature (136)..(136): n is a, c, g, or t
  misc_feature (141)..(141): n is a, c, g, or t
  misc_feature (147)..(147): n is a, c, g, or t
  misc_feature (198)..(198): n is a, c, g, or t
  misc_feature (273)..(273): n is a, c, g, or t
  misc_feature (303)..(303): n is a, c, g, or t
  misc_feature (424)..(424): n is a, c, g, or t
ttgtggtggattgacgatacaatcacacagaacagtntgcatgatagaattatcgactcnttagggattgccntggagccagaatcgcnacgagatttgtatctgtgtcagtgcatgaaatggtgagggatacccntagtntggatnttgtgagcataggtatgcaaggcaaatggaactaacacatctgccattgantcaggtctccagttctagaaaagcagacactgttgggaccaaagtctccatggcacatgactgaagactggtgtncgtgtgtgtgcggagtccacggaagcctcngggaggtggagctgctccttccattccgtcaggacgtgatctgaaaacatgtagagaagatgagttgaggacagcttttctaaggcaatgtgatgtctctgctttcttatttctctttctntgcgttgttagttttaaagagtggaggagctaggggctccagaaaagaatcttacacatgtgttgaagacattgatgtcatagggagcggggagctgcattcccttctgggctgttactgctaaatctcagtatgaacagaccaggcggaaagcttggtggccaagcagtctgtgtgcttccccgctgatggagaacgttgcgttgttcacaatagggcctcatgggtgtagccgcatggcagacccatggctggcgcagctgcctgttgccgtctgtcttcagtaactgctgctctgttaactgttctattctgatactacgcgtgttgttttttacaacaggtatgtttttgtttcagaaatatgtattgcttttctcatattttttgcaaattgtattgtcaacatgggtcatttaaagtcctgtatgaaccataacctgctgtggtacctttgtacatgtttgattctgtattctttattccagtgtggcatatgtgcccctctgtatcttttgagaagtgcggaataggttgcttctaccacctgttcttaatgtaacagtaaaagttttcacatttttctcagaaaaaa

SEQ ID NO: 75992 - DNA, 1118 bp, Homo Sapiens
cagtcgacggtaccggacatatgcccgggaattcggccattacggccgggggcggtagtggcgaaagagcaacatgaagaccatgtctgccatctaccagaaggtgcggcatcggctgaacgacgactgggcatacggcaatgatcttgatgcccggccttgggacttccaggcagaggagtgtgcccttcgtgccaacattgaacgcttcaacgcccggcgctatgaccgggcccacagcaaccctgacttcctgccagtggacaactgcctgcagagtgtcctgggccaacgggtggacctccctgaggactttcagatgaactatgacctctggttagaaagggaggtcttctccaagcccatttcctgggaagagctgctgcagtgaggctgttggttaggggactgaaatggagagaaaagatgatctgaaggtacctgtgggactgtcctagttcattgctgcagtgctcccatcccccaccaggtggcagcacagccccactgtgtcttccgcagtctgtcctgggcttgggtgagcccagcttgacctccccttggttcccagggtcctgctccgaagcagtcatctctgcctgagatccattcttcctttacttcccccaccctcctctcttggatatggttggttttggctcatttcacaatcagcccaaggctgggaaagctggaatgggatgggaacccctccgccgtgcatctgaatttcaggggtcatgctgatgcctctcgagacatacaaatccttgctttgtcagcttgcaaaggaggagagtttaggattagggccagggccagaaagtcggtatcttggttgtgctctggggtgggggtggggtgtttctgatgttattccagcctcctgctacattatatccagaagtaattgcggaggctccttcagctgcctcagcactttgattttggacagggacaaggtaggaagagaagcttcccttaaccagaggggccatttttccttttggctttcgagggcctgtaaatatctatatataattctgtgtgtattctgtgtcatgttggggtttttaatgtgattgtgtattctgtttacattaaaaagaagcaaaaat

SEQ ID NO: 75993 - DNA, 682 bp, Homo Sapiens
gggggggcctgctgggtggcttagcactgcagggctctgcgcgggaacgctaacctggtccggagcgagtctgggtctcagccccgcgaacagcctttcacgagtcttcaagctttcaggctatcttctagtcaagatgagtgataagccagacttgtcggaagtggagaagtttgacaggtcaaaactgaagaaaactaatactgaagaaaaaaatactcttccctcaaaggaaactatccagcaagagaaagagtgtgttcaaacatcataaaatggggatcgcctcccaacagcagatttcgacattacctgagagtcttgattttaggcttgttttttgtaaacccatgtgtttgtagagattttaggcgtcttcggatatcttctcacctatgttccctggctaagaagtcagaggtagccaatgtttccttaaattcatttttaaacttaccattggtgcatatgttccagatggcagatgctgtcaataatctcaccattgatgacctttgtgtatgtagttcttgcatcctatactggataagcctgttttaacctgctatgatgggtgcttccattgcttcataatcttcatgaagttgcatgcttttgcagcttttcacagtttatttgcatttctaatgtagtaataaagtaaccaatataatcattaaaa

SEQ ID NO: 75994 - DNA, 918 bp, Homo Sapiens
tttcgctccgtggtggttttgggcgtggcccccgttttgtgttgagccacgtgcgcctcttctacggtcccgaccaggggttctccgtgtagatgtgcctcgcctcacgtggagcctttgaggtggcctggggggcgttctctttgatcccccctcttgtcttagaagagatggtgcccccctcttgaggctcaaccgagaggggaaggagtcgatcccgcaccctcgcccatcagagaggctggcccgcccctcttagaaggcttagcccctcaggggctctggccgggaagctcacctggggggaccacctgggtctcaccccgcgtacggcctttcacgagtcttcaagccttcagctttcttctagtcaagatgagtgataaaccagacttgtcggaagtggagaagtttgacaggtcaaaactgaagaaaactaatactgaagaaaaaaatactcttccctcaaaggaaactatccagcaggagaaagagtgtgttcaaacatcataaaatggggatctcctccaaagagcagatttcagcattgcctgacagtcttggttttaggcttgtttttttgtaaacctgtgtgtttgtagagatttcagacatcttctgatttcttctcacctatattccctggttaagaggtcaggggtagtgaatgtttccttaagttcctttttaaacttcccattggtatgtaaattccaaatggcagatgctgtcaataaccttgccatggatgacctttgtgtaggtagtccttgcacctcatgcaggataagccaattttaactttctacaatgggtgcctcaatagtttcataatcttcatgaagttgcatcctttggcagcttcttacagtttattttcacttccaatgtagcaataaaataataaatataatcgtt

SEQ ID NO: 75995 - DNA, 1131 bp, Homo Sapiens
tttttttgttttacattacttggtatgtaaataccttgattaaaaccttgtaaaccaatttcaaggttactataagttgtatagtacaagtgttttttaaaaatcttggggtgtttttaaaaattaagatatattttgcccaagaatttttttaacaagattgctaaaaacatcttatttagacacttcaatgtaccaatttataattggatattcagtttaaatagtacacagagttgtggcttttattttcaattaatttttttccttgtgggcagtgtgcatggtataataagcctgagcagaggcttaagttgtatgtgtgcagagtttgtaaaggaatcaattggaagatgcagaagaccgaggtttgctttcaaggtatttttcaggctgtgtgggtaaaatttgcctcaaatttctatcaaacaggaatgtaaaatagataaaatcctatgtatttgaattgtcagagctagggagtgcaaatgttttggcaatgtattcaaaatgctggcctgggcaccaaagagaaaatagccttttacagttacatagtaagatgcgattagtacccacaaattactgttttctaaacatttgaagttttacgattagctttaaaataatgattttataaattggtggtcacaataattttggtattactttcctccttttcccacttagcaatatagccaaatgtattcaacataaaaattcatagggtctgaaattcatagctgggccaaattttttatggcaccttagttttaccataatggtcatctattacactcttctgttataaaatatacccttatttcttttgtttatagtatctttgaggaatgtttttggaaaagttaatttatattttatagggagaacactcaataaattatgttaactgtgcccccgagttaaaaattttatgagtatatgtgaaacttgaacaactgaagactttttttaattgataaaaatgcttagtatgcctgttttggtctgccagtaaattaagtagcttattgagataactaacagctaaatatagctgtagtgtttcctgactgtatattctatgatttaataaaattatccagactagttatattgccacagtaaaaa

SEQ ID NO: 75996 - DNA, 1351 bp, Homo Sapiens
gtggatgttcccccaggacagcgtgttctccccacagctgctgagttggcagaaccaaacttgccacccacccgtctcatttacagtaaatccagtgggttgcagaaataggacctgaaactgcctgagggcagcagggtggggggacagtgaggggacgggaaaggggccagcctgctggtccatgggaggggaccgtcaggggaaagcccttcccgcctctggggaagggaacttccgcttcggaccgagggcagtaggctctcggctcctggtcccactgctgctcagcccagtggcctcacaggacaccagcttcccaggaggcgtctgacacagtatgatgatgaagatcccatggggcagcatcccagtactgatgttgctcctgctcctgggcctaatcgatatctcccaggcccagctcagctgcaccgggcccccagccatccctggcatcccgggtatccctgggacacctggccccgatggccaacctgggaccccagggataaaaggagagaaagggcttccagggctggctggagaccatggtgagttcggagagaagggagacccagggattcctgggaatccaggaaaagtcggccccaagggccccatgggccctaaaggtggcccaggggcccctggagccccaggccccaaaggtgaatcgggagactacaaggccacccagaaaatcgccttctctgccacaagaaccatcaacgtccccctgcgccgggaccagaccatccgcttcgaccacgtgatcaccaacatgaacaacaattatgagccccgcagtggcaagttcacctgcaaggtgcccggtctctactacttcacctaccacgccagctctcgagggaacctgtgcgtgaacctcatgcgtggccgggagcgtgcacagaaggtggtcaccttctgtgactatgcctacaacaccttccaggtcaccaccggtggcatggtcctcaagctggagcagggggagaacgtcttcctgcaggccaccgacaagaactcactactgggcatggagggtgccaacagcatcttttccgggttcctgctctttccagatatggaggcctgacctgtgggctgcttcacatccaccccggctccccctgccagcaacgctcactctacccccaacaccaccccttgcccagccaatgcacacagtagggcttggtgaatgctgctgagtgaatgagtaaataaactcttcaaggccaagggacagtggtctaattcaactctgtgtcccagcacctggcacaccagaagtgccatgctcagaaatgttggttacatgaatgaatgaaccatgaatgaatga

SEQ ID NO: 75997 - DNA, 735 bp, Homo Sapiens
  misc_feature (40)..(40): n is a, c, g, or t
tcctgtgggaacatttgggaaacactatgtagatagtctntaaggagacaaaacggtaatgaacagatagcactggggcagaatatgcatgcattttgtaacgtccagtgtggcgttgaatagatgtgtatttcctcccctgcagaaaataagcacaggaaaattataatgtaggtgatcggagctctttcctttgatagagagaacagccccaatgatcctggctttttcactgaacgtatcagaatacatggatgaattggggtaaataaggttttaattcagatctagaagaaagtattgtacgtttgaatgcagatttttatccacagatagttgtagtgtttagacatgacaggacctatcgttgaggtttctaagacttactatgggctgtaaacctgttttttaaaactattttagaaacctgagacttgccgtctggcattttagtttaatacaaactaatgattgcatttgaaagagattcttgaccttatttctaaacgtctagagctctgaaatgtcttgatggaaggtattaaactatttgcctgttgtacaaagaaatgttaagactcgtgaaaagaattactataaggtactgtgaaataactgcgattttgtgagcaaaacatacttggaaatgctgattgatttttatgcttgttagtgtattgcaagaaacacagaaaatgtagttttgttttaataaaccaaaaattgaacataaaa

SEQ ID NO: 75998 - DNA, 1032 bp, Homo Sapiens
cagaatatcgtctcccctcccccacggaaggatgtggaggtgtgcttccttggccaagaggttgtttgcaaccaccacctttcttccccgggccaaatttcttgcccgctccctggctttccggggggccagggggcttccccaccatgccactttggccggtccccacatttcccccatgggaatgccactccttccgagaaatggcccagccgagacttcttccttctggtagaaatcccaaggacatctgtcccccaagcccatcccccaccagaattgcgcagtgcatccttgaactccccaaacaaccttgcgcagggcacgatccagttcctcagaagagacacgcacataagtgaagtcgatgaagtcacagtcaacatcctgggtgcccacggtgccaatggagtaggtgccctccttcttgtagtggaacttgcctgtgctgcggtgcagaagcaccgtgtgcagcacagccagcatggcctcctccacctgccgcccctccaccgacacctccagcacctccgagcgacagttcatcctgcacccagtaacccacaccaaggtgtggaactaggataaagacaggggatcttcaccctacccaagggccacccttgagtgtagagtttggagcacggattcctcaagctcggctcatgcccttcctcctcctcctcacgccctggtgcgacctccgcaggtacgcttcaacctccgcacggcgctgagccacaagagaccagctccacagtccacgtaaccagggaggaacggactcctcgggtgtctcgggggcggcgccccgcgcccaggctggctggactcggaagctggaggagcgcccgcgttccactgccccgggggatgcccacgccggcacaggagagggggcacacggttaaaacagctcccacctcccccaaccacagtccacgaccagcctctcagatgcccgacgcgtgggtcgacgatatcccgggaatccgaccggaccagcctgcttttttaccactgtcatagcac

SEQ ID NO: 75999 - DNA, 1450 bp, Homo Sapiens
ttacggctaggtacgaggctgggtgtggaatcggcacgaggctccgacccaggtggtctggagcctgccgggagagtggtggcatctgagaggctggtcgtggactgtggttgggggaggtgggagctgttttaaccgtgtgccccctctcctgtgccggcgtgggcatcccccggggcagtggaacgcgggcgctcctccagcttccgagtccagccagcctgggcgcggggcgccgcccccgagacacccgaggagtccgttcctccctggttacgtggactgtggagctggtctcttgtggctcagcgccgtgcggaggttgaagcgtacctgcggaggtcgcaccagggcgtgaggaggaggaggaagggcatgagccgagcttgaggaatccgtgctccaaactctacactcaagggtggcccttgggtagggtgaagatcccctgtctttatcctagttccacaccttggtgtgggttactgggtgcaggatgaactgtcgctcggaggtgctggaggtgtcggtggaggggcggcaggtggaggaggccatgctggctgtgctgcacacggtgcttctgcaccgcagcacaggcaagttccactacaagaaggagggcacctactccattggcaccgtgggcacccaggatgttgactgtgacttcatcgacttcacttatgtgcgtgtctcttctgaggaactggatcgtgccctgcgcaaggttgttggggagttcaaggatgcactgcgcaactctggtggcgatgggctggggcagatgtccttggagttctaccagaagaagaagtctcgctggccattctcagacgagtgcatcccatgggaagtgtggacggtcaaggtgcatgtggtagccctggccacggagcaggagcggcagatctgccgggagaaggtgggtgagaaactctgcgagaagatcatcaacatcgtggaggtgatgaatcggcatgagtacttgcccaagatgcccacacagtcggaggtggataacgtgtttgacacaggcttgcgggacgtgcagccctacctgtacaagatctccttccagatcactgatgccctgggcacctcagtcaccaccaccatgcgcaggctcatcaaagacacccttgccctctgagcgtcgctggatctctgggagctccttgatggctcccagaccttggcttttgggaattgcacttttgggcctttgggctctggaacctgctctgggtcattggtgagacttggaaggggcagcccccgctggcttcttggttttgtggttgccagcctcaggtcatccttttaatctttgctgacggttcagtcctgcctctactgtctctccatagccctggtggggtcccccttctttctccactgtacagaagagccaccactgggatggggaataaagttgagaacatgaaaa

SEQ ID NO: 76000 - DNA, 777 bp, Homo Sapiens
  misc_feature (75)..(83): n is a, c, g, or t
ccatacctacacttgatagtttttatctgttgggcgaaaaagaaccttttcttattttgcatttccctgattatnnnnnnnnntggtgagattggggttattttcatgttaattggccatttatagtttactgtggattgttcgtatcccttacctgctttctattgggttatgtgtggatatattgtttttatttgttcagcatctccttccccatcttctggtaacacaacctttatttatttgtggggaacctattccctgtggcttaggtgagcatgtgaccaggcctggcctcctgagtcccacagcttcctagccacagtgataaaagaatgggtatataacttaagccaggctaaggaaagcccttaacagaacttctgctggaactactggaaagaaggctttatggagatcccaggaaccaaggaccatgtaagcctgaatttgtgccatgtggagagagtctgtctgaggagaaactcggatgctagcagaaatggaaagagaactaagttctgatgtcatttttctggaggccctagatccagctgtgcctaaagcctgccctacctccggactttaaagttttgtgagccaataaagtccctttcttgtttaagataattgaattgagtttctgttctgattaatataggttatttgtattttcttattgatttgtagaaaacctttgtaattttaaattctagactttatgcactatataagttaataaaattagcatggccttccatgatttggcctgtgtca

SEQ ID NO: 76001 - DNA, 663 bp, Homo Sapiens
  misc_feature (524)..(536): n is a, c, g, or t
tcctgggggtagttcacccccacgggttcatagttcagcggcgaatgccaggcagctgttttctggctgagcaaacagcacctttctcattgagcttcctctactgacctctgtcccccttgggatttcatcttctgaccgaaccctgatgttcagtggcagagacagcccatagccagaactgtgggtagaccagggttggggtgtgcggtttgggacagcccaaaccccagccgctgtgtcaaggcctaggacgccatgctgccatcaaaagggggttccaggtttccatcagtggcctaaagaagggacttcttgttgtactgaggagtgcggaattaaagagatttgactccctttagtattgggggcagtccgttccccagacactgtggcctctgaagtggaaactgaaagctgcatacctgggaaagaactttctaggaataggcaatggccttcagtggaagagggagggctggaggtgtgcccagtacttggatgttcatctgtccacaacagcnnnnnnnnnnnnnaaaaaagctaaaatggaaatggattttatcataaaggatgacatcgttttcttctacaattaatacatgttcattgtataaaacccaaaaagcagctaaaaaataaagcgggaaaggaactactggt

SEQ ID NO: 76002 - DNA, 1010 bp, Homo Sapiens
  misc_feature (50)..(59): n is a, c, g, or t
  misc_feature (100)..(134): n is a, c, g, or t
aaactaatcatacacatcaataaattgcggccgccaatggggcctggccnnnnnnnnnncgaacgacgagcgcagcgagtagtgagcgaggaagcggcgnnnnnnnnnnnnnnnnnnnnnnnnnnnnnnnnnnncagtcgacggtaccggacatatgcccgggaattcggccattacggccgggggcgctgggcagtgtggaggtcgttggagtcacttccgcgtcaccagctcctgtgcctgccagtcggtgcccctcccgctccagccatgctctccgccctcgcccggcctgtcagcgctgctctccgccgcagcttcagcacctcggcccagaacaatgctaaagtagctgtgctaggggcctctggaggcatcgggcagccactttcacttctcctgaagaacagccccttggtgagccgcctgaccctctatgatatcgcgcacacacccggagtggccgcagatctgagccacatcgagaccaaagccgctgtgaaaggctacctcggacctgaacagctgcctgactgcctgaaaggttgtgatgtggtagttattccggctggagtccccagaaagccaggcatgacccgggacgacctgttcaacaccaatgccacgattgtggccaccctgaccgctgcctgtgcccagcactgcccggaagccatgatctgcgtcattgccaatccggttaattccaccatccccatcacagcagaagttttcaagaagcatggagtgtacaaccccaacaaaatcttcggcgtgacgaccctggacatcgtcagagccaacacctttgttgcagagctgaagggtttggatccagctcgagtcaacgtccctgtcattggtggccatgctgggaagaccatcatccccctgatctctcagtgcaccccaaggtggactttccccaggaccagctgacagcactcactgggcggatccaggagggccggcacggaagtggtcaaaggctaaagcccgagcaagctctg

SEQ ID NO: 76003 - DNA, 561 bp, Homo Sapiens
  misc_feature (499)..(508): n is a, c, g, or t
cagtcggtgcccctcccgctccagccatgctctccgccctcgcccggcctgccagcgctgctctccgccgcagcttcagcacctcggcccagcgttccattgctttgacgtagctaatctccttgcagcatccgtgtgagttgtgcgtgaataaaagaaatcgtatacttcctaattccatagtatggacaaaccgaggctagagaactgggccagggttacagtcatttggccagaggattagaattcagcgcttctgacctgaagacggcttcctcttaacctttttggaggatctctcctgctgtgggcggactgagcctgccgccaggtgtcttaacagtgcttgacttggcccgcgaccacttaagcctaggagcctaggctatttttagccatcttctagaatggtggttcttaaactctgcagtgtgtcagaatcaccagaaagctaataaaaaacagacgtctgggttcattgaagaagcttaagactgcnnnnnnnnnntccgcatttttaccaggtgaatctaattaaacctaattttgagaaaccaaaaa

SEQ ID NO: 76004 - DNA, 790 bp, Homo Sapiens
ggcacgaggcagagagcaggcgctgggcagtgtggaggtcgttggagtcacttccgcgtcaccagctcctgtgcctgccagtcggtgcccctcccgctccagccatgctctccgccctcgcccggcctgtcagcgctgctctccgccgcagcttcagcacctcggcccagaacaatgctaaagtagctgtgctaggggcctctggaggcatcgggcagccactttcacttctcctgaagaacagccccttggtgagccgcctgaccctctatgatatcgcgcacacacccggagtggccgcagatctgagccacatcgagaccaaagccgctgtgaaaggctacctcggacctgaacagctgcctgactgcctgaaaggttgtgatgtggtagttattccggctggagtccccagaaagccaggcatgacccgggacgacctgttcaacaccaatgccacgattgtggccaccctgaccgctgcctgtgcccagcactgcccggaagccatgatctgcgtcattgccaatccgggtaattccaccatccccatcacagcagaaagtttcaagaagcatggagtgtacaaccccaacaaaatcttccgcgtgacgaccctggacatcgtcagagccaacacctttggtgcagagctgaaggggttggatccagctcgaggcaacgtccctggcattggggggcatgctggggagaccatcatcccccctgatctctccagggcacccccaaggggggactttcccccaggaccagcttgacagcacctcac

SEQ ID NO: 76005 - DNA, 841 bp, Homo Sapiens
aaatatggctaaggtagcgagtgctgggtgttgaattcggcacgaggccccagagagcaggcgctgggcagtgtggaggtcgttggagtcacttcctgcgtcaccatgctcctgtgcctgccagtcggtgcccctcccgctccagccatgctctccgccctcgcccggcctgtcatgcgctgctctccgccgcagcttcagcacctctggcccagaacaatgctaaagtagctgtgctaggggcctctggaggcatcgggcagccactttcacttctcctgaagaacagccccttggtgagccgcctgaccctctatgatatcgcgcacacacccggagtggccgcagatctgagccacatcgagaccaaagccgctgtgaaaggctacctcggacctgaacagctgcctgactgcctgaaaggttgtgatgtggtagttattccggctggagtccccagaaagccaggcatgacccgggacgacctgttcaacaccaatgccacgattgtggccaccctgaccgctgcctgtgcccagcactgcccgggagccatgatctgcgtcattgccaatccggttaattccaccatccccatcacagcagaagtttttcagaaaccatggagtggacaaccccccaccaaatccttcgggcgtgacgaccctgggacatcgttcagaggcccaccaccctttgtttgcaaaagctgaaaggggtttgggattccagcttcgaagtcaacgtcccctgttcatttggtgggccattgcctgggaaaaaacctttcatccccccctgaatcttctccagaggccacccccccaggggggggaccttt

SEQ ID NO: 76006 - DNA, 1130 bp, Homo Sapiens
cccaaaaggatatagggctcccaagtttcgtccccccgggttgctcttccctatcttcccgtcctactcttattgtccccccgtctggttcgatccccctctggccctcgctggggggcacgatctttccccaagggacttccgaacccgtttttcaccttttccacacacggttggagaagtagtacatccgtttccgttgactaacgaagaccattccacaacacctccttccatcatgcatccacaaggagaagacaaacggcgccgcatacgccatgaagaggtggcagacctgctcccggctctaagcctttgaccacctccgtgccggcctcctggatccgcccagtgagtgctgtcagctggtcctggggaaagtccaccttgggggtgcactgagagatcagggggatgatggtcttcccagcatggccaccaatgacagggacgttgactcgagctggatccaaacccttcagctctgcaacaaaggtgttggctctgacgatgtccagggtcgtcacgccgaagattttgttggggttgtacactccatgcttcttgaaaacttctgctgtgatggggatggtggaattaaccggattggcaatgacgcagatcatggcttccgggcagtgctgggcacaggcagcggtcagggtggccacaatcgtggcattggtgttgaacaggtcgtcccgggtcatgcctggctttctggggactccagccggaataactaccacatcacaacctttcaggcagtcaggcagctgttcaggtccgaggtagcctttcacagcggctttggtctcgatgtggctcagatctgcggccactccgggtgtgtgcgcgatatcatagagggtcaggcggctcaccaaggggctgttcttcaggagaagtgaaagtggctgcccgatgcctccagaggcccctagcacagctactttagcattgttctgggccgaggtgctgaagctgcggcggagagcagcgctgacaggccgggcgagggcggagagcatggctggagcgggaggggcaccgacatggcaggcacaggagcctcgtgccgaattaaccacccagcctcgctaccttaaaccgttagagttactgccgtc

SEQ ID NO: 76007 - DNA, 1462 bp, Homo Sapiens
  misc_feature (1306)..(1306): n is a, c, g, or t
taacggctagtacgaggctgggtgtgtaatcggcacgaggcagctcctgtgcctgccagtcggtgcccctcccgctccagccatgctctccgccctcgcccggcctgtcagcgctgctctccgccgcagcttcagcacctcggcccagaacaatgctaaagtagctgtgctaggggcctctggaggcatcgggcagccactttcacttctcctgaagaacagccccttggtgagccgcctgaccctctatgatatcgcgcacacacccggagtggccgcagatctgagccacatcgagaccaaagccgctgtgaaaggctacctcggacctgaacagctgcctgactgcctgaaaggttgtgatgtggtagttattccggctggagtccccagaaagccaggcatgacccgggacgacctgttcaacaccaatgccacgattgtggccaccctgaccgctgcctgtgcccagcactgcccggaagccatgatctgcgtcattgccaatccggttaattccaccatccccatcacagcagaagttttcaagaagcatggagtgtacaaccccaacaaaatcttcggcgtgacgaccctggacatcgtcagagccaacacctttgttgcagagctgaagggtttggatccagctcgagtcaacgtccctgtcattggtggccatgctgggaagaccatcatccccctgatctctcagtgcacccccaaggtggactttccccaggaccagctgacagcactcactgggcggatccaggaggccggcacggaggtggtcaaggctaaagccggagcaggctctgccaccctctccatggcgtatgccggcgcccgctttgtcttctcccttgtggatgcaatgaatggaaaggaaggtgttgtggaatgttccttcgttaagtcacaggaaacggaatgtacctacttctccacaccgctgctgcttgggaaaaagggcatcgagaagaacctgggcatcggcaaagtctcctcttttgaggagaagatgatctcggatgccatccccgagctgaaggcctccatcaagaagggggaagatttcgtgaagaccctgaagtgagccgctgtgacgggtggccagtttccttaatttatgaaggcatcatgtcactgcaaagccgttgcagataaactttgtattttaatttgctttggtgatgattactgtattgacatcatcatgccttccaaattgtgggtggctctgtgggcgcatcaataaaagccgtccttgattttatttttcaaggtcccttctgtaaaacanaaaccaaaactatttttaaccttaccacactccctttttaacacccccgttggcttccccgccccccacaaaacaattttcacttaaccccgtaagagaaacaacccaacgaccgcattggataccaataaaggcccaaaccgtcttccctttatt

SEQ ID NO: 76008 - DNA, 956 bp, Homo Sapiens
ggggttctgcctatacgtgtatatctgcaagttacaataaggttattctcctttgcaaaaacaatgacaaacctcaaaccatgtgttttatatatgctctcattttagagtcttggccttttccttatcctccattacttctgtcacagttaagattgatggagttcatttaggccaggctgttcatgtgtctggtcccattttcgtactgaagtggaatcctagaaactacagtagtgggacacataacatagaagtaatcgtccaggattctgctggaagaagtaagagtgttcaccacatattttctgttcaagagaataatcatctcagttttgatcccctggcatcatttattctccgtactgatcactacatcatggcccgggtcctttttgtgctgattgtgctgagccagctcaccattctcattatttttagatatcgaagatacccagagcttaaagaaccttcagggtttataaatctgacctcattttctcttcatgtcttgagcaaaaaaaacatcttctactattctgtgttgttgttgaccctgaatacagtgctgggtccatggtttttttggggaaatcattgatggcaaatttggttgctgcttttcctttgggatatttgttcctcgtgccgaattcggcacgagggtcgttggagtcacttccgcgtcaccagctcctgtgcctgccagtcggtgcccctcccgctccagccatgctttctccgccctcgcccggcctgtcagcgctgctctccgccgcagcttcagcacctcggcccagaacaatgctaaagtagctgtgctaggggcctctggaggcatcgggcagccactttcacttctcctgaagaacagccccttggtgagccgcctgaccctctatgatatcgcgcacacacccggagtggccgcagatctgagccacattcgagaccaa

SEQ ID NO: 76009 - DNA, 1315 bp, Homo Sapiens
  misc_feature (1275)..(1275): n is a, c, g, or t
aggtcggttttctgtacaagcactttccgggaacttcattttaacatgtttcccatctgccctcagaaaaagggcatcgagaagaacctgggcatcggcaaagtctcctcgttttgaggagaagatgatctcgaatgccatccccgagctgaaggcctccatcaagaagtgggaagatttcgtgaagaccctgaagtgagccgctgtgacgggtgtccagtttccttaattgtatgaaggcatcattgtcactgcaaagccgttgcagataaactttgtattttaatttgctttggtgatgattactgtattgacatcatcatgccttccaaattgtgggtggctctgtgggcgcatcaataaaagccgtccgttgattttagttttgtcaaggtcccttctgtaaatgctgtgctttcttccctgtgagagccaactttagagtgtctgctacctcttcattaccaatcagaattaggatgatgtttaactgttagactgaagcgtgacgctttcatcagtagcttcaagaaaagtctaaattgttaatttatggaattggacacagtattcagtttacccgtacatgctcctcccgcccctcctgttggcacccttgcatcgccaaggcctgattcctcctgggggtagttcacccccacggggtcatagttcagcggcgaatgccaggcagctgttttctggctgagcaaacagcaccgtttctcattgagcttcctctactgacttctgtcccccttgggatttcatcttctgaccgaaccctgatgttcagtggcagagacagcctatagccagaactgtgggtagaccagggttggggtgtgcggtttgggacatcccaaaccccagccgctgtgtcaaggcctaggacgccgtgctgccatcaaaagggggttccaggtttccatcagtggcctaaagaagggacttcttgttgtactgaggagtgcggaattgaagagatttgactccctttagtattgggggcagtccgttccccagacactgtggcctctgaagtggaaactgaagctgcatactgggaaagaactttctagcaataggcaatggccttcagtggaagagggagggctggaggtgtgcccagtacttggatgttcatctgtccacacagcttttgttttttaaaaaagctaaatggaaatggatttatcataaaggatgacatcgtttcttctactattaatacggttcattgtataaaacctcgcctttaaatggccaggcgtnaaaaataaggcgagaaaaaggaactgccttgccccacttg

SEQ ID NO: 76010 - DNA, 1365 bp, Homo Sapiens
  misc_feature (706)..(720): n is a, c, g, or t
  misc_feature (868)..(965): n is a, c, g, or t
  misc_feature (978)..(1059): n is a, c, g, or t
  misc_feature (1132)..(1132): n is a, c, g, or t
ccgtggagacgacgatagtgtttctgtataataaagtgtctgccggctcgcgggccagaatcctctcggtgggatgggcaccacagacaggaggcccctcaggcccgtgcgggccactgtctgctgccgcctgccggggtggcagagtgagttgtctcaggaccccgtcactgcgacgttgacactcctctcccttcccttcctccccaactccccaaacactgtggaaggggagaaggaagtgatccacagcattcaggccacttggggtctagaccatggtggtgccagcctggggggggcagtggccctcagctctgcccgctggagcggttgagtgcagaagggtgcgcctcttccctctacccccgcaccacctgctgtgtgccagcctgagacggttcctgcctgtcttgggggttggtggagggtggaggcagttctgccagccgtggcagggctgctatggggcatccagggctgtgggggtctggaggaggggacatgaggtgagaggtatcctggccgagggcggggggcagcggggggtctccctccggacctacctcagggagctgagcgtgcaggcgctccagggcaggcctgggacagagtcaaggctcagagaataaaggtagctaatctcatcataatatttttattagaatgttctgatgataaaaataaaacttgttttctttaaagnnnnnnnnnnnnnnngggcgggcgctctaaaatatccctccagggggccaagcttacccgtacccagctttcttggaccaagggggccctatagtgagtcctattataagctaaggactggccggcgttttaccaccgcctgactgggaaaactggtaacttnnnnnnnnnnnnnnnnnnnnnnnnnnnnnnnnnnnnnnnnnnnnnnnnnnnnnnnnnnnnnnnnnnnnnnnnnnnnnnnnnnnnnnnnnnnnnnnnnngggataatggggnnnnnnnnnnnnnnnnnnnnnnnnnnnnnnnnnnnnnnnnnnnnnnnnnnnnnnnnnnnnnnnnnnnnnnnnnnnnnnnnnngatccaaattggttgggggattttagaatcaccggccccaggggtcatttccgggccctcagtcctcacaggnctggtcctgatcctaatcaggcatacccatttttggaaaaggggtttactttgctttaaaaaaaccttcccaaaacctccccctgtaaactggaaacctaaaatgaatgggaaattgggtgttggtaaactgggttaattggcagcttaatatgggttaccaaataaaggcattagccttccccaattttcccaaataaaagcattttttcccggcgattttccaaagtgggg

SEQ ID NO: 76011 - DNA, 321 bp, Homo Sapiens
  misc_feature (203)..(253): n is a, c, g, or t
aattaaaatactgttatacccagtggaatgcggcagcaatcctggtacagggtggcataacaaaacagccatgtttacattttaaatatttacgataacttaaacatacagacacacatcatggtctttggcagaaaatgttcacagcacaaaaaatactttaaaagaaataccaaatattaatccaaaatatattaagttgnnnnnnnnnnnnnnnnnnnnnnnnnnnnnnnnnnnnnnnnnnnnnnnnnnntgctttgtaaacaatgcacatgaaccaaatgtatttttcagctttaaacaggggtaggggaatttttt

SEQ ID NO: 76012 - DNA, 903 bp, Homo Sapiens
  misc_feature (62)..(101): n is a, c, g, or t
  misc_feature (302)..(352): n is a, c, g, or t
gtgctaaccgtaaaattaaccctcaactaaagggaataagcttgcggccgcatacgcggtcnnnnnnnnnnnnnnnnnnnnnnnnnnnnnnnnnnnnnnnnaattaaaatactgttatacccagtggaatgcggcagcaatcctggtacagggtggcataacaaaacagccatgtttacattttaaatatttacgataacttaaacatacagacacacatcatggtctttggcagaaaatgttcacagcacaaaaaatactttaaaagaaataccaaatattaatccaaaatattaagttgnnnnnnnnnnnnnnnnnnnnnnnnnnnnnnnnnnnnnnnnnnnnnnnnnnngctttgtaaacaatgcacatgaaccaaatgtatttttcagctttaaacaggggtaggggaattttttaaaaaaaattgcaattgtccagcaaatgcaaatgtttaaaaaggaaacttgaggaaccatggaaataaaacaacacataccaaacctaaaaacgataaaggaagaaaacaaagaatcaaggagaactaaaaacggtaaagacaaaactgctaaaacccaccaatagctcctggggctgaagtgagggactctttaagaccagaagtcaaagtcactgctgctagcaggctgccatgtgggtgtttcaccccaattccaaagcatctggtgctgctttagggcgctgggcatgggtagcttgaggagccagcctcctgggcactgttttgtgatgggggctccattcagaggactatttgactcttgtagctcattaactagttttcaactgctttgctcctctcccaaaccctccaggtgggaatgaagacacttatgctaacaagacatctccagtttctcagaaagaactggtaccgggtag

SEQ ID NO: 76013 - DNA, 690 bp, Homo Sapiens
  misc_feature (24)..(24): n is a, c, g, or t
  misc_feature (90)..(90): n is a, c, g, or t
ggaattagattttagttgattttntaaagaatacagcccaacacttgttttttacattttaagagttgtagaagttgttcctaacttggngactggacctaccctctaggagggagttgttaatggggctcttttagcccactgatgcttacttaggccggagagcaggggacacggtgctaggttccctcgtgcagtgcctggtgctctcaaattgtctcaaaaggaccaagaggaaaagagtcggaggggtagaccctgcagcccctgttgagaagaaagattccagtgaagttgctgatggtatggctgtggtctgggacttgcggtgtctcggcatacccctctcctcttcccacctcctcctggctatgttctgcagcctcccagagtagaaaactactttgttacttaaggttgttcaccttgtaccagtggttatttgagtttgttcctattacaccaatccttacttgaggtggttcggattacagtttccaaatgcattctgggattgcctattccagagagggtacagaaaaagcacacagatggcttgtctcaggagtgttgaatgtgtgccccgctgctgtctggggggatgggagtgggctctggggtcatatgtgaacatccccttggatgatttgcggttgcttagaataaaacttgctactagcaaaagaaaaa

SEQ ID NO: 76014 - DNA, 685 bp, Homo Sapiens
  misc_feature (57)..(92): n is a, c, g, or t
catctgttttcattgttatttccactatagaacttctactttatactagcggggaannnnnnnnnnnnnnnnnnnnnnnnnnnnnnnnnnnntttatgtatcacatactgtgctacagttagcctcaatgaagattctattttgaactagacatcctgtcaatagtttgtcaagtaacttcattgcttcctttgatagcaattcagtgaaattttttcccaagtgatattttcccccaacttttgtgagtttgataaataggatgagtcttttatattggaaatactgtgaatggaaaattgccaaatcccttcttagtatattttaagcaccctacaacactttacctccctgcctttagtggtatttaaacatatggccaagttagtatttgggtttgattcctttggtgaagattaaggcatcaaaacatttcttaaaatgtttgagtacaaggctaagttataatgtcaactttcaaagactatgttgtgattcggtttgaatatgctgaagtgagcaattatgatttgcccaagtgcaatacaacaaatctataatgtatatttcacattttctacttgaacacattcatgtatatattttgttaaacttcatatgtatttaaaaagaatcatgaactgtatcaaaattctttcaataaaatttctatttaaaaatctct

SEQ ID NO: 76015 - DNA, 1272 bp, Homo Sapiens
  misc_feature (88)..(122): n is a, c, g, or t
acccaccaaacagtagaacctaatagtggcccccagtcgcttatatagcgacgacgacgcacgagctagtgagcgaggacgcggccgnnnnnnnnnnnnnnnnnnnnnnnnnnnnnnnnnnncagtcgacggtaccggacatatgcccgggaattcggccattacggccgggcaagaagggaactatagaaaagttcaggtttttaggctatagcagagacagtgagaaagcatctgggcctttctcttcctcttggtccaggtgacctcattcaccaacgtagagcttggtgtacaggaacggggtcacagtgctgagggggcttgagtcccacctttcagcttgatggatgctcacctcttctcagccccagctcgtgccctgtttttctagccatagcccccagattactcacagctcctcatgccatttcctgtccagattgctatgtatgactctgacctctcttgtccagtggtctggtgctcacctcctctcactgctagaatattcaccaaaggtttgcatttgggaagtcccttaccagctcctgcttagagctgtagggccatacatgtccacactcccaactggtgctctcccgctgaatggggcctcagcaggtgcccaagctgctacaaccttggccactctgtttctccaccccagcactgggcatggtaattagcctttccccatgttaatttattcagttttttcaagggtcaactgaattccccacttcctgggtaagaagcatgatctccttttaatttcacgtctaagatcctggcagcttcccctagctggttcctctgtagtcctgctgggactgtcagctcatttaaatgtgggtctgcagaaggctttaggtctcccccaacccccttacctttcacagaggaacctttcatcaggataaatgattattgctgccctgtgggtcttgctcaatactgttcatacctggagagagaaggtattgaaacatctcctttatgtgtgactttcccaaatttttaaaaattgtttatggtttaggccccttaaatactgtgtagcaggatgaagtctaccattaccagctgggtcaccttggatgggtctgtcaacatctaagcctcagttccctcacctgtaaaaatgagggtagtccctacctcataagggatattgtgaggatggaaagcgaaagtgtgagaaaatacctcccaagtgcctggtacatagtgggtgctaaataaaccactttttgtctgcaactgtcaaaa

SEQ ID NO: 76016 - DNA, 1344 bp, Homo Sapiens
cgcgctggacgggagcagctggagcgggaagcctggctgcgctaccgcggctgcctcctgttgtgcaggtccccgaccctctctctgtcctcattgcgcccagacgggccggcccagagctcccgggtcgtctttcgtgtggccgcgagacactcttgcactcctgtaatgagcctggcactgtgatgaaacacttttcccgtgtcgtttgagtgcatcttctcaacaaccctaggagggttcttgaagcttttgagattaacaatggcaggaaaatcatcactttttaaagtaattctccttggagatggtggagttgggaagagttcacttatgaacagatatgtaactaataagtttgatacccagctcttccatacaataggtgtggaatttttaaataaagatttggaagtggatggacattttgttaccatgcagatttgggacacggcaggtcaggagcgattccgaagcctgaggacaccattttacagaggttctgactgctgcctgcttacttttagtgtcgatgattcacaaagcttccagaacttaagtaactggaagaaagaattcatatattatgcagatgtgaaagagcctgagagctttccttttgtgattctgggtaacaagattgacataagcgaacggcaggtgtctacagaagaagcccaagcttggtgcagggacaacggcgactatccttattttgaaacaagtgcaaaagatgccacaaatgtggcagcagcctttgaggaagcggttcgaagagttcttgctaccgaggataggtcagatcatttgattcagacagacacagtcaatcttcaccgaaagcccaagcctagctcatcttgctgttgattgttagattgttgatgcattctaaccaactcacacatatacacaaaatcaacatggggatggagaagagaattagcgtttgcagcagtgtatcatctactaataaaattaaactaatgttgctgcttcattagttggtgggagaagggacacatccactcttggaggaatatatttactcaataatggcaccttacatttataaattgtaacagttgtctaataacgtttctttaatttaaatatgtaagttgcagagctaataaatgaaatgaccaagactttaattataataaaaataagaaacttgactattctagaagttatacttggattttttcctgggaaaatggagaactactttttatatgtgtatgtttttatgcaattagcattgtattcttggttcagggaaatactttcctaaagcaataatgttagatattaaagattaaaatctaatgtaaaaaaaac

SEQ ID NO: 76017 - DNA, 897 bp, Homo Sapiens
  misc_feature (838)..(856): n is a, c, g, or t
ccagaggatcccatctctcctctcgacatctcggctgtggtgggggcattgctgctgaccgtggttacttcatccagcccactgtgtttggagatgtgcaggatggcatgaccatcgccaaggaggagatcttcgggccagtgatgcagatcctgaagttcaagaccatagaggaggttgttgggagagccaacaattccacgtacgggctggccgcagctgtcttcacaaaggatttggacaaggccaattacctgtcccaggccctccaggcgggcactgtgtgggtcaactgctatgatgtgtttggagcccagtcaccctttggtggctacaagatgtcggggagtggccgggagttgggcgagtacgggctgcaggcatacactgaagtgaaaactgtcacagtcaaagtgcctcagaagaactcataagaatcatgcaagcttcctccctcagccattgatggaaagttcagcaagatcagcaacaaaaccaagaaaaatgatccttgcgtgctgaatatctgaaaagagaaatttttcctacaaaatctcttgggtcaagaaagttctagaatttgaattgataaacatggtgggttggctgagggtaagagtatatgaggaaccttttaaacgacaacaatactgctagctttcaggatgatttttaaaaaatagattcaaatgtgttatcctctctctgaaacgcttcctataactcgagtttataggggaagaaaaagctattgtttacaattatatcaccattaaggcaactgctacaccctgctttgtattctgggctaagattcattaaaaactagctgctcttnnnnnnnnnnnnnnnnnnncctgagcaggcggccgcaagcttattccctttagttgaggg

SEQ ID NO: 76018 - DNA, 833 bp, Homo Sapiens
  misc_feature (46)..(47): n is a, c, g, or t
  misc_feature (71)..(71): n is a, c, g, or t
aacagagccagcagattgcacaggatgagctgcggtgcgccgtacnncgagaggagaccacccgtatccgncaggagatccaagagctcaaggccagtcttaagattttccaaaagaccaagtgcagcatctgtaacagtgccttggagttgccctcagtccacttcctgtgtggccactccttccaccaacactgctttgagagttactcggaaagtgatgctgactgccccacctgcctccctgaaaaccggaaggtcatggatatgatccgggcccaggaacagaaacgagatctccatgatcaattccagcatcagctcaagtgctccaatgacagcttttctgtgattgctgactactttggcagaggtgttttcaacaaattgactctgctgaccgaccctcccacagccagactgacctccagcctggaggctgggctgcaacgcgacctactcatgcactccaggaggggcacttaagcagcctggaggaagatgtgggcaacagtggaggaccaagagaacagacacaatgggacctgggcgggcgttacacagaaggctggctgacatgcccagggctccactctcatctaatgtcacagccctcagaactaaagcggactttctttccctgccttcttatttagtcagcttgccatccctcctcttcactagcagtgtagatcattccagatcagtgggggagggcacctcagcaacctctgagtgtggacaatagctgctttcttctctatccaagagcaccaggctgtgcttgggtccttgctctcagagtctataaataaaagaatataatgattaaaa

SEQ ID NO: 76019 - DNA, 1376 bp, Homo Sapiens
  misc_feature (90)..(90): n is a, c, g, or t
  misc_feature (177)..(177): n is a, c, g, or t
  misc_feature (239)..(239): n is a, c, g, or t
gatgccctcaactgtcgtggttcctctgtgattcagcctggttcaattgccagtgttaggtgccaagggtgctggatgcactcagccagnttgctggatgcctgagtattaaagaaaaactactaaagctaaagtagaccacaagatatcttgcccttctgactttttatcttaccntccagaatgaccgccctcatgctgctgctgcaacattatgagaagtgccttcagtgtccacntgtgaacccaggacacagcacctgactgcacacagtggctgaaatccagcatttttacataggagatgcacttagcctctaagcctcgttttactcatctgtgaaacagagataagtaaccctctctcatgaactctttgatgaggatttgtaaacgaaaacagactcgaactattgtgtaccaccacatagcacatgcacgtctgtcccagactttgacaacctgcacaagacaagcagcctaaagcaggagagacctccctagggttttgtgtgtgtgcacactaccctcactccccaactggccattaccctagttctgcccttgtttgtggagttacagcctcaaggttgtagcatgtgtgctggcaatcagggccgcagtgtgttctgcgcctgcccagagctgactcctgatttaaccgctggcgtaaccgcgggttgcacgcatgcgtgctgaaaagcctttcaccctcacgtggtttcttttttaaccagtcatcaagcgaggctcgcgcgcaggccccgcgttggaaaatggcggggaagctgaaacctctgaatgtggaggcgccagaagctgctgaggaggctgaaggtagtgagggcaagtgggctgcactcctttctctccaaccagggcagaaaggagggaggattcgtcccattacaataatgaaataatgatattctaatttttttaaataaaatgttaagccttttgttattgaagaaaaccaattttttacccgttcagcacagtggagataaattaacagggcatattcttatcaccgagaataacttttgtcaactgtagtgtatacgttgttgaaagtaaacaacatgtagttcagtacgaaagtcttcaaacaaaagtggggcggtggggatgttctcataacaatcaccgtgctgcagccaccccttattaacagtaattcccagtgtcgccatttcacacctaacacatatgacactttgatggactcttaaacctcctaatcgaacatggcctcccccacagcctcttttctccagggtattgacttgaatgacaggcaaaggagggtggaggggtgtcggcctagacactattggaaattgtattccatccaacttaacaacctaaaaact

SEQ ID NO: 76020 - DNA, 947 bp, Homo Sapiens
  misc_feature (104)..(165): n is a, c, g, or t
tagcacagacccaatgaactggtgcggctgagcctgctcagaccagggatggaacatggtttaggcaccacccccggttccttccagagaacgatatgcaagtnnnnnnnnnnnnnnnnnnnnnnnnnnnnnnnnnnnnnnnnnnnnnnnnnnnnnnnnnnnnnncagtgagtatggaatagccttccataggagtgcacgtctctattagcaaatttgtctgaaggtgaaagcctggaaaataatttcatgttttgtgtatgaagacactgggcgtgaaacggtactgaacaccaatcctgcaatgcaggggaattttcctccgtgggattcagaaatgagaggatcaccaccaggacaacacctgaagatggtgttagctgaaggcagacattggggacctgaagtctgtctgcatcaagaccttgagtaattggccacagctgtacccaaagagttcctgggctggggagacccttcatttctcttctccagcttcagctaaaggcctagagacatggagaaggaagcagaatacagtacttcaattgtcttcctactgaggagccattctcatttagacctggcggttctcaggtctggatagtgtcattgtgcgaaggaactctttgggtacagctgtggccaattactcaaggtcttgatgcagacagacttcaggtccccaatgtctgccttcagctaacaccatcttcaggtgttgtcctggtggtgatcctctcatttctgaatcccacggaggaaaattcccctgcattgcaggatcggtgtccagtaccgtttcacgcccagtgtcttcatagacaaaagatgaaattattttccagggtttcaccttcagacaaatttgctaatagagacgtgcactcctatggaaggctattccatactcactgttttttcaggcttttcttttctctttctcc

SEQ ID NO: 76021 - DNA, 724 bp, Homo Sapiens
tgctttacaaaaaattactctttaattagtgaaaaaattcaaattcaagccttacctaatgcttattgcccttccttgcaggtctaaatgctagacctagtgactgtggcaactatctctcattgatgttccaaaaggcgaagagctccttcctgctagactttcttcgatatttcagttgtaataagcagatttaactagcttttggaaagttgctcactatcatcatagtatcttatgccttcacttctctgtagttgaagctcttgctgctgccttgtcattctttatttatgctgacttgtccaaacacaaaaggctgctgaagtcctgtcttagtgagtttctgtgatccacactgtgcttaaaaagcacatcttaggtcctttaaaggtggttaaatcgctctcctcatggcttacttttccacactgttcacaagagctaagctaatacaacttataaacaggtcacatacacagatttcacctgcttataggttgtaaacatcaacttactgtaaatgttttcactataatactagttccagaacatagaaagttggttaacagtacaattaacctcatgccattaaaggatactgtcaaggttgtgtcaaacaatttcacaaacataaaacaggaaatgttaatctcccccattcccttaaactttatttatatgaataaaagacttgagacatttagctcattttatgtttccc

SEQ ID NO: 76022 - DNA, 998 bp, Homo Sapiens
  misc_feature (118)..(118): n is a, c, g, or t
  misc_feature (169)..(169): n is a, c, g, or t
  misc_feature (184)..(184): n is a, c, g, or t
  misc_feature (217)..(217): n is a, c, g, or t
  misc_feature (272)..(272): n is a, c, g, or t
  misc_feature (307)..(307): n is a, c, g, or t
caactagtctcattatagatttagaatactgataaatctctgatttaatgttgaaggtctaaggactacgacagacatactagacatttcaaattatagctttgatagtatatattcntaattgataataaaatgtagctttttataagccaggaaacataagcatatntgttaaaattctctntggtcttgaggaccaaaaaaggacgtaaaattnacagtcaatctatgagggttttttccctccataagtttaactttaaaactgtatntaaggaatcaaatcttacaaaatcctggaagattntggtaatgatgttgataatttcagggaaattaatcaaggacctatattgatttaaaagtgtattttatccagtagtttgaggatcttgccaatggaagatactagccccagcctagcagaaaagtgcaatatgtatagcatactttgacattttaaacatgatagtccataaccattttgaaatgctgggcaaactacatgaagttatttataattaattcacagctaatcaggcattttgaaagcttaattggattcaaaaaccataatgttggaatttggtaaaattttaatgttgatttttactgtgaaaaggtttttataagatatacacaccctagtttaatgttgtgtcttggtgtggatttacagatttactacaggtattctgaaccaggaacacaatcaggtttcaggccagtttgatactggctgtccttaattctaatatgagagtaggacatcatactaaatgttatgtcagtgggactgtactgtctgtggaacttagcaaattaatcattttcttcagacttgaaggagagtgataaataaaatttggagtcataggatattgatgcacaatttaaggattaaacatttttaatcaattgtggatgatggcttattaaatgttgacttcctagtataaaactgcaagaataaaagtaacttctccagctgtaaaaaa

SEQ ID NO: 76023 - DNA, 959 bp, Homo Sapiens
  misc_feature (668)..(740): n is a, c, g, or t
  misc_feature (742)..(742): n is a, c, g, or t
tttttaaggtgaggactcagaaaatcaaagggctagtagaaacagtgttatgttgggaagcagggtacccccaaagatgttccctgtaggtcacggcactcccaaaagcacacaagcacatacagacatatgcatccccacacacgcctatgcacaaacgtggattatcgcacagactgggaggtttagtggtgcatttctcctctgttttctttttaatatacatttaaaatacagtattatcactttataaaacatacattaagcctaataaatggaccaataagccaaactatcagtattttgtatatcctgcataaactctaatttagttcctcaacttattttcagtgtttatgcagacctttagagttaagcctttgtatttccatgttattccacaatatgcaatatttctctgagtagcttctgctatgatattcttatgaagaaaaggggcaactttctgtccactataggagagaattcagccgaagatatgagagtaatgagagacattttccagtcattggatcgtgttttcttttgtccattattgtactgtgctgtaccacatttatttctatattcattttgtaaaaaatttaaaagtgctattttgtttgtatttgaaaatctctgtgaataaattctctctttgatcaatnnnnnnnnnnnnnnnnnnnnnnnnnnnnnnnnnnnnnnnnnnnnnnnnnnnnnnnnnnnnnnnnnnnnnnnnnanaccggtttgttggcctcaggcaatttccaaggggggcgattatatccaaacgggaaaggtttcggggggaatggttccgccaaatcccaacaaaaaacggaaaaaagtgaacccggggccaagaggcaactaataatggtggccaaggcgtcaatggaacttgtggctgattataccgcccgcggaaaggttgttggggctcctccccagacccgcg

SEQ ID NO: 76024 - DNA, 2446 bp, Homo Sapiens
  misc_feature (840)..(875): n is a, c, g, or t
  misc_feature (1809)..(1835): n is a, c, g, or t
  misc_feature (1848)..(1848): n is a, c, g, or t
  misc_feature (1904)..(1904): n is a, c, g, or t
  misc_feature (2181)..(2181): n is a, c, g, or t
tcccgggatgggaaggagctgacaggaaggcgctgtgcagagcctccccacccccgcccatccccccagttactgacagaggagccatttacaaaaggccgattctctggggagtggagaggcaggaacgcagcgtctatgaagactggcccatttgcagagcactccaaccagctgtggaacatcagcgccgtcccttcctggtccaaagtgaaccagggtctcatccgcatgtataaggccgagtgcctggagaagttccctgtgatccagcacttcaagttcgggagcctgctgcccatccatcctgtcacgtcgggctaggaggggccaagccgaagagccacccaggccacagttcctgtgcctgccttccccaccccagcagtggcccctccccatcccctccctctgttcgtcccgtttgatgagaggctgtttactggggtggggtggcgagatgggcttgagggggctcagagcataaggcttcagggcccaagttgggagaagtgaccaaagtgtagccagttttctgagttcccgtgtgctagactggccagaagagagggtctggggcctggtcactcggccactctctcctgtttctggcctcttctcccttcactcccgtccagtctggttttgagagcaggggctgttctgcagcacctcagggaagggaggagagatacctgctgcttccattgcttttcccttcctggagtcgatgcctttctaagggttggagctgctccttgcaggggcgggtcagtttcccaggccatgccggggtggccatctatgctagggctggaagctgaggctggccgccagctnnnnnnnnnnnnnnnnnnnnnnnnnnnnnnnnnnnnagaggccttagctgtcctggctggtgcccctcccaggctccttttcaccctgccccctgggcctgaggccccctgtgtccaagcctccccctggctcttcagttctctagcccttggctttgctgggtttcctgactgtagccacatctctcccgctccctaagggtaacctagccaatggaagctgccctttgggtaggtgctgggctcctgggagggcccagatgatggggtgaggcatgtctttccagaactttccctggcagggaggggatggcagaaactcagggaggggcttggggcccattgtatctggagagcctggattcctcttggcagtcttaggcccagccacttctgctacctttgcgctgctgtgagcctcaccctgggcccctgggccctgcttctctgctcccctgggtgatgggtgggcccagaaggtggcagtcccacaccttgtcctcccacctccctgaactgtccattgcttttatagggtgaggtaagtgacagcctcccaagcccaggctttggcactcagaatgggcccagtgggggctgggcaggcccattgagggccaccgccgaggtttctcctagggctgttcctgggcctggctcttacaggctcgtcccccaggcctgcccttctccactgccccctcctgtgtctgggtccacacacccttcaggaagggggagcactgagaagcacagcacaggggctcagcctgggatccggtgatggtctgggcagaggctgggtcaggagtcccaaaggtcagtgacagtttctcagaagaggcccagcgtccacctctctcccagggccagacaccccttcctggctcccccatccccctatgggctcccagccccttgcaccctcattgctgttcagattaaagcctctgttttgcacctgtcaaannnnnnnnnnnnnnnnnnnnnnnnnnncatgtcgggccgncctcggcccctcgaggaagctttctaaaccatttcgtttgggcgcgcggggcccangtagggtaaggtgaacatgggtccataggctggtttccctagggagatccgtggtccatgacctagtggctttggaattcctccaccaaataaaaaaaccgccccggggggccacaccgaggcggttcctggaaccaaattcccagaatgggagtttcctggaggttccatttacctgggaatccttatccaaaccagggaaggtccaaaggcggaagcctccgtataatccaaaattttacgccccccccggccccttggcccatctccatttcgngcagagaaacctgggtgtgggtaaattctccattttgaaaggccaatttctcttgggcccggcaacaattgggggaaaagccccccatttcacaccaaaaaacccggcgccatatgtgaaatgaatcaccccccttgagataatcccgggccccaagagcggggggaatatctcacagtccaaccccctcttgtgtgtctcgcgccccctttgtcggggggaaaattaaaaaatatttatgttgccccgcaccattgagggttag

SEQ ID NO: 76025 - DNA, 1322 bp, Homo Sapiens
  misc_feature (562)..(598): n is a, c, g, or t
  misc_feature (604)..(604): n is a, c, g, or t
  misc_feature (834)..(847): n is a, c, g, or t
gagcgaggcctgggtggcgaattcggcacgaggtcacgtcgggctaggaggggccaagccgaagagccacccaggccacagttcctgtgcctgccttccccaccccagcagtggcccctccccatcccctccctctgttcgtcccgtttgatgagaggctgtttactggggtggggtggcgagatgggcttgagggggctcagagcataaggcttcagggcccaagttgggagaagtgaccaaagtgtagccagttttctgagttcccgtgtgctagactggccagaagagagggtctggggcctggtcactcggccactctctcctgtttctggcctcttctcccttcactcccgtccagtctggttttgagagcaggggctgttctgcagcacctcagggaagggaggagagatacctgctgcttccattgcttttcccttcctggagtcgatgcctttctaagggttggagctgctccttgcaggggcgggtcagtttcccaggccatgccggggtggccatctatgctagggctggaagctgaggctggccgccagcnnnnnnnnnnnnnnnnnnnnnnnnnnnnnnnnnnnnnagaggncttacctgacctggctggtgcccctcgcaagctccttttcaccctgccgcctgggcctgaggcaccctgagaacaaccctccccctggctcttcagacccctagccggtggactgggggaaaaacgggggggcagcaacgatctctcccccaacaagggggaagcaccacccaatggaaactgggcattcgcgggggaccttggacggcacacccgtgaaccgacatgtnnnnnnnnnnnnnnagggcgttgcaccaagtgcaaaccgtgggggacccaaggggaaataacccatatacaatctcccgcacaaccggcttgtactaacccgacccggccctgcgcccggaagtcgacggagcgaacccggaacacaggagtgggacgtaaaccgagaaacacctaaaacacctgtatgtctacttttgctggttgcgcgaactaggcaggataaataaagagggcgccaaacgagtcgctgattaggacctattggtgggccccaccggggtccaacaaggcacgagtggcggtctgtgctcaacaacagcgtgcgggcaccgtacggcccaagacggtcggcgattggcccgtgtccgaaaaagagctgcgctcgggagacgggcccacagcaacacaggggcgaacccggcacaacgctgcgctactccaacccgtggcgagaaaacgacaggaggaggatgaggagagtacacac

SEQ ID NO: 76026 - DNA, 716 bp, Homo Sapiens
  misc_feature (685)..(685): n is a, c, g, or t
cggagtgaagggagaagaggccagaaacaggagagagtgccgagtgacaggccccagaccctctcttctggccagtctagcacacgggaactcagaaaactggctacactttggtcacttctcccaacttgggccctgaagccttatgctctgagccccctcaagcccatctcgccaccccaccccagtaaacagcctctcatcaaacgggacgaacagagggaggggatggggaggggccactgctgggatggggaaggcaggcacaggaactgtggcctgggtggctcttcggcttggcccctcctagcccgacgtgacaggatggatgggcagcaggctcccgaacttgaagtgctggatcacagggaacttctccaggcactcggccttatacatgcggatgagaaccttgggtcaactttggaccaggaagggacggcgctgatgttccacagctggttggagtgctctgcaaatgggccagtcttcatcaactagggactgcaaaatgctgctcactgctccgaggtggaagagggtgggcgctctggagaaccaacacaacgtgtgctgcaaccagcggccacgtggcaagatgggcccttgctgcagccaccccggctcctgggcacactcctcctagggtctactgttgaacaccatgcccaagagcctagacccnaaagtgaaaacccggacctgtggagaaggtg

SEQ ID NO: 76027 - DNA, 1007 bp, Homo Sapiens
aagccaaagaaaacagaagctctttatgccaaatcacaaggacagacaggggaatgtgggggatggacaggagggagggcctgggcaggctgcctgccttttggcaccttgtgcccaggcgagttcccggacccatccaggagctcttagttcgttcagtcaattccttgacatttgatgtgcctggctcagaactgggtgctggggacatctaggtgcataaagccaggttgcattctgacaggagagagtcaagccaaccggccaggacaggcctgctgctttattcacagatttagatgtcgttccatctgctctcgaagtttgaatttctggatctttcctgaaatggtgagggggtagtttgtgacaaacacgatgtacttcggaatcttgaagtgagagatcttccctttgcagaaagcttttatctcctccaccgtggtctcctccccgtccttcagccgaatgcaggcacaaatctcttcccccatccgatcgtccttcactcccaccacctgcacttcctgcaccttcgggtgtgtgtgaaagaagtcctcgagctctgcggggtagatgttctcaccaccccggatgatcatatccttagagcggcccacgatcttgcagaagccctgctcattcattgtggcgacatctcctgtccaataccacttgtcctgatccactgcttcctctgtcttctgaggctcaccccagtagcccagcatgacgcagtaccctcggatgcacagctccccgggcgtgttcagctttgccagcgtccctgcctccatgttcatgatccgcgcctccgtgtgaggcataattctgcccacgctttctgccttctgctccacagtgtcctcagggaagtgcgcgaatgtcacgggactgttctctgtggttccataagcaacctagagggtccaggaaagggtgtttgaagagggctcagcacgtgcagagggatcaggtgagctatctgaggaaatgggaaggaattc

SEQ ID NO: 76028 - DNA, 601 bp, Homo Sapiens
ttgtgcccagaaccgggcgctggggtatctaggtgcataaagccaggttgcattctgacaggagagagtcaagccaaccggccaggacaggcctgctgctttattcacagatttagatgtcgttccatctgctctcgaagtttgaatttctggatctttcctgaaatggtgagggggtagtttgtgacaaacacgatgtacttcggaatcttgaagtgagagatctgcagaccagagggagggaggtaaggcgtgaggctgcgcaagctcacaggggtattgggtaggggaccaggggctggcctggccaggagtccagcttcgtcaagggcagagcaatccccaccctgggctggttggcagaggagtgggtgagcaaagaacagagcagcatcagctaggttgagcggaggctcccaccttccctttgcagaaagcttttatctcctccaccgtggtctcctccccgtccttcagccgaatgcaggcacaaatctcttcccccatccgatcgtccttcattcccagcaccttccagggccaaagaaaaatatcagacatcaccgtgttcatgtgtgtttcttggtcctgggggccacag

SEQ ID NO: 76029 - DNA, 1945 bp, Homo Sapiens
  misc_feature (436)..(456): n is a, c, g, or t
  misc_feature (907)..(917): n is a, c, g, or t
  misc_feature (1371)..(1773): n is a, c, g, or t
  misc_feature (1778)..(1863): n is a, c, g, or t
  misc_feature (1871)..(1871): n is a, c, g, or t
  misc_feature (1884)..(1884): n is a, c, g, or t
  misc_feature (1916)..(1916): n is a, c, g, or t
gtcccggaactgtcagacatgtttgatttagcgtttctttgttcttcaaatcaggtgcccaaataagtgatcagcacagctgcttccaaataggagaaaccataaaataggatgaaaatcaagtaaaatgcaaagatgtccacactgttttaaacttgaccctgatgaaaatgtgagcactgttagcagatgcctatgggagaggaaaagcgtatctgaaaatggtccaggacaggaggatgaaatgagatcccagagtcctcacacctgaatgaattatacatgtgccttaccaggtgagtggtctttcgaagataaaaaactctagtccctttaaacgtttgcccctggcgtttcctaagtacgaaaaggtttttaagtcttcgaacagtctcctttcatgactttaacaggattctgccccctgaggtgtaannnnnnnnnnnnnnnnnnnnncacgtactccacagccaacatcacgaggtgtaatttttaatttgatcagaactgttaccaaaaaacaactgtcagttttattgagatgggaaaaatgtaaacctatttttattacttaagactttatgggagagattagacactggaggtttttaacagaacgtgtatttattaatgttcaaaacactggaattacaaatgagaagagtctacaataaattaagatttttgaatttgtacttctgcggtgctggtttttctccacaaacacccccgcccctccccatgcccagggtggccgtggaagggacggtttacggacgtgcagctgagctgtccgtgtcccatgctccctcagccagtggaacgtgccggaactttttgtccattccctagtaggcctgccacagcctagatgggcagtttttgtctttcaccaaatttgaggacnnnnnnnnnnngccattatttcttcagttttcttttcttgcactgatctttctcctctccttctgtgactccagtgactcagacgttagacctcttgatgttttcccactggtccctgaggctctgttcacctttcttcattcttttttctgtctgtccttcagatttggctatttctggtgctccgtcttcaagttcactgattttttttcctctgtcgtcttaattctgctactgaactcacccagtgaatttatttcaaatactgtaattaagttttaaaatttccattaggttcctttttatttctctgctgggtacttctggttttccactcattccaagagtgttcacctttacttcatgaagcatggttataactaggactgcagtgaattctgggataatttgaacgtttgagcatcttggggctgaaatcgtcttttccctcgtgccgaattcttnnnnnnnnnnnnnnnnnnnnnnnnnnnnnnnnnnnnnnnnnnnnnnnnnnnnnnnnnnnnnnnnnnnnnnnnnnnnnnnnnnnnnnnnnnnnnnnnnnnnnnnnnnnnnnnnnnnnnnnnnnnnnnnnnnnnnnnnnnnnnnnnnnnnnnnnnnnnnnnnnnnnnnnnnnnnnnnnnnnnnnnnnnnnnnnnnnnnnnnnnnnnnnnnnnnnnnnnnnnnnnnnnnnnnnnnnnnnnnnnnnnnnnnnnnnnnnnnnnnnnnnnnnnnnnnnnnnnnnnnnnnnnnnnnnnnnnnnnnnnnnnnnnnnnnnnnnnnnnnnnnnnnnnnnnnnnnnnnnnnnnnnnnnnnnnnnnnnnnnnnnnnnnnnnnnnnnnnnnnnnnnnnnnnnnnnnnnnnnnnnnntaggnnnnnnnnnnnnnnnnnnnnnnnnnnnnnnnnnnnnnnnnnnnnnnnnnnnnnnnnnnnnnnnnnnnnnnnnnnnnnnnnnnnnnnagtcagangtgcgaacggaangatataagatcaagcgtcccctggagtctccntgtctctgtcgactgccgtacgatacgcc

SEQ ID NO: 76030 - DNA, 738 bp, Homo Sapiens
  misc_feature (648)..(685): n is a, c, g, or t
accatccacatcagaggtgtgtctttagttgacagttcacaaacttgtgtaaaggtttgtgaaatgcatcttcttactgcatcagaccttccttaagaatgaaaccgaccacatggagggaaaaagaaaacaattctttcttggcttggttttttgagaagtttactgacaaattactgtttatcaaatctgaaatagtcacctcacagctcttcaaagaaaacctttgaaagatttatatctaaaagctgtatttactttaaaagaagtgcataattaccaaaattgtatgtactattgtacatttttacaacagcattttcttaaacataatctgtgtttaatgattattgtccattgagcctgtactctgctttccataccaagtaaatatgaaataatctactttgcacataacagaagaaactataattacttggctgttggagatttgtacttgagtataaatgtacaccagtttttgtatttgtgaactcatctgtgggaggagtaaagaaaatccaaaagcatttaatgttttgtttttgttctataaagatatgaaaatgtatttttatattattttacttatttggaatttacagagcacacctaagcaattaggatataacaaaactacttaaccannnnnnnnnnnnnnnnnnnnnnnnnnnnnnnnnnnnnntaaaaagatgaaaacttataaataaattcttaatttgtaattactttaatata

SEQ ID NO: 76031 - DNA, 714 bp, Homo Sapiens
  misc_feature (14)..(14): n is a, c, g, or t
ccccagagcccagntgccctcaaggctctcagcccccgagcagcaagaggatgaggacagcctggaggaagactcgcctcgggccctgggctcgggccagcattcggatagccacggggagtcatcagccgagctggacgagcaggacatcttggctcctcagaccgtgcagtgtccagcccaggccccagcaggcggcagtgaggagaccatcgccaaagccaagcagagtcgcagtgagaagaaggcccgaaaggcaatgtcaaagctgggcttgcggcagattcagggagtcaccaggatcaccatccagaagtccaagaacatcctctttgtcatcgccaagcctgatgtcttcaagagcccagcctcagacacttatgtggtctttggcgaggccaagattgaggacctgtcccagcaagtgcacaaaaccgcagctgagaagtttaaggtgccctcaaagccctcagccttggtccctgagtcagcacccaggccccgggtggacgaggcggggctggaactgcgtgacattgagctggtgatggcgcaggccaatgtgtccagggccaaggccgtgcgggctttgagagacaaccacagtgacatcgtcaacgccatcatggaactgaccatgtagccactgaccggaagctggagccatcctacgccttccctcagctctgctactcaataaatcggtgtcccttc

SEQ ID NO: 76032 - DNA, 343 bp, Homo Sapiens; identical to SEQ ID NO: 289

SEQ ID NO: 76033 - DNA, 1641 bp, Homo Sapiens
  misc_feature (159)..(210): n is a, c, g, or t
aacacttcaaatcagctttattatgggtgacagatttagggttcttaaatagcgatagcagtggctagaagaagcgcttcatccccacagtggagttctttgttgtgaggggagggaatgcaaggagtcatcagcgggggtggcccttggccacttttnnnnnnnnnnnnnnnnnnnnnnnnnnnnnnnnnnnnnnnnnnnnnnnnnnnngccatttgtgggcagtggggacaatggatcataggggcaccctttggaaaccatatataggaaagaacatcttacatcccatatgcctgcaattcttggttccaacttaggggtatttccactccactctgccctcctgtggcctgtcttattttctggaggaggactgggcctgcctcatcctagcatcttaaaccctctttccagagctgcagcttctccacgtggaagatgtctgctctggtgggcatacattcattttaggagagaaactaaactcacaacccttcattttgggggatccatcttaaaaccaggaaggccttccagcctgccttttaatgggtaatcatttttggaattcctccctaccatgtattcttctattttttaccctctcctccttggtttatgggcatttcttggagggctgggggaccacagtcaagttgaggtgatccccgctccggggacggagtaaggcaaggaggcgggatcggaatgttggaggcagaaccgcaagctcccaggcccaccccaatcacaaggccaagtcatccgttgaagaccctgcctccgcgcccggcagccaactccgtatcttcctcgcaagtatcgcagggttggcccgaggcccgcacatgcctgcagtaaaacctacgcccgcgagggctcgggcctcctcctgctcctactcccgagaggctccggcaatgagaataggccccgcccccccgcgcaagccaagtctacggaccaagtccgagcctgcagacaagctccgccccccacgagggcctgctccgggctgacagcgtccggcagcgcggcagagccccgcccccatgcgggggcaacgcttactgacaccgtccgtgcgcgcgggaagggcccagcctcgcggcccggcgtggctttgtgacgggcctctggtggcccagccccttccagcagcgtcagcagatcccagtggttacgttggtgagcgacgtccgccggcgctagcccagcctggtcccgcagctctcgggctgcccccagccccagcagtagctgggctacttccaccgctccttcccgccccgccaggaatagcggcgtctgctcctgtacagaagagccagggccgatatcagggaaggccacgcccacaggactgggcctttctgccttcaattgcgcgaccactggcccctatcccttcaggctttgcgggttaccgcaatttccatctctcgtgcgcctgaatgttttgtgggaagccctctgtcccatctaaccctgttgtcctgggcatctttatcggctccggcctggagaagcgagcgggcggctcgggcgttgttcacggcagcagcccagtgcagcgcagttttcccccatttatctctggcccccacgtctgcttgggctgcaatcagttcttcaacc

SEQ ID NO: 76034 - DNA, 425 bp, Homo Sapiens
  misc_feature (252)..(252): n is a, c, g, or t
tgcagctctggaaagagggtttaagatgctaggatgaggcaggcccagtcctcctccagaaaataagacaggccacaggagggcagagtggagtggaaatacccctaagttggaaccaagaattgcaggcatatgggatgtaagatgttctttcctatatatggtttccaaagggtgcccctatgatccattgtccccactgcccacaaatggctgacaaatatttattgggcacctactatgtgccaggcnttgtgtaggtgctgaaaagtggccaagggccacccccgctgatgactccttgcattccctcccctcacaacaaagaactccactgtggggatgaagcgcttcttctagccactgctatcgctatttaagaaccctaaatctgtcacccataataaagctgatttgaagtgttt

SEQ ID NO: 76035 - DNA, 618 bp, Homo Sapiens
  misc_feature (338)..(351): n is a, c, g, or t
ctcttttcttctttcttttcctctttttccccaagaggaagaattgcttttctcttaccagtatgatttgtaactctggaacactattcttacagaatgcctttctaacctgaaggatacccagatttctttctttatgtacaagatggaaaatcccctacccctcaaaaacaggttgagtttatgggccagaatattttgtataccagacattggtaagctctcatggtttacaggaaggctctggttccccctcacaggatgagcatgctcagttgggcgtgtgtggaggagctgtgaacttcacgctcttcaaccccagactttgactgtatagnnnnnnnnnnnnnnaactgttccatcaggaaaaaaatgtgtcagttgattttggtgtgacttgtgtaaatggttcatggcaatgacgttgggttgcttcctaggcctggctgagttgtgcctaagggtggctgaaatactaaaacacttatcttacagcaagtgaacaggggctacctgccacatcccctccacagatgcactttaaaaagccactcatgctttggcttaaactgtaattaatttattttatgtacaataaatcgcatttgaaaaagaaaa

SEQ ID NO: 76036 - DNA, 2973 bp, Homo Sapiens
  misc_feature (98)..(177): n is a, c, g, or t
  misc_feature (2958)..(2958): n is a, c, g, or t
aaggacgcgaggcctgggtggcgaattccgcacgaggcggccttttgtgcgggctgttgggtcgggtgggggcggcggccgcggaaggccaggccggnnnnnnnnnnnnnnnnnnnnnnnnnnnnnnnnnnnnnnnnnnnnnnnnnnnnnnnnnnnnnnnnnnnnnnnnnnnnnnnnggggcgcgcccaccgcgccgcatccatgttcgacaccacaccccactctggccggagcacgccaagcagctccccatcgctccggaaacggctgcagctcctgcccccaagccggcccccacctgagccagaaccaggcaccatggtggagaagggatcagatagctcctcagagaagggtggggtgcctgggacccccagcacccagagcctaggcagccggaacttcatccgcaacagcaagaagatgcagagctggtacagtatgctgagccccacttataagcagcgtaatgaggacttccggaaactgttcagcaaactccccgaagcagaacgcctcattgtggattactcctgcgccctgcagcgtgagatcctgctccagggccgcctctacctctctgagaactggatctgcttctacagcaacatcttccgctgggagaccacgatctccatccagctgaaggaagtgacatgtctgaagaaggaaaagacggccaagctgatccccaacgccatccagatctgcacggagagcgagaagcatttcttcacttcctttggggcccgtgaccgctgcttcctcctcatcttccgcctctggcagaatgcactgcttgaaaagacgctgagtccccgcgagctctggcacctggtgcatcagtgctacggctcagagctgggcctcaccagtgaggatgaggactatgtctcccccttgcagctgaacggtctggggacccccaaggaagtgggagatgtgatcgcccctgagcgacatcaccctcctccgggggcagctgaccgcagcccggagccaagcccaagggggttcgcgccccgggccatgtcacgcccaacctttcccgaaccagcagcgaagcagaacatgggggcaaaggaggacaagggaggagcagggaaaacagccagccagacgcctcctccagccagacagtgaccccggtggctgaacccccgagcacagagcccacccagcctgacgggcccaccaccctgggccccttggatctgctgcccagtgaggagctattgacagacacaagtaactcctcttcatccactggggaggaagacttggctgccctgcttcccgacctctccggccgcctcctcatcaactctgtcttccatgtgggcgctgagcggctccagcagatgctcttctcggactcgcccttcctccagggcttcctacagcagtgcaagttcacagacgtgacgctgagcccctggagtggggacagcaagtgccaccagcgccgggtgctgacgtatcacccatccccatcagcaacccactgggccccaagagcgcctccgtggtggagacacagacgctgttccggcgcggcccccaggccggcgggtgtgtggtggactccgaggtgctgacgcagggcatcccctaccaggactacttctacactgcccaccgtctactgcatcctgggtctggcccggaacaaggcgcggctccgagtgtcttctgagatccgctaccgaaagcagccgtggagcctggtgaagtcgctcattgagaagaactcgtggagcggcattgaagactatttccaccatctggagcgagagctcgccaaggctgagaagctgtctctggaggaaggcgggaaggatgcccggggcttgctatccggcctgcggcggcggaagcggcccctgagctggcgggctcacggggacgggccccagcacccagatcctgacccctgtgcccgggccggcattcacacctcgggctccctcagctcccgcttctccgaaccatctgtggaccagggccccggggcaggcatccccagtgccctggttctcatcagcattggtccttatcatcctcatcgccctcaacgtcctgctcttctaccgcctctggtccctggaaaggacagcccacacctttgagtcctggcacagcctggccctggccaagggcaagttcccccagacggccacagagtgggccgagatcctggcgctgcagaagcaattccacagcgtggaggtgcacaagtggaggcagatcctgcgggcctccgtggagctcctggatgagatgaagttctcgctggagaagctgcaccaaggcatcacagtctcagaccctccctttgacacccagccccggcccgatgacagcttttcctgaggaccccggccacgcagctgttcccccacatggacagatggacacacagagcctcggcggccactgctggcacggtgtgagcgccaggcatctcccacccgcccctcccgacggcccaaccaggggctgtgcagacgtggggaccacggaaccgagatgcactttagaccagggagctggcccggcctctggcaggccccccactaacttattttgcccggctgaggttgtggggggcgcctcctggggtgcacgattccctcagctctgggtttaatgtattatatttatttggggccgacagtgccccaataaagggtcagaagtggctgtggctgtgcctgtggggccctgggagtgggtgggagcctcctgttgcactcagatcctgccatggtggggaggggacctctgtctgtgttctggggccatagtcactgaaacgatctggaattcccgcagcatcttacacaagctttacatcatctgaggtcaacgcaggaactccagggacagaccgtggtagctggagttcaaatcctgcttcctagcagtggtgtaaatgcagcaggtcagccccctgnagctccagtgagctt

SEQ ID NO: 76037 - DNA, 1786 bp, Homo Sapiens
  misc_feature (27)..(27): n is a, c, g, or t
  misc_feature (130)..(130): n is a, c, g, or t
  misc_feature (151)..(151): n is a, c, g, or t
  misc_feature (153)..(153): n is a, c, g, or t
  misc_feature (178)..(178): n is a, c, g, or t
  misc_feature (180)..(180): n is a, c, g, or t
  misc_feature (190)..(190): n is a, c, g, or t
  misc_feature (196)..(197): n is a, c, g, or t
  misc_feature (207)..(207): n is a, c, g, or t
  misc_feature (261)..(261): n is a, c, g, or t
  misc_feature (284)..(285): n is a, c, g, or t
  misc_feature (987)..(987): n is a, c, g, or t
  misc_feature (1000)..(1000): n is a, c, g, or t
  misc_feature (1003)..(1003): n is a, c, g, or t
  misc_feature (1037)..(1037): n is a, c, g, or t
  misc_feature (1117)..(1117): n is a, c, g, or t
  misc_feature (1177)..(1177): n is a, c, g, or t
  misc_feature (1216)..(1254): n is a, c, g, or t
  misc_feature (1292)..(1309): n is a, c, g, or t
  misc_feature (1319)..(1319): n is a, c, g, or t
  misc_feature (1340)..(1348): n is a, c, g, or t
  misc_feature (1401)..(1401): n is a, c, g, or t
  misc_feature (1406)..(1406): n is a, c, g, or t
  misc_feature (1411)..(1411): n is a, c, g, or t
  misc_feature (1413)..(1421): n is a, c, g, or t
  misc_feature (1425)..(1434): n is a, c, g, or t
  misc_feature (1448)..(1485): n is a, c, g, or t
  misc_feature (1529)..(1533): n is a, c, g, or t
  misc_feature (1535)..(1535): n is a, c, g, or t
  misc_feature (1592)..(1592): n is a, c, g, or t
  misc_feature (1677)..(1677): n is a, c, g, or t
cccagacgtttctgtagattacgcccnttaggatgcctgggccagatcgcagagcgcagaatttattgtgtctgaacctcagacccaggtgcgctgatttcccagtccagttcccccaccagatgtgtcntcattctcctccaccccgctntntagggcaagtatgacatgtagactnangggagtttcntcttcnntcgccagagntgagcctgcatgcagtggtcctgcgacacgtcaaggtccggcacacgttgtgtncacgtcgccagaatcacgcctcnntggccatgtgtctttgatgacgatgatccgttggggcggaggctgcccttgcagcgccgcaggaactcggccaggtgctgatcggtgaggtggcctggggagggcagaggcaaggttaccagggcaccatgcaagcggatgtcggcactggatgggatgtacttctcagccccgctgagcccctcatttgtgcccagcattttgtgtgcacacatggcctcattggctctcagtcccgagagatttactaaaccccaattcatagaataggaaactgtggctcagaggtcatctacctaaagacacattaagccagaatttgacttgatgggatggcttacaagtcctgcctgatacctacacaccatgatgccccacccctgccaggcttggatcggaggagtgaacctgggctaagagtttggcattgcaggagctcccagagagactgccttccctacactagaagtccccacaaaggcttctgagaccacaaaatacaaggccagacctagagtgtccacagcaggcctgtgctgcccgcctcaggaggtggccgactgctgctagcggcctgccgccacgtcagcagcccagggcacagcgctcgaggtgtgctgttaggctaagagggtgcagggctagacacgaagcttaaactattcatcttattaaaaataaaacccttatataatagcttcnccatggtggggcnggnttggaagggaacaaaccctagaaaaaatttggtnccttttgccgggcccggcctcggacccatccaaaaaacctttttctaagaaccattccgtttgggccccccgggcccccnaaagtaaacggcaaaatggggcataacccgtgtttttcctcttcaaggaaaacccccgcngccacacagaattttaaagggggggtggttggtttcctnnnnnnnnnnnnnnnnnnnnnnnnnnnnnnnnnnnnnnngggcggggggcggcgcccaaaaaacctaggtttgttcnnnnnnnnnnnnnnnnnncacggggccncccccccggccttcaggacannnnnnnnnctttaaaaaaaaccacgggccgcccccgcgcccggcccccgggcctccttttnctccntcctntnnnnnnnnntatnnnnnnnnnnccggaaaagtaccnnnnnnnnnnnnnnnnnnnnnnnnnnnnnnnnnnnnnnttagagggcgaagatagtcattccccctaccccaccaaaacacnnnnnanaggaggcggggaaaacactgtgcctttctaccccctattacattctaaaccccatanccccaacaatccacccactcggcaatgcccctacccgccgagacgtatcgtgtgggaaactccccggcagcggcggacgaaattnccccccgcaagagggccgagagcggaagacaacctcatcccgtttcgcgcccgcacattgacacccccacccttgtttctcctcgcccccatgggggcgggtgactcct

SEQ ID NO: 76038 - DNA, 1078 bp, Homo Sapiens
tttgagtggacggcagacagctatatttagtggtgcctcgacactcacgaaccgccagcgtggcgcctggatcttgcccagctgccagctccccccaccaggactgtggttcctcagtttctcctgccagccccggctcatctcagggcaaagctatagacatggtagatctcatcggggaggttctcctgcctctcctcggccaggaggctgaggcctgcactgcagatgatcctgcggaccacgtcaaggtcccggcacacgctgctgtccacgtcgtccagaatcacgccctcctgggccatgttgtctttgatgacgatgatgccgttggggcggaggctgcccttgcagcgccgcaggaactcggccaggtgctgatcggtgaggtggcctatcacccactggatccagatcacgtcgtaagagtccggctccggggtgaagtcctggagcccacaacagaagtagttcctcaccctcttgccctcctcccccaggtaggtcttggcttgaaccaggaagtcctccgttatgtcgaccatatccacctctctgaacagcggcaggagcagccgcttggtgatcctcccaatgccagctccacagtccagggcacaggacgttcctgtcttgttcgggccttccctcaaaaacctctgcagaaacttccgggagctgttgatgtcgatgctggagatgtggccataccccccaagcatgccgtccaccgtgggtgggatttgtttccagtaggtcttggccttggaatagaattgcttctcgtcttctatcacctcgctcgtcatgctgtcaccaaccacggctctactcaagcaccacgatcagcaaccgcgactctctccgggcgggggctcccgggaccgagagaagaagatggggaagaggaagggagggcggcggcggcggagacgccacaagccaaccgcagctccgccagaccacgaccagacgcgacagctcgcgcacgcgtggtcgacgatatcccgggaattccggaccggtacagcctgctttttgaaccactgttctatagcacaatgcgggggggcggggt

SEQ ID NO: 76039 - DNA, 658 bp, Homo Sapiens
gaaagcccacagtctaacagtattgaaacatcctgctgtattagttcaaccacatattatctcttcctgtgctaaagcagtctttattattttcatatttaattgaaacaaagagcagctagcaatttcatagaaaattaatttgttttttctgatgtgtctgcaactgtgtataatacagacatttcacattgtttccaaaagtgaagaacactcatttaatatcttcaatgttttaagttagaaggggtggatcttttcctttggttggtgattggtttggtttatacttgatgagttatgctagactgattgtttagagagagcagtctctttattacacaggctcagtttgttgggatgctcagggaacagagttttctggttaaccagaaaacccccttttttcctattttaattctggttgaaaaccatgataaaatagactttcttagcacagtatggtagatataacttaactgctttttgattggggatcatttagggcttcaggatcacgatttctaaacatcagggatcatatggttgcagatgccgatgctataagtaatttggccggatgcagctcctaaggtaaagcagggtactttccctggaatttcctttttaaataaatatctgtttctttgcatgtaaa

SEQ ID NO: 76040 - DNA, 683 bp, Homo Sapiens
  misc_feature (355)..(398): n is a, c, g, or t
  misc_feature (550)..(563): n is a, c, g, or t
gcggccgcgccctggtcgtgcgcaaggtgccccccggctactccatcaaggtgttcgacttcgagcgctcgggcctgcagcacgcgcccgagcccgacgccgccgacggcccctacgaccccaacagcgtccgcatcagcttcgccaagggctgggggccctgctactcccggcagttcatcacctcctgcccctgctggctggagatcctcctcaacaaccccagatagtggcggccccggcgggaggggcgggtgggaggccgcggccaccgccacctgccggcctcgagaggggccgatgcccagagacacagcccccacggacaaaaccccccagatatcatctacctagnnnnnnnnnnnnnnnnnnnnnnnnnnnnnnnnnnnnnnnnnnnncttgtaattatggagtcatttttacaatgtaattatttatgtatggtgcaatgtgtgtatatggacaaaacaagaaagacgcactttggcttataattctttcaatacagatatattttctttctcttcctccttcctcttccttacttttnnnnnnnnnnnnnnaagaaaatgatacagcagagctaggtggaaaagcctgggtttggtgtatggtttttgagatattaatgcccatacaaaaagctaataccagtcactcgataataaagtattcgcattata

SEQ ID NO: 76041 - DNA, 514 bp, Homo Sapiens
  misc_feature (360)..(398): n is a, c, g, or t
gcggccgcgccctggtcgtgcgcatggtgccccccggctactccatcaaggtgttcgacttcgagcgctcgggcctgcagcacgcgcccgagcccgacgccgccgacggcccctacgaccccaacagcgtccgcatcagcttcgccaagggctgggggccctgctactcccggcagttcatcacctcctgcccctgctggctggagatcctcctcaacaaccccagatagtggcggccccggcgggaggggcgggtgggaggccgcggccaccgacacctgccggcctcgagaggggccgatgcccagagacacagaccccacggacaaaaccccccagatatcatctacctagatttannnnnnnnnnnnnnnnnnnnnnnnnnnnnnnnnnnnnnncttgtaattatggagtcatttttacaatgtaattatttatgtatggtgcaatgtgtgtatatggacaaaacaagaaagacgcactttggcttataattctttcaatacagatatat

SEQ ID NO: 76042 - DNA, 526 bp, Homo Sapiens
  misc_feature (354)..(396): n is a, c, g, or t
ggggccgcgccctgtgtcgtgcgcaaggtgccccccggctactccatcaaggtgttcgacttcgagcgctcgggcctgcagcacgcgcccgacccgacgccgccgacgcgccctacgaccccaacagcgtccgcatcagcttcgccaaggctgggggcctgctactcccggcagttcatcacctcctgcccctgctggctggagatcctcctcaacaaccccagatagtggcggccccggcgggaggggcgggttgggaggccgcggcaccgccacctgccggcctcgagaggggcgaatgcacagagacacagcccccacggacaaaaccccccagatatcatctacctagannnnnnnnnnnnnnnnnnnnnnnnnnnnnnnnnnnnnnnnnnncttgtaattatggagtcatttttacaatgtaattatttatgtatggtgcaatgtgtgtatatggacaaaacaagaaagacgcactttggcttataattctttcaatacagatatattttctttctcttcc

SEQ ID NO: 76043 - DNA, 807 bp, Homo Sapiens
tggaaggcatggagaaaactggattcaaagacctgacgccagcatgtctccggacgccaccaagccgagccactggtgcagcgtggcgtactgggagcaccggacgcgcgtgggccgcctctatgcggtgtacgaccaggccgtcagcatcttctacgacctacctcagggcagcggcttctgcctgggccagctcaacctggagcagcgcagcgagtcggtgcggcgaacgcgcagcaagatcggcttcggcatcctgctcagcaaggagcccgacggcgtgtgggcctacaaccgcggcgagcaccccatcttcgtcaactccccgacgctggacgcgcccggcggccgcgccctggtcgtgcgcaaggtgccccccggctactccatcaaggtgttcgacttcgagcgctcgggcctgcagcacgcgcccgagcccgacgccgccgacggcccctacgaccccaacagcgtccgcatcagcttcgccaagggctgggggccctgctactcccggcagttcatcacctcctgcccctgctggctggagatcctcctcaacaaccccagatagtggcggccccggcgggaggggcgggtgggaggccgcggccaccgccacctgccggcctcgagaggggccgatgcccagagacacagcccccacggacaaaaccccccagatatcatctacctagatttaatataaagttttatatattatatggaaatatatattatacttgtaattattggaagtcatttttacaatgtaattatttatgtatggtgcaatgtgtgtatatg

SEQ ID NO: 76044 - DNA, 478 bp, Homo Sapiens
  misc_feature (355)..(398): n is a, c, g, or t
tgcggccgcgccctggtcgtgcgcaaggtgccccccggctactccatcaaggtgttcgacttcgagcgctcgggcctgcagcacgcgcccgagcccgacgccgccgacggcccctacgaccccaacagcgtccgcatcagcttcgccaagggctgggggccctgctactcccggcagttcatcacctcctgcccctgctggctggagatcctcctcaacaaccccagatagtggcggccccggcgggaggggcgggtggaggccgcggccaccgccacctgccggcctcgagaggggccgatgcccagagacacagcccccacggacaaaaccccccagatatcatctacctagnnnnnnnnnnnnnnnnnnnnnnnnnnnnnnnnnnnnnnnnnnnncttgtaattatggagtcatttctacaatgtaattatttatgtatggtgcaatgtgtgtatatggacaaaacaagaaagac

SEQ ID NO: 76045 - DNA, 1025 bp, Homo Sapiens
ggccgcggctgtaggctcttgtttatttttttgctgtgtttacagcttgttaatgctctactgtctttgtttcaagagagattgttcactgcccagctcgttttgtgtcctgagccctatgcccagcccaccttataaatcatgcctgtttagatgtttgattttgttctgtttgctattgttatcttaaaggtgtataactctgacatgccagacatcaaattaagctcaaattaagctctcgtttaaatgtttaaacacctaatttatattctaattgatcccagccactgatgcatgtactttagctacttctgctaaataagcatattaattttccacatcaggccatcagatcttgagaaccaacagttatctagaattccgtgtctactaatgtttcacctgcatgcagccttcattaattttgtagcaaaatataaagtgatcattatgtagtttctggattaaaaaaatttgtgtgtgaagttgctttgtaaagtgcatgtggaattaatgggacagtgtgccctttgtgttagatgttagagcaaaagaaagggcttatagtgttagtattggagcactttgaagatagatattttcagaaaagatgtaggatttaaaagttaaattttaaattttagaaaaagatatgatggcaattggaaatagtcacaatgaagttcttcatccagtaggtgtttaacagtgttattttgccactggtaatgtgtaaactgtgagtgatttacaataaatgattatgacgtcacagaagaacctcctgcctatttctgttctcgagggccaaatccctatagtgagtgttataattcgtatcatgtcatactgtttctgtgtgaattgtatccgtcacattcacacacataccagcggaatcaaagtgcactctgggtgctatgatgtctactcacatattgcttggttcatgccgcttcagtccgaacctgctgcattgataagatcgcacgcccggaagcgtttttctgggtctcgctccg

SEQ ID NO: 76046 - DNA, 741 bp, Homo Sapiens
  misc_feature (60)..(60): n is a, c, g, or t
caggagttagatcacttatccgtctctccctggcccacccttctctgtcacatgcttctntgctgaccctgatacacaccacactgtcttctctacctggaagttgtattccccatacccacatggctcacttcttcacttcattcaagtctctgctcagatattaacctcttcagagagcccttccttcacacactgtcttgcatagcagcctcccctacaagttgtcttctttctccttaacttttgtgatggttaattttaggtgtcagcttgactggattaaagaatacctagagaactggaaaggcattatttgttagtgtgtctgtgagggtatttccagaagagattgatatatgactgaatggactaagagggaaccatccgccctcaatgtgcaggtggcttgaaacaaaaacggaagaaaggcaaattggtcttactctcttggagctggaatacacgcttccattcctgcccttggatttcaggatcccaggctgttgggtctcaggactccaggacctacatcagcctttccgtcaccgctggggttctaaggcctttgggctaagaattatatcatcagctttcctgattctgaggctttgggacttggactgagccatgctaccagtatccctgggtctccagcttgcagacaatctgctgtgggacttctcagcctctgtaatcatgtgagccctttctaactcataaaccctcttttatatatct

SEQ ID NO: 76047 - DNA, 732 bp, Homo Sapiens
aaataaagagatatcttgacattagaaaggtgatcaaactattaccatttcattaagcacaaaaccaggcaggttttagtagaaataaggataaaggattacaccacagcaacatgggacctgatcatagtaccaaagtcttcaggtaaggtgtcaggctcctaagtcttattaccaaaaatagctcaaacaaaaaccgagcttatataaagattaagaggagaaattctgcaataacatatccaaaaagattaagcaggtttcagatctacatgaacttgaagcctccagttccactgcttatgttcccaatgatttagctaacaatgcgtaacagctctgacatcctctgtcatgctttgattctgcatacaaaatttcttctgtctctgagggatatccagcccatctcccttcctgaactgactgaccaacatagtatcgtatcacatcacccttgaaatcagggcccttttcctttaatgtgggaccctggactccattttatccaagaaaaagtctgcattattagctaataacagaaggctactaatcactgcccttgtatttatatcctttgcaacacctaaaacctcccatgttctgttttatttcagtgggtcactacaagctgctggagcaaagacttggtgggtgggtaacttaacctcttcacagaggataaaaaatgcttgtgagtatgacagaagggaataaacaggcttaaagggt

SEQ ID NO: 76048 - DNA, 629 bp, Homo Sapiens
  misc_feature (45)..(45): n is a, c, g, or t
tgttgtctcgtctgattggaggctgaatagtagatggaatggggngacagtgtgcctggtgtgaggaagacgtaagatccccaatttggaaagcatgcccccctcccttttagtagaagcccatggttgccctttgccaaactggggaggaggcaatgagccttggtggaaggaacctctctgttgatatttaaagaagtgagggctgtgggtattcattgttagaaatgccaatttcactttgaaaccatagtccaagtctctaggttggtagaagggaaaggaaggaagtggtcccagtgattctagatctggttgggaaacttctgcctcatgactctgtcctttgagtcctttggacagcagcacaaaacataacaatttttatttttaaacagacccattctttttgatcccacaggagctgtggttgggtcggccgtagccccgggatgtggtttaagtggattactgcctagctgagccaaaatgtttgcttgtacctgttggaccactacagcaaaccgctgcttacagtgcattgtgtatttctgtagtactgttttgcattttccatagagacagaaaactttgcaagtcaatcactgttgttcccatggtactgtaag

SEQ ID NO: 76049 - DNA, 632 bp, Homo Sapiens
  misc_feature (407)..(445): n is a, c, g, or t
gcacgagggaaaaaaacacacatcaattaaaggagacaaaaagaggcagagcgagtagagagcagccctcattcaccacctggtcccagacgtgcttcagtcctcgtcctctctttgtggctggctcccagccttctctttcctcttgaggatacttagggtaaactggatccttcctgctcaaggatcctcatttgtatacctagtggaaaggactctgaactcagaggagtcactgttcctttttttaggttagaaattaacagcagggaaatgccatcttattacctgagacgaccagcactgggagttaggtacggtctgaagttatgtctagataagacttcagacgtcctgggattgaaagaatgtgtgtgaaggggtagaatttgtgcggtaaagacttnnnnnnnnnnnnnnnnnnnnnnnnnnnnnnnnnnnnnnntgcttccttatctggaagcctttctggattaatccagtgatggtcccacctttagtgtttgagctttgtcattgcttgtctccctggcatgtgccagttatagactgtccagcatccaagacgtttcggttatgtcgggtcctcagatcgcctctgacttgttaccacaacaaatcattttgatttc

SEQ ID NO: 76050 - DNA, 732 bp, Homo Sapiens
aggaagatatgatcatgctgtacaacagggtagaaaatgataaaaatagactattgactgacccagctaagaatcgtgggctgagcagagttaaaccatgggacaaacccataacatgttcaccatagtttcacgtatgtgtatttttaaatttcatgcctttaatatttcaaatatgctcaaatttaaactgtcagaaacttctctgcatgtatttatatttgccagagtataaacttttatactctgatttttatccttcaatgattgattatactaagaataaatggtcacatatcctaaaagcttcttcatgaaattattagcagaaaccatgtttgtaaccaaagcacatttgccaatgctaactggctgttgtaataataaacagataaggctgcatttgcttcatgccatgtgacctcacagtaaacatctctgcctttgcctgtgtgtgttctgggggaggggggacatggaaaaatattgtttggacattacttgggtgagtgcccatgaaaacatcagtgaacttgtaactattgttttgttttggatttaaggagatgttttagatcagtaacagctaataggaatatgcgagtaaattcagaattgaaacaatttctccttggtctacctatcaccacattttctcaaaatgaactctttgttaaatgtccatttctattcaggtaacttctttttcattaaacatggatcaaaactgac

SEQ ID NO: 76051 - DNA, 475 bp, Homo Sapiens
  misc_feature (475)..(475): n is a, c, g, or t
ttgacctgatgcgaaaggaagagctgtttgactatctcacagagaaggtgccctctctgaaaggaaaccaggtccatcatgcggtctctgctggaagcagtgagctttctccatgccaacaacattgtgcatcgagatctgaagcccgagaatattctcctagatgacaatatgcagatccgactttcagatttcgggttctcctgccacttggaacctggcgagaagcttcgaggtagacagtgagctcggtaagggctcatctcatttgccacttggcaaatcaatgcaacttggcattcaagaaatacttggtgtaggaatgaatttcccaacaaagtcagtttcaattcggggctgttaaaatctcctggaagtgtgccatggaacaaggttcagaaagtactggaagaattggtgcccgagtggtagaacaaactaaaaatacagacttgagccaagcgtggtggcacgn

SEQ ID NO: 76052 - DNA, 1889 bp, Homo Sapiens
  misc_feature (638)..(668): n is a, c, g, or t
ctggtaccggtccggaattcccgggatccgccgccgggggttaaggtgagcgactgcaggcaaacccggcgacagcgcagctcgcgtcgaccctggctcctctgcctgccccctcaggcccccgcctccttcaggatgacgctggacgtggggccggaggatgagctgcccgactgggccgccgccaaagagttttaccagaagtacgaccctaaggacgtcatcggcagaggagtgagctctgtggtccgccgttgtgttcatcgagctactggccacgagtttgcggtgaagattatggaagtgacagctgagcggctgagtcctgagcagctggaggaggtgcgggaagccacacggcgagagacacacatccttcgccaggtcgccggccacccccacatcagtgaggctgtcttccttgctcctgttagcagacgacctcccacctcctgctggccctgcccatagcccacttccgccaacattgcctccacacctctcctcccttcattccactaaagagtggccatccgttgggcgcccactgcctcctctggttctcctttcttcccagtaacagcccgctgctgtcccagggtggccaagccccgttaatgtgcatccactcctttccnnnnnnnnnnnnnnnnnnnnnnnnnnnnnnncctagtcaccctcatcgattcctacgagtcttctagcttcatgttcctggtgtttgacctgatgcggaagggagagctgtttgactatctcacagagaaggtggccctctctgaaaaggaaaccaggtccatcatgcggtctctgctggaagcagtgagctttctccatgccaacaacattgtgcatcgagatctgaagcccgagaaatattctcctagatgacaatatgcagatccgactttcagatttcgggttctcctgccacttggaacctggcgagaagcttcgagagttgtgtgggaccccagggtatctagcgccagagatccttaaatgctccatggatgaaacccacccaggctatggcaaggaggtcgacctctgggcctgtggggtgatcttgttcacactcctggctggctcgccacccttctggcaccggcggcagatcctgatgttacgcatgatcatggagggccagtaccagttcagttcccccgagtgggatgaccgttccagcactgtcaaagacctgatctccaggctgctgcaggtggatcctgaggcacgcctgacagctgagcaggccctacagcaccccttctttgagcgttgtgaaggcagccaaccctggaacctcaccccccgccagcggttccgggtggcagtgtggacagtgctggctgctggacgagtggccctaagcacccatcgtgtacggccactgaccaagaatgcactgttgagggacccttatgcgctgcggtcagtgcggcacctcatcgacaactgtgccttccggctctacgggcactgggtaaagaaaggggagcagcagaaccgggcggctctctttcagcaccggccccctgggccttttcccatcatgggccctgaagaggagggagactctgctgctataactgaggatgaggccgtgcttgtgctgggctaggacctcaaccccagggattcccaggaagcagaactctccagaagaagggttttgatcattccagctcctctgggctctggcctcaggcccactaatgatcctgctaccctcttgaagaccagcccggtacctctctccccactggccaggactctgagatcagagctggggtggaagggagccattctgaacgccacgcctggcccggtcagtgctgcatgcactgcatatgaaataaaatctgctacacgccagggaaaaaaaa

SEQ ID NO: 76053 - DNA, 1286 bp, Homo Sapiens
gcaggagccgaaactcagagtccttcaaggcctatagccaggtgatggaggacgaggagaaggcagtggagatcttgggcaacacggaagctgctcatcctccatcccccatccgctgctgctggctccgcctccgctgcttggcagctactagcattatctgtggctgctcttgcctgggagtcatggctctggtgtttgccatcaagatgccactcggtgattggccgtgtctgaagccgcgccccggcgtcgcgttgcagccttaggtccagccgagcgccgactcacgccccagccccaattgggcggccggtttccaattggaagggcttctgagcctcagtcttcgggcggcgctgaccattggcgggcaggaatggaggcggagccttgggtcgtcgcccgccgccgggggttaaggtgagcgactgcaggcaaacccggcgacagcgcagctcgcgtcgaccctggctcctctgcctgccccctcaggcccccgcctccttcaggatgacgctggacgtggggccggaggatgagctgcccgactgggccgccgccaaagagttttaccagaagtacgaccctaaggacgtcatcggcagaggagtgagctctgtggtccgccgttgtgttcatcgagctactggccacgagtttgcggtgaagattatggaagtgacagctgagcggctgagtcctgagcagctggaggaggtgcgggaagccacacggcgagagacacacatccttcgccaggtcgccggccacccccacatcatcaccctcatcgattcctacgagtcttctagcttcatgttcctggtgtttgacctgatgcggaagggagagctgtttgactatctcacagagaaggtggccctctctgaaaaggaaaccaggtccatcatgcggtctctgctggaagcagtgagctttctccatgccaacaacattgtgcatcgagatctgaagcccgagaatattctcctagatgacaatatgcagatccgactttcagatttcgggttctcctgccacttggaacctggcgagaagcttcgagagttgtgtgggaccccagggtatctagcgccagagatccttaaatgctccatggatgaaacccacccaggctatggcaaggaggtcgacctctgggcctgtgggggtgatcttggtcaacactcctgacttggctcgcacccttctggcaccggcggaagatcctgatgttacgcattgatcatgggaggccaggtccagttcagtccccagtggat

SEQ ID NO: 76054 - DNA, 120 bp, Homo Sapiens
cccacccccatctcccctaccctagcccaccctagggcctctacccagcgggaggggttgaagaccaggcctggttttattagaattcattttgtaataaaagccttttttagtggtgaa

SEQ ID NO: 76055 - DNA, 955 bp, Homo Sapiens
cttaggctaggtacgaggctgggtgttaaattcggcacgagggaggcgcgggagggcagcgagaggttcgcgggtgcagcgcacaggagaccatgtccgggggcagcagctgcagccagaccccaagccgggccatccccgccactcgccgggtggtgctcggcgacggcgtgcagctcccgcccggggactacagcacgacccccggcggcacgctcttcagcaccaccccgggaggtaccaggatcatctatgaccggaaattcctgatggagtgtcggaactcacctgtgaccaaaacacccccaagggatctgcccaccattccgggggtcaccagcccttccagtgatgagccccccatggaagccagccagagccacctgcgcaatagcccagaagataagcgggcgggcggtgaagagtcacagtttgagatggacatttaaagcaccagccatcgtgtggagcactaccaaggggcccctcagggccttcctgggaggagtcccaccagccaggccttatgaaagtgatcatactgggcaggcgttggcgtggggtcggacaccccagccctttctccctcactcagggcacctgccccctcctcttcgtgaacaccagcagatacctccttgtgcctccactgatgcaggagctgccaccccaaggggagtgacccctgccagcacaccctgcagccaagggccaggaagtggacaagaacgaacccttccttccgaatgatcagcagttccagcccctcgctgctgggggcgcaaccaccccttccttaggttgatgtgcttgggaaagctccctccccctccttccccaagagaggaaataaaagccaccttcgccctagggccagaaaaccacgaacaagaagcaaaaaccggaggcattaagtccggtgcaacaggaggagacaggcagggcatcgggtcca

SEQ ID NO: 76056 - DNA, 1029 bp, Homo Sapiens
gtcttggcctccttcatgagagtctagtgccatgtcctgtcccatgatctggaccctgggactgtcttggcatcttaactgcagtttcaatgaggcagagggcaaagagagaccaagatcagaggggttcattatacccctggctagagaacccagctactgacatgcaagcagcttggggctggctggacacaggtactaggcccattgtttccaggtgaagctttcatcacagaacagtgttgtctccacctggccttagatggcacgccatgattcgggcctggatagactgcctgcgtccttaccactgatctggccaagaatgaggccctcccaacactttcactccctctccaagccttgatgagacctccacttatttaggcctcatgtgctttgaagaagctttgagagccaatgtgtcttccacgggtctcttttttgctacaagtaatcagccccatgtgttctcttaaactgagaattgcacctgggcaattcctgttttctaaggtggtctctgctgctatttaacaacccagagtaggcctctgtgaggcttcagtggcctcagaaaccagagggtccagatagggggcctgcttgggccctctgctgccaactgctcaaacctgctttagctccagccacttgtggcaaacaacctcgtttccttacaaattccagcatgtgactttggtgccgttacttgtgaaaaatctattctgttgtctttgatgtgtccaagaaaattcgtgtagtttacgtaaaaatatctgactcacaagaaagccaactgtatgtcttgtgatgggacagttcataatgtagttgctagaccactttacaaattgttcttgtcaccagatgtgttcagacattgctgtgcaattgttggggagggtagggggaaaggcgagaggagatacttattggtctttttgtttaataccttccccaagaggggacagtctggccaacttgctccagtaatgcaataaagacattgcaataaagtaaaaaaaa

SEQ ID NO: 76057 - DNA, 672 bp, Homo Sapiens
ctttgcactcttagtaaaatctgtgaggaatatttttactcctataattcttcttttgtgttctcctctgccctcttccctttttacacgttaccaacaaaatgggcaatgaattggtagttttagcctctcaacccagaccctccttatcccccgcaacctctattccctcacctcactccgggtaagtctggtttgtgtacctttccttcctcatttcagcacttattcccttttacctgctcttggcaaagggtcagagctgatgtttttgttaatagccacagtcacctgccagacagaaatgttgcagggagtctaaaaccaataacttgtaaccttgcctaaatcaggaagggttgggttataatagaggaataaacagaacacattctgagtgacatgtgtcttctctttctagacggggaaatcctttacatttatgcaaagagcgattcaagaagattcagaagctctggcaccaacacagtgtcacagaggaaattggacatgcacaggaagccaatcagacactggttggcattgactggcaacatttataattattgcaccaccaaaaaacacaaacttggatttttttaacccagttggctttttaagaaagaaagaagttctgctgaatttggaaataaattctttatttaaactttc

SEQ ID NO: 76058 - DNA, 805 bp, Homo Sapiens
aaatggagttccttccccacccgacattcaagttcctggaacaagccattttgaacatttatgtagctatctttccctaccaaacaacctcatttgcctttttcaagaaaatagtgagataatgaattcactgattgaaagttggtgccgtaacagtgaagttaaaagatatctagaaggtgaaagagatgctataagatatccaagagaatctaacaaattaataaaccttccagaggattacagcagcctcattaatcaagcatccaatttctcgtgcccgaaatcaggtggtgataagagcagagccccaactctgtgccttgtgtgcggatctctgctgtgctcccagagttactgctgccagactgaactggaaggggaggatgtaggagcctgcacagctcacacctactcctgtggctctggagtgggcatcttcctgagagtacgggaatgtcaggtgctatttttagctggcaaaaccaaaggctgtttttattctcctccttaccttgatgactatggggagaccgaccagggactcagacggggaaatcctttacatttatgcaaagagcgattcaagaagattcagaagctctggcaccaacacagtgtcacagaggaaattggacatgcacaggaagccaatcagacactggttggcattgactggcaacatttataattattgcaccaccaaaaaacacaaacttggatttttttaacccagttggctttttaagaaagaaagaagttctgctgaatttggaaataaattctttatttaaactttaaaaaa

SEQ ID NO: 76059 - DNA, 967 bp, Homo Sapiens
  misc_feature (88)..(88): n is a, c, g, or t
  misc_feature (155)..(155): n is a, c, g, or t
tttgtttgatgtggcgatacattcacacagaacagtttgcatgtacgaattatacgctcattaggattgccctcgagcccagatcgcnacgagcctccatgcctggcgtacgagaagctgaagtgcatcatgacaggagcctcgccacagataanggacagctgttgacccagccgctcgctgtgtactcatacctgcacattgccctcatgcaagccctgggagctttccttgtgtatttcaccgtctatgcacaagaggctttctgccccgcactctcattaacctgcgggtagaatgggagaaggactacgtgaatgacttgaaagacagctatgggcaggaatggacaaggtaccagagggaatacctagaatggacgggctacacggctttctttgttggcatcctagtccagcaaatagcagatctgatcatcaggaaaacccggaggaattccatcttccagcagggtctcttcagaaataaagtcatctgggtggggatcacctcacagatcatcattggtctgatcctctcctatggcctcggaagtgtcacagccttgagtttcaccatgcttagggctcagtactggtttgtggctgtgccgcacgccatcctgatctgggtgtatgatgaggtgcggaagctcttcatcaggctctaccctggaagctggtgggataagaacatgtattattaagaccacctcccttcctatgtctctcagcagcacgttggggcacacttgttcatcttctgaccgtttgctgggctattcccctgcagtgcagacatcgtcaaaattcagacaagaggaaattttcatgcagaaagctgtatgcaggatgctcactgatgttttgcactttaaaactgaaattcaactctttatataggattttcttttctatctccatctcctcattaaaaaatacgtacatttcgaggtaatggtataggg

SEQ ID NO: 76060 - DNA, 768 bp, Homo Sapiens
tgcggccgctccaacatcagaataccaaaggaccagacggctgactttggcctggcccgggtcattgaggacaacgagtacacggctcgggaaggggccaagttccccatcaagtggacagctcctgaagccatcaactttggctccttcaccatcaagtcagacgtctggtcctttggtatcctgctgatggagatcgtcacctacggccggatcccttacccagggatgtcaaaccctgaagtgatccgagctctggagcgtggataccggatgcctcgcccagagaactgcccagaggagctctacaacatcatgatgcgctgctggaaaaaccgtccggaggagcggccgaccttcgaatacatccagagtgtgctggatgacttctacacggccacagagagccagtaccaacagcagccatgatagggaggaccagggcagggccagggggtgcccaggtggtggctgcaaggtggctccagcaccatccgccagggcccacacccccttcctactcccagacacccaccctcgcttcagccacagtttcctcatctgtccagtgggtaggttggactggaaaatctctttttgactcttgcaatccacaatctgacattctcaggaagcccccaagttgatatttctatttcctggaatggttggattttagttacagctgtgatttggaagggaaactttcaaaatagtgaaatgaatatttaaataaaagatataaatgccaaagtctttaccaaaaaa

SEQ ID NO: 76061 - DNA, 729 bp, Homo Sapiens
acatcaacaagagaatgagtggaggcgagaagaaatcgcttgtaaaggctatgtgattccctgatgacagatctgaggaagaatgaagaggctttgaagataaaggtatcttcacctcgccaagatcaaccacatcctgcagaacccttcattcattcagcaaacagccaggctttatgctaggccctggggaaatggcaattaaggagactcagtccctatccttacagaacaccccatctgacacggaaatagctcctggcccgcaatgtggtaagatgcagtaatacgtgcaaggcccctgacttagtggcaatgatgtttaagccgagatctgaaggataactaacaacggcgtgccagagaaaagagtagcgggtggagagaggaggccaggggaatatttctgggcttggtaagtaagccaggtccctgccagacatggactgagaagagcaaagccaggagtgacagctgatgattattttttaactgaggaaggaagatccttgagaacggaacctcttgggaccttctacccagaacaccagagcacctcactgggatcagagccaggccatcgggtggattaagcaactaaaattgattgtcctgaaccatgagtctgtctgtttatggggagagaaactttgagatgaattaatccacaggtccaatgggactttgacattttaatttgtagaaataaaacttgcctttgattttgcc

SEQ ID NO: 76062 - DNA, 1401 bp, Homo Sapiens
  misc_feature (63)..(63): n is a, c, g, or t
  misc_feature (97)..(97): n is a, c, g, or t
  misc_feature (125)..(125): n is a, c, g, or t
  misc_feature (156)..(156): n is a, c, g, or t
  misc_feature (1300)..(1308): n is a, c, g, or t
  misc_feature (1338)..(1351): n is a, c, g, or t
cattttccgtcttttttggattggcgaaaattccccagaagttgactgtcggattatggctcnttagattgcctgggccagattgcaggagccatgntgtccttttttcccacaatccttgcacnttatcctgttgtgccatgtcggccctggctnaagatgatttgacgcctcatccctccgccagcatgtcctccgcagctgtgcagcctgcagtaactgctgtaggagctcagacaccaagctggcctgcagaggaggggcacagtaggacacagtgactgcccaggtgtccacacacctgtaggcctctgagccagcgtccagggtacaggtgcgggtggtggggatgaaggcctgaccagggagggagaagcaggtttggagaggaccctgtgcccaccctgacagacaccctggctggccctgactgactgtattctctggccacattcaagtcccccattggtgggggcagagaagtaggaccaggccatccttggctccagagctcgaagaccccaagacagccctctgctctcagcggcgccacagagagcctgggctcagccttctgcatcaggacatggcctcgtccactgagggcacgatttaaacatttgacatcagaagctttatttgtaaacctcacacagataaggaccaagggctggcggtgtggccagaggacaggggaagctgaaggccccgtgcttgagctcggcagtcctgctccttgcagtgaagccaccatgggtgaccgtccagcctcacccggtggcctgcacagtgagggaagggcttcagggccatctgctcccagggcaggggacaggccaccaaggacctttggcaaatgaaggtttacatttctgtagtttgtttgttttagagcttaatttgtagttttttagctattaaaaccatttgaatttttaacgacctgatgagggcatcaggtaaattaaaggattttgggaagattcttattttcaattctaatatctgacagatgccatcaagaataagcattaaggtataaaaaatactgtgtgtataaaacaatgccaaaccacattcctacagcaaatgcactgtgccatttataaccctgacatcacctcccaaggctctcaaggaagatttattttaaataacttaaatagaagtcctagatgatattgtttaggaatttaagagggtggtggatatggtcctgtgaatagcacttcccctgaagccagctcatggtctgttcatttggtttaaaaatgagcttgtattttgcagaagcccaacnnnnnnnnngtgataaaagtgttgttggtataaattacnnnnnnnnnnnnnntacaaaagtcataagactactagtaaaaaatgttcaatcaatgccgtcac

SEQ ID NO: 76063 - DNA, 908 bp, Homo Sapiens
gtatcggtgacgcgggtgtttccccagtttgtggcccctgagtgctggggggggaccgcggtgactgaacctagaaggtggagaggaatcgtcctcggtgcccagaggcggctctgcagccccgtgacggcgaccactgctcccgggccgtgcttccccaagtagtccgatggcagcggctgcgccgaggcgcccgactcagggcactgtgacctttgaagatgtggctgtgaacttttcccaggaggagtggtgtcttcttagtgaggctcagaggtgcttgtaccgtgatgtgatgctagagaacctggctctcatatcctcgctgggttgttggtgtggatcaaaagatgaggaggcaccttgtaagcagagaatttctgtacaaagagagtctcagagcaggactcctagggcaggtgtttctcctaagaaggctcacccctgtgaaatgtgtggcctcatcttggaggatgtttttcactttgctgaccaccaggaaactcatcacaagcagaagctgaacaggagtggagcatgtggaaaaaacttggatgacactgcataccttcatcagcaccagaagcagcatattggagagaaattctacagaaagagtgtcagagaagcatcgtttgtaaagaaacgtaagctcagggtgtcacaggagccatttgtcttccgcgagtttgggaaggacgttctgcccagttcaggattgtgccaagaagaagctgctgtagagaagacagacagtgaaactatgcatggcccaccctttcaggggggaaaaactaattacagttgtggaaaacgcacaaaagccttcagcttcccctgtcctctggccacaccgccagcccttggtccttatctgtgtgaggtttacaaataaagcttctgatgtc

SEQ ID NO: 76064 - DNA, 1158 bp, Homo Sapiens
gtgtacacacgtatgcatatgtgcctgtgtggtggggtctggccaagtttctaaagtccctcttggttctctcttttccaggcctgatcacttgaacggacatatcaagcaggtgcacacttctgagcggcctcacaagtgtcaggtgtgggttgggagcagcagcggcctgccgcccctggaacctcttcctagcgacctgccatcatgggactttgcccagcctgctttgtggaggtcgtcccattcggttcctgacaccgcctgttccctttcgtctaaaaaaatcattcccagcccttgaaaacctgggcccagcacactccagcaacactctcttctgcccagccccgccgggatatctgaggcagggctggaccaccccagagggcagcagggcctttacccagtggcctgttggctagcctgggcctccctggagagggttgacagtggaagggaacaggaggggcatttggcctgagacccctgcttttgggagaggctagcagggtggttcctgcccagcatgcccagctcctccctgggtgactcggagtctttcccatgtcagagcccccaaatgggggtagcaaggagcacctttctggaaccccctatagcatccaagtttctttctgggctctcttgccttttcccccctttcacagatggcacccctgggcatctgtccttgcctaggtgattttggaggttggtgccttcctgggaactagccaccagcttatctgcttcccttcccctggcatcacttcccataggcctggggtttctagactggggcctggccacccctttccccactccacgagtgagtcggcctccagagaagactggcacaattccaactagagtcaacccatgctgccctctgcccttcccactcagatctagatcctgctttcatttctggctagtgaagtagacttttgtgtttttgaggtttattagcaggtctgctcaggaaccaaactaatgagtagctttatattgggccaccccaatatatggctttgggggctgaaaaagcagatgtagaccccctccctcggatccttattggtgtgccctttagcactccgcagactctgcggggtgaacaggagtgatgataaaatttttcattctaacaaaaaa

SEQ ID NO: 76065 - DNA, 654 bp, Homo Sapiens
ctctaactattgctgagaccaacaacgagcttgaagcccagagagttgcaacggaatttgccttcaggaagcggctgcgggagatggagaaagtgtacagtgagctcaagtggcaagagaagaataccttggaggagatcgctgagctgcaggaggacatccggcacctggaggaggatctgcgcacaaagctcctgagcctgaagctgtcccatacccggctagaggccagaacctaccggcccaacgtggaactctgccgggaccaggcacagtacggcctcaccgacgaggttcaccagctagaggcaaccatcgctgccctgaagcagaagctggcgcaagcacaggacgcactggacgccctgtgcaagcacctggcccggctgcaggctgacattgcctgcaaggccaactccatgctgctggacaccaagtgcatggacacgcggcgcaagctgaccgtgcctgctgagaggttcgtgcctgaggtggacaccttcacacgtaccacaaatagcaccctgagtccactcaaaagctgccagctggagctggcctagccttggaggactgcaggaggagggcagggttgggtgggcaatggaaggagggaggagagaaatgaatggaataaatgcagaggatctcaaa

SEQ ID NO: 76066 - DNA, 1136 bp, Homo Sapiens
cggcaacattgacccagaagcaggtggtggattacttgactcatactcgggtataaagcctggtgacctcgatgccaaaatttcctccaagcacctaacaactctcaagtctacctacttaaagcttcgttttctcattgacattggagtcaagtttgtgggtcatggcctgcagaaggacttccgggtcatcaacctgatggtttggcagggctcttttaagagtcttcttgtgagagtgggcccctcagggtatacattgtgcctttagagaatggggaattataggtcccctaccttaagtctccccctcttttatccttgccaggtgcccaaggaccaagtccttgacactgtctacctgttccatatgccccgaaaacgaatgatttccctgcgattccttgcttggtactttctggatgcagctgtcttctcctcagtgctggcgctctgactacccttcccaaagaaccacggccctctccctttactgttctatagccccagaactgggagatggcttcctaagttggctataccttgtccacttccagtactggacgtgctcagggtctagggtcacagatggtgctattaattgaactggaacacagcagaattgttgcaaaggttctaggagccagattcattccttcttcattctttgcaaaacagtggtacagacatggagtctagaattgacccagatggaaagtaattggtattcttaatatcctgggtgactaatatccaggcagagaagctcctggaaccataactgtaagttcctagctggctagggattgaagtcctggacagtgacagaggataccacagtagttcaagacttagcacaagtcaccaactgcttcagggatacctggaggggccagcaagtagagtgttggtggcccaagcaaaccagtgttgccaataccattgccaaaagggcctttggatcctggacaaagcttggctgccggcttcatttattcctgctgatggctgagaagcatctgtcttccatcccacttgcctgtcccaagttttgttccattttttaaaaatttgttgtaaactgcatgttttataaaataaaaataaaatatcgtttgttatttatctcattagag

SEQ ID NO: 76067 - DNA, 1156 bp, Homo Sapiens
tcttaagtgtattgctctttcatcttaaacactttagaggatttgcagtgcgtctagcaccaagattacagccaggaacattggttaagaactgttggaaacaaaactaaaagcaaactcaacatatgtgatgtttatggccctcagatccttagtattgtgtgattttcccccgttaacatgtctttctaaaattgtctattaaagcagaggaaatacctgccaaaggaagtatgtattgcattaatcagggcataactaatattctcctgttcagaataatacttatttacgtgtgaaagcaacatggatgtgattcccaacacagaattttcatgacccttttattgtatacaaataaataccataacagttacttggttagacatcaaatctgtgtgcatgactatgtgcttatccacttaagacaataggtaaaaggggatctgagaaattatgtaatagggagtgggaataaaactacttaattcctgtgggcaggttatattttaagttcaaatgcattgctttaacctttggttacttttattctgttaaacagaattgaagaaagagtattataccagagtgtagtaggctagggtgattgtaagaactctgtaatagaatgtcattgtggatgttacctttttcagatccaagcatataaaaagcctgtatattttttaaaaacacatcttaactccacgctttacgatattataaaagttgaatggttcctcttggtaaggatatttgcttacaagtgctaggaaataactcactgatacctgcgttaacatactttgttttgcctagagaggggcaataaaaatgaaccaaaggatatttccagaaaggattaagaaagctgtttaagaaggccatgactctttaggtgtgtatgtgtacctttcagcatcctaggaatttttatactaaaagcaaaatgttttttccagttagtcttcttcaaggaattactattgttccttttgtcacaggtaaaatcagtgttgggaattataatttgagaaaaatattacccagtaacattgaatgtagatggctaaacgattcttactcagtgtgatgtataatgatgcaacagggacccttgtaaattgtcatacgccaataaaatgtcacaagtaat

SEQ ID NO: 76068 - DNA, 1300 bp, Homo Sapiens
  misc_feature (1214)..(1244): n is a, c, g, or t
ggggctgggcagagggtgcttacaaccttgactccctttctccctggacttgatctgctgtttcagaggctaggttgtttctgtgggtgccttatcagggctgggatacttctgattctggcttccttcctgccccaccctcccgaccccagtccccctgatcctgctagaggcatgtctccttgcgtgtctaaaggtccctcatcctgtttgttttaggaatcctggtctcaggacctcatggaagaagagggggagagagttacaggttggacatgatgcacactatggggccccagcgacgtgtctggttgagctcagggaatatggttcttagccagtttcttggtgatatccagtggcacttgtaatggcgtcttcattcagttcatgcagggcaaaggcttactgataaacttgagtctgccctcgtatgagggtgtatacctggcctccctctgaggctggtgactcctccctgctggggccccacaggtgaggcagaacagctagagggcctccccgcctgcccgccttggctggctagcttgcctctcctgtgcgtatgggaacacctagcacgtgctggatgggctgcctctgactcagaggcatggccggatttggcaactcaaaaccaccttgcctcagctgatcagagtttctgtggaattctgtttgttaaatcaaattagctggtctctgaattaagggggagacgaccttctctaagatgaacagggttcgccccagtcctcctgcctggagacagttgatgtgtcatgcagagctcttacttctccagcaacactcttcagtacataataagcttaactgataaacagaatatttagaaaggtgagacttgggcttaccattgggtttaaatcatagggacctagggcgagggttcagggcttctctggagcagatattgtcaagttcatggccttaggtagcatgtatctggtcttaactctgattgtagcaaaagttctgagaggagctgagccctgttgtggcccattaaagaacagggtcctcaggccctgcccgcttcctgtccactgccccctccccatccccagcccagccgagggaatcccgtgggttgcttacctacctataaggtggtttataagctgctgtcctggccactgcattcaaattccaatgtgtacttcatagtgtaaaaatttatattattgtgaggnnnnnnnnnnnnnnnnnnnnnnnnnnnnnnnggtatattgctgtatctactttaacttccagaaataaacgttatataggaaccgtc

SEQ ID NO: 76069 - DNA, 2852 bp, Homo Sapiens
  misc_feature (2318)..(2381): n is a, c, g, or t
agaaggactccagtccatccttcataaaaaccggctgaggaatcaggtcgtgcatgttcccttggaagcctacgacagctcgctgcctctcatcaaggccatcctgacagctgccatcgtggatgcagacaggattgcagtcggcctagaagaagggctctatgtcatagaggtcacccgagatgtgatcgtccgtgccgctgactgtaagaaggtacaccagatcgagcttgctcccagggagaagatcgtaatcctcctctgtggccggaaccaccatgtgcacctctatccgtggtcgtcccttgatggagcggaaggcagctttgacatcaagcttccggaaaccaaaggctgccagctcatggccacggccacactcaagaggaactctggcacctgcctgtttgtggccgtgaaacggctgatcctttgctatgagatccagagaacgaagccattccacagaaagttcaatgagattgtggctcccggcagcgtgcagtgcctggcggtgctcagggacaggctctgtgtgggctacccttctgggttctgcctgctgagcatccagggggacgggcagcctctaaacctggtaaatcccaatgacccctcgcttgcgttcctctcacaacagtcttttgatgccctttgtgctgtggagctcgaaagcgaggagtacctgctttgcttcagccacatgggactgtacgtggacccgcaaggccggagggcacgcgcgcaggagctcatgtggcctgcggctcctgtcgcctgtagttgcagccccacccacgtcacggtgtacagcgagtatggcgtggacgtctttgatgtgcgcaccatggagtgggtgcagaccatcggcctgcggaggataaggcccctgaactctgaaggcaccctcaacctcctcaaatgcgagcctccacgcttgatcaacttcaagagcaagttctcgggagcggttctcaacgtgccggacacctccgacaacagcaagaagcagatgctgcgcaccaggagcaaaaggcggttcgtcttcaaggtcccagaggaagagagactgcagcagaggcgagagatgcttagagacccagaattgagatccaaaatgatatccaacccaaccaacttcaaccacgtggcccacatgggcccaggcgacggcatgcaggtgctcatggacctgcctctgagtgctgtgcccccctcccaggaggaaaggccgggccccgctcccaccaacctggctcgccagcctccatccaggaaaaagccctacatctcgtggccctcatcaggtggatcggagcctagcgtgactgtgcctctgagaagtatgtctgatccagaccaggacttttgacaaagagccctgatttcggactccaccaaacactcaactccattcgaatagctccaacccccagcgggcccaccgagccccaactccccccacaggagccagctccccctcgaaggcctggagcagccggcctgtgacacctgaagccgccagctcgccacaggggccagggagctggagatggcctccagcgtcagtgccaagactgagcgggccctccagtgttgtccaaggaaatgtagaatcactttgtagatatggagatgaagaagacaaatctttattataatattgatcagttttatgccgcattgttcgtggcagtagaccacatctgttcgtctgcacagctgtgaggcgatgctgttccatctgcacatgaaggacccccatacagcctgtctcccacccctgacaacccgagagggcatatggggccctgccaacaccacttcctcagcagaaacccgtcatgacgcggctgcttcggaagcagacatctggggacacagcctcagtacccagtcttttccctagttcctgaaactttcctaggaccttaagagaatagtaggaggtcctatagcattcccagtgtcactagaattttgaagacaggaaagtggaggttagtctgtggcctttttttcatttagccattgcacagtcagctgcagaagtcctgctgaccacctagtcatggacaaaggcccaggaccagtgacaccctgcgtccctgtgtgcattaagttcattctgggtcgcagccatgaagtgtcaccagtatctactactgtgaagtcagctgtgctgttttccattcgcttccacggcttctgcctcctgccataaaaccagcgagtgtcgtggtgcaggcaggccctgtggcctgctgggctgagggaagtcagagccccagggcgccacgaagcagccactgggatannnnnnnnnnnnnnnnnnnnnnnnnnnnnnnnnnnnnnnnnnnnnnnnnnnnnnnnnnnnnnnntgattagtagcccgtatgatcacgtagacccacccaacacactcctgcacactggccccggcccacggcacagcaatcccctgcgcgtggatttcacctcaccctttgtaccagatgttgagtgaccagctctgtggccctgtgtcgtcagaggcttgtgattaactgtggcggcagacacagcttgtccacagcttgggccaggcttcccctgtcctcccaccggtcggctgcttggcaaggctgttcaggacgtgcacttccccaagtcggcactgagtggcccagcaccgcctagccctgccaccccactgccctcctgggccttctgctggatgggcacctggggggttctggtttttacttttttaatgtaagtctcagtctttgtaattaattattgaattgtgagaacatttttgaacaatttacctgtcaataaagcagaagacggcagttttaaagttaaaa

SEQ ID NO: 76070 - DNA, 1028 bp, Homo Sapiens
  misc_feature (241)..(241): n is a, c, g, or t
  misc_feature (256)..(256): n is a, c, g, or t
  misc_feature (513)..(553): n is a, c, g, or t
gtcggcggagcgagcccaatgcacccctttccggtgcgtcatatcatgcagacgttccgatgaagcgcatgggcagcattattgatgtcactcatagcacccagctacattatctccgtgtatgtgttgattgagcgatacattcacacggaacacttgactgatacgaattatacgactcacttaggaattgccctcgagccagaattcgccacgaggctgcagagtcctgttgcccacntgtcatgacaaagcncaggaccagtgacaccctgcgtccgttgtgcgtaagttcatctgggtcgcagccatgaagtgtcaccagtatctactactgtgaagtcagctgtgctgttttccattcgcttccacggcgtctgcctcttgccataaaaccagcgagtgtcgtggtgcaggcaggccctgtggcctgctgggctgagggaagtcagagccccagggcgccacgaagcagccacatggataacccaaaacccgcccgccttggccggnnnnnnnnnnnnnnnnnnnnnnnnnnnnnnnnnnnnnnnnngtgattagtagcccgtatgatcacgtagacccacccaacacactcctgcacactggccccggcccacggcacagcaatcccctgcgcgtggatttcacctcaccctttgtaccagatgttgagtgaccagctctgtggccctgtgtcgtcagaggcttgtgattaactgtggcggcagacacagcttgtccacagcttgggccaggcttcccctgtcctcccaccggtcggctgcttggcaaggctgttcaggacgtgcacttccccaagtcggcactgagtggcccagcaccacctagccctgccaccccactgccctcctgggccttctgctggatgggcacctggggggttctggtttttacttttttaatgtaagtctcagtctttgtaattaattattgaattgtgagaacatttttgaacaatttacctgtcaataaagcagaagacggcagttttaaagttaaaaaaa

SEQ ID NO: 76071 - DNA, 426 bp, Homo Sapiens
ctgagacttacattaaaaaagtaaaaaccagaaccccccaggtgcccatccagcagaaggcccaggagggcagtggggtggcagggctaggtggtgctgggccactcagtgccgacttggggaagtgcacgtcctgaacagccttgccaagcagccgaccggtgggaggacaggggaagcctggcccaagctgtggacaagctgtgtctgccgccacagttaatcacaagcctctgacgacacagggccacagagctggtcactcaacatctggtacaaagggtgaggtgaaatccacgcgcaggggattgctgtgccgtgggccggggccagtgtgcaggagtgtgttgggtgggtctacgtgatcatacgggctactaatcacgaagaatccatgcgggggcaggactggtggaaagggccgca

SEQ ID NO: 76072 - DNA, 367 bp, Homo Sapiens
aatgtgcccttaaggaaattttctctgaggctttagcaatggaaatttgattgcccattgtataagaacaaattgatttcctatccacctgattatgttctctggttagtttagccattttgaacttaagatcatatgaccttagtgcttttggctaaacatacagaatactacttgtatgcagaagagaattagttgattacatgtttcaaccttttagggtgataaatacatgtataattgtttacatacttaaaaggaaaaagttgagtaaatttcttgtcatatagtggctctacgtaatgtagcctgtattaatgtgaaatatttaccagaatattcaataaaaagatgaacagtcaaaaaa

SEQ ID NO: 76073 - DNA, 1416 bp, Homo Sapiens
aggcagtctgaggaagggaagtagatataatggagcttagtggcagagcagctggaatcctgagagaagagaataactttaggttcagagcaggtggggaaatgagagattgagtaggaggaccaaggttgagggaagcagatcttcttagttgctgtcagcggctgatggggaagactgttggtagaaggaagtcagaatataggtacagagggataagtttgctaagaacagagatcagcaaacagcttttctgagagaaagaaacatctgcgaaatgacatgctgtttctgcagtttctgctgctagctcttcttctcccaggtggtgacaatgcagacgcatcccaggaacacgtctccttccatgtcatccagatcttctcatttgtcaaccaatcctgggcacgaggtcagggctcaggatggctggacgagttgcagactcatggctgggacagtgaatcaggcacaataattttcctgcataactggtccaagggcaacttcagcaatgaagagttgtcagacctagagttgttatttcgtttctacctcttgtggattaactcgggagattcaagaccatgcaagtcaagattactcgaaatatccctttgaagtacaggtgaaagcgggctgtgagctgcattctggaaagagcccagaaggcttctttcaggtagctttcaacggattagatttactgagtttccagaatacaacatgggtgccatctccaggctgtggaagtttggcccaaagtgtctgtcatctactcaatcatcagtatgaaggcgtcacagaaacagtgtataatctcataagaagcacttgcccccgatttctcttgggtctcctggatgcagggaagatgtatgtacacaggcaagtgaggccagaagcctggctgtccagtcgccccagccttgggtctggccagctgttgctggtttgtcatgcctccggcttctacccaaagcctgtttgggtgacatggatgcggaatgaacaggagcaactgggcactaaacatggtgatattcttcctaatgctgatgggacatggtatcttcaggtgatcctggagctggcaactgaggagcctgctggcctgtcttgtcgagtgagacacagcagtctaggaggccaggacatcatcctctactggggacaccacttttccatgaattggattgccttggtagtgatagtgcccttggtgattctaatagtccttgtgttatggtttaagaagcactgctcatatcaggacatcctgtgagactcttccccctgactcccccattgtgttaagaacccagcaacccaggagcctagtacaatatagtgatgccatcccgtcgactctccatttaaattgtttctctttctgcataataaacatttgttaat

SEQ ID NO: 76074 - DNA, 921 bp, Homo Sapiens
  misc_feature (53)..(63): n is a, c, g, or t
  misc_feature (91)..(115): n is a, c, g, or t
ctaagaagcgctgaagaaggatgagtgatagagaagaaagcaacaccattgannnnnnnnnnnaagaaatgatatatatatgtatatgttnnnnnnnnnnnnnnnnnnnnnnnnnattctgtgcattattttgtcatgatctcaattctcttctttccaccaaagtttgtcgtaatattttctcctgaaggtgcattctggctcctttaaattagtcagtgttatattgtaggagactgtcatggaaaaaaggactcagtttactttcgtcattttcacaggggaaccttttaaaacaatcttttcagcagcagatacctttaaccctaataatctcaggccttgatgaaaatactatattttgtagattatggttaaagggggaaaattactagttccgtaagataaatatgagctccatttgacttctgatgtctggtttagcattacataatatgtggatcttacactctgcttttgtccaaataaaatgcaatagtatcaatatcaatttcagaaaaatggactgaatatgcttttttggtgatgaaatctcatgtacgatatttatagtgatgtgcttttattttctcatgagatactaaatattaattgtgttgtacatttgttcttagcatatattaaagttttgaaccaaatgtgttaaagcttacgctttgccatgtaaatttcccagaagttgttgagctcaaatgtatcctacatccagctgtagaaatttgtcagaaattgtttaaattttgtatataattgtactgtttaattctagccattgcgctgaacagtatttgagttaccatataatatggctttacacaaggaaatgtgtggcttttgttttgtattttttcagtatagaagttcctgtgtcttatttaaataaagttattagtaaaactg

SEQ ID NO: 76075 - DNA, 888 bp, Homo Sapiens
gtcccatttccacttcatcactgttggagatcatggagctaagaagcagagccaagtccacccatgtccttggcagagatgacaggcacacagcttgtgcagtgccagaatatcattagcgtttcccttctttagtggtttgcttaaatttaaatccctggtaatctgtagaaccttctcctaggaaatggtgaagtctattaggagccacttgtgactccatgacctgttaaaaccagcaatgtgagtattatttggagtaaatttgttccacgtcaagttctggccttctgatgcaaatgcaaaggaacttagtctgttatgaacccaggttgatgacagaccagtccttgtggaataagattccctttaaaaactctttagccagtcgtgacatcaaccctagacctgtctgccttggcatttgctgtcaacatctgctgggctatgtaggcaggttaatcctcccacttctcatgtggttgaaccagtgtgttttttggtaaaatggtgattgtagataagattagttccctgatcccctgccccctgtcccctgcctcttttcccaattcccttccttatgctggacttttaaagcttaaaaaaaatccgattgaatataaatgcctaatttcattctttgtgaaatggttgcttcctcctgattccctaattgtgctgtgttcgtgtcttgcactggaattcaacattcccttctccttttgtactgtgttgtgcttgctgtctctcccggacacccttaaagactgtctttttagcaaaaaatttcagtaaagtgttttctgtaatctttttttaaaaggtgagaactaattattgtccatacttgtagcattcttcattaaagtcttgcttctctcaaaa

SEQ ID NO: 76076 - DNA, 707 bp, Homo Sapiens
ggtcacttcagtctacttcacgtacttgaaaagctttcctttacacttccaggaccaaacagcaacttcctgccacacacttccaccctatcactgggagaaatccttttctggacatgagcctttgacctgggtggggcagaaagaaccacaaactccatctcccaatagaactttgaaattcactcagcttttcctttcatgctgtttgttgcctgcttgttgcactcctcctgccccagaactgcaagatttttagcttcacccctttctgagagtaatgttatcttttatcagaatcagtatcagttcccctgtattctgtgcttcatcgaatttgcaagactgacctcttttaagcatttaattcactcccagagtcatctggtcaggttgcaatatgaggacttctctgtctcctctgaagcctgggacactgagcttacttaatacattagatgttcaaaagaggagcgttgtttcatctttcaaaatgttaggccattactttgagtataaaatcgacttattaatgattagtaatttttctaaagtattgggaaaactttcttattttataagatcttaacaagcttaaaaaagaattttatgaccagaatccaacaagagctctattttggaattgtgcccaagttggtgatgtttactctaaaattaataataaaactacttgtaagcacaaaaaa

SEQ ID NO: 76077 - DNA, 1046 bp, Homo Sapiens
  misc_feature (57)..(57): n is a, c, g, or t
  misc_feature (92)..(92): n is a, c, g, or t
  misc_feature (550)..(571): n is a, c, g, or t
gctgcttatcaaaatattttattttaggagacccctcaaaaaaagacccaccacatntagacagacgccccaacaacacccttgggcctttnttttggtcttttctgtattttttcctttttaaatcaactaaaacaatttgatgcttaaaataaaagacaggaaatatttcctgatgagactttagtcgagaatatagatatatttctgatccgggggcgggtgatcaggggcgggggaggagaaggatgtgccaccagtggttcgcgaggttccgtttctcagctcaggagggagcctggctgcctggacccgggctagggacccagagctggggctccacaggcctgaccagggccagggaagaagacggaggaggaggaagagaaggcggggctggcggctggggcttgtaatttacatgagaaccgtgctggtcactagcgctgtctgtgtctgtctgtcctgcgggacttctgctctggggagggaggctgggattcagcgtcgttgtcatttcctgtgtggcttcttttccagctgagaaacnnnnnnnnnnnnnnnnnnnnnnaaaaagaatcacagccaaaataagacattaactgcaaaatccaaaatggctgcgcttaccctatgtataaaaatgcgtccagtccggtcggggcacggcctatgctttcccggggatcttggcccgcttgcgtgcaatagcatcctccacggccttcagctgtttcagcagctcctcccgccgagacagcgtgctggccttccctgatttggtgctggcggcgccgggatccgaggctttgccgggcacgctcgtgaccttgctggagctcttggactggggtgacagctggcgcttcctgtcagccggggctgcaggggctttggagttctggcctcactgccgctctgggcttcgggggaccccagtctccaccctggacttccggtcccgaaaaaccttcggtctggggaatggtgttgggccccctttggctttggaaggaaggggctcttggccctgttccctttgttcc

SEQ ID NO: 76078 - DNA, 1287 bp, Homo Sapiens
tccaggtcgtcttcgcggtcatcgtcctactctggctccggctcctcccggtcgcgatcccggtcttcatcctacagctcctactccagccgctcttccagacacagctcgttctcaggaagccggtccaggtcccggtccttctcttcgtccccgtccccgtccccaacaccttccccacatagaccttccatcagaaccaagggagagccggccccgccgcccgggaaagcaggagagaagtcagtgaagaagccggccccgcctccagccccaccacaggccaccaaaaccactgctcctgtccccgagcccaccaagccaggagaccctcgggaagccaggaggaaggagcggccagccaggaccccccccaggaggcggacgctaagcggcagcggcagtggcagtggtagcagctatagtggttccagctcccgatccaggtccctgagcgtgagcagcgtctcctcagtgtccagtgctacgtcgagcagcagctctgcacacagcgtggactcggaggacatgtacgcagacctggctagccccgtgtcctcagccagctctcggtccccggccccagcccagaccaggaaggagaaaggaaaatctaagaaagaagacggtgttaaagaggaaaagcggaaaagggattcgtccacacaaccacccaaatctgcaaaacccccagcagggggggaagtcctcccagcagccctcgacaccccagcaggcaccccccgggcagccccagcagggcacatttgtggcccacaaggagatcaagttgacactgttgaataaggcggctgataaaggaagcaggaagcgctatgaaccatcagacaaggacaggcagagccctcctccagccaagcggcccaacacatccccagaccgaggttctcgggaccggaagtcaggtgggagactgggctccccgaagccagagcggcagagaggccagaactccaaagcccctgcagccccggctgacaggaagcgccagctgtcaccccagtccaagagctccagcaaggtcacgagcgtgcccggcaaagcctcggatcccggcgccgccagcaccaaatcagggaaggccagcacgctgtctcggcgggaggagctgctgaaacagctgaaaggccgtggaggatgctattgcacgcaagcgggccaagatccccgggaaagcataggccgtgcccccgaccggactggacgcatttttatacatagggtacgcgcagcattttggattttgcagttaatgtcttattttgg

SEQ ID NO: 76079 - DNA, 2190 bp, Homo Sapiens
acaggagaggcctgggtgtgtaatcggcacgagggcgacccgagaggccggttcctttaagccgcctgcccgcctccagctctcggggtcggctccaggaggcgccctcaggagaggggcgggcgctctattccagagaccgagtggcagggcggccactgtggcggggctctttccccgtttcgcctcagctacccctcagctccggtagtcgccagtccggggtcgtcgccgtttggggcgggagctgctcggccccgccgccgtccccgtcgccgcttccgggtccaggcccctcgggccgcctgccgccgtcatgaggctgcgggtgcggcttctgaagcggacctggccgctggaggtgcccgagacggagccgacgctggggcatttgcgctcgcacctgaggcagtccctgctgtgcacctgggggtacagttctaatacccgatttacaattacattgaactacaaggatcccctcactggagatgaagagaccttggcttcatatgggattgtttctggggacttgatatgtttgattcttcaagatgacattccagcgcctaatataccttcatccacagattcagagcattcttcactccagaataatgagcaaccctctttggccaccagctccaatcagactagcatacaggatgaacaaccaagtgattcattccaaggacaggcagcccagtctggtgtttggaatgacgacagtatgttagggcctagtcaaaattttgaagctgagtcaattcaagataatgcgcatatggcagagggcacaggtttctatccctcagaacccatgctctgtagtgaatcggtggaagggcaagtgccacattcattagagaccttgtatcaatcagctgactgttctgatgccaatgatgccttgatagtgttgatacatcttctcatgttggagtcaggttacatacctcagggcaccgaagccaaagcactgtccatgccggagaagtggaagttgagcggggtgtataagctgcagtacatgcatcctctctgcgagggcagctccgctactctcacctgtgtgccttcgggaaacctgatcgatgtaaatgctacactaaaaatcaacaatgagattagaagtgtgaaaagattgcagctgctaccagaatcttttatttgccaagaaaaactaggggaaaatgtagccaacatatacaaagatcttcagaaactctctcgcctctttaaagaccagctggtgtatccttctttgggcttttacccgacaagcactgaaccctaccagatgtatttgggttggtcgtcctcccattggaactgaaactacggatcttccgacttctggatgttcgttccgtcttgtctttgtctgcggtttgtcgtgacctctttactgcttcaaatgacccactcctgtggaggtttttatatctgcgtgattttcgagacaatactgtcagagttcaagacacagattggaaagaactgtacaggaagaggcacatacaaagaaaagaatccccgaaagggcggtttgtgatgctcctgccatcgtcaactcacaccattccattctatcccaaccccttgcaccctaggccatttcctagctcccgccttcctccaggaattatcgggggtgaatatgaccaaagaccaacacttccctatgttggagacccaatcagttcactcattcctggtcctggggagacgcccagccagtttcctccactgagaccacgctttgatccagttggcccacttccaggacctaaccccatcttgccagggcgaggcggccccaatgacagatttccctttagacccagcaggggtcggccaactgatggccggctgtcattcatgtgattgatttgtaatttcatttctggagctccatttgtttttgtttctaaactacagatgtcaactccttggggtgctgatctcgagtgttattttctgattgtggtgttgagagttgcactcccagaaaccttttaagagatacatttatagccctaggggtggtatgacccaaaggttcctctgtgacaaggttggccttgggaatagttggctgccaatctccctgctcttggttctcctctagattgaagtttgttttctgatgctgttcttaccagattaaaaaaaagtgtaaattaaaaa

SEQ ID NO: 76080 - DNA, 337 bp, Homo Sapiens
caccgaagccgaagcactgtccatgccggagaagtggaagttgagcggggtgtataagctgcagtacatgcatcctctctgcgagggcaactccgctactctcacctgtgtgcctttgggaaacctgattgttgtaaatgctacactaaaaatcaaccatgagattagaagtgtgaaaagattgcagctgctaccagaatcttttatttgcaaagagaaactaggggaaaatgtagcccacatataccaagatcttcagaaactctctcgcctctttaaagaccagctggtgtatcctcttctgcttttcccccgaacgcggtaactggggatcctc

SEQ ID NO: 76081 - DNA, 786 bp, Homo Sapiens
acgtcggtattgggttaatgcatggtttgtttacctttttcagttagggcctagtcaaaattttgaagctgagtcaattcaagataatgcgcatatggcagagggcacaggtttctatccctcagaacccatgctctgtagtgaatcggtggaagggcaagtgccacattcattagagaccttgtatcaatcagctgactgttctgatgccaatgatgccttgatagtgttgatacatcttctcatgttggagtcaggttacatacctcaggtaagtactgcaagcaaaacacagacatcttatgattgctcatacatgtggatggttcctgctctcaagttgcccgtagtctgagagtggcagagagagacaaaaatataaagcactgtgctatattggtgaagttctgggagaaacatactcatatataggatgccaggaattcatggaggagaacatttagaatattgcttctcaaactttaatgcgctttggaatacctggggaccttattaaaatgcagattctgatttagtaactgtagaatggaccgtgaacttcttcatactcctgcataataccaatgttgctggtctgtgagccatgttataagttacaaagatacagagtagttcggtgatcagtgcacacctgcagcatgccatgcactgacctagaaattaggatataaaaatattgggatatttcttgtcttcaaggagtccatacatagaggagagagacgaataaaagatactcagaaataacgatcgagacatagggta

SEQ ID NO: 76082 - DNA, 1164 bp, Homo Sapiens
ggcctgggtggcgaattcggacgaggccggagccgggagcgccgctccagcgaggcgcgggctgtggggccgccgcgtgcctggccccgctcgcccgtgccggccgctcgcccgccatgcctggcttcgactacaagttcctggagaagcccaagcgacggctgctgtgcccactgtgcgggaagcccatgcgcgagcctgtgcaggtttccacctgcggccacctgaatacctgcagcttcaatgtcattcccagccttctacacacataagtatggttacaagctgcaggtgtctgcattcctcaatggcaatggcagtggtgagggcacacacctctcactgtacattcgtgtgctgcctggtgcctttgacaatctccttgagtggacctttgcccgccgtgtcaccttctccctgctggatcagagcgaccctgggctggctaaaccacagcacgtcactgagaccttccaccccgacccaaactggaagaatttccagaagccaggcacgtggcggggctccctggatgagagttctctgggctttggttatcccaagttcatctcccaccaggacattcgaaagcgaaactatgtgcgggatgatgcagtcttcatccgtgctgctgttgaactgccccggaagatcctcagctgagtgcaggtggggttcgaggggaaaggacgatggggcatgacctcagtcaggcactggctgaacttggagagggggccggacccccgtcagctgcttctgctgcctaggttctgttaccccatcctccctcccccagccaccaccctcaggtgcctccaattggtgcttcagccctggcccctgtggggaacaggtcttggggtcatgaagggctggaaacaagtgaccccagggcctgtctcccttcttgggtagggcagacatgccttggtgccggtcacactctacacggactgaggtgcctgctcaggtgctatgtcccaagagccataagggggtgggaattggggagggagaaagggtagttcaaagagtctgtcttgagatctgattttttccccctttacctagctgtgccccctctggttatttatttccttagtgccaggagggcacagcaggggagccctgatttttaataaatccggaattgtatttatt

SEQ ID NO: 76083 - DNA, 1160 bp, Homo Sapiens
gcctgggtggcgaattcggcacgagggcccggagccgggagcgccgctccagcgaggcgcgggctgtggggccgccgcgtgcctggccccgctcgcccgtgccggccgctcgcccgccatgcctggcttcgactacaagttcctggagaagcccaagcgacggctgctgtgcccactgtgcgggaagcccatgcgcgagcctgtgcaggtttccacctgcggccaccgtttctgcgatacctgcctgcaggagttcctcagtgaaggagtcttcaagtgccctgaggaccagcttcctctggactatgccaagatctacccagacccggagctggaagtacaagtattgggcctgcctatccgctgcatccacagtgaggagggctgccgctggagtgggccactacgtcatctacagggccacctgaatacctgcagcttcaatgtcattccctgccctaatcgctgccccatgaagctgagccgccgtgatctacctgcacacttgcagcatgactgccccaagcggcgcctcaagtgcgagttttgtggctgtgacttcagtggggaggcctatgagagccatgagggtatgtgcccccaggagagtgtctactgtgagaataagtgtggtgcccgcatgatgcggcggctgctggcccagcatgccacctctgagtgccccaagcgcactcagccctgcacctactgcactaaggagttcgtctttgaaaccatccagagccaccagtaccagtgcccaaggctgcctgttgcctgccccaaccaatgtggggtgggcactgtggcttcgggaggacctgccaggccatctgaaaggacagctggtacaccccctcgggtggctctgcccatttcaaaaactcccggttggaaagcacaaggtggccctaaactgggcatgggcaccggcattggggaagggaaaagtgtgaaacccccttttgggccattaagtggtgcccccgggtaaacccgacaacgccagaaaacttcccgggccctctccccaaaaatttggagaagaaactatttataggggccaatgaaaggggggggctttctccgggaaaaatttgggcccccctttggagaggggggggctttaacggaggaggccaacaggccccaacccccct

SEQ ID NO: 76084 - DNA, 565 bp, Homo Sapiens
gttattataccgtatgttctggtcattggaaacagaacagctcatagttgggtgatgtaatataataacagtaatataacctagtagtcattttgcttcaagtaatttaattagatagcaaaatcactgcggtttgtttattacacttgtagggctttttgtcttactcagtgaccatcactacgaatgtcttacattgaagcacagactgcagagcacttgttaacttagtcctcctgcataatgcactcgtgaaaagtagtgcttgctaggtgtttgaagattttatgatccgtgtgcttgggctcgttgagttatttgtaaaataaacatttagtttgagttgatgcagtaagttttttggactagtagtatccaggtccctactctactgaaaatataatcttcactatctccccttaagtcagaggagatgtagcatttagaacaccttgagacatgacattgtaaaatagcttgttttatgttcctgaagctatcttgttctctgttaaagctactaattgtctcagtgtaagttttaaataaacatatttctttaaaa

SEQ ID NO: 76085 - DNA, 918 bp, Homo Sapiens
  misc_feature (162)..(177): n is a, c, g, or t
  misc_feature (881)..(881): n is a, c, g, or t
ttcttggcaagaataattttattttaaagggatggaaaggggttaaatccagggttttaatttaactgaacaggcaataaaaccgctgaatggaacctaatcccacacactgttaccctcgtacatataatgaactgaaaagtgagctgtcacgtatgtcgnnnnnnnnnnnnnnnnaagaaaccaatctgactcccaaccaatggtttgcgatattaacaaaggccacaaacagtacacctgggccagcaaacagtgtgaaactgacaaaactccaagggggaaacatctagcaaataaatcaaaaagccaaagatcattgctggtgatattagcatactagaaacccttaatatgctgctactatgatttgttttaaattattgtttagtcatatattaaagagccagctgatgctcttacagttaaaaaaactgtgtagccacattactgttttcaacgtcctgtgtggaaagttgctatcactgtacaattttgcttgagcctttattttacaacagggctttacctctaactcagaattgcacgtaagaaggctatttaaaaagtacgataaaaatttgcacaaatcagacttaagaattgagtcagtatgctgtacactttctacaatagtatgctgataagtgaagggacaatagaagtgctgccactaaactttcagttgaggaataattgactggaattttttatttctttaaagtagttatcccaggtcaagttaagaccaagagcttaggcattaagccttaaagactgatcttctcttctccttgaagaaatgtcaatatctatagagtcttttccaactattaacctcaagcgcttagctggaggaagaggaataaaatcgtcttcanagtcatcatcatagtcatcctcctcttcatcgccctc

SEQ ID NO: 76086 - DNA, 828 bp, Homo Sapiens
gggtgatcattacatttcaatctatgctacttttattcaaaatatgcagcagtttgactttaaagttgcaaactggctaaaaacgttttactggacattcagctatattgcttagaaaagggctacatgtttctttttcatataagttgttcattgagttatgataggaatatattcataaataagcaaagaaaaatacctaattgtaattatcaaaggttcacttaaaaaattaactattaggtaaacttaagggggcagtgaaaaatctatttatgatttcgggagtaacctaaccatgaataatattagcataatgagaacatttactttttaaataaataactaaattttgtttacaatatgagtttttccagaatacaaggtttcaataatcacatgaggagtttaaagttttaaatatatactcagacattcattgtaacacagagtgtatgtaaaatcatttcccccactcactggagggagtatttattgcagactttttgttcagcaacatttagtgtttcagtgaaagttggacagttggggcttaaaacatttatttgtaaaatgagctatgttcaaatgtaaatatttgtaatttaatgtatttaccacattgactgtactaattatttagtagtcatactgtaatttttatgttaataataactggagttcaaagtctagctattggtataatcatctaatattatatatatctccagtgcccctgaattttatgtttgatgactatatatttgggcatatatcttgttggattagaataaataaaacactttatattttcatgaactctaaaaa

SEQ ID NO: 76087 - DNA, 1327 bp, Homo Sapiens
cagtcgacggtaccggacatatgcccgggaattcggccattacggccgggggtggccgaggtggagggccggtctgaagagtggcgggactggcttcacttcctccgcggttcctcggagccgcctcgctcctcttcagggactttgctgagaagggctctcgggcgtccagaccccaccgcaaaggtgtttggcgatccgccgagaagttgttggccccaggagcatccctcggggccgaatgcgcagtggacgatgccccttctgacccaacagatccaagacgaggatgatcagtacagccttgtggccagccttgacaacgttaggaatctctccactatcttgaaagctattcatttccgagaacatgccacgtgtttcgcaactaaaaatggtatcaaagtaacagtggaaaatgcaaagtgtgtgcaagcaacatgcttttacttcaggctggaatatttcaggagtttaaagttcaggaagcagtctgttacttttcgaattaatttaactgtccttttagactgtttatctatttttggatcaagtcctatgccagggactttaactgcacttcgaatgtgttaccaaggttatggttaccctttgatgctgttcctggaagaaggaggagtggtgacagtctgcaaaatcaatacacaggaacctgaggagaccctggactttgatttctgcagcaccaatgttattaataaaattattctgcagtcagaggggctccgtgaagcattttctgaattggatatgacgagtgaagtcctacaaattaccatgtctcctgacaagccttatttcaggttatctacttttggaaatgcaggaagttcccaccttgactatcccaaagattctgatttgatggaagcatttcattgtaatcagacccaagtcaacagatacaagatttccttactgaaaccctctacaaaggcattagtcctatcttgtaaggtatctattcggacagataacagaggcttcctttcattacagtatatgattagaaatgaagatggacaaatatgttttgtggaatattactgctgccctgatgaagaagttcctgaatctgagtcttgagtatgacaattcactgatatttatgtgtacatttatgatagatgaagttcttattctgagtacagtactctttgtcatttcatattggattttctatagagaagaagcacaatggggaagataggagcaaggtcatgtaccctaatagttactatgttttgtaaatccattttgtagagggcatgtaaataaatgttttcctgtagtctttattcggaaa

SEQ ID NO: 76088 - DNA, 898 bp, Homo Sapiens
  misc_feature (848)..(848): n is a, c, g, or t
  misc_feature (879)..(879): n is a, c, g, or t
gagaatggggatggggacaaagagaaaacaggggtgcgcttcctgcgatgcccagcagccatgaccgtcatgcatcttgccaagtttctccgcaacaagatggatgtgcccagcaagtacaaggtggaggttctgtacgaggacgagccactgaaggaatactacaccctcatggacatcgcctacatctacccctggcggcggaacgggcctctccccctcaagtaccgtgtccagccagcctgcaagcggctcaccctagccacggtgcccaccccctccgagggcaccaacaccagcggggcgtccgagtgtgagtcagtcagcgacaaggctcccagccctgccaccctgccagccacctcctcctccctgcccagcccagccaccccatcccatggctctcccagttcccatgggcctccagccacccctcgtgccgaattcggcacgagggaccgggtcatgcaggtgcagactggccggtcgcttcccgccctccagccacccgcagctccccggcaggcgaagggcggccgcgcgggtgtgggccgagagagggaggcggctcggctggagcgcgccgaccgcccgacccccgccgcctctcgggcgcctgcgctcacgctgcggggcccagcgcattgtgagccgggtcgagctccacgctggcagcgtctgagagctgtcctgggccggaggtggcgcgaaccctgtgcggcctagagtgggcctgggatgcctcagcactaatgatcatgatcagagaccccgagttctctcgtgctgctacgcttcgcaacacatagcacaaatggaatattgtgttgacacacccctctaaagtnaaagatctttgatattaagaccctgactttnttccctttcattcttccga

SEQ ID NO: 76089 - DNA, 3009 bp, Homo Sapiens
  misc_feature (744)..(766): n is a, c, g, or t
  misc_feature (1303)..(1315): n is a, c, g, or t
  misc_feature (1953)..(1975): n is a, c, g, or t
ggggtgccagggaccgggacgagaagaagggccccctggagaatggggatggggacaaagagaaaacaggggtgcgcttcctgcgatgcccagcagccatgaccgtcatgcatcttgccaagtttctccgcaacaagatggatgtgcccagcaagtacaaggtggaggttctgtacgaggacgagccactgaaggaatactacaccctcatggacatcgcctacatctacccctggcggcggaacggacctctccccctcaagtaccgtgtccagccagcctgcaagcggctcaccctagccacggtgcccaccccctccgagggcaccaacaccagcggggcgtccgagtgtgagtcagtcagcgacaaggctcccagccctgccaccctgccagccacctcctcctccctgcccagcccagccaccccatcccatggctctcccagttcccatgggcctccagccacccaccctacctcccccactcccccttcgacagccagtggggccaccacagctgccaacgggggtagcttgaactgcctgcagacaccatcctccaccagcagggggcgcaagatgactgtcaacggcgctcccgtgccccccttaacttgaggccagggaccctctcccttcttccagccaagcctctccactccttccactttttctgggcccttttttccacctcttctactttccccagctcttcccaccttgggggtggggggcgggtttnnnnnnnnnnnnnnnnnnnnnnngtacataggaaaaaccaaatatacatacttattttctatggaccaaccagattaatttaaatgccacaggaaacaaactttatgtgtgtgtgtatgtgtggaaaatggtgttcattttttttggggggggtcttgtgtaatttgctgtttttgggggtgcctggagatgaactggatgggccactggagtctcaataaagctctgcaccatcctcgctgtttcccaaggcaggtggtgtgttgggggccccttcagacccaaagctttaggcatgattccaactggctgcatataggagtcagttagaattgtttctttctctccccgtttctctccccatcttggctgctgtcctgcctctgaccagtggccgccccccacgttgttgaatgtccagaaattgctaagaacagtgccttttacaaatgcagtttatccctggttctgaggagcaagtgcagggtggaggtggcacctgcatcacctcctcctcttgcagtggaaactttgtgcaaagaatagatagttctgcctcnnnnnnnnnnnnncctgtgtgtgtggcctttgcatcatttatcttgtggaaaagaagattcaggccctgagaggtctcagctcttggaggagggctaaggctttagcattgtgaagcgctgcacccccaccaaccttaccctcaccggggaaccctcactagcaggactggtggtggagtctcacctggggcctagagtggaagtgggggtgggttaacctcacacaagcacagatcccagactttgccagaggcaaacagccttccaattgcccctccacccccagctgaggcccggtcacctggtcaggacagagcaactgcatctaaaagcacaagaagacagaaacctgtaagctctgaccccacccccaccccttgagaggtcagcggaccacctccttagggacagaccctggcaggtcgctgcccaccgagatttcctcaagtgtgcatagatctgagaggagtcgggagtcgagactcgagattccatcatagcgtaggtgtgtggggttgggagccccctgatgggcttgtctgtgtttgcaccttgtcctgtgtctgaggtcctgtgactgtaccctcctttgccctgggacatctgtatctcttggctttgtaataaatgctgcatactttcgccgccgnnnnnnnnnnnnnnnnnnnnnnngacgaaaggaggcggggggggagacaggggaaaaaacgtgggcggccggcgaccggcctgtggcaggcttctccccccctcagagggggtccggggccgccgggcggcctgggacccccccgtgggccgcctgccaggggggggtcggcttttcccccagcgcgcccgggggttcgggcgcataagggtgggcgctgggacggcgaacatggagagtggtccccgggaccgaaccccaggggcgggtgccgcatcggaggacctcctcaaagggggaggccctctcagacgcgaaatgcgccaccggagcagctgtcacccccccgccggggtatccccaccaccagcggccgccgcccgcagtaggtgccgcgaatgtaaagcggggctggccgcgcgaccgacgggggcggaagcccgcctgggtgggggaggcgatgcgctttcggcgggaggtgggaagaccgggcccttgtggtgggcgcgcgcgccccccttatctccctctggggcgacagggggggaggctgtggcgaggtctagaggggcgcgtccggcccgcgcgagagaacacccccgccccgcactaatgggggtgtgggggcccgacgcgcgtcgacgtaactttatttgcccaccccccgcggccggctgtagggtgtcaccccgcgacccgagccgcgcctgtggagtcgatcgcccccggcgcgtgccggcgcacagaaataaaattagggggtgtctggcgcccgcccacttcgtggagacgcggtggagtagcctccgggggtgtgtggggccagcgcaccgaactggacgagttgctgctagaagccctaccgatattttgctggggccccggcgccggggacggggcctggatgaggcgcccacatgagcgcgcggcccggccgcccgtattcctttcacaagcgcgctcgtggcgggatagcgtcttatggttgcggcgagagtaggactgagcgtcactgtgtgcggggccgggacgcccccagacgcgccaagcagcgggg

SEQ ID NO: 76090 - DNA, 664 bp, Homo Sapiens
  misc_feature (45)..(45): n is a, c, g, or t
  misc_feature (244)..(244): n is a, c, g, or t
gtttagctccagaggcctcaaagttagtgaaaattctgccagatntggatcataagttttcttcttaattattggtggttggtggtgtgagtttctatcatttcctgtagtctcatagttatttttgttgttggaaaaagctgggttagaagccagcaggcccaggataaactatttatagaagtctttgtatttggttctttgttaggaaataatttagacagtaattttttactattttttnagatcagcagaaactgagaaaacaaacttgatttattctgtgataagcagatatggaccatgaattaaaaatgcccacattcagacatttagatctaattatcagtgttacttagctgcctgtccaagtttagaaggttcttgacctaaaattcttcccaaatattatttcagacacagatgctcagaaatcatcctattgaatagaattaatttaaaatattttttttccagaaaaatttgcaagaagaaattgacgccttagaatccagagtggaatcaattcagcgagtgttagcagatttgaaagttcagttgtatgcaaaattcgggagcaacataaaccttgaagctgatgaaagttaaacattttataatactttttttatttgtttaataaacttgaatattgtttaaaatg

SEQ ID NO: 76091 - DNA, 1199 bp, Homo Sapiens
  misc_feature (686)..(700): n is a, c, g, or t
  misc_feature (766)..(823): n is a, c, g, or t
  misc_feature (924)..(934): n is a, c, g, or t
  misc_feature (948)..(966): n is a, c, g, or t
gggagtcccaagatggcggccaccatgaagaaggcggctgcagaagatgtcaatgttactttcgaagatcaacaaaagataaacaaatttgcacggaatacaagtagaatcacagagctgaaggaagaaatagaagtaaaaaagaaacaactccaaaacctagaagatgcttgtgatgacatcatgcttgcagatgatgattgcttaatgataccttatcaaattggtgatgtcttcattagccattctcaagaagaaacgcaagaaatgttagaagaagcaaagaaaaatttgcaagaagaaattgacgccttagaatccagagtggaatcaattcagcgagtgttagcagatttgaaagttcagttgtatgcaaaattcgggagcaacataaaccttgaagctgatgaaagttaaacattttataatactttttttatttgtttaataaacttgaatattgtttaaaatgagaattttccttcttcaaatgacatggaaagcaaaacatgcttcggcaaaaatcggcactcatttaatggaaacttgaccattttcaaaacaatgcatatggacgagagagcccaaaaagaaaaaagaacctcaccaaagaatgatgcataacgaaaatatcaaggctagggcccccacgccacgccattaaaatcagtttaaaaaaccttttnnnnnnnnnnnnnnncccccctaaagaaaagggagaggggcttttatgtgttttccagggaaaaccatgccgcagggaaannnnnnnnnnnnnnnnnnnnnnnnnnnnnnnnnnnnnnnnnnnnnnnnnnnnnnnnnntgtaaaagaacaaccactgaggggagggtttttggggcgcctatttggggagtccattcacaaggggggcgtgcgggaggacttttattatataattgggnnnnnnnnnnntgggcgcgtttttnnnnnnnnnnnnnnnnnnnaccttttgtagagaactcgggccgggcggaggagagggggctctctctatgggggcgggggtatagaactcaaaaacgcgcgcgagggtgacatccccgcccgttttgggccggatagggaaataaaaatatttttcccccagggagaacacaaggggggggagaacaaagatacttgttcttatttcttccggcgcgcccgttaacaaaatacaagaggggagggagaatca

SEQ ID NO: 76092 - DNA, 728 bp, Homo Sapiens
  misc_feature (61)..(61): n is a, c, g, or t
gacacatatggactgctcgacagagcagcctgggagcatcctgggccccgaatgtgcctcntgcaaaagagtattttctccctacttcaaaaaggagccggtgtaccagctgccctgcggccacctcctgtgccgaccctgcctgggtgagaagcaacgctccctgcccatgacgtgcacagcctgccagcggccggttgctagccaagacgtgctgcgggtccacttctgagtgactgacctccactggaggagacccattgctgggaggagctgagggggaacaggagcagggccacagcacccctgaggtctggccaggccccaggcacagagctgcctgctccctcccggggctcttcttcatcacctcacggtatagcacattgcttctgcgctggtggcaatagggcaacaaagccataggccagagggcggggggatgtccctgcctccctgccaccccccctgcctgagcccaggacccactggagccagccccaccctaggcaggaagacccctgctgagggcccccccgtgcagtccgcatacccccctgtccagcagggcactgtgggtggctcaccctagattgtggcccagatctcaggagtctctgccttcagggtcatccaaaagtggaccttgggagcagtgggggtgtctgtggagtgcatgactcagccccccgactcgcagccttaataaagcgatggttgacgtctgc

SEQ ID NO: 76093 - DNA, 1958 bp, Homo Sapiens
ggggacactgagccccgcgcccctcttcagccccggcacctacgagcgcctggcgctgctgctgggctccattgggctgctgggcgtcggcaacaacctgctggtgctcgtcctctactacaagttccagcggctccgcactcccactcacctcctcctggtcaacatcagcctcagcgacctgctggtgtccctcttcggggtcacctttaccttcgtgtcctgcctgaggaacggctgggtgtgggacaccgtgggctgcgtgtgggacgggtttagcggcagcctcttcgggattgtttccattgccaccctaaccgtgctggcctatgaacgttacattcgcgtggtccatgccagagtgatcaatttttcctgggcctggagggccattacctacatctggctctactcactggcgtgggcaggagcacctctcctgggatggaacaggtacatcctggacgtacacggactaggctgcactgtggactggaaatccaaggatgccaacgattcctcctttgtgcttttcttatttcttggctgcctggtggtgcccctgggtgtcatagcccattgctatggccatattctatattccattcgaatgcttcgttgtgtggaagatcttcagacaattcaagtgatcaagattttaacaagtatgaaaagaaactggccaaaatgtgcttttaaatgatattcaccttcctggtctgttggatgccttatatcgtgatctgcttcttggtggttaatggtcatggtcacctggtcactccaacaatatctattggtttcgtacctctttgctaaatcgaacactgtatacaatccagtgatttatgtcttcatgatcagaaagtttcgaagatcccttttgcagcttctgtgcctccgactgctgaggtgccagaggccggctaaagacctaccagcagctggaagtgaaatgcagatcagacccattgtgatgtcacagaaagatggggacaggccaaagaaaaaagtgactttcaactcttcttccatcatttttatcatcaccagtgatgaatcactgtcagttgacgacagcgacaaaaccaatgggtccaaagttgatgtaatccaagttcgtcctttgtacggaatgaagaatggcaacgaaagatggggccttaaattggatgccacttttggactttcatcataagaagtgtctggaatacccgttctatgtaatatcaacagaaccttgtggtccagcaggaaatccgaattgcccatatgctcttgggcctcaggaagaggttgaacaaaaacaaattcttttaattcaacgggtgctttacataatgaaaaaaccacttgtggcacacgatgggcatctaacatcatcatcttctaatgtgttggagattttcatttcaaatatatttttgaaattactctattttccaaaacacgtaatgcatttttctcgaaaataccttactgtaaaaataactgtcgcgtacacatggtgtgaagtagctagaacatactgaattttttttgtactgttggactctattcagtgtcatgtcctatatctgatcaagttatcaaggagataattctagaatgaaaaagaaaatcctcttgttggaaacaaaagacgttttatatgtgcagtatgacaaagaggagtttcagagacaactttgaatccttgtcagcctggagaccagcaccagaggaatctacaaggcaaactcccatatatttgcttcccccaaattgctgcccctacagactcaaagctctttttctttgttttgttgtttctctaaaaatttactgttctttgtcgatgctatataagccagggagttctaagacgccagctctttgagatttgctcattcccctgtatttcccacatatatattacatatacccgctaataaatttatgtttgtttttctcttgtc

SEQ ID NO: 76094 - DNA, 1041 bp, Homo Sapiens
  misc_feature (85)..(85): n is a, c, g, or t
  misc_feature (92)..(93): n is a, c, g, or t
  misc_feature (167)..(167): n is a, c, g, or t
  misc_feature (179)..(179): n is a, c, g, or t
  misc_feature (223)..(223): n is a, c, g, or t
  misc_feature (225)..(225): n is a, c, g, or t
  misc_feature (233)..(233): n is a, c, g, or t
  misc_feature (273)..(273): n is a, c, g, or t
  misc_feature (292)..(292): n is a, c, g, or t
  misc_feature (613)..(699): n is a, c, g, or t
catttagattgccctggagccagattcgcaggagtcacgggtcttacttaatgaaaaccacttgggcacacgtggcataaacatnatatctnntaatggtggagatttcattcaatatattttaaatactttatttcaaaacacgtatgcattttctcgaaataccntactgtaaaatnactgtcgcgtacacatgtgtgagtagctagaacatactgaattntntgtactgnttactctattcagtgtcatgtcctatatctgatcaagtantcaaggagataatctaganatgaaaaagaaaatcctcttgttggaaacaaaagacgttttatatgtgcagtatgacaaagaggagtttcagagacaactttgaatccttgtcagcctggagaccagcaccagaggaatctacaaggcaaactcccatatatttgcttcccccaaattgctgcccctacagactcaaagctctttttctttgttttgttgtttctctaaaaaatttactgttctttgtcgatgctatataagccagggagttctaagacgccagctctttgagatttgctcattcccctgtatttcccacatatatattacatatacccgnnnnnnnnnnnnnnnnnnnnnnnnnnnnnnnnnnnnnnnnnnnnnnnnnnnnnnnnnnnnnnnnnnnnnnnnnnnnnnnnnnnnnnnaaattattttttctttccctacaaactgaacatggattattagaactcaaggttttcattgacaatatagaaaagaaacactgaatcattttattttattgcccaatttttatttcttatatgactctagtgtttcatcttcataattaatcatgtttgaaggatttctgagtgactcagcagcctgttaaagaaggatgaaccaaagaaaacatttcactaaatgtgcttttaaaaatcaagtgtattgctggttctgctgcagtatgtagtcgaagaataaattagtaaattgcttctgagggtctgaaattgaataaagtaatggctttgtatttctat

SEQ ID NO: 76095 - DNA, 169 bp, Homo Sapiens
caattaaggaaaaagctccatctctacctttaacatcacccagacccccgcccctgcccgtgccccacgctgctgctaacgacagtatgatgcttactctgctactcggaaactatttttatgtaattaatgtatgctttcttgtttataaatgcctgatttaaaaaga

SEQ ID NO: 76096 - DNA, 461 bp, Homo Sapiens
  misc_feature (461)..(461): n is a, c, g, or t
ctccagccccagttacctggagcttctcagaacccactttgccggtgctaaaacacaagagggggtgaaagtggctgccagtaatggccagaaaccaaccaccagaggccaggctgaaagacaagctccgggtgtccaggggctgacgggccaaccatgtggcaggtcccaggccccacccactgcgccatccgcctctgagctccacagtggtcccactaatgggaacctcctctagggagagtgatactgcaccttcacccgtaggactcatatttataacaatgtgtaatggctgtagcaaaaagcccttgtttctagatgtaaatggtcaaagaaacaagcgctctattgttttgaataaaatagttcaaatgagtcctgtatcattgtatctcctattctggattagtgccttttggacagtagactgttctgtaattaaaatgtagtatactgcn

SEQ ID NO: 76097 - DNA, 1356 bp, Homo Sapiens
  misc_feature (1273)..(1296): n is a, c, g, or t
tggatttcccgagagttggtattcttggaggtaccagatccctgctctggcccaggcaggttaccgggtcctagctatggacatgaaaggctatggagagtcatctgctcctcccgaaatagaagaatattgcatggaagtcgttatgtaaggagatggtaaccttcctggataaactgggcctctctcaagcagtgttcattggccatgactggggtggcatgctggtgtggtacatggctctcttctaccccgagagagtgagggcggtggccagtttgaatactcccttcataccagcaaatcccaacatgtcccctttggagagtatcaaagccaacccagtattggattaccagctctacttccaagaaccaggagtggctgaggctgaactggaacagaacctgagtcggactttcaaaagcctcttcagagcaagcgatgagagtgttttatccatgcataaagtctgtgaagcgggaggactttttgtaaatagcccagaagagcccagcctcagcaggatggtcactgaggaggaaatccagttctatgtgcagcagttcaagaagtctggtttcagaggtcctctaaactggtaccgaaacatggaaaggaactggaagtgggcttgcaaaagcttgggacggaagatcctgattccggccctgatggtcacggcggagaaggacttcgtgctcgttcctcagatgtcccagcacatggaggactggattccccacctgaaaaggggacacattgaggactgtgggcactggacacagatggacaagccaaccgaggtgaatcagatcctcattaagtggctggattctgatgcccggaacccaccggtggtctcaaagatgtagaacgcagcgtgtgcccacgctcagcaggtgtgccatccttccacctgctggggcaccattcttagtatacagaggtggccttacacacatcttgcatggatggcagcattgttctgaaggggtttgcagaaaaaaaagattttctttacataaagtgaatcaaatttgacattattttagatcccagagaaatcaggtgtgattagttctccaggcatgaatgcatcgtccctttatctgtaagaacccttagtgtcctgtagggggacagaatggggtggccaggtggtgatttctctttgaccaatgcatagtttggcagaaaaatcagccgttcatttagaagaatcttagcagagattgggatgccttactcaataaagctaagatgactatgnnnnnnnnnnnnnnnnnnnnnnnncctgagcaggcggccgcaagcttattccctttagttgagggttaattttaagcttggcac

SEQ ID NO: 76098 - DNA, 764 bp, Homo Sapiens
  misc_feature (428)..(458): n is a, c, g, or t
caaaatataaatctggaaaagtctagaatcttttctgtgaatgctatctcagtactactttaagtcaagtgtgatgctaatgatatcttaaaatttccaacaccttttgtgcagtgatcacaaagtctccacttaatttgagactgttactcagaacacgccttgcgtcacgggggctaatctaagtgtcctagtctatatgactacattacatcatgatgtattgattgcctctggcctaggaatctgcagcttaagccagtgacacaacattttgcatttttaaatggtgattctcaccaaataatgcctccccacaaaagaggaaacctaataatgccccaaatcctctttttactccatcttaatgacataaaaattaagtgaattagagaactacaatgatcttaaaataatttttcaggcannnnnnnnnnnnnnnnnnnnnnnnnnnnnnntctgtttttgcctatgaaagataggtcctgtaactgttacacagtttaacacttctgaaattagaatattagagatcctgctaaatattacgtattgtttccttggcctctcttaatagtgccatttatatttttaatttaccagagttaggctcattaagatagtgtttgctttgaaatcaatgtttctgtggaaactaattttaacttttacagatattgattacgggcttgtgaaaaggcaagtaaaggaggaatgctgtgctatctgggcattaaaacaaaacaatacaattaaaagttaaa

SEQ ID NO: 76099 - DNA, 391 bp, Homo Sapiens
tttttttgtttcaaatattaagatgtccatttattaatctgcctgttttcaaaaaattatttagcaacatacagtgagttttctaatgtagaataatgtacagcatgagccaaagatgactgccacgcaccaaaggcaagaggcacggtgtgtcacagatgtgctctctggactgagtcttatctttcttcaaaagaaagacctggaaatagccctgaatgcattcactgttggtgggttttcttttgattttcagctcacttgccctgttttcttaaagacttattatggggacataaaaacaaacaaagtatcgagtttgggagaatccacatcagtgacattgagggctataaaaaaacataaaagactgtgtaagttcctattaaaa

SEQ ID NO: 76100 - DNA, 787 bp, Homo Sapiens
actcaagacaggtcagacatttataaaacaagtgaatattcacaaacaaattgtgggagaaacacaccttcccagcaatagaaaatctctataaagtgcattttgcctgcaaccatctcttccccatgctggcccttgggtcaggatttgaggcactgttccgagggagccctcagggccacctgagctgggagaagggaggcatgaagccaccatggagctccaggctactggacataccctctctaccctgcccttccctcttggctccaggagtgcactgcctgactccactggcaggttgatctgggaacgggctggcatgctagggatggtggagaagtaggcggaggtggtcctgccaacctgtaccttagggaagagagccagcagcagacaggcaggaaaaggaatcatcctgctacccgaaggcgctgctagtgaatactaaatctgggcctcggcctttggccttcccactctcagatttgcccttccaggtttgcttgactctctttctggcagtggcccgattctctttcctctcgactggggctgagggaacagggaagcccccaacccaatgctctgaatgcacaccatcccctgtgccctgctcccctcccacgatgatgggacatttctagtgaaggtgacatacgtacaacagttggactctaaaggcagctctctggctgagaaaactgaggatatctcaggaagaagctgtcagtgtgatggacagctacaggagatgggtctgaggctaggaaaggtcacaggggaa

SEQ ID NO: 76101 - DNA, 381 bp, Homo Sapiens
agggaacagggaagcccccaacccaatgctctgaatgcacaccatcccctgtgccctgctcccctcccacgatgatgggacatttctagtgaaggtgacatacgtacaacagttggactctaaaggcagctctctggctgagaaaacctgaggatatctcaggaagaagcctgtcagtgtgatggacagctacaggagatgggtctgaccccagggttctggtccaaggacagaggacagtgagggacagggctggggccaaaagaattaacagatctgaggctaggaaaggtcacaggggaggtagaaaggaaaaggcccaaaggccagcttaatgatacacgtgaggacaaaaatccaaacaggaatcagcctcatagc

SEQ ID NO: 76102 - DNA, 692 bp, Homo Sapiens
tttagtaaacaacttagataatttatttagaaagtagaaaataaaaagtatgattctaacatctatttagaatatgaacaaaattagaaatggttaaactacagaaaaaaaggcagagaaactgaagttggcttaatggttatccaatacaaacaagcaaaacccaagttaccttcatgcaaataagcattaaggaaaagaatacgggaatgtttacagaatgcgccatggcaaacatttttcaaatttacataagatactgtacataaatgaaaaaataaattaggtaatttacaagaaatgttttacagattacaataggctataacttagtttattatgaataaaatttatggcacatcatacatttttacatcacagattcagtgttaaaagaattcagacatgataaagcttagacttgacaagaatgatgtaatagaatgaggcaactgaaactgaaatggcatgtgtaagtaaaattaatccccaaattaaaggattccttagattgggacataataacatcttctgagtacactttggtcaataactggtcattaagataaacgccattcaattttagttaaaaaatcagttttttgctgtagtttacataaaaagtaaaagcacacagtgtataaaaaataatacaaaccatcttaatattgcttacatcctaatactattag

SEQ ID NO: 76103 - DNA, 1840 bp, Homo Sapiens
  misc_feature (147)..(156): n is a, c, g, or t
  misc_feature (1265)..(1398): n is a, c, g, or t
  misc_feature (1411)..(1424): n is a, c, g, or t
  misc_feature (1533)..(1543): n is a, c, g, or t
  misc_feature (1580)..(1620): n is a, c, g, or t
  misc_feature (1650)..(1659): n is a, c, g, or t
  misc_feature (1740)..(1748): n is a, c, g, or t
  misc_feature (1779)..(1788): n is a, c, g, or t
caaccatgcagaggaatttttccacttaagtcagagccttcctccccatctggaattcacagctgttccctggcagcacacaggagggtattaaggacctttgtgaggctaggtacactgtccacacctctttggggaagttacgannnnnnnnnnccatcataattcagtctcttcttattctacagtgtgcactttatgcctctcgccttttgataatagttgttcagtgaaggaagtcagctgccagaatattaagaaggggtctccctttatgtcaagtacaaactgttagggcgggccttcccatttaatttaggtttcaagaggattcaccggaagcacatgccccggtctagtcccatttgaaacagttctgctttactgagaccctaggccggtctccttgctgaccctagcgctgctgcctaggtgccatttcctttcctcctcagtcaaatacaggctgcacattttgtcacttaatgccagtacaatctgtgttactcctaaggacttttgggattttgatgagacctgcgagggagaagacactgagaagccagtgatctgcaagcatttgctcttgtttccacatcacctctgggatatttcagctgttgtttccaaatggcaaatcatcaactaaaagcacttgtttcaagttttgttctgcactcccacgactgaagttgtagattgagccgaataaccatgggaagtgaccaagcaaagacactcgattggagtcagttgaatatttgtaccctcagtggagcccttctggtcttttcttccacttctgcagaatttcctctagcaaatacttctttctccttgcttgcctccaccatgatatttgaataagagatggccagaggataacacttgtctcttaaaaactaagctaaaaagaacctagaaccttcaattgagcagttgtgaaaattgctaatggtgccaaggccaagcaaagagtttcagaaaatgactgagaaggagcgataacccccagaatgcaaaatcaggggcatcattatccggtgcttgaacaaggagctccgctctacaactggtttttttaggacttgtgaggaacacagcaacggaaatccatccacaaaggatgcagtgccccaacttgtactgcgcctgaatagtcatgtgataatttactgaagaaatctagtgtactttaaatttttttcataaaagtttacattgtattgtaggttaacattaaatgttttatagcaaaaacttcnnnnnnnnnnnnnnnnnnnnnnnnnnnnnnnnnnnnnnnnnnnnnnnnnnnnnnnnnnnnnnnnnnnnnnnnnnnnnnnnnnnnnnnnnnnnnnnnnnnnnnnnnnnnnnnnnnnnnnnnnnnnnnnnnnnnnngattttggggcgnnnnnnnnnnnnnnaaaaattttttaaaacctttttttggggggcggggcccaaaagggaagggaaaggggccaaatttttttcaagagaaaccgggggaaaaaaaaggtgtggaattccccnnnnnnnnnnnccccccggggaacccagaggcttggaaaaaacccaannnnnnnnnnnnnnnnnnnnnnnnnnnnnnnnnnnnnnnnnccccccacgggcctccaaatataattgaannnnnnnnnnggggcccttttatgagaaaagggggggtgaaattttactaaaaagtttccgggcgcaaaagtggagaaccccttcccaaannnnnnnnnaagaaatacccgaaatccgccgcggggccgnnnnnnnnnnttggcgcctctccgaataaataacttttccccccaggggaaaaaaggggggc

SEQ ID NO: 76104 - DNA, 863 bp, Homo Sapiens
ggtaccggtccggaatttccgggatatcgtcgacccacgcgtccggagggtgccacggggtccttatttattgttttcatctatttgggtacgaagtgtgcaaagtcacagaccttttgcaaagaggtttctagacagcagaagaaaacccctctctcagcgctcatctcacgcagaggatgccaggcagggtgaggatgggggagtagatgccgcttttgcagtggctcgcactgctgtggccactgctgaccactgaggctcccagcggagggtgttcacagccaggtcccgggccacggagctcccttacttgaagttctccttcagcatagattagacgtgatccactttgctttcttgcttctcacctcgcccccttgcacattgcctgacaccctcatattggccagctgtaatctcgtgactatgggactgaggctcaatcttggcttggggtgtttgaatgtctatagcaaaggaattcataatgggaaatctttttcatttgagaaattgtatgatatttattggttgtgtctactgccaacatttatatccaattctaagatttctgaaaaaaaattcttatcccttgctgctcagaaaaagtttacggaaaacaccagttcactaaaagcaccgaaatctgcaaagcctgtcttccgctagaacaacgtctacaaatgtgaagatgatgacttctggcacgcggtcatgagggtggggaatggcactaggagctgatgtttgcctcatttaaagtaggcaagccgagccaactgcagccatcattcattaagttttgggtagtgctctcaatggtttgttcactttaataaagacagattttggtaaagtag

SEQ ID NO: 76105 - DNA, 1263 bp, Homo Sapiens
  misc_feature (129)..(149): n is a, c, g, or t
ccatgctgttatcattccttggttataaaatgaaatggcatatgtaaaggcagagttgttaactgctatatttcatctgttctatagggaagccattttgtctgtttaaaatttcagtttaattttgcnnnnnnnnnnnnnnnnnnnnncctttcaacttagttgacatacgtgccttaaaaaggaaaactagtgttgctattgtgcatttactagaaaaaaggaattggttgtttagggcacactgttatatgggaattaaaatatgtttaggcaggggtgtgtaaaaaggttaagtttttgtttctcctgcttggaacttattttgaattactggcttgtcacctttttttctatttaatcaaataagatacatgatattgaaagaataaagcagcatttttagtttttactaccttaggctttattgctttgaaaacaacattggccttttgtatctcacaattctggtctagattcagttatgaatgtaggcatttagttaaaattaacaagatgcagagtataatttcttaagacaacaaagtgatttctgtaagtttgagccctatgtggaaagcattgtggaatcttaaccttttcgtacacactcttgtgggacgtatcatataaatgtcagcactaagtaatgtcttgtttgtggctgaatatttttcgtagatgtttttgaagttgacatgacttacgtgcatttaaatatatattgccatccttagtttgtaattaagatttggaatatggttgtggatttctgagcatgtgcagactggtctagctagttcaggaactggtgcatgtatttttcaaagataaagaaagtgtactgcgaaaatatgcaggaagattaattttgtggcagttttctaaaactgacaaccaggtgggaccaaagtttatgtgcctttagtcttaatttaccttgcattgtaatattcagttttaataaatcttcaaaatattttgtatttaggaatagatctgactttaataaaaacatggctcagaatctacaggtcaaattaatttgaacagttcttgtcaatccgaattgttgattctgtttaaatgaccaatactttttgaaattgatgtacttagtttcaagattcatagattctgttatctatgtagacagaatggtcatgtatattttctattagttgagtttttacatctttagaaatgtaaaattcagtatagtttgaaagcggcacaattaaaaattaattttctaacaaaaaa

SEQ ID NO: 76106 - DNA, 602 bp, Homo Sapiens
gatgtgaactattttctactactacccacacagaataccagacagacactcatgggaggatgggctctggagggagggctcccagccttgtcagatccgattgtgtggacatatagactcaattgccctgtaccttgaaaggggacccctaatggagataagatcctaggaaagaggggcagagtaggggtcctgattgtcagattgaagctggggtaatacttctgatttgtgaattttcttaaagagaggtgttaaaaaactttgcatgaaagagcgtgggagagtgccctaaacttgagggcggagcaacctgttatcaatacactttcttgagcagagtctgaaggagaaacgaacacagtcacatagtccaaatcatttgagacggtgccctgtatgttcatctcaaggcatctagctcttacccacagagaaccgtgactctgggcttccctcactaaatatgtctgtgacatctgtatccttatgtgcttatggaaatgttcacatacacacctgcagatgtgatgactgaaaaaaacgattatttattcagagctttgtatttagtttatgctataataaattcagttgttata

SEQ ID NO: 76107 - DNA, 1273 bp, Homo Sapiens
  misc_feature (575)..(597): n is a, c, g, or t
  misc_feature (615)..(1044): n is a, c, g, or t
  misc_feature (1066)..(1066): n is a, c, g, or t
  misc_feature (1144)..(1144): n is a, c, g, or t
  misc_feature (1170)..(1170): n is a, c, g, or t
  misc_feature (1193)..(1193): n is a, c, g, or t
  misc_feature (1196)..(1196): n is a, c, g, or t
tcagatgaaatatcagtaactgtcttggacagtgctgaaatcaggtggttaaacgggtaaacaaaatatactgtattttgagaaatggcacaaaaacaggcagtcatctttaagggctatgcctaggcaaactactaacatgcattgtgagaatgccgtgtatacctcacgtactgtgtactttgtacatatattttaccttttatacctatgttcgattttgttttgttctgttttgttctggctttgaggcttgttttgttgtctgtgtctgtctgaataacctgcgtgtctaaaaccacgtgaaatgtgaatgattattggcaatattaccttgacagaatcatgggactttgagaagagggaggacagaggcctctgtcgcactaacgctctcgtggttgctcgactgttgtatctgtgatacattatccgactaaggactctgggctggcagggccttctgccgggaaagctagaaacactaggttcttcctgtacatacgtgtatatatgtgaacagtgagatggccgtttctgacttgtagagaaattttaataaacctggtttcgtnnnnnnnnnnnnnnnnnnnnnnncctcgttccgaattcttnnnnnnnnnnnnnnnnnnnnnnnnnnnnnnnnnnnnnnnnnnnnnnnnnnnnnnnnnnnnnnnnnnnnnnnnnnnnnnnnnnnnnnnnnnnnnnnnnnnnnnnnnnnnnnnnnnnnnnnnnnnnnnnnnnnnnnnnnnnnnnnnnnnnnnnnnnnnnnnnnnnnnnnnnnnnnnnnnnnnnnnnnnnnnnnnnnnnnnnnnnnnnnnnnnnnnnnnnnnnnnnnnnnnnnnnnnnnnnnnnnnnnnnnnnnnnnnnnnnnnnnnnnnnnnnnnnnnnnnnnnnnnnnnnnnnnnnnnnnnnnnnnnnnnnnnnnnnnnnnnnnnnnnnnnnnnnnnnnnnnnnnnnnnnnnnnnnnnnnnnnnnnnnnnnnnnnnnnnnnnnnnnnnnnnnnnnnnnnnnnnnnnnnnnnnnnnnnnnnnnnnnnnnnnnggcgcgtgctggcgtttcctangctcgccccctgacgacacacaaatcgacctcagtcagaggtgcgaaccgacagacataagaacaaggttcccctggnactcctctggcctctgtccgactgcngctacgaactgtcgctctcctcngancgtgggctccaaccagcgtagaccatcgggtagctcgtcagtggttttgacacccgtaccacgtgctacgtaacgtg

SEQ ID NO: 76108 - DNA, 1267 bp, Homo Sapiens
  misc_feature (62)..(62): n is a, c, g, or t
  misc_feature (315)..(315): n is a, c, g, or t
  misc_feature (644)..(652): n is a, c, g, or t
  misc_feature (1037)..(1046): n is a, c, g, or t
  misc_feature (1106)..(1136): n is a, c, g, or t
  misc_feature (1142)..(1161): n is a, c, g, or t
gactttatagaatgaaatgccagagatttgatatttattatctgaaataggtttaacatttnggagaaatgtgttcaaacacacaacctttggaaagaaaagcaagcctgataggtcagagaacagagggtgggcagaaaacacgatgtgcataattttgctgcgtgttgggcaaaaagttagaaaactgggttctttggagaataaagagctctcagatgaggtaaaggtaaaacacaaataaatttccaacccttgatgagggccacgagatatcaattttaaatatatatgaccacaatatcaataatgaangaaatcttaccgttttattgaatactttggccagatcagcccctttgaagggatcactaatttaggaaagaagaacaacaaaccatcattcactttcctgcaggttcatcgttttcctaattatttctatggatccctgctttattctttctgtaaattaaggggcaggaggagagtttctataatagatcagcaatgtctgggttcttatcccaaatattccacctaataaggatgtaaattctcatggattggacaaccactctgcaacattcctgagaattgaataatataataatcttgaaagtcagcagagtggattatccacnnnnnnnnnctggacttgaacttgtgaactcaacagtagcactgcaaaaaagcaaacgtgctaagcactttgccagagtaaccttccatgtagacttttcatcttaaatacacacaactgaaaacaactaccaatttttggaaaattatgtacaaacccgatacttcttttgattacatataaatacaaattagctatttttttcctaaaaagtggttataatagtaaataaatacaaaataaatctgaccattatacttcatgtgctggggttgaacccatataaaatgtacaactaaatacattttaaatctttaaggaataattctctgattaaaatatttgttttcccaacttcttttcgtagatataaatatattttcaaaatagctgnnnnnnnnnncattccattccataaataaagtcttcattgggaaatattaaagtgtcaactggggtgggnnnnnnnnnnnnnnnnnnnnnnnnnnnnnnnctaaannnnnnnnnnnnnnnnnnnnttatgtatttaattttgctgtactagcgacacccacaaccctccacaaccatgtcccccggccgtaatggccgaattcccgggcatatgtccggtaccgtcgactg

SEQ ID NO: 76109 - DNA, 1725 bp, Homo Sapiens
tggaccatcatgcctactttggaggagtgggaggccctgtgccagcagaaagctgcagaggcagctcccccaacccaggaggcacaaggggaaacggagcctactgaacaggcacctgatgccttggagcaagcagcagacacttctagacggaacgcagaaactccagaggccaccacacagcaggaaacggacactgatctcccagaggcccctccaccccccctagaacctgctgtcatcgcacgccctggctgtgtaaacctgtccctccatgggattgtggaggatcggaggccaaaggaaaggatctcttttgaggtgatggtgctggccgagctgtttctggagatgctccagagggattttggctatagagtttataagatgctactgagccttcctgaaaaggtcgtgtccccacctgaacctgagaaggaggaggcggccaaggaagaagccaccaaggaggaagaagccatcaaagaggaggtggtcaaggagcccaaggatgaggcacacaatgagggcccggctacagagtcagaggccccgctgaaggaggatgggcttttgcccaaaccactctcttctgggggagaggaagaagaaaaaccccggggcgaggcttctgaggacctgtgtgagatggccctggacccagaactgttgcttctgagggatgatggcagaggaggagtttgcaggagcaaagctggaggattcggaggtccggtccgttgcctcaaaccagtcagagatggagttctcttcacttcaggacatgcccaaggagctggatccctctgctgtgctccccttagactgtctgcttgcttttgtgttctttgatgccaacttggtgtggctacttgcaccggcgagacttagagaggatcctccttacccttgggatccggctcagtgcagagcaggccaagcagctggtcagcagggtggtgacccagaacatctgccagtaccggagccttcagtacagccgccaggagggcctggatggtggccttcccgaggagtgctcttcggaaacctggacctgctgccccctcctgggaaaagcacgaagccaggtgctgcccccacagaacacaaagccttggtgtcccacaatggcagcctgattaacgtggggagcctgctgcagcgcgcggagcagcaggacagcggccggctctacctagagaacaagatccacacactggagctgaagctggaggagagccataaccgtttctcagccactgaagtaaccaataagacgctggcggcagagatgcaggagctgcgagtccggctggcggaggccgaggagaccgcccggacggcggagcgacagaagagccagctccagcggctgctgcaggagctccgcaggcgtctgacccccctgcagctggagatccagcgggtggtggaaaaggctgacagctgggtggagaaggaggagccggcacctagcaactgacggcctcgcacggaactgccatcctgtgagggcagcggtggcgcccggcaaagttggagcccttgcggtaccagaaagcagcgagagcgagacctgggagccagggcaggggtggctgaccccatgctcagcctctaggggacggcaggccatcaggctgggggctgtgctatgtgggatggatgtgtgaggaaccccggttccacttaacaactaaatacaacatcttttgcacccct

SEQ ID NO: 76110 - DNA, 986 bp, Homo Sapiens
cccgattctgggtacatcatctgtttcaaacaggctgacagctgggtggagaaggaggagccggcacctagcaactgacggcctcgcacggaactgccatcctgtgagggcagcggtggcgcccggcaaagttggagcccttgcggtaccagaaagcagcgagagcaagacctgggagccagggcaggggtggctgaccccatgctcagcctctaggggacggcaggccatcaggctgggggctgtgctatgtgggatggatgtgtgaggaaccccggttccacttaacaactaaatacaacatcttttgcacccctagaatgtcattttgccctcaaccttggtatttctcctggggcccttttagtcttgtgctgactttctcctgtcctcttccagcttagaataagacaggggagaaaaaggcttttcgagtgtgggacaaggtctgatgtcagtgaacggaattgaagagcaagacatggagcctggctggggctaagcagccccctcctccggatggcacaggctctgctaggttccggacacaggcttctgggggaagggtctcccttggccatcacgggaatggagtccatgctagaaagagctcagtgttgggctgggtttgccagtagaacactgcgttccagtcaccccggtcttgccagaagaaaccagcacctctttcccgtggctcctgtgttcagaatgtggtattggctctggcccagccttctcccctgttacccataattcttgcctctttccataatccgtggtttcagtttgacttcgtatataaagttggggtttaatttatttatataaaaggggctgggtcataaaaataaaaccaagagtcaaaacaccaacagacccgagagaaacaaacaaacgaaacagacgagccacacccaaggaaaaagcaaaagaagggacaaaaccagagcaatcgggggggcgcggagtaaaagggagaggga

SEQ ID NO: 76111 - DNA, 640 bp, Homo Sapiens
  misc_feature (65)..(98): n is a, c, g, or t
  misc_feature (100)..(110): n is a, c, g, or t
gttgttttaatctgaacgattattctcctgtaaaaataatttggggaggggcgggtgttgttcgnnnnnnnnnnnnnnnnnnnnnnnnnnnnnnnnnnannnnnnnnnnnacagtggcgcctgtctaaagtattttcacaacatgtttgataatcagtgctttaaaaagcagcagtgtcctatgaagtggaaatgtcagttctagagcattggatgtgaagttctggtcatgtcaccttgcgtgtctcaccctggaggagtgaaggtgggcgcccggcgggggggtgtggctgcaccccagcaccgggagggggcacgcacgacaccagaggaagggacagccccacccatgtcaacagcaggcaacctgtgttttcatttcaagtgggatacagtatttttttaataaggagccatacttttttttaagagtttgagatctgaatgtgatttctaattgtatcagacgttaatgttttaaagctataacaaagtttaaaatttctactttttgtttttcatttattttaactgttcttttatctattaaattgttgtatgtggatggggaagttttgtttctcctcttagcatttgtttctataaccagaaataaaattctatattaaagaaatgaaaa

SEQ ID NO: 76112 - DNA, 757 bp, Homo Sapiens
  misc_feature (23)..(24): n is a, c, g, or t
  misc_feature (41)..(42): n is a, c, g, or t
  misc_feature (734)..(734): n is a, c, g, or t
  misc_feature (737)..(737): n is a, c, g, or t
catgagagtagaggcactggtcnnccgtgccccacgcagcnnccctgcaggaaaactgaggcccttgggcacctcgacttgtgaacgagttgttggctgctccctccacagcttctgcagcagactgtccctgttgtaactgcccaaggcatgttttgcccaccagatcatggcccacatggaggcccacctgcctctgtctcactgaactagaagccgagcctagaaactaacacagccatcaagggaatgacttgggcggccttgggaaatcgatgagaaattgaacttcagggagggtggtcattgcctagaggtgctcattcatttaacagagcttccttaggttgatgctggaggcagaatcccggctgtcaaggggtgttcagttaaggggagcaacagaggacatgaaaaattgctatgactaaagcagggacaatttgctgccaaacacccatgcccagctgtatggctgggggctcctcgtatgcatggaacccccagaataaatatgctcagccaccctgtgggccgggcaatccagacagcaggcataaggcaccagttaccctgcatgttggcccagacctcaggtgctagggaaggcgggaaccttgggttgagtaatgctcgtctgtgtgttttagtttcatcacctgttatctgtgtttgctgaggagagtggaacagaaggggtggagttttgtataaataaagtttctttgtctccnganatggaagccatcaacaacca

SEQ ID NO: 76113 - DNA, 2313 bp, Homo Sapiens
  misc_feature (1105)..(1122): n is a, c, g, or t
  misc_feature (1124)..(1224): n is a, c, g, or t
  misc_feature (1278)..(1372): n is a, c, g, or t
gggagagagtatgaagtcgacggcgcgccgaattcggcacgaggagatccatggcaatggtctccccacagaccgcaggactgagcctggagagagaagttgcttgacggatgccacttgtcaggacagtatgtgagtgtctggagacagcatagctgaccccaatcccccagggctgaggacccctccaggcccctctctcctggaagtgctgcatatgcccctgtgcccagtggttgatgataccaccaccacctgcctacccatgggcccaagtttctgtggctcattacagggcatctgacccctgccacccagcatagacacacctcacagctgccctgccatgcagagccctggccgctggagactcttaaaccccccacagccctccaggtcctccagctctgtcagatggagggctctcgggcctagatcccactggtaggcctcgtggctggcagcagtgctctgggaataaacagctgccctagccccagagggatccctgcacccaggaggcctcctgacaccagccaaaatcctgacagcagggtctgccctcttgagtgtggggagcccctagtcctttaaggttggctgctaaggcctgtgctccaaagcaacgggctggggcagcctgcagctgcccacccaacctggtcttcacaccagattgcacaggatactgggtcttgtctatcttgatggagaagaggggttcctgcccaggatcttacaacacagcaagtagcatagagctctttcctttcctcttatcaggggaggttggggtcaggagttgctctctttgagatttaagtttccatagtagagggggtaatcaccttcaaggtaaaaccagtaataggcaagagtgaaggtacttatggaacccactaacacctctgcacagggcagttagccagctcaagttctttttcagagaaagggacttggccagtggtttaagtacctgccccttcacctctcagacgaggcagctgacgaggcagctggcccagtcttgggagtctgctcaggacagtggtggagctgggtcttgaaccccagtctgcacctaaaaaaactaaaggaaatggannnnnnnnnnnnnnnnnngnnnnnnnnnnnnnnnnnnnnnnnnnnnnnnnnnnnnnnnnnnnnnnnnnnnnnnnnnnnnnnnnnnnnnnnnnnnnnnnnnnnnnnnnnnnnnnnnnnnnncccccaccagctgggactacaggcacatgccaccatgcccggctaatttttttnnnnnnnnnnnnnnnnnnnnnnnnnnnnnnnnnnnnnnnnnnnnnnnnnnnnnnnnnnnnnnnnnnnnnnnnnnnnnnnnnnnnnnnnnnnnnnnggaaaatgggtcattttcaaaggggcaacagtgataccatccctgcactcctgggtcctgctcttccaatgcccaaggcatggcatggtggcagctgtgcccccgcccattgctttggagcacagatgactctgggggcagaggtgggctctgtttaggagggcagtgagaccacccagccaaattgcttctcaaccctagacaaagcctttggccaagagggaggtgctgttagttgggcagcccttctgggtttcagagaccggtgttggctctagactggtctcatctccattgccttaatgccaggtggcccaggagtacccatgcacagcagctgtggggtgtgggcatcttcaggtggtgttctggtaaaatcgttagaatagctgtatgaaggaaaccagtgggaggaaatgaagttttcaggatggtgggatgtgatttagacagtgcacatgctgttagggctgtcactagggagtggccttcatggagggtggtaacagcacctcagtccagccaaaatgtttagaaacactcagtctctggtcccagaggatggcttctcagggcatgccacaagttaaaggtcaccttcctgaaagatgaatgagaaagctgcccattctcaagactcatctgcctagggagggtcacagaggcaggatgtaagacacactgtgttgcattcttgcacaagtcatgaaaatggagccagagagcctggacatcagggacttttgcccacagcacatgacaccgacagctgcccagcctgttcacatgctggggaccagcacagcacctgaagccatgtgggacagttgggctttgttcattctagccacggggatgaaagggatcttttgcattgcagagattttatatatattttgtttgtaatgagccattctcaataaacattattctcactgcgc

SEQ ID NO: 76114 - DNA, 1429 bp, Homo Sapiens
aaggtagcgaggcctgggtggcgaatccggcacgaggcacagttcccgctcatcctctggcatccttatgcgcgtcactactacttctgcatgatgacagaagccgagcaggacaagtggcaggctgtgctgcaggactgcatccggcactgcaacaatggaatccctgaggactccaaggtagagggccctgcgttcacagatgccatccgcatgtaccgacagtccaaggagctgtacggcacctgggagatgctgtgtgggaacgaggtgcagatcctgagcaacctggtgatggaggagctgggccctgagctgaaggcagagctcggcccgcggctgaaggggaaaccgcaggagcggcagcggcagtggatccagatctcggacgccgtgtaccacatggtgtacgagcaggccaaggcgcgcttcgaggaggtgctgtccaaggtgcagcaggtgcagccggccatgcaggccgtcatccgaactgacatggaccaaattatcacctccaaggagcaccttgccagcaagatccgagccttcatcctccccaaggcagaggtgtgcgtgcggaaccatgtccagccctacatcccatccatcctggaggccctgatggtccccaccagccagggcttcactgaggtgcgagatgtcttcttcaaggaggtcacggacatgaacctgaacgtcatcaacgagggcggcattgacaagctgggcgagtacatggagaagctgtcccggctggcgtaccaccccctgaagatgcagagctgctatgagaagatggagtcgctgcgactggacgggctgcagcagcgatttgatgtgtccagcacgtccgtgttcaagcagcgagcccagatccacatgcgggagcaaatggacaatgccgtgtatacgttcgagaccctcctgcaccaggagctggggaaggggcccaccaaggaggagctgtgcaagtccatccagcgggtcctggagcgggtgctgaagaaatacgactacgacagcagctctgtgcggaagaggttcttccgggaggcgctgctgcagatcagcatcccgttcctgctcaagaagctggcccctacctgcaagtcggagctgccccggttccaggagctgatcttcgaggactttgccaggttcatcctggtggaaaacacgtacgaggaggtggtgctgcagaccgtcatgaaggacatcctgcaggctgtgaaggaggccgcggtgcagaggaagcacaactctaccgggacagcatggtcatgcacaacaggaccaactgcgactgctggcgagggcgcccccatcgactggggcgaggagtacagaacagcggcgggggcgggagcccagcccagcaccccggagtcagcaccctctcggaaagcgagggcgcaaccggtggtctcgg

SEQ ID NO: 76115 - DNA, 1495 bp, Homo Sapiens
  misc_feature (1423)..(1423): n is a, c, g, or t
  misc_feature (1449)..(1449): n is a, c, g, or t
ggtccggattcccgggatatcgtcgaccacgcgtccggcggcattgacaagctgggcgagtacatggagaagctgtcccggctggcgtaccaccccctgaagatgcagagctgctatgagaagatggagtcgctgcgactggacgggctgcagcagcgatttgatgtgtccagcacgtccgtgttcaagcagcgagcccagatccacatgcgggagcaaatggacaatgccgtgtatacgttcgagaccctcctgcaccaggagctggggaaggggcccaccaaggaggagctgtgcaagtccatccagcgggtcctggagcgggtgctgaagaaatacgactacgacagcagctctgtgcggaagaggttcttccgggaggcgctgctgcagatcagcatcccgttcctgctcaagaagctggcccctacctgcaagtcggagctgccccggttccaggagctgatcttcgaggactttgccaggttcatcctggtggaaaacacgtacgaggaggtggtgctgcagaccgtcatgaaggacatcctgcaggctgtgaaggaggccgcggtgcagaggaagcacaacctctaccgggacagcatggtcatgcacaacagcgaccccaacctgcacctgctggccgagggcgcccccatcgactggggcgaggagtacagcaacagcggcgggggcggcagccccagccccagcaccccggagtcagccaccctctcggaaaagcgacggcgcgccaagcaggtggtctctgtggtccaggatgaggaggtggggctgccctttgaggctagccctgagtcaccaccacctgcgtccccggacggtgtcactgagatccgaggcctgctggcccaaggtctgcggcctgagagccccccaccagccggccccctgctcaacggggcccccgctggggagagtccccagcctaaggccgcccccgaggcctcctcgccgcctgcctcacccctccagcatctcctgcctggaaaggttgtggaccttgggccccccaagcccagcgaccaggagactggagagcaggtgtccagccccagcagccaccccgccctccacaccaccaccgaggacagtgcaggggtgcagactgagttctaggccagtgggtccctgactgctgcacatggcacaggccgttcccttccggacccaggcaggctcagctctggggagggcaccctggtctgtgccttgtgggtggaggcggggcagggctgtgtggcaccgccagggagcgggcccacctgagtcactttattgggttcagtcaacactttcttgctccctgttttctcttctgtgggatgatctcagatgcagggggctggttttggggttttcctgcttgtgccaagggctggacactgctggggggctgganaagccctcccttcctgtccttctgtnggctccatcccctcatgggtgctgccatccttcctggagagaggga

SEQ ID NO: 76116 - DNA, 867 bp, Homo Sapiens
cctctgtgcctccagtcggcagagttgagtatcagctgtcatgctccgcattatctgctcgtgtgacacgactgctgcaatcaatcgtgtgcagccgtcagtgcaggactcatctctcaagagctcgcatctcaggggtgtagcccgccggacagctctcatgtactcgcccagctgtcaatgccgccctcgttgatgacgttcaggttcatgtccgtgacctccttgaagaagacatctcgcacctcagtgaagccctggctggtggggaccatcagggcctccaggatggatgggatgtagggctggacatggttccgcacgcacacctctgccttggggaggatgaaggctcggatcttgaaggcaagatgctccttggaggtgataatttgatccatgtcagttcggatgacggcctgcatggccggctgcacctgatgcaccttggacagcacctcctcgaagcgcgccttggcctgctcgtacaccatgtggtacacggcgtccgagatctggatccactgccgctgccgctcctgcggtttccccttcagccgcgggccgagctctgccttcagctcagggcccagctcctccatcaccaggttgctcaggatctgcacctcgttcccacacagcatctcccaggtgccgtacagctccttggactgtcggtacatgcggatggcatctgtgaacgcagggccctctaccttggagtcctcagggattccattgttgcagtgccggatgcagtcctgcagcacagcctgccacttgtcctgctcggcttctgtcatcatgcagaagtagtagtgacgcgcacctcgtgccgaattcggcgcgccgtcgacttcatactct

SEQ ID NO: 76117 - DNA, 1500 bp, Homo Sapiens
  misc_feature (65)..(126): n is a, c, g, or t
gtatgatgtcgacggcgcgccgaattcggcacgaggggacggggcccgaccgggagcggagccgnnnnnnnnnnnnnnnnnnnnnnnnnnnnnnnnnnnnnnnnnnnnnnnnnnnnnnnnnnnnnntccatggcgccagcggcgtccgcctgagcagcgcgggcaacagcggcggcgtcggccggatcgggccgcgacacctcctggccatgggggacgtgctgtccacgcacctggacgacgcccggcgccagcacatcacagaaaaaaaccgggaagatcctgacggagttcctccagttctatgaagaccagtatggcgtggctctcttcaacagcatgcgccatgagattgagggcacggggctgccgcaggcccagctgctctggcgcaaggtgccactggacgagcacatcgtcttctcggggaacctcttccagcaccaggaggacagcaagaagtggagaaaccgcttcagcctcgtgccccacaactacgggctggtgctctacgaaaacaaagcggcctatgagcggcaggtcccaccacgagccgtcatcaacagtgcaggctacaaaatcctcacgtccgtggaccaatacctggagctcattggcaactccttaccagggaccacggcaaagtcgggcagtgcccccatcctcaagtgccccacacagttcccgctcatcctctggcatccttatgcgcgtcactactacttctgcatgatgacagaagccgagcaggacaagtggcaggctgtgctgcaggactgcatccggcactgcaacaatggaatccctgaggactccaaggtagagggccctgcgttcacagatgccatccgcatgtaccgacagtccaaggagctgtacggcacctgggagatgctgtgtgggaacgaggtgcagatcctgagcaacctggtgatggaggagctgggccctgagctgaaggcagagctcggcccgcggctgaaggggaaaccgcaggagcggcagcggcagtggatccagatctcggacgccgtgtaccacatggtgtacgagcaggccaaggcgcgcttcgaggaggtgctgtccaaggtgcagcaggtgcagccggccatgcaggccgtcatccgaactgacatggaccaaattatcacctccaaggagcaccttgccagcaagatccgagccttcatcctccccaaggcagaggtgtgcgtgcggaaccatgtccagccctacatcccatccatcctggaggccctgatggtccccaccagccagggcttcactgaggtgcgagatgtcttcttcaggaagtccggacatgaacctgaacgtctcacgagggcgcttgacaactgggcaatactggaaaactgtccggtgggtacacccctgaaatgatactgcagtaaaatgatcctgtatagaggctcacacattatggtcgcatcttttacacaccaatcatgggtaaagaatgtgatttcaaactctccaatg

SEQ ID NO: 76118 - DNA, 882 bp, Homo Sapiens
tgggagagagtatgaagtcgacggcgcgccgaattcggcacgaggcagatgccatccgcatgtaccgacagtccaaggagctgtacggcacctgggagatgctgtgtgggaacgaggtgcagatcctgagcaacctggtgatggaggagctgggccctgagctgaaggcagagctcggcccgcggctgaaggggaaaccgcaggagcggcagcggcagtggatccagatctcggacgccgtgtaccacatggtgtacgagcaggccaaggcgcgcttcgaggaggtgctgtccaaggtgcagcaggtgcagccggccatgcaggccgtcatccgaactgacatggaccaaattatcacctccaaggagcaccttgccagcaagatccgagccttcatcctccccaaggcagaggtgtgcgtgcggaaccatgtccagccctacatcccatccatcctggaggccctgatggtccccaccagccagggcttcactgaggtgcgagatgtcttcttcaaggaggtcacggacatgaacctgaacgtcatcaacgagggcggcattgacaagctgggcgagtacatggagaagctgtcccggctggcgtaccaccccctgaagatgcagagctgctatgagaagatggagtcgctgcgactggacaggctgcagcagcgattgatgtgtcagcacgtccgtgttcagcagcgagcccaaatcccatgcggagaaatggaaatgctttgaactttcaaacctctgcccttagctgggagggccacaaggagacttgagtcctcatgggctgagctggcgaaaaaacactcaatactctgtggaaagtttcgggggttgtaaacttcttctcaaatgccttgaatga

SEQ ID NO: 76119 - DNA, 882 bp, Homo Sapiens
  misc_feature (737)..(737): n is a, c, g, or t
  misc_feature (850)..(850): n is a, c, g, or t
agggggagagagtatgaagtcgacggcgcgccgaattcggcacgaggaggactcaaggtagagggccctgcgttcacagatgccatccgcatgtaccgacagtccaaggagctgtacggcacctgggagatgctgtgtgggaacgaggtgcagatcctgagcaacctggtgatggaggagctgggccctgagctgaaggcagagctcggcccgcggctgaaggggaaaccgcaggagcggcagcggcagtggatccagatctcggacgccgtgtaccacatggtgtacgagcaggccaaggcgcgcttcgaggaggtgctgtccaaggtgcagcaggtgcagccggccatgcaggccgtcatccgaactgacatggaccaaattatcacctccaaggagcaccttgccagcaagatccgagccttcatcctccccaaggcagaggtgtgcgtgcggaaccatgtccagccctacatcccatccatcctggaggccctgatggtccccaccagccagggcttcactgaggtgcgagatgtcttcttcaaggaggtcacggacatgaacctgaacgtcatcaacgagggcggcattgacaagctgggcgagtacatggagaagctgtcccggctggcgtaccaccccctgaagatgcagagctgctatgagaagatggagtcgctgcgactggacgggctgcagcagcgatttgatgtgtccagcacgtccgtgttcangcagcgagccagatcacatgcggagcaatggacatgcgtgtatcgtcgagacctctgcacagagctgggagggccacaagagactgtgcatcatcagcgtctgacggtgcganatacaacagcacctggcgaagtctcggagctg

SEQ ID NO: 76120 - DNA, 1565 bp, Homo Sapiens
  misc_feature (1237)..(1238): n is a, c, g, or t
ggtcctaggtagcgaggcctgggtggcgaattcggcacgaggctgagttctaggccagtgggtccctgactgctgcacatggcacaggccgttcccttccggacccaggcaggctcagctctggggagggcaccctggtctgtgccttgtgggtggaggcggggcagggctgtgtggcaccgccagggagcgggcccacctgagtcactttattgggttcagtcaacactttcttgctccctgttttctcttctgtgggatgatctcagatgcaggggctggttttggggttttcctgcttgtgccaagggctggacactgctggggggctggaaagcccctcccttcctgtccttctgtggcctccatcccctcatgggtgctgccatccttcctggagagagggaggtgaaagctggtgtgagcccagtgggttcccgcccactcacccaggagctggctgggccaggaccgggagagggagcactgctgccctcctggccctgctccttccgcagttaggggtggaccgagcctcgctttccccactgttctggagggaaggggaaggagggggtcttcaggctggagccaggctgggggtgctgggtggagagatgagatttagggggtgcctcatggggtgggcaggcctggggtgaaatgagaaaggcccagaacgtgcaggtctgcggaggggaagtgtcctgagtgaaggaggggacccccatcctgggggatgctgggagtgagtgagtgagtgagatggctgagtgagggttatggggagcctgaggttttatgggcctgtgtatccccttctcccggccccagcctgcctccctcctgcccgcctggcccacaggtctccctctggtccctgtccctctggtggttggggatggagcggcagcaaggggtgtaatggggctgggttctgtcttctacaggccaccccgaggtcctcagtggttgcctggggagccggacggggctcctgaggggtacaggttgggtgggccctccctgagggtctggggtcaggctttggcctctgctgcctctcagtcaccaagtcacctccctctgaaaatccagtcccttctttggatgtccttgtgagtcactctgggcctggctgtcgtccctcctcagcttcttgttcctgggacaagggtcaagccaggatgggcccaggcctgggatcccccacccaggacccccaggcccctccccnntgctgctttgcggggggcagggcagaaatggactccttttgggtccccgaggtggggtcccctcccagccctgcatcctccgtgccgtagacctgctccccagaggaggggccttgacccacaggacgtgtggtggcgcctggcactcagggacccccagctgccccagccctggtctctggcgcatctcttccctcttgtcccgaagatctgcgcctctagtgccttttgaggggttcccatcatccctccctgatattgtattgaaaatattatgcacactgttcatgcttctactaatcaataaacgctttatttaaagccaaa

SEQ ID NO: 76121 - DNA, 1060 bp, Homo Sapiens
  misc_feature (117)..(117): n is a, c, g, or t
  misc_feature (167)..(168): n is a, c, g, or t
  misc_feature (186)..(186): n is a, c, g, or t
  misc_feature (199)..(199): n is a, c, g, or t
  misc_feature (207)..(208): n is a, c, g, or t
  misc_feature (270)..(270): n is a, c, g, or t
  misc_feature (983)..(1002): n is a, c, g, or t
catcacccagacagtagctgtacgattatcgatccttaggattgcctgagccagatcgacgagcgtgtggccaaggagactagcagttgcaccagcccacctcataggtctgcagcntgtctgagagcctgtgctgcctgcagagtacaaagctcaggacgctgctnntggggactcagccaagcncctggcaccatcntgctttgnncagggatgagtgagccctgcagagagcatcccagccaaagttcccactcagcttgccccctntgcatgtgggtagaggatgtactgggacttggcatttaggattccatctggcccagcccctgaaggtcctggggaagcaggtctcaattctgaatagccagtggggcacactgactgtcctccccaggggaactgcagcgccctcctccccactgccccctgcagcccctgagatattttgctcactatccctccccacttgcttccctgatatgtgctctgagcttccctgaaccaggatctgcctattactgctgtgccccatggggggctccttccctgcctgacccactgttgcagaatgaagtcacctcgcccccctcttcctttaatcttcaggcctcactggcctgtcctgctcagcttgggccagtgacaatctgcaaggctgaacaacagcccctggggttgaggcccctgtggctcctggtcaggctgcccgttgtggggaggggcagtgttagagcagggctggtcataccctctggagttcagaggaagaggtaggaccagtgcttttttgtttcttttgttatttttggttgggtgggtgggaaggtctctttaaaatggggcaggccacacccccattccgtgcctcaatttccccatctgtaaactgtagatatgactactgacctacctcgcagggggctgtggggaggcataagctgatgtttgtaaagcgctttgtaaataaacgtgctctctgnnnnnnnnnnnnnnnnnnnncctagcaggcggccgcaagcttattccctttagttgagggttaattttagcttggcac

SEQ ID NO: 76122 - DNA, 721 bp, Homo Sapiens
  misc_feature (351)..(379): n is a, c, g, or t
ttttatttttaaaaattaaaaataattatatttcctctgttgcatgaggattctcatctgtgcttataatggttagagattttatttgtgtggaatgaagtgaggcttgtagtcatggttctagtgtttcagtttgccaagtctgtttactgcagtgaaattcatcaaatgtttcagtgtggttttctgtagcctatcatttactggctatttttttatgtacacctttaggattttctgcctactctatccagttgtccaaatgatatcctacattttacaaatgccctttcagtttctattttctttttccattaaattgccctcatgtcctaatgtgcagtttgtaannnnnnnnnnnnnnnnnnnnnnnnnnnnnaatttgattttcaagagtgctagacttccaatttgagagattaaataatttaattcaggcaaacatttttcattggaatttcacagttcattgtaatgaaaatgttaatcctggatgacctttgacatacagtaatgaatcttggatattaatgaatttgttagtagcatcttgatgtgtgttttaatgagttattttcaaagttgtgcattaaaccaaagttggcatactggaagtgtttatatcaagttccatttggctactgatggacaaaaaatagaaatgccttcctatggagagtatttttcctttaaaaaattaaaaaggttaattattttgact

SEQ ID NO: 76123 - DNA, 1284 bp, Homo Sapiens
ggaattcccgggatccagccgggaccgctgacctggcgctttgtgcggctccaggcctccgagtggactccagaaagcctgaaaagctatcatggcagcaaggcccaagctccactatcccaacggaagaggccggatggagtccgtgagatgggttttagctgccgccggagtcgagtttgatgaagaatttctggaaacaaaagaacagttgtacaagttgcaggatggtaaccacctgctgttccaacaagtgcccatggttgaaattgacgggatgaagttggtacagacccgaagcattctccactacatagcagacaagcacaatctctttggcaagaacctcaaggagagaaccctgattgacatgtacgtggaggggacactggatctgctggaactgcttatcatgcatcctttcttaaaaccagatgatcagcaaaaggaagtggttaacatggcccagaaggctataattagatactttcctgtgtttgaaaagattttaaggggtcacggacaaagctttcttgttggtaatcagctgagccttgcagatgtgattttactccaaaccattttagctctagaagagaaaattcctaatatcctgtctgcatttcctttcctccaggaatacacagtgaaactaagtaatatccctacaattaagagattccttgaacctggcagcaagaagaagcctccccctgatgaaatttatgtgagaaccgtctacaacatctttaggccataaaacaacacatccatgtgtgagtgacagtgtgttcctagagatggtattgtctacagtcatgtcttaatggatcccagctctgtcatggtgctatctatgtattaagttgggtcctaagttgggtcttttgtgtcaaagagatcatctcttctagaaatatcaaccttttttgtccagtaaataattgttaggggatctttattggaaaacttttttggagaggctggtatttaagttagatctgattgggctactcatgtcctgtagccagttcatcctcataataagaatgggcaggatctcttgttctctcctgagtgtctttctactctcctgagcgtctttctgctctccttatcctgttctcttatccttatcccctccagtctctgcctaatttttagtgtttaataacaaccgaatgtctagtaaatgactctcctctgagctgtaataaataaaatggtagtaatgaatgcaatcagtgttagccaaaataaagaatttatgagtcattaaaaaaa

SEQ ID NO: 76124 - DNA, 840 bp, Homo Sapiens
cagtcgacggtaccggacatatgcccgggaattcggccattacggccgggggtgcggctccaggcctccgagtggactccagaaagcctgaaaagctatcatggcagcaaggcccaagctccactatcccaacggaagaggccggatggagtccgtgagatgggttttagctgccgccggagtcgagtttgatgaagaatttctggaaacaaaagaacagttgtacaagttgcaggatggtaaccacctgctgttccaacaagtgcccatggttgaaattgacgggatgaagttggtacagacccgaagcattctccactacatagcagacaagcacaatctctttggcaagaacctcaaggagagaaccctgattgacatgtacgtggaggggacactggatctgctggaactgcttatcatgcatcctttcttaaaaccagatgatcagcaaaaggaagtggttaacatggcccagaaggctataattagatactttcctgtgtttgaaaagattttaaggggtcacggacaaagctttcttgtgggtaatcagctgagccttgcagatgtgattttactccaaagcattttagctctagaagagaaaattcctaatatcctgtctgcatttcctttcctccaggaatacacagtgaaactaagtaatatccctacaattaagagattccttgaacctggcagcaagaagaagctccccctgatgaaattatgtgagaaccgtctacaagatctttaggcataaaacaaacattcatgtgtgagtgacagtgtgttcctacagatggtaatgtctacagtacatgtctaatggatcca

SEQ ID NO: 76125 - DNA, 1108 bp, Homo Sapiens
  misc_feature (982)..(1029): n is a, c, g, or t
gactttgcccacaagatgccttgtggagattttattatatagagtgtaaaatgaattgtcagtcaaataaaaagaacactttgttttcttaaaaaccccatgcataacattttccaattgtcttttttaatagttagacatttcaagcattataagaaaaataaggagaaaaaaccagaaactgtaacttcagtacatttcaaacggaatgtccctcaggtcaattagaaatgcaagaaaaaatagcttcaattccgttttttttcctttaaaaatacatgttatctgtacaagatacactacagtaaacactgggaaatcatattatccctttcattaaatcaaaattatttaattcataatgcggttaatactagatttatttattcatctagttaatctggacaaaatattaagaaaatatttaaaagaaaaaagcaacaacaccttggaattaaaaatagttataactacatttttatacggtttaatgttccacagtgtgtgttaaaagttatattgaatttcttaatattaaaaataacagtatttatatttctgagataatagagaaaggttttttgttttgttttaaaaacaagcttggaggtcttagatacacaattgcaactggtaatggaggcatgagaaaaacgtaggctaaacacacgagcacatttttatattacccctttcgaactctagaaattatacaaaccctacaaaatgcccctcccaacccctgttggacagcaatacaattatctgtctcagttcagaattcacatcattcattacaatacataatagttcagtttttttaaaaatgcaataaaaccagacagccaagatacaagaaattagaagtaaaacattaaatgaatttacacatttaagaatacttaaatactgctttaaaatttttaaaaagaatttgttacataccacctaagacttccaagccactttctgttgcaacagnnnnnnnnnnnnnnnnnnnnnnnnnnnnnnnnnnnnnnnnnnnnnnnntcatgttgaaatgtcacagctctgagcacattctggtgcctgactttgtaggtattgctccaaaaagaatcccagagct

SEQ ID NO: 76126 - DNA, 2026 bp, Homo Sapiens
  misc_feature (278)..(278): n is a, c, g, or t
  misc_feature (283)..(283): n is a, c, g, or t
cgcatgacaaaatgtagacaagatgcctcaaggtatggtagcaagcaagattttgccctttaggttttcgaagacacctttctttcattatgcactcgggacaagaaaattaatagagcgttattccacagaaggcctctagccagagatcttgagtgtagtgcaagggactcatgctttgcgaacttgtccctgtgactagtagattcccccttttcctgtgtttaggatttagtagtgcataaagcattaatatccataaacatacctagaagttngtttngcttttaatttaaaggaagcagtaaccacaaagcttccgctcagggttttttctttcttcaagtctccaagggctcttcagcgtcacaagccagcaactctctttgcattaaaatttcaaagtttaattaatataattaaaagcaacagcaagcagcagcctgtgaagattttgctcatcttttttatgccttttgacattgaatgacctattactgtatgcgcattacttggattttgaggggcactctaccttggttatgattcagtagaggaaaaagaccacctttcttcaatttacaaattaaatcttctggagggtcgctatcacaaaacattgacgatgtatgtattataattttttagaaaaaccaccatcgtgtcacgtcgacgatgccaaattatgttagcgtgagcagaaacaccgtgggggaggaaggcagcagctgaagaaaaaagctcaaatgatctagtcactttcgatactgtacttcagatgcgaaatggatattcgagtggaaacctgacaaagtgcgcctgctttgatgtgaactggtatagacaatgaccagtggctgggtcagtgggatgtctctctgtgagcacaaaggcttatcaaatgacactaaagataagttcaacaaccatcacattggaagggagaaggcgaacatttcatgtttggcgggcatgtgagtgcacaagatggaaagagcgattggagcatcctggtataattacccccattgtgctcttaatggaaatttcaaaggacgggagtattctgttggttggtgtccaggtttgtggcactgttccaagaggccttacacacacacacaaatatataattttctatacatatatatcctctagcttgaaacttttgctcaagtttatttatgtcactggctggctggatccaaagtcatgtgtccacacattcataaataaaaattttacctatgcctgtgctaccatttctttaagcccacataaagctaatgccttcttgggttgaatatgcagttgttatgcttagttgcaggaatggaattctattcagttccaaaatgtccctcatgttcacagatgatactattggcagtagctgcatatgcaagtgtaacttggaagcctgatatagtatacccaaccctttctgcaatgagttattgtatccctttgttctgcatatgcatctggaacaagacctaatgtggcttccttaaatgggcacttcatttctgatgagtgcacaccaattattgctattttaatatcattgagaatactacagaagctaaggctatgtttctttggtaactacttcaaatttctctagaattatgtagcatacttacattttgctgcatgaacaatgaaaattaacctctgcctttaaatggaaaaataactttctgtagattgttatacagctactatgaagagctcttaatgaagaggaagtggcagtggtctatatgtagactgaaaaaatatcattaataaagttcaaagactgatggaatttcattgcccttaaagatatgaaccagatctgtgtttatgcttttctccaattatactaactagcagttgaaaagaattgtttgaagagtgtgtattttcttagcaaaagacagatcaaaaatcctatatttttccacaaaaaagattaaatgaagccattttattaattaagggctttatatttatattgagaaaagagttcgggagaaac

SEQ ID NO: 76127 - DNA, 698 bp, Homo Sapiens
  misc_feature (43)..(43): n is a, c, g, or t
ctgtaagtattgttttctgatgccatacccttgtcatacatantattaaatgaccaatattatgtatgaagtagacaaaaaaatttactcaaacttcattcaaatcctaattgtgataatttttgttttatatttaattataaaccaaaatacatttgcatttttaagctaatttgtctcaaaattttgctttatatttttggatcaggttaaagtcctgtggatcccctgaatgttattgtccctcttgattggtttttacttctgagctatacgtcaaaagacacataagcttcaaaagtcaagacaaacctcatttgccataaaaatcaagatatagatgttctgttccgtaaactccttgaaaaacattttaaagtcatcaatatgatctgtttcccatgaaacttaagttagctttcttattggagttatttcttttctgtaagtctgaaaagtagagattttgttttacgcattttagtaacctgcaacaaccaactctaaaaaagatttggcttgtaatgacggtctctgcttttttgggtttggagtacacaattgtaatatttacttagttatttgtgtttttctttgttcaaggtattgactagtttcataaattttttgcaagtttttctttcattggttggaaagcagattacattttgcactattaaaataagtttattacttta

SEQ ID NO: 76128 - DNA, 726 bp, Homo Sapiens
  misc_feature (76)..(76): n is a, c, g, or t
cagatgcatgcatgttttctgcaccttgctatcatttttcagtccatttttcacatgtatacatagtgattatttntaaatgcaaccctgatttcacatgcctcatgttgaaatatcgtgtggcttattgtggacttaaagtgtaacattctccttatggtatgtaaggacttttgtacaaaccaatgcctatctatctatcatttctgaaaactttttcctcctatgcaatattttctggcctctgtgaacaacttgtagttccttgagatttctattatcacttatgtttttgcaaatctgcaattgaaatgcccttgttccttgttaatgcctattgaatctatatgaacctgtacgtgtgtttctcactgtgataatataatcattgcatgttttatctttcccactagaaagcttctagaaagctaggactatcttttttgtctgtgtaatttttgcatcacaagctatatttaaatgtgggtgcagtgagtggctgttttctgccacatggagaaacatggtctgcagtgagagagaagaatgaagccatgatgaaagcaaaatcaagaaagagtcccgattgtgttccagtacctggttcttctggtcttcatgttcaggtccacctctgcccttttcatgtcttgattgttgaattcttctgtgagatactccaaatatcctaataaattctcatgtttgcttcatctggaaaaaaaa

SEQ ID NO: 76129 - DNA, 1846 bp, Homo Sapiens
aacagctggtcgcgccgggatttcggatgtgccagaggccaggaggccctaaggcaggcagggagacggtggagaatctgcctcccctgcctttggaccctgtcctcagagctcctgggggccgccctgctccatcccaggaccttaaccagcgctccctggagcactctgaggggcctgtgggcagagaccctgctggccctcctgacggcggccctgacacagagcctcgggcagcccaggcaagctgagagatggccagaaggatgccgcccccaggcagctggcactgtgaaggagctccccaagggcccggagcaggtgcccgtgccagaccccgccagggaagccgggggcccagaggagcgcctcgcagaggaattccctgggcaaagtcaggacgttactggcggttcccaagacaggaaaaaacctgggaaggaggtggcagccactggcaccagcattctgaaggaagccaactggctcgtggcagggccaggagcagagacgggggaccctcgcatgaagcccaagcaagtgagccgagacctgggccttgcagcggacctgcccggtggggcggaaggagcagctgcacagccccaggctgtgttacgccagccggaactgcgggtcatctctgatggcgagcagggtggacagcagggccaccggctggaccatggcggtcacctggagatgagaaaggcccgcgggggggaccatgtgcctgtgtcccacgagcagccgagaggcggggaggacgctgctgtccaggagcccaggcagaggccagagccagagctggggctcaaacggagctgtcccggggggccagaggccggacaatgccaagcccaaccgggacctgaaactgcaggctggctccgacctccggaggcgacggcgggaccttggccctcatgcagagggtcagctggccccgagggatggggtcattggccttaaccccctgcctgatgtccaggtgaacgacctccgtggcgccctggatgcccagctccgccaggctgcggggggagctctgcaggtggtccacagccggcagcttagacaggcgcctgggcctccagaggagtcctagcacctgctggccatgagggccacgccagccactgccctcctcggccagcagcaggtctgtctcagccgcatcccagccaaactctggaggtcacactcgcctctccccagggtttcatgtctgaggccctcaccaagtgtgagtgacagtataaaagattcactgtggcatcgtttccagaatgttcttgctgtcgttctgttgcagctcttagtctgaggtcctctgacctctagactctgagctcactccagcctgtgaggagaaacggcctccgctgcgagctggctggtgcactcccaggctcaggctggggagctgctgcgtctgtggtcaggcctcctgctcctgccagggagcacgcgtggtcttcgggttgagctcggccgtgcgtggaggtgcgcatggctgctcatggtcccaacacaggctactgtgagagccagcatccaaccccacgcttgcagtgactcagaatgataattattatgactgtttatcgatgcttcccacagtgtggtagaaagtcttgaataaacacttttgccttcacccagcctcggtggatgctgtttggtgtccaggaagcacagggagcaggggccagacaagccgggtgtccagggcactgccggtgccaccctttgcactcctcatggttgcccagccctccattgtctgtgtttttcaaaatccaattgtggctttttttaaaaagtaaaaaacaccactgataaa

SEQ ID NO: 76130 - DNA, 859 bp, Homo Sapiens
cagaagctggcaaggcggagatgctggaccacgccgtcctgcttcaggtgatcaaagaacagcaggtcagcaaaagcgcttgctggaccagcaggagaactgctgcggtgatcgaaggagcagcaacaaggagatccaccacagagcaggagacgaggaggataaacccaggcagggtagccggctgcggatggatgggtgggccagcaggggtctcctgctgtcctcatgcggctgggtctgaggctcggtggcctctagacctgagcgtgagtctggatttggttcccaatgctgttgttgactggttcttctgagcccctccactggcagcctgtgtacagtgctgtggctaaattgatgaccgacttcatttgcagtggaggtgcatcaagagcccggggcagcggtgcccagaggccaggaggcccctgaaggcaaggccagggagacggtggagaatctgcctcccctgcctttggaccctgtcctcagagctcctggggcccgccctgctccatcccaggaccttaaccagcgctccctggagcactctgaggggcctgtgggcagagaccctgctggccctcctgacggcggccctgacacagagcctcgggcagcccagggcaagctgagagatggccagaaggatgccgcccccagggcagctggcactgtgaaggagctccccaagggcccggagcaggtgcccgtgccagaccccgccagggaagccgggggcccagaggagccactagcagaaggaatcaccaggacaaagtcagaacgtgaccagccctcgtgccgaattcgccacccaggcctcgctaccttaggaccgtatagtactggccgt

SEQ ID NO: 76131 - DNA, 2150 bp, Homo Sapiens
tagctgctgagatggagtttctgccttaaaatctgaaacaaaaaaagggacaaattgctggtagatctactgactgtagccatcaccagaacacttagtttcttcccagacatgaatttcctgacaggctctgagccagaaacacactgtgggcgtgcatctggttcagccctggatatgcctccactgtggagggaagcattggaactggagttgtgcacagcaccgcagctagtgggcctggctgggggtgcagaagggcagggtagttctttccatttccccttgcagctacacttactttctccctgactaccaaatggagtgacggttgaagaatcaagctcataatatgatacacccagacagacccagaaatcttttgatttccccagcgagatacttaccactctctcttctctttcccatggttaaaacaggagttgtgttctctgtcgctgctaaattattcttcacttgagtgaagcaaatatttagcttccaaataaagtatattttgttctgaactggcagtttaagaggagataccgtagtctagattgtctttgaggtagaatatatgatggaccacatagtttaagattacaaggtactttccctcttctctcaggccatgcatttgaataaagtgcctcccttagcctgagctcctaaagacctcttgtacttggttgcaaactcagatctctagtctagtctagtctagtctagtcatgtgtgactgtgtactgagataccactagcccagtttgctgggtctctatgttttggaagttgggggtttaataatatttaatgtctttttaggatcataaacataaataggtttgttgatattcaggccttcagaatttaagggttttaaatatagcattcagattgtaattggtatgtttttgccatctggtccactcaattgtatatttttattttgcaaaacaacccaaaacttactttatgttgctttgttcagtaccttttgaattcccccagaagagttgttttcaaaacaaacattccagaatgaatgtcgctcttcaatggaacgtctttattgtgcttgaagtatttcttctctggttgtaattctaaattacagagtcatttgagctttctcccctcccgctagtatctttacaggagcagggaagagcagtagaggatgtataattttgggcgaagttaaattacaatttatttgaggttattcctaaacctatttatttggtgttttggaggagatcacacactaagagaacgttgattgcctcggctattgtgctggctggacactttggtcacttttgaagcatgttaataaatgtcactgattaaaacagctggagcatttccttccctttccagtgaaggagcagcatagtgaaatcctggcacccctcacctttttgtgatgacaagatggctgacagtcacggagtccaggagaaggtgctgcttctccttgctttctgagtaaacagagtaatgttttttttcttattttcccaaagaaagaaaagggggaaaatatatttgtatgtttagaccagccaaattctgtcattattttagtatcaacctgctgtatattagagcaactgaatataatatggaataagtttgaccaggtcaagttttaggatatagttgaatttctttaaaaagttttctattttatctaaaatctttctattatatctaaattagaatgatcatcctgcgcaaattcagattactgtttgctggctaattgacagtatttctcagcatcactatgtagcattctgttttagcatctttgaattatgatcatttgatttggctaattacaaaaagtacaggtttaaactggacttaccttgagttaaaggcaaagaaaatctaaaaacataaatgttatatttcacaagaaatcagttgcatattatccattacatatttagttttaaaaggaggagtcaccttgaattattttctgagtcaccttgagttatttgatctctcagcctgctttctcatctgtaaaaaaggggggaggataactttcacagggtaattggtaggctaaataggagttacagaaaactgttaaatagggaagaactacattaaatttaaatattcacatt

SEQ ID NO: 76132 - DNA, 901 bp, Homo Sapiens
  misc_feature (250)..(281): n is a, c, g, or t
aaaggcaaaattttttagctttcccaaattaaaagttatatttttggttttggaacttggcaggtttaaagaggaagattacccgtagttttaggatgttctttgaggttagaattatatggatggacccacatagtttaaagatttacaaggtactttcccttttttctcaggccatgcattggaataaagtgcttcccttagcctgagctcctaaagacctcttgtacttggttgcaaactcagatcnnnnnnnnnnnnnnnnnnnnnnnnnnnnnnnnatgtgtgactgtgtactgagataccactagcccagtttgctgggtctctatgttttggaagttgggggtttaataatatttaatgtctttttaggatcataaacataaataggtttgttgatattcaggccttcagaatttaagggttttaaatatagcattcagattgtaattggtatgtttttgccatctggtccactcaattgtatatttttattttgcaaaacaacccaaaacttactttacgttgctttgttcagtaccttttgaattcccccagaagagttgttttcaaaacaaacattccagaatgaatgtcgctcttcaatggaacgtctttattgtgcttgaagtatttcttctctggttgtaattctaaattacagagtcatttgagctttctcccctcccgctagtatctttacaggagcagggaagagcagtagaggatgtataattttgggcgaagttaaattacaatttatttgaggttattcctaaacctatttatttggtgttttggaggagatcacacactaagagaacgttgattgcctcggctattgtgctggctggacactttggtcacttttgaagcatgttaataaatgtcactgatt

SEQ ID NO: 76133 - DNA, 534 bp, Homo Sapiens
tgggcgcaagccatcctcccctctctgcctcctgagtagagacaaccatgcccggctaattttttttacaagaccactgttaaaagcccggaagaatcctgcagctcgctgtggtgggctgttttgcgtgtgctagagtctattcagcatttcagacagaaaagcctcagcattcctcttctgtgggtctccaccgtagctcctttgaaatctctgctttctcacactttcccatctgagtctttgtgccatggccgtcccctcctctccaatacgaagagcccacactcagtttccctccctcctcctccatcccacactgcccgagcacctcacctcccaatgactgactcgtccccggtcttgcacacacctggggagtgtagctggcctgtcctgcacaccagccttgcaggctcagtgagtagaccatccttgtctgctcttgccgggtgcagctgtgtgtagtggcccaagggggggtcatctgggagggaccaggaagcataagtgacatgcaccatgaggaagcgt

SEQ ID NO: 76134 - DNA, 152 bp, Homo Sapiens
gcctactactactactatacggctgcgagaagacgacagaaggggaatgctgaggcttttctgtctgaaatgctgaatagactctagcacacgcaaaacagcccaccacagcgagctgcaggattcttccgggcttttaacagtggtcttgt

SEQ ID NO: 76135 - DNA, 926 bp, Homo Sapiens
ggcaggacactgcctgcatccccgtatctgggtcagcaagtgggtggactattcggacaagtacggccttgggtaatcagctctgtgataacagcgtgggggtgctcttcaatgactcaacacgcctcatcctctacaatgatggtgacagcctgcagtacatagagcgtgacggcactgagtcctacctcaccgtgagttcccatcccaactccttgatgaagaagatcaccctccttaaatatttccgcaattacatgagcgagcacttgctgaaggcaggtgccaacatcacgccgcgcgaaggtgatgagctcgcccggctgccctacctacggacctggttccgcacccgcagcgccatcatcctgcacctcagcaacggcagcgtgcagatcaacttcttccaggatcacaccaagctcatcttgtgcccactgatggcagccgtgacctacatcgacgagaagcgggacttccgcacataccgcctgagtctcctggaggagtacggctgctgcaaggagctggccagccggctccgctacgcccgcactatggtggacaagctgctgagctcacgctcggccagcaaccgtctcaaggcctcctaatagctgccctcccctccggactggtgccctcctcactcccacctgcatctggggcccatactggttggctcccgcggtgccatgtctgcagtgtgccccccagccccggtggctgggcagagctgcatcatccttgcaggtgggggttgctgtgtaagttatttttgtacatgttcgggtgtgggttctacagccttgtccccctccccctcaaccccaccatatgaattgtacagaatatttctattgaattcggaactgtcctttccttggctttatgcacattaaacagatgtgaatattcaaaaaaaa

SEQ ID NO: 76136 - DNA, 1491 bp, Homo Sapiens
  misc_feature (753)..(753): n is a, c, g, or t
aaccatacggcctaggtacgaggccggttgttaattcggcacgaggacagccttacccatttactgctactccgtgcaccacagcagtggctggggtgatcctctgaaggccaggtggcagcctaatgcttggggcagggtctgtggcccccctgagttttgggctctgcgtgtgtttgcggggtggggatgtggaggcgcgcagccccaggctcactgtgcgctgtggttcaggcttccaggccctggtgctgacagccctgttggtggggctggggatgtcagcggggctgcctctgggggcgctcccggaaatgctcctgcccttggcgtttgtcgccaccctcaccgctttcatcttcagcctctttctctacatgaaggcgcaggtagccccagtttcggccctggcacctggggggaactcaggcaatccgatttacgacttttttctgggacgagagctcaaccctcgtatctgtttcttcgacttcaaatatttctgtgaactgcgacccggcctcatcggctgggtcctcatcaacctggccctgttgatgaaggaggcagagcttcgaggcagtccctcactggccatgtggctggtcaatggcttccagttgctctacgtgggtgatgccctctggcacgaggtgaggctggactggacgagggtgggtgtctgagggccgcatagggactaagccagtgtgtctgggtcttgtccctgcaggaggccgtcctcacccaccnatggatatccacacatgacgggtttggcttcatgctggcgtttggggacatggcctggtgcccttcacctacagcctgcaggcccagttcctgctgcaccacccgcagcccctggggttgcccatggcctctggtcatctgcctcatcaatgctattggttactacatcttccgtggggcgaattcccagaaaaacactttccgaaagaatccttctgaccccagagtggctgggcttgagaccatctctacagccacagggcggaaactgctggtgtctgggtggtggggtatggtccgccatcccaactatcttggagacctcatcatggctctggcttggtccttgccctgcgaccctggcgcttttgctgctgagccccgatgcccacatgagccatgaggggtgtcacacctgctgccctacttctacctcctctacttcaccgcgctgctggtgcaccgtgaggcccgggatgagcggcagtgcctgcagaagtacggcctggcctggcaggagtactgccggcgtgtgccttaccgcatcatgccctacatctactgaagcggctccaccaccccaggtgggggcatgtgcccactcatccaccagcacacccaggaccaggagcctcgacacacttgggactcaagggcttgcaccccacccagccctgaggatgaacaacctcagagaagaggtggtttagagcaaggaaaaaaatgaaaccagtgacc

SEQ ID NO: 76137 - DNA, 1570 bp, Homo Sapiens
ccgtgtccaggcaggtgcaggcgccgcggggccggatcctccgcgcggccgagtccatctcctgggaaatggggcggacagtgtttccttgactgactattgtgagcgccctctctctccggcggagcggagaccatggcccccactcagggcccccgggccccgctggaattcggagggcccctgggcgccgcggctctgctactgctgctgcccgccaccatgttccacctgctcctggcggcccgttcgggccccgcgcgcctgctgggtccacccgcgtccctgcccgggctggaggtgctgtggagcccacgggcgctgctgctgtggctcgcctggctcggcctgcaggcggcgctctacctactgccggcgcgcaaggtggccgaggggcaggaattgaaggacaagagtcgcctgcgctatcctattaacggcttccaggccctggtgctgacagccctgttggtggggctggggatgtcagcggggctgcctctgggggcgctcccggaaatgctcctgcccttggcgtttgtcgccaccctcaccgctttcatcttcagcctctttctctacatgaaggcgcaggtagccccagtttcggccctggcacctggggggaactcaggcaatccgatttacgacttttttctgggacgagagctcaaccctcgtatctgtttcttcgacttcaaatatttctgtgaactgcgacccggcctcatcggctgggtcctcatcaacctggccctgttgatgaacggaggcagagcttcgaggcagtccctcactggccatgtggctggtcaatggcttccagttgctctacgtgggtgatgccctctggcacgaggaggccgtcctcaccaccatggatatcacacatgacgggtttggcttcatgctggcgtttggggacatggcctgggtgcccttcacctacagcctgcaggcccagttcctgctgcaccacccgcagcccctggggttgcccatggcctctgtcatctgcctcatcaatgctactggttactacatcttccgtggggcgaattcccagaaaaacactttccgaaagaatccttctgaccccagagtggctgggcttgagaccatctctacagccacagggcggaaactgctggtgtctgggtggtggggtatggtccgccatcccaactatcttggagacctcatcatggctctggcttggtccttgccctgcggggtgtcacacctgctgccctacttctacctcctctacttcaccgcgctgctggtgcaccgtgaggcccgggatgagcggcagtgcctgcagaagtacggcctggcctggcaggagtactgccggcgtgtgccttaccgcatcatgccctacatctactgaagcggctccaccaccccaggtgggggcatgtgcccactcatccaccagcacacccaggaccaggagcctcgacacacttgggactcaagggcttgcaccccacccagccctgaggatgaacaacctcagagaagaggtggtttagagcaaggaaaaaaatgaaaccagtgaccaaaa

SEQ ID NO: 76138 - DNA, 1017 bp, Homo Sapiens
  misc_feature (193)..(193): n is a, c, g, or t
ggggaaaaggattgttatgtaaacccaggtgagccttttgattgagggccagattgaccaggaggccccatggggccaacccccaggggggcttgcggggtgggtgcagcaggaaacttgggcctggcaggcctgtagtgaaagggccacccccggccatgtcccccaaacgccaagccatgaagccaaaacnccgtcaatgtgtgatatccatggtggtgaggacgccctcctcgtgccagagggcatcacccacgtagagcaactggaagccattgaccagccacatggccagtgagggactgcctcgaagctctgcctccttcatcaacagggccaggttgatgaggacccagccgatgaggccgggtcgcagttcacagaaatatttgaagtcgaagaaacagatacgagggttgagctctcgtcccagaaaaaagtcgtaaatcggattgcctgagttccccccaggtgccagggccgaaactggggctacctgcgccttcatgtagagaaagaggctgaagatgaaagcggtgagggtggcgacaaacgccaagggcaggagcatttccgggagcgcccccagaggcagccccgctgacatccccagccccaccaacagggctgtcagcaccagggcctggaagccgttaataggatagcgcaggcgactcttgtccttcaattcctgcccctcggccaccttgcgcgccggcagtaggtagagcgccgcctgcaggccgagccaggcgagccacagcagcagcgcccgtgggctccacagcacctccagcccgggcagggacgcgggtggacccagcaggcgcgcggggcccgaacgggccgccaggagcaggtggaacatggtggcgggcagcagcagtagcagagccgcggcgcaatagtcagtcaaggaaacactgtccgccccatttcccaggagatggactcggccgcgcggaggatccggccccgcggcgcctgcacctgcctgatcccgggaattccggaccg

SEQ ID NO: 76139 - DNA, 723 bp, Homo Sapiens
  misc_feature (38)..(38): n is a, c, g, or t
  misc_feature (66)..(66): n is a, c, g, or t
ctgtaaagcaaaagacccttttctgtttgctaggaatntgtgatctaatcctaaatttaaaagatntgttggaaaaaatttttaggaaactcaccttcctcatctaaaagaaaaaggcattttagagaaaactaaagaaatttctcatgagcgtgacactcattttagtgctttgtttccgtgcacttaaaaataattgagaagaaaaactcaattaaaattttgtttataagaaatgttttcctttccaaaccttgatttgtaatgagctcttatatgcagaacacatttcaaatgagttttgctatgggctgcccccagggtggcaatttattttaagagtattttctggtaaaaagaaaaatgtgtattttaagatgaaatattttcttgatgtagcagaatatttcctagttcatttgacccatttgatattttttaaaccatgctctggcatgttgaatatttttgtgcacctaaaacttaagccaatttcaatcttatttgtgattacctttctccttcccaaaaagctttatctattaccaaaagtcaaccctcctaaaagttcaacctgttcatcttgaacttggcctgagaacattttctgggaagaggtaagggtgacaaatggaacatcagaaacgtatcttgcttgctaattattttaaacactttaatgttggtattagaatattatcttcataagttaataaataagta

SEQ ID NO: 76140 - DNA, 1559 bp, Homo Sapiens
  misc_feature (1032)..(1190): n is a, c, g, or t
  misc_feature (1199)..(1212): n is a, c, g, or t
  misc_feature (1252)..(1363): n is a, c, g, or t
  misc_feature (1433)..(1441): n is a, c, g, or t
ggggattcaagacacaggaagagaagtgggtttgaagcaaggttgtggagaaaagcaaaggagacaaaaagtaaccttcctgaagaggacatgtgattggaagttgtcaattgttgaagcattggtaactccagtctctaacgttttagaaaatcataacaagcggttctctaccctgtaaaggtgaactactgagttcttcattatgtctgatggagattatgattacctcatcaagtttttagctttgggagactctggtgtagggaagaccagtgtactttaccaatatacagatggtaaatttaactccaaatttatcacaacagtgggcattgatttcagggaaaaaagagtggtgtacagagccagtgggccggatggagccactggcagaggccagagaatccacctgcagttatgggacacagcagggcaggagaggtttcgtagcttaacgacagcgttcttcagagatactatgggttttattctactttttgatctgacaaatgagcaaagtttcctcaatgtcagaaactggataagccagctacagatgcatgcatattggtgaaaacccagatatagtgctgtgttggaaacaagagtgatctggaggaacagagagtagtggaaagaggagggaagccatagcactcgcagagaaatatggaatcccctactttgaaactagtgctgccaatgggacaaacataagccaagcaattgagatgcttctggacctgataatgaagcgaatggaacggtgtgtggacaagtcctggattcctgaaggagtggtgcgatcaaatggtcatgcctctacggatcagttaagtgaagaaaaggagaaaggggcatgtggctgttgagaagtcaagtaagcgacatagtagttcaggtggcccatgcctgggatcttctctatgattgatacatggcacagtgagagattaatgggcattgtgtacaaattgcttctcaccatccccattagacctacgaataaagcatccggttctaaaattnnnnnnnnnnnnnnnnnnnnnnnnnnnnnnnnnnnnnnnnnnnnnnnnnnnnnnnnnnnnnnnnnnnnnnnnnnnnnnnnnnnnnnnnnnnnnnnnnnnnnnnnnnnnnnnnnnnnnnnnnnnnnnnnnnnnnnnnnnnnnnnnnnnnnnnnnnnnnnnctttggggnnnnnnnnnnnnnnaaaaaatttttaaaaacatttttttgggcgcggggccccnnnnnnnnnnnnnnnnnnnnnnnnnnnnnnnnnnnnnnnnnnnnnnnnnnnnnnnnnnnnnnnnnnnnnnnnnnnnnnnnnnnnnnnnnnnnnnnnnnnnnnnnnnnnnnnncccaagggggttttgggggctttaatgggattaataaaagggggcccaggggagcccaataaaaaataannnnnnnnngggccatttttggagaaatgggggaattaaaaaagaaattgcgccgaaggggaacccttccaaaaggggtgtgaaaacccttaatcccccgggggaataaacaccttggcccctttgg

SEQ ID NO: 76141 - DNA, 786 bp, Homo Sapiens
agggtgtaccgggatcgccacgctctgcacaagtctattttcggagcctagccagagacgggaaaactgaccaagataatggaatctgaaaatatggattctgaaaatatgaagacagaaaatatggaatctcaaaatgtagactttgagagtgtttcttcagttacagctctggaagccctctctaagctacttaatcctgaagaagaggatgattctgactatggacagacaaatggtttatctactattggagccatgggtcctgggaatattggaccaccccaaatagaagagctcaaagtcatccctgaaaccagcgaggaaaataatgaggacatctggaattcagaagagattccagaaggagcagaatatgatgatatgtgggatgttagagaaatcccagagtatgagattatattcagacagcaggtgggaactgaagatatatttttagggttgtcaaaaaaggactcctcaacaggttgttgcagtgaactagtggctaaaattaaattgccaaatacaaacccttctgatattcaaattgatatccaggaaacaatccttgaccttcgtactcctcagaagaagctgttgataactcttcctgagctggtggaatgtaccagtgccaaagcattctatatcccagagactgaaactcttgaaatcactatgactatgaaaagagagttagatattgctaatttcttctgaaactgcatgaaaaagataaaaagtagtaaaatggcattggtaacaattaaaaaactttgaaaa

SEQ ID NO: 76142 - DNA, 1184 bp, Homo Sapiens
  misc_feature (60)..(60): n is a, c, g, or t
tcgtacttgaaagcctgcaggactgctggacacttcgtgcaggaagaagactatgaatgnggaagtagttccatacttgatgttttgactggaatcaatgtacagcaacgaagactagcacttgcagcaatgagatggagaaaaaaaatcccagcaaagacaagaatctggcattgttgagggagcatttagtgggtggaaggttattttacatgtggatcagtctcgagaagcaggcttcaaacgccttcttcagtcaggaggagcaaaggtgctacctggtcattctgtacctttatttaaagaggccacacatcttttttctgacttgaataaactgaaaccagatgactcgggagttaatatagcagaagctgctgcccagaacgtgtactgcttgagaacagaatacattgctgattatctcatgcaggaatcacctcctcatgtagaaaattactgtctaccagaagctatttcatttattcagaataataaggaacttgggactggattatcacaaaagaggaaagctcctacagaaaaaaataaaatcaaacgacctagagtacactaatcgcatctaccctttagttaccaaacattaaatgtttttaaaaattgaaagcctgaatgtgactgtgatagatttgggtagtaatttaaagatgagtacctgaagaattctgcttcagagtataatgatgacccttcttgagttttgaacacctgaaattgtaatcactgaaatattaactgtttcttaataaaaagttacctgaaataacaacaaaatacaactcctcagctagcttgctgttaaaccacattgaagtctgttaaaagatatttatttttcttgtaaatatctgaagctgtagcttagtggaaattttagcaaggtaatggattttgctttaaaatgtctgccttacaaattcataacaacaagatttgtcagtcagcatttattcatgttttccctgatttttatcttctcaccattttacctcttttaacaggagcctgagcacaaggtttaatgaggaagctggggctataaatatgtgtgtatatatgtatatgtatgtttgtacaaatctccatgatgtttgccaagtttgaatgcgcaaaacttggaaaatgtgacaataaagaataaaagtagtaactcaaattagaaa

SEQ ID NO: 76143 - DNA, 2122 bp, Homo Sapiens
  misc_feature (1589)..(1684): n is a, c, g, or t
  misc_feature (1811)..(1832): n is a, c, g, or t
atattgcttctattcttggaaaaatagaagtgtaaaatgttaataatacaaatgtcactgtgacctcctccactgagaggactggtttatgccagatcattttccggcacacacggagtggctttgacagattgataactttgtaagatgggagacatctgaaatattcatgttttccttttgtagtcccatctccactatttagaaatgttctcagactttaaaataatgcacagggcttgagctttctgtcatttgactttaaaaggaagtttcattcatatttatcctcttatgtaaaattgcggtataaagtctcatttccaaatatgttaaatgacaaaattattttataaaatgtttatgcacactttataaccttaagtttttatttgagaatgtgaaagtacaaagtgcagtagacttcaacaatcttgagtgccaagaataatacagaaaaagaagacagttgatgaatgagtttatagggttctaatcttaagatggtaaaaatgtagaaagaccttgctggttttttgggggtattcgtttcttaaacaatccaaatctaagcttagaagaaaagtttagcgttaagcacctttatcttcatgaataagcttcagcttgctcttggcaagagaagagtgcttgagttacagaaggcataagtagtttgaagaatgcagcaacctttttgtaaacttcccagatatcaaaatagactttgatatataaatggctttctgagatgacactgcctctatttctataaccatttcacctggactatctaatcagtcctatgaatgtatccctaaatgtggttattgaaaacctaatagctgcctcatgacaagtacatgttatttaaggaggaaaaaatactaaatttggaattgagtgtgtacgctccctatcattatatatagagtttctttttccacggtactcagtgacttaacctgaattgtaaatgtttgtaaagggttaattgtcctacatcaaacttagttaaataattccatccacttatggaggaggaggagaatgtggaagaggtaaaaagctgggcacaagttcatatgcctatgagtcagtaaagactgaagtaatgtcctatgttgagctggttattttgatatatgataataattatctttgaagtagaacaattctgttaactggaaaatcacaggatatatccatcatatttttcaggacagatagtttttactgtggggcaaataggttaaaattacactatgttagttgcatttaggttttaaagcaaagaatctgtagagaaatctatgcaatatatagtttgtccagattagctttcatttggggaatgaagttctgaaatatctaaagcagtttactcatcaattgaaaagtcctccaaaaagagaactattgggaaaccatggtgtggtggtggaaaagaaaagctccctcagttttttggagggaataacttaaaaaaatacttaaatggctaagtttacttggtgcagttaagaattaaacttgtcaattttaacattgctgttacatctgaaataaacttatgtgatgttctggtnnnnnnnnnnnnnnnnnnnnnnnnnnnnnnnnnnnnnnnnnnnnnnnnnnnnnnnnnnnnnnnnnnnnnnnnnnnnnnnnnnnnnnnnnnnnnnnnttgggggccgccccgccccctaaaaactttttaaaacctttttttgggcccgggtgcccaaagggaaaggaaacggggccaatactggttcccaaggaaaccggggtacggaacaagggttggaatnnnnnnnnnnnnnnnnnnnnnngggggaaaccggaaggtttggaaaaaatcccaaaaggggtgttcgggggcctttccggggatcctttcaacgggggtccccagggggaccctcaaaaccaaattacgccccccgccccgtggcctttcttcggaaaaaacgggggggaaatccattttaagcttttccgcccgaagggggaaacccttcccaaaagggggtgtgataaacctgagaccccccggggggattcaagacccttgggcgccttgggaaaaaaatatttgcccccggggggaaaacgggggggc

SEQ ID NO: 76144 - DNA, 647 bp, Homo Sapiens
  misc_feature (433)..(451): n is a, c, g, or t
tcccagggctctggataattgaatcttcctgagtcccacagctggagactcaaccaggatatagctgtaaatgcccaagtagaatctgacagaataagacagagacactgaaaataaagccctagaaaggaagaaattggaagcaaagaaaaggagaggtgaaaagataaaaagcctccttcaaggttaggttcaggttctgttttccatttaacctcatgtgccataaagctgcccaggcacaccagagccacatcctgaacccgaccctccctgacagtgctgctctgccagtagcaagccccagatggaggaagctgggcccatttctggccacttccacccatttggagctttgccagaggagtcgtctatgccaataatatttctgcaacagcatattatattatttgaagattagtagatctttttnnnnnnnnnnnnnnnnnnnacagtttctatagatgaagaaccagtgttggttgtacagctgttgggggtcatctatcccatgtgaagctattctttttccaaatcttgttgtttctgcatttgtgtcctccaccactcccttcttggctgacatagatatgcctgccagattgtcatcaagggtcatatttcaataaaaggtgctaaggacaaaa

SEQ ID NO: 76145 - DNA, 769 bp, Homo Sapiens
cagtcgacggtaccggacatatgcccgggaattcggccattacggccgggctctacaaagaccttatttccaaataagataatatttggaggtattgggaataaaaactccaacatataaatttgaggaaggcacgatttcactcataacaatcttaccctttcttgcaagagatgcttgtacattattttcctaataccttggtttcactagtagtaaacattattattttttttatatttgcaaaggaaacatatctaatccttcctatagaaagaacagtattgctgtaattccttttcttttcttcctcatttcctctgccccttaaaagattgaagaaagagaaacttgtcaactcatatccacgttatctagcaaagtacataagaatctatcactaagtaatgtatccttcagaatgtgttggtttaccagtgacaccccatattcatcacaaaattaaagcaagaagtccatagtaatttatttgctaatagtggatttttaatgctcagagtttctgaggtcaaattttatcttttcacttacaagctctatgatcttaaataatttacttaatgtattttggtgtattttcctcaaattaatattggtgttcaagactatatctaattcctctgatcactttgagaaacaaacttttattaaatgtaaggcacttttctatgaattttaaatataaaaataaatattgttctgattattactgaaaagatgtcagccatttcaatgtcttgggaaacaa

SEQ ID NO: 76146 - DNA, 1093 bp, Homo Sapiens
  misc_feature (893)..(924): n is a, c, g, or t
gcaggcagacaggcacagcatccatgacacagatgtgcggcacacctggaaaagcaactgcctccctctgcgcttctgggtgaacgtgattaagaacccccagttcgtgtttgacatccacaagggcagcatcacggacgcctgcctctctgtggtggcccagaccttcatggactcttgttcaacgtcagagcaccggctgggcaaggactccccctccaacaagctgctctatgccaaggacatccccagctacaagagctgggtggagagatactacgcagacatcgccaagctcccagccatcagtgaccaggacatgaatgcctacctcgccgagcagtcccgcctgcacgccgtggagttcaacatgctgagtgccctcaatgagatctactcctatgtcagcaagtatagtgaggagctcatcggggccctagagcaggatgagcaggcacggcggcagcggctggcttataaggtggagcagctcattaatgccatgtccattgagagctgagaggaggagcctcgcattcctgggaagagggacctgtccaagctgtcacactgggagtctcagatggaaggacaagtgatggggatcaggccccagagcttgctgtcccctgagaccccatcctggggagaggggaggactcctctccctacgccagccaagtttcgtcatagccagttccagctgggagagacagtgggcgtcgtccatcctcagtgagaacaccagagaacccggggccgggagaaggtggttcttcaagccgagaggcacgagctggggacagttctgcctctgtgactgctgctttgcatgaaaactcatttgatgtatattggggaaataatgagaactttatttaatttttttaagnnnnnnnnnnnnnnnnnnnnnnnnnnnnnnnngccgccctgttaatcccgtccaacttttgtttaattctgatttctgtctcccttccttcttttctcccattcctccttctttatataatgcctatttccaaatgccagagaaagcagagatgctgagagacattggagagaaaatgactgtctccttttccttgaaatt

SEQ ID NO: 76147 - DNA, 1711 bp, Homo Sapiens
  misc_feature (741)..(741): n is a, c, g, or t
  misc_feature (836)..(836): n is a, c, g, or t
  misc_feature (957)..(957): n is a, c, g, or t
aattgtggcacctgggtgaaaaaccacgaccatgccgaccatcgcgagggggaccgtggcagcaagatggtctccgagatctacctgacacggctgctggccaccaagggcacactgcagaagttcgtggatgacctctttgagacagtgttcagcacagcccaccggggctcggccctgcccctggccatcaagtacatgttcgacttcctggatgagcaggcggaccagcgccagatcagcgaccccgatgtgcgccacacctggaagagcaactgcctgccgctgcgcttctgggtgaatgtgatcaagaacccgcagttcgtgttcgacatccacaagaacagcatcacggatgcctgcctgtcggtggtagcccagaccttcatggactcctgctctacatccgagcaccgcctggggaaggactcgccctccaacaaactgctctacgccaaggacatccccaactacaagagctgggtggagaggtattatcgagacattgcaaagatggcatccatcagcgaccaggtacatgggatgcctacctggtgaagcagtacagcctccacgacagcgaattcagcgtcctgagtgcgctcaacgagctgtatttctatgtcaccaagtaccgccaggagattctcacggctctggaccgagatgcctcttgtcggaagcataagttgcggcagaaactggaacagatcatcagcctcgtgtccagcgacagctaanggtggtggaatccgttgaagaagggggcttctcagtcctgtgccgtcctcccatcccaggggagtggctggctcaagcccgggtccccgggctgnagccctggattgggtatcgtggggcaggtcaccctggccacgatgcccccggcacacccaggcccccttcattagtgccttgctttgggccctgcagggggaggggtgacagggcgagccncccaccccagcagcagcaatacccccaccctcctgccctgtgcccaggtgttgggacagtcccaccctccctgctattaatatccctctgcctattaattgaatcgaacttcgcctctgtctccatctgtaaatatgtgtccccccaccggatgtcgccaccctcactcacctgcctcttcttgagctgtcctgggccctgccacccgtctgggctcctttgtgtagcattatcagcctcggtctggcctctggcacctcacccttgccatggctgaccccacccattccaaggcggggtcacggtaccagcagcacttggggtgaggcctccaaagcttcctcagaattgtggctgtgccacgctggaccacagggtccccctcaagcatctcggggccctattctctctgagcacctggagggctggactcaggcttgtgccagggcctgacttgggcctgggggccctagaacactcctcctcctgagcctactgccaaacgtcctcagtgttgtctgcacctgctccgactccttcagccgccccattcagcgcccgctccgtccagtgcccgccctgtggggccaaggcggccgtgccttactactctgtgtcttctgcctcctctgaggaatctggccctgtctgacagtcccagaccccccgttctctcctctttagttgcatgagtttttctttgttcatggaatgttttttcctgattaaatgttggggaaatgccaaaaacatt

SEQ ID NO: 76148 - DNA, 1897 bp, Homo Sapiens
cgcgtcggtggcgtttttcctgcagcgcgtgcgtgctgcgctactgagcagcgccatggaggactctgaagcactgggcttcgaacacatgggcctcgatccccggctccttcaggctgtcaccgatctgggctggtcgcgacctacgctgatccaggagaaggccatcccactggccctagaagggaaggacctcctggctcgggcccgcacgggctccgggaagacggccgcttatgctattccgatgctgcagctgttgctccataggaaggcgacaggtccggtggtagaacaggcagtgagaggccttgttcttgttcctaccaaggagctggcacggcaagcacagtccatgattcagcagctggctacctactgtgctcgggatgtccgagtggccaatgtctcagctgctgaagactcagtctctcagagagctgtgctgatggagaagccagatgtggtagtagggaccccatctcgcatattaagccacttgcagcaagacagcctgaaacttcgtgactccctggagcttttggtggtggacgaagctgaccttcttttttcctttggctttgaagaagagctcaagagtctcctctgtcacttgccccggatttaccaggcttttctcatgtcagctacttttaacgaggacgtacaagcactcaaggagctgatattacataacccggttacccttaagttacaggagtcccagctgcctgggccagaccagttacagcagtttcaggtggtctgtgagactgaggaagacaaattcctcctgctgtatgccctgctcaagctgtcattgattcggggcaagtctctgctctttgtcaacactctagaacggagttaccggctacgcctgttcttggaacagttcagcatccccacctgtgtgctcaatggagagcttccactgcgctccaggtgccacatcatctcacagttcaaccaaggcttctacgactgtgtcatagcaactgatgctgaagtcctgggggccccagtcaagggcaagcgtcggggccgagggcccaaaggggacaaggcctctgatccggaagcaggtgtggcccggggcatagacttccaccatgtgtctgctgtgctcaactttgatcttcccccaacccctgaggcctacatccatcgagctggcaggacagcacgcgctaacaacccaggcatagtcttaacctttgtgcttcccacggagcagttccacttaggcaagattgaggagcttctcagtggagagaacaggggccccattctgctcccctaccagttccggatggaggagatcgagggcttccgctatcgctgcagggatgccatgcgctcagtgactaagcaggccattcgggaggcaagattgaaggagatcaaggaagagcttctgcattctgagaagcttaagacatactttgaagacaaccctagggacctccagctgctgcggcatgacctacctttgcaccccgcagtggtgaagccccacctgggccatgttcctgactacctggttcctcctgctctccgtggcctggtacgccctcacaagaagcggaagaagctgtcttcctcttgtaggaaggccaagagagcaaagtcccagaacccactgcgcagcttcaagcacaaaggaaagaaattcagacccacagccaagccctcctgaggttgttgggcctctctggagctgagcacattgtggagcacaggcttacacccttcgtggacaggcgaggctctggtgcttactgcacagcctgaacagacagttctggggccggcagtgctgggccctttagctccttggcacttccaagctggcatcttgccccttgacaacagaataaaaattttagctgcccca

SEQ ID NO: 76149 - DNA, 902 bp, Homo Sapiens
aacggccagtaactataacggtttaaggtagcgaggcctgggtggcgaattcggcacgaggctgaagcactgggcttcgaacacatgggcctcgatccccggctccttcaggctgtcaccgatctgggctggtcgcgacctacgctgatccaggagaaggccatcccactggccctagaagggaaggacctcctggctcgggcccgcacgggctccgggaagacggccgcttatgctattccgatgctgcagctgttgctccataggaaggcgacaggtccggtggtagaacaggcagtgagaggccttgttcttgttcctaccaaggagctggcacggcaagcacagtccatgattcagcagctggctacctactgtgctcgggatgtccgagtggccaatgtctcagctgctgaagactcagtctctcagagagctgtgctgatggagaagccagatgtggtagtagggaccccatctcgcatattaagccacttgcagcaagacagcctgaaacttcgtgactccctggagcttttggtggtggacgaagctgaccttcttttttcctttggctttgaagaagagctcaagagtctcctctgtcacttgccccggatttaccaggcttttctcatgtcagctacttttaacgaggacgtacaagcactcaaggagctgatattacattaacccggttacccttaaagttacaggagtcccagctgcctgggccagaccagttacagcagttccaggtggtctgtgagactgaggaagacaaattcctcctgttgtatgccctgtcaagctgtcattgattcgggcaagtctctgctctttgtcaacactcttagaacggagttaccggttacgctgttcttggaaccagttcaggatcg

SEQ ID NO: 76150 - DNA, 1082 bp, Homo Sapiens
ctgctaaaatacatgtttattcgagactacaaatcaaagattgtcaaaggcatcgatgaggatgatcttctcgaagacaaaatgagtggcagcaataatgcgaacaaaagacaaaagattgctcaggacttcctcaactctattgaccagacaggagaacttttagcaatgtttgaagatgacgaaattgatgaagttaaacaagaaagaatggagagagcagaaagacaaactcgaatcatggattcagctcaatatgcagaattctgtgaaagtcgacaattaagtttctccaaaaaagcttccaaatttcgagactggttggactgcagcagtatggagataaaacccaatgttgtcgcaatggaaatcttagcatatttagcgtatgaaactgtggcacagttagtggatctggctcttcttgtgaggcaagacatggtaaccaaggcaggggaccccttcagccatgccatttctgcaaccttcattcagtatcacaactctgctgagagcactgcagcctgtggtgttgaggctcacagcgatgccatccagccctgccacatcagagaggccattcgacgctacagccacaggattggcccactttccccattcacaaatgcctaccgcaggaatgggatggcttttctagcctgctgatgtgacaactgtgatgtgcctgcaacaacaggaaaggcaatgttatattaaggagtaaaccaagccaattcagcacttcctgtttacttccttgtcatatgtaccatagatggtgacagacctgctctcaaaacaagcttccttcgtttaattctgcattttctgcttagacaaccaccctatcaatatacttgaacaatgaaacaatttggatacggaatgcacagtctctgaattcctccttcaacttgtcagtggaaaggaaagtcccttggtggaatggtaggaatagttttaagcggggtatcacacagtgccttacagtggagaatatcaaagcgttttcagctcttcaatcttcgtatgcatgacatgggtgaacacaagactaataaacaacaaggattccttagaaa

SEQ ID NO: 76151 - DNA, 1509 bp, Homo Sapiens
tctaggtaaggaggcctggtgtttaatcggcacgaggtggtatccagccccgttgggcatcgtggaggagttcgccaccgagggcactgaccgcaaggacgtctttttctaccaggcagacgatgagcactacatcccccgggccgtgctgctggacttggaaccccgggtgatccactccatcctcaactccccctatgccaagctctacaacccagagaacatctacctgtcggaacatggaggaggagctggcaacaactgggccagcggattctcccagggagaaaagatccatgaggacatttttgacatcatagaccgggaggcagatggtagtgacagtctagagggctttgtgctgtgtcactccattgctggggggacaggctctggactgggttcctacctcttagaacggctgaatgacaggtatcctaagaagctggtgcagacatactcagtgtttcccaaccaggacgagatgagcgatgtggtggtccagccttacaattcactcctcacactcaagaggctgacgcagaatgcagactgtgtggtggtgctggacaacacagccctgaaccggattgccacagaccgcctgcacatccagaacccatccttctcccagatcaaccagctggtgtctaccatcatgtcagccagcaccaccaccctgcgctaccctggctacatgaacaatgacctcatcggcctcatcgcctcgctcattcccaccccacggctccacttcctcatgaccggctacacccctctcactacggaccagtcagtggccagcgtgaggaagaccacggtcctggatgtcatgaggcggctgctgcagcccaagaacgtgatggtgtccacaggccgagaccgccagaccaaccactgctacatcgccatcctcaacatcatccagggagaggtggaccccacccaggtccacaagagcttgcagaggatccgggaacggaagttggccaacttcatcccgtggggccccgccagcatccaggtggccctgtcgaggaagtctccctacctgccctcggcccaccgggtcagcgggctcatgatggccaaccacaccagcatctcctcgctcttcgagagaacctgtcgccagtatgacaagctgcgtaagcgggaggccttcctggagcagttccgcaaggaggacatgttcaaggacaactttgatgagatggacacatccagggagattgtgcagcagctcatcgatgagtaccatgcggccacacggccagactacatctcctggggcacccaggagcagtgagtcccccaggacagggaccctcatctgccttactggttggcccaagccctgcctgactgaccaccccctcagagcacagatcagggacctcacgcatctctttctcatatacatggactctctgttggcctgcaaacacatttacttctcctcttatgagactatttatctttaataaagcactggatataaatcaaaaa

SEQ ID NO: 76152 - DNA, 874 bp, Homo Sapiens
tggtgtccaccatcatgtcggccagcaccaccaccctgcgctaccccggctacatgaacaatgacctcatcggcctcatcgcctcgctcattcccaccccacggctccacttcctcatgaccggctacaccccgctcactacagaccagtcagtggccagcgtgaggaagaccacggtcctggatgtcatgaggcggctgctgcagcccaagaacgtgatggtgtccacaggccgagaccgccagaccaaccactgctacatcgccatcctcaacatcatccagggagaggtgaccccacccaggtccacaagagcctgcagaggatccgggaacggaagttggccaacttcatcccgtggggccccgccagcatccaggtggccctgtcgaggaagtctccctacctgccctcggcccaccgggtcagcgggctcatgatggccaaccacaccagcatctcctcgctctttgaaagttcctgccagcagtttgacaagctgcggaagcgggatgccttcctcgagcagttccgtaaggaggacatgttcaaggacaactttgatgagatggacaggtctagggaggttgttcaggagctcattgatgagtaccatgcggccacccagccagactacatttcctggggcacccaggagcagtgatttccctccccactactccttctccttctagatggtaaccacagcctcgaccatgcctgctccctctgacccagcttcacctcatggacaacccttcttggttcatctccagcccgtgagctggtcctgcttcctcccttccatgccctaacttttaatatgcttgttcagctctaataaagtaataaagcttggttgtcagtataaaaa

SEQ ID NO: 76153 - DNA, 945 bp, Homo Sapiens
cttacggctaggtacgaggcctgggttgtagaattcggcacgagggaggagcgatgccgagggaaatcatcaccctacagttgggccagtgcggcaatcagattgggttcgagttctggaaacagctgtgcgccgagcatggtatcagccccgagggcatcgtggaggagttcgccaccgagggcactgaccgcaaggacgtctttttctaccaggcagacgatgagcactacatcccccgggccgtgctgctggacttggaaccccgggtgatccactccatcctcaactccccctatgccaagctctacaacccagagaacatctacctgtcggaacatggaggaggagctggcaacaactgggccagcggattctcccagggagaaaagatccatgaggacatttttgacatcatagaccgggaggcagatggtagtgacagtctagagggctttgtgctgtgtcactccattgctggggggacaggctctggactgggttcctacctcttagaacggctgaatgacaggtatcctaagaagctggtgcagacatactcagtgtttcccaaccaggacgagatgagcgatgtggtggtccagccttacaattcactcctcacactcaagaggctgacgcagaatgcagactgtgtggtggtgctggacaacacagccctgaaccggattgccacagaccgctgcacatccagaacccatccttctcccagatcaaccagctgggtgtctaccatcatgtcagccagcacacaccctgcgctacctggtacatgaaccatgactcatcggctcatcgctcgtcattccacccaggctcccttctctgacggtacccttccttccggcctcggggccccggggggggaccggcccgggtttgagcgcgtgggccactgttggtcccgggacgccgcaccgtgtt

SEQ ID NO: 76154 - DNA, 866 bp, Homo Sapiens
  misc_feature (706)..(718): n is a, c, g, or t
taaggctaggtagcgaggcctgggtggcgaattcggcacgaggagcgggctggcgtgcggcgccgttgcgggcgggagcggctgcaacgccggtgcctgaggagcgatgccgagggaaatcatcaccctacagttgggccagtgcggcaatcagattgggttcgagttctggaaacagctgtgcgccgagcatggtatcagccccgagggcatcgtggaggagttcgccaccgagggcactgaccgcaaggacgtctttttctaccaggcagacgatgagcactacatcccccgggccgtgctgctggacttggaaccccgggtgatccactccatcctcaactccccctatgccaagctctacaacccagagaacatctacctgtcggaacatggaggaggagctggcaacaactgggccagcggattctcccagggagaaaagatccatgaggacatttttgacatcatagaccgggaggcagatggtagtgacagtctaaagggctttgtgctgtgtcactccattgctggggggacaggctctggactgggttcctacctcttagaacggctgaatgacaagtatcctaagaagctggtgcagacatactcagtgtttcccaaccaggacgagatgagcgatgtggtggtccagccttacaattcactcctcacactcaagaggctgacgcagatgcaaacnnnnnnnnnnnnnctggacaacacagccctgaaaccggattgccacagaccgcctgcacatccagaacccatcccttctcccagatcaaccagcctgggggcctaccatcatgggcagccaagaaccaccaaccctggggctaccctggggctacatgaac

SEQ ID NO: 76155 - DNA, 1250 bp, Homo Sapiens
aggctctttagtgagcagaagggggcgcacataagccgacgtgggcggacacgagagaattcttctggggcccctggacgcggcgccccgggggatagagcgacacgctgcgtccgaggacctgcaaagtctgtgagccaccgggggggcaaacaccgcccgcgaagatgtaaggatcgccagactaacccagggtgctcgccggtttcggccgtgggacacccagtcacgttcttggttgcaccaaccgccttcagacatccgggaccggggtcttcttcacgctgcccactgactggtccgtagtgagaggggtgtaccggtcaatgaggaagtggaaccttggggttgggaatgaacggaggcgatgaggccgaatgaggtcattgttcaatgtagccagggtagcgcaaggttggtggtgctggctgaacatgatggtagacaaccagctggttgatcctgggagaaggatgggttctggatgtgcaggcggtctgtggcaatccggttcagggctgtgttgtccagcaccaccacacagtctgcattctgcgtcagcctcttgagtgtgaggagtgaattgtaaggctggaccaccacatcgctcatctcgtcctggttgggaaacactgagtatgtctgcaccagcttcttaggatacctgtcattcagccgttctaagaggtaggaacccagtccagagcctgtccccccagcaatggagtgacacagcacaaagccctctagactgtcactaccatctgcctcccggtctatgatgtcaaaaatgtcctcatggatcttttctccctgggagaatccgctggcccagttgttgccagctcctcctccatgttccgacaggtagatgttctctgggttgtagagcttggcatagggggagttgaggatggagtggatcacccggggttccaagtccagcagcacggcccgggggatgtagtgctcatcgtctgcctggtagaaaaagacgtccttgcggtcagtgccctcggtggcgaactcctccacgatgccctcggggctgataccatgctcggcgcacagctgtttccagaactcgaacccaatctgattgccgcactggcccaactgtagggtgatgatttccctcggcatcgctcctcaggcaccggcgttgcagccgctcccgcccgcaacggcgccctcgtgccgaattcgccacccaggcctcgctaccttaggaccgtatagttactgccgtt

SEQ ID NO: 76156 - DNA, 967 bp, Homo Sapiens
gatacaggtttggttcggccgtgacccccctttgtccccaccccttaaaaccagccgggtttccccgggcccgacggtcctatgagagggttaccgttcatgagaatggacctgggttgggaatgacgagccgatgagccgaagaagtcattgttcatgaaccaggtagcccaggtggtggtgctgctgacatgatggtagacaccaactggttgatctgggagaaggatgggttctggatgtgcagccggtctgtggcaatccggttcagggctgtgttgtccagcaccaccacacagtctgcattctgcgtcagcctcttgagtgtgaggagtgaattgtaaggctggaccaccacatcgctcatctcgtcctggttgggaaacactgagtatgtctgcaccagcttcttaggatacctgtcattcagccgttctaagaggtaggaacccagtccagagcctgtccccccagcaatggagtgacacagcacaaagccctctagactgtcactaccatctgcctcccggtctatgatgtcaaaaatgtcctcatggatcttttctccccagcgagttgtgggccctgccagggaataggaaacgacctgggagaatccgctggcccagttgttgccagctcctcctccatgttccgacaggtagatgttctctgggttgtagagcttggcatagggggagttgaggatggagtggatcacccggggttccaagtccagcagcacggcccgggggatgtagtgctcatcgtctgcctggtagaaaaagacgtccttgcggtcagtgccctcggtggcgaactcctccacgatgccctcggggctgataccatgctcggcgcacagcctgtttccagaactcgaacccaatctgattgccgcactggcccaactgtagggtgatgatttccctcggcatcgctcctccctcgccgatcacacccgggt

SEQ ID NO: 76157 - DNA, 983 bp, Homo Sapiens
cgcaggtgatgcgactgccgaccatcgatgtgaacaccaaccggttggatctggtagcaaggccgggttctgtatgtggcaggcgatccagtggcaatccggttacaaggtgctagtcattgtccagcaaccacgcacacaatcgtgcgttctcgcggtcagcctcttgagtcgtcaggagtgaattgtgagggctgaaccactacgtcgctcatctcgtcctggtagggaaacactgaataagtctgcactagcttcttggggtacctgtcattcagtcgctccaggaggtaggagccccaggccagaacccgtacccccagcgatggagtgacacagcacgaagccctccaaactgtcacttccatctgcttctcggtctatgatgtcaaagatgtcttcatgaattttctcaccctgggagaatccgctggcccagttgttgccagctcctcctccatgttccgacaggtagatgttctctgggttgtagagcttggcatagggggagttgaggatggagtggatcacccggggttccaagtccagcagcacggcccgggggatgtagtgctcatcgtctgcctggtagaaaaagacgtccttgcggtcagtgccctcggtggcgaattcctccacgatgccctcggggctgataccatgctcggcgcacagctgtttccagaactcgaacccaatctggttgccgcactggcccagctgcagggtgatgatctcccggggcatcgctcttcagacgtgggcgcgccagccccggcctggcgagagtcacggctgagacgaatgcccggcagccaggagcgcaggacgtggggagcgcgcgctctcttcgcctcttgacgcggatgctcggtctgcgcgtgtgcagcgcagcctctcctcggccggtgggccggggagcccaacctgggcatcattttctccctcagcagtcgcagctggaattccgcacaggcgccccc

SEQ ID NO: 76158 - DNA, 1043 bp, Homo Sapiens
  misc_feature (307)..(343): n is a, c, g, or t
aaataaggtgagcaggatgactggggagagagaaacatttgactttgactgcctcccccattctttgctgtgagctggaaagtgtgcagttggtcgtctttcttctcctttctttaggatagtaagagactcactcactgcacttctgctcagttggcttctgcatcgggatcacacagccatcagcaggactgcccagttggtgagcacactccattgaccacgtggcgccagcgcttcctcaatgcacatgattgagaggaaagaaagttctcttagatgttactgcttttgctcagactttgcnnnnnnnnnnnnnnnnnnnnnnnnnnnnnnnnnnnnnattattaatcacttttgtccttgagaaagtcttgaatgaacagagaatttattccattgcaatatttgattgtatagaggcacactgtttcatcgacagaagaagcaaaaaggctttgtgtaagtttttggtactatgtaccacctctgttattcttttaaagctgaagtattcatgtacttaaaccatattatatttaattgtgtttgattttaaaatatatatatatgaattctatttaaaattgtgtcaactttctgctttcagggcatttatggctcttctgttgaaatatattgatctttccaaatattttcatttgctttctaaaaacccagaacatgagccactactggactttgccttgtgtttgaagtgtatggcataaacccaaggtttttattagtcatctatgctgtgattaattcattttgttcttttaacaaaatatttccatccacttcacattgcttcaatctttaacagaaaagcaatataaaggttatagaataaaatgtggttttgggcaactcttgctgcctctgcatgttttggaataacaatttctacaagactctaggctgtttaaactagtgctttcagttaagataaattctaatcatttctttgtatatacattttgtgcttctgagctagagatgccaagtagttgtaaactgcttataaagagaatagcagc

SEQ ID NO: 76159 - DNA, 719 bp, Homo Sapiens
  misc_feature (87)..(87): n is a, c, g, or t
cagcaggccccttgacagcccctcccacaggatgtgggctctgaggcctaaaccatttccagctgagtttccttcccagactcctcntacccccaggtgtgcccccttagcctccggaggcgggggctgggcctgtatctcagaagggaggggcacagctacacactcaccaaaggcccccctgcacattgtatctctgatcttgggctgtctgcactgtcacaggtgcacacactcgctcatgctcacactgcccctgctgagatcttccctgggcctctgccctggcctgcttcccagcacacacttctttggcctaagggcttctctctcaggacctctaatttgaccacaaccaacctgggcttcagccacatcagtgggcactggagctggggtgcacatggggcctgctcaccttgcccacacatctccagccagccagggccctgcccagcttcaatttacagacctgactctcctcaccttcccccctgctgtccagagctgaacatagacttgcacttggatgtcacctggagtgtcacatgggagtgttatggcagcatcataccaaggcctactgttgcacatggggccaaaaccagtaaacagccaccttcttggaaagggaatgcaaaggctttgggggtgatggaaaagaccttttacaaatgataccaattaaactgccctggaaagggcataggtgggcaaaa

SEQ ID NO: 76160 - DNA, 915 bp, Homo Sapiens
gagatgcatattttcctttattgctgaattaatgaggcaccaataatctcaaaaacacaagtcagactttattctgaaaataccataaagagacaaaaagagttagtcaagtattcttgcctgctggagacacagaatttcaatagcaccttttttaaaaaaagacatgaacatttataaaattgcagaacatatcttacatattcacatataaaatcatgaaccaataataatccggatggaaaaactgatctgtttcatcaacatcaataaacattttgttgagagtttgttccacatattatacttccctcagtatattagaagtacttcagctttctatttgaagtggttttcctaaaaataaccttttcccctgctcaggataaccagctattattatagtatacatattataataacaaggtatatgtctttgacctcatatatgactccccagttgctacaggaatagatttacttttcatacacaaattggaaaagatgtcaaatattgatgatagtatcgaagagttgtagctactctaaactgagtaaattagcgattgtacagacgagcacttcataatagttgaaggttttaaattcagttaattacatgaatatttgacaagtatgtgaatgttgtaaatattttgaccaaagtactaattttgattctaatgattgcatgttacatagtctctatataatgtcaattatactaagtgataacgtaatttcaagttctttaatcaaaaagtgtgagttactcgtaatgaaaactggcccaaaaggagggagaaaaaatcttgtttataaagcaagccatgcaaaactacaacgacattgcattgtagctttccaccagatacggaatatctgccaagaaaatatttcactcaatcttcaatc

SEQ ID NO: 76161 - DNA, 890 bp, Homo Sapiens
ctccttgacaaccctggcgggggttcgctggctgcggccccggctccggcccccgcaggagcagcaccccccggggaaagacattttctgctcccaccgagttggcagggcctgcttcctgaatctcctgggtgtgtcttaactgccagtcccagcacctcctgaaagccccactctcctccagtggtcacagtggaaggatcatgggagaaacagaagggaagaaagatgaggctgactataagcgactgcagaccttccctctggtcaggcactcggacatgccagaggagatgcgcgtggagaccatggagctatgtgtcacagcctgtgagaaattctccaacaacaacgagagcgccgccaagatgatcaaagagacaatggacaagaagttcggctcctcctggcacgtggtgatcggcgagggctttgggtttgagatcacccacgaggtgaagaacctcctctacctgtacttcgggggcaccctggctgtgtgcgtctggaagtgctcctgacactctgtcccctgccccgtcccctgcagggccttttcctgccactcatctggggtggggagcagccctaggcaggtcctggtttttccaaggagagttggggtcttttcttttgtctttgtgtaccagtttcctgagccacgcccagtgtgtgaacttgacatctccatccccaggctctcaactgtctccctacggagttctcaagggttgtggaccgggggcagcgtggccattgggatcttgttgttgggagaacgctaaggtgaaggccggtgttgacagggttaaaggacgtgagacaatgagaatcttcccgcaacaggaaccacgccgagtaccccactttcctccagggctagcttcccg

SEQ ID NO: 76162 - DNA, 694 bp, Homo Sapiens
ggggtccggcagtagagctcgctgcagatccgggctctgaccatgatttggcgccgcgcggcgctggcggggacgcggctggtttggagcaggagcggctcggcaggctggcttgacagggcggcgggagctgcgggagctgcggcagctgcggcctctgggatggagagcaatacatcatcatctttggagaatttagcgacggcgcctgtgaaccagatccaagaaacaatttctgataattgtgtggtgattttctcaaaaacatcctgttcttactgtacaatggcaaaaaagcttttccatgacatgaatgttaactataaagtggtggaactggacctgcttgaatatggaaaccagttccaagatgctctttacaaaatgactggtgaaagaactgttccaagaatatttgtcaatggtacttttattggaggtgcaactgacactcataggcttcacaaagaaggaaaattgctcccactagttcatcagtgttatttaaaaaaaagtaagaggaaagaatttcagtgatgtttatactaataagtttgctagtacagtgtcagttatttaaagtggtaatgcccgaaaatgtcttttaaatgtttgaggatgttttaaatacatgcattgtcttcacgaagaagatgtaaaaataatgaacaataaattgcggtggaaacctctt

SEQ ID NO: 76163 - DNA, 1595 bp, Homo Sapiens
  misc_feature (1532)..(1552): n is a, c, g, or t
taaacataggctaggtacgaggcctgggtgttgaattcggcacgaggcaggcggccgacttagccggtggcacgacagttgctgcagggaatcttttaaacgagagcgagaaggactgcgggcaggaccggcgggctcctggggttcagccgtgccgcctcgttacgatgaccagtgtggttaagacagtgtatagcctgcagcccccctctgcgctgagcggcggccagccggcagacacacaaactcgggccacttctaagagtctcttacctgttaggtccaaagaagtcgatgtttccaaacagcttcattcaggaggtccagagaatgatgttacaaaaatcaccaaactgagacgagagaatgggcaaatgaaagctactgacactgccaccagaaggaatgtcagaaaaggctacaaaccactgagtaagcaaaaatcagaggaagagctcaaggacaagaaccagctgttagaagccgtcaacaagcagttgcaccagaagttgactgaaactcagggagagctgaaggacctcacccagaaggtagagctgctggagaagtttcgggacaactgtttggcaattttggagagcaagggccttgatccagctttaggcagtgagaccctggcatcacgacaagaatccactactgatcacatggactctatgttgctgttagaaactttgcaagaggagctgaagctttttaacgaaacagccaaaaagcagatggaggagttacaggccttaaaggtaaagctggagatgaaagaggaaagagtccgattcctagaacagcaaaccttatgtaacaatcaagtaaatgatttaacaacagcccttaaggaaatggagcagctattagaaatgtaagaagaagcaagtggccagatggctccctcttgggcataaaatctcagaggaagctacttaggacatcatcttggccatgatcttctgggactcaccatctccagaatgaaaacaatttctacagtagacttaaggacagtttatgctgaaatggcaattcctcatttaagcaagttttcccaaccttcaggttggtcagccctcctgagcctcacaggtggataattgaggcctacaagagaggggagcctaggagcttggattgaccttctagtcaaccacctgacttcagcacaccattacaatcgggagactaaaccaacaaccagaggatctaaaatgtcacattcagattttcaggaagaaaatcttcattacagtggagcacaaatgttccatacaagacatcattgaggagccatgctgtccccttctaacctgaaacacattctttcccatcctggttgggcttctgtacctccttattaatttatgaacctgaagttgcttgaagtgttttgggcttaataaatggggtgaaagtataggtagcagtaacacctacatgaaacaatacaccttggatcttttaatctaaattacttttcttttttaagtctacttttaaaataaatacttctgtaaatnnnnnnnnnnnnnnnnnnnnncctgagcaggcggccgcaagcttattccctttagttgagggta

SEQ ID NO: 76164 - DNA, 818 bp, Homo Sapiens
gggagggaatcttttaaacgagagcgagaaggactgcgggcaggaccggcgggctcctggggttcagccgtgccgcctcgttacgatgaccagtgtggttaagacagtgtatagcctgcagcccccctctgcgctgagcggcggccagccggcagacacacaaactcgggccacttctaagagtctcttacctgttaggtccaaagaagtcgatgtttccaaacagcttcattcaggaggtccagagaatgatgttacaaaaatcaccaaactgagacgagagaatgggcaaatgaaagctactgacactgccaccagaaggaatgtcagcaaaaggctacaaaccactgagtaagcaaaaatcagaggaagagctcaaggacaagaaccagctgttagaagccgtcaacaagcagttgcaccagaagttgactgaaactcaggcagagctgaaggacctgacccagaaggtagagctgctggagaagtttcgggacaactgtttggcaattttggagagcaagggcccttgatcccagctttaggcagtgagaccctggcatcacgacaagaatccactactgatcacatggactctatgttgctgttagaaactttgcaagaagaagctgaagctttttaacgaaacagccaacaaagcagatggaagcgagttacaggcccttaaacggtaaagctgggagactgaaagagggaaggaggtcccgattcctaaaacagcaaacctttatggaacaatcaaggtacatggatttaacaacgggccctttaaagggaaaggggagccgcctattaaa

SEQ ID NO: 76165 - DNA, 657 bp, Homo Sapiens
cacccctccacgtattatgtgactcttacaccagttcacccttcccagaatgtatccaaaccttgagaatgcaggagctctgtgagctccaccgtcagcaccattcagctgcatcccttgtgcacagaactgtttgccagcgttgggtgggacacccgtggcggctgctccctcagacctcccttctgtggactgacctctcacctccgcctgttgttcctgcaccacatcagataagcatgtgaaggagggccaactggcagctgcgggacccttggcttgtcccccaccgacaagtcccacctgctgggtgaggacgagactgtttccatctcaggcatgtatcccaccaagtgcctccctcacagccatgcccagaagcctcacacctcgtcaccaccaccaccccccaccccatcctgaggcactgcctggcagataaccctggttggccacagaagctattaatacacgacagcatgtggggaaggacttatggtgggccaggtggacctcatcctgcttcttcctccctctggtttaaagagatatataaactaatttcacataatttgtgtgtgcaggtgattggtttttacataagtcctatttataccttttatatgttacagaaataaaagttaatttatataaaaa

SEQ ID NO: 76166 - DNA, 1145 bp, Homo Sapiens
  misc_feature (44)..(82): n is a, c, g, or t
  misc_feature (86)..(120): n is a, c, g, or t
  misc_feature (1129)..(1129): n is a, c, g, or t
aaaatcaattataaggggggcggctaaggattccgggccagagnnnnnnnnnnnnnnnnnnnnnnnnnnnnnnnnnnnnnnnccgnnnnnnnnnnnnnnnnnnnnnnnnnnnnnnnnnnncagtcgacggtaccggacatatgcccgggaattcggccattacggccgggtctctgggtagttggtgcagctgtggcagaaatcaggcccctggggaagtcctgtgacatggatgcttccctgaagcagcagcagtgtgtggctcaggggtcctcagaggccggtggtgcccgcgggtggcacgggggcactctcatgggcagcacttggtcttgtgttaacagtattggagggattcacatcgttattttctggattaagctgctaggagtatcatgtacttagaaattcagtgtttatagtaagatgtattaaacattgctaatgatgtatggttacaatgtataacaggttttccattgtcataactgtatggaattttcttggaggatgtcattagcttctgtttgcactgacttgtgagctgtgtgtacgctgtggtcagatttctgaatgctgtagagcacttaccagctctgaccgtgtcttgctggggccagcaggctgcgtgtgcagcggggccagctgtctcagggctgatatgtagacgtgtattctgtttacaattagttccccaactctgtggggaagaacttaagcggttttagtgttttataatatggtgaggcaatgagggtcagggcgcgtggtccctgagggagggtcttcagggcaagacccatggccctggcctggaactgtgctccccagggcgtggtgcctccctaaggggatggtcagtgttcctgggactgactgccaggccagcccgtctgcagactcctgtggtgggagttccctgggacgggaagcccctcggccccttccctccaggggcaggaactgagccagcatgggcggggccggccgagcttccaggcgtgttttctctgttaaatgtacctctgtctttaagctgtctcattttctaatcgctggcatgtcttgcctagaaaagcatttggaattgcttatgttcaattacagaaataaaatgtcttacttgccnattgtagaattcctgc

SEQ ID NO: 76167 - DNA, 631 bp, Homo Sapiens
  misc_feature (217)..(233): n is a, c, g, or t
caacacatttgtgaaataacctactcctatatactgacctgcctgtccacgaataattgtaaagggtttttgcatgtacagtttttacaagaattacagttttgtgaagttgtgtctaaattaaagcatttctttagaacaaatggccttaaattctcacggaattcctggaaatgattgtgaattgccttcaaataatagaaaagtgtatttattnnnnnnnnnnnnnnnnncaaaaatgtaactgctttataatattttttccttacctatatattctatttaatacttggtttatttctactgtacattgttttctttgtcccaagttgacctagggtgacttttataagcatgaaactattttactggaaagaaaaatatatacatccacatatctaacagtatcaatgttatataactatgtaataattgttgatttttaattatgtattaaaatctttaaatcataactatttgctttgtacgtttcatgtatgaatgacaatagtttgatgatttcctttactgatcttaaatatttatgccactacagtgtattacctacggatttttaaatttagctttatttatcaacccaaaaaacaaataaataagatcaatattcttt

SEQ ID NO: 76168 - DNA, 974 bp, Homo Sapiens
  misc_feature (75)..(109): n is a, c, g, or t
gactgtatagatcactatagggctactcggtatacgaacgacgagcgcagcgagtagtgagcgaggaagcggcgnnnnnnnnnnnnnnnnnnnnnnnnnnnnnnnnnnncagtcgacggtaccggacatatgcccgggaattcggccattacggccgggggctcctcctgcacacctccctcgctctcccacaccactggcaccaggccccggacacccgctctgctgcaggagaatggctactcatcacacgctgtggatgggactggccctgctgggggtgctgggcgacctgcaggcagcaccggaggcccaggtctccgtgcagcccaacttccagcaggacaagttcctggggcgctggttcagcgcgggcctcgcctccaactcgagctggctccgggagaagaaggcggcgttgtccatgtgcaagtctgtggtggcccctgccacggatggtggcctcaacctgacctccaccttcctcaggaaaaaccagtgtgagacccgaaccatgctgctgcagcccgcggggtccctcggctcctacagctaccggagtccccactggggcagcacctactccgtgtcagtggtggagaccgactacgaccagtacgcgctgctgtacagccagggcagcaagggccctggcgaggacttccgcatggccaccctctacagccgaacccagacccccagggctgagttaaaggagaaattcaccgccttctgcaaggcccagggcttcacagaggataccattgtcttcctgccccaaaccgataagtgcatgacggaacaataggactccccagggctgaagctgggatcccggccagccaggtgacccccacgctctggatgtctctgctctgttccttccccgagcccctgccccggctccccgccaaagcacccctgcccactcgggcttcatcctgcacaataaactccggaagcaagtcagtaaa

SEQ ID NO: 76169 - DNA, 1719 bp, Homo Sapiens
  misc_feature (1699)..(1699): n is a, c, g, or t
tatccggatacctccctcgctctccccaccactggcaccagagcccggacacccgctctgctgcaggagaatggctactcatcacacgctgtggatgggactggccctgctgggggtgctgggcgacctgcaggcagcaccggaggcccaggtctccgtgcagcccaacttccagcaggacaaggagtctcaggagcaggggctgcggcagaggctgctggacgagcagttcgcagtgttgcggggcgctgctgccgaggccgcgggcatcctgcaggatgccgtgagcaagctggacgaccccctgcacctgcgctgtaccagctccccagactacctggtgagcagggcccaggaggccttggatgccgtgagcaccctggaggagggccacgcccagtacctgacctccttggcagacgcctccgccctggtggcagctctgacccgcttctcccacctggctgcggataccatcatcaatggcggtgccacctcgcacctggctcccaccgaccctgccgaccgcctcatagacacctgcagggagtgcggggcccgggctctggagctcatggggcagctgcaggaccagcaggctctgcggcacatgcaggccagcctggtgcggacacccctgcagggcatccttcagctgggccaggaactgaaacccaagagccgtagatgtgcggcaggaggagctgggggccatggtcgacaaggagatggcggccacatccgcagccattgaagatgctgtgcggaggattgaggacatgatgaaccaggcacgccacgccagctcgggggtgaagctggaggtgaacgagaggatcctcaactcctgcacagacctgatgaaggctatccggctcctggtgacgacatccactagcctgcagaaggagatcgtggagagcggcaggggggcagccacgcagcaggaattttacgccaagaactcgcgctggaccgaaggcctcatctcggcctccaaggctgtgggctggggagccacacagctggtggaggcagctgacaaggtggtgcttcacacgggcaagtatgaggagctcatcgtctgctcccacgagatcgcagccagcacggcccagctggtggcggcctccaaggtgaaggccaacaagcacagcccccacctgagccgcctgcaggaatgttctcgcacagtcaatgagagggctgccaatgtggtggcctccaccaagtcaggccaggagcagattgaggacagagacaccatggatttctccggcctgtccctcatcaagctgaagaagcaggagatggagacgcaggtgcgtgtcctggagctggagaagacgctggaggctgaacgcatgcggctgggggagttgcggaagcaacactacgtgctggctggggcatcaggcagccctggagaggaggtggccatccggcccagcactgccccccgaagtgtaaccaccaagaaaccacccctggcccagaagcccagcgtggcccccagacaggaccaccagcttgacaaaaaggatggcatctacccagctcaactcgtgaactactaggccccccagggtccaacaaggttggctgggtgaaggccctgggcctctgcaactgccctgacaagaaccgaaaggccttgccccctccacctgggtgcccaagcctcccggccccaacgggntgggatccatgggcctccat

SEQ ID NO: 76170 - DNA, 1177 bp, Homo Sapiens
  misc_feature (472)..(569): n is a, c, g, or t
  misc_feature (610)..(693): n is a, c, g, or t
  misc_feature (929)..(991): n is a, c, g, or t
gcccaccaaaaagacgctggtaccgcgtccggaattcccgggatcacctccctcgctctcccacaccactggcaccacgccccggacacccgctctgctgcacgagaatggctactcatcacacgctgtggatgggactggccctgctgggggtgctgggcgacctgcaggcagcaccggaggcccaggtctccgtgcagcccaacttccaccaggacaaggtgaggggctttcctgcgtcatccccaagggctacaggaccctgtcaagggaagggcactttccggctgggtcttccccctgggaggagtgagcgaagtcccgcagtgccgggcagtgccggccagggactgagcgggccgcgcaagaaagacgctggctacccgccccacgaggctgcccgcgagaagccccccctggggcaccgcgtcccgtctcccctgatgggccaaggtaaaagtgggccacactnnnnnnnnnnnnnnnnnnnnnnnnnnnnnnnnnnnnnnnnnnnnnnnnnnnnnnnnnnnnnnnnnnnnnnnnnnnnnnnnnnnnnnnnnnnnnnnnnnaacacctcgccaccaccgccagcaccagcagccccacacannnnnnnnnnnnnnnnnnnnnnnnnnnnnnnnnnnnnnnnnnnnnnnnnnnnnnnnnnnnnnnnnnnnnnnnnnnnnnnnnnnngcggctcataaaaaccgtcacaccccgattgcccaccacccacaatctcgccgcccccccaagcacctcccgctctcctcctacacgcgggcctcccaccccctccccgccctatcactccgcaactcccacattccacagaaccctccatcccattagcacctaatgtgctcccgttcagataggcgtcatgccaccatcatttttccttggcacgcacatttcccaacacagannnnnnnnnnnnnnnnnnnnnnnnnnnnnnnnnnnnnnnnnnnnnnnnnnnnnnnnnnnnnnngggctccgccagcaaggctatcccgcagccaaatcgccccaatgccacccccctctcccagccagactagccccgccgctcacgggacccatacatacgatgggagatcggaccgcagacagcgctcgctagccgcgtcaccgatacctctcccccccgccacacctcctcgccacccccgtccgc

SEQ ID NO: 76171 - DNA, 376 bp, Homo Sapiens
gtaaccggagatagtttttacaagtgaaataacatttcagctaaataaaacatcgctaaataattgatatttgatgaaaatctgctttgtataatttctgtaaattatccttgttctgaaaaaggtgtaatgccctaatatttttaaatccttatcctttgattttttaaaaactgacctattgataaaactataaattttcattttccagtgcagttagttacctttttaaacataaatgcacaacaagcaaatgaatttaagagaactaaactggaataagtgttcataaatgaaacccttggactatttaataaagttgaaatgtgaattaaggaaaacttttgttaataaaaactttcttttaagtgaaaaa

SEQ ID NO: 76172 - DNA, 608 bp, Homo Sapiens
acgagttctctgttgattgtcatgaactttaaaggttgtgaaccactgacttaaacaattgaggaacattaaggaacttaacagtatattctctcaataaaatgtttgattattcttactagccccttaggatagttaccaaaacaaaactactaatttatactcttttaaaactacaagttgcctgtgttatgtaggagagatataagattgtgaaattttccaaaaatacctgccacacccctaacagacaggagatgataagagtaaaagagagaattgggaggctttagaagccctattgtaatatttcttaaaacacattatttattgctaaatatatttagtgtgagccatgtaaaaattgccatttttggaggtcaaaaaccgttgaatatcagcaatttagtatggttcaatttatgtggtttctaatcaaatgtacaaagtacaataatttggtttcatacttgattttttatttcttaggctgagtcattaaaagttgatcagtgatatatggcaaaattatttaaagtgcttgaggaattggggagacttgctgcttatgtgatcagatatacaaaaataaagtttttcatttcatt

SEQ ID NO: 76173 - DNA, 1605 bp, Homo Sapiens
  misc_feature (1113)..(1181): n is a, c, g, or t
gctccccgtctcaccgtcttttcgggtgtactggcatgtcctggttcgaacaagccacttccgttggcgccgaactttcggtggaacatgtgtcaaactatggtgcactatcccggcggttcatctggtggccctggaacttggcccaagattttctccgactggagcaatacaatgggttgatcccttcctgcgagctgacactactgagggtgtgccatccttgtactgaggaagaagctacaagcctttttctcgaggagctctccatcgaggggccttaagaaggtcccaccgcctgagcaacaccacgtttcctcatgtcctgcccactcatcaccctgctggagtgtgactcggccccaccagagggccctgagccctggggcagcacggagcacggcgtaggacgttcggtgctggctcacctggaggcacgcccgcacagtggcacaccacggaggcctgtaccacaccaatgctgaagtcaagctgcaggggttccaggcccggccggagctcctggaggtgttcagcacggagttccagatgcgccttctctggggcagtcagggtgccagcagcagccaggcccggcgctatgagaagttcgacaaggtcctcactgccctgtcccacaagctggaacctgctgtccgctccagcgagctgtgaccccagggacatttcccctctgcagctgcggacagcgtcaggggcagaggggcacacaactttccccagagcaccccaaggacactgtgatcaacccgagaatgttctgggttcaactcaagcatctcccttgcacctccagggtcctgcgtggactctgggttccatcccacctgctacatgctcaccaggtctccattgaggaagaacaggaacgccggttcccccaccagcttttgctgctccccttcctgctggggttccctgttttcgagccatgggaggcaggctgctcacgcctcctcactctctgtctgtccctcaccaacaccaaggcctccatctcactgtaaataagtctctgttctgtaaatagatgtacagaagccatgttatttctttcatataataaacttttatgactctttacaaacaacnnnnnnnnnnnnnnnnnnnnnnnnnnnnnnnnnnnnnnnnnnnnnnnnnnnnnnnnnnnnnnnnnnnnnggggggggcgccccaaaacaccccagcagggggggccccgacgaaagaacgaaggagagcagcccgtgtatctggcagacaagaaaacagcggcccacgcaaaaaggacgacgcagctaacgacagcacgagagaggcagggggccacgagacaaacaacaccgccacatacgcgcgaagaaacacggcgaagtgagtaagcagttgatgcgaagggcaagccccacacacctgcgggcgcgagcaaaccaacaacgcgggccgagcagcccccacacacaggcaaatagacgccccacacagagcaaaaaacaagacaacggagatcctatacggcgggcacacacaaacacgaccacagcaccgcgcccagagaaaaaccgtgcccgcggggcacaatgcgagcgggaaggataacacaagg

SEQ ID NO: 76174 - DNA, 689 bp, Homo Sapiens
  misc_feature (99)..(146): n is a, c, g, or t
gagccccagggtggcaggggcattatagcctggtggacatgtgccttcagggttcctccggggccaccttcctcaggccagtgctgggttcaaagggcnnnnnnnnnnnnnnnnnnnnnnnnnnnnnnnnnnnnnnnnnnnnnnnnggtgcacacatctgtcccatgtatgcagtgagacctgtctacctcccacaaggagcaagggctctgcccgccctctgctcattcctacccaggtagtgggaccccgggcccccttctgcctggcttgcctgcttctgccctttccagaggggtctcactgacagccagagacagcaggagaagggttggctgtggatcaaggaaggctgcccctgtaccctgtggggaaatggtgggtgcatggctggatgcagaggtggaaggccctgggccacaggcgagagtgggcgtgtcacctgtcccaggttcccagcaagtctgcagctgtgcagtcctggggtccctgaccctgtcgcccagggggcgtgctgtccagcaggggccctgccttgcaaggaacgtctcttccggcggctgggccgctcctgcctggtctgggctgtgtgtggcgccctttcctccttgtttgttcctctgtgttctgtgtgcgtcttaagcaataaagcgtggccgtggctcgcgtgcctgccctctgctcccttc

SEQ ID NO: 76175 - DNA, 683 bp, Homo Sapiens
gggcagccctcgaatccccctcccggcgcagcagagctcggaggcccgtgtcatccgcgtcagcatcgacaatgaccacgggaacctgtatcgaagcatcttgctgaccagtcaggacaaagcccccagcgtggtccggcgagccttgcagaagcacaatgtgccccagccctgggcctgtgactatcagctctttcaagtccttcctggggaccgggtgctcctgattcctgacaatgccaacgtcttctatgccatgagtccagtcgcccccagagacttcatgctgcggcggaaagaggggacccggaacactctgtctgtctccccaagctgaggcagccctgtcctctccacaagacacaagtcccacaggcaagcttgcgactcttctcctggaaagctgccatcccccagtagaggccactgtgctgtgtatcccaggaccaccacccaactgtagcccattggaccccatctctttttctgactctgttggtactagatccatattccaaagacatcagcccatgggtggctggtggagagctcaatcccataaatgtagaaagaggtggggcatggatacgtcaaatccctccccagagaaatcttataaatgttagagacgcatcagaagtgacagatgcggatgaaaatagtgaccagagttatgaaacagg

SEQ ID NO: 76176 - DNA, 1097 bp, Homo Sapiens
  misc_feature (79)..(97): n is a, c, g, or t
  misc_feature (101)..(218): n is a, c, g, or t
  misc_feature (851)..(851): n is a, c, g, or t
  misc_feature (865)..(865): n is a, c, g, or t
  misc_feature (949)..(949): n is a, c, g, or t
  misc_feature (968)..(968): n is a, c, g, or t
  misc_feature (988)..(989): n is a, c, g, or t
  misc_feature (1013)..(1013): n is a, c, g, or t
  misc_feature (1044)..(1044): n is a, c, g, or t
tggtaaaacgacgggccaagtgccatagccaaaattaaccctcactaaagggaaaaagcttgcggccgcctgctcaggnnnnnnnnnnnnnnnnnnnacannnnnnnnnnnnnnnnnnnnnnnnnnnnnnnnnnnnnnnnnnnnnnnnnnnnnnnnnnnnnnnnnnnnnnnnnnnnnnnnnnnnnnnnnnnnnnnnnnnnnnnnnnnnnnnnnnnnnntcacagctaaacagactgctctgtgcagggagaggccctacagtgaagggaaaagtagacacttgattgtggactaatttgttcagtatttcccaaaaacttacagctaacaataatattaaacaggttttattagcatcttatacatctgacactctctcctaagcatccagtttattttctagtcacgggttacttactaaaagtctgtgtaacatgagctcacatcagattagaaaacatcaagtgggtagtatttttgactgaattaacatacaaaagaaattgcctatatcatgtatatgggctccaagggtagttcatacttcagcctcttcattcttttctgcttttgtcacctgttacagaaaatgatctataaaatcctcataaataagacatgagttttgcctgtaatgagtaggatgaaaaaaggccagtgccgcatgctatgaaacaatagcaactttacaggggaatccaagggtttgtgtgcacaaaaattataagcggcattttctgctatgctggaaaaactgaagtataaaacacaaatgaactaagcctttcaaggatgaggtatcaccaacactggtagctgtttaatatattcatcttacaactggatgctanaatgcatcactggntattataagttgaggaaacacaagatagctacagggtaaagatattagataaataatgtgtacatctctatgttccatcactgngaagcatctatggatacangagtagagtttctgtttcanngacatgagtaatcactcagatcanagtactgggctatatatataaagacaataancaggggtcatagcgtgtccattctgatctgagtttgactcctataagcaacat

SEQ ID NO: 76177 - DNA, 1218 bp, Homo Sapiens
  misc_feature (50)..(103): n is a, c, g, or t
  misc_feature (1058)..(1110): n is a, c, g, or t
  misc_feature (1158)..(1172): n is a, c, g, or t
cagcgacatctcactcatgaaaatgtacagcgcaagcaagccaggacagnnnnnnnnnnnnnnnnnnnnnnnnnnnnnnnnnnnnnnnnnnnnnnnnnnnnnnatgaagagaacgagatcatttacaaccccaaaaacctgccacttggctgggatggcaaacctattccctactggctgtataagcttcatggcctaaatatcaactacaactgtgagatttgtggaaactacacctaccgagggcccaaagccttccagcgacactttgctgaatggcgtcatgctcatggcatgaggtgtttgggcatcccaaacactgctcactttgctaatgtgacacagattgaagatgctgtctccttgtgggccaaactgaaattgcagaaggcttcagaacgatggcagcctgacactgaggaagaatatgaagactcaagtgggaatgttgtgaataagaagacatacgaggatctgaaaagacaaggactgctctagtgttgagggatgtagctcagcttttgggctagcccaggcttccctaagatctgctttttctatttctcccaaccaaatcctcttaaagaccctttgctatgtagtctcatggtctagcatgcatcttgtagaaacaaggcatgctggcagattgcagggttgagatgtgttttatctgttttatattttaaaagattctgccagaaaataaaaccagaccttgttctaaagcccagggttatggaccaactcagtgcttcaggtcttaatgcctccatacctcttcctcaccaactttactagtagctgagatttaatgggcacctattatgctacatatcatgttaggtaaatctgacctgacctctttccccaccctcctttgttgctgcttccctgaatgagtattaccccaggatgaggtctgccatcagcttagttagccattgatgcaaatactagggaaagactaggaggatgagccagggttgctactaaggactaagtgtcgcaccaaggtttgccttttgtatttgcataaagaaaggagttggagctgnnnnnnnnnnnnnnnnnnnnnnnnnnnnnnnnnnnnnnnnnnnnnnnnnnnnnggttgcttgagactagcctaggtaacatagtgaggccctgtctcattnnnnnnnnnnnnnnnggcatggtggcacgcactgtggtcccagctactcaggagactgagg

SEQ ID NO: 76178 - DNA, 1726 bp, Homo Sapiens
  misc_feature (1145)..(1200): n is a, c, g, or t
  misc_feature (1653)..(1653): n is a, c, g, or t
gtgaatataacggctaggtacgaggctgtgtgtgtgaattcggcacgagggttggtggtctgaattgagaagccgcgactaagggaagatggagacaatactggagcagcagcggcgctatcatgaggagaaggaacggctcatggacgtcatggctaaagagatgctcaccaagaagtccacgctccgggaccagatcaattctgatcaccgcactcgggccatgcaagataggtatatggaggtcagtgggaacctgagggatttgtatgatgataaggatggattacgaaaggaggagctcaatgccatttcaggacccaatgagtttgctgaattctataatagactcaagcaaataaaggaattccaccggaagcacccaaatgagatctgtgtgccaatgtcagtggaatttgaggaactcctgaaggctcgagagaatccaagtgaagaggcacaaaacttggtggagttcacagatgaagagggatatggtcgttatctcgatctccatgactgttacctcaagtacattaacctgaaggcatctgagaagctggattatatcacatacctgtccatctttgaccaattatttgacattcctaaagaaaggaagaatgcagagtataagagatacctagagatgctgcttgagtaccttcaggattacacagatagagtgaagcctctccaagatcagaatgaactttttgggaagattcaggctgagtttgagaagaaatgggagaatgggacctttcctggatggccgaaagagacaagcagtgccctgacccatgctggagcccatcttgacctctctgcattctcctcctgggaggagttggcttctctgggtttggacagattgaaatctgctctcttagctttaggcttgaaatgtggcgggaccctagaagagcgagcccagagactattcagtaccaaaggaaagtccctggagtcacttgatacctctttgtttgccaaaaatcccaagtcaaagggcaccaagcgagacactgaaaggaacaaagacattgcttttctagaagcccagatctatgaatatgtagagattctcggggaacagcgacatctcactcatgaaaatgtacagcgcaagcaagccaggacannnnnnnnnnnnnnnnnnnnnnnnnnnnnnnnnnnnnnnnnnnnnnnnnnnnnnnntgaagagaacgagatcatttacaaccccaaaaacctgccacttggctgggatggcaaacctattccctactggctgtataagcttcatggcctaaatatcaactacaactgtgagatttgtggaaactacacctaccgagggcccaaagccttccagcgacactttgctgaatggcgtcatgctcatggcatgaggtgtttgggcatcccaaacactgctcactttgctaatgtgacacagattgaagatgctgtctccttgtgggccaaactgaaattgcagaaggcttcagaacgatggcagcctgacactgaggaagaatatgaagactcaagtgggaatgttgtgaataagaagacctacgaggatctgaaaagacaagggactgctctagtggtgagggcatgtacctcagctttttgggctagccccaggcttccctaagaacggcntttttctatttctcccaaccaaatcctcctttaagaccctttgctatgtaggcctcatgggcctagcaatgca

SEQ ID NO: 76179 - DNA, 553 bp, Homo Sapiens
actatacaacagcatgttaaaaaacatgtttattttacaatatgtacaatcaggaacatattttaaaaccattaccattaaaataaatgaagatcataaatcacaatttagtttgttcttagtgtatatactcacattaaaatataaagaacatataccaaaaagagccaaaagtgtgcattttgctaaaacctggtatatacatattccattggaaaaaagcaatcaaaaatgacttaaaccaaaactaagttcctgtgatgtgtagtaaccattatattgtttgtatgaggtagtaactaaattattttggccatgtattaatactctaagtcaaaagaaatatgaaaaggatcataaaataaggccaacaaaagtaaaaattccaagagaaatttgaaccacttcactctatggaatgttacagttcttcagtgtgatcatatgaaatgtttagtgaggactctttaataatgctaattaattctttgtgcatactgtaattctgaccacaattgcagtattctatcatggtaccgctattctgtgattc

SEQ ID NO: 76180 - DNA, 683 bp, Homo Sapiens
tcaacaaaagcttacctggtaagatattcagctggtctggtcctcaagactccaatagacactcttaaagaaggattgctgatggattgatagtgaaaccattagatcattgaattcctctggaattagaaaaccagagagtcccattttaagaaattagatatttaatatagcattgtgtgttctattttagtaacagcagaatctcttgacattacacaactcagtgaaacaacatcatttaagccaaaatatctcccaactgactgatagactctgagcactaatatcatagtgctgtgatgatggacaattacatagtaccgataacagccatgcactgtgcaaagcatgcccttctgcacaggagagcaaggcacttgcagtagtgatctatgccagcaaaacatcattttgagacaaacatttttgtggcagatgtttttcctaaaaagtactatatcatccaagaaatatttgagtaaaatcccttgttcttttgggtgacattaactgacatttgctttttttcaagacctaatagaaaataagaaagcccataatgtatttagaaacaggaatcctcagagcaattctctgtattctcatataatttcaatgtaaaacagaaaacatattgatgtgttggtgataggcttgaattattaaaaacttcaaaaaca

SEQ ID NO: 76181 - DNA, 1219 bp, Homo Sapiens
  misc_feature (635)..(647): n is a, c, g, or t
  misc_feature (1157)..(1177): n is a, c, g, or t
cagtcgacggtaccggacatatgcccgggaattcggccattacggccgggggagtcagaacctgtactcttattcagttccttggtgatgctatgtttgccagcgggagcacttcatcaggttcagaattttcacagctgtattcaggtaactgaagatttgtgtctccagaacatcttgtagagtcatttcatttaacacaggaactgagacttttgaaggaagaaatcaattatgatgataaactacaggttaaaaatattttgtatcatgcagtcaaagaaatggtgagagccttgaagatacacgaggatgaagtagacgatatggaagaaaattaagtgtgatccagtttgatatttttaggttgttgaactgggattacttaaccttgaatgatgatatgtatgcacactgactttaagcttcataaaaccatcagtgccaagaaattctctttgtagtaattacttgttactgacaccacagcagtatagcatatgtcacagctcctgtgattcaatgttataaaacaagcagaattttaaaagcagcactatatagctgttttgtattatagtgtatatgatgtttgtgaaaatgccagatttaaaatgatgtatttatttttggtnnnnnnnnnnnnnttctatgctatattgttgatcaagtgtaaatgtgaccttgtacagtttactaaaattactgatatttttcactacattgagacagttactgtgagaataggacacaaacaccagctattgcctgcatctgggaaattgctgaatcgcacagcagtcatgtcataatcagaaaattactgccaaataattgtaaaatttgtaaagtataaagtatataaagtagatactaaatacagacacttcaatattttgttgaagctattgactgtacaattaaacattttcaaaaggtgtaatttatttaaaattgtctcattttggtaaaatttatgtgaacttttaaagctaaatattaaacttaatatgctatgtaaatatatacatatatacatttaatgatgtatttttttaaaacattggcttgcttttgttaaagtgcaagtgttacatatggctttgtacattaaagttgaaaggggttttacattttccattaaaaggactttatcnnnnnnnnnnnnnnnnnnnnngcctacagccgcggccgcaagcttattccctttagttgaggg

SEQ ID NO: 76182 - DNA, 1050 bp, Homo Sapiens
  misc_feature (97)..(160): n is a, c, g, or t
  misc_feature (504)..(516): n is a, c, g, or t
ggggcacattggggctcggtggtctggtggtcccttcggtcttggccctatctgtcctttgtttttgtgatttactatcaatcatcacgaaccagtnnnnnnnnnnnnnnnnnnnnnnnnnnnnnnnnnnnnnnnnnnnnnnnnnnnnnnnnnnnnnnnntctcactgcttttcagtcttctctgtacttcatttttgtgaaaaagtgaaaatcacatataatctttatttaaaaatgctcaccaagcactgcagactttggagttagggattcagcagcttgttccagtgaaaaggaggagtgaagctggggaagttagtatctaagaggggcaagctgattgcatgtgcatttatacctatgcctttaaaacattcccataaaaagtattaataaagaaatttccattccacactagtactgatgaaaaggtggttgattttgccttgtgataattatcaaaggatagtttttcatccttagattttattcacatgagagannnnnnnnnnnnnctctgttgacttaggaacacatcataaattcacaccaactgacacgttgctgacgtctgtacttgacataaccatttttattcatacaggaagcattaaatataaaagatggtcagttttgaagagcaaagggtgctgaaatgacttgtacggttggctggtgctttctcaaatggattgccatagttcattactagtaaagaaaaggaaaatgtgatttacgttgtcatttttcctattaaaaaaaacccttaagaatggggcacttgagctgtccctgcaatgttttcatatctagtagtcattttagggaaagtgataatctgtagaatgaatagttatgttttgatatgactgatactttctttgttaaaaggttgtattaagtcttcaatttcaagtctagcttaaaagtgtaaacattatgtgattcatttgaatacaagaatgcctatgaaatacccactataacagcattccttttgtgtttagaactatagaagaaaatgtcttcaaataaagtagttttcagtc

SEQ ID NO: 76183 - DNA, 1104 bp, Homo Sapiens
  misc_feature (100)..(100): n is a, c, g, or t
  misc_feature (905)..(913): n is a, c, g, or t
gtggaccggtccggaattcccgggatatcgtcgacccacgcgtccggagactttcgcttccggctgccgcaggcgcttcgctggtgcagacgcagtgctngagcaaacagctaccggacaaagagtgacgcccggagctggagttatggcggctacggagccgatcttggcggccactgggagtcccgcggcggtgccaccggagaaactggaaggagccggttcgagctcagcccctgagcgtaactgtgtgggctcctcgctgccagaggcctcaccgcctgcccctgagccttccagtcccaacgccgcggtccctgaagccatccctacgccccgagctgcggcctccgcggccctggagctgcctctcgggcccgcacccgtgagcgtagcgcctcaggccgaagctgaagcgcgctccacaccaggccccgccggctctagactcggtcccgagacgttccgccagcgtttccggcagttccgctaccaggatgcggcgggtccccgggaggctttccggcagctgcgggagctgtcccgccagtggctgcggcctgacatccgcaccaaggagcagatcgtggagatgctggtgcaagagcagctgctcgccatcctgcccgaggcggctcggggcccggcggatccgccgccgcacggatgtgcgcatcactggctgagcggtggagctgcgggcggccagggcccgggcgctcctgtgcggactggggccatgatcgggccccggggagcctgaaccctggggaccccaccccgtgtttaatgaaaaatgagtttttggcagcgccccaatacctacccccggctactgggcgggcctcgcttggcttcgccgtccctcaccgagccctgaaagccccatgccatctagtactccnnnnnnnnncgctcttaaaagtcccccccaagggggccctagcttttccgctaaccccgttttttggtgaaaaaagggggccccttactaagggacgcggtttataaaacctggggccccgggcccggttcttttttacaaccgcctgactggggaaaaaatcgctccacctctgggacttctttgggagagggagcctt

SEQ ID NO: 76184 - DNA, 777 bp, Homo Sapiens
ctctaggtcgaggcggtgttatcggacgaggggctgcgcaggcgcttcgctggtgcagacgcagtgctgagcacacagctaccggacaaagagtgacgcccggagctggagttatggcggctacggagccgatcttggcggccactgggagtcccgcggcggtgccaccggagaaactggaaggagccggttcgagctcagcccctgagcgtaactgtgtgggctcctcgctgccagaggcctcaccgcctgcccctgagccttccagtcccaacgccgcggtccctgaagccatccctacgccccgagctgcggcctccgcggccctggagctgcctctcgggcccgcacccgtgagcgtagcgcctcaggccgaagctgaagcgcgctccacaccaggccccgccggctctagactcggtcccgagacgttccgccagcgtttccggcagttccgctaccaggatgcggcgggtccccgggaggctttccggcagctgcgggagctgtcccgccagtggctgcggcctgacatccgcaccaaggagcagatcgtggagatgctggtgcaagagcagctgctcgccatcctgcccgaggcggctcgggcccggcggatccgccgccgcacggatgtgcgcatcactggctgagcggtggagctgcgggcggccagggccgggcgctctgtgcggactggggccatgatcgggcccgggggcctgagcctgggaccccaccccgtgttaatgaaaaatgagttttggcaaaaaaaca

SEQ ID NO: 76185 - DNA, 550 bp, Homo Sapiens
ctactggcttgttgccagtgaagaagaagctagtaataaaaagaaatctaatagacgaagtcgctcaaagtctcgatcttcacattcacgatcttcatcacgctcatcctccccctcaagttcaaggtctaggtccaggtcccgttcaagaagttcttccagttcgcagtcaagatctcgtgccagttccagagaacgttcgagatctcgtgggtcgaaatcaagatccagctccaggtcccacaggggctcttcttccccacgaaaaagatcttattcaagttcatcatcttctcctgagaggaacagaaagagaagtcgttctagatcttcttcatctggtgatcgcaaaaaaagacgaacaagatcacggtcacccgaaagccaggtgattggtgaaaacactaaacaaccctgagcccagggccaacccctacggaacaccactactttacccagacgccacaggtcatcatctggatcatcccattctggttcccgttcaagttcaaaaaagaaataatgtattaaaatttacatcttaaaaaaa

SEQ ID NO: 76186 - DNA, 648 bp, Homo Sapiens
tacgacgaggctggcggtcaaacgataaatacagaaggaaaagcagttggccccgcatccatataaaagcaagctcatcacaagaatcagagcggaaagacagaggaccaggacaaagatctttctaaatataagttacatgaggatgaggatgaagatgacgctgatctctcaaaatataatcttgatgccagtgaagaagaagatagtaataaaaagaaatctaatagacgaagtcgctcaaagtctcgatcttcacattcacgatcttcatcacgctcatcctccccctcaagttcaaggtctaggtccaggtcccgttcaagaagttcttccagttcgcagtcaagatctcgttccagttccagagaacgttcgagatctcgtgggtcgaaatcaagatccagctccaggtcccacaggggctcttcttccccacgaaaaagatcttattcaagttcatcatcttctcctgagaggaacagaaagagaagtcgttctagatcttcttcatctggtgatcgcaaaaaaagacgaacaagatcacggtcacccgaaagacgccacaggtcatcatctggatcatcccattctggttcccgttcaagttcaaaaaagaaataatgtattaaaattaacaaattaaaa

SEQ ID NO: 76187 - DNA, 1312 bp, Homo Sapiens
atgtacgcagtgtgtttatagttaacatccgtgaggcaaatgttcactaaattcacaatgtctgccattggccctttcaccataagagaaatatactttaaaagcttacttcaatttgcctcattaagtatgatttagcctgtttctaccatatagtatttggtaactacatttggaagaatatcacacaaagcttcttaacacattggtaaacattttgagatgtctttatcaagcaaccgtatcagcagagaaaagataaactcttaagactttcttttttgccccacaattatgtgtcagaaaggaaaatatatcccacttctctccttgtagacatcacaagattcttttgcattaaatgtggagcaaaaaagtaaagctggataaaagagacacaatgattctaaggcacccttagcatagggaatcttcaaaatagacatttacagttggctgcttacaacatagtttaactttttttggtgagaatcactctgacatctgttaacagcataaaaaggctgactttcttttccataagtatgttgtttccaactagtttccagtctttcttccatgcccaaagttcaggcaagcctaggtaatcctgtcttagccaatggacaggatgtatttggaaatgacaaaaatgggtttaaattaggaagcaaagtactttgttatagctgaaatggcttttaaatgaagcaaatggttgtaaataatgaatgacagaacatctattttgggacattatggcttaaaatgctatttacttttaacttcacaaataaacacagctgtattgttttgaaaagcaatgaaaggcatgcacctctactagcagatttagcacttctgaccaagtaagacaccaacttctttaaaaatatgcttcatgcactgtactggatttttttaagatgtaaattttaatacattatttcttttttgaacttgaacgggaaccagaatgggatgatccagatgatgacctgtggcgtctgtaagacataatggagagagtaggcattctagtaagctagagctaaatctcagcattcattcttaagactgtgaaagtatacaaaattcagtaccatgatgctagcaaaaaaattaaaaattgagataggaacttacacacataaaattatctgatgtttagactttggatatgagcccagttatcatataaatacaataaaaaattctctacaatttcaaaagaatctcatttcaaaatatagccacctctcaattatgttaagatatcaaagaaaagccttgcaaaaatgtgtaaaattac

SEQ ID NO: 76188 - DNA, 1921 bp, Homo Sapiens
  misc_feature (571)..(579): n is a, c, g, or t
  misc_feature (1867)..(1867): n is a, c, g, or t
ggaattcccgggatgtcagaggcggcgtggagatcgctgggagcggttgcggcgtgccgggagctgagttatagctgtgacttctgccctgccaggccgcacacaagctggctgacccggtttgtaaaaatggaatttcaagcagtagtgatggcagtaggtggaggatctcggatgacagacctaacttccagcattcccaaacctctgcttccagttgggaacaaacctttaatttggtacccattgaacctgcttgagcgtgttggatttgaagaagtcattgtggttacaaccagggatgttcaaaaggctctatgtgcagaattcaagatgaaaatgaagccagatattgtgtgtattcctgatgacgctgacatgggaactgcagattctttgcgctacatatatccaaaacttaagacagatgtgctggtgctgagctgtgatctgataacagacgttgccttacatgaggttgtggacctgtttagagcttatgatgcatcacttgctatgttgatgagaaaaggccaagatagcatagaacctgttcccggtcaaaaggggnnnnnnnnngcagtggagcagcgtgacttcattggagtggacagcacaggaaagaggctgctcttcatggctaatgaagcagacttggatgaagagctggtcattaagggatccatcctacagaagcatcctagaatacgtttccacacgggtcttgtggatgcccacctctactgtttgaaaaaatacatcgtggatttcctaatggaaaatgggtcaataacttctatccggagtgaactgattccatatttagtgagaaaacagttttcctcagcttcctcacaacagggacaagaagaaaaagaggaggatctaaagaaaaaggagctgaagtccttagatatctacagttttataaaagaagccaatacactgaacctggctccctatgatgcctgctggaatgcctgtcgaggagacaggtgggaagacttgtccagatcacaggtgcgctgctatgtccacatcatgaaagaggggctctgctctcgagtgagcacactgggactctacatggaagcaaacagacaggtgcccaaattgctgtctgctctctgtccagaaaaaccaccagtccattcgtcagcccagattgtcagcaaacacctggttggagttgacagcctcattgggccagagacacagattggagagaagtcatccattaagcgctcagtcattggctcatcctgtctcataaaagatagagtgactattaccaattgccttctcatgaactcagtcactgtggaggaaggaagcaatatccaaggcagtgtcatctgcaacaatgctgtgatcgagaagggtgcagacatcaaggactgcttgattggaagtggccagaggattgaagccaaagctaaacgagtgaatgaggtgatcgtggggaatgaccagctcatggagatctgagttctgagcaagtcagactccttccttttggcctccaaagccacagatgttggccggcccacctgtttaactctgtatttatttcccaataaagaagggcttccaaaggcatgctggagacttgtggagcagtccaaagctccatgtcaggtgggctccaggtgtacacagtgtatgttcacgtgtcatgtggtaaagatcatctggagcaagtgtgtgggacaggacagatacagtggcctaactcttgtgtgccaagatgtatcggtggggcagcagctgtccaatgtaaagctcctaggaaggctactttctgactggctgacccaacccagtcctgaaagtatccctcacctaaaaggacctgggagtaattacntcagtcccttatcctaatcagcctttctagacccataggcctagctgctggcag

SEQ ID NO: 76189 - DNA, 937 bp, Homo Sapiens
gttttattcttcagtgttcatatagcacctggcccattacatatctaggcaactaaaaacaaacattgtaagaatgaatatttttaatgtagtaattcctagttacaatagatacataaagtaatgaactcagcattctgtacttttgcttcaggtttgaagtaaaaaatatctagtaaaatttttttatttcacgtaaccatgccatttcacattaccataccatcagatagcatggcttattgtgggcatttctgcagtgaatacattttccaaaacagttaaattgtctgtttggatttgctttaaagtcttgtgtaagagagaagaaactatttctataataaaaagcactctcatcagatatctgacataattagatacaatataacattttactaagttcagtattcatgttttaaaggtgtttatactgatttgattgtgctggcaaatatactgtattgttaatattgaactgtttatttttctcttagtcttcttatttaattaacttcattgccgctggattctgttcagcctttaaaaatatttcttagtggtcattgctctgcagaactcaaaaagaaaattgtacttgttcatagacatttttaaagggttaatttattgttcagccttatcccttggcacgtaaacagactactagacttattgtaggttcgtttgagctttgtgttgtaaaattaaaaatgcttctgtaaagttttcaaggtagggagtgattttattattgtgtatatctaatatattaagtatgtgtgatactaaggtttgactgctataattatttgtactgttgatcacatgtacttaaaacatctgatactgtattctaagacaggttgtttttgcaattaaatttattttaataagacgatcatgaataaaactttaaattgatatttttattatt

SEQ ID NO: 76190 - DNA, 672 bp, Homo Sapiens
tgtggcctgtccgggcgttggccagccctgcagctgcacccccgatcctcatccctcaccccattccctgccagcatcctaaggctcctggcgggcatcctctctgctcaaaattattgacctgtctcccggccacacctgctgtgccctctcagccaggccatcatcaccccctgttcattatgtcaggcctcatgggagcctggccttctccagaagctggccccggcgtcctcccaagctggaccacgtaggccccagatcacacctgggggtccagatgtaggggtcccgtgtgcacgcccaatcagaccgagcacttgtgacactaccccaacacctctcccagggctgaatgaggaacgcgccactggacacatgaggaagaggctgccctgggagctactgatgctgtgacctcacctctctggctttgggcggcaggtccctgcacctaggatgcctgcctggaaatgtccttgcattcgtggcctccttcacagcctcctcctcagagaagcctctgcgagtgcacagggagtgtgtgcagccttgtgaagggctgggaccacttgcccagactggggcccctcaggcacaggcgtggggtcctactgacctgtctccccagctcccacacagaaagcatctaaaataaacacacgtggatgg

SEQ ID NO: 76191 - DNA, 703 bp, Homo Sapiens
cacagtccccccatctctgccagaaccccccatgtggccactgtcctcagacagctcctggagcttgtggataagcactggaatgctccggctccctcctcctcaacaagaagttctcggaaagtttgaagcaaaaactggtcaaagtgctggaggaaaacctcattttgtcagaaaaaattcaacagttggaggaaggtgctgccatctcaattgtgagtgggcaacagtcacatacttatgatgatcttctgcacaaaaaccaacagctgacccatgcaggtggcttgcctgaaccaggagcttgcccagctgaaaaagctggagaagacagttgccattctccatgaaagtcagagatccctggtggtaactaatgagtatctgctgcagcagctgaataaggagccaaaaggttattccgggaaagcgctcctgcctcctgagaagggtcatcatctggggagatcatcgccctttgggaaaagcacgttgtcttcctcctcaccagtggcacatgagactggtcagtatctaatacagagcgtcttggatgctgccccagagcctggcttatagagctagcatggaactcacaccacagcttccctggtccacagaggctctcaccgccattgccaccagtatggtggtatgtactcacaaagattaagaaagaaatgtattctgattagaaaaaaaa

SEQ ID NO: 76192 - DNA, 1592 bp, Homo Sapiens
ggtaccggtccggaattcccgggatatcgtcgacccacgcgtccgggttaagttctgcctcctgggggcattgctggcccccatccgagtgcttctggcctttatcgtcctctttctcctctggccctttgcctggcttcaagtggccggtcttagtgaggagcagcttcaggagccaattacaggatggaggaagactgtgtgccacaacggggtgctaggcctgagccgcctgctgtttttcctgctgggcttcctccggattcgcgttcgtggccagcgagcctctcgccttcaagcccctgtccttgttgctgccccacactccactttctttgaccccattgttctgctgccctgtgacctgcccaaagttgtgtcccgagctgagaacctttccgttcctgtcattggagcccttcttcgattcaaccaagccatcctggtatcccggcatgacccggcttctcgacgcagagtggtggaggaggtccgaaggcgggccacctcaggaggcaagtggccgcaggtgctattctttcctgagggcacctgttccaacaagaaggctttgcttaagttcaaaccaggagccttcatcgcaggggtgcctgtgcagcctgtcctcatccgctaccccaacagtctggacaccaccagctgggcatggaggggtcctggagtactcaaagtcctctggctcacagcctctcagccctgcagcattgtggatgtggagttccttcctgtgtatcaccccagccctgaggagagcagggaccccaccctctatgccaacaatgttcagagggtcatggcacaggctctgggcattccagccaccgaatgtgagtttgtagggagcttacctgtgattgtggtgggccggctgaaggtggcgttggaaccacagctctgggaactgggaaaagtgcttcggaaggctgggctgtccgctggctatgtggacgctggggcagagccaggccggagtcgaatgatcagccaggaagagtttgccaggcagctacagctctctgatcctcagacggtggctggtgcctttggctacttccagcaggataccaagggtttggtggacttccgagatgtggcccttgcactagcagctctggatgggggcaggagcctggaagagctaactcgtctggcctttgagctctttgctgaagagcaagcagagggtcccaaccgcctgctgtacaaagacggcttcagcaccatcctgcacctgctgctgggttcaccccaccctgctgccacagctttgcatgctgagctgtgccaggcaggatccagccaaggcctctccctctgtcagttccagaacttctccctccatgacccactctatgggaaactcttcagcacctacctgcgccccccacacacctctcgaggcacctcccagacaccaaatgcctcatccccaggcaaccccactgctctggccaatgggactgtgcaagcacccaagcagaagggagactgagtgcctcagcctctcaccccctcctcctcagggcagcgctaggggcctcccctatgcctcagccccatctctgctcctg

SEQ ID NO: 76193 - DNA, 509 bp, Homo Sapiens
aggagcagagatggggctgaggcataggggaggcccctagcgctgccctgaggaggagggggtgagaggctgaggcactcagtctcccttctgcttgggtgcttgcacagtcccattggccagagcagtggggttgcctggggatgaggcatttggtgtctgggaggtgcctcgagaggtgtgtggggggcgcaggtaggtgctgaagagtttcccatagagtgggtcatggagggagaagttctggaactgacagagggagaggccttggctggatcctgcctggcacagctcagcatgcaaagctgtggcagcagggtggggtgaacccagcagcaggtgcaggatggtgctgaagccgtctttgtacagcaggcggttgggaccctctgcttgctcttcagcaaagagcttgggagagaaagggataagagtcaagttctctcctcatgccatggcctcaccctgccccacagactggcctgacaggctcctcctcttccaaaagg

SEQ ID NO: 76194 - DNA, 1673 bp, Homo Sapiens
ggcgtggctcctggagttggcgtggctcctggtgtcggtgtggctcctggagttggcttggctcctggagttggcgtggctcctggagttggtgtggctcctggcgttggcgtggctcccggcattggccctggtggagttgcagctgcagcaaatccgctgccaaggtggctgccaaagcccagctccgagctgcagctgggcttggtgctggcatccctggacttggagttggtgtcggcgtccctggacttggagttggtgctggtgttcctggacttggagttggtgctggtgttcctggcttcggggcagtacctggagccctggctgccgctaaagcagccaaatatggagcagcagtgcctggggtccttggagggctcggggctctcggtggagtaggcatcccaggcggtgtggtgggagccggacccgccgccgccgctgccgcagccaaagctgctgccaaagccgcccagtttggcctagtgggagccgctgggctcggaggactcggagtcggagggcttggagttccaggtgttgggggccttggaggtatacctccagctgcagccgctaaagcagctaaatacggtagtggcagcaagacctggcttcggattgtctcccattttcccaggtggggcctgcctggggaaagcttgtggccggaagagaaaatgagcttcctaggacccctgactcacgacctcatcaacgttggtgctactgcttggtggagaatgtaaaccctttgtaaccccatcccatgcccctccgactccccaccccaggagggaacgggcaggccgggcggccttgcagatccacagggcaaggaaacaagaggggagcggccaagtgccccgaccaggaggccccctacttcagaggcaagggccatgtggtcctggccccccacgcgccatcccttcccacctaggagctccccctccacacagcctccatctccaggggaacttggtgctacacgctggtgctcttatcttcctggggggagggaggagggaagggtggcccatcggggaaccccctacctggggctcctctaaagatggtgcagacacttcctgggcagtcccagctccccctgcccaccaggacccaccgttggctgccatccagttggtacccaagcacctgaagcctcaaagctggattcgctctagcatccctcctctcctgggtccacttggccgtctcctccccaccgatcgctgttccccacatctggggcgcttttgggttggaaaaccaccccacactgggaatagccaccttgcccttgtagaatccatccgcccatccgtccattcatccatcggtccgtccatccatgtccccagttgaccgcccggcaccactagctggctgggtgcacccaccatcaacctggttgacctgtcatggccgcctgtgccctgcctccacccccatcctacactcccccagggcgtgcggggctgtgcagactggggtgccaggcatctcctccccacccggggtgtccccacatgcagtactgtataccccccatccctccctcggtccactgaacttcagagcagttcccattcctgccccgcccatctttttgtgtctcgctgtgatagatcaataaatattttattttttgtcctggaaaa

SEQ ID NO: 76195 - DNA, 1110 bp, Homo Sapiens
  misc_feature (760)..(812): n is a, c, g, or t
ccgatgatggggatgggcttggtgctggcatccctagacttgggagttggtgtcggcgtccctggacttggagttggtgctggtgttcctggacttggagttggtgctggtgttcctggcttcggggcagtacctggagccctggctgccgctaaagcagccaaatatggatcagcagtgcctggggtccttggagggctcggggctctcggtggagtaggcatcccaggcggtgtggtgggagccggacccggcgccgctgctgccgtagtcaaagctgctgccaaagccgcccagtttggcctagtgggagccgctgggctcggaggactcggagtcggagggcttggagttccaggtgttgggggccttggaggtatacctccagctgcagccgctaaagcagctaaatacggtgctgctggccttggaggtgtcctagggggtgccgggcagttcccacttggaggagtggcagcaagacctggcttcggattgtctcccattttcccaggtggggcctgcctggggaaagcttgtggccggaagagaaaatgagcttcctaggacccctgactcacgacctcatcaacgttggtgctactgcttggtggagaatgtaaaccctttgtaaccccatcccatgcccctccgactccccaccccaggagggaacgggcaggccgggcggccttgcagatccacagggcaaggaaacaagaggggagcggctcggaatagccaccttgcccttgtagannnnnnnnnnnnnnnnnnnnnnnnnnnnnnnnnnnnnnnnnnnnnnnnnnnnngttgaccgcccggcaccactagctggctggtgcacccaccatcaacctggttgacctgtcatggccgcctgtgccctgcctccacccccatcctacactcccccagggcgtgcggggctgtgcagactggggtgccaggcatctcctccccacccgggtgtccccacatgcagtactgtataccccccatccctccctcggtccactgaacttcagagcagttcccattcctgccccgcccatctttttgtgtctcgctgtgatagatcaataaatattttattttttgtcctggaaa

SEQ ID NO: 76196 - DNA, 1191 bp, Homo Sapiens
  misc_feature (1126)..(1138): n is a, c, g, or t
cagtcgacggtaccggacatatgcccgggaattcggccattacggccggggagacaccgtgtcctcttgcctgggagaggggaagcagatctgaggacatctctgtgccaggccagaaaccgcccacctgcagttccttctccgggatggacgtggggcccagctccctgccccaccttgggctgaagctgctgctgctccatgctgctgctgccctcaggggccaagccaacacaggctgctacgggatcccagggatgcccggcctgcccggggcaccagggaaggatgggtacgacggactgccggggcccaagggggagccaggaatcccagccattcccgggatccgaggacccaaagggcagaagggagaacccggcttacccggccatcctgggaaaaatggccccatgggaccccctgggatgccaggggtgcccggccccatgggcatccctggagagccaggtgaggagggcagatacaagcagaaattccagtcagtgttcacggtcactcggcagacccaccagccccctgcacccaacagcctgatcagattcaacgcggtcctcaccaacccgcagggagattatgacacgagcactggcaagttcacctgcaaagtccccggcctctactactttgtctaccacgcgtcgcatacagccaacctgtgcgtgctgctgtaccgcagcggcgtcaaagtggtcaccttctgtggccacacgtccaaaaccaatcaggtcaactcgggcggtgtgctgctgaggttgcaggtgggcgaggaggtgtggctggctgtcaatgactactacgacatggtgggcatccagggctctgacagcgtcttctccggcttcctgctcttccccgactagggcgggcagatgcgctcgagacccacgggccttccacctccctcagcttcctgcatggacccaccttactggccagtctgcatccttgcctagaccatttctcccctccagggagcccaccctgacccacccccactgcaccccctccccatgggttctctccttcctctgaacttctttaggagtcactgcttgtgtggttcctgggacacttaaccaatgccttctggtactgccattcnnnnnnnnnnnnncaagtattggaaggggtggggagatatataaataaatcatgaaatcaatacat

SEQ ID NO: 76197 - DNA, 592 bp, Homo Sapiens
tttgttataaaacaaaatttattatgcaatactttctcataatgaattgcatctctttggtaaaaataaactttataaacattttaataatcagagattagatacaaaaactaagtatttgtaagttgtttttaatatgagcaaagattggcaactgagaagtggttcacttgtgactggtcatctactggcagttataactcaaaccgggacaatttttatgctacatcagaaaagaggataaggaaacagtttgataacaaatttgttgaatcagaaagcattcttacactttcatttaaaaataaataatagttacaatcaattggcaattatacatttttatacactatatgatggcaacataatactttaaaattaagcacttagtttaataagaaatgtacaacgatttaaaaaataagttttgacaatggcactggcagttagatgcaaagaatatgctttaagaaaaaaaatggcaggtataacattaaaatactcgaattcacctttcaataaatatttttactacatcattaacatactgaagtaaacgatggtttaaatcaaagcttacacatttcaaact

SEQ ID NO: 76198 - DNA, 1477 bp, Homo Sapiens
acaatcagtcatcaaagtaagtaaaaattagatgctacagctagctaactgtatccctagaaatgatgaataatttgccatttggacagttaacatccaggtgttacaaagtcagtgttaattctaaagatgatcatttctgccctttagaatggcttgtcccatcagcagatgaatgtgttaagcacaaagcatcttccttaaagcacaaagagagggactaactgatgctgcatctagaaaacacctttaagttgcctttcctctttgtagttagcgttcaggcaggtgacgtgtggaaagtctagggggttccattctggccatgcgagcccagctcctaccaacgtcggtaacttgagcagtccctgttgctggccagagactgcctggtcgccagcgctcaccatgggtgccaggatgcttcgcagaggcactgtgctcacggttggacttggtgtcagtgggaaagggcagtgtggggactgtcatttttgtgatttaataacacacagtgaaaatccaggaagaatgaattaagcttcttctgggagttgtttattcctgctcgtgcttaagattgatgatttcgtgaaataaagaacatcatttcatttaagagatcatttcattaagatctctaatctgttttgagtctttacaaaatagccagttataaaatggggcttgatttgttttagactgaaggaagaaccgtttttcccaaaatatactacagaagtgctacaatatttgcgatattaaaatgcctgcagattgaaaatgggggccactcatttcagaactgcaggaatggtgtagttacagatcgacataaactcctgccccccaacaatgccatgagctgcttagcccaggagacctgggagctatggcaggacggttaggccagccgatgagggactgcagagaggctactggaaggttaaggacccagagagaaatcgagaggtgccctacagcagccaggcctatcaggatccgtcacacacggcagcggcgtggacaccggcctgatgcagagcgtgacccctcctgctgggacctgtgttgtaagctcctatttgcttatcttgtttatttcaagcagaaatcaataaattccataaccctctgtattgactgcaatgtaagctgctgaggagactggttctgttggtcagtcaggtgtttgctcagccctgtctgatcacctgtgctgctctgtccctaactagtgacccatggaagcttccaagcagttttctcttcatcactactaacaaacgaaacactaagaaggcttagtatcgctctttttctgcggggctactctgaagtactgacttgctttccagtctgattcacgttagcagtgtgtacactactgtatcatcatcagcttcatcaccctgtaaaccaggctcctctgaagagactttggtgagatgaacgtgaggtaaaaatttcgttcggc

SEQ ID NO: 76199 - DNA, 854 bp, Homo Sapiens
  misc_feature (64)..(64): n is a, c, g, or t
cctctgagtaatagagtccgaagaggatttgtcagctcgtgccagcatcgtaattttcacttcntgaggtctaccacccccagaagggtgccagtctcactgtgtgatgggttagcccagtgtgtgctgcatccacacccagcaacggagtcccgtgcttgcaggctggtggatgctgtcctctgggttaagactgtctcccttctcgagagcactggaggttctccatctgcgtgtttcagtggaagttggcagatacgaaaacaggcccctatagggaagcagttccatgaaaatgattaattctttccaaaagacttaaaattttttcctatttcaattttcctttcaaaaaaggaaatacattcatgtagttcaaaacttaagaaaacaaaagtctgttcagcaaaagactcccactccggttccccaaacgctgagccccaccccccatccctggtagcaagaagtgtttccaattttaaggttaagaaacaaagtccctggatttgtgttagggatgtcttcctgagagtgggttgtgttccgtttgaccctggcggttgacctcggcccactaggatcatgccgccctctccagggaggagggcctccccatcaccctgtacagtggcaccccagccctggcactgcccgcccttgctcagcgtacctttcccatggcactctgacgtactggatgtttggtttctgaagttactggctgtttaccctgccgggatgtaagcccctccagggcaggggcttgtctcgtgttcagtgctgcatcccagctgctgggcacggtacctggtccatggcgttcaataaataactgttggatgagtgaaaaa

SEQ ID NO: 76200 - DNA, 805 bp, Homo Sapiens
aaatccattcattgaaatggtttctaaactgtataatgtaatttggagcctatttagtaatagaattaaatgtcctatgtagtgctacaatttttgaattagaaagtgatcaaatgtaagaaaaaaatttaaaaattcagcccagaaaacaaaatagtgtattaaattagtttaatgtaaaaggaatttataagatttttttcctcaatatagatacctcacttgaaaagaaagcacagcatacttaaagtagttctagtaaacatgtcctagaaaacagttgctaaatgtaggacatcttttgaggaattagtttatgagaaataaaattttacttgtttttactatcctgttagaagtatttgtttatcctgataattttaagccaacatagtagtcttaaattacttttgaatttctaatctgtgaaggcagtaaatgaaatatctgttctgcaactgttgaaacaaataattggctacattgaccataattaaagttaaaattttgccaatgatgtacagttttatggttaaagttgctgtggttggttgcattacatgacacagaaaactgtcctctacctcacgtgaaataaatattttatatggttttactaaaaataagactcatgtatctggtcacctagtttacaaattttgaattatatttattgaaacatgacatactgtgctctgagcttatacctcaattgtattttgtgctgttttccattttcatgccttgtaaataacttgtatagattgtggatcaaatactaaataaaaacttttaatgccaaaaa

SEQ ID NO: 76201 - DNA, 690 bp, Homo Sapiens
gagtccctgaggccgggcctggactcagaggtgacccggaccctgagggcgacctgggtatgcccgcccagccccactccccaactggagaagctcagcacagggcggagtgggggcaggcacagggcacagggcctggaggggctccaggtgttgaggactcttcccggcaccgggagcccctgcacggcctctgccctggaggtgctcggccctcggtctgcctgggaacttcctgggcctcacaggccatcacagcagggggtgagcaggggcagcccctggcagtgggtctgggccaaggctgtgggtggccacctcaggcgtctcggtctccccaccccaggtgtccgggggcctgtttttggagagccatcagctccaccgcacaccagtggggtctcgctgggagagagccggagcagcgaagtggacgtctcggatctcggctcgcgaaactacagtgcccgcacagacttctactgcctggtgtccaaggatgatatgtagctcccaccccagagtgcaggatcatagggacagcgggggccagggcagcggcgtcgctcctctgctcaacaggaccacaacccctgccagcagccctgggaccctgccagcagccctgggaaaaggctgtggcctcagggcgcctcccagtgccagaaaataaagtccttttggattttg

SEQ ID NO: 76202 - DNA, 1289 bp, Homo Sapiens
ctcgccgacctctggtgaacctgagccgctgcgacgcctcatcgtggtgctttcggacgccttcctgagccgggcctggtgcagccacagcttccgggagggcctgtgccggctgctggagctcacccgcagacccatcttcatcaccttcgagggccagaggcgcgaccccgcgcacccggcgctccgcctgctgcgccagcaccgccacctggtgaccttgctgctctggaggcccggctccgtggtgcggagcaggcgcgggagggtccggggctagcggcgggttagagatgggcggtgcccgggctccaggctgggacccctccgtggggagctctgcggcacacgctttgtgaatgggccctggggggaggttccgctgcctggggccccgatgcggggagccgcccttgaggcccccggagccacggaatagctgtcgcagggcgtggaacccgtgggcagccgcaggtgtgctcttgggggccaggacgccaggggcttccgaggtgtcacacctgcaaaccgcccgacctggccccagactccttcctccgagtagggaaagaagtgcagctggcgctgccgcggaaggtgcggtacagagcggtggaaaggagacccccagacgcagctgcagggacgacaaggaccccatgctgattcttcgaggccgagtccctgagggccgggccctggactcagaggtggacccggaccctgagggcgacctgggtatgcccgcccagccccactccccaactggagaagctcagcacagggcggagtgggggcaggcacagggcacagggcctggaggggctccaggtgttgaggactcttcccggcaccgggagcccctgcacggcctctgccctggaggtgctcggccctcggtctgcctgggaacttcctgggcctcacaggccatcacagcagggggtgtccgggggcctgtctttggagagccatcagctccaccgcacaccagtggggtctcgctgggagagagccggagcagcgaagtggacgtctcggatctcggctcgcgaaactacagtgcccgcacagacttctactgcctggtgtccaaggatgatatgtagctcccaccccagagtgcaggatcatagggacagcgggggccagggcagcggcgtcgctcctctgctcaacaggaccacaacccctgccagcagccctgggaccctgccagcagccctgggaaaaggctgtggcctcagggcgcctcccagtgccagaaaataaagtccttttggattctg

SEQ ID NO: 76203 - DNA, 1114 bp, Homo Sapiens
agctatgagacctataaccgctggttaaaaaagcaggctggtacggtcggatttccgggatatcgtcgacccacgcgtcgtgcaaggccaggaagctacagggaaagttctgatcaagaatacacaaagacacaagccaggtccccaccgcgctggcgatgcatccatagcagccttggtgctgtggacactccctggggcccagcgaaggggagagtttgctcccaaaggcgcaccaatgaccaacatttgccccccggaggaaagaactggaaccagcctctgacctgtccaggtgccctgtccagctgactgcaaggacagagaggagtcctgcccagctcttggatcagtctgctggccgaggagcccggtggagccagggtgaccctggagcccagcctgccccgaggaggccccggctcagagccatgccaggtgtctgtgatagggcccctgacttcctctccccgtctgaagaccaggtgctgaggcctgccttgggcagctcagtggctctgaactgcacggcttgggtagtctctgggccccactgctccctgccttcagtccagtggctgaaagacgggcttccattgggaattgggggccactacagcctccacgagtactcctgggtcaaggccaacctgtcagaggtgcttgtgtccagtgtcctgggggtcaacgtgaccagcactgaagtctatggggccttcacctgctccatccagaacatcagcttctcctccttcactcttcagagagctggccctacaagccacgtggctgcggtgctggcctccctcctggtcctgctggccctgctgctggccgccctgctctatgtcaagtgccgtctcaacgtgctgctctggtaccaggacgcgtatgggggaggtggagataaacgacgggaagctctacgacgcctacgtctcctacagcgactgacccgaggaccgcaagttcgtgaacttcatcctaagagccgcagctggagcggacgttcggggctaaaaagctcttcctggacgaacgggactcctgccggcgctgagcctcgcgactcttggtgaactgagcggtgcgagcctcatcggggtgctttcga

SEQ ID NO: 76204 - DNA, 1318 bp, Homo Sapiens
cagccttggtgctgtggacactccctggggcccagcgaaggggagagtttgctcccaaaggcgcaccaatgaccaacatttgccccccggaggaaagaactggaaccatggtcaaggccaacctgtcagaggtgcttgtgtccatgtgtcctgggggtcaacgtgaccagcactgaagtctatggggccttcacctgctccatccagaacatcagcttctcctccttcactcttcagagagctggccctacaagccacgtggctgcggtgctggcctccctcctggtcctgctggccctgctgctggccgccctgctctatgtcaagtgccgtctcaacgtgctgctctggtaccaggacgcgtatggggaggtggagataaacgacgggaagctctacgacgcctacgtctcctacagcgactgccccgaggaccgcaagttcgtgaacttcatcctaaagccgcagctggagcggcgtcggggctacaagctcttcctggacgaccgcgacctcctgccgcgcgctgagccctccgccgacctcttggtgaacctgagccgctgccgacgcctcatcgtggtgctttcggacgccttcctgagccgggcctggtgcagccacagcttccgggagggcctgtgccggctgctggagctcacccgcagacccatcttcatcaccttcgagggccagaggcgcgaccccgcgcacccggcgctccgcctgctgcgccagcaccgccacctggtgaccttgctgctctggaggcccggctccgtgactccttcctccgatttttggaaagaagtgcagctggcgctgccgcggaaggtgcggtacaggccggtggaaggagacccccagacgcagctgcaggacgacaaggaccccatgctgattcttcgaggccgagtccctgagggccgggccctggactcagaggtggacccggaccctgagggcgacctgggtgtccgggggcctgtttttggagagccatcagctccaccgcacaccagtggggtctcgctgggagagagccggagcagcgaagtggacgtctcggatctcggctcgcgaaactacagtgcccgcacagacttctactgcctggtgtccaaggatgatatgtagctcccaccccagagtgcaggatcatagggacagcgggggccagggcagcggcgtcgctcctctgctcaacaggaccacaacccctgccagcagccctgggaccctgccagcagccctgggaaaaggctgtggcctcagggcgcctcccagtgccagaaaataaagtccttttggattctgg

SEQ ID NO: 76205 - DNA, 689 bp, Homo Sapiens
gacacggagggacagctagagcacgtgaagctgttcatgcaggacctctctgccatgctggccggcctgggtcaggctgagcctgcagcccctgcctcctagccctgacacaggctgacgcagctgctgcccttctgtggccatacagtgctccttttcacagatgatggctcctgcagggagtgcccccagtgcccagcacagggccaggcacacagtggtgcacgggaacgtctgctgatgcccaccctaaggccaatcaaggagccacggggctgggtcctggtcctcacatcctcttccgcatcttgcccttcttggagcgggcaccccggccgaaggcgccctgctgcagctcctggacgcggcggcggttgcgggcagagagctgcttgaggccaccacgctgcaggaagtgcagcttctgggcccggcgccgctgcttcaggatctgctgcttggtcttgagttccgggcggactcggcctgcaggggtgcctggggcgtggggccgggatgcacctgctgggacagggattcagggagctcagctgttgggatcactcccaagatcccctcctcccagaagcttgcagactcctcccctgcccctactcctgttctgtgcttattgctgtggcccagtgtctgtacacagtaggtggctaataaagttttaggcagcctca

SEQ ID NO: 76206 - DNA, 671 bp, Homo Sapiens
ggtggagataaaaagtttccttctcagctgttgatacggtgatgaatatgagggggagcccacagatggttgtaagttcaccctcaagttctagtttttacaatggatccatggtatttattaagttcatattcataaagaagttaattaaaacaaaaggagagccacccacggagataagagtaggtcacaaaccaatgaatatgactgatccagttacaagaaaataaagctgattgatgtaaatgaaaatactaattggatagtgcaggtgacagcagcgaggaagctgtgaaggtgtctgctcacgcagcagttgggaaggttggcctgaggctttcaaaacccagaacggtttaggatctcagtcaccacctctgggaaccaccatcatcactgttcttttaatgaggggatctccagtccccgccctaccttttggcctcccccgcgtgttgaggggtgggggctggacagtgactctggggctgggatgtgacttcgtgctgggcccccccaggtgaagctgttcatgcaggacctctctgccatgctggccggcctgggtcaggctgagcctgcagcccctgcctcctagccctgacacaggtgagcagcgggagagggaacccctgagagaccctgagataggaggggccacatttccaatg

SEQ ID NO: 76207 - DNA, 3088 bp, Homo Sapiens
  misc_feature (1939)..(1973): n is a, c, g, or t
  misc_feature (3070)..(3070): n is a, c, g, or t
cggtccggaattcccgggatcagcgcgcggcccgaatggcggccgacaagggcccggcggctggacctcggtcgcgagctgccatggcccagtggaggaagaagaaagggctccggaagcgccgaggcgcggcctcccaggcccgcggcagcgactcggaggacggcgagtttgagatccaggcggaagatgacgcccgggcccggaagctgggacctggaagacccctgcccaccttccccacctcggaatgcacctcggatgtggagccggacacccgggagatggtgcgtgcccagaacaagaagaagaagaagtctggaggcttccagtccatgggcctgagctacccggtgttcaaaggcatcatgaagaaggggtacaaggtgccaacacccatccagaggaagaccatcccggtgatcttggatggcaaggacgtggtggccatggcccggacgggcagtggcaagacagcctgcttcctcctcccaatgttcgagcggctcaagacccacagtgcccagaccggggcccgcgccctcatcctctcgccgacccgagagctggccctgcagaccctgaagttcactaaggagctaggcaagttcactggcctcaagactgccctgatcctgggtggagacaggatggaagaccagtttgcagccctgcacgaaaatcccgacataattattgccacgcccggacggttggtgcatgtggctgtggaaatgagcctgaagctgcagagtgtggaatacgtggtgttcgatgaagctgaccggctttttgaaatgggtttcgcagagcagctgcaggagatcatcgcccgcctccccgggggccaccagacggtgctgttctccgccacgctgcccaaactgctggtggaatttgcccgggctggcctcacggagcccgtgctcatccggcttgacgtggataccaagctcaacgagcagctgaagacctccttcttcctcgtgcgggaggacaccaaggctgccgtgctgctccacctgctgcacaacgtggtgcggccccaggaccagaccgtggtgtttgtggccacgaagcaccacgccgagtacctcactgagctgctgacgacccagcgggtgagctgcgcccacatctacagtgccctagacccgacagcccgcaagatcaatctcgccaaattcacgcttggcaagtgctccactctcattgtgactgacctggccgcccgaggcctggacatcccgctgctggacaatgtcatcaactacagcttccccgccaagggcaaactcttcctgcaccgcgtgggccgtgtggctcgggctggccgaagtggcacagcctactccttggtggcccctgatgaaatcccctacctgctggatctgcacctgttcctgggccgctccctcaccctcgcccgacccctcaaggagccctcaggtgtggccggtgtggatggcatgctgggtcgggtgccacagagtgtggtggacgaggaggacagtggtctgcagagcaccctggaggcatcgctggagctacggggcctggcccgcgttgctgataacgcccagcagcagtatgtgcgctcacgcccggcgccctcgcctgagtccatcaagagggccaaggagatggaccttgtggggctgggcctgcaccccctcttcagctcgcgttttgaggaggaggagctgcagcggctgaggctggtggacagcataaagaactaccgctcccgggcgactatctttgagatcaacgcctccagccgagacctgtgcagccaggtgatgcgcgccaagcggcagaaggaccgcaaggccatcgcccgcttccagcagggacagcaggggcggcaggagcagcaggagggcccagtgggcccagccccgagccgcccagcactgcaggagaagcagcctgagannnnnnnnnnnnnnnnnnnnnnnnnnnnnnnnnnngacattttctcagaggtcgtgggccggaagcggcagcggtcaggacccaacaggggagccaagaggcggagggaggaggcccggcagcgggaccaggaattctacatcccctaccggcccaaggactttgacagcgagcggggcctgagcatcagcggggaagggggagcctttgagcagcaggcagctggcgctgtcctggacttgatgggggatgaagcccagaacctgacgaggggccggcagcagctcaagtgggaccgtaagaagaagcggtttgtgggacagtcaggacaggaagacaagaagaagattaagacagagagcggccgctacatcagcagctcctacaagcgagacctctatcagaagtggaaacagaaacagaaaattgatgatcgtgactcggacgaagaaggggcatctgaccggcgaggcccagagcgaagaggtgggaagcgagaccgtggccaagcaggtgcatcccggccccacgccccaggcacccctgcaggccgagtccgcccggaactcaagaccaagcagcagatcctgaagcagcggcgccgggcccagaagctgcacttcctgcagcgtggtggcctcaagcagctctctgcccgcaaccgccgccgcgtccaggagctgcagcagggcgccttcggccggggtgcccgctccaagaagggcaagatgcggaagaggatgtgaggaccaggacccagccccgtggctccttgattggccttagggtgggcatcagcagacgttcccgtgcaccactgtgtgcctggccctgtgctgggcactgggggcactccctgcaggagccatcatctgtgaaaaggagcactgtatggccacagaagggcagcagctgcgtcagcctaagacagagacatttgaacagggccttgaagggtgtgcaggagttcgccagcaaagccaggcaggccaagacttgagttggcaactcagctgctgctgcttccatgtgttctgggttcagaggtcatggctgcaccggtcagagccctgagtgcctcagggtttggcaatggaatttttaatgtaataaatctttattgagcactganaaaaaactcgtgccgaat

SEQ ID NO: 76208 - DNA, 960 bp, Homo Sapiens
gggtccggaattcccgggatggccgacaagggcccggcggctggacctcggtcgcgagctgccatggcccagtggaggaagaagaaagggctccggaagcgccgaggcgcggcctcccaggcccgcggcagcgactcggaggacggcgagtttgagatccaggcggaagatgacgcccgggcccggaagctgggacctggaagacccctgcccaccttccccacctcggaatgcacctcggatgtggagccggacacccgggagatggtgcgtgcccagaacaagaagaagaagaagtctggaggcttccagtccatgggcctgagctacccggtgttcaaaggcatcatgaagaaggggtacaaggtgccaacacccatccagaggaagaccatcccggtgatcttggatggcaaggacgtggtggccatggcccggacgggcagtggcaagacagcctgcttcctcctcccaatgttcgagcggctcaagacccacagtgcccagaccggggcccgcgccctcatcctctcgccgacccgagagctggccctgcagaccctgaagttcactaaggagctaggcaagttcactggcctcaagactgccctgatcctgggtggagacaggatggaagaccagtttgcagccctgcacgaaaatcccgacataattattgccacgcccggacggttggtgcatgtggctgtggaaatgagcctgaagctgcagagtgtggaatacgtggtgttcgatgaagctgaccggcttttttgaatgggtttcgcagagcagctgcaggagatcatcgcccccctccccggggggcacccaaaacggggctggttctccgccacgctgcccaaatggggtgggtgggaattttgccccggggctggccctcacgggagccccgtgctcatttcccggccttggacggtgggataccaaagctcaaac

SEQ ID NO: 76209 - DNA, 590 bp, Homo Sapiens
aaaggagatggcagttcctgacagcctcctcatgaagtgctgagccagcgcctggaccagcaggactgcatccagaaaggctgggtgctacacggcgtcccgcgggacctcgaccaggcacacctgctgaaccgcctgggctacaatcccaacagggtgtttttcctgaatgtgccatttgattccatcatggagcggctgactctgagaagaattgatccagtcactggggaaaggtaccacctcatgtacaagccacctcccaccatggagatccaggctcgcctcctgcagaacccaaaggatgctgaagagcaggtcaagctgaaaatggacctgttctacaggaactcagctgacttggagcagttgtatgggtcggccatcaccctcaatggggaccaggacccatacacagtcttcgaatacatcgagagtgggatcattaatcccctgcccaagaaaatcccctgatgggttcagagccaggagcgctgccccagggaaagagttaatcccctgcccccagccccccagcctcggcacagctcccctaaaaagccaataaagcctgctggatacagtctcgt

SEQ ID NO: 76210 - DNA, 1098 bp, Homo Sapiens
  misc_feature (124)..(201): n is a, c, g, or t
  misc_feature (952)..(960): n is a, c, g, or t
gggagggcggagagctggggcgggtctcagcagctgctccaagcttttctgccatttgaagcttcttctgggagccagctgtgaccagaggaatagctccagccatccggttaaaagtttaacnnnnnnnnnnnnnnnnnnnnnnnnnnnnnnnnnnnnnnnnnnnnnnnnnnnnnnnnnnnnnnnnnnnnnnnnnnnnnntttagctaaagaagatactgaggcagctattcaatcaatattatacaaagaaaattctgtaattaagggaaatgcatttatagaacattatgatccaaaagagtatgatcccttttatatgagcaagaaggaccccaattttctgaaggcaaaatatattcaataaaggaattcaaagaagttgagaaggttcagctgcattccagattcccacaaattcctaattcaaggcactttataactccaaacgagtggctgaaactgcctacaagatacatagaaagtgaattgtgtagaaggagaaggttaaaggtgaaagtgaattttaatgactgtagttttgatgtgaaacccttggcaagagctccttatcttttggaatccccaggaagaagaaaaaacagttattttacaaaaacaaagggtcatcctttctagaaagagaaccgctgtgctatcaggagggaaataatccaagtgccaaagaggccatctctgaagggtatttttcttccttgagcctcagccaggaacgggaggaagaccaggatgggtctccctccccgcgtttgggactgctgaagctggagctataagaaagaagagggaggtttcagcaaccaaggagcacacaccctgatccttgattggtgaaaggatacacaaaatcaggctgcttcagaggaagtcatctgctcacaggaatcagggtgaaggccaaggacggcactcaagaattgtcctgtctctnnnnnnnnngcatctgcaacgaacttcctttaatttttgagttcagtgtctgtgataattaagaaatggcaataccatgtattttccccagaagttaagaaatattgctgaacgaaccaataaaaataattacagctccctcaaaaa

SEQ ID NO: 76211 - DNA, 1271 bp, Homo Sapiens
ccattccggtggaggcagaggcagtcctggggctctggggctcgggctttgtcaccgggacccgcaggagccagaaccactcggcgccgcctggtgcatgggaggggagccgggccaggaacaatatgttagccgtgcactttgacaagccgggaggaccggaaaacctctacgtgaaggaggtggccaagccgagcccgggggagggtgaagtcctcctgaaggtggcggccagcgccctgaaccgggcggacttaatgcagagacaaggccagtatgacccacctccaggagccagcaacattttgggacttgaggcatctggacatgtggcagagctggggcctggctgccagggacactggaagatcggggacacagccatggctctgctccccggtgggggccaggctcagtacgtcactgtccccgaagggctcctcatgcctatcccagagggattgaccctgacccaggctgcagccatcccagaagcctggctcaccgccttccagctggtacatcttgtgggaaatggtcaggctgggagactatgtgctaatccatgcaggactgagtggtgtgggcacagctgctatccaactcacccggatggctggagctattcctctggtcacagctggctcccagaagaagcttcaaatggcagaaaagcttggagcagctgctggattcaattacaaaaaagaggatttctctgaagcaacgctgaaattcaccaaaggtgctggagttaatcttattctagactgcataggcggatcctactgggagaagaacgtcaactgcctggctcttgatggtcgatgggttctctatggtctgatgggaggaggtgacatcaatgggcccctgttttcaaagctactttttaagcgaggaagtctgatcaccagtttgctgaggtctagggacaataagtacaagcaaatgctggtgaatgctttcacggagcaaattctgcctcacttctccacggagggcccccaacgtctgctgccggttctggacagaatctacccagtgaccgaaatccaggaggcccataagtacatggaggccaacaagaacataggcaagatcgtcctggaactgccccagtgaaggaggatggggcaggacaggacgcggccaccccaggcctttccagagcaaacctggagaagattcacaatagacaggccaagaaacccggtgcttcctccagagccgtttaaagctgatatgaggaaataaagagtgaactggaa

SEQ ID NO: 76212 - DNA, 666 bp, Homo Sapiens
gagatggggtcttgctatgtagcccaggctggccttgaactcctgggctcaagcaatcctcctgcctcagcctcctgagtagctggaactattggtgcatgccatactacttaagatgaaaatgaaaatgcatgtcatgttccaggaactgccagagatacagcacaaatggattgcaaggagcaagtgggaaaggcacattcacaaggacttaaaagtctagctacatgatgaggggccaagggtgatttctaagcagacagtgagtggcatgatcagacgtgaggtttctaaaggcttgctttgaaaggactctcctttcaaaatcaacagagccctccctactatcacaatcctcacgtttccttccttgctccccttcccacttcaggtaccagaacaataacagctgccatcatggaacatgtgatgtcccctacacagtgccagacacttccaacgtgtcatctcatttaatctttacaacatctctataatcaaggaacctacagtcagagaaattaaatttcttactctgatgcacgtagtttataagtggtaaatgaaatccaaacctaactaacttcagattctgtggtttcctacgaatatgcccacacgatcccagcctgaactgcactctcctcaccctctcactattccaca

SEQ ID NO: 76213 - DNA, 1651 bp, Homo Sapiens
gggggagcagatcctcagaatggcccttggtgctgcaggcgcggtgggctccgggcccaggcaccgagggggcactggatgactctccaggtgcaggaccctgccatctatgactccaggtcttcagcacccacccaccgtggtacagcgccccgggatgccgtctggagcccggatgccccaccagggggcgcccatgggccccccgggctccccgtacatgggcagccccgccgtgcgacccggcctggcccccgcgggcatggagcccgcccgcaagcgagcagcgcccccgcccgggcagagccaggcacagagccagggccagccggtgcccaccgcccccgcgcggagccgcagtgccaagaggaggaagatggctgacaaaatcctccctcaaaggattcgggagctggtccccgagtcccaggcttacatggacctcttggcatttgagaggaaactggatcaaaccatcatgcggaagcgggtggacatccaggaggctctgaagaggcccatgaagcaaaagcggaagctgcgactctatatctccaacacttttaaccctgcgaagcctgatgctgaggattccgacggcagcattgcctcctgggagctacgggtggaggggaagctcctggatgatcccagcaaacagaagcggaagttctcttctttcttcaagagtttggtcatcgagctggacaaagatctttatggccctgacaaccacctcgttgagtggcatcggacacccacgacccaggagacggacggcttccaggtgaaacggcctggggacctgagtgtgcgctgcacgctgctcctcatgctggactaccagcctccccagttcaaactggatccccgcctagcccggctgctggggctgcacacacagagccgctcagccattgtccaggccctgtggcagtatgtgaagaccaacaggctgcaggactcccatgacaaggaatacatcaatggggacaagtatttccagcagatttttgattgtccccggctgaagttttctgagattccccagcgcctcacagccctgctattgccccctgacccaattgtcatcaaccatgtcatcagcgtggacccttcagaccagaagaagacggcgtgctatgacattgacgtggaggtggaggagccattaaaggggcagatgagcagcttcctcctatccacggccaaccagcaggagatcagtgctctggacagtaagatccatgagacgattgagtccataaaccagctcaagatccagagggacttcatgctaagcttctccagagaccccaaaggctatgtccaagacctgctccgctcccagagccgggacctcaaggtgatgacagatgtagccggcaaccctgaagaggagcgccgggctgagttctaccaccagccctggtcccaggaggccgtcagtcgctacttctactgcaagatccagcagcgcaggcaggagctggagcagtcgctggttgtgcgcaacacctaggagcccaaaaataagcagcacgacggaactttcagccgtgtcccgggccccagcattttgccccgggctccagcatcactcctctgccaccttggggtgtggggctggattaaaagtcattcatctgcc

SEQ ID NO: 76214 - DNA, 309 bp, Homo Sapiens
gggagcagatcctcagaatggcccttggtgctgcaggcgcggtgggctccgggcccaggcaccgagggggcactggatgactctccaggtgcaggaccctgccatctatgactccaggtcttcagcacccacccaccgtggtacagagccaagaggaggaagatggctgacaaaatcctccctcaaaggattcgggagctggtccccgagtcccaggcttacatggacctcttggcatttgagaggaaactggatcaaaccatcatgcggaagcgggtggacatccaggaggctctgaagaggcccatg

SEQ ID NO: 76215 - DNA, 1137 bp, Homo Sapiens
  misc_feature (982)..(982): n is a, c, g, or t
gctgcgatcgccgggaggacccccgcctcgccgaagacgggcggggcaagccgagcctcacggggtccccggagctgggccgggcctccagatggagaaggcgcaacggggagttcttgagtaagccagagcggtgtccagcgcggtgtagccgcagccgccgctgtcaggcgcagcaacgggcaaccccgtagaagtcggtcggcaggtcctctccaacccgccgctaccgcgccgctgtgggagagaccccagcaggagcccaagggcagctacgggggcgcgaaggccgctggcgccgcctcggccagcccttcccgcgcggttccactgccttaaggatgacagtcgtagggaaccctcgaagttggagctgccagtggttgccaatcctgatactgttgctgggcacaggccatgggccaggggtggaaggcgtgacacactacaaggccggcgaccctgttattctgtatgtcaacaaagtgggaccctaccataaccctcaggaaacttaccactactatcagcttccagtctgctgccctgagaagatacgtcacaaaagccttagcctgggtgaagtgctggatggggaccgaatggctgagtctttgtatgagatccgctttcgggaaaacgtggagaagagaattctgtgccacatgcagctcagttctgcacaggtggagcagctgcgccaggccattgaagaactgtactactttgaatttgtggtagatgacttgccaatccggggctttgtgggctacatggaggagagtggtttcctgccacacagccacaagataggactctggacccatttggacttccacctagaattccatggagaccgaattatatttgccaatgtttcagtgcgggacgtcaagccccacagcttggatgggttacgacctgacgagttcctaggccttacccacacttatagcgggcgctggtctgagacttcagtggnagcgtcggagtgacaggcgcccgtggttgacaatggtgggttttctttcctcgaaacactggaaaacccattgggttgggccatcatcaaactccatgggggcttggtggttttactgggggggttttagtggcctggcattctaaatgcgggtg

SEQ ID NO: 76216 - DNA, 365 bp, Homo Sapiens
ctcagggtcacggtccttctccctacaggctcggacctcattgtacagcttggaggaagagatgggagccagaaaggaagtgtactccccggggatgctcacaccatcatctgcacagcaggagagtcaaattagttccagagggagggaaatggtatgtctgtactaactgaaggatcagaaggatcaaacctcccatgtcaaaaccaaccaacgttggcatgggcatggaagaaagagacaaatgcatgttgtcacattactaagccagcctgcttccaactactgtcatggaggattccactactaggttaatttacagagtcacacagattaaaactgaaagaacccaaaataataaaaaa

SEQ ID NO: 76217 - DNA, 1451 bp, Homo Sapiens
cattgtgaactatgaacagtgttacaaaaagcaggctggtacggtcggaattcccgggatatcgtcgacccacgcgtcgccaccactcagagaaggagttctgctcctacctccaatacctggaatacttaagccagaaccgtcctccacctaatgcctatgaactctttgccaagggctatgaagactatctgcagtccccgcttcagccactgatggacaatctggaatctcagacatatgaagtgtttgaaaaggaccccatcaaatactctcagtaccagcaggccatctataaatgtctgctagaccgagtaccagaagaggagaaggataccaatgtccaggtactgatggtgctgggagcaggacggggacccctggtgaacgcttccctgcgggcagccaagcaggccgaccggcggataaagctgtatgctgtggagaaaaacccaaatgccgtggtgacgctagagaactggcagtttgaagaatggggaagccaagtgaccgtagtctcatcagacatgagggaatgggtggctccagagaaagcagacatcattgtcagtgagcttctgggctcatttgctgacaatgaattgtcgcctgagtgcctggatggagcccagcacttcctaaaagatgatggtgtgagcatccccggggagtacacttcctttctggctcccatctcttcctccaagctgtacaatgaggtccgagcctgtagggagaaggaccgtgaccctgaggcccagtttgagatgccttatgtggtacggctgcacaacttccaccagctctctgcaccccagccctgtttcaccttcagccatcccaacagagatcctatgattgacaacaaccgctattgcaccttggaatttcctgtggaggtgaacacagtactacatggctttgccggctactttgagactgtgctttatcaggacatcactctgagtatccgtccagagactcactctcctgggatgttctcatggtttcccatcctcttccctattaagcagcccataacggtacgtgaaggccaaaccatctgtgtgcgtttctggcgatgcagcaattccaagaaggtgtggtatgagtgggctgtgacagcaccagtctgttctgctattcataaccccacaggccgctcatataccattggcctctagccctgcgtgccaagtgtccagagccttggaagcagcttcaggttctgctcctgtagtacagaagggctcaagccaccaatctatgaagacctcaggccagggggtgaggaattagtgctggatttgaagctacgcactcagcctcaagaactccctggaatatccctgagaacatggggtttgaacggattttcagcctttttctgttcttgttttgatggttttgtgtaagaggaaatacaaataaagttatagccctttactgcc

SEQ ID NO: 76218 - DNA, 852 bp, Homo Sapiens
actccttctctgatggtgtttgtgccgtgatgattgactgcacctccaacttgaggagccggaagatgagcctcttggtgcatcttagaaagaacaggaaatcccttcttattggccacgaaaatgctactggcgagaatggctgctttgatgggctccccaagcacagcgatcaatgacatgattagatgggaggtcagccccaatttcaagagccactgcaatcctcttactatagtcacacaaagtccggaagttgtgccaccacatccacgttttctcctccccactgtactcctctgtgtgtgtagttggtgcattctcaattatatcatctctcaggtcctctggtgccaccaagggtacccgcatccagaacatggaagagtgatggccagtgtggatgtgcttggtcaaaactctggccaggttggtgttatcgttcctgattaaggggcagcaggaaagctggaagacccaaatatgcaccaaaattcagctcctgtaacatggccgcctcggagttcctgcgaatcttctccacttttgagtctggacgaatccatggagaaagctttcccacaattagcgtattccagtcccttcctgacagcagtaggtctgatcgtgtctggggaccgggccgattcttagcaggttcctgaatgaactccctcttgaaacgcggatggaagacaggcatgcagaggaaatcaaaccccgcattccgctcgtggaggtccggccctcacccctgcttggccacagcccctagtgtgtcagctatttcggggacgcaattcaggtccctcccgctggacacgcggctcccaccagcacccccgaccgcca

SEQ ID NO: 76219 - DNA, 1644 bp, Homo Sapiens
  misc_feature (1421)..(1421): n is a, c, g, or t
tctaggtacaggctgggtggctaatcggcacgaggcgcgaggagaaagatggcggcgatggcggtcgggggtgctggtgggagccgcgtgtccagcgggagggacctgaattgcgtccccgaaatagctgacacactaggggctgtggccaagcaggggtttgatttcctctgcatgcctgtcttccatccgcgtttcaagagggagttcattcaggaacctgctaagaatcggcccggtccccagacacgatcagacctactgctgtcaggaagggactggaatacgctaattgtgggaaagctttctccatggattcgtccagactcaaaagtggagaagattcgcaggaactccgaggcggccatgttacaggagctgaattttggtgcatatttgggtcttccagctttcctgctgccccttaatcaggaagataacaccaacctggccagagttttgaccaaccacatccacactggccatcactcttccatgttctggatgcgggtacccttggtggcaccagaggacctgagagatgatataattgagaatgcaccaactacacacacagaggagtacagtggggaggagaaaacgtggatgtggtggcacaacttccggactttgtgtgactatagtaagaggattgcagtggctcttgaaattggggctgacctcccatctaatcatgtcattgatcgctggcttggggagcccatcaaagcagccattctccccactagcattttcctgaccaataagaagggatttcctgttctttctaagatgcaccagaggctcatcttccggctcctcaagttggaggtgcagttcatcatcacaggcaccaaccaccactcagagaaggagttctgctcctacctccaatacctggaatacttaagccagaaccgtcctccacctaatgcctatgaactctttgccaagggctatgaagactatctgcagtccccgcttcagccactgatggacaatctggaatctcagacatatgaagtgtttgaaaaggaccccatcaaatactctcagtaccagcaggccatctataaatgtctgctagaccgagtaccagaagaggagaaggataccaatgtccaggtactgatggtgctgggagcaggacggggacccctggtgaacgcttccctgcgggcagccaagcaggccgaccggcggataaagctgtatgctgtggagaaaaacccaaatgccgtggtgacgctagagaactggcagtttgaagaatggggaagccaagtgaccgtagtctcatcagacatgagggaatgggtggctccagagaaagcagacatcattgtcagtgagcttctgggctcatttgctgacaatgaattgtcgcctgagtgcctggatggagcccagcacttccctanaagatgatggtgtgagcatcccccggggagtacacttccctttctggctcccatctcttcctccaagctgtacaatgagggccgagcctggaagggagaaaggaccgtgaaccctgagggcccaggtttgagagcccttatgtgggtacgggctgcacaaacttcccaccagctctctgcacccccggcccctggtttcactttcagccatccccacaaaaga

SEQ ID NO: 76220 - DNA, 1290 bp, Homo Sapiens
ggcatgtgaatatgaacagtgttacaaaaagcaggctggtacggtcggaattcccgggatatcgtcgacccacgcgtcgatccatacagatgtcttccgcttccccccataccgtggtctgctctgtgctgtgcttggcgtgggtgcccagttcctggcccttggcactggcattattgtcatggcactgctgggcatgttcaatgtgcaccgtcatggggccattaactcagcagccatcttgttgtatgccctgacctgctgcatctctggctacgtgtccagccacttctaccggcagattggaggcgagcgttgggtgtggaacatcattctcaccaccagtctcttctctgtgcctttcttcctgacgtggagtgtggtgaactcagtgcattgggccaatggttcgacacaggctctgccagccacaaccatcctgctgcttctgacggtttggctgctggtgggctttcccctcactgtcattggaggcatctttgggaagaacaacgccagcccctttgatgcaccctgtcgcaccaagaacatcgcccgggagattccaccccagccctggtacaagtctactgtcatccacatgactgttggaggcttcctgcctttcagtgccatctctgtggagctgtactacatctttgccacagtatggggtcgggagcagtacactttgtacggcatcctcttctttgtcttcgccatcctgctgagtgtgggggcttgcatctccattgcactcacctacttccagttgtctggggaggattaccgctggtggtggcgatctgtgctgagtgttggctccaccggcctcttcatcttcctctactcagttttctattatgcccggcgctccaacatgtctggggcagtacagacagtagagttcttcggctactccttactcactggttatgtcttcttcctcatgctgggcaccatctcctttttttcttccctaaagttcatccggtatatctatgttaacctcaagatggactgagttctgtatggcagaactattgctgttctctccctttcttcatgccctgttgaactctcctaccagcttctcttctgattgactgaattgtgtgatggcattgttgccttcccttttgccctttgggcattccttccccagagagggcctggaaattataaatctctatcacataaggattatatatttgaactttttaagttgcctttagttttggtcctgatttttctttttacaattaccaaaataaaatttattaagaaaaa

SEQ ID NO: 76221 - DNA, 1103 bp, Homo Sapiens
tggaccggtccggaattcccgggatgaaagatggcggcgatggcggtcgggggtgctggtgggagccgcgtgtccagcgggagggacctgaattgcgtccccgaaatagctgacacactaggggctgtggccaagcaggggtgagggccggacctccacgagcggaatgcggggtccgaactcggggacggagaagggcagactagtcatcccggagaagcaggggtttgatttcctctgcatgcctgtcttccatccgcgtttcaagagggagttcattcaggaacctgctaagaatcggcccggtccccagacacgatcagacctactgctgtcaggaagggactggaatacgctaattgtgggaaagctttctccatggattcgtccagactcaaaagtggagaagattcgcaggaactccgaggcggccatgttacaggagctgaattttggtgcatatttgggtcttccagctttcctgctgccccttaatcaggaagataacaccaacctgggccagagttttgaccaaccacatccacactggccatcacgtcttccatgtttctggatgcgggtacccttggtggcaccagaggacctgagagatgatataattgagaatgcaccaactacacacacagaggagtacagtggggaagagaaaacgtggatgtggtggcacaacttcccgactttgtgtgactataataaaagggatggcagtggctctttgaaattggggttgacctcccatctaatcatggcattgattccctggctttggggaaccccttccaaagcagccattcttcccacctaacctttttcctgaaccaataaagaaacggaatttcctggttcctttcctaaaatgcccccaaggggttcttcttccgggttcccctaaggtgggaggggggcatgtctttttttcaagggggccccaccccacccctttaaggaaggaagttctggccccctcccctctcataaccccgggaagtatctttagccctgaaacccgccttcccgccctaacggccgctgaagcccctcttttggccacgggggttctctaaagaacactcttctcccca

SEQ ID NO: 76222 - DNA, 812 bp, Homo Sapiens
cgatggcggtcgggggtgctggtgggagccgcgtgtcagcgggagggacctgaatgcgtccccgaaatagctgacacactaggggctgtggccaagcaggggtttgatttcctctgcatgcctgtcttccatccgcgtttcaagagggagttcattcaggaacctgctaagaatcggcccggtccccagacacgatcagacctactgctgtcaggaagggactggaatacgctaattgtgggaaagctttctccatggattcgtccagactcaaaagtggagaagattcgcaggaactccgaggcgttggaggtgcagttcatcatcacaggcaccaaccaccactcagagaaggagttctgctcctacctccaatacctggaatacttaagccagaaccgtcctccacctaatgcctatgaactctttgccaagggctatgaagactatctgcagtccccgcttcagccactgatggacaatctggaatctcagacatatgaagtgtttgaaaaggaccccatcaaatactctcagtaccagcaggccatctataaatgtctgctagaccgagtaccagaagaggagaaggataccaatgtccaggtactgatggtgctgggagcaggacggggacccctggtgaacgcttccctgcgggcagccaagcaggccgaccggcggataaagctgtatgctgtggagaaaaacccaaatgccgtggtgacgctagagaactggcagtttgaagaatggggaagccaagtgaccgtagtctcatcagacatgagggaatgggtggtccagagaaa

SEQ ID NO: 76223 - DNA, 1551 bp, Homo Sapiens
  misc_feature (42)..(42): n is a, c, g, or t
  misc_feature (69)..(69): n is a, c, g, or t
  misc_feature (112)..(112): n is a, c, g, or t
  misc_feature (179)..(179): n is a, c, g, or t
gcggggggaggcccaccattcaggccacagattcggcacccnccagcggttaatcttccccaggaccanctggaagtagggtgagtgcaatggagatgcaagccccccacanttcagcaggatggcgaagacaaagaagaggatgccgtacaaagtgtactgctccccgacccccattnctgtggcaaagatgtagtacagctccacagagatggcactgaaaggcaggaagcctccaacagtcatgtggatgacagtagacttgtaccagggctggggtggaatctcccgggcgatgttcttggtgcgacagggtgcatcaaaggggctggcgttgttcttcccaaagatgcctccaatgacagtgaggggaaagcccaccagcagccaaaccgtcagaagcagcaggatggttgtggctggcagagcctgtgtcgaaccattggcccaatgcactgagttcaccacactccacgtcaggaagaaaggcacagagaagagactggtggtgagaatgatgttccacacccaacgctcgcctccaatctgccggtagaagtggctggacacgtagccagagatgcagcaggtcagggcatacaacaagatggctgctgagttaatggccccatgacggtgcacattgaacatgcccagcagtgccatgacaataatgccagtgccaagggccaggaactgggcacccacgccaagcacagcacagagcagaccacggtatggggggaagcggaagacatctgtatggataattttccagccattgtcaccctggtcaaagtcatcaccagaacctgcagaggtggtctcctcatctaagttgtaccgagccaggtcattccgaagcacacgcattagaatgacagccacaaaacccaccagtaaaaacacaagcaccatggagttgatgatggacaaccaatggatttccagtgttcgaggaaagaaaccaccatcgtcaccacggcgcctgtcactccgacgctccactgaagtctcagaccagcgcacgctataagtgtgggtaaggcctaggaactcgtcaggtcgtaacccatccaagctgtggggcttgacgtcccgcactgaaacattggcaaatataattcggtctccatggaattctaggtggaagtccaaatgggtccagagtcctatcttgtggctgtgtggcaggaaaccactctcctccatgtagcccacaaagccccggattggcaagtcatctaccacaaattcaaagtagtacagttcttcaatggcctggcgcagctgctccacctgtgcagaactgagctgcatgtggcacagaattctcttctccacgttttcccgaaagcggatctcatacaaagactcagccattcggtccccatccagcacttcacccaggctaaggcttttgtgacgtatcttctcaaggcaacagactggaagctgatagtacgggttagttctctgaaggttattgttgggtgccactttgttgacatacacaattacagggtcgccggccttgtagtgtgtagcgct

SEQ ID NO: 76224 - DNA, 688 bp, Homo Sapiens
  misc_feature (17)..(17): n is a, c, g, or t
tgcaccttgcaatttcntgtgcaggtgcactcagtactacatggctatgctggctacttcgagctcgtgctctatcagcacatcactctgagtatccgtccagagactcactctcctgggatgttctcatggtttcccatcctcttccctattaagcagcccataacggtacgtgaaggccaaaccatctgtgtgcgtttctggcgatgcagcaattccaagaaggtgtggtatgagtgggctgtgacagcaccagtctgttctgctattcataaccccacaggccgctcatataccattggcctctagccctgcgtgccaagtgtccagagccttggaagcagcttcaggttctgctcctgtagtacagaaggtgcagtacatctatgggctgtgattccccttgcccatcagagaggagcatttcaatctgctttcctgccttacatcaaggtgggcaagggattataattaattgcagggctcaagccaccaatctatgaagacctcaggccagggggtgaggaattagtgctggatttgaagctacgcactcagcctcaagaactccctggaatatccctgagaacatggggtttgaacggattttcagcctttttctgttcttgttttgatggttttgtgtaagaggaaatacaaataaagttatagccctttactgcacgac

SEQ ID NO: 76225 - DNA, 595 bp, Homo Sapiens
  misc_feature (429)..(438): n is a, c, g, or t
ctttacttctaaaaaagttacagtttactaataaagttaagtctggttctgtcctagaggaaataaattcactattaattcatgtcttaagttacttgggttaaaacactttcagccacccagattaattaaagtggagcagtggagcccctggctgggagatggcctccagaggagcagctgcagggcacgttctgggcttagcgacagaggcaagcaagggactggtgtctctggtgagaggtgggtttgatgtatctctgtcctatgctggtctctcttctcctttataaaatcctctgtggtcaactgactactgcgtatcgcagtggaataagactgcacagttgctggtaggtgagtttaaagtcttaatctatgcattcagagaaatatttttatatgctttgtgtaatttataacaaggannnnnnnnnnagctttgttaactgtgaattcacccctcctcctccactgcatatttaaagcatgtgttcacactgtgtgtaaacattcactgaagattttttctttgtgcattgctgactgttcaaacataacaagtattattaaaattaaatattaactgaccaaa

SEQ ID NO: 76226 - DNA, 1014 bp, Homo Sapiens
  misc_feature (817)..(825): n is a, c, g, or t
ataaaaaataaagtgaacagtgaggtgtagcaagactctttttagaaaagaaagcatttacctgcctgtctgtaaggtggaaatttcatcagtttgcaaacgataagaaatgcagacttgctcttgatagaaatgcttagaaacactctggggggggaaaaagctccttccatatactgtgagacatttgttaagtgacatctattgtttatcagcttttaaggataaaaaaggtattttaaaagttggatatttaggatatttgaggatattcctttatgagctctccatatccttcttgagaaactggttaaaaaaggaataggggttgagtgttacagagagtagtctgaagattcctgtgtaaaagcaaagctaacaagcaatgaagacatgaagcaaaatactaatctaattgtgtaaagaaaggatattttaataagttctttctgcttgctgctaagagtttgctaaactgtcatgaattattctggttattactaaagtttctatgaaacacttaagtagattttaagaataaatgtttctggaaaagaactatgttatgattttgtagaaatgtaaagattacttgaggtgtttaaaataaatttttcattcagactacctttgactttttgaggtgtttttatatttaacattttgccaattcagtagttggaacaaaaatcctctgctccgacaacaagaattcagcctcatgcaaaataccttgcatcaacttaagaaacacttaagttgcctatgtaggagcatttatgccattggattggtagactggtgaaaacatgggttnnnnnnnnntcatcactagaagaggaaggatgaaaatgatttttaagagcctctgctgacataagtgttttccaatactttaactcattttaccagttcaaagcacattctctgatagcacaaaggtgataaagctaaaattttaaatagaatatcccatggattttaacattaagacatttatgatgttagttgaga

SEQ ID NO: 76227 - DNA, 928 bp, Homo Sapiens
  misc_feature (58)..(59): n is a, c, g, or t
  misc_feature (93)..(93): n is a, c, g, or t
  misc_feature (220)..(220): n is a, c, g, or t
  misc_feature (234)..(234): n is a, c, g, or t
atgtcactgttgagctgagcagccgggtgtcacatgggcctgcagttccttgagtganntgagcaggaatcaggtgcctgagcagcaccgctngagctgggccgtgacccttgcccggtcaggttccaccagccgacacgacatgagcaaagtcaccgagcaccttgcccgtgttgacgagcgtgtgctccaatcccgcagcggagtgccagggccaccntgcagtgcagcttntcaacttcagcgcttctcgggcaatgagcccctgggtgagctccgtctgccactgggcaccgtggatctgcagccatgttctggagcactggtacctgctgggcccgccggctgccactcagcccgagcaggtcggggagctgtgcttctctctccggtacgtgcccagctcaggccggctgaccgtggtggtgctggaggctcgaggcctgcgtccaggacttgcagagccctacgtgaaggtccagctcatgctgaaccagaggaagtggaagaagagaaagacagccaccaaaaagggcacggcggccccctacttcaatgaggccttcaccttcctggtgcccttcagccaggtccagaatgtggacctggtgctggctgtctgggaccgcagcctgccgctccgaactgagcccgtaggcaaggtgcacctgggtgcccgggcctcggggcagcccctgcagcactgggcagacatgctggcccacgcccggcggcccattgcccagcggcaccccctgcggccagccagggaggtggaccgcatgctggccctgcagccccgccttcgcctgcgcctgcccttgccccactcctgaatgcaccacatgcctctgtctccccgctgagcccaggcacttgcccaggccgccctgcaggaccactgcaataaacgccttctcctgccaaa

SEQ ID NO: 76228 - DNA, 716 bp, Homo Sapiens
  misc_feature (12)..(12): n is a, c, g, or t
gcagaagtatantcagagtagagctgacttccagtacccgggcagccagctctgtctccagggaggcctggcctggaggaggagtccactaacaggaaacacttctcaccccctcacacaggcccaggggagcccctggagggaaattccttggcaggggaacaggaaatgtggccgcctctgccccactgccagcctgagtgggcaaggaagcaggtggatcccccagaaggaaccgcagctcgcgaggcacctctcctcgtccccacccacccccacatttgcacaccttccacagggtcaggatggagtagctgccttgcgaggtggtgagactcctgtctctggaggtctgcaagcactggtagtgatattgcagcagacaaggtctgggttgggcgtctgcaggaggagaccttgtgggacatctgaggacatccgcagattcttgtcagcctgtgaactaggccctgcctctgtcacctcattggtccatgaaggagcagccaggggtggtggaaggagcactgggctaggggtcaggggtcagagattctgtcctgctcctgggatgcactggctactcccttagtctactcccttcccctctctggtcctcagcttcctccatcatggaggagatgggatcatggattttctgggcataagtggctgttctgggagtcattccaaagagagaataaaactcctgatcc

SEQ ID NO: 76229 - DNA, 1595 bp, Homo Sapiens
cggtactattctgcccccagtatcctattttccggctatgtttgtggattgaggatacattcaaacggaaacgctttactgattcgaattattcgggtcctatgggaattggccatgagaccagattcgcacggagggaaattgaagtggaggtttaacccttcggacacccgtttattctgagcccaaatctgtccagaattcagagaagctttttgttcagcagcagaggaccctgggtgatacactcaagccaccatatatgccataaaaattgatgattaaaaagtgatgaaggattcggctccggaactgaatgtgagtagttctggaacagaggaggacaaggatgaagctaaaccagatggagaaaaagatccagattttaatcaagcaaatgtggaacaaagcggcaaaagatatcccatcaaaattatatagcctatcaaaagcaagttattcgccgaagtatgcgacatagaaaagttcgtggtgagaaagcacttctcgtttctgctaatcagacgttaaaagaattgaaaattcagatcatgcatgcattttcagttgctccttttgaccagaatttgtcaattgatggaaagattttaagtgatgactgtgccaccctaggcacccttggcgtcattcctgaatctgtcattttattgaaggctgatgaaccaattgcagattatgctgcaatggatgatgtcatgcaagtttgtatgccagaagaagggtttaaaggtactggtcttcttggacattaatctttgaatacttgctgactgctaagaaatgaccagaggggaagaggagtttgacatgttagggcattaaagcaaaggtggatttaagaattaaaccattacatgccccttccaaaaggcagaaatccattcaaacgtgactgtcccaaatgccttatgtcaaataaagcagattgcactgatggacatcagacttgaaggaaatgtttccaattttatatttaaggggggtggtgggtgggagagggcaagtaaagacggaacaagtttagtagcagtaatagtaaatcatgtttacatatgagatttatagtcgtgggaggggaataaagttctgttatatttccttgctcgagtttcataccagatgcgttggtccataaaggattgtatcaagtagatgggacaacattctgctctgaacgaaaagtaattttagagacataacctgcttaccaatgcctgtctttgattcatattctactttcaataaagcatgaaagtgaagaacttgtcctaagtgtggaaaagtgtcttcagatttagactcttctccatgtcagctgcagcgccacccgccttacacctgcccggccgtctgtctcttggtattgggtaaaggagggggcacctgcatgtctcctgcaatgagcaaggaattatgtctcatgttttgacttcagaggctttttgctttggtgcatttcagaaaggatggagaatatttattatgtgtgaaagcatcctcttccggttttgctgttattcaaaagtgggaaatgtacctggcacgtttgaaaataaaaaatctgactacctatc

SEQ ID NO: 76230 - DNA, 2026 bp, Homo Sapiens
  misc_feature (1182)..(1182): n is a, c, g, or t
ggcaaagaaatcacactgtttcattccacctcaacaaactgaaatacaacagtactgtgaaggaatctcggaatgatatttcacttattctcaatgagtatgctgaattcaacaaggtgatgaagaatagcaaccaattcattttccaagacaaagagctaaatgatgtttctggagaagccactgctcaagagatgtatctgcctttcccaggacggtcagcctcctatgaagacataatcatagacgtgtgcaccaatttgcacgtcaaactaagaagtgttgtgaaagaggcttgtaaaagtaccttcctgttctaccttgtcgaaacagaagacaaatcattctttgtaagaacaaagaaccttctgaggaaaggaggccatacagaaattgaacctcagcacttctgtcaagctttccacagagagaatgatacactaatcatcatcatcagaaatgaagatatatcatcacatttgcatcagattccttctttgctgaagctgaagcatttccccagtgtcatctttgctggagtagacagccctggagatgttcttgatcacacctaccaagaactgtttcgtgcaggaggctttgtgatatcagatgacaagatactagaagctgtaacattagttcaactgaaggaaattatcaaaatcctggaaaaactaaatggaaatggaagatggaagtggttgcttcactacagggaaaataaaaagctaaaagaagatgaaagagtggattcaactgcacataagaagaacataatgttgaagtcatttcagagtgcaaatatcattgaattgcttcattatcaccagtgtgactctcgatcatcaacaaaagcagaaattctgaaatgtttgctaaacctgcaaattcagcatattgatgccaggtttgctgtcctcctaacagacaagcctactatccccagagaagtctttgaaaataatggaatccttgttacagatgtaaataactttatagaaaacatagaaaaaatagcagctccatttaggagtagctattggtgactcaactacagcctgcctggatatggatgatgccaataaaaaattagtattttccctttggaaaacttgtgaacatgtgaatacacatgtgaacagtcttacatttgaaaaaccaatgttctacaacttgganagttttcattttttatattttgctgaaatatgtcacagtggcattgcagttgtctgttagctttgggttgcagtgctagatattgttttaaattattttcattttaaacaagatgccttctaagctattgagcttattaaaaataattttacatgtttacttagttggagcaaaaataagtctattttaacaaatagcttggtttttgcatgctaatgtcagaaaggcatacgatgcacattatgctctgttttaaaggttttaccacccttgtaaaaactataatcttaaatggttttatttgctgttacacaaacaacactacataaaacattttttcctaaatggtacaaatttataaactatcatttttcacttacggtatttgtaaatactacactacaaaaatcagctttctgagaaagaaataatcatttatttatgatattgaaaatttctacagtaaacactcaaaaccaagcaaaaaacatttgtaagatacacggtatctatttggagcaacggtttttgtaactaatgtgtttcattttttaaataaagacaactaaaaataaaaacacaagactcaacccccacaacaaaagggggggccgcaaaaaaatttccccggggggccaagcttgcccacccccgctttttggtcaaagggggccaatggaggcgtatataagcaaggcgggcgcgcgtaaccacccgcgcgggacacggccgcgggccttgagagacccaccccggcggggcatcggccacccaacagtaaggctaggcaatcactcggactcggtacaaccgcaccgcgtgatgccgatgttaacgcggagca

SEQ ID NO: 76231 - DNA, 1958 bp, Homo Sapiens
  misc_feature (1380)..(1457): n is a, c, g, or t
aacggctaggtacgaggcctgggtggtgtgaatcggcacgaggagtgagtgtttacaccggcggcagtgcggccgggttccttccgcgggacggggagaaagagagagcgcgaaagagagaggatgtctctctcagactggcacctggcggtgaagctggctgaccagccacttactccaaagtctattcttcggttgccagagacagaactgggagaatactcgctagggggctatagtatttcatttctgaagcagcttattgctggcaaactccaggagtctgttccagaccctgagctgattgatctgatctactgtggtcggaagctaaaagatgaccagacacttgacttctatggcattcaacctgggtccactgtccatgttctgcgaaagtcctggcctgaacctgatcagaaaccggaacctgtggacaaagtggctgccatgagagagttccgggtgttgcacactgccctgcacagcagctcctcttacagggaggcggtctttaagatgctcagcaataaggagtctctggatcagatcattgtggccaccccaggcctcagcagtgaccctattgctcttggggttctccaggacaaggacctcttctctgtcttcgctgatcccaatatgcttgatacgttggtgcctgctcacccagccctcgtcaatgccattgtcctggttctgcactccgtagcaggcagtgccccaatgcctgggactgactcctcttcccggagcatgccctccagctcataccgggatatgccaggtggcttcctgtttgaagggctctcagatgatgaggatgactttcacccaaacaccaggtccacaccctctagcagtactcccagctcccgcccagcctccctggggtacagtggagctgctgggccccggcccatcacccagagtgagctggccaccgccttggccctggccagcactccggagagcagctctcacacaccgactcctggcacccagggtcattcctcagggacctcaccaatgtcctctggtgtccagtcagggacgcccatcaccaatgatctcttcagccaagccctacagcatgcccttcaggcctctgggcagcccagccttcagagccagtggcagccccagctgcagcagctacgtgacatgggcatccaggacgatgagctgagcctgcgggccctgcaggccaccggtggggacatccaagcagccctggagctcatctttgctggaggagccccatgaactccctgcttcccctgaacccccagcaagttgcagaggctactgcccttgggaggcactcatgaaggtgcctccatctctcccttccccaatatacctgatggtcaactctcnnnnnnnnnnnnnnnnnnnnnnnnnnnnnnnnnnnnnnnnnnnnnnnnnnnnnnnnnnnnnnnnnnnnnnnnnnnnnncagcaataagaattccccccggaggggcgcgccacatttatacggcgcctccccacagttttttgtggaccaaagggggccccaaattaggggacagcggcttttattaaaaccttagtcgacaggcggcggcggcgtcttttaaaaagctgtgtagagcggggagaaaaaccgctggtacctgctggggccgcaccttctgcggggagacgacgacccctattattctctcgcggggggggcagcgagacaccaaattgtgggcggacacacacactctcacccccccaagaagaattttaaagacgccgccccacgggaggcggacataatataaaacagagttttacaacgacggccgactaatcagcggggtggtacaaccacaacccggccggctagatattagtattcgctcctggtgaggaacaaacactttcgcgcgcccactacgagcgagatatcgttatcttaggacagcacgcaatttttcccccgggg

SEQ ID NO: 76232 - DNA, 678 bp, Homo Sapiens
  misc_feature (546)..(569): n is a, c, g, or t
tttccccccggaatacaggacaggacccagggcgcttgtacgcggagccaggctgctctccaggcattgtgtaagcctcttgtgttgtgctctctttcaggtaggataattgcggactgaaccctcgggctgcggtcatatatgagaacttgctccgcgcggtcccctttgccgggatgtttccattgcttcatgtttcagtaaacaaaaggagtttgtgaccaactatgttttctttcttaattcttctaagttgacttttctttcctcctgaaactagtctctgtagcctttcactctgttccttatattctcagcctctgagcagccctaggtaaggattatgctggcatcccctttttcctgtgcagtggaacccctcttatcttgctttccctaggagttgaatccttctccctgcctacctgcagcatctcctttccctttaaaatgaccatgtagtggcaagcagccttttactcttctgttagctctggactcttaacacttaagttactcttctgaaattgctaggaccattggggnnnnnnnnnnnnnnnnnnnnnnnnatgtccgacctgtgatcgtggtacagcattagctgaaatttacccttgttttactccactcctcccttttttaaaaaaattttttgacaaataaatgtttctaacactt

SEQ ID NO: 76233 - DNA, 1118 bp, Homo Sapiens
  misc_feature (243)..(243): n is a, c, g, or t
  misc_feature (245)..(245): n is a, c, g, or t
  misc_feature (917)..(940): n is a, c, g, or t
  misc_feature (1050)..(1069): n is a, c, g, or t
gaatccatgtattacaacgatgcatatgagcactcgactactataagcgataccgggtccgctcttatgaggcagtagcagcggcgcaagcggcttctgcatacaactacgcagagcagaccatgtcccatctgcctcaagtccaaagcacaactgtgaccagccacctcaactctacttctgttgatccctatgacagacacctattgccaaactctggcgctgctgccacttcagctgcantnatgtgctgctgaagcaaccacttcctcctactatggaagggacaggagcccactgcgtcgtgctgcagccatgctccccacagttggagagggctacggttatgggccagagagtgaattatctcaggcttccgcagctacacggaattctctgtatgacatggcccggtatgaacgggagcagtatgtggaccgagcccggtactcagccttttaaaaactggaggtaggataattgcggactgaaccctcgggctgcggtcatatatgagaacttcctccgcgcggtcccctttgccgggatgtttccattgcttcatgtttcagtaaacaaaaggagtttgtgaccaactatgttttctttcttaattcttctaagttgacttttctttcctcctgaaactagtctctgtagcctttcactctgttccttatattctcagcctctgagcagccctaggtaaggattatgctggcatcccctttttcctgtgcagtggaacccctcttatcttgctttccctaggagttgaatccttctccctgcctacctgcagcatctcctttccctttaaaatgaccatgtagtggcaagcagccttttactcttctgttagctctggactcttaacacttaagttactcttctgaaattgctaggaccattggggnnnnnnnnnnnnnnnnnnnnnnnnatgtccgacctgtgatcgtggtacagcattagctgaaatttacccttgttttactccactcctcccttttttaaaaaaattttttgacaaataaatgtttctaacacttnnnnnnnnnnnnnnnnnnnnccctcgtgccgaatatcgccacccaggcctcgctaccttagacccgtaa

SEQ ID NO: 76234 - DNA, 817 bp, Homo Sapiens
  misc_feature (14)..(14): n is a, c, g, or t
  misc_feature (26)..(26): n is a, c, g, or t
  misc_feature (32)..(32): n is a, c, g, or t
  misc_feature (60)..(60): n is a, c, g, or t
  misc_feature (106)..(106): n is a, c, g, or t
aggcacaatgttcntggagcgctacncgagtncgggaactgctggtgcggcccagcgggnacgcgccgacggcgtgtcggtcacacgcggcaagatgcacacgggnacgcacgtggtccgggcatacaaaggtgaagcggaggggccccaagtacgtgatcgatgtggaacagccgttctcttgcacctccctggacgccgtggtcaactatttcgtgtcgcataccaaaaaggcgctggtgccattcctgttagacgaggactacgagaaggtgctaggctacgtggaagccgataaggagaatggcgagaatgtgtgggtggcgccctccgctccgggcccaggtcctgcaccctgcacaggtggccccaagccgctgtcacctgcgtctagccaggacaagctgcccccactgcccccactaccgaaccaggaagagaactacgtgacccccattggagatggcccagctgttgactatgagaaccaagatgtggcttcctctagttggccagtcatcctgaagccaaagaagttgccaaagcctcctgccaagcttccaaagccacccgttggacccaagccagagcccaaagtctttaatggtggcttgggcaggaagctgccagtcagttcagcccagcctctcttccccacagccgggctggcagacatgacggcagagctacagaagaagctggagaagaggcgggcactggagcactgattcggacacaccagggaccagcgggctagtcccagggcatggcccagcggccagattctttttcccaggattaaaactctgaccccagc

SEQ ID NO: 76235 - DNA, 508 bp, Homo Sapiens
  misc_feature (96)..(106): n is a, c, g, or t
gcaaatgtatgtcactgagtaggacgtggacctttcctgagatttattttatccgtgatgtattttttttaattcttttgatacagagaagggtcnnnnnnnnnnnaagtatttcagtgaaaacttggtgtaagtctgaacccatcttttgaaatgtattttcttcattgcaggtccacctaatcatcctgtgaaagtggtttctctatggaaagctttgtttgcttcctacaaatacatgcttattccttaagggatgtgttagagttactgtggatttctctgttttctgtcttacaagaaacttgtctatgtaccttaatactttgtttaggatgaggagtctttgtgtccctgtacagtagtctgacgtatttccccttctgtcccctagtaagcccagttgctgtatctgaacagtttgagctctttttgtaatatactctaaacctgttatttctgtgctaataaacgagatgcagaacccttgaaaaaaaccaaacaaagg

SEQ ID NO: 76236 - DNA, 1425 bp, Homo Sapiens
cagtcgacggtaccggacatatgcccgggaattcggccattacggccgggggcgagtgttctgagggaagcaaggaggcggcggcggccgcagcgagtggcgagtagtggaaacgttgcttctgaggggagcccaagatgaccggttctaacgagttcaagctgaaccagccacccgaggatggcatctcctccgtgaagttcagccccaacacctcccagttcctgcttgtctcctcctgggacacgtccgtgcgtctctacgatgtgccggccaactccatgcggctcaagtaccagcacaccggcgccgtcctggactgcgccttctacgatccaacgcatgcctggagtggaggactagatcatcaattgaaaatgcatgatttgaacactgatcaagaaaatcttgttgggacccatgatgcccctatcagatgtgttgaatactgtccagaagtgaatgtgatggtcactggaagttgggatcagacagttaaactgtgggatcccagaactccttgtaatgctgggaccttctctcagcctgaaaaggtatataccctctcagtgtctggagaccggctgattgtgggaacagcaggccgcagagtgttggtgtgggacttacggaacatgggttacgtgcagcagcgcagggagtccagcctgaaataccagactcgctgcatacgagcgtttccaaacaagcagggttatgtattaagctctattgaaggccgagtggcagttgagtatttggacccaagccctgaggtacagaagaagaagtatgccttcaaatgtcacagactaaaagaaaataatattgagcagatttacccagtcaatgccatttcttttcacaatatccacaatacatttgccacaggtggttctgatggctttgtaaatatttgggatccatttaacaaaaagcgactgtgccaattccatcggtaccccacgagcatcgcatcacttgccttcagtaatgatgggactacgcttgcaatagcgtcatcatatatgtatgaaatggatgacacagaacatcctgaagatggtatcttcattcgccaagtgacagatgcagaaacaaaacccaagtccacctaatcatcctgtgaaagtggtttctctatggaaagctttgtttgcttcctacaaatacatgcttattccttaagggatgtgttagagttactgtggatttctctgttttctgtcttacaagaaacttgtctatgtaccttaatactttgtttaggatgaggagtctttgtgtccctgtacagtagtctgacgtatttccccttctgtcccctagtaagcccagttgctgtatctgaacagtttgagctctttttgtaatatactctaaacctgttatttctgtgctaataaacgagatgcagaacccttg

SEQ ID NO: 76237 - DNA, 1903 bp, Homo Sapiens
  misc_feature (1151)..(1152): n is a, c, g, or t
ggtccggtccggattcccgggatatcgtcgaccacgcgtccggccccggactcgtggagttgtgaacgccgcggactccggagccgcacaaaccagggctcgccatgaagccaggattcagtccccgtgggggtggctttggcggccgagggggctttggtgaccgtggtggtcgtggaggccgagggggctttggcgggggccgaggtcgaggcggaggctttagaggtcgtggacgaggaggaggtggaggcggcggcggcggtggaggaggaggaagaggtggtggaggcttccattctggtggcaaccggggtcgtggtcggggaggaaaaagaggaaaccagtcggggaagaatgtgatggtggagccgcatcggcatgagggtgtcttcatttgtcgaggaaaggaagatgcactggtcaccaagaacctggtccctggggaatcagtttatggagagaagagagtctcgatttcggaaggagatgacaaaattgagtaccgagcctggaaccccttccgctccaagctagcagcagcaatcctgggtggtgtggaccagatccacatcaaaccgggggctaaggttctctacctcggggctgcctcgggcaccacggtctcccatgtctctgacatcgttggtccggatggtctagtctatgcagtcgagttctcccaccgctctggccgtgacctcattaacttggccaagaagaggaccaacatcattcctgtgatcgaggatgctcgacacccacacaaataccgcatgctcatcgcaatggtggatgtgatctttgctgatgtggcccagccagaccagacccggattgtggccctgaatgcccacaccttcctgcgtaatggaggacactttgtgatttccattaaggccaactgcattgactccacagcctcagccgaggccgtgtttgcctccgaagtgaaaaagatgcaacaggagaacatgaagccgcaggagcagttgacccttgagccatatgaaagagaccatgccgtggtcgtgggagtgtacaggccaccccccaaggtgaagaactgaagttcagcgctgtcaggattgcgagagatgtgtgttgatactgttgcacgtgtgtttttctattaaaagactcatccgccnnccactacccgctccgatctacaacatcccttgtcggccgcctcggccctccagaagcttcctagaccattccgtttggctcgcgggcccagtaggtaagtgaacatggtcatacctgtttcccaggagaccctgggccatgactaccgcttggatcctcccccataaaacacgccccggcggcaacccaagcgtttctgaacacatccaaatggaagtttctgacgggcctttacgtggatcctatacaccgcgaacctccaaacccaggctccccaaattccaactttaacccgccccgccccttgccaccttcattccgcaattaaccggggggcgaactttccgtttaaacgcctatttccctgcccgcaaccttgtgggaacactctctttacacaaaacggggaactagaactgaaacccctacaatctcgctccagcgcgccataccgagtacccctttggctccccactttgcggtgtataaattattttgcgcccctggtggggcaaaaacagcggggggcggacacaaaagccggctgcccgcactttgggcgccccgctttataagatctcaaaccccggggtgaaaaactctcacccagggggtattggggctgttaacaaccaaagagccatactctgttgaaaatgaaccctcttttaaggaggaaaatggcacccaggttttgttcccccatataacgccgcccaccatccttccgatgaaaaaacgtgttagtaaa

SEQ ID NO: 76238 - DNA, 778 bp, Homo Sapiens
  misc_feature (27)..(27): n is a, c, g, or t
  misc_feature (38)..(38): n is a, c, g, or t
  misc_feature (193)..(252): n is a, c, g, or t
  misc_feature (710)..(710): n is a, c, g, or t
  misc_feature (730)..(730): n is a, c, g, or t
ccccggactcgtggagttgtgaacgcncgcggactccnggagccgcacaaaccagggctcgccatgaagccaggattcagtccccgtgggggtggctttggcggccgagggggctttggtgaccgtggtggtcgtggaggccgagggggctttggcgggggccgaggtcgaggcggaggctttagaggtcgtnnnnnnnnnnnnnnnnnnnnnnnnnnnnnnnnnnnnnnnnnnnnnnnnnnnnnnnnnnnnttccattctggtggcaaccggggtcgtggtcggggaggaaaaagaggaaaccagtcggggaagaatgtgatggtggagccgcatcggcatgagggtgtcttcatttgtcgaggaaaggaagatgcactggtcaccaagaacctggtccctggggaatcagtttatggagagaagagagtctcgatttcggaaggagatgacaaaattgagtaccgagcctggaaccccttccgctccaagctagcagcagcaatcctgggtggtgtggaccagatccacatcaaaccgggggctaaggttctctaactcggggctgcctcgggcaccacggcctcccatgtctctgacatcgttggtccggatggtctactctattgcagtccagttctcccaccgctctggccgtgacctcactaactttggccaacaagaggaccaacatcattcctgtgatcgangatgctcgacacccacacanataccgcatgctcatcgcaatggtggatgtgatctttgctgatgtggc

SEQ ID NO: 76239 - DNA, 1048 bp, Homo Sapiens
ggggggttgaccgatgctgggcagctgagcggaccaatcggccccctagactgagacgttggcgtttgaaatcagccaatggcaggtctacactggagcttcctctccgcctccttcgcctagcctgcgagtgttctgagggaagcaaggaggcggcggcggccgcagcgagtggcgagtagtggaaacgttgcttctgaggggagcccaagatgaccggttctaacgagttcaagctgaaccagccacccgaggatggcatctcctccgtgaagttcagccccaacacctcccagttcctgcttgtctcctcctgggacacgtccgtgcgtctctacgatgtgccggccaactccatgcggctcaagtaccagcacaccggcgccgtcctggactgcgccttctacgatccaacgcatgcctggagtggaggactagatcatcaattgaaaatgcatgatttgaacactgatcaagaaaatcttgttgggacccatgatgcccctatcagatgtgttgaatactgtccagaagtgaatgtgatggtcactggaagttgggatcagacagttaaactgtgggatcccagaactccttgtaatgctgggaccttctctcagcctgaaaaggtatataccctctcagtgtctggagaccggctgattgtgggaacagcaggccgcagagtgttggtgtgggacttacggaacatgggttacgtgcagcagcgcagggagtccagcctgaaataccagactcgctgcatacgagcgtttccaaacaagcagggttatgtattaaacctctattgaaaggccaagtggccatttgaagtattttggacccaaagccctggagggaccgaaaaaagaagtatgcctttccaatgttcccagacttaaaaggaaaattactattggaagcagattctaccccagttcaatggccattttcctttttccacaaatatcccaccaataacattttggcccccaaggtggggtcccggaaggggcttttgaaaaaatatatctgggacaccccatct

SEQ ID NO: 76240 - DNA, 563 bp, Homo Sapiens
cgcgtacggcactatgggtctacgtgcaccagcacaggtagtccagcctgaaataacagactcgctgcatacgagcgtttccaaacaagcagggttatgtattaagctctattgaaggccgagtggcagttgagtatttggacccaagccctgaggtacagaagaagaagtatgccttcaaatgtcacagactaaaagaaaataatattgagcagatttacccagtcaatgccatttcttttcacaatatccacaatacatttgccacaggtggttctgatggctttgtaaatatttgggatccatttaacaaaaagcgactgtgccaattccatcggtaccccacgagcatcgcatcacttgccttcagtaatgatgggactacgcttgcaatagcgtcatcatatatgtatgaaatggatgacacagaacatcctgaagatggtatcttcattcgccaagtgacagatgcagaaacaaaacccaagtcaccatgtacttgacaagatttcatttacttaagtgccatgttgatgataatacacattcctactccccacccc

SEQ ID NO: 76241 - DNA, 2072 bp, Homo Sapiens
  misc_feature (1872)..(1901): n is a, c, g, or t
gtagcgaggcctgggtggttttcaaacagagggagcggccgggcggatcacgcctgcagaccatcccagacgccggagcccgagccccgacgagtccccgcgcctcatccgcccgcgtccggtccgcgttcctccgccccaccatggctcggggccccggcctcgcgccgccaccgctgcggctgccgctgctgctgctggtgctggcggcggtgaccggccacacggccgcgcaggacaactgcacgtgtcccaccaacaagatgaccgtgtgcagccccgacggccccggcggccgctgccagtgccgcgcgctgggctcgggcatggcggtcgactgctccacgctgacctccaagtgtctgctgctcaaggcgcgcatgagcgcccccaagaacgcccgcacgctggtgcggccgagtgagcacgcgctcgtggacaacgatggcctctacgaccccgactgcgaccccgagggccgcttcaaggcgcgccagtgcaaccagacgtcggtgtgctggtgcgtgaactcggtgggcgtccgccgcacggacaagggcgacctgagcctacgctgcgatgagctggtgcgcacccaccacatcctcattgacctgcgccaccgccccaccgccggcgccttcaaccactcagacctggacgccgagctgaggcggctcttccgcgagcgctatcggctgcaccccaagttcgtggcggccgtgcactacgagcagcccaccatccagatcgagctgcggcagaacacgtctcagaaggccgccggtgacgtggatatcggcgatgccgcctactacattcgagagggacatcaagggcgagtctctattccagggccgcggctggcctgtgacttgcgcgtgcgcggagaacccctgcaggtggagcgcacgctcatctattacctggacgagattcccccgaagttctccatgaagcgcctcaccgccggcctcatcgccgtcatcgtggtggtcgtggtggccctcgtcgccggcatggccgtcctggtgatcaccaaccggagaaagtcggggaagtacaagaaggtggagatcaaggaactgggggagttgagaaaggaaccgagcttgtaggtacccggcgggcaggggatggggtggggtaccggatttcggtatcgtcccagacccaagtgagtcacgcttcctgattcctcggcgcaaaggagacgtttatcctttcaaattcctgccttccccctcccttttgcgcacacaccaggtttaatagatcctggcctcagggtctcctttctttctcacttctgtcttgaaggaagcatttctaaaatgtatcccctttcggtccaacaacaggaaacctgactggggcagtgaaggaagggatggcatagcgttatgtgtaaaaaacaagtatctgtatgacaacccgggatcgtttgcaagtaactgaatccattgcgacattgtgaaggcttaaatgagtttagatgggaaatagcgttgttatcgccttgggtttaaattatttgatgagttccacttgtatcatggcctacccgaggagaagaggagtttgttaactgggcctatgtagtagcctcatttaccatcgtttgtattactgaccacatatgcttgtcactgggaaagaagcctgtttcagctgcctgaacgcagtttggatgtctttgaggacagacattgcccggaaactcagtctatttattcttcagcttgcccttactgccactgatattggtaatgttcttttttgtaaaatgtttgtacatatgttgtctttgataatgttgctgtaattttttaaaataaaacacgaatttaataaaatatgggaaaggcacgnnnnnnnnnnnnnnnnnnnnnnnnnnnnnncatgtcggcccgcctcggcccctcgagaaacctttcctaaaccattccttttgggcgcggcgggccccagtaagggtaaggtggaacatgggcccataaccttggttttcccttaggaaaaattcctgggctcattggaccttagtggcttgagaatttcttcacccaaat

SEQ ID NO: 76242 - DNA, 945 bp, Homo Sapiens
ggggaaagcagttgccatggagttgctctgagtaaccctgaggcagtgggacgccaagactggagaggaagcgactgcggggagtatttccattttaaccggaaacaatccctgaacccacaggaatgaatgcctaatggtggagtttcagccatcagtgacaggctgaacccagactcccagggcacatgcttccacctgatgaatgatggcctgaactatgaacaaacgggactatatgaacacttccgtacaggagccccctcttgactactccttcagaagcatccacgtcatccaagatctggtaaatgaggagccaaggacaggactacgaccactgaagcgttcaaagtcgggaaaatcactgacccagtccctgtggctgaataacaatgttctcaatgatctgagagacttcaaccaggtggcttcacagctgttggagcacccagagaacctggcctggatcgacctgtcctttaatgacctgacttccattgaccctgtcctaacaactttcttcaacctgagtgtcctctatcttcacggcaacagcatccagcgcctgggggaggtgaataagctggctgtccttcctcggctccgtagcctgacactccatgggaaccccatggaggaagagaaagggtataggcaatatgtgctgtgcaccctgtcccgtatcaccacgttcgacttcagtggggtcaccaaagcagaccgcaccacagctgaagtctggaaacgcatgaacatcaagcccaagaaggcctggaccaagcagaatacactttgaggctcccacgaccctagtagtcctaaaggcctaagcatagacagcatggtttgacaataaataatttgagctgttgagcagatgagaagtcacttacaccttgtagagatgttctctaactcaggcaactgcaagtagctctagcc

SEQ ID NO: 76243 - DNA, 377 bp, Homo Sapiens
gataagccactgcacctggccagctctagtcttattttgctgaaaaagggaggcaattgagggaaaggcctgctggcctgggacactggagacgtgggtttaccacacagccttgggaaatttatctaactctctgggcccctttgtacttttcagcttagagatttgggggttaaagtagatcagtaatttccaaactcttcacagagtaccagggtctgtagagatgcctcacaggcctccatgacaggccaagaagatggcctatgatctctgaaaccagcccccacttcaatcagatcaaagtaattccattctgttttatatgctgggattctgcttaagatttcatttgataaaaagaatcttctgcttga

SEQ ID NO: 76244 - DNA, 865 bp, Homo Sapiens
  misc_feature (37)..(37): n is a, c, g, or t
  misc_feature (215)..(215): n is a, c, g, or t
  misc_feature (277)..(277): n is a, c, g, or t
agcggatcccctttgtgctaagtgccaacctccacgngggtgagctcgtggtgtcctacccattcgacatgactcgcaccccgtggcttgcccgcgagctcacgcccacaccagatgatgctgtgtttcgctggctcagcactgtctatgctggcagtaatctggccatgcaggacaccagccgccgaccctgccacagccaggacttctccgtncacggcaacatcatcaacggggctgactggcacacggtccccgggagcatgaatgacttcangctacctacacaccaactgctttgaggtcactgtggagctgtcctgtgacaagttccctcacgagaatgaatttgccccaaggagtgggaagaacaacaaagacgccctcctcacctacctggagcaggtgcgcatgggcattgcaggagtggtgagggacaaggacacggagcttgggattgctgacgctgtcattgccgtggatgggattaaccatgacgtgaccacggcgtggggcggggattattggcgtctgctgaccccaggggactacatggtgactgccagtgccgagggctaccattcagtgacacggaactgtcgggtcacctttgaagagggccccttcccctgcaatttcgtgctcaccaagactcccaaacagaggctgcgcgagctgctggcagctggggccaaggtgcccccggaccttcgcaggcgcctggagcggctaaggggacagaaggattgatacctgcggtttaagagccctagggcaggctggacctgtcaagacgggaaggggaagagtagagagggagggacaaagtgaggaaaaggtgctcattaaagctaccgggcacctt

SEQ ID NO: 76245 - DNA, 1682 bp, Homo Sapiens
  misc_feature (24)..(24): n is a, c, g, or t
  misc_feature (975)..(994): n is a, c, g, or t
cagttgagagcgaggggcggcggngacctggcaccgggcggggccggcggcagcgaccatgatcgctttgttcaacaagctgctggactggttcaaggccctattctggaaggaggagatggagctcacgctggtcgggcttcagtactcgggcaagaccaccttcgtcaacgtgatcgcgtcaggacagttcaacgaggacatgatccccaccgtgggtttcaacatgcgcaaaatcaccaaagggaatgtgactatcaagctctgggacattgggggacagccgcgtttccgcagcatgtgggagcgctactgccgaggagtgagcgccatcgtgtacatggtggatgctgctgaccaggagaagattgaggcctctaagaacgagctccacaacctactggacaaacctcagctgcagggcatcccggtcttagtcctgggtaacaagcgagaccttccgggagcattggatgagaaggagctgattgagaaaatgaatctgtctgccatccaggaccgagagatctgctgctactccatctcttgcaaagaaaaggacaacattgacatcaccctacagtggcttattcaacactcgaagtcacggagaagctgagactccagcccttctccctcagaccagggaccgtcatcatctaaacctgaagccgagctccccgcccacccctgtcgtccccctaagcccacccctcctcacccagtgtgaggagggccctctggggaccccagagtcctgttctgctgaggtttgaactcctgtttttattgtaaaataaattgccccccattctggtcccctaacttctcacccttccccgctgcctttgtcccatcacccagccctgcctccctcccagcagccctgggccacagcccccgcccctggcttttccccggcccgctcttgtacctcccttttcaacactctctgttattgtcctgtgtgtacannnnnnnnnnnnnnnnnnnntttaattttttaatttaagcaaagactaaaatcaaccatttgatgctgcaggggcctttcaggatctgggagggggcagtctggagagaaggagggagacgcaggtggacttggggcaagttcagatcagaagaggtgcaggctggcacctgcggcaggtaccagcctgggcactggtggccgcctccctgtcccgtgtgtttccaccgcccaatctggcttgtcctggcagtgcttgaatgccacaggctggcaggggcctctgggggcccctcccctcgacccccagcctgggtagagccaccaggtacgacgaccaggtaccagaaaccaccaggcacacggggcagaaagccagcgtccatgccccagcagccccctcctgcctgttcctggctcccagctcccgcccctccccagggcccccacctccacggcccacttcattttctgttctcattttgcagagttgcacaaggagagaactcagcatggggggttggttctttgggttctgtttgtttatttgtttaatttaatgatttgtaaagtgatgttcctcttccttttttacacttttcagctcatatttaacctctgtttggaaaatgattcttgtaactgtacatttttttgcttcctaataacaatgacaacaaaaaaaataaatgaccagttttgtgttggg

SEQ ID NO: 76246 - DNA, 706 bp, Homo Sapiens
  misc_feature (563)..(573): n is a, c, g, or t
tttatggattatgtaccagggctattaataatacctaaaccccttattctgctatggtggttagatttttttattccttttcaattagtgctactaactattacatggtcgtattcatgcttattacagatgaactatttttagtgccagtgtaaaggattaagaataacattcaattagttggctatttcaggctttattgtacatggtaatgtttcagggagtgtgatttggtctagaatatatccagatccttgtaattatgatattgggttatgacaggattctattatttttagctatgaatggtgcttatttttccctatattaggaatgttaatatttggattatcagagtccatgttataaacagaatttacctatgcaagacaaattctaactgtgcaacattttcatgagaattaaaagttgtgtgttaaggggaaaaccctctgaatgtttttatgtgtaagtgcctaaagaaccgtagaaacagtacatcaaaagctcttataaaagaaaaactgattgaacattagccagaaacaaaatatgatttacannnnnnnnnnnggttgctgggactgaataccctaaaaactaagagatgtgagtggggaaaatgtctaattgataagaaagttgatttatattatatttacatgcatcttctaagattgcctttacagtagccaatcagaacttt

SEQ ID NO: 76247 - DNA, 1474 bp, Homo Sapiens
cagattggagacaccattgagttccggggccccagtgggctgctggtctaccagggcaaagggaagttcgccatccgacctgacaaaaagtccaaccctatcatcaggacagtgaagtctgtgggcatgatcgcgggagggacaggcatcaccccgatgctgcaggtgatccgcgccatcatgaaggaccctgatgaccacactgtgtgccacctgctctttgccaaccagaccgagaaggacatcctgctgcgacctgagctggaggaactcaggaacaaacattctgcacgcttcaagctctggtacacgctggacagagcccctgaagcctgggactacggccagggcttcgtgaatgaggagatgatccgggaccaccttccacccccagaggaggagccgctggtgctgatgtgtggccccccacccatgatccagtacgcctgccttcccaacctggaccacgtgggccaccccacggagcgctgcttcgtcttctgagggccgggcacggtcacacggccacccgccccgcgcaccccacgccctgttcacgctcacccagtcacctccccacatcgcacactggggccccgggttcagcctggcctgcccgtgccctggtgaatcacctggctgagcagttcccctggagccccttcgggagcagggctgtgtcccagatgggccacggctgagccttcagagtacgtcctgcctggcacttactggtccttaccagagacgcccagccccatccctgtcctcatgacccctcgtccaccccacacacacactataaggctgagggctgccagcagccccgtctgcccaccattcccggccgtggaccatagtcgggatgtcagcagacacacatgggcagcccaaagctgcaggtgccagggcccaccccagcctcgcctgtcacccccactcccgcctcagggccaggcccaggcctcaccacctgacgctgcatgagacattgacaccagaaagccctcttgggggcactgctccctaccccagggccctggccagccgggagcttggctctcctctggctagagtgggaagagggggctggccatggggccctcccagaacctcagcatttccttccagcccatccaaacactgaggcagccttggggaaccccgagctggggggttggcagcccactgcaccgcctcagggttttggggtcctgggctggggccaccatccctgatggcagaactcccacaaccacatgtatttattcctctgtcctaaaccgtcccctccttccctcacccccagcacagggggattctgagcagtgcctcttgtctgagggacatatcagtgacctcgacgttgcctttagactacagttgtgttagcctcttgcgtattggctttttcagagtcatttatgagcagaaatttttaaagtaaaactttgctaatattaacccttcaaaa

SEQ ID NO: 76248 - DNA, 396 bp, Homo Sapiens
ccagcagccccgtctgcccaccattcccggccgtggaccatagtcgggatgtcagcatttccttccagcccatccaaacactgaggcagccttggggaaccccgagctggggggttggcagcccactgcaccgcctcagggttttggggtcctggctggggccaccatccctgatggcagaactcccacaaccacatgtatttattcctctgtcctaaaccgtcccctccttccctcacccccagcacagggggattctgagcagtgcctcttgtctgagggacataccagggacctagacgttgcctttagactacagttgtgatagcctcttgcgtattggctttttcagagtcatttatgagctgaaaacctacatgtaaacatttgctaata

SEQ ID NO: 76249 - DNA, 1110 bp, Homo Sapiens
  misc_feature (853)..(853): n is a, c, g, or t
cgacggtctcggcggcggcggcggcggcgacagagcgagcgcggcgcggggccaccatgggggcccagctcagcacgttgggccatatggtgctcttcccagtctggttcctgtacagtctgctcatgaagctgttccagcgctccacgccagccatcaccctcgagagcccggacatcaagtacccgctgcggctcatcgaccgggagatcatcagccatgacacccggcgcttccgctttgccctgccgtcaccccagcacatcctgggcctccctgtcggccagcacatctacctctcggctcgaattgatggaaacctggtcgtccggccctatacacccatctccagcgatgatgacaagggcttcgtggacctggtcatcaaggtttacttcaaggacacccatcccaagtttcccgctggagggaagatgtctcagtacctggagagcatgcagattggagacaccattgagttccggggccccagtgggctgctggtctaccagggcaaagggaagttcgccatccgacctgacaaaaagtccaaccctatcatcaggacagtgaagtctgtgggcatgatcgcgggagggacaggcatcaccccgatgctgcaggtgatccgcgccatcatgaaggaccctgatgaccacactgtgtgccacctgctctttgccaaccagaccgagaaggacatcctgctgcgacctgagctggaggaactcaggaacaaacattctgcacgcttcaagctctggtacacgctggacagagcccctgaagcctgggactacggccagggcttcgtgaatgaggagatgatccggggaccaccttccacccccangaggaagagcccgctggtggctgatgggtggccccccaaccatggatccagtacgcctggctttcccaacctgggaccacgtgggccacccccacggagcgctgcttccgcctttccgaagggccggggcaacggtcacaaggggccacccggcccgggaaaccccaaggccttgtttcagcttcaccccggtcacctccccacaatcgcaaaagggtgggggcccccgggtttcaacccggggcctggccccgggc

SEQ ID NO: 76250 - DNA, 795 bp, Homo Sapiens
cttctggacccagaagaggtgctgccacaacatggttacccccctggctggagtcgggtgcgccaggaggaaagcagaaagggggagccgaggtgttcctagctgattttctgctgtgcagagctaatgctgacatttcatgtcaacttccccggttctctgggtctcctctcctctgagcagccacatagaacattccccacatatccaaagctgcccaggggagccgagagaagggactttgctgtcaggtccaagccctcctgacctccctgagattgatctgccagtgtcctgctgtccctctgggactggccacatggccatcgctgccccttgttgacacctcctttctgtgtgagttgtccccggccaataacaaagctgttccttgaaccagaacaaccagagtgcacttttccttccttagacggaagtagatcctggctagggtttctgcccaggcccttgttcccggcagtgtgactgtttacatggtttggcaataggtttgattctgattgcttcagagtggctggtctattttgtttcctttggtttccttcctccccaaattgtgacaggaaaaacagaccaaaaccaccctaggaaattgctggttgcctgtccccacgtgatgataaatgttgccctcttctggatatcgtttctctaccttacgaccaaacgcccgtcctatagagtgtctgattggatcctctgtcgcgtattctgatggtgcctgctggtttgacgtggagctatcctgtgaaataaaacagcttaacttttctc

SEQ ID NO: 76251 - DNA, 1358 bp, Homo Sapiens
  misc_feature (43)..(77): n is a, c, g, or t
aaacgacgagcgcagcggagtctgtgagcgaggaagcggccgnnnnnnnnnnnnnnnnnnnnnnnnnnnnnnnnnnncagtcgacggtaccggacatatgcccgggaattcggccattacggccgggggcttccgcctgtgtggaggtgcgggattgggcgggctgccacggcatggagaatggctccgcttctgttgcagctggcggtgctcggcgcggcgctggcggccgcagccctcgtactgatttccatcgttgcatttacaactgctacaaaaatgccagcactccatcgacatgaagaagagaaattcttcttaaatgccaaaggccagaaagaaactttacccagcatatgggactcacctaccaaacaactttctgtcgttgtgccttcatacaatgaagaaaaacggttgcctgtgatgatggatgaagctctgagctatctagagaagagacagaaacgagatcctgcgttcacttatgaagtgatagtagttgatgatggcagtaaagatcagacctcaaaggtagcttttaaatattgccagaaatatggaagtgacaaagtacgtgtgataaccctggtgaagaatcgtggaaaaggtggagcgattagaatgggtatattcagttctcgaggagaaaagatccttatggcagatgctgatggagccacaaagtttccagatgttgagaaattagaaaaggggctaaatgatctacagccttggcctaatcaaatggctatagcatgtggatctcgagctcatttagaaaaagaatcaattgctcagcgttcttacttccgtactcttctcatgtatgggttccactttctggtgtggttcctttgtgtcaaaggaatcagggacacacagtgtgggttcaaattatttactcgagaagcagcttcacggacgttttcatctctacacgttgaacgatgggcatttgatgtagaactactgtacatagcacagttctttaaaattccaatagcagaaattgctgtcaactggacagaaattgaaggttctaaattagttccattctggagctggctacaaatgggtaaagacctactttttatacgacttcgatatttgactggtgcctggaggcttgagcaaactcggaaaatgaattaggttgtttgcagtcttcagttgtgttcttatgcttcagtgtcacatttcatttcatttgaaactaaaattttaagtaaagctgaaataaacttcttgtcattgtctgccttttgataattttaaagaaataactttccataagtaaaaaattatatatctctttggatataaatgatttttaaaagatgtttatttaaaaagtc

SEQ ID NO: 76252 - DNA, 1012 bp, Homo Sapiens
  misc_feature (105)..(105): n is a, c, g, or t
  misc_feature (169)..(170): n is a, c, g, or t
  misc_feature (290)..(290): n is a, c, g, or t
  misc_feature (383)..(383): n is a, c, g, or t
  misc_feature (591)..(623): n is a, c, g, or t
cgctacatttctcgtgtattgttgattgacgtacatcaccagaacactgactgatcgattatcgactccttaggattgcctcgagccagatccgcacgagatttntaaaaaaacataaatgattatctgatttaaagatccaaccgatcatattttcgtgtgatggttnntgaaattgacacagtaaaagtactccagtattcactttctcgatcactaaacatatgcatatatttgtaaaaatcagtaaaagcattactctaagtgtagacttaataccatgtgacatntaatccagattgtaaatgctcatttatggttaatgacattgaaggtacatttattgtaccaaaccattttatgagttttctgttagcttgctntaaaaattattactgtaagaaatagttttataaaaaattatatttttattcagtaatttaattttgtaaatgccaaatgaaaaacgttttttgctgctatggtcttagcctgtagacatgctgctagtatcagaggggcagtagagcttggacagaaagaaaagaaacttggtgttaggtaattgactatgcactagtatttcagacnnnnnnnnnnnnnnnnnnnnnnnnnnnnnnnnncttctgcaatacatttgaaaacttgtttgggagactctgcattttttattgtggtttttttgttattgttggtttatacaagcatgcgttgcacttcttttttgggagatgtgtgttgttgatgttctatgttttgttttgagtgtagcctgactgttttataatttgggagttctgcatttgatccgcatcccctgtggtttctaagtgtatggtctcagaactgttgcatggatcctgtgtttgcaactggggagacagaaactgtggttgatagccagtcactgccttaagaacatttgatgcaagatggccagcactgaacttttgagatatgacggtgtacttactgccttgtagcaaaataaagatgtgcccttattttacct

SEQ ID NO: 76253 - DNA, 907 bp, Homo Sapiens
  misc_feature (794)..(836): n is a, c, g, or t
gcggccgccacctgcacggcgggggagccgctcgccgcgggagcgtcaggtgaggggacgcccgacccaaggtcaccaggcgtgggggcgctgggggatcggggaccatcccggctctgaccctggtgcgctccgagaagggcgtgggtcctggagggggatggggaacgcggaggccacgccctccctgagcccggccgaaaatcaaccggctctcgtgggtagcagaggaggccgtgggggatacaggcaccaggtcgcagcgctgcagaggtgcgcaagggccgcccaaagaccagcttgggcctcgcactgcgcccgaggcagacacagggcgttccatcctcttccctccccgctcccgcacagaggggcgcccaggaggcagtgacagtcgtcgcggaatcctgcgtgtgacaccccgcccctgcccagcggattagggagttgtcctctggtaaaaggatttctgggctgcttccagcttggggccctcatccctgccctggcaggcctttctacaccgatctgcatctagtggggggtcagcgtgagcagcagcgccgtgagttctgaggccaagaaccttctccacttgagaagccttcctgggggaggctgagtgggccaggcctggagccacgtaccaacactttatacccaggggaatggatcccaagggcccagataacgcccccaacttcttggggttcacacgcgtcctgagacatctgggaactgcctctgcctgggccaaagctattccattaaaactttattgctgtgcttacttnnnnnnnnnnnnnnnnnnnnnnnnnnnnnnnnnnnnnnnnnnnctccctcgtgttgaaacgccacccaggcctcgctacctaggaccgttgacggcccctataagttggggtgg

SEQ ID NO: 76254 - DNA, 756 bp, Homo Sapiens
atgaagaaaagaggtttaattaactcacagttctgcaggctgtacaggaagcatggctgcgaggcctcaagaaacttacagtcatggcagaagggcgaagggaaagcaagcaccttcttcacatggcagagggagagagcaagcaaagggggaagtgctacacacttaaccagatctcatgagaactcactgtcatgagaacagcaagggggaaatctgcccccatgatccaatcacctcccaccaggctctacctccaagactcaggatcacaattcaacatgagatttgggtggggggacacagccaaaccatatcattccaccctggcccctcccaaatctcatgtcctcacatttcaaaacacaatcatgccttcccaatagccccctaaagtcttaactcattccagcattaactcaaatgtccaagtcaagtctcatctgagaccagccaagtcccttcctcctgtgagcctgtaaaatcaaaaacaagtcagttatttccaagatacaatggggatacaggcattgggtaaatgctcccattccaaataggagaaatcagccaaaacaaaggggctatgggccccatgcaagtccaaaatccaggagggcagtcattaaatctcaaacctccaaaatgatctttgactccacgtctcacatccaggccacactgacacaaggagtgggctcccaaggctctgggcagctctgcctctgtggctctgcatatagtcccacagctgctttc

SEQ ID NO: 76255 - DNA, 1075 bp, Homo Sapiens
  misc_feature (42)..(81): n is a, c, g, or t
  misc_feature (85)..(119): n is a, c, g, or t
aaaggatgatagatcactatagggcgctagctcgtcgctagnnnnnnnnnnnnnnnnnnnnnnnnnnnnnnnnnnnnnnnnccgnnnnnnnnnnnnnnnnnnnnnnnnnnnnnnnnnnncagtcgacggtagcggacatatgcccgggaattcggccattacggccgggggatctcggactccctggaccctccctccagcccagcctcgctagctccgcctgcggtacgtgctcccgcctccgactcaaaatgcctgtctggggaggtggaaacaagtgtggggcctgtgggaggaccgtgtaccacgcagaagaggtgcagtgtgatggcaggagcttccaccgctgctgctttctctgcatggtttgcaggaaaaatttagatagcacaacagtggcaattcacgatgaagagatctactgcaaatcctgctacggaaagaagtatgggccaaaaggctacggttatggccagggcgctggcacgcttaacatggaccgtggcgagaggctgggcatcaaaccagagagtgttcagcctcacaggcctacaacaaatccaaacacttctaaatttgctcagaaatatggaggtgctgagaagtgttccagatgtggggattctgtatatgctgccgagaagataattggagctggaaagccctggcacaaaaactgtttccgatgtgcaaagtgtgggaagagtcttgaatcaacaactctgactgaaaaagaaggtgaaatctattgtaaaggatgctatgcaaagaactttgggcccaagggatttggctatggccaaggagcaggggctcttgttcatgcccagtaagatgtaaaccctgaactaaacatcacacactgagaatctcttcataatctaggcacagataatctttaacactaaactactgtgaaattctaccagcattaagtactgtatatcgccctgtacttggataggctggctaactcgtaggaagagagcactgtatggtatccttttgctttattcaccagcattttgggggaacatttcttttacattttaaataaaacttcagcttgaaaaaa

SEQ ID NO: 76256 - DNA, 562 bp, Homo Sapiens
cttctccgaggactggttcacttctcagaccgcgggcatgccgagatggccatcgcactctggaacaacatgctggaaccagtgggccgcaagactacctccaacaacttcacccacagccgagccaaactcaagtgcccctctcctgagagcccttacctctacaccctgcggaacagccgattgctcccagaccaggctgaagaagcccccgaggtgctctactgggctgtcccagtggcagcgggagtcggccttgtggtgggcatcatcgggacagtggtctggaggtgcaggagaggtggccggagggaagatcctccaatgagcctgcgcactgtggccctctaggcccgggggtgggtcctcaccctaaactccctatagccaccctcttcaccgccctctgccccagccactcccggccaccaggacatgcttcaatgcctggtgccataggaagcccaggggacagtcacaacttcttggggcctgggcttcttccaggcctatgctcctggaatggatacatttaaataaagtccaaagctattttattcct

SEQ ID NO: 76257 - DNA, 1109 bp, Homo Sapiens
  misc_feature (42)..(76): n is a, c, g, or t
aaacgaccgagcgcagcgagtctatgagcgaggaagcggcgnnnnnnnnnnnnnnnnnnnnnnnnnnnnnnnnnnncagtcgacggtaccggacatatgcccgggaattcggccattacggccggggatccggtgttccaacccagggggaaaaatgcggcctttgactgaagaggagacccgtgtcatgtttgagaagatagcgaaatacattggggagaatcttcaactgctggtggaccggcccgatggcacctactgtttccgtctgcacaacgaccgggtgtactatgtgagtgagaagattatgaagctggccgccaatatttccggggacaagctggtgtcgctggggacctgctttggaaaattcactaaaacccacaagtttcggttgcacgtcacagctctggattaccttgcaccttatgccaagtataaagtttggataaagcctggtgcagagcagtccttcctgtatgggaaccatgtgttgaaatctggtctgggtcgaatcactgaaaatacttctcagtaccagggcgtggtggtgtactccatggcagacatccctttgggttttggggtggcagccaaatctacacaagactgcagaaaagtagaccccatggcgattgtggtatttcatcaagcagacattggggaatatgtgcggcatgaagagacgttgacttaaaacgaagccattccaaggacagacggctgtatggaaaggccgagctttgtttcctgtgtttgtgtggactccaccatcatgttgaattttgtcaacactctggcctcttcagggacttcttatttactgtactctctatcactgacaaatgcaggctggattcttattatatacagagatggctcaaaaatggggtttcagatctttgtgacgaaatagaatactgtttcatatttgaatcagagggcttcttgttctgagaaataggttcaaaatcattggaaccaggaacaagaatagcttattgttatctgtgataacactgttttctaaacaccaaggattttcttttttattaatatgcaacatagacattgccataacagaataataaaccacagtgtggggtttt

SEQ ID NO: 76258 - DNA, 1380 bp, Homo Sapiens
aatagggagggaaaaaatttgataattttcttctttctacatgcacttaagactaaaacacaggtttggattaattttatttgcttcctttttccgcttttcttcccgcagagcctgatgggagaatgtccagggcagggaaaccacattttttgtaggtgataactcaatgaaaattggtgcttattttttacacttctctcttgtggctctcttgtggtgctatctgttttaaggtctccttgaaggcgcactggggtccctggccatgcctcgttctccctgctttctttatcctgttattgcctccacagtctgttgccaaggactctaagatcaatgcacgtcactttcctttccactgggcaggatagccaagcacactccctcctgcgctctcccgccccggtgcgtccactcccgagggctgttatgaggactgggttgtgcctacttgatttgaaaacacacacaagcaataaaaagcctcttcctgcattgtctgtggtgtgaccatagcagattatatttgggttcctgaatgtttgtggtgctaatttctgtgtttgttccaagccgttcagtcatgccatgcgctgcctcggtagatggagtaatgtacaatgaactccatgagtctctccagggctgcctgcagcacgtcttttccaagtagcctatttggattcccatctcaaatgtcctggatgcgagcgtcagcggctccagagctcggggcgggtgaggtcccctttggggaaccctttcctggccatcgaggtcggggggctgccgtctgtgggcaggaggacccgaggggcagccaggaaaggcgatctcttcactgtgaaaagttgcccgggtgcagcgccttttccttctaccatgggaaatgcaggctgggcccttggggtgagcctgcggggctctggtgctgtccccgacccccaccaccaccagaatgcagttccagcttaggaagccacaaacaagccacccaggaggaacaaaacaccgccagcgtggattttccaaatttccctggaaagtaagtctcgctcttgccaaagaaaagtctggcttggagagtctctggagcccaggatgccagcatgtgccaatgactgtcaccttcatctcttcaaaagaaaagccatagccgaggactgtcccgcgacccccgtggactgcgtctaggtcatgtgattctgttttcatttctcatcccatccaatttgtccttttctcctgtcattttcttcctctgtggtcccttcaaagttgttataatttgtactgaacttcaaaatgtgtcccgttctccccagaccactctagccacagtatattgcaataaaattacttcttatatttgcagaa

SEQ ID NO: 76259 - DNA, 930 bp, Homo Sapiens
  misc_feature (75)..(178): n is a, c, g, or t
  misc_feature (289)..(297): n is a, c, g, or t
tggctcaagcaattctcccactgcagcctcctaagtagctgggaatacaggtatacacgagtacacccagctaannnnnnnnnnnnnnnnnnnnnnnnnnnnnnnnnnnnnnnnnnnnnnnnnnnnnnnnnnnnnnnnnnnnnnnnnnnnnnnnnnnnnnnnnnnnnnnnnnnnnnnntgttatacgtgtgagcctctgcacccggcggcaaaactggcttttaatcaaccttttggctaaaggatttctctttttatttatttttaaaaggatttcccatttttatcnnnnnnnnngatattaaaatgttgcctcatcctacccagtaagtacttgaatttgaattctcttccttttcatttttgcctgcaaactgaccagtcttttctgagttcatctcttctgtacgttttgtcaagtgcagtgaacagcaactacaaaatattttgtttttctgtctttttctttagtaaagggtagatgatctgcctttcaggttatctcaaggggcagtttcacctttccataatataaattacccttgtgtaagttatttcttccatcttctgatagcaatttcctgaatgcctgccagctaaccattaagccagtgttcagtattttagcattttaaaaaacaagggaccaatttctgtgtcagcatgggctagcttgccattgaataacaaaggcaaaatctcactgtctcacacaacttttctattgcaacttgcctagggactttggtttagatcataggttggccatgatcaaactatggtccatgggcaaaatctgtctagctccttatttatctaaataaagttttactgcaatattaaaaacaaccaattacaaaactacaaaacaaacaaggggggggcgcccaagaaatatcccccgggggggccccattttccgtcaccccc

SEQ ID NO: 76260 - DNA, 485 bp, Homo Sapiens
  misc_feature (190)..(235): n is a, c, g, or t
  misc_feature (309)..(411): n is a, c, g, or t
atcatctaccctttactaaagaaaaagacagaaaaacaaaatattttgtagttgctgttcactgcacttgacaaaacgtacagaagagatgaactcagaaaagactggtcagtttgcaggcaaaaatgaaaaggaagagaattcaaattcaagtacttactgggtaggatgaggcaacattttaatatcnnnnnnnnnnnnnnnnnnnnnnnnnnnnnnnnnnnnnnnnnnnnnngagaaatcctttagccaaaaggttgattaaaagccagttttgccgccgggtgcagaggctcacacgtataacannnnnnnnnnnnnnnnnnnnnnnnnnnnnnnnnnnnnnnnnnnnnnnnnnnnnnnnnnnnnnnnnnnnnnnnnnnnnnnnnnnnnnnnnnnnnnnnnnnnnnnttagctgggtgtactcgtgtatacctgtattcccagctacttaggaggctgcagtgggagaattgcttgagcca

SEQ ID NO: 76261 - DNA, 845 bp, Homo Sapiens
  misc_feature (77)..(77): n is a, c, g, or t
gcaacattccaagccccccccggtcccctatccaaggacaaatgtagggcctctaggatgtcccagacccacctcgngagggccagtcagttcaggtaggtcaggcccagttctcttccctcccgacagaccccgggcccgggaagcaccgaagaccatgatgctggctggagtgaagacactcgtttccgtatcaagagctgagcctaagaaatgctcatcgttggtcaggctgggtctgggccaaagggacagacagcaaagaaataccgtctccacgggaggaagacgggagaggagggaggatggacgagcggtgggcacgcaggggacatagccagggcagggtggagaaggctgggaccactgggaggggaccgaggtaagagtggctcttcagagccaggtgaagagtctgtggcctaacggaaacagaaaggagcgcccccaacccccactcctcgtggctcatcactagtggccctgaggactccctcccaagggatggaatgcaaatccaaatactaagaacagcctagggaggagcgagcgcccgctgtggcagtggcatctggggcatggcttcgaggcggtgagggccgggcctccatgctcacctgcaggccggctgcttgctgcactgccctggaaagccagggccccatcttctcgggactctgccagtctcttttcagttcacaaaggcgtctatggagcgctgggtgcacactggacgcttagacgtgaacatctttctcagctcatcacctgaggttggagggccccaagggcccctctgtctggagtctgtactggctcatctgggcccaaggcctctccttgta

SEQ ID NO: 76262 - DNA, 2138 bp, Homo Sapiens
gggttcttgaacaactggtaggtcaagaagtaccacctgctgaagagtcaccagaggtgacaacagaggctgcagaggcctcagctgtagaggctggatcagaagtctctgaaaagcctgggcaggaggctccagttctccctaaggatggtgcagtcaatggaccgtcagttgtaggagatcagactcctattgaaccacagacttctatagaaagactgacagaaacaaaagatggctcaggactagaggagaaggtcagggcaaagctggttcctagtcaggaggagactaagctgtctgtagaagagtctgaggcagctggagatggggttgataccaaggtagcccagggagctactgagaaatcacctgaagacaaagttcagatagctgctaatgaagagacacaagagagagaagaacagatgaaagagggtgaagaaactgaaggctcggaagaggatgataaagaaaatgataagactgaagaaatgccaaatgattcagtccttgaaaacaagtctcttcaagaaaatgaggaggaggagattgggaacctagagcttgcctgggatatgctggatttagcaaagatcatttttaaaaggcaagaaacaaaagaagcacagctttatgctgcccaggcacatcttaaactcggagaagttagtgttgaatctgaaaactatgtgcaagctgtggaggagttccagtcctgccttaacctgcaggaacagtacctggaagcccacgaccgtctccttgcagagacccactaccagctgggcttggcttatgggtacaactctcagtatgatgaggcagtggcacagttcagcaaatctattgaagtcattgagaacagaatggctgtactaaacgagcaggtgaaggaggctgaaggatcgtctgctgaatacaagaaagaaattgaggaactaaaggaactgctacccgaaattagagagaagatagaagatgcaaaggagtctcagcgtagtgggaatgtagctgaactggctctgaaagctactctggtggagagttctacttcaggtttcactcctggtggaggaggctcttcagtctccatgattgccagtagaaagccaacagacggtgcttcctcatcaaattgtgtgactgatatttcccaccttgtcagaaagaagaggaaaccagaggaagagagtccccggaaagatgatgcaaagaaagccaaacaagagccggaggtgaacggaggcagtggggatgctgtccccagtggaaatgaagtttcggaaaacatggaggaggaggctgagaatcaggctgaaagccgggcagcagtggaggggacagtggaggctggagctacagttgaaagcactgcatgttaagagggggcacagccctcctcccaagggaaagtgtttttgtatataatgtattttttcacttttggaggattctttttgtataacttcaataaagattgtaagcaaaggttgaggctttgatggtttttttcttaattattggctgaatctgccttggagcactgctggttttatatattagccaaaggttttgttctggccttctgtactgatctgtgttcctgatcctaattcctatctgtctaacgtggaggtgatcaagtgtggctgtaggcctttgttttccaatggtgctatattctgttttcaaacacttcactgaacccagctgtcttgcaaactttcagtggtgctgtccctggatgggggctacaaaaacaagaattggtgaagatcttgctcttcagtgctgaaaatggatgatggactttggctgtgagccaggcctaggatggttcttgtcctatatccacctagtcttcacctggggctataattctgtcctggaaaaagaactctgaaaacctgggtcaggggaatgattcctaaggaaaacggtctgcatttgagctctggtttgaaagtagccaaggggactgatggtggacactccagatgtggttggaagcatatgtggggaggctggctggttgagttttgttattttctgtatagaaaggttgagatatatcaacacttggaattgttacccatctgcagaattgacttctcaaataaagatgctaaaaatct

SEQ ID NO: 76263 - DNA, 508 bp, Homo Sapiens
ggcgtcataaacctgttctctcaactcttcccttgcttcctcatctatgttatcattattttctaccagagattcatcttctgttttttctccttcttcctcttccacatgcacaccttccaaggcgtttcccaacacaccattctccattcttgccaactccagaagtgatttcccatagaaaaagaaggcttctccacactcattagctgtctctccatacttcttacctaaaagactagctgcttcctggaatgcattgacagctgctggaatatcccccatcaccagatgtttctgtcctaaacccaatagtttcttagcttcactatccacatccagactctccactttatctgcagatgtagaaggagcaggaacatcttcaattttgtcggcagaaaccagctccgcggcgacggcggcagtggctgtggactccatggccatcgttcccctgaggtggcgaaccagcgaacggaatagagcctgcgagaaaaacaggccc

SEQ ID NO: 76264 - DNA, 997 bp, Homo Sapiens
  misc_feature (773)..(822): n is a, c, g, or t
attgtgactatgaaccagtgtgtcaaaaagcaggctggtacggtccggaattcccgggatatcgtcgacccacgcgtcgggctggcttatgggtacaactctcagtatgatgaggcagtggcacagttcagcaaatctattgaagtcattgagaacagaatggctgtactaaacgagcaggtgaaggaggctgaaggatcgtctgctgaatacaagaaagaaattgaggaactaaaggaactgctacccgaaattagagagaagatagaagatgcaaaggagtctcagcgtagtgggaatgtagctgaactggctctgaaagctactctggtggagagttctacttcaggtttcactcctggtggaggaggctcttcagtctccatgattgccagtagaaagccaacagacggtgcttcctcatcaaattgtgtgactgatatttcccaccttgtcagaaagaagaggaaaccagaggaagagagtccccggaaagatgatgcaaagaaagccaaacaagagccggaggtgaacggaggcagtggggatgctgtccccagtggaaatgaagtttcggaaaacatggaggaggaggctgagaatcaggctgaaagccgggcagcagtggaggggacagtggaggctggagctacagttgaaagcactgcatgttaagagggggcacagcctcctcccaagggaaagtgttttgtatatatgtattttctcacttttgggagggatctttcgtataacttcataaagcatgtagnnnnnnnnnnnnnnnnnnnnnnnnnnnnnnnnnnnnnnnnnnnnnnnnnncaagttaccgtcacccgcttttggacaaggggcccaaagggagcggaaaaaacagaagaggcggggctaaagcgcgcggaaagtgcccggtcctggcgaccccctcgggggcaatgcaccacccaataagcccggaaaatcagatgtgacacgctccgcatgtgtaacacaccgg

SEQ ID NO: 76265 - DNA, 896 bp, Homo Sapiens
ctcattcatactgagagttgtacccataagccaagccccagctggtagtgggtcttgcaaggagacggttgtgggcttccaggtactgttcctgcaggttaaggcaggactggaactcctccacagcttgcacatagttttcagattcaacactaacttctccgagtttaagatgtgcctgggcagcataaagctgtgcttcttttgtttcttgccttttaaaaatgatctttgctaaatccagcatatcccaggcaagctctaggttccccaatctcctcctcctcattttcttgaagagacttgttttcaaggactgaatcatttggcatttcttcagtcttatcattttctttatcatcctcttccgagccttcagtttcatctatgttatcattattttctaccagagattcatcttctgttttttctccttcttcctcttccacatgcacaccttccaaggcgtttcccaacacaccattctccattcttgccaactccagaagtgatttcccatagaaaaagaaggcttctccacactcattagctgtctctccatacttcttacctaaaagactagctgcttcctggaatgcattgacagctgctggaatatcccccatcaccagatgtttctgtcctaaacccaatagtttcttagcttcactatccacatccagactctccactttatctgcagatgtagaaggagcaggaacatcttcaattttgtcggcagaaaccagctccgcggcgacggcggcagtggctgtggactccatggccatcgttcccctgaggtggcgaaccagcgaacggaatagagcctgcgagaaaaacaggcaatttgggacgccagagactcactcagggacagaaaatggcagattccc

SEQ ID NO: 76266 - DNA, 1043 bp, Homo Sapiens
  misc_feature (85)..(85): n is a, c, g, or t
  misc_feature (103)..(103): n is a, c, g, or t
  misc_feature (177)..(177): n is a, c, g, or t
  misc_feature (206)..(206): n is a, c, g, or t
  misc_feature (215)..(215): n is a, c, g, or t
  misc_feature (218)..(218): n is a, c, g, or t
  misc_feature (234)..(234): n is a, c, g, or t
cctgagccagatcgcagagctctgctgctggacacctggtgctttgacgagatttgagtgatccctctgccagaatctgtctcancagatgcccctcccctgnccctatggactggccctcctgatccaagcaaagaccgtccccagagcctaccccccatatgtcctcagagagcntgaggtcccctccagcagtcatgggaccntgagccccntcntgcctgaccttgctcncccagtggggaggtgactgtgttcccagagttgtgagccgctctcctcacccctaaaaagctgactcactgtgagtgaccttggccaagttcccaaacctccttgtgcctcagtttccccatctggaaaaaatggggccacctcttgccagcagtagcagggctgcccacgcccctttctccccatgccccatccagcacttgggcgactcatgcctctgcctcagtgggcctgtgggagcctactggagcccagcacttactccccctgagcagcgagcctgcgtctgtctcagctgtccagcgctgagggccagggtcttgtgctgtggggctgggggatgccctcttttctatatttatttcatagaaagtctcctgcgggagcggaaatgcagtccggcctagggctcccagcccttgactgtcctcctgtgagggcctgaagctgggccagggcccgtcgcagcggagccccctctcagcagcccaccgggtccctccaggctgctgcccgtgcgtggtctttctcctccttttcaaagcaatagccgccgggtctgcaaagccctgtcagacagactgggcccttccaaggtcaagccatgtgtctgatgacattcctggtgaagcaaaggagaggaggatgggtcagccctcactgggtgtcacacactgagagaagtcctattgtaaagaaacggaaaaagtcacaaaaaagtttgtataaagacatatttttgtactacatggggactcttcctgcatgtcagcaataaaacttcctgatctggaaccactgtggaaaaa

SEQ ID NO: 76267 - DNA, 1059 bp, Homo Sapiens
cgcccgcgccaccgggccgctccggggacaggccggggcggggcgcggcggcaggaaacggggcggggacttgcggaggcgttggggacgagagagggcgcggccaactccaggggggacggcaggccgagagcgcggcgcccgggcctggcgcggagcctgagcccgccggacgggaggcggccccgccgcgggctcggccccggccccagccccgccagcatggccggccggactgtacgggccgagacccggagccgggccaaggatgacatcaagaaggtgatggcgaccatcgagaaggtccggagatgggagaagcgatgggtgactgtgggcgacacttcccttcgtatcttcaagtgggtgccagtggtggatccccaggaggaggagcgaaggcgggcaggtggcggggcagagagatcccgtggccgggaacgtcggggcaggggcgccagtccccgagggggtggccctctcatcctgctggatcttaatgatgagaacagcaaccagagtttccattcggaaggttccctgcaaaagggcacagagcccagtcctgggggcaccccccagcccagccgccctgtgtcacctgccggacccccagaaggggtccctgaggaggctcagcccccacggctgggccaagagagagatcccgggggcataactgctggcagcaccgacgaacccccaatgctgaccaaggaggagcctgttccagaactgctggaagctgaggcccccgaagcttaccctgtctttgagccagtgccacctgtccctgaggcagcccagggtgacacagaggactcggagggtgcccccccactcaagcgcatctgcccaaatgcccctgacccctgagaagccggcctgcctgtcctgttgccccaggggcccctttggctttttacaaataaagaccccttttggtaaccacacaaagtgatgtacattaactcctatcccccccgggggcgcgcggctcttagaaaatccccccagagggggcccaagcttaacgcgataccccagcttttcttgtgg

SEQ ID NO: 76268 - DNA, 1239 bp, Homo Sapiens
cagtcgacggtaccggacatatgcccgggaattcggccattacggccgggtatgatccttcttttatagttagaccttgaaacaagtctaaactatttttaaattatttgcaaaaaatgtggctaataaaaatccctagtctattttcaggtagattcttgtactttgagattatcataatcttctaactgatattttatatttttctaaaaacttttataagttctttagttttatttcaggcttgaacattggttctgatttgtatatcaacatatcagaagaattagtcaactaaagtttgaaaacctatgtagcagagatctggttcagaaactgcttctatactatacatttaaaaattaatcagcaattgatggtattatttttatattaagaaatgataggaacattgacactaatgtggaggaatttgccaaatattttatttcaaaatttagcctctgatatcataaccacaagatattttaaatcaacagtttctaagcatactaccacagtttttatgacctctccatcatcttgtggtttctagagattgacagatactatgtttgttttatagatatggtaattaatgaaacaactttaaattgtcttccattctttcttcctcagttcatttctttttgtcttcccactgatagtctttggcagctcttgaataaattctacctgttggcatcaaggggaagaaaattagcctggaaatttttatctttacataaagccaattatatagcagtttgattatgaattctaggtggaagaattagaatagtctttggaatgggttttgggtaacagccaaaatagggaaaagggtattgttaggaaagttgtcttgatattaagtatttactgtgagtccagtaagccaaaggaccaaacaaaataggttcagggtttcattttaatctcaaagattctgattcttacccatatgtcatcagttcagtttgggacatgtggtgcagcatgtgtgaagaaaatattcattaaaatgtaaaaataaacacttgaaattgtccacaacactgagcaaatattcgttataattaggatgcctacctttctgggatatttgtaaggtgctgtagtttttttaacatgctcctgaatctcctttattagttgttcttgatcatgtgacttgtaatcaggatttagaacgacaaaagcctttactacctaaaataaatatttgaaacaccagga

SEQ ID NO: 76269 - DNA, 1043 bp, Homo Sapiens
  misc_feature (801)..(801): n is a, c, g, or t
aatacgggcgggcaaaatcctgcatggagtagtgttttttccccgtggatccagggagcatgtgtattcacacaccatttcccccgttttgagccgacttctatcttgcaaacactctccaagtcccccatcacagtcttctgttcagcaccaactgtataccgaatgcttgtacagaatgatataaccagctataagtttaaaagcttaaagcactgtgtgagtgctggggaaccaattacccctgacgtgactgaaaaatggagaaacaagacgggcctggatatctacgaaggatatggacagactgaaacggtgctaatctgtggaaattttaagggaatgaaaattaaacctggctcaatgggaaaaccttctcctgctttcgatgttaagattgtagatgtaaatggcaatgttctacctcctggacaagaaggagatattggcattcaagttctacccaaccgaccatttggcctttttactcattacgtagataatccttcaaaaacagcttcaactctacgaggcaatttctatatcactggggacagaggatatatggataaagatgggtatttctggtttgttgcaagagcagatgatgtcatattatcctctggctatcgaattggaccatttgaggtagaaaatgccctgaatgaacacccttcagttgcagagtcagctgttgtcagcagcccagaccccatcagaggagaggtagtaaaggcttttgtcgttctaaatcctgattacaagtcacatgatcaagaacaactaataaaggagattcangagcatgtttaaaaaactacagcaccttacaaatatcccagaaaggtagaatttattcaagagctgccaaagactatcagtgggaagacaaaagaaatgaactggagaaagaaagaatggaagacaatttaaaggtgtttccttaattaccatatctataaaacgaaccttgtatctgtcaatctcttgaaaccaccagatgatgggaaagggcctaaaaactggggggagaatgccttaaa

SEQ ID NO: 76270 - DNA, 1597 bp, Homo Sapiens
cggcagtaactacaacggtcctaaggtagcgaggcctgggtgtcgaattcggcacgagggcatcatggcaaccgttacagccacaaccaaagtcccggagatccgtgatgtaacaaggattgagcgaatcggtgcccactcccacatccggggactggggctggacgatgccttggagcctcggcaggcttcgcaaggcatggtgggtcagctggcggcacggcgggcggctggcgtggtgctggagatgatccgggaagggaagattgccggtcgggcagtccttattgctggccagccgggcacggggaagacggccatcgccatgggcatggcgcaggccctgggccctgacacgccattcacagccatcgccggcagtgaaatcttctccctggagatgagcaagaccgaggcgctgacgcaggccttccggcggtccatcggcgttcgcatcaaggaggagacggagatcatcgaaggggaggtggtggagatccagattgatcgaccagcaacagggacgggctccaaggtgggcaaactgaccctcaagaccacagagatggagaccatctacgacctgggcaccaagatgattgagtccctgaccaaggacaaggtccaggccggggacgtgatcaccatcgacaaggcgacgggcaagatctccaagctgggccgctccttcacacgcgcccgcgactacgacgctatgggctcccagaccaagttcgtgcagtgcccagatggggagctccagaaacgcaaggaggtggtgcacaccgtgtccctgcacgagatcgacgtcatcaactctcgcacccagggcttcctggcgctcttctcaggtgacacaggggagatcaagtcagaagtccgtgagcagatcaatgccaaggtggctgagtggcgcgaggagggcaaggcggagatcatccctggagtgctgttcatcgacgaggtccacatgctggacatcgagagcttctccttcctcaaccgggccctggagagtgacatggcgcctgtcctgatcatggccaccaaccgtggcatcacgcgaatccggggcaccagctaccagagccctcacggcatccccatagacctgctggaccggctgcttatcgtctccaccaccccctacagcgagaaagacacgaagcagatcctccgcatccggtgcgaggaagaagatgtggagatgagtgaggacgcctacacggtgctgacccgcatcgggctggagacgtcactgcgctacgccatccagctcatcacagctgccagcttggtgtgccggaaacgcaagggtacagaagtgcaggtggatgacatcaagcgggtctactcactcttcctggacgagtcccgctccacgcagtacatgaaggagtaccaggacgccttcctcttcaacgaactcaaaggcgagaccatggacacctcctgagttggatgtcatcccccgaccccaccctgttttccaccagagttctgacactgtgactctgtataaaatggttgggaagctgcacccaccttgtgcatgtgtggttgccctgagcccacagaaagacacctccagagtgcg

SEQ ID NO: 76271 - DNA, 1294 bp, Homo Sapiens
attacggctaggtagcgaggcctgggtgtgtgaatcggcacgagggcgtggaggacgtgtggttactcaaagaacagctaagaattttgcaatcggcctgagcggggcggtggtggggctgagcaaaaggaggaggagccaggagacattgggaatggacccaggagttccggacgcccgtcttccagcgcagcctcggtgggagggcggggcataaagtcccgccacgcccccacaatatttacatatttatgaggaaccatcgagatctttgaagaaccagctagcctagaggagccagaacatctcgctcctcgcgcgtttccgtttccgctaggactctggcagttggtgagcatcatggcaaccgttacagccacaaccaaagtcccggagatccgtgatgtaacaaggattgagcgaatcggtgcccactcccacatccggggactggggctggacgatgccttggagcctcggcaggcttcgcaaggcatggtgggtcagctggcggcacggcgggcggctggcgtggtgctggagatgatccgggaagggaagattgccggtcgggcagtccttattgctggccagccgggcacggggaagacggccatcgccatgggcatggcgcaggccctgggccctgacacgccattcacagccatcgccggcagtgaaatcttctccctggagatgagcaagaccgaggcgctgacgcaggccttccggcggtccatcggcgttcgcatcaaggaggagacggagatcatcgaaggggaggtggtggagatccagattgatcgaccagcaacagggacgggctccaaggtgggcaaactgaccctcaagaccacagagatggagaccatctacgacctgggcaccaagatgattgagtccctgaccaaggacaaggtccaggccggggacgtgatcaccatcgacaaggcgacgggcaagatctccaagttgggccgctccttcacacgcgcccgcgactacgacgctatgggctcccagaccaagttcgtgcagtgcccagatggggagctccagaaacgcaaggaggtggtgcacaccgtgtccctgcacgagatcgacgtcatcaactctcgcacccagggcttcctggcgctcttctcaggtgacacagggggagatcaagtcagaagtccgtgagcagatcaatgccaaagtggcttgaatggcccccaggagggccaaggcggaaatccatccccggggagtgctggtccatcgaccaagggtccccaatggctggaaccatcca

SEQ ID NO: 76272 - DNA, 1015 bp, Homo Sapiens
aaacgttaggctaggtacgaggctggtgtgtgaatcggcacgaggcatcatggcaaccgttacagccacaaccaaagtcccggagatcgtgatgtaacaaggattgagcgaatcggtgcccactcccacatccggggactggggctggacgatgccttggagcctcggcaggcttcgcaaggcatggtgggtcagctggcggcacggcgggcggctggcgtggtgctggagatgatccgggaagggaagattgccggtcgggcagtccttattgctggccagccgggcacggggaagacggccatcgccatgggcatggcgcaggccctgggccctgacacgccattcacagccatcgccggcagtgaaatcttctccctggagatgagcaagaccgaggcgctgacgcaggccttccggcggtccatcggcgttcgcatcaaggaggagacggagatcatcgaaggggaggtggtggagatccagattgatcgaccagcaacagggacgggctccaaggtgggcaaactgaccctcaagaccacagagatggagaccatctacgacctgggcaccaagatgattgagtccctgaccaaggacaaggtccaggccggggacgtgatcaccatcgacaaggcgacgggcaagatctccaagctgggccgctccttcacacgcgcccgcgactacgacgctatgggctcccagaccaagttcgtgcagtgcccagatgggggagctccagaaacgcaggaggtggtgcacaccgtgtcctgcacgagatcgacgtcatcaactctccgcacccagggcttcctgggcgctcttctcaggtgacacacgggacaaacacgtcacaaagtccggaggcacatcatggccacgtggtgaatggggcaggaggcaaggggggaacaatcccggggggggcaccggaggtcacctggggacggagtccttcccacggcgggaagaagggcgtttgaatgaaaccacgggaccaacgggcacc

SEQ ID NO: 76273 - DNA, 1181 bp, Homo Sapiens
ggcgaggtcactgcaggtcagaggtcacgagatcaaagatctggaaccctgagcctcgaagcggaggatccctgtgtcccagccgggcatggccgacccccaccagcttttcgatgacacaagttcagcccagagccggggctatggggcccagcgggcacctggtggcctaagttatcctgcagcctctcccacgccccatgcagccttcctggctgacccggtgtccaacatggccatggcctatgggagcagcctggccgcgcagggcaaggagctggtggataagaacatcgaccgcttcatccccatcaccaagctcaagtattactttgctgtggacaccatgtatgtgggcagaaagctgggcctgctgttcttcccctacctacaccaggactgggaagtgcagtaccaacaggacaccccggtggccccccgctttgacgtcaatgccccggacctctacattccagcaatggctttcatcacctacgttttggtggctggtcttgcgctggggacccaggataggttctccccagacctcctggggctgcaagcgagctcagccctggcctggctgaccctggaggtgctggccatcctgctcagcctctatctggtcactgtcaacaccgacctcaccaccatcgacctggtggccttcttgggctacaaatatgtcgggatgattggcggggtcctcatgggcctgctcttcgggaagattggctactacctggtgctgggctggtgctgcgtagccatctttgtgttcatgatccggacgctgcggctgaagatcttggcagacgcagcagctgagggggtcccggtgcgtggggcccggaaccagctgcgcatgtacctgaccatggcggtggcggcggcgcagcctatgctcatgtactggctcaccttccacctggtgcggtgagcgcgcccgctgaacctcccgctgatgctgctgctgctgggggccactgtggccgccgaactcatctcctgcctgcaggccccaaggtccaccctgtctggccacaggcaccgcctccatcccatgtcccgcccagccccgcccccaacccaaggtgctgagagatctccagctgcacaggccaccgccccagggcgtggccgctgttacagaaacaataaaccctgatgggcatggaaaa

SEQ ID NO: 76274 - DNA, 1005 bp, Homo Sapiens
  misc_feature (971)..(971): n is a, c, g, or t
acaacaacccaacataaccaccccacgactcacaccaacgtagcgaggcctgggtggctatttcggcacgaggggtacgggagccgggcgggcacgctccgaaccgcggcttacgtggcggcggcgaaggatgcacccggcaggcttggcggcggcggctgcggggacgccccggctgccctcgaagcggaggatccctgtgtcccagccgggcatggccgacccccaccagcttttcgatgacacaagttcagcccagagccggggctatggggcccagcgggcacctggtggcctaagttatcctgcagcctctcccacgccccatgcagccttcctggctgacccggtgtccaacatggccatggcctatgggagcagcctggccgcgcagggcaaggagctggtggataagaacatcgaccgcttcatccccatcaccaagctcaagtattactttgctgtggacaccatgtatgtgggcagaaagctgggcctgctgttcttcccctacctacaccaggactgggaagtgcagtaccaacaggacaccccggtggccccccgctttgacgtcaatgccccggacctctacattccagcaatggctttcatcacctacgttttggtggctggtcttgcgctggggacccaggataggttctccccagacctcctggggctgcaagcgagctcagccctggcctggctgaccctggaggtgctggccatcctgctcagcctctatctggtcactgtcaacaccgacctcaccaccatcgacctggtggccttcttgggctacaaatatgtcgggatgattggcggggtcctcatgggcctgctcttcgggaagattggctactacctggtgctgggctggtgctgcgtggccatctttgtgttcatgatcccggacgctggcggctgaagatcttggcagacgcagccagctgaaaggggggcccggntgcgtgggggcccgggaaaccagctgcgcatgta

SEQ ID NO: 76275 - DNA, 873 bp, Homo Sapiens
  misc_feature (745)..(745): n is a, c, g, or t
  misc_feature (825)..(825): n is a, c, g, or t
  misc_feature (844)..(844): n is a, c, g, or t
tggaaccctgaggtgtgcacagcgctgggatgccaggttcggcctcgaagcggaggatccctgtgtcccagccgggcatggccgacccccaccagcttttcgatgacacaagttcagcccagagccggggctatggggcccagcgggcacctggtggcctgagttatcctgcagcctctcccacgccccatgcagccttcctggctgacccggtgtccaacatggccatggcctatgggagcagcctggccgcgcagggcaaggagctggtggataagaacatcgaccgcttcatccccatcaccaagctcaagtattactttgctgtggacaccatgtatgtgggcagaaagctgggcctgctgttcttcccctacctacaccaggactgggaagtgcagtaccaacaggacaccccggtggccccccgctttgacgtcaatgccccggacctctacattccagcaatggctttcatcacctacgttttggtggctggtcttgcgctggggacccaggataggttctccccagacctcctggggctgcaagcgagctcagccctggcatggctgaccctggaggtgctggccatcctgctcagcctctatctggtcactgtcaacaccgacctcaccaccatcgacctggtggccttcttgggctacaaatatgtcgggatgaattggcggggtcctcatgggcctgctcttcgggaagattggctactacctgggtgctgggnctggtgctgcgtaggccatctttggtgttcatgatccgggacgctgcgggctgaaagaatcttggcagacgcaaccaaanctggaggggggtccccggngtgccgtggggggccccgggaaaccaaca

SEQ ID NO: 76276 - DNA, 1585 bp, Homo Sapiens
tctaggtacgaggcctgggtgtgttaattcggcacgaggagcgggctgcgccgaggtcgtagcggaaccagctggcgaacccgcagaatgaaccacaagagcaagaagcgcatccgcgaggccaagcggagtgcgcggccggagctcaaggactcgctggattggacccggcacaactactacgagagcttctcgctgagcccggcggccgtggcggataacgtggaaagggcagatgctttacagctgtctgtggaagaatttgtggagcggtatgaaagaccttacaagcccgtggttttgttgaatgcgcaagagggctggtctgcgcaggagaaatggactctggagcgcctaaaaaggaaatatcggaaccagaagttcaagtgtggtgaggataacgatggctactcagtgaagatgaagatgaaatactacatcgagtacatggagagcactcgagatgatagtcccctttacatctttgacagcagctatggtgaacacccctaaaagaaggaaacttttggaagactacaaggtgccaaagtttttcactgatgaccttttccagtatgctggggagaagcgcaggcccccttacaggtggttagtgatggggccaccacgctccggaactgggattcacatcgaccctctgggaaccagtgcctggaatgccttagttcagggacacaagcgctggtgcctgtttcctaccagcactcccagggaactcatcaaagtgacccgagacgaaggagggaaccagcaagacgaagctattacctggttaaatgtgatttatccccggacacagcttccaaacctggccaactgaattcaaaacccctggaaatcttacaaaaaccaggagagactgtcttggtaccaggaggctggtggcatgttgtcctcaatctcgacactactatcgccatcacccaaaattttgccagcagcaccaacttccctgtggtatggcacaagacggtaagagggagaccaaagttatcaaggaaatggtataggattttgaagcaagagcaccccgagttggcagtcctcgcagactcggttgaccttcaggagtccacagggatagcttccgacagctccagcgactcttccagctcctccagctccagttcgtcagactccgactcagagtgcgagtctggatccgagggcgatgggacagtgcaccgcaggaagaagaggaggacgtgcagcatggtgggaaacggggacaccacctcccaggacgactgtgtcagcaaagagcgcagctcctccaggtgacccagcaaggctgttgtctgtatggaaggacacgctcgcggcaagggcagggcctggggagggtggcctgtccagtcctgcagacaaggggaggcctgacagagcccaagaatgaggacaccctcggcacgggaacccattcacttagcgtttgctccagtagctttccctctgctaccaatgcagataaacgcggcttgttttactcaggcaagagaatgtgaatagtgccaagaaaatcctttacattatttaataaaaattgaatccattttcaaaaaaa

SEQ ID NO: 76277 - DNA, 520 bp, Homo Sapiens
ggagaaagtgaccaatatctgtgctgtctcccgaggtcagaggtttgtttaatgaagaagtgggttgcatccaggttgactccttgttttctgtcctcctgtgtccagtgcgagtctggatccgagggcgatgggacagtgcaccgcaggaagaagaggaggacgtgcagcatggtgggaaacggggacaccacctcccaggacgactgtgtcagcaaagagcgcagctcctccaggtgacccagcaaggctgttgtctgtatggaaggacacgctcgcggcaagggcagggcctggggagggtggcctgtccagtcctgcagacaaggggaggcctgacagagcccaagaatgaggacaccctcggcacgggaacccattcacttagcgtttgctccagtagctttccctctgctaccaatgcagataaacgcggcttgttttactcaggcaagagaatgtgaatagtgccaagaaaatcctttacattatttaataaaaattgaatccattttctaaa

SEQ ID NO: 76278 - DNA, 630 bp, Homo Sapiens
  misc_feature (197)..(231): n is a, c, g, or t
  misc_feature (236)..(236): n is a, c, g, or t
ttttttagttaaaaatgaactcgatatgtttaataaagcttggtattaccaaaatcgcggtacaaacatcaagtcacacgcccacacgacagaattccatttacaaaatgttcctcgggaagcctccaccgaacccgtgcccaaagagagcccgaaccaagcctggggtctctgggtgggcagaaaacgtgagtgcnnnnnnnnnnnnnnnnnnnnnnnnnnnnnnnnnnncaggnaggagggcaagtggagagaaacgcagactcaaaagcagtccatataacagctcaaaaagagccagccggggatattatcacaatgatacagtacatatcaaagcaaaaatcaaaatcattcggctgataacagcaggctacgctgccaagaacccagatggcagccttcttgcggccatccgcacgggcctcctcacccaccatctctcccgtgcgcccactcgcttccctctcgctcactcgcacgcactctctcgctaggaaacacggaaggtattttgtgtttggagctagtaaccttggtcaaacgattcctccgaagagtcgctgaaggaggaacgcgcctcggcctctcgaagcagcagacaaaacgggtgcttcctgctggtggccg

SEQ ID NO: 76279 - DNA, 865 bp, Homo Sapiens
ttcggcacgaggagaaatggataatttcatctactgcctttacttggggttaatgtgattcttaaacaccttcatcatggaactctcagagtggggtccgttttggtttcctggtggtgggttttgaaagataagggaaagcacattttgagcatgtctgggtaccatggtgcggatgcttgggaaccagaactgtttcagaggaatctaaagtctgattttagttttcagagacacagcttgttgtaaaacatgagaagacatgatttctaggactcaagcagcaagccaggattctaggttggctgctgtgtcatctttgaagtcaagacaaagctgggctcgaccttcaagggtcctcgttttgataatacttcagaatagggaactcatgtgaatactactatgtagaaataaaacctagaccttgagcgaacatctgtatattggttgaaaacgatagtggtaaccattgatcccccttcatttgatgtttggaaaattccagtaattatcatttttgcaacgaatatggataccacatagtactttggtgttacctgcttttgaaaaataaagtctttggttcacccggtgaactatttatgagttcttttggtgtgaagaaagggctcatgttgcatttccagccattgctacaaagaacctttatttgttcagtaacggtagaaaatccttcccgattaaaaacttcagacttgctgaatatcctgcaatgtcaagatgaccgatgttgagttgggtggatttgctaacgagtcagatttgaacatgaggctattggaacccaataggcgtcattgatggcggcaagccatagctttcaagttttaataaaatgccc

SEQ ID NO: 76280 - DNA, 1251 bp, Homo Sapiens
  misc_feature (86)..(86): n is a, c, g, or t
  misc_feature (199)..(199): n is a, c, g, or t
  misc_feature (273)..(273): n is a, c, g, or t
gaacgtcaagtgtggtgaagtacaacttatcacattggtcctagaaaatctgatgaactacggtatcacttgatcgtaaatgatcnagagtgtgagtataaacactgtatgtatctcgagctcctaagaattggatagaagcaatccttgacaacagacatcccttaaaagtagtggaatttcccaagtagagtgaganaaggcacttggaactcgcatatgagtgtatcctgtactctatatataaatctgacgaatagaagtaaatatgtntattggtgaaaaagaattccagaacataatggcagatcctagagatccagacgtgtatcatgtattaggtgtatctgggcaattagcgtgtgagattaaggttctgcacatggacccttggtcatcatctgatatatacacccggaaaggaccgctggaaaacccaaagcgtagggaatttttagtccaattacaacaaaagctgtatcgtattcaaatgattcctcgtcaaaatttatttcccaagaacttaacacctatgaactataatatattttttcacttgttaaagcactgttttgggaggcgcagcgccactgtaatagaccacttacgttcattgactccacttgatgcgagagatatattgatgcaaataggaaaacaggaggatgagaaagtagttaacatgcaccctcaagacttcaaaacactttttgaaactatagagcgttccaaagattgtgcttataaatggctgtatgatgaaaccctggaagataggtagcaactagactgtcgtttttggtggagcggttcatttatttggaaactatgacatgaaaaccaaatttgaaaactcacatcctttcagcagaaggtaactgttcttgtcttgcacaagccaggcagatcatttctcctaagctgatatcattggcttattggatgaaacagtgtctgctattttattcacaattgaataaaatgaaaacttcaattaattgtggatttgatcagattgaattcgttttgtttcagattcctatttaaatatttcacttgtactgttgctgatttttgcatcttcttgaagagcaagagtctgtacattattaagcttagaaagtaagcaaaactgatttactggtttgcctttcagtttgttgaaatgtattgtcaagtactgtacaatgaaattgtttaaattttaatatgatttaagctttttagaaattaaaatattttaaataaaaa

SEQ ID NO: 76281 - DNA, 662 bp, Homo Sapiens
  misc_feature (37)..(37): n is a, c, g, or t
caccctccgtatggtcccctgctctgccctcgtgctntgctggcccctgcccgctactcccactctcagacacccaggggtggtgggccctaactggctggcccctcccagcgctgccctctgccgtccagatgctgcagtgtggccagatttaccttccagtaacatacttctagtcacccctcctcctgcgaagtgatctgcagtggctgtttgaccagaccacaaagttcacatctcctgagcttagtgtccgtggctgtccacctcccagccatacttgactgtccccaaactctccctgcagccacatgtttcccatgacctgtgggctctgcagatggacctctctccgctagagatgcccttctcccaaatggcttccctcctggaaggcccagcctgagtcctcgtctcctttccagtgcttctgccagaagcatccccatgatgttgtgaccgcacagcactttgtgtctcgctttgagcacttgccactctggctggtgctgctgccactgattgtgtactgtcttgctgccctttctagactgtgagctcctcgtgggcagggaccgcctgtgttctctgtatttcccacggcgcctagcacagtgccttgcacttgataggtgcttaataaatgtctgctcaactgaaaa

SEQ ID NO: 76282 - DNA, 1358 bp, Homo Sapiens
  misc_feature (1081)..(1134): n is a, c, g, or t
tttcccaccctttaccttggccggcggcgtctgcggccagtgtcttctatcgccataaaagcgatgatgggtattgcctcactaccgtgcgtggtttagtatacgtaattttgtggctccgctcatcgtatatcgattatttaaccaccgttcgctcgttctagcgcctccttttcccacgcccccgacctctcttactcacactcccccgtccccgagctacactctccatctggacttgtgctcgatcattcatacgtcatagcttactgagctcgagcatgtgttgtaagtgcgcgcggtactctacccccgtcttaccgcctcagcctacctttgagagtttcgtgtgtactgccttcgacgagctttctcatgaccgttgagctcaatctctgtaaattcacgacgggagttgtattctgcagtacccccgctgcgccagcgtctcgcttctgcggagctaagtgccccaggggcaacaatccacccggcggtttcctcccgcgggggtttccccgccattcgcctccctattactgcgcccgccactggttcttttccggttcttttatgttttcgcgtgaaagtgggtctacaccaagtacacccagagggtacatggcgacggttacaaggcggattcaaagctttttttctgggggggagttcaccccttacttctttttcaggaagggctaccaggccctttcttggatttgccatgggttttcgcgccaagctttccatgcacctcgccttgccccgtgcatctagcgtgtcccggggtttttcccccccctcgggggcgggtagcagcgcaggcccgacccgcaacagggggtgtacaccccgcagggcatccccaagcccagggcgcaagtggcgcaacagccgcagcccggctctcgcaccagctcctcgcagcccacgggggggcggcagcgcgctagcttctcctcggagcagggcgggcagtggatggcttcgtcgcccaggctcggcccgggcccggcggccagcagcagggcggccacgaggcagaggggcagcatgaccgcccgaggactgggcgcgggcnnnnnnnnnnnnnnnnnnnnnnnnnnnnnnnnnnnnnnnnnnnnnnnnnnnnnncacacggcggcagcgcctggcgctcctggaggacccgacccggagggcgcggggagacggggcggcccggcgggcgaacggggacgtagcgggggaagttagcaggcgtgccggaggggagcaagcctggccgccgaggcgctgcgccgcatcctcggcccggcccaggcaggcggcgggcggcgaggggcagggggccggacgcgtggtcgacgattcccggg

SEQ ID NO: 76283 - DNA, 2107 bp, Homo Sapiens
  misc_feature (893)..(925): n is a, c, g, or t
  misc_feature (1860)..(1938): n is a, c, g, or t
cctaagtctccttcccatccagtcaagccagaagatccccaggggagtagggaggtttggggagggaggtttagggaaaggagatatggagagggaggcagagctacagggagcgagccactggaaggataggttcatcccggtgacttcatggctgtgaccacaaatggggtagggaacaggacccaggaagcccctcatcccctagcacgtgggtcttctccattaggcacattcagtccactcttgcattctttcttcccaccctgactgctcagagaaatgtaccccacctccctagccctctgtgcttcaagtcttcctttgacccccttcgctctcccacagcagggctctcagctgccagccaaccaagcagatggtgcaacaaccagacctaaaggaaggacctggggaagaagagaaagggagcctggcaagtctgagctttgggagtgggtctggacctcgtgaccattactccatctgctaccccacgcttccttaggctcccaccctctggctagcttgagaggaaggacgatggtcaaggtacatgtctcttctcctctgactctgggaatgagatttttctactcccacaggcttgaactctccttataggagtgtctccacatgccaaaatcagaggaagtcagaataaaacctcccaaggctgaaaactagagctggcacgtagtacatggtcagtaaatgtttttaggtggctggatgagtgaaggaatgagtgagtgagtgaatccaggatcgatctggaaacacaccagggctcagacctcttgggctaagtgccagtctcagtcctcttgggctgtgtaacaccaaagagaacaccccaggctctggcttaccccaagggcacacccatgctnnnnnnnnnnnnnnnnnnnnnnnnnnnnnnnnngatcccacgccgctttgagggaaacttctgggccgcaggcagagacaggactcagactcagactccactctgggtcagctctgcagcctccagagcacaggagtagcaggggacgctgagtccctggcctgctggcaggcctcactctcgaaagctgtcagccagctggtggcagtccagctccccctttggctccaggccccccggaagcttcacccccgtcttccggtccacacaccagcacttgccacgctgcccatccagagctgggtgacactgcttggggtggaagttgccgttgcggtcgcagttggggatggggatgatgtagaggtcctcgtgggtgcggctctgtgaagcggccagccgctccagcgcccggtgcagctcgctctggcaggagccctggggcacaggccgggcatcctcccggggcgccccattgaccttcatcttgcccccactggtgctccggtctcgaattttggcgaagtgcttctgcaggcacctgcggtcatgggcgctacaggggctgaagctgttgttggggtggtcaccctcgtccttgtcagagggctgcaggctttcctggatggcctcgatctccgccagctccatgcacacgccttgcccgtgcatcagtgtgtgcaggggcttctccacccctcggggcgggtagcagcgcaggcccgagccgcaacggggggtgtacaccccgcagggcatccccaagcccagggcgcaagtggcgcaacagccgcagcccggctctcgcaccagctcctcgcagcccacgggggggcggcagcgcgccagcttctcctcggagcagggcgggcagtggatggcttcgtcgcccaggctcggcccgggcccggcggccagcagcagggcggccacgaggcagaggggcagcatgaccgcccgaggactgnnnnnnnnnnnnnnnnnnnnnnnnnnnnnnnnnnnnnnnnnnnnnnnnnnnnnnnnnnnnnnnnnnnnnnnnnnnnnnnctggcgctcctggaggacccgacccggagggcgcggggagacggggcggcccggcgggcgaacggggacgtagcgggggaagttagcaggcgtgccggaggggagcaagcctggccgccgaggcgctgcgccgcatcctcggcccggcccaggcaggcggcgggcggcg

SEQ ID NO: 76284 - DNA, 690 bp, Homo Sapiens
  misc_feature (184)..(245): n is a, c, g, or t
gccgcccgccgcctgcctgggccgggccgaggatgcggcgcagcgcctcggcggccaggcttgctcccctccggcacgcctgctaacttcccccgctacgtccccgttcgcccgccgggccgccccgtctccccgcgccctccgggtcgggtcctccaggagcgccaggcgctgccgccgtgtnnnnnnnnnnnnnnnnnnnnnnnnnnnnnnnnnnnnnnnnnnnnnnnnnnnnnnnnnnnnnngcccagtcctcgggcggtcatgctgcccctctgcctcgtggccgccctgctgctggccgccgggcccgggccgagcctgggcgacgaagccatccactgcccgccctgctccgaggagaagctggcgcgctgccgcccccccgtgggctgccaggagctggtgcgagagccgggctgcggctgttgcgccacctgcgccctgggcttggggatgccctgcggggtgtacaccccccgttgcggctcgggcctgcgctgctacccgccccgaggggtggagaagcccctgcacacactgatgcacgggcatggtgtgtgcatggagctggcggatatcgaggccatccaggaaagtgtgcagccctctgacaaggacgatggtgaccaccccaacaacagcttcagcccctgtagcgcccatgactgcaggtgcctgcagaagcac

SEQ ID NO: 76285 - DNA, 695 bp, Homo Sapiens
  misc_feature (577)..(633): n is a, c, g, or t
ggcctgggtggcgaattcggcacgagggattttggcatgtggagacactcctataaggagagttcagcctgtgggagtagaaaaatctcattcccagagtcagaggagaagagacatgtaccttgaccatcgtccttcctctcaagctagccagagggtgggagcctaaggaagcgtggggtagcagatggagtaatggtcacgaggtccagacccactcccaaagctcagacttgccaggctccctttctcttcttccccaggtccttcctttaggtctggttgttgcaccatctgcttggttggctggcagctgaaagccctgctgtgggagagcgaagggggtcaaaggaagacttgaagcacagagggctagggaggtggggtacatttctctgagcagtcagggtgggaagaaagaatgcaagagtggactgaatgtgcctaatggagaagacccacgtgctaggggatgaggggcttcctgggtcctgttccctaccccatttgtggtcacagccatgaagtcaccgggatgaacctatccttccagtggctcgctccctgtagctctgcnnnnnnnnnnnnnnnnnnnnnnnnnnnnnnnnnnnnnnnnnnnnnnnnnnnnnnnnngggcatcttctggcttgactggatggaaggagacttaggaacctaccagttggccatgatgg

SEQ ID NO: 76286 - DNA, 399 bp, Homo Sapiens
  misc_feature (306)..(346): n is a, c, g, or t
agtttcgacggtatactctccttattggtagtgtctactactatgccaaaatcagagagtaagtctagaataaaacctgcccaaggttgaaacactagagctggcacgtattacatagtctcgacatgtattaaaccctggcgggatgagtgaaggaatgagtgagtgagtgaatccaggatcgatctggaaacacaccagggctcagacctcttgggctaagtgccagtctcagtcctcttgggctgtgtaacaccaaagagaacaccccaggctctggcttaccccaagggcacacccatgctnnnnnnnnnnnnnnnnnnnnnnnnnnnnnnnnnnnnnnnnngcgcatttgagggaaacttctgggccgcaggcagagacaggactcagactcag

SEQ ID NO: 76287 - DNA, 1474 bp, Homo Sapiens
  misc_feature (360)..(433): n is a, c, g, or t
  misc_feature (448)..(496): n is a, c, g, or t
  misc_feature (703)..(733): n is a, c, g, or t
  misc_feature (747)..(770): n is a, c, g, or t
cagtctttctcttttgcggttttggccgtgccctgtcttctgttgtgtgcagtcctttctctgtcttcctgtccttgcttcttctgcctgtcgctcgtcggtcgtggtgttgggtgcgtccgttgtgttggcgtttcgcttcgcttgtttcgtgtctctttctttgcttggcttccttgatgtcttgggcttgtgtgtcctgttggtgctgtttctcgctccctggtgtcgttgcctatgtttgctgctgcttttttcggctggtctgtgggacaggtttcggttgtgtgtcttgtcctcgttcctttttcgctttgtctttgttctcttctgtatttgcgcatttcagagcaccccggnnnnnnnnnnnnnnnnnnnnnnnnnnnnnnnnnnnnnnnnnnnnnnnnnnnnnnnnnnnnnnnnnnnnnnnnnncctagtacagccgtnnnnnnnnnnnnnnnnnnnnnnnnnnnnnnnnnnnnnnnnnnnnnnnnncaatatgtcaccaccaaccagaagtaaggttccttcaccaagatccccagctagccacgttttgccccagtcacgacgttggttaaacgacggcccagtgcctagcttattatacgactccacgtatagggacccacctttgtaccagaaagctgggtacgcgtaaacttggccccctcgagggatacttctagagcggccgccccnnnnnnnnnnnnnnnnnnnnnnnnnnnnnnngttctgttttgttnnnnnnnnnnnnnnnnnnnnnnnncatcatggccaactggtaggttcctaagtctccttccatccagtcaagccagaagatgcccaggggagtagggaggtgtggggagggaggtgtaggggaaggagatatggagagggaggcagagctacagggagcgagccactggaaggataggttcatcccggtgacttcatggctgtgaccacaaatggggtagggaacaggacccaggaagcccctcatcccctagcacgtgggtcttctccattaggcacattcagtccactcttgcattctttcttcccaccctgactgctcagagaaatgtaccccacctccctagccctctgtgcttcaagtcttcctttgacccccttcgctctcccacagcagggctctcagctgccagccaaccaagcagatggtgcaacaaccagacctaaaggaaggacctggggaagaagagaaagggagcctggcaagtctgagctttgggagtgggtctggacctcgtgaccattactccatctgctaccccacgcttccttaggctcccaccctctggctagcttgagaggaaggacgatggtcaaggtacatgtctcttctcctctgactctgggaatgagatttttctactcccacaggcttgaactctccttataggagtgtctccacatgccaaaatcagcctcgtgccgaattcgccacccaggcctcgctac

SEQ ID NO: 76288 - DNA, 1271 bp, Homo Sapiens
  misc_feature (967)..(1026): n is a, c, g, or t
tgctgtaatataaacccagttttcaaaaagcaaggctgtacggtccggatattcccgggatatcgtcgacccacgcgtcggctgctggcctgcgggccctgggccgagcctgggcgacgaatgccatccactgcccgccctgctccgaggagaagctggcgcgctgccgcccccccgtgggctgcgaggagctggtgcgagagccgggctgcggctgttgcgccacttgcgccctgggcttggggatgccctgcggggtgtacaccccccgttgcggctcgggcctgcgctgctacccgccccgaggggtgggagaagcccctgcacacactgatgcacgggcaaggcgtgtgcaatggagctggcggagatcgaggccatccatggaagagcctgcaaccctctgacaaggacgaggtgtgaccaccccaacaaaagcttcaggcccctgtagcgcccatgaccgcaggtgcctgcaggaagcacttcgccaaaattcgagaccggagcaccagtgggggcaagatgaaggtcaatggggcgccccgggaggatgcccggcctgtgccccagggctcctgccagagcgagctgcaccgggcgctggagcggctggccgcttcacagagccgcacccacgaggacctctacatcatccccatccccaactgcgaccgcaacggcaacttccagcccaagcagtgtcacccagctctggatgcgcagcgtggcaagtgctggtgttgtggaccggaaggacgcgcgtgaagcttccggggggcctggagccaaagggggagctggactgccaccagctggctgacagctttcgagagtgaggcctgccagcaggccagggactcagcgtcccctgctactcctgtgctctggaggctgcagagctgacccagagtggagtctgagtctgagtcctgtctctgcctgcggcccagaagtttccctcaannnnnnnnnnnnnnnnnnnnnnnnnnnnnnnnnnnnnnnnnnnnnnnnnnnnnnnnnnnnccttggggtaagccagagcctggggtgttctctttggtgttacacaggccaagaggactgagactggcacttagcccaagaggtctgagccctggtgtgtttccagatcgatcctggattcactcactcactcattccttcactcatccagccacctaaaaacatttactgaccatgtactacgtgccagctctagtttcagccttgggagggttcatcctgacttcctctgattcaggcatgtg

SEQ ID NO: 76289 - DNA, 446 bp, Homo Sapiens
  misc_feature (65)..(121): n is a, c, g, or t
gacatcatggccaactggtaggttcctaagtctccttccatccagtcaagccagaagatgcccannnnnnnnnnnnnnnnnnnnnnnnnnnnnnnnnnnnnnnnnnnnnnnnnnnnnnnnncagagctacagggagcgagccactggaaggataggttcatcccggtgacttcatggctgtgaccacaaatggggtagggaacaggacccaggaagcccctcatcccctagcacgtgggtcttctccattaggcacattcagtccactcttgcattctttcttcccaccctgactgctcagagaaatgtaccccagctccctagccctctgtgcttcaagtcttcctttgacccccttggctctaccacagacagggtcctagtggcagccaaccagcagattgtgaacaaccagacctaagggaggaacttgggaagagaaaaag

SEQ ID NO: 76290 - DNA, 553 bp, Homo Sapiens
  misc_feature (214)..(254): n is a, c, g, or t
ctaatcgagctcggtaccagttcgacggagactctcgaaagctggactgccaccagctggctgacagctttcgagagtgaggcctgccagcaggccagggactcagcgtcccctgctactcctgtgctctggaggctgcagagctgacccagagtggagtctgagtctgagtcctgtctctgcctgcggcccagaagtttccctcaaatgcgcnnnnnnnnnnnnnnnnnnnnnnnnnnnnnnnnnnnnnnnnnagcatgggtgtgcccttggggtaagccagagcctggggtgttctctttggtgttacacagcccaagaggactgagactggcacttagcccaagaggtctgagccctggtgtgtttccagatcgatcctggattcactcactcactcattccttcactcatccagccacctaaaaacatttactgaccatgtactacgtgccagctctagttttcagccttgggaggttttattctgacttcctctgattttggcatgtggagacactcctataaggagagtctccgtctaaccgggccg

SEQ ID NO: 76291 - DNA, 415 bp, Homo Sapiens
tgcttatgaacccatttaattgctcagactgtgctagagaatacgtaccatgaaatacatatatttcataaggttcagttacaaaatggattgtttcaaatggcaatttcttacactaacctgattatgaaaaaaagaagtctgtatcatctgcttccaagtctgttatgtccaaatatattttaattatgcatttattttgctacttttataaatattagagatttcaccttaaattatttttgtaactagttctagaacatgttttccaattattatttttctaatgggagacatataattgaccctatgtttatggcatatatggttctctacacagtggaaactttttttaaaaaggaataggtaaaggaaaatgcgggacgtcctgggctctcccagggcaaagtccaaa

SEQ ID NO: 76292 - DNA, 688 bp, Homo Sapiens
  misc_feature (265)..(281): n is a, c, g, or t
ggtgatgtaaaaccaactccctgccaccaaaataattaaaatagtcacattgttatctttattaggtaatcacttcttaattatatgttcatactctaagtatcaaaatcttccaattatcatgctcacctgaaagaggtatgcactcttaggaatacagtttctagcattaaacaaataaacaagcgcgcgaagaaaataaaactcaagcgagtgaaaatcagcgacgcgtcgaaataaaatgttcctcgcattcccccccgcnnnnnnnnnnnnnnnnngactttgccttggagagccagagcttccgcattttctttactattctttttaaaaaaagtttcactgtgtagagaacatatatgcataaacataggtcaattatatgtctccattagaaaaataataattggaaaacatgttctagaactagttacaaaaataatttaaggtgaaatctctaatatttataaaagtagcaaaataaatgcataattaaaatatatttggacataacagacttggaagcagatgatacagacttctttttttcataatcaggttagtgtaagaaattgccatttgaaacaatccattttgtaactgaaccttatgaaatatatgtatttcatggtacgtattctctagcacagtctgagcaattaaatagattcataagcataaaaaa

SEQ ID NO: 76293 - DNA, 909 bp, Homo Sapiens
  misc_feature (557)..(557): n is a, c, g, or t
tatggctgtaacgagtgtgggaaagcgtttgcgtatatgtcgtgtctggttaagcataagagaatacacacaagggagaaacaagaggcagccaaggtggaaaatcctcctgcagagaggcacagctcattacacaccagtgatgtcatgcaggagaaaaactctgctaacggggcgactacacaagtgccttctgtggcccctcagacaccattaaacatcagcgccctcctcgcaaacaggaacgtagtccttgtgggacagccagtggtcagatgtgcagcctcaggagataacagaggatttgcacaggacagaaaccttgtgaatgcagtgaatgtggttgtgccttccgtgatcaattatgtcttattttatgttacagaaaacccataggaagaaaactcagatctatgtggaaaagggttgagcaaaaatttgtagttcattatgtggccgaaaagcatacactgagagaacatgtataaggctgagatagcctgataaactcatcctattaaaatgtatgctgtgatacacaggcaaatttgatgttnacctaagcacatacacagcaattgctcgactgtgtcaattaaatgagtaaaggaagcccaagtacttttaagtggaggaaatgaagtactgtgaatttttaaaacagatgagataattggtgtcgggagtgttgcagtgactgaaaagcttcataaggggcagttggtgggaaagggctaatactgtaatggtggaatgtgggacacatatgtgtcaattcagtttccttagaccagtgccagtgtggaggattaattgaaaaccaggaccataaactttcagaactttgtattatgcagagggatctgtgaaactagtcaatttgtttcattaaacaaatattttaaaatt

SEQ ID NO: 76294 - DNA, 920 bp, Homo Sapiens
  misc_feature (129)..(129): n is a, c, g, or t
ccaacagccgggctggcctttagccttgagctgatcgggggatggcctctcctccacccaaggcaatctacaccattccagacctttattaaggaattttggaagggggatggaaaaattggccaccancccccaccaataatggacattgtcgtcatgcaaggtgtaattgctgctgtggccattcgtcctagtctccatcctcttcgtcatgctgcgctacatgtaccggcacaagggcacgtaccacaccaatgaggccaagggcacggagtttgctgagagtgcagatgcagccctgcagggagaccctgccctccaagatgctggtgatagcagcagaaaggagtactttatttgagggacaacagacttcacttccctgaatgcctcccccatctccatcaggaaaaatacaccccatcgcccagcacccctgctgataccaccagacagagagagagagcacttgattcttcccgagatagccacctggaaacactaggtgcctgcccagggaggaacggaggaggactcgcgctacaagaggccactcccagggacccagggaggcgatggccaccccagaggccaccttttgctccacggaggtgggagaaaatctgggcacatggggccccctgggcagtgcaggacaacatcagctcactggcaggaaagtccttgttgagggtgagggggtgctggggtacccgggggctggggaagcaaggaaataagtcatctgtatgctgactggggataatggcatcaaatgtcagtccttgacatttggggggaacagcaggtgccagagctaaaaggtacctttgtctgccattgatccagctcagaacgattggaaataaatttgaaatgtaacctacagagaaacaaaccacaccaacaaagaaccctgt

SEQ ID NO: 76295 - DNA, 551 bp, Homo Sapiens
tgcggccgccgagggtcaggagcccgggagcgcgaccctcccccggcccggcctggcccggcctggccagtccccgcggtctctgcccgggctgacgcccaggaatgtggtcgacgagaagccccaacagcacggcgtggcctctcagcctcgagcctgatccagggatgtctggatggccggatggcagaatggagacctccacccccaccataatggacattgacgacattgcaggtgtgattgctgctgtggccatcgacctagactccctcctcttcgtcatgctgcgctacatgtaccggcacaagggcacgtaccacaccaatgaggccaagggcacggagtttgctgagagtgcagatgcagccctgcagggagaccctgccctccaagatgctggtgatagcagcagaaaggagtactttatttgagggacaacagacttcacttccctgaatgcctcccccatctccatcaggaaaaatacaccccatcgcccagcacccctgctgataccaccagacagagagagagagcacttgattctt

SEQ ID NO: 76296 - DNA, 1013 bp, Homo Sapiens
  misc_feature (349)..(364): n is a, c, g, or t
  misc_feature (545)..(929): n is a, c, g, or t
  misc_feature (932)..(932): n is a, c, g, or t
  misc_feature (951)..(951): n is a, c, g, or t
  misc_feature (959)..(960): n is a, c, g, or t
  misc_feature (990)..(990): n is a, c, g, or t
gtatgagcaccctctaaggaagcagtctttatttgcatttttagagtgaacacatatatgaaaaacactgcaacaggttgacacaatgctcagtccctttttaagtgaattcctggggagaaagtcaaggaccttagggagcagagcagtggaatgcaaacacagaaattacctatgagtcacttttgtgagccaatgacacggcctcactgcagccattccaagaagtatctttgctcacggtaaatgcaaagtaaacaaaataccacactgcatatttgaaacaaacaaatgtgacgttgcctatactggcctcatgtgcagaaggaattttggtcagacaatgacnnnnnnnnnnnnnnnncagattgtgaaatggaattaaaagcacaattctttgtatctgggaacgtttcactggcaacactaactgtatgatacagacgttacctggaacagtagttatgtttctcttcctatccccaaagaagcacaatagaagaaatagacgcaaaatggaggagggtcctcgtgccgaattcttnnnnnnnnnnnnnnnnnnnnnnnnnnnnnnnnnnnnnnnnnnnnnnnnnnnnnnnnnnnnnnnnnnnnnnnnnnnnnnnnnnnnnnnnnnnnnnnnnnnnnnnnnnnnnnnnnnnnnnnnnnnnnnnnnnnnnnnnnnnnnnnnnnnnnnnnnnnnnnnnnnnnnnnnnnnnnnnnnnnnnnnnnnnnnnnnnnnnnnnnnnnnnnnnnnnnnnnnnnnnnnnnnnnnnnnnnnnnnnnnnnnnnnnnnnnnnnnnnnnnnnnnnnnnnnnnnnnnnnnnnnnnnnnnnnnnnnnnnnnnnnnnnnnnnnnnnnnnnnnnnnnnnnnnnnnnnnnnnnnnnnnnnnnnnnnnnnnnnnnnnnnnnnnnnnnnnnnnnnnnnnnnnganatgtgagcaaaggcagcanaggcaagnnacgtaaaggcgcgtgctggcgttttcaaangtccgcccctgacagcatcaaaa

SEQ ID NO: 76297 - DNA, 948 bp, Homo Sapiens
  misc_feature (142)..(158): n is a, c, g, or t
  misc_feature (247)..(247): n is a, c, g, or t
cactgcagccattccaagaagtatctttgctcacggtaaatgcaaagtaaacaaaataccacactgcatatttgaaacaaacaaatgtgacgttgcctatactggcctcatgtgcagaaggaattttggtcagacaatgacnnnnnnnnnnnnnnnnncagattgtgaaatggaattaaaagcacaatttctttgtatctgggaacgtttcactggcaacactaactgtatgatacagacgttaccntggaacagtagttatgtttctcttcctatccccaaagaagcacaatagaagaaatagacgcaaaatggaggagggtgttgttttaccaggttatttcagtgcagcctgtgggaatgaatacacgggccacagtgagcagtgcccttggctgtattccccagggttctgtatgttgtgcgatggttatatacaagagggtttgacaaaagagagttaactactaaaggtatccaaaaaaggcctgagaaaatctggttaaaatgtataaccttgtattgctactgatgggagttgtttttatatcttttacaaataataaaaagattgttaaaaaatagatttatccagaaagatgttgatttgaactctaaaaagcaacgtggaatcattattttcccttttgaatgaagagccatggagctccgtggttttcagctccctttctggttgcaaatcaatccttcctctggagtgagtctagggcatgcgggctcttcctaggtgtctacgtggaaatccttcactcatgcaggtgtagaacacacctggtttggttctgtgtgttccaatattttggccagcttgcccacttcaagaacaagcctcaggttcccctagctgctccttcagggacaggattagctgcctttgatttagcctggagaatcctgctctcaaaagaattgcctttacaaattccc

SEQ ID NO: 76298 - DNA, 969 bp, Homo Sapiens
acactcgcctgtgtcttcggttggcggctcggacggagttcatttgtttggctgaggtggcggcgttggcggagggacacacacacgcacacgcacagcgagcttcggggcaggagaaaggggtcccacaaactgcaaggaaaagaaaaaccctcaacaggaattacctttatacctgatgcccccaacataatctctctccaagggaaacgtgtttttattgccttgcggctgaaaatgtattctcgattctcccccttctctcttttgttgtgcattttttggatgtggtaaaactggcagtttatctgattatctggttttcagaactttgggcgatgtctctgagtgtcatcagttgctctctaggtttgacatagataattaagcaactacaaagcgtgataaagcttttgagagggaggaaaatgtattttggaaggagggagagacgcaaagaggcgagcctgtgtgttgagtcccagacttggtgtgtgactacaggcaaagtacttcacctttctagatgtcagccccgcccccctcacctcccaagtttaaataagaacttattttagactacatgatcctgttttcaatttttaagagttctgtgattttgagatgatctctctttagtccagaaaaatagagaaacgtaggtctatgtttgtttctcaaaaaaatatttgaggaggacagctgttacaaaacagctggagaactccaaatttttatggtggttagctaggtgcaaatgggtacaattttaggtttgttcaaataaacataggggaaaagtaaaagtacaggaaaattacgttatacatataagtgtgtccatcatttctgatttttctaaaaatttacttttttatttgacaagtactttttggctccttccgtgtatgcattaatatgtatataaggtgttatgggaaatactaataaaaggaaaatattgggcat

SEQ ID NO: 76299 - DNA, 635 bp, Homo Sapiens
  misc_feature (491)..(514): n is a, c, g, or t
  misc_feature (615)..(615): n is a, c, g, or t
gtagaataggaaaaggtgtgagggacacacagatacacattgctaaaaacctacaatggtttgtcctaacaaaaataatatctttttttctcttctcttaattatcatcatggatccatttatttttggggtctgggtggagaaaattcaacaggagctagaaatggaggttgcaatgccaagaatggctgggtagaaaatgtgaccacagggagccctgggcctcttctggtgaaattggacttctcaaaattttctgggtcactgttgctaacaagattgtgtggagttttactgtattgggattttggctgctctttccccagagttagggtattctcaggggggacagcatctgaagagctccaaaagcaaacagaagagctcagggcccatcgatactcaacaaggccagtggttggggccagcaaaaaaccagggtagggacagcagactggcaggaatgagtgacagttctatgcaaatggagnnnnnnnnnnnnnnnnnnnnnnnnataagggcaggtttgtaccagaactgcccagtatggcctgtgacttctgcgcagcattatttctccagggacagggcctgaagctactcacagtgatgcanaaaatgggattcccactaac

SEQ ID NO: 76300 - DNA, 1137 bp, Homo Sapiens
cagtcgacggtgaccggacatatgcccgggaattcggccattacggccgggggaacttagggctgcttgtggctgggcactcgcgcagaggccggcccgacgagccatggttgctgggagcgacgcggggcgggccctgggggtcctcagcgtggtctgcctgctgcactgctttggtttcatcagctgtttttcccaacaaatatatggtgttgtgtatgggaatgtaactttccatgtaccaagcaatgtgcctttaaaagaggtcctatggaaaaaacaaaaggataaagttgcagaactggaaaattctgaattcagagctttctcatcttttaaaaatagggtttatttagacactgtgtcaggtagcctcactatctacaacttaacatcatcagatgaagatgagtatgaaatggaatcgccaaatattactgataccatgaagttctttctttatgtgcttgagtctcttccatctcccacactaacttgtgcattgactaatggaagcattgaagtccaatgcatgataccagagcattacaacagccatcgaggacttataatgtactcatgggattgtcctatggagcaatgtaaacgtaactcaaccagtatatattttaagatggaaaatgatcttccacaaaaaatacagtgtactcttagcaatccattatttaatacaacatcatcaatcattttgacaacctgtatcccaagcagcggtcattcaagacacagatatgcacttatacccataccattagcagtaattacaacatgtattgtgctgtatatgaatggtattctgaaatgtgacagaaaaccagacagaaccaactccaattgattggtaacagaagatgaagacaacagcataactaaattattttaaaaactaaaaagccatctgatttctcatttgagtattacaatttttgaacaactgttggaaatgtaacttgaagcagctgctttaagaagaaatacccactaacaaagaacaagcattagttttggctgtcatcaacttattatatgactaggtgcttgctttttttgtcagtaaattgtttttactgatgatgtagatacttttgtaaataaatgtaaatatgtacacaagtg

SEQ ID NO: 76301 - DNA, 1028 bp, Homo Sapiens
  misc_feature (955)..(963): n is a, c, g, or t
gctaggtagcgaggctgggggtgaatcggcacgaggcggacggaggtagaggccagggcagcgcgtccgggagcggagtccgcgcccgccgccgccatgccggacagctgggacaaggatgtgtaccctgagcccccgcgccgcacgccggtgcagcccaatcccatcgtctacatgatgaaagcgttcgacctcatcgtggaccgacccgtgaccctcgtgagagaatttatagagcggcagcacgcaaagaacaggtattactactaccaccggcagtaccgccgcgtgccagacatcactgagtgcaaggaggaggacatcatgtgcatgtatgaagccgaaatgcagtggaagagggactacaaagtcgaccaagaaattatcaacattatgcaggatcggctcaaagcctgtcagcagagggaaggacagaactaccagcagaactgtatcaaggaagtggagcagttcacccaggtggccaaggcctaccaggaccgctatcaggacctgggggcctacagttctgccaggaagtgcctggccaaacagaggcagaggatgctgcaagagagaaaagctgcaaaagaggccgccgctgccacctcctgaggcagctgtgggtgcccctgctgtgtggctctgtatgactgttgctgaaatataaagccctgcaacctgcaaaagaaaacgccgctgccacctcctgaggcagctgtgggtgcccctgctgtgaggcactctatgactgttgctgaaaaaaaaagcactgaaacctggcactgggccatacctgggttccggaccccgcttttcttggacaaaggggggaaaatctggcgggcttccccaaagggggggcgtatttattttcgaaaagcccgggttaccctgcataaatgggatcgggtggggaacccggggaatttaaccccgcctaatggagcggggnnnnnnnnnggggatccaaagggatctttctggaagaccctttttttcccgggaagaattctggcgtttttgcg

SEQ ID NO: 76302 - DNA, 1849 bp, Homo Sapiens
  misc_feature (74)..(74): n is a, c, g, or t
  misc_feature (246)..(246): n is a, c, g, or t
  misc_feature (248)..(248): n is a, c, g, or t
  misc_feature (274)..(274): n is a, c, g, or t
  misc_feature (311)..(311): n is a, c, g, or t
  misc_feature (360)..(360): n is a, c, g, or t
  misc_feature (571)..(571): n is a, c, g, or t
  misc_feature (576)..(576): n is a, c, g, or t
  misc_feature (616)..(616): n is a, c, g, or t
  misc_feature (619)..(619): n is a, c, g, or t
  misc_feature (621)..(621): n is a, c, g, or t
  misc_feature (663)..(663): n is a, c, g, or t
  misc_feature (689)..(689): n is a, c, g, or t
  misc_feature (700)..(700): n is a, c, g, or t
  misc_feature (747)..(747): n is a, c, g, or t
  misc_feature (766)..(766): n is a, c, g, or t
  misc_feature (792)..(792): n is a, c, g, or t
  misc_feature (851)..(851): n is a, c, g, or t
cgagaaagagaacggcggggcgcgctctactttattctctctatacagagggggtgtgctagcagatgaagaanagattagcgtgttgtttttattggttatcattgcgcacacgtaaatcactctcgtgtgcgcgagatgtgggtcctccatccctcaccgtgtcgtgctggattttcgacgagaatgctcgccgcaaaataatatgtatgggcggacgcggctttgtaattgttgtggtcaccncnggtgtctctatgtttgcgcccacgcntatgtgggcacagaaacactgtgttcttatggtctcncgcatacgcgtgtagcgctacgagcagggtggcgtgtgtttaccggggncgcgccgcttgtgcgcctgggtgtgttcctcgaccgtatgttgtctccacatgcttggctcgcggcgcgcattttctatggaggacgcgtatcgggttttgtcgccgcagagtgtgtcaggcgcgcgcgagtattgtgtctttttgtgagacattgactggtatgtgtgcgagcgtgtcacatccatcgtgtacgggggcaggcgtattanagacncgggtgacataactgacacacgcgccgggggccacgcgtntancnacatctatgcgcgatgatgttatcagcgagaagcggtttccnagcgcgatcacggagcgatcggtccncctcgctcttnttacacattgagatatgtgtcaccacgcgcggtggtagtacatatancctcgtcgggcgcgaaganagatgtgctcccatattcggcgcggnagattatgtgttgtacacaaagccggctcctgcggagtggattcgccacgcccacacgnaagtattgtatattacattgggtggcgagagagggtatcgcaaaggcgccgctgtatcgtggtgggggccccgggatgttttcttttgtggggaaaaccgcgcggtattggggcgcggtgttccgattgtgcgagtaattgtggcgcccgcccgcgggcagagaggaagaattggtcttgggaaagattcttttgtggggtgcccgaagcgggcgccgacagaggcacgtatgaagatggatgatggtggttgagagaggcgtatagggcaccacgatggggtcgttagtgggggcaggtgggggagggtagaagtgggaagtgggtagtcaggttgcagggctttatatttcagcaacagtcatacagagccacacagcaggggcacccacagctgcctcaggaggtggcagcggcggcctcttttgcagcttttctctcttgcagcatcctctgcctctgtttggccaggcacttcctggcagagctgtaggcccccaggtcctgatagcggtcctggtaggccttggccacctgggtgaactgctccacttccttgatacagttctgctggtagttctgtccttccctctgctgacaggctgggagccgatcctgcataatgttgataatttcttggtgggctgtgctccacactcccagcatggctcacgtactagtccctcttccactgcatttcggcttcatgcatgcacatgatgtcctcctccttgcactcagtgatgtctggcacgcggcggtactgccggtggtagtagtaatacctgttctttgcgtgctgccgctctataaattctctcacgagggtcacgggtcggtccacgatgaggtcgaacgctttcatcatgtagacgatgggattgggctgcaccggcgtgcggcgcgggggctcagggtacacatccttgtcccagctgtccggcatggcggcggcgggcgcggactccgctcccggacgcgttgccctggcctctccc

SEQ ID NO: 76303 - DNA, 730 bp, Homo Sapiens
tataattaagaaagcagattagatgcacatggtcaacaggaagttgactgtatgtctgctagttagattcaaaacatcataaagatgatagcatgtcaatatattagcctagccattatgttagcctttgttaggtgggcagcttttctgctttttcccttcctctgtggtgacaacggaggaaatatccaacagaaatacatctaacagggaaattgggatcatagtttatatgcatctgatttgaaaggagtattgaggaaggttttcatatatgatctatctttggattaaaaagaacatttatgaaatcaagccttctaacactagttataattgagaagcaacagtaactccgtggacagcaatcaagcttaaaattgtaaataaatatggggataattcagttgttgcaaaaaaagggcagaattcagtagaataaagtccttttctcttacaggtattaaatgaggacagagaacctcaggtgttcttatgctagtgcttgctgagtgcatactaagaaagcaattccaaatagatgtatacatctagagagagtggtattagagattcagtgtatgtatttatttacatgagaggaaactggaatataatcccataaattatcaccttttatgactggaaaatatttgccaatgaagaaatggtctgtaggtatttgtcttaagatttttggctgtttaataaaaatgtaactttaacggtt

SEQ ID NO: 76304 - DNA, 1700 bp, Homo Sapiens
  misc_feature (72)..(106): n is a, c, g, or t
gaaatgatagatcatataggggcccgtgatagcgaagacgagcgcagcgagttttgagcgaggaagcggcgnnnnnnnnnnnnnnnnnnnnnnnnnnnnnnnnnnncagtcgacggtgaccggacatatgcccgggaattcggccattacggccgggggacgtgtacttctgtttctcagctttatctggatgttatcagatcacagaccatggtctcagggttttgactctgggaggagggctgccttatttggagcaccgttaatctctctggttgtcttactataaatggtgcagccctgcaggatatggttcaagcatgtccttctctgaatgatgaatacttttactactgtgacaacagtaacggtcctcatgctgataccgccagtggatgccagaatttgcagtgtggttttcgagcctgctgccgctctggcgaatgacccttgacttctgatctttgtctacttcatttagctgagcaggctttctttcatgcactttactcatagcacatttcttgtgttaaccatccctttttgagcgtgacttgttttggccccatttcttacaacttcagaaatcttaatttaccagtgaattgtaatgttgtttctcttgcaaattatacttttggtttagaaagggattaggtcttttcaaaagggtgagaacagtcttacatttttcttttaaatgaaatgctttaaagaatgttggtaatgccatgtcatttaaagtatttcatagataattttgagttttaaagtccatggaggtgattggttctctttacacattaacactgtaccaagctttgcagatcttttccgacacacatgtctgaagacttattttcaaagacagcacatttttggaaactaatctcttttccgtaatatttcctttatttcaatgattctcagaaggccaattcaaacaaacccacatttaaggttctttaggattatagaataaattggcttctgagtgttagctcagtgagctaggaaagcaccaatcgatatttgtttcctttagggatactttgttctcaccactgtccctatgtcatcaaatttgggagagattttttaaaataccacaatcatttgaagaaatgtataaataaaatctactttgaggactttaccaagtaatactgttgtgttgtgattttattataaatctcaatccaggtttactttagtatagaataggactacatactttgtctttggacctcccatgaacttattaccctgacaaatagttttagacagatactgaattttattgagctgaattttctttttgaaatgagttattcagtagtcaaaatttgaatccgtaagtatatctactttgctttgttaaaacatcatgagagtggaggcctgccacccagaaaggcacatactagtgccttttagtacaattttatgtcatgtagaagaaaatggcaatgttcctcctattgatacagatacaggcatatgtcatcttattgcgttttgctttattgcactttgcaaataatgcattttttacaaatggaaggtttatggcaactctgcgttgagccagtctattggtgccatgtttcccaataaaacttctcctttcatgtctcgtatattgtgataattcttggagtatttcatagtttttccctattattaaatctgttgtggtg

SEQ ID NO: 76305 - DNA, 720 bp, Homo Sapiens
ataggaatgaatctggctttagggttaaatcatttaaggtccttttataggcaggcactagtaactaaaactgaaaactaagtaagtttatttttgaggaatgttgttaaaaatgtctttaggaagtcactaaaacttaattggaagaaaaaatcatgatgcttatacaataaatatgaataaatgttatataaggaaactcacctatttgaaatcatggctatattgtttttattttctagattccaaaaatacaaacactagttgttccagcattgtactttgataagtctgtacattgacgtgtatggactaaatccagggtaaaatcaatgttacaaaatttaagggtatgttaactaaaggatagcatttctaagatattttgaatattagggtcatttggcacttctcagcaagtaggatacttctcatgttttgaaattatatgaatatggaaaaaaatggcttaagaccagcgtctctgtatgacattgtgtggttgaccctctgagataactgttttcatctacagaattgcatttttgcttttaaagaggtcttataatggaactaggaatcaccgttttgagagaacctgcatatataccagtcattatctgtttggtccttatacagttttaacttacttagatttattctagttaagccataagttcaacgtgtaaacttgttttcattaaagaatttttctatcaa

SEQ ID NO: 76306 - DNA, 986 bp, Homo Sapiens
cagggggctttatttttgacgggtttagggtcggaacagaagggggtttttggaaattttcccatccaaattaattaaacttaaaccccacccaaatgggggattactagcggtaaatgccaaatacttccattcccccttaacaaaggaccaaaaggtctttgactccaagaagaaagtgaaattaaccaatgcggaaggagtagagtttaagcttttccaagaaacaactacaagctatagaatttaacaaagctttacttgctatgtacacaaaccaggctgaacaatgccgcaaaatatctgccagtttacagtcccaaagtcccgagcatctcttacctgtgttaatccaagctgcccagctctgccgtgaaaagcagcacacaaaagcaatagagctgcttcaggaattttcagatcagcatccagaaaatgcagctgaaattaagctgaccatggcacagttgaaaatttctcaaggtaatatttctaaagcatgtctaatattgagaagcatagaggagttaaagcataaaccaggcatggtatctgcattagttaccatgtatagccatgaagaagatattgatagtgccattgaggtcttcacacaagctatccagtggtatcaaaaccatcagccaaaatctcctgctcatttgtccttgataagagaagctgcaaacttcaaactcaaatatgggcggaagaaggaggcaattagtgacctacaacagctgtggaaacaaaatccaaaagatattcacaccctggcacagcttatttctgcttactcacttgtagatccagagaaagccaaagctcttagtaaacacttgccatcgtcagatagtatgtctctaaaagtagatgttgaggctcttgaaaattctgctggtgctacatacattcggaagaagggtggaaaagttactggagatagtcaaccaaaggaacaaggacagggagatttgaaaaagaag

SEQ ID NO: 76307 - DNA, 1014 bp, Homo Sapiens
  misc_feature (16)..(16): n is a, c, g, or t
  misc_feature (101)..(101): n is a, c, g, or t
  misc_feature (753)..(766): n is a, c, g, or t
agggctcagatgttcncaaacatggcacagactttttggaatataaatgtcgctactgctgttcagtggctgtttttttctgttttggaacaacacatttntgtaatgcttgtcatgatgattttcaaagaatgactagcattcctaaggaagaactaccacactgtcctgcaggtcccaaaggcaagcagttagaaggaactgaatgtccactccatgttgttcatccacccactggggaagagtttgctctgggatgtggagtgtgcagaaatgcccacactttttagaacacgcagatcctttgtctacagagagaaaaattgccttcatcccccaagaggatgcggtgaagtttaaactctgctcaggataaggacgggaccatttttacatccatgaaaatgaaccattcacagtgcaagaaggataccaaataccatgtacataattcttgctatgaaaagtttccccattattttggtttatcttcttttgaacaaatgacatcaaacttgtgaggtgtttgcatgtggccattaccgtcattggcctgtgaagcattggacatttatagataattgatataaaagaatcgccatgcccatggactaagaacgatgctggctttcaagcaaaaaagaaaaataatcattgtttattgtatactgcctttttgtaatcctgtacaattgcatcacgggtggggataaaaagaggaatattctggtttatttcctagactgttatttnnnnnnnnnnnnnncattgtgttaggacagcatataaatgtaataagtatcacactgtatataaacatatcaatgtttgtcctgtataagaattactaaattacaaatgcaatttcatttaaacttctaggttaagtttgagcctgaaattttaatgaagtgcaatactgagtgtgcctcattatcttgcagctgtaaacatattggaatgtacatgtcaataaaaccactgtacatttttatacagtgataaagtcaaaaa

SEQ ID NO: 76308 - DNA, 1611 bp, Homo Sapiens
  misc_feature (41)..(75): n is a, c, g, or t
ccgacgagcgcagcgagtcatgtgagcgaggaagcggccgnnnnnnnnnnnnnnnnnnnnnnnnnnnnnnnnnnncagtcgacggtaccggacatatgcccgggaattcggccattacggccgggcacgctgcaattctcatctgcaggaagcactggcctccttcatccttaggctacagtgctgacactggcctccttcatcctcagactgtggtgccagatgtcacccctctgcgaggcccttgggatcgactgagtgaccagcagtgaagttcgtcagccttctgaatggatgccatgatcagatgtgatggagctcagtgggatgctgctgctttccctcccttagctaggatgtccctgataaaggatgacacacaagcctcagcacaactggccaaacttgaggtggtcatcatagcactgatgctgggccaacaattagccccatttgtacctttttacaaactttttgacaattgccaagaatcgtccaccttccctccccattgaattaaatacacttcttgtctcatggatactcagaataccaatcaaggtaacagatgcctttattttaactaaggacacagtacagatctcacagggacactccttatcccttgcagagttccagacactactgatggtcaccaaagcaacatttcatcagaaaacacagtgctgggcttgtgaagaaggtgtccagcagagcttccactgcccctgtaggctgcaggcagctgcttcagttgagagatacactgagctccctcaaagaattcctatttaaggtacaaagcagcgactggatgccctgctggattcccactatttgccacaggctttgataactctaagttcatgctccttagggaaagtgcactttttacaccaatgttagacagttccctcagttgcctttactggacatcaaggagttcacatttttgacaatctttcagtcctgaactgtccaaggggtggaggtagctccatacaggaagctgcctgctgcgtgtggatcagtaatatcagacttgcccaacagctcactggagacatcaaaaccaatgcatgggggatgcatgacgtcacccaaatatttaccacacgcttttgctgccagagaccccagatcacttttcctgcctcctgctaaacaaatgggagcagtagcttctcatcagcctccacatttcattactcataattgtggccttcctaatgtctcatgcccctaagcacttattacaatgtctcaacagccttctctcagcctctcaaaatattagtcatcattaaaataaatgtctgatgttaaagcatcagggtcaattgtactgtgacacctaaaatttcatgctgcatcccaccaggtcctcagcctaatggctttcatgcccccaacagactgctaaactctttgaattagtcaagcatatccctcaagggacaaggggttaccccaccctctgatttctaccaagcctgcctcccgcaccctgtgctccagagtgaacccccgggtagacctgcacagatgcagtgtcatcccctgttgggctgagtatgcgagatgaataaattacggtgaatttcgtctaaa

SEQ ID NO: 76309 - DNA, 3461 bp, Homo Sapiens
  misc_feature (2764)..(2827): n is a, c, g, or t
  misc_feature (3058)..(3067): n is a, c, g, or t
atccccttcactgtgtcactggacaacggccactccttccctcgtgcgggcacctggctggctgtgcaccccaacaaagtgtcaatgatggagaagagcgagttggtgaacgagacgcgttggcaatatacggcaccgccaacacctcaggcaacctcagcctgacctggcatgtcaagtcgctgcccacgcagaccatcaccatcgaactgtggggctacgaggagacaggaatgccctactcacaggagtggactgcaaagtggtcgtacctgtaccccctggccacacacatccccaactccggctctttcactttcaccccaaaacctgctcctcccagctaccagagatggcgagtgggtgcacttcggatcatcgacagcaaaaattacgcagggcagaaggacgtgcaggcgctctggaccaacgaccacgcactggcctggcacctgagcgatgacttccgagaggaccctgtggcctgggcacgaactcagtgccaggcctgggaggagctggaggatcagctgcccaacttcctggaggagctgccggactgcccctgcaccctgacccaggcccgggctgactccggccgcttcttcacggactacggctgtgacatggagcagggcagcgtgtgcacctaccaccccggggccgtgcactgtgtgcgttctgtgcaggccagcctccggtacggctcaggtcagcagtgctgctacacagcggacgggacgcagctcctgacagctgactccagcggcggcagcactcccgaccgcggccatgactggggcgcacccccgttccgcacgccaccccgagtgcccagcatgtcccactggctctacgatgtcctcagcttctattactgctgcctctgggcacccgactgcccccgctacatgcaacggcggccctccaatgactgccgcaactaccggcccccaagactggcctccgccttcggagacccacactttgtgaccttcgacggcaccaacttcacattcaatgggcgcggagagtacgtgctgctggaggcagcgctgaccgacctgagggtgcaggcgcgggcccagcccgggacgatgtccaacggcacggagacccgtggcactgggctgaccgcagtggccgtccaggagggcaactcagatgtggtggaagtcaggctggccaacaggaccggaggtctggaggtgctgctgaaccaggaggtgctgagcttcaccgagcagagctggatggacctgaaaggaatgttcctgtcggtggctgccggggacagggtctccatcatgctggcatcaggggccggcctggaggtcagcgtgcagggcccgttcctgagtgtgtccgtcctgctgcctgagaagttcctcacccacacccacggcctcctcgggacactcaacaacgaccccaccgacgacttcaccctgcacagcgggcgcgtcctgcccccaggcaccagtccccaggagctgttcctgtttggggccaactggaccgtgcacaatgcgtcctccctgctcacctacgattcctggttcctggtccacaacttcctgtaccaacccaagcacgaccccaccttcgagcccctcttccccagtgagaccaccctcaaccccagcctggcacaagaggcagccaaactatgtggggacgatcatttctgcaactttgatgtggcagccactgggagcctgagcacgggcactgccactcgggtggcccaccagctgcaccagcgtcgcatgcagagcctgcagccagtggtgtcctgtggctggctggccccacctcccaacggacaaaaggagggcaacaggtacctggcgggttccaccatctacttccactgtgacaacggctacagcctggccggggcagagaccagcacctgccaggctgacggcacctggtcctcacccaccccgaagtgccagccaggacgcagctacgcggtgctgttgggcatcatctttgggggcctcgcggtggtggcggcggttgcgctcgtctatgtgctgctgcgccgcaggaagggcaacacgcacgtctggggtgcacagccctgatgggagcagcttggctgtgagcaccaggccaagactcctgagaacaggcagcccagtcctgcgactcccgcatccccaggaccagacacctgggacctggatacttgatacctgggcatttaaccccctactctgtcatctcagaccccaggcaggaggcccagtgttccaacacccaagccccgtgctagcagcgctccgtgctcttccccaaatactcacggctctaattccccaaacctgaaacttcataccctgggattctaatacctatgtcctgagccctgacactcccacacctgagcctcagattccaatagctcactccctagagcctgacgccggggcccctgacccctgagcctcagattccaatacctcactccccagagcctgatgccggggcccctgacccctgatctacggaggcctgctcccggaccgtgcgggcaccagtgcagtgctgccttggttcctggacccctgggcccatcctgggaccccagatggggtaaggagaggccccagaaccccaaagcagacagcgagacccccagcggcagaggcctccctcggcactccaggcttataatttcgaactcttctggaaggtcactcaggaacaccctccctgcctgtgcaaagagaaaacaagcgccttgtttccttcnnnnnnnnnnnnnnnnnnnnnnnnnnnnnnnnnnnnnnnnnnnnnnnnnnnnnnnnnnnnnnnncacaagaattccccggggggggccacacaatataagcggaggcaccccgagctttctgcgggtacccaagagggggcgcccaatagaggggagagcaggctaataaaaagagcagaaggcgcgaggggcgcgcagcggataacaacacgcagccggggacagcgggagacaacacggggagcggcggggagaaccacttggagaacggggacacccccatacgaaccggcnnnnnnnnnnagagacaccactatcgtgctggggaacaaacatcatcccctcgagacgagaagcatattgaagacgccccatctgaggagggagggacacaattacagaccacttgctagaggggcacgaatgacagcgtggtgtcaccaacaccgaccaggcggcaaatatagtgccgcgcgagcgtgatagacacagaattcgcgggccacgcgcgcagaatagttaggacttagtagaaccaaacttatttcccggcgggagcgagtagtagaccagtataatacgccgccaacggcgccaagactagcagcccgcagccaccgccgaggcagccaccagcggcgccacgacgtgggcacacctacaccaactaccacccgaacgaatcgcccccgctccc

SEQ ID NO: 76310 - DNA, 800 bp, Homo Sapiens
  misc_feature (12)..(12): n is a, c, g, or t
  misc_feature (41)..(41): n is a, c, g, or t
cgaggagcactntggacacctggagacccagccctgttatntaatggtagtgggcaagtgtgtgtgcatactgtctgccactgctttctccctgccccatgccagagagccctgtccctgccaggcccagccttcttagccccaacttgggaacaaagtgcaacatgggatcatgggttggggtgctcaggtgagccctctctatagtgcttccctgggccaagctgacaccagcccctgagggtggggtgggacgggtggtgcttaaaagaggaaggggaccagtgtagcaacttgccagggaccccacccctccctctctgggcctgtgcagtgagcatggggattcccatcaaggggcctggcacctgtgctagttacgtagccgctgctcacgcgctcactcctgaccacatgcacgttccctagatgcagactgctttgaactttaaagctgtacaatttggttatgtttgtgctgacttaaaatatattttaatgaggaaaaaataatggagaaccctgggaaggacctggttcttttgcttctcggggaactgtaagccctcgcgttctgggaatcgctctctgctgctctttcctggaagctaagcctgtctccaccgcccgaggcctgcgccggtggctcccgccgcagttgcgtttgctttggaccttgcgtgcgggggagggggtgctcggtccgagcccgctcctttctgtacacctagcgctgcccgccccgcttgtgtctgaggtcgtgtatgtcaaaaataaagccgctagaaacggaaataaaa

SEQ ID NO: 76311 - DNA, 486 bp, Homo Sapiens
caatgttcagtgattattgtgtacagcgagtgtcctgctcttgaaaaattgtcaaaagcacagcagcagctagggaattcccgccctccagctggatttaccggtacatactaggggtcacagaaggaatttgatttcataacagcgtggtgacccgggctgtgtggaaattcactgggcctgatggagctggatgcagccttggaaattctccctttccctttgggctcccgcagcaggccccccagtcctgggtgcaggcttgtgacagctgctcagggatccaaacgtggcgcttgagctctctgcgatgtgttccacagttccctggaggcggacactgcgtgagggtcagtttttgcccctgcttccctgtggtgtctggctcccagcagcgtcagggagggtccgtggagtggctgagtttggatctaggtggttggcattaaaatctccctggctttgggttttcttttttgagacaga

SEQ ID NO: 76312 - DNA, 612 bp, Homo Sapiens
aggtgagtgacttgcgcaatcaggtctacctggaggatggactggaccccttcccaggcgagggccgtgtggtgggcaggcagcggatgcacaaggccttggacagggtggaggagcacccaggctccaggatgactgctgagaaatttctgaacaggctccccaagtttgtgatccggcaaggcgaggtgattgacatccggggccccatcagggacaccttgcagaactgctgcccattgcctgcccggatccaggagattgtggtggagacgcccaccttggccgctgagcgagagaggagccaggagtcacccaacacgccggcacccccgctctccatgctgcgcatcaagtctgagaatggggaacaggccttcctactgatgatgcagcctgacaacaccattggggacgtgcgagctctgctagcgcaggccagggtcatggatgcctctgcctttgagatcttcagcacattcccgcccaccctctaccaggacgatacactcacgctgcaggctgcaggccttgtgcccaaagcagcactgctgctgcgggcacgccgagccccgaagtccagcctgaaattcagtcctggtccctgtcccg

SEQ ID NO: 76313 - DNA, 673 bp, Homo Sapiens
  misc_feature (23)..(23): n is a, c, g, or t
  misc_feature (30)..(30): n is a, c, g, or t
  misc_feature (33)..(33): n is a, c, g, or t
cgcagtcagctggagcgtcgcgnaggtccngtnctgtcggagagcgtgtcctgcggcgcgatggccgtagtgttgccggcggttgtggaggagctcctgagcgacgatggcggcggcggtgcaggagagcgcgcgaattcctgatgaatatctgttatcgctgaagtttctctttggctcatcagccacccaggccttggacctagttgatcgacagtccatcaccttaatctcatcacccagtggaaggcgtgtttaccaggtccttggaagttccagtaaaacatacacatgtttggcttcttgtcattactgttcatgtcctgcatttgcattctcagtgctacggaagagtgacagcatcctgtgcaagcatctcttggcagtttacctgagtcaggttatgaggacctgtcagcagctaagtgtctctgacaagcagttgactgacatattattgatggagaagaaacaagaagcataaaaggactgcaggaggtgctgtgggttggagccgtgggctgtggagggtttgtgtatgatgagaagccctgtacagtcttgtcaagaaataccctgagccagtctctgagacgcttcggtaaaaaatgtccctggatggaatcaagattttaaattcaaataaagcctaatatcatgttgtgtccacatt

SEQ ID NO: 76314 - DNA, 583 bp, Homo Sapiens
aacaagggaagaactggtttcactctgcacttctgatctttacaacagggcaattgaaggaacagactaaaaatcgtgtcctgggaaggaaactacaggtactaccagggattttcagtctgaagaagaaaagacaaaatagatgacagaaggagtattagaagggagagcgatgagactcagttggacaccgagagagcaaagaagcaataatacgtgaagatgaaaatgaaatcaatttcagcataagaagacaagaacttatggtaaagctgcccacagccagaagaggatcctagaaggacaggaattccctgtctgcagcatttcataagcatgtaatattgttgcagggatactgcagaaggagttgaagcagtggacagacagatgatataggtgattttacagcctaagaaagccctgtgcttgtgcccccaaaacatgaggtgctagtgaatgaatgctgggggaaagcccagggcctaggtgttgcaatgttctgtggttggcagatgctttttgttttgttaaaaagtgcaacagataaaatttatcaatacttttctgctactcaggaaaa

SEQ ID NO: 76315 - DNA, 678 bp, Homo Sapiens
ccattctcattttacagttcctgatgaatatctgttatcgctgaagtttctctttggctcatcagccacccaggccttggacctagttgatcgacagtccatcaccttaatctcatcacccagtggaaggcgtgtttaccaggtccttggaagttccagtaaaacatacacatgtttggcttcttgtcattactgttcatgtcctgcatttgcattctcagtgctacggaagagtgacagcatcctgtgcaagcatctcttggcagtttacctgagtcaggttatgaggacctgtcagcagctaagtgtctctgacaagcagttgactgacatattattgatggagaagaaacaagaagcataaaaggtacagattgagcatcattctttcaaaatagaatcctgtcaagaaatgcattgaaagcgtcatgattcacatggaaaagaggtgaaatggatcttcagacacttcatgttactgtcccttttccctccaggactgcaggaggtgctgtgggttggagccgtgggctgtggagggtttgtgtatgatgagaagccctgtacagtcttgtcaagaaataccctgagccagtctctgagacgcttcggtaaaaaatgtccctggatggaatcaagattttaaattcaaataaagcctaatatcatgttgtgtcc

SEQ ID NO: 76316 - DNA, 1104 bp, Homo Sapiens
gcggccgcggctgtatgctctttgtctaatcagttgtctgtttttggaaggaagttgtatcattttgggtacttctccagttgaaagggtatccatttgagaaacactgcactgatctgaagagagtagtgctttctcctcaattttacagctgactagacaaaaagctgtttctactgataggacatctgttccaaaaattaagaaaaatgtcatggaagatccttttcccagaaagtcttcaactattacgacccctccttttagttcagaggaggagcaggaggacgacgacctcatccgggcatacgcatccccaggcccacttcctgtgccgccaccacaaaacaagggcagcttcgggaagaacacagtgaaaagtgacgcggacgggaccgagggaagcgaaatcgaggacactgatgattctcccaagcccgcaggagtcgccgttaaaacacctactgaaaaagttgaaaagatgtttccacatcgcaaaaatgtgaacaaaccagtcggtggaactaatgtccctgagatgtttatcaaaaaagaagaattacaagaactaaagtgtgcggatgtggaggatgaagactgggacatatcatccctagaggaagagatatctttgggaaaaaaatctgggaaagaacagaaggaacctccacctgcgaaaaatgaaccacattttgctcatgtgctaaatgcctggggcgcatttaatcctaaggggccaaagggagaaggacttcaagaaaatgaatcaagcacattaaaaagcagcttagtaactgtgactgattggagcgacacttcagatgtctaattccacatgtcagaagattattccagaagccagcagtatttcagtatcacagtgtttcagtaatttgcctccatgattctagtgcttctgccttaccgtgtttcccacagcaacacagagactgattcaaagaacaatggtctctttaatggcacccaatacagtattgaaaatcagatcatcaacagtatttcgaagcatgtaaaggtgtttaagacttccgctgctgcttaaaaataacatgtcattgaagtcataaaaagttttttcttcag

SEQ ID NO: 76317 - DNA, 1004 bp, Homo Sapiens
  misc_feature (855)..(930): n is a, c, g, or t
gcagaaggccactcccagagaggcctaggagtaccttggtcattttttcttgcctcaaatattataaacctccaacttgctcagaatcagggtgcttttattgtctgttttctggctctgaggcccttgccccaaatttaagtcagatacagactgaatttccattctgttctgtttataatatgaatgatattaatactcttgtttgcttaatgttatgttggaattttctgtttaatctgcagtagagcaagatggagagccatctggaattgacttccttctgtctttcttctgtgttcgcttactacttgggcccatgtgggaaaaaaactttaaaaggaaggaagtcttcttagggatccagttcaaagctatttgggggcatcaaactgaaactctcttctccactactcaagacttcgtgcctcagtccaagtaggtaagagcaaaagggaaatgcatctctacacaatggcccatggtcagggccaccagagcaagctgggcctagatctccacctgtcagtgactggccattctaagaggtgaaacagcagatcgttgaggctgtgagggaggatctttgaattcccatgagacatagcataagaagggtatcattaaagccctgggctctaaagttacagagcctggttttgagtcctggctccaccactgccaactgggtaaatttgagcaaatggtattctctttcttatctcagctcctgcgtttctaaaatgagggtctgcgttatgaatagttaggaggattaagtgagaggatgtataacccatgggttacttaaaagtatatttcctaccttccaaacatgagatttttctagttatnnnnnnnnnnnnnnnnnnnnnnnnnnnnnnnnnnnnnnnnnnnnnnnnnnnnnnnnnnnnnnnnnnnnnnnnnnnnaacttggttgttggcctagtatgagatcaatgttgtaaatgtgccatgtatgtttaaaaagactatatattctg

SEQ ID NO: 76318 - DNA, 282 bp, Homo Sapiens
taaggtggattttggttgttataaatggagaaaggtaagagttcaagttcaacccgtgtgtgaaagcaaaacaatggaaaacaggattggcttcttcaaaggctcctcttgtagaactgcctctttgaaatttcgaggtaatctactttggagactctgcctggagagggtcagttcctaagttaaaagcatcgcttaaccttggctcctgtggcattttacaaaggtttaaaggaattgattcctctgaaagggcctgaaaataaaaagtctttaacatac

SEQ ID NO: 76319 - DNA, 1667 bp, Homo Sapiens
cctagtcgaaggccgggtgtgaatcggcaccgaggcacttccagtcgcctacacctgtgcctggggaggtgttgaagttggatgatgtcattgacaacattatgcgtctggacgatgtccttggctacatcaatcctgaaatgcagatgcccaacacgctacccctgtccagcagccacctgaatgtgtacagcagcgacccccaggtcacagcctccctggtgggcgtcaccagcagctcctgccctgcggacctgacccagaagcgagagctcacagatgctgagagcagggccctggccaaggagcggcagaagaaagacaatcacaacttaattgaaaggagacgaaggttcaacatcaatgaccgcatcaaggagttgggaatgctgatccccaaggccaatgacctggacgtgcgctggaacaagggcaccatcctcaaggcctctgtggattacatccggaggatgcagaaggacctgcaaaagtccaggagctggagaaccactctcgccgcctggagatgaccaacaagcagctctggctccgtatccaggagctggagatgcaggctcgagtgcacggcctccctaccacctccccgtccggcatgaacatggctgagctggcccagcaggtggtgaagcaggagctgcctagcgaagagggcccaggggaggccctgatgctgggggctgaggtccctgaccctgagccactgccagctctgtcccggcaaggcccgctggccctggccacccaggcaccggccccattccatcgacctggacttcagccgacagctgagctttgggggcagggaggacgagggtcccccgggctaccccgaaaccctggcgccggggcatggctccccattccccagactgtccaagaaggatctggacctcatgctcctggacgactcactgctaccgctggcctctgatccacttctgtccaacatgtcccccgaggcctccaaggccagcagccgccggagcagcttcagcatggaggagggcgatgtgctgtgaccctggctgcccctgtgccagggaacaggggccggcctgggggctgggagggccaggggcacctccctcccacccttcaggctgcactgtgtgtgaagtagccacctgccctgcctccctcctccccgttggcccctgtttggacttagtgcctgtctggcagcctgtggggtcaggagaagcacccccagggcagcccttttgactggcgcagtgggaagaggccttcagcccctctcccggagatggaatcgcggggcagggaggggcagggtgttctagaggtgagaagagggcctggtggagattccctgtcttctgagcccgagcccctcattaccagtgaaggacatgcttgaggggttcgggaagctcctcatctgaggcaactggtcctgggggtgctcaggcctgcctttttgggactcagatggcaggaggtccaccccgcagcctggtcctcggctctcccacaggtgggcaccccccactttggtgctaatagctctccacccaggtggtgtgagcgcgggggctgccagaagcgggaggggtcactgccggaagagcagctgccctccgaccccctccactttgtgcctttagtaaacactgtgctttgtaaaa

SEQ ID NO: 76320 - DNA, 1405 bp, Homo Sapiens
  misc_feature (76)..(110): n is a, c, g, or t
tggatcatcactataggggctagctcgtctgaccgaacgacgagcgcagcgaagtagtgagcgaggaagcggccgnnnnnnnnnnnnnnnnnnnnnnnnnnnnnnnnnnncagtcgacggtaccggacatatgcccgggaattcggccattacggccgggggcgctcccgggtggcaagatggtggcgcgcaggaggaagtgcgccgcgcgggacccggaggaccgtatccccagcccactgggctacgcagctattccaatcaagttctctgaaaagcaacaggcttctcactacctctatgtgagagcacacggcgttcgacaaggcaccaagtccacctggcctcagaagaggactctttttgtcctcaatgtgcccccatactgcacagaggagagcctgtcccgcctcctgtccacctgtggcctcgtccagtctgtagagttgcaggagaagccggacctggctgagagcccaaaggagtcaaggtcgaagttttttcatccaaagccagttccgggtttccaggtagcctacgtggtgttccagaagccaagtggggtgtcagcggccttggccctgaagggccccctgctggtgtccacagagagccaccctgtgaagagtggcattcacaagtggatcagtgactacgcagactctgtgcccgaccctgaggccctgagggtggaagtggacacgttcatggaggcatatgaccagaagatcgctgaggaagaagctaaggccaaggaggaggagggggtccctgacgaggagggctgggtgaaggtgacccgccggggccggcggcctgtgctcccccggactgaggcagccagcttgcgggtgctggagagggagagacggaagcgcagccgaaaagagctgctcaacttctacgcctggcagcatcgagagagcaagatggagcatctagcgcagctgcgcaagaagttcgaggaggacaagcagaggatcgagctgctgcgggcccagcgcaaattccgaccgtactgagctgtgagagccgcagtgaatggctggaggtgcagggccaggaggaggcgaggcagggcctgcagcggtctctgagaggccgagctctggccaacgggccccaggttgaaggccaccgcgtccaacagccccatcagagtccacacaggccaggagggaaggaccaggccacccctcgggtcttgtgcttcagcagtcctggggacccaggcgtgccgagaggaggacttgtccttcctgcttcttgcctccacaccctcctctccaggaccctggatgaatccgttctgtgcttccttttccctcaatgcaaaagcccttgctggcaacgaaaaagcctcaaaagcagtgagaatacaagaaccttttattttacaagcgag

SEQ ID NO: 76321 - DNA, 1267 bp, Homo Sapiens
  misc_feature (47)..(111): n is a, c, g, or t
ttggttcagaatggcactttgaataatgtaaaccagtgaaaagtggnnnnnnnnnnnnnnnnnnnnnnnnnnnnnnnnnnnnnnnnnnnnnnnnnnnnnnnnnnnnnnnnnaaagtgcctcccacctaggcgtaggcatgaccatttggggtacgagagcctaattttgtaggacttaatctgttgaaaagtgcagttacttctggaaattaacctcaatattaggtcagcatgtgaaatgttggatttgacatgtcaggtagggttcagggactgattggtcccatttgccctcaggtcagttgtttaatctcaagacctgttactactgattttattaaatcagagtctttaattcttgcatgtttgtatctaatttctgaacgaatgagcacactttaaccagttatttacagttacctttttcctttaaccggattgtgaaagcttcatgtattttaatttagattctgtgtttttaagggttctgagcatgaagctggcagatagtcggcaggactcattttttcatcatggctggctgatttctccatagattgataacagtattttgttatcttgcttctctgtagttttgcatcagctgtttaactttgagctgagtgaggggagaggggtaaagagaaagaaacttaagttttctttcacagaactccaccattgtgggctttgagagagccctaaagcattgtacctagtggtacctagtgacttccaaccaaagcctttgagtatgcactaaataggtgagaagaaaggagagaaggtttttaggttagaaacctttaaccgatagaaggatatggtatgttgtaaagctggaaccaagtttgcatttttgagggcttgagatgaagggaagactcttaccagatagtaagacagctgagttttcctcagttttctcgtcttaacactagtggacaattctagcattttgtttggaggatttcagagttaacctcatggaattcaggattttttagcaagtttgcttttggttttatcttggcttttagtaatcatgttggctggtctggtcacaggtgactgtgaaacagatgccctggtcttgctttcatcactctaggatcatgaagtgctatgctatttcctggttatgaatattaaggttggaattacatttttattgattgtttggatcagagctcagttcctgtagaaaacgaactgtaaaagaccatgcaagaggcaaaataaaacttgaagtgaatgcttaaaaaaa

SEQ ID NO: 76322 - DNA, 1946 bp, Homo Sapiens
  misc_feature (1292)..(1355): n is a, c, g, or t
  misc_feature (1930)..(1930): n is a, c, g, or t
tgcggccgccaacagaaggagatcctgtctcaaagaaagtgaaaatgcttcagctagaattataggataatcctgtgtgagataatttacatagtgactggaagagttattaaatattgctttcttgttgctaagttctgtagttgggttagatatctaatgcgtaactattgtgaaagtcaagagattctaatttttccagaaaataatgttgagtttccatgaagaacaggaagtactgccagaaactttccttgctaatttcccttctctgataaagatggacattcacaaaaaagtaactgacccaagtgtggccaaaagcatgatggcttgcctcctgtcttcactgaaggctaatggctcccggggagctttctgtgaagtgagaccagatgataaaagaattctggaattttacagcaagttaggatgttttgaaattgcaaaaatggaaggatttccaaaggatgtggttatacttggtcggagcctgtgacatttgttgacactgtgaactgtccaaaagtctcttaactgcaccttgtgaatggtagttgaggtcttcatacagttcagcctctagaatggtaacaaatcagccaattggattcgaaacaaagaagactatgtaaaactcacccatcacactttgagactactcactggttggaagaatatagtattgcagcaaatcctgtatgaaagagagatgtgggcttcctttttgagtcttgtgttaggtgctgagaccttttacatgggcttatacagggagagagtcttcaataaatgtagtcagcactattttctgcatccagtgtggttgcgtttctcacctgagagtaatcaagataacatctgtcatcttccttggtttattgagtgaaatgcctctcagtcttaggggacatggcagagatgaaagaaagaaagagtgggtttcagaagtgtcagggtggagtgattccaagtgggatggttgtggcattagtttaagctgaataaataatttcaatttggggcagttattctgctttttgtaaagccgtggccaattgtctcctgtaatgactgttggttcaggcatgttgtactttgtagggacaaatgtgcatttgtttgtggcaaaagcctacaattgacaaacttgtaaatttctttgtatataaactagctgtaacctgactatcctttgtgtttactgtttttgtaaatttttttcctctataaatgaaagggtgttggttcagaatggcactttgaataatgtaaaccagtgaaaagtggannnnnnnnnnnnnnnnnnnnnnnnnnnnnnnnnnnnnnnnnnnnnnnnnnnnnnnnnnnnnnnnaaagtgcctcccacctaggcgtaggccatgaccatttggggtacgagagcctaattttgtaggacttaatctgttgaaaagtgcagctacttctggaaattaacctcaatattaggtcaccatgtgaaatgttggatttgacatgtcaggtagggttcagggactgattggtcccatttgccctcaggtcagttgtttaatctcaagacctgttactactgattttattaaatcagagtctttaattcttgcatgtttgtatctaatttctgaacgaatgagcacactttaaccccgtaatttacagcttaccctttttcctttcaacgggattgtgcaagccttcctgtattttttaatttacaatccggtggtttttaaggggtccctgagccatgaaactgggcacataagccgggcaagggactcattttttttcacccatgggctgggctggaatttcctcccctaagaattggataaacccggaacttttggggcaatccttggccttccccctgggaaattttggccatccaagcttgggcttacacccttttcaaacccctgaaaancgaaacgggggcaaaa

SEQ ID NO: 76323 - DNA, 952 bp, Homo Sapiens
agattccatctcaaaagaaaagaaaagaaatctgttaatattattaaaatatttatgtcactttggagaatcttcccttagaagtaaaagctccaatacataaaagacagatgaacatgtgaacatggacatttattgtaaaaattgttcttaatggcaaaaaaacccccaaaaccaaagcaaacactagaatcaaagtaaatacccatcaactgggaaattgtagaaaggaaaaaactatagtgtatccattccatagaatgttaatatagccattaaggtggacaaattaaaactatgctagtggacttgagtggaattccacaatgttctcttgagtgaaaaatgcaaggtagatattaagtatgttaaatatgactccatttttgtaaatcattaacaaaatgtctctaggtgtttgtcagcaataaacggtatctatatatgtttatttgattttatgtgcatgaagaaaagtatagaagagtatgcattgacttggagggaggtgggtaatgcaggtaggttatgggggagtcaggggtgtagggaaaaggaaaaccaaaaaagaaaaatacataaatgactgaatcacgggtgataccacaaatgtgtgagttagtaaatttggctggggatgggggagctagaattttgctaatttgtggggatgttcatggtatatattgtaaaaagggaaaatttcataataatgtatacgattctatttttaaaaaaagtaaaaactcctgtgtgtgtatatatgcatgtggatgtttatatgaacatagaaaagtgtagaagaatacacacgaaggtgttaacattcattggttaccttggtggagaagggtaataagttttctgaatacctttgcattgtcttgttcacatatattgcttttgtaatttgaaaaacaaaataaagggggaaaacatttcaaactgaatg

SEQ ID NO: 76324 - DNA, 698 bp, Homo Sapiens
ccactatctttcaagttacctaaaggcaccaggctgcttgagcaagaagaataaaaggcctagagtgcaaattatgtgaagtagagtttttagattgtgggattgtaataatacgggattctcatggttacatcatgttaaatcacactgttcagtctttaaaacttggtgttttaaaatttgtctcattgtgatagccagaaacaaggaataaacgtgatttcagtttaaactatatacaaatatcttctgtaattttgctgctctaatttttaggctataaattttgtaatagagcttatcagatcgcaaatttcctttgtttacaatctcatgtagtagggctcagataatttcttagctataaaccttttctcccactctcatattgtttcatttaaaatatttaagctaagcctaaaaattgaaatcagttaagaatttggagagtttatcttaaatggaaatggtgtattcttttcaaagaattttgtaaccatctttacagtttctttgcttggaaaacttgggttgttaactaccagttaacaatggcattactttccaaaacgttatctaatgggcccaatgtgtacctcaagataaacacagtatgttatgtctaaaaatttccttgtctgttgatttaaatggttctgaaatgtctgtaataaagaaattttcaaagttaaaaaaaa

SEQ ID NO: 76325 - DNA, 600 bp, Homo Sapiens
  misc_feature (41)..(41): n is a, c, g, or t
agttatagaaaatcagagaggggtaagtttatagggcattntgttctgatggttcaaccagaggtctgggaaatagcactgttggcccaaacagaacaggcttttagaagataaaagcgacaagaaggaatctggtgaattttagtcatcccagctttttagtcttaaccacagttctcactctcttaaatggtacctcaaaaagctggagcctctctgccatgattatgcttctacaaatttcttttataaagagactcaaagctaatgatagcttaaaagaaaagttaatgccttctcattggaaatgtataatcaaataagtagttaagggcttttggtattaaagatattctgaagctctgaaatgctagaaaaaaatttggaatggagtatatgcctgaaaaggttttggattcagaaagaaaaaggatggttagtttaatcagtgattctttttaaactcttcaaatatcatgaacaagatactaaattgtacctaaggatttgtatttctttacaatttgttctaaatatctgtttaatgactagttgatatttgtgcatgttatttaataaagagttatatttttatagaaa

SEQ ID NO: 76326 - DNA, 1232 bp, Homo Sapiens
  misc_feature (1152)..(1172): n is a, c, g, or t
ggtccggaattcctcgaatcgtcgaccccgcgtccgccctcagtgacaagtgcagccgcaagaccctcttctacctgattgccacgctcaatgagtccttcaggcctgactatgacttcagcacagcccgcagccatgagttcagccgggagcccagccttagctgggtggtgaatgcagtcaactgcagtctgttctcagctgtgcgggaggacttcaaggatctgaaaccacagctgtggaacgcggtggacgaggagatctgcctggctgaatgtgacatctacaggtgggccggcatccctgcagatggcctccaggcctccaggtttgtggggcacttggcgcctcacaccacctgtcaccctatactccccagctataacccagacttggactcagatcccttcggggaggatggtagcctctggtccttcaactacttcttctacaacaagcggctcaagcgaatcgtcttctttagctgccgttccatcagtggctccacctacacaccctcagaggcaggcaacgagctggacatggagctgggggaggaggaggtggaggaagaaagcagaagcaggggcagtggggccgaggagaccagcaccatggaggaggacagggtcccagtgatctgtatttgatgaggaggagccgaggccccagcttcatccagcttcaaccaatgcctggacctgtccacctgagaggcccctggggcctccccagctgctggccagaccctggcgctgccacagtcctggcactgcccaaggccatacctgcctagccctttggctccatcctgtggatgcccactcacccctcagactcctgctgcccatgctgtggccggacttgtcagcagggggcctggtgggaggagcgactgccctgcccaaatgaactgccacagcagggacagctggaccgcagagtttatttttgtatttctactgggcctgcacactccagcccaaagggtctgtggccggaggccccacgagcaggccccagcagtcaccggctctggtcttgggccggccccggtgcccacctgtacccccacctcgcccatttggccgcgtgcactgagtgtcactttgctgcagctcgtttctttccaataaaagtttctgtgacttnnnnnnnnnnnnnnnnnnnnngaccgcgtaggcggccgcaagcttattcccttgtagtgagggttaattttagcttggcac

SEQ ID NO: 76327 - DNA, 1255 bp, Homo Sapiens
  misc_feature (100)..(158): n is a, c, g, or t
cgtgcccggggcccggctccgtgacgtccgcatgtaactgtgtattgggccgggtctcccccgaaccgtccctgggaccgtcctcccccatgggctggtnnnnnnnnnnnnnnnnnnnnnnnnnnnnnnnnnnnnnnnnnnnnnnnnnnnnnnnnnnnatgtccagctcgttgcctgccttctgagggtgtgtaggtggagccactgatggaacggcagctaaagaagacgattcgcttgagccgcttgttgtagaagaagtagttgaaggaccagaggctaccatcctccccgaagggatctgagtccaagtctgggttatagctgtagatgtcacattcagccaggcagatctcctcgtccaccgcgttccacagctgtggtttcagatccttgaagtcctcccgcacagctgagaacagactgcagttgactgcattcaccacccagtctaaggctgtggctcccggctggaactcatggcttgcgggctgtgctgaagtcatagtcaggcctgaaggactcattgagcgtggcaatcaggtagaagagggtcttgcggctgcacttgtcactgagggggccctcctcctcaccgccttggcttttgctgagtctgctggggctcagtcctgaagtctggggtggagaaagtgcctccagcacgtggggctggccctcctggcagaactgcttgaacatgtgtttgtcgtctcctgccatcttacatgagtagctctcaatcctgccaatgatgtgggcatctccggtctccacagtcagctgtgagttgatggcttcaaagctcgagttctccaatagcttcatgtctttggggaaggagctccgtgctccagaggggctagtattgcctgcctggctgggttagatcagcccgcgccgggccgggtctggctgggctggtcgctccgcgtcggtgccggtgcgcaggcgggggcgggctccgcgcagcgcgggctcttcaagatcggagggcggcgccgcggcctccgctcgggccgcactgtatccgggggaagaagctccgcggcgacgtcccgttactcccggccctgccggcccatccgggctgccaccgcgacatagcctcgcccccttccacagagcccgctctcgcgaccgacctgccgccgaccgccacagagcgctccggcgagtcagcgagccgagcgagcgagcgagcgacctccgcctcccccggccggacaacaacaagcgtccgccggcccggccc

SEQ ID NO: 76328 - DNA, 1069 bp, Homo Sapiens
  misc_feature (147)..(147): n is a, c, g, or t
  misc_feature (156)..(156): n is a, c, g, or t
  misc_feature (193)..(193): n is a, c, g, or t
  misc_feature (196)..(196): n is a, c, g, or t
  misc_feature (201)..(201): n is a, c, g, or t
  misc_feature (213)..(214): n is a, c, g, or t
  misc_feature (986)..(1009): n is a, c, g, or t
cctgactattgcagcacacaaccattttattctgctacatgctccagacacagcttgcatgtgcagaccattctagacttggccatctagccagatcatccaactgtgatgacatcggactctctccagggactggcaaactcagcnccacacctntgacagccaaatccagtcccgtcttgctccccagtcntgncagtnccgtgatgcggnnaggaagtctcacatcatagaggacccctcctcctctcccagttctcaacttctccatgcctggaatccacgggtgaagagagtcggtagatctcataagaaagaatccagtctgacttccctctggagaatgactatggacagaaggccaccatcctccacagagcaccctgtcctgagtaggggttgtgctcattaccccaggccagtggtagcttcctcaggagcctggccacttccaacggtagcactgaagtcatgcaaatgcatagtcaggtagattcagaccttgtccacaccttcctgggcaacccccaccatgaacctgtcagcctctttcccatagctaatagacatttcccaggccttgaggggccccaccctgtctctttcatcaaacctgatggtccaggctgggcatccctctcctcctccatccccagacatcaccaggtctaatgtttacaaacggtgccagcccggctctgaagccaagggccgtcccgtgccacggtgctgtgagtattcctccgttagctttccccataaggttgggagtatctgcttttgtgtctgagatgggcccctcttttcagaggccgcagggtgggtgatggagaaggctgagaacctttcagaccctctgtgtgggctgggctggtcagaatcagggtgtacctccccgacaccttctttttcagtgatgttttctcttctccctgcctttcctctgcctcctcccctgccagccctagcgtgactacccagagacnnnnnnnnnnnnnnnnnnnnnnnncctgagcaggcggccgcaagcttattcccttgtagtgagggttaatttgagcattggcac

SEQ ID NO: 76329 - DNA, 908 bp, Homo Sapiens
  misc_feature (587)..(599): n is a, c, g, or t
gcatgtgatatgaaccaagttgtaaaaaaagcaggctggtacggtccggaatcccgggatatcgtcgaccacgcgtcgcgtgcactatggctcggggctcgctgcgccggttgctgcggctcctcgtgctggggctctggctggcgttgctagcgctccgtggccggggagcaagcgccaggcaccgccccctgctcccgcggcagctcctggagcgcggacctggacaagtgcatggactgcgcgtcttgcagggcgcgaccgcacagcgacttctgcctgggctgcgctgcagcacctcctgcccccttccggctgctttggcccatccttgggggcgctctgagcctgaccttcgtgctggggctgctttctggctttttggtctggagacgatgccgcaggagagagaagttcaccacccccatagaggagaccggcggagagggctgcccagctgtggcgctgatccagtgacaatgtgccccctgccagccggggctcgcccactcatcattcattcatccattctagagccagtctctgcctcccagacgcggcgggagccaagctcctccaaccacaannnnnnnnnnnnncggtgaatcacctctgaggcctgggcccaggttcaggggaaccttccaagggtgtctggtttgccctgcctctggctccagaacagaaagggagcctcacgctggctcacacaaaacagtgacactgactaaggaactgcagcatttgcacaggggaggggggtggcctcctttctagaagcctggggggcagctgacttggggggcagactgaaactaggcccatcattcaatgtctgaattcacacggggtaccgggggttgggccatttaacccaagggctggcctagaggtggctaaaaaaacca

SEQ ID NO: 76330 - DNA, 989 bp, Homo Sapiens
  misc_feature (537)..(549): n is a, c, g, or t
aggtagcgaggcctgggtggcgaattcggcacgaggtatggctcggggctcgctgcgccggttgctgcggctcctcgtgctggggctctggctggcgttgctgcgctccgtggccggggagcaagcgccaggcaccgccccctgctcccgcggcagctcctggagcgcggacctggacaagtgcatggactgcgcgtcttgcagggcgcgaccgcacagcgacttctgcctgggctgcgctgcagcacctcctgcccccttccggctgctttggcccatccttgggggcgctctgagcctgaccttcgtgctggggctgctttctggctttttggtctggagacgatgccgcaggagagagaagttcaccacccccatagaggagaccggcggagagggctgcccagctgtggcgctgatccagtgacaatgtgccccctgccagccggggctcgcccactcatcattcattcatccattctagagccagtctctgcctcccagacgcggcgggagccaagctcctccaaccacaannnnnnnnnnnnncggtgaatcacctctgaggcctgggcccagggttcaggggaaccttccaaggtgtctggttgccctgcctctggctccagaacagaaagggagcctcacgctggctcacacaaaacagctgacactgactaaggaactgcagcatttgcacaggggaggggggtgccctccttcctagaggccctgggggccaggctgacttggggggcagacttgacactaggccccactcactcagatgtcctgaaattccaccacgggggtcaccctggggggttagggacctatttttaacactagggggctggcccactaggagggctggccctaagatacagacccccccaactccccaaagcggggaggagatatttattttggggagagtttggaggggagggagaatttattaataaaagaatctttaactttaaaaaaaa

SEQ ID NO: 76331 - DNA, 1006 bp, Homo Sapiens
  misc_feature (880)..(901): n is a, c, g, or t
cggtccaaggtagcgaggcctgggtggcgatctcggcacgaggggtccctgccggccggcggcgggcgcagacagcggcgggcgcaggacgtgcactatggctcggggctcgctgcgccggttgctgcggctcctcgtgctggggctctggctggcgttgctgcgctccgtggccggggagcaagcgccaggcaccgccccctgctcccgcggcagctcctggagcgcggacctggacaagtgcatggactgcgcgtcttgcagggcgcgaccgcacagcgacttctgcctgggctgcgctgcagcacctcctgcccccttccggctgctttggcccatccttgggggcgctctgagcctgaccttcgtgctggggctgctttctggctttttggtctggagacgatgccgcaggagagagaagttcaccacccccatagaggagaccggcggagagggctgcccagctgtggcgctgatccagtgacaatgtgccccctgccagccggggctcgcccactcatcattcattcatccattctagagccagtctctgcctcccagacgcggcgggagccaagctcctccaaccacaaggcggggctggggcggtgaatcacctctgaggcctgggcccagggttcaggggaaccttccaaggtgtctggttgccctgcctctggctccagaacagaaagggagcctcacgctggctcacacaaaacagctgacactgactaaggaactgcagcatttgcacaggggaaggggggggcccctccttcctaaaaggccctgggggccagacttgacttgggggggcaaaatttgaacctaaggccccccttcactcagaaaggtcctgaaaaatcccccaccnnnnnnnnnnnnnnnnnnnnnntaaggcgaactaattttctcaaccctaagggggcgctgggccccccttaaggggggtctgggatctcaacgaaaacacggaaacccccgctaactctcccccaaa

SEQ ID NO: 76332 - DNA, 602 bp, Homo Sapiens
  misc_feature (428)..(438): n is a, c, g, or t
gaccaaggcaatggacagtttattgaggcttctaaaaagtaatgagtggctctcattatgttaaaatctcttttaattaaatattttgcattttacaaaggcgcctgcagtttctttcactttttaaatctaagagtataacctgtttcctttctgtaatactttagctcatacccagcagaatcaataggtgtaaaaaattaaattaaacttgtattttttaactatgaaacagttttgggggaaacacaaatgtatatatttatattacaaaaaaacattaaatgcctgtacaggtgtcttgatttcataatttacttcaaagatattgaattatcaatttaaatacaaaaatgctacattaaatatacagaataagatttaatacaaatccttttttaatttttcttttcggttggttaagacannnnnnnnnnngtgtggagatgtttacatttttatgtcatccatctccataaactataaacttctgaataggaggggaagtttattttctccccctgtccctctccctcggtgaaggaaaaataactgccaaggccatgtttttaataaattataaaagtccgggaccgacgcac

SEQ ID NO: 76333 - DNA, 611 bp, Homo Sapiens
  misc_feature (514)..(535): n is a, c, g, or t
gcagagatcgccacatcgtcggacaaggtcaaggacgggggcggcgggaacgagggctctccatgcccaccgtgtcccgggcccatagccgggcaagccctaggaggcagccgggcgtcgccggccccggcgccgtcacgctcgccctcggcgcagtgtccttttccaggcgggacggtgctgtcccggcctctctaatacaccgcgcccttctatcccggctacacgaactatggctccttcggacaccttcatggccacccggggcccgggccaggccccacaaccggtccggggtctcatttcaatggattaaaccagaccgtgttgaaccgagcggacgctttggctaaagacccgaaaatgttgcggagccagtctcagctagacctgtgcaaagactctccctatgaattgaagaaaggtatgtccgacatttaacgcgggctgcgtcggtcccggacttttctaatttattaaaaacatggccttggcagttatttttccatcaccnnnnnnnnnnnnnnnnnnnnnnaaataaactacccctcctattcagaagtttatagtttatggagatggatgacataaaaatgtaaacatctccatac

SEQ ID NO: 76334 - DNA, 759 bp, Homo Sapiens
  misc_feature (24)..(24): n is a, c, g, or t
  misc_feature (48)..(48): n is a, c, g, or t
  misc_feature (282)..(303): n is a, c, g, or t
  misc_feature (384)..(424): n is a, c, g, or t
gcctcttcggacaccttcatggcnaacccggggccccggccaggcccnacaaaccggtccggggtctcatttcaatggattaaaccagaccggtgttgaaccgagcggacgctttggctaaagacccgaaaatgttgcggagccagtctcagctagacctgtgcaaagactctccctatgaattgaagaaaggtatgtccgacatttaacgcgggctgcgtcggtcccggacttttctaatttattaaaaacatggccttggcagttatttttccatcaccnnnnnnnnnnnnnnnnnnnnnnaaataaactacccctcctattcagaagtttatagtttatggagatggatgacataaaaatgtaaacatctccacacacacnnnnnnnnnnnnnnnnnnnnnnnnnnnnnnnnnnnnnnnnngatttgtattaaatcttattctgtatatttaatgtagcatttttgtatttaaattgataattcaatatctttgaagtaaattatgaaatcaagacacctgtacaggcatttaatgtttttttgtaatataaatatatacatttgtgtttcccccaaaactgtttcatagttaaaaaatacaagtttaatttaattttttacacctattgattctgctgggtatgagctaaagtattacggaaaggaaacaggttatactcttagatttaaaaagtgaaagaaactgcaggcgcctttgtaaaacccaaaatatttaattaaaagagatttaaaca

SEQ ID NO: 76335 - DNA, 398 bp, Homo Sapiens
  misc_feature (100)..(127): n is a, c, g, or t
tgtgacccagactgcctccgggcctgccaggagcagatcgaagccctgctggagtcaagcctgcgccaggcccagcagaacatggaccccaaggccgccnnnnnnnnnnnnnnnnnnnnnnnnnnnntggacctggcttgcacacccaccgacgtgcgggacgtggacatctgagggcgccaggcaggcgggcgccaccgccacccgcagcgagggcggagccggccccaggtgctccactgacagtccctcctctccggagcattttgataccagaagggaaagcttcattctccttgttgttggttgttttttcctttgctctttcccccttccatctctgacttaagcaaaagaaaaagattacccaaaaactgtctttaaaagagagagagaga

SEQ ID NO: 76336 - DNA, 712 bp, Homo Sapiens
  misc_feature (100)..(100): n is a, c, g, or t
  misc_feature (422)..(422): n is a, c, g, or t
  misc_feature (426)..(426): n is a, c, g, or t
  misc_feature (428)..(428): n is a, c, g, or t
gcccgaggaggtactgcaaatgagctgctcttgttgacaagttcaatggaatcctgcccgcaatgcccggcacgatttcattgaccacttcctctccaanaatgcaagaggcggaggagaccaaacagatcatccgcaaacacgcgcagaccttcgttgccctctgtgccacagatgtgaagttcatttccaatccgccctccatggtggcagcggggagcgtggtggccgcagtgcaaggcctgaacctgaggagccccaacaacttcctgtcctactaccgcctcacacgcttcctctccagagtgatcaagtgtgacccggactgcctccgggcctgccaggagcagatcgaagccctgctggagtcaagcctgcgccaggcccagcagaacatggaccccaaggccgccgaggagganggananagaggaggaggagtggacctggcttgcacacccaccgacgtgcgggacgtggacatctgagggcgccaggcaggcgggcgccaccgccacccgcagcgagggcggagccggccccaggtgctccactgacagtccctcctctccggagcattttgataccagaagggaaagcttcattctccttgttgttggttgttttttcctttgctctttcccccttccatctctgacttaagcaaaagaaaaagattacccaaaaactgtctttaaaagagagagagaga

SEQ ID NO: 76337 - DNA, 1200 bp, Homo Sapiens
  misc_feature (1092)..(1100): n is a, c, g, or t
gttgaagttgcaaagtcctgggagcctccagagggctgtcggcgcagtagcagcgagcagcagagtccgcacgctccggcgaggggcagaagagcgcgagggagcgcggggcagcagaagcgagagccgagcgcggacccagccaggacccacagccctccccagctgcccaggaagagccccagccatggaacaccagctcctgtgctgcgaagtggaaaccatccgccgcgcgtaccccgatgccaacctcctcaacgaccgggtgctgcgggccatgctgaaggcggaggagacctgcgcgccctcggtgtcctacttcaaatgtgtgcagaaggaggtcctgccgtccatgcggaagatcgtcgccacctggatgctggaggtctgcgaggaacagaagtgcgaggaggaggtcttcccgctggccatgaactacctggaccgcttcctgtcgctggagcccgtgaaaaagagccgcctgcagctgctgggggccacttgcatgttcgtggcctctaagatgaaggagaccatccccctgacggccgagaagctgtgcatctacaccgacaactccatccggcccgaggagctgctgcaaatggagctgctcctggtgaacaagctcaagtggaacctggccgcaatgaccccgcacgatttcattgaacacttcctctccaaaatgccagaggcggaggagaacaaacagatcatccgcaaacacgcgcagaccttcgttgccctctgtgccacagatgtgaagttcatttccaatccgccctccatggtggcagcggggagcgtggtggccgcagtgcaaggcctgaacctgaggagccccaacaacttcctgtcctacaaccgccctcacacgcttcctctccagagtgatcaagtgtgacccagactgcctccgggcctgccaggagcagatcgaagccctgctggagtcaagcctgcggcaggcccagcaaaacatggaccccccagccgccgagggaggagaaaaaagagaaggaggaggtggacctggcttggacacccaccgacgtgccgggacgtggacatctgaaggcgccaggcaannnnnnnnnccaccgccaccctgaagcaaagggcggaacccggccccaagggggctccactggacggttccctcctcctccggagcattttggaatacccgaaagggaa

SEQ ID NO: 76338 - DNA, 1531 bp, Homo Sapiens
  misc_feature (85)..(119): n is a, c, g, or t
aagatcgtatcgactcactatagggcgctaggtgttagtagccgaacgacgagcgcagcgagtcattgagcgaggaagcggccgnnnnnnnnnnnnnnnnnnnnnnnnnnnnnnnnnnncagtcgacggtaccggacatatgcccgggaattcggccattacggccggggacaagtgtgaagcctggaagccggcgggtgccgctgtgtaggaaagaagctaaagcacttccagagcctgtccggagctcagaggttcggaagacttatcgaccatggagcgcgcgtcctgcttgttgctgctgctgctgccgctggtgcacgtctctgcgaccacgccagaaccttgtgagctggacgatgaagatttccgctgcgtctgcaacttctccgaacctcagcccgactggtccgaagccttccagtgtgtgtctgcagtagaggtggagatccatgccggcggtctcaacctagagccgtttctaaagcgcgtcgatgcggacgccgacccgcggcagtatgctgacacggtcaaggctctccgcgtgcggcggctcacagtgggagccgcacaggttcctgctcagctactggtaggcgccctgcgtgtgctagcgtactcccgcctcaaggaactgacgctcgaggacctaaagataaccggcaccatgcctccgctgcctctggaagccacaggacttgcactttccagcttgcgcctacgcaacgtgtcgtgggcgacagggcgttcttggctcgccgagctgcagcagtggctcaagccaggcctcaaggtactgagcattgcccaagcacactcgcctgccttttcctgcgaacaggttcgcgccttcccggcccttaccagcctagacctgtctgacaatcctggactgggcgaacgcggactgatggcggctctctgtccccacaagttcccggccatccagaatctagcgctgcgcaacacaggaatggagacgcccacaggcgtgtgcgccgcactggcggcggcaggtgtgcagccccacagcctagacctcagccacaactcgctgcgcgccaccgtaaaccctagcgctccgagatgcatgtggtccagcgccctgaactccctcaatctgtcgttcgctgggctggaacaggtgcctaaaggactgccagccaagctcagagtgctcgatctcagctgcaacagactgaacagggcgccgcagcctgacgagctgcccgaggtggataacctgacactggacgggaatcccttcctggtccctggaactgccctcccccacgagggctcaatgaactccggcgtggtcccagcctgtgcacgttcgaccctgtcggtgggggtgtcgggaaccctggtgctgctccaaggggcccggggctttgcctaagatccaagacagaataatgaatggactcaaactgccttggcttcaggggagtcccgtcaggacgttgaggacttttcgaccaattcaaccctttgccccacctttattaaaatcttaaacaacgaaaaa

SEQ ID NO: 76339 - DNA, 844 bp, Homo Sapiens
agcagcaaatgaagattataacttatatacttttgatatgcgtgcactggacactcctgtaatggtccatatggatcatgtatctgcagtgcttgatgtggattactctcccactgggaaggagtttgtgtctgctagtttcgataaatctattcgaatctttcctgtagacaaaagtcgaagcagggaggtatatcatacaaagagaatgcaacatgttatctgtgtaaaatggacttctgacagcaagtatattatgtgtggatctgatgaaatgaacattcgcctgtggaaagctaatgcttctgaaaaattgggtgtgcttacatcacgagaaaaagcagccaaggattataaccagaaattgaaggagaaatttcagcattatcctcatataaaacgtatagctcgtcatcgacatctaccaaaatctatctatagccagattcaggaacagcgcatcatgaaagaagctcgtcgacgaaaggaagtgaatcgtattaaacacagcaagcctggatctgtgccacttgtgtcagagaagaagaaacacgtagtggcagttgtaaaataattggtattcctaacaatcctgatgtataattatttgttacttttgatttgagaactctacaaagtaaaagtgctgggactagattagtggcaaagagtttcagttatatgtgtagagctttatggtaactccttttagctacccgtgaaaacatgatccttaaaggtggctagtgggtaagacgtgtcgttatccttaatctgcattcttctttcatcgtagaatacagtaatttgcaactcattttttcatgtgaattaccagatatag

SEQ ID NO: 76340 - DNA, 1890 bp, Homo Sapiens
tggcagtaactctcacgggttaaaggtagcgaggcctgggtgttgaattcggcacgaggggatggcggcagcagtggcggacgaggcggtggcgcgcgatgtgcagcggttgctagtgcagttccaggatgagggcgggcagctgctgggttccccgttcgacgtgcccgtggacatcaccccggacaggctgcagctcgtgtgcaacgcgctactggcccaggaggatcccctgccactggctttctttgtccacgatgctgagatcgtctcctcactggggaagacgttggagtcccaggcagtggagacagagaaggtcctagacatcatctaccagccacaggctatcttcagagtccgggctgtgactcgctgcaccagctccttggagggtcacagtgaggcagtcatttctgtggccttcagccctacgggaaagtacctggccagtggctctggagacaccaccgtgcgcttctgggatctcagcacagagacaccacatttcacatgcaagggacacagacactgggtccttagtatatcctggtctccagatggcaagaagctggcctcaggctgcaagaatggccagattctcctctgggacccaagcacagggaagcaggtgggcaggaccctcgctggccacagcaagtggatcacaggcctgagctgggagcccctccatgcgaaccctgagtgccgctatgtggccagcagctccaaggatggcagtgtgcggatctgggacacaactgcaggccgctgtgagcgcatctcaccgggcacacccagtcggtcacctgtctccggtggggaggggacgggctttctctaatctgactcccaggaccgaaccatcaaagtctggagagctcatgacggtgtgctgtgccggactctgcaaggccacggccactgggtgaacaccatggccctcagcactgactatgccctgcgcactggggcctttgaacctgctgaggcctcagttaatccccaagacctccaaggatccttgcaggagttgaaggagagggctctgagccgatacaacctcgtgcggggccagggtccagagaggctggtgtctggctccgacgacttcaccttattcctgtggtccccagcagaggacaaaaagcctctcactcggatgacaggacaccaagctctcatcaaccaggtgctcttctctcctgactcccgcatcgtggctagtgcctcctttgacaagtccatcaagctgtgggatggcaggacgggcaagtacctggcttccctacgcggccacgtggctgccgtgtaccagattgcgtggtcagctgacagtcggctcctggtcagcggcagcagtgacagcacactgaaggtgtgggatgtgaaggcccagaagctggccatggacctgcccggccacgcggatgaggtatatgctgttgactggagtccagatggccagagagtggcaagtggtgggaaggacaaatgcctccggatatggaggagatgagacggcccgaagttctctctgacccccacctcgactcggcctctgccagctgccttccctgccagagaacaaaggctgagatggcagtgcacacaccctccccaccagtggggacctgagaatgcgtgtggcctgctgtcctcgatagaccggaatggggttttcccacagatccccgcctgtggcacaccccagagccagaaatcgaaggtcacaggaagttgtcactgaacttggcccgtgtctgctactctgtaccttgctggtacagacaggggtggtgggcagccaggctctatgagtgggcccctagtgtcagctctgtacagggtcagatcccaggttctatgaccaaataagtaacttaaaaa

SEQ ID NO: 76341 - DNA, 1515 bp, Homo Sapiens
  misc_feature (1274)..(1278): n is a, c, g, or t
  misc_feature (1280)..(1285): n is a, c, g, or t
  misc_feature (1287)..(1287): n is a, c, g, or t
  misc_feature (1290)..(1291): n is a, c, g, or t
  misc_feature (1293)..(1346): n is a, c, g, or t
  misc_feature (1382)..(1382): n is a, c, g, or t
tatacggctaggtagcaggctgggttggaattcggcacgagggggaagccggaggagaccgggtcgactgggcagagcggcagagggtcgaggagcctgctctgcacgcccagggagtagaagtgggcagggagcagggtcacgtgagggagcgcgccgcgactgagcttgggtccgactggagctcaggctcgcgacccagactggtgggccaggcctccaagccggccttacacccaatccaaggaggacagaccggacacagagggacggagcgagcaaggagacatggcttcatcattcctgcccgcgggggccatcaccggcgacagcggtggagagctgagctcaggggacgactccggggaggtggagttcccccatagccctgagatcgaggagaccagttgcctggccgagctgtttgagaaggctgccgcgcacctgcaaggcctgattcaggtggccagcagggagcagctcttgtacctgtatgccaggtacaaacaggtcaaagttggaaattgtaatactcctaaaccaagcttctttgattttgaaggaaagcaaaaatgggaagcttggaaagcacttggtgattcaagccccagccaagcaatgcaggaatatatcgcagtagttaaaaaactagatccaggttggaatcctcagataccagagaagaaaggaaaagaagcaaatacaggttttggtgggccagttattagttctctatatcatgaagaaaccatcagggaagaagacaaaaatatatttgattactgcagggaaaacaacattgaccatataaccaaagccatcaaatcgaaaaatgtggatgtgaatgtgaaagatgaagagggtagggctctacttcactgggcctgtgatcgaggacataaggaactagtcacagtgttgctgcaacatagagctgacattaactgtcaggacaatgaaggccaaacagctctacattatgcctctgcctgtgagtttctggatattgtagagctgctgctccagtctggtgctgaccccactctccgagaccaggatggctgcctgccagaggaggtgacaggctgcaaaacagtttctttggtgctgcagcggcacacaactggcaaggcttaatcaaaagactggaaaactgcagtctgtaatagcataaggcttccattatgaaagaaaactacaaaaataatacttcttttccacccgtctttggtatgtattggctaataaaatcagttctgtggaactgggaaaannnnnannnnnnanaannannnnnnnnnnnnnnnnnnnnnnnnnnnnnnnnnnnnnnnnnnnnnnnnnnnnnntcatcaaccttcccccggaacaaacacattcaccancacttaaagaaatttgtggccccccttgggcccttaaaaaatttttcaaaacatttcttttgggcgcccggggccccgtagggaaagggaacccggggcccaaacgggtttccccaaggaaaaacccggggcc

SEQ ID NO: 76342 - DNA, 744 bp, Homo Sapiens
agcacgttctttcacatacattatttggcaaaatacataactgtatctgcaaactatttcaggcctttatgtacagatatgaacctcttaccattttattaagaaaggctaagaataataaaattgtgtactactctttctattttttctcaccatatgtgaatttttttcagtttactaagataaaattcagaaatatttaggtgaatggtggtagcacatctattgctacttagttgaaatggacaacataacaaaaaagaatggagaaattaattcttaattaccttgtcaagcatgtcacctggtgctatgtccaaagactttccaagaagcagaaaatctgaaactccttgaactaatgccaacagacagtgacctccagaaatcaaaagaactaaaaaaggaaattctactttattggtcaacctaatagtaagtgcatgagcctccatatgatgaatgggaatgaatggcttttttaactgtcctaccagctgtaagctaaatgataagcccactcccaggcttaaagcaagtcctggttttatggtagttgcaattgctgagaggtcacttggagagactccactggcagaaagagcttcttgtactattcgttgaatattttctctgtgaagctgttgagctgctggaggaacaatcccacctgttctgaaagaaagaaagacagcattttgtagttttaagattgtaaaaatgaagaaaaatgatattacagct

SEQ ID NO: 76343 - DNA, 490 bp, Homo Sapiens
taaggctgaggagttgccctcagaaaagaacttggaatatgatgatgaaaccatggaattgattctgccttctggtgccagagtgggtcatcgctccttgatgagatactacaaacagcgatttggcttgtcaagagctgtggcagttgccaaaaatcggaaggccgtgggccgagtacttcagcagtacagagccctgggatggactggcagcacaggagcggctcttatgcgagagcgagacatgcagtatgtccaaaggatgaaatcaaaatggatgctgaagacaggaatgaagaacaatgccaccaagcagatgcactttcgggtccaagtgagattctgagagtctgctgggattgagcaatcatctcctgcccaagtttcctccttgccctgaggaccagtgaaagacagatcataggagagacccttttgctgctacttcattcgttctgacctaataataaaagttagacccataaaaaaa

SEQ ID NO: 76344 - DNA, 1230 bp, Homo Sapiens
aaaattgcacttctgaatttactccacaatatcaaagtttaatcagtacagtccaaaagatctatacagaggtatgattcttaaaaaattataattgagttgtacagagccagtgctcagggaatgccactgacaggaattcccgacagctccagtcattgtgtgtgcttcttgggcatgggttcaggtctgtgcgtactcggtgttgttataaaggtagtccaagagtggaggattgggaaaaggggaaggaatattcagaattggagacatcttgctttacacattccacataaattacctgaggcacacatccaaaatatcctgagaattagatacagccatttccagtttggaagaaggacagaataatagagaaccttctggaacttattcagaaaatcaaaggagttcataaagcaagattagtgacagaggcaagagctgaactgaagtacctggacttattccagcactaggatttaaagcaccagctaaaatcccatctgtcctggatccaggagacttgaacgcttgggcactgtggctgggaatagggggaaaaagtctccatccccattgcccacacactgtgcaatcctgaaatctttgttttctacagctccctctagctagtatcagtttccacatcggggtgggtttagaagcaaataactttctatcttgccatcagccttgtgcctctgaattctgcacacagaatttcttccacaatgggtagaaccttttgaacactaatggaagaaaggaaacaaaacgtatgttgaaagacaaggtatttaagaaattaaaacaaatgctcatttactgtttttaatatgtagtcaaatatgacagcagtcttacacaaatagctccctcctcccccttctaaaatcccaaatttgttgactcctactgtaagtgaaaaacatggtttgcttctgaaaatagcaatcaacagcaaaaacacaggtaacatttggtccccaccagcttccacacctttaaagataaattgtgtcactgaggcagtcaatacactaaatttcttatcaaactattactaggggaaaaaaatcagatttcccacacactgtaagcagaaccgaaagagctgcagagaaacttggtttaagaagctgtgtgaagaaaacattaatgacttattgcaattgtaataatccccaggtaaaagatggatgtcaaattaatggactgtaaggaaat

SEQ ID NO: 76345 - DNA, 783 bp, Homo Sapiens
acagccatttccagtttggaagaaggacagaataatagagaaccttctggaacttattcagaaaatcaaaggagttcataaagcaagattagtgacagaggcaagagctgaactgaagtaccttgacttattccagcactaggatttaaagcagcagctaaaatcccatctgtctgatccaggagacctgagcaagccaggcctggcttgctcaggtctatgtggtgaagagatgggttgctaagggaaaacagacggagcgaagggtgaagagcagatgcgttgggaacagatgtctgtgggtggttatttaaggaagaggaaagcacagtcttattgagcgtggcttggatggaggggttactccgagaactctggagaccagaggagcttcttatacccaggtgggtcatagcagctgggatgtcgtccacactattccccacactcatactgccaaagtggtggtcggtggtgtccagggaggctggcaggggtgtcgagtagtggaggttggttagatctggcaatgaccctccagtgttcaaggtccccaagaagggtgagaggcctaggtttagaccattatgcggaaaagcattgccacctccaacatcacaggatcgagggcgtcctgacagggactgaatctccttggtctcccacagttgttttggcagtggcttcggaacatttaacagattctcttctttcaatgggccagggaaagatgctacttccccatgtccattattctcaccatcacagaaacccatgtatggg

SEQ ID NO: 76346 - DNA, 1444 bp, Homo Sapiens
  misc_feature (113)..(147): n is a, c, g, or t
aaatcagatccacattaaattagggtgtgggccggcccttaaagctgtcccggtttttttaatttatggtcccgaacgacgagcgcagcgatcagtgagcgaggaagcggcgnnnnnnnnnnnnnnnnnnnnnnnnnnnnnnnnnnncagtcgacggtaccggacatatgcccgggaattcggccattacggccgggggtgtaacccacgggtgcgcgcccacgaccgccagactcgagcagtctctggaacacgctgcggggctcccgggcctgagccaggtctgttctccacgcaggtgttccgcgcgccccgttcagccatgtcgtccggcatccatgtagcgctggtgactggaggcaacaagggcatcggcttggccatcgtgcgcgacctgtgccggctgttctcgggggacgtggtgctcacggcgcgggacgtgacgcggggccaggcggccgtacagcagctgcaggcggagggcctgagcccgcgcttccaccagctggacatcgacgatctgcagagcatccgcgccctgcgcgacttcctgcgcaaggagtacgggggcctggacgtgctggtcaacaacgcgggcatcgccttcaaggttgctgatcccacaccctttcatattcaagctgaagtgacgatgaaaacaaatttctttggtacccgagatgtgtgcacagaattactccctctaataaaaccccaagggagagtggtgaacgtatctagcatcatgagcgtcagagcccttaaaagctgcagcccagagctgcagcagaagttccgcagtgagaccatcactgaggaggagctggtggggctcatgaacaagtttgtggaggatacaaagaagggagtgcaccagaaggagggctggcccagcagcgcatacggggtgacgaagattggcgtcaccgttctgtccaggatccacgccaggaaactgagtgagcagaggaaaggggacaagatcctcctgaatgcctgctgcccagggtgggtgagaactgacatggcgggacccaaggccaccaagagcccagaagaaggtgcagagacccctgtgtacttggcccttttgcccccagatgctgagggtccccatggacaatttgtttcagagaagagagttgaacagtggtgagctgggctcacagctccatccatgggccccattttgtaccttgtcctgagttggtccaaagggcatttacaatgtcataaatatccttatataagaaaaaaaatgatctcttatcaattagcactcactaatgtactactaattgagcaacctacgcactcagttgactacgtaaatctgtcaggtcttttgtgatttcctctgatgcaggagaggaaaaattgtaattgatgaaaataatgaatgaaaatcaacagatgaataaatggttctttataagtgaaaaaa

SEQ ID NO: 76347 - DNA, 2278 bp, Homo Sapiens
  misc_feature (84)..(118): n is a, c, g, or t
  misc_feature (1308)..(1321): n is a, c, g, or t
atcaaacgtatctgaccaatagtggcgccatcctcttgagcgaacgacgagcgcagcgaagctagttagcgaggaagcggccgnnnnnnnnnnnnnnnnnnnnnnnnnnnnnnnnnnncagtcgacggtaccggacatatgcccgggaattcggccattacggccggggagacgcgcgggcgggaagatggcggctgggttcaaaaccgtggaacctctggagtattacaggagatttctgaaagagaactgccgtcctgatggaagagaacttggtgaattcagaaccacaactgtcaacatcggttcaattagtaccgcagatggttctgctttagtgaagttgggaaatactacagtaatctgtggagttaaagcagaatttgcagcaccatcaacagatgcccctgataaaggatacgttgttcctaatgtggatctaccacccctgtgttcatcgagattccggtctggacctcctggagaagaggcccaagtggctagccagttcattgcagatgtcattgaaaattcacagataattcagaaagaggacttatgcatttctccaggaaagcttgtctgggttctatactgtgatctcatttgcctcgactacgatggaaacattttggatgcctgcacatttgctttgctagcggctttaaaaaatgtacagttgcctgaagttactataaatgaagaaactgctttagcagaagttaatttaaagaagaaaagttatttgaatattagaactcatccagttgcaacttcctttgctgtgtttgatgacactttgcttatagttgaccctactggagaggaggaacatctggcaacaggaaccttaacaatagtaatggatgaggaaggcaaactctgttgtcttcacaaaccaggtggaagtgggctaactggagctaaacttcaggactgtatgagccgagcagttacaagacacaaagaagttaaaaaactgatggatgaagtaattaagagtatgaaacccaaataaacagccaccacattttcaaaacagatttgtaaaaattgtatttgttaacactgtgcacaaacgttttatactaaataaatatcaaactacattcttctgaaagatgtttctattatttcttaggtcacttccatatatattatgtatagtgaaaccatttttaaaaagcaatgacttaggcaaaccaaccctagtttgttaaaccatttccctgtttttatttaaaaatgataaggttgtgcttctgtataaagtttgtacatctagcaatgtaaaatactgacacattnnnnnnnnnnnnnngtagaaactcaattcttttgattcagtgctcttgtgtttttaaaaaaggaacaaaaagtaatgcaagactcaaaattttggagtggttggcgtgcctctcttcattttactttttgactggctgcctgtatgccgatgatgatgtagctgagctgtttgtgctgctgctgctgccatagccatttgatgctgcaagaatcgcaactgcagctgcctgtgactgcataaaacttcctactccagtaaggttaataacagcagcttgctgagcagataaggcctgttcttgactggttgaaccttgctcagaaccctgctcccctggctgttgaggactacaagttgtgggctgctgaggttgttgtggtgtaaactgggagagctgctgttgctgctgctgcagagtgttaaaaataagtgaaccacctggaagctggagtagatttaagggcctgagacttgaagtattttttaaaccaaatggaacacctgcttgagaagctgcctgcattgcactgggcagtgcatttggtagcagacctcctgagggtagaaggccgctcaggtttattcctgcaggagttatggcaccagtgttacagcccagcatggggtttgaaccactcatcaaagcctgggccccacaaacagagcccactacattgatgaagttaagtccagcagagtttgccatgacctgggtggccgtggttcctggagttatagatgttaccatggtggaaagaggaatggttgttacaggcattgcctggctcagagacctttgctgctgagcaaactgagttaacaaagtgggctgaggggtgaagcctgaatcttggggagtaggggtggctgaaggggtactaggagttgagctctgagcatcaggagggtgtggggtggatggaggggttggtgtaaaagtagccggcttaggagttccagatcctgctc

SEQ ID NO: 76348 - DNA, 879 bp, Homo Sapiens
gggagacgcgcgggcgggaagatggcggctgggttcaaaaccgtggaacctctggagtattacaggagatttctgaaagagaactgccgtcctgatggaagagaacttggtgaattcagaaccacaactgtcaacatcggttcaattagtaccgcagatggttctgctttagtgaagttgggaaatactacagtaatctgtggagttaaagcagaatttgcagcaccatcaacagatgcccctgataaaggatacgttgttcctaatgtggatctaccacccctgtgttcatcgagattccggtctggacctcctggagaagaggcccaagtggctagccaattcattgcagatgtcattgaaaattcacagataattcagaaagaggacttatgcatttctccaggaaagcttgtctgggttctatactgtgatctcatttgcctcgactacgatggaaacattttggatgcctgcacatttgctttgctagcggcttttaaaaaatggacagttgcctgaaggttactataaatggaagaaactgctttagcaaaaagttaatttaaaggaagaaaaggtatttggaatattaaaacctcatccaggtttgcaacttccctttgctggggtttgattgacactttgccttataggttgacccctacctggaaaaggagggaacatcctgggcaaccaggaaaccttaaccaatagtaattggatggagggaaggcaaaactcctgggtggcccttcaccaaacccaggtggggaaggggggcctaacctggggacctaaaacttctccgggactggtattgaggccccagcgcggtttccccggaccccccagggaaggttttaacaaaaacttggg

SEQ ID NO: 76349 - DNA, 1141 bp, Homo Sapiens
  misc_feature (631)..(641): n is a, c, g, or t
cggtctaggtagcgaggcctgggtggcgaatccggcacgaggaagacgtctccattccagtgtgagcggaacccctgccccatggacagcaggccctgccgccatctgcccaagaccatctccttccattacctctctctgccttccaacctgaagacgcccatcacgctcttccgcatggccacagcctctgcccccggccgagctgggcccaacagcctgcggtttgggatcgtgggtgggaacagccgcggccactttgtgatgcagcgttcagaccggcagactggggatctgatccttgtgcagaacctggaggggcctcagacgctggaggtggacgtcgacatgtcggaatacctggaccgctccttccaggccaaccacgtgtccaaggtcaccatctttgtatccccctatgacttctgagggtacacaggggcactggggtgtggagagctgacctcatttctcttccccgaaggctcagcttcgggcaccgactgcgtggagcctcccgcctgttcccgcccactcaccagtgcacccaggcttctagggcagcgttgcacggcgccccatggaatagcacggaagagcagccacaaaactcaactgctgccatcactcnnnnnnnnnnnctgctttgaggcccttcccttagattatgcactaactttcttaaaactttttcatccaggggatgggtggctttccaaaatgctgtgcaaatggccttgtgagtttgaactagctggggagagaaaaggtggcaatgtgtgtcaggtgactatcagcccttctgcctttttgtagccaggcttgctatgaatgaaacggttctagtcgtgcggggggccctagtcatgcctctgcgcatgtggcataggaagtggagtctcctcccatgacccagcacgttgttcttatctgccttttcctctgtgacatgcctgcctgcctgccttctcatcagagagtcacaggagggccttaaaccccacgcagatccttctagaccaaggacccattgttaaaagcatggattctgcctgagttacttcccttttgagaaatcatatctcaaatacataacctggtaatataactgaaaaaataaaagtgattgctccttcaaaaa

SEQ ID NO: 76350 - DNA, 842 bp, Homo Sapiens
cctgcaatgtcctggctgtagaaaagtacttcctactgttggccgaggccaactcactggtcaatgctgctgtgtactcttgccgagatgctgagatgcgccgcaccttccgccgccttctctgctgcgcgtgcctccgccagtccacccgcgagtctgtccactatacatcctctgcccagggaggtgccagcactcgcatcatgcttcccgagaacggccacccactgatggactccaccctttagctaccttgaacttcagcggtacgcggcaagcaacaaatccacagcccctgatgacttgtgggtgctcctggctcaacccaaccaacaggactgactgactggcaggacaaggtctggcatggcacagcaccactgccaggcctccccaggcacaccactctgcccagggaatgggggctttgggtcatctcccactgcctgggggagtcagatggggtgcaggaatctggctcttcagccatctcaggtttagggggtttgtaacagacattattctgttttcactgcgtatccttggtaagccctgtggactggttcctgctgtgtgatgctgagggttttaaggtggggagagataagggctctctcgggccatgctacccggtatgactgggtaatgaggacagactgtggacaccccatctacctgagtctgattctttagcagcagagactgaggggtgcagagtgtgagctgggaaaggtttgtggctccttgcagcctccagggactggcctgtccccgatagaattgaagcagtcccacggggaggggatgatacaaggagtaaacctttctttacactctgaaaa

SEQ ID NO: 76351 - DNA, 1378 bp, Homo Sapiens
  misc_feature (1234)..(1243): n is a, c, g, or t
ggtcggattccgggatatcgtcgacccacgcgtccggctagctggcatggcggcctgcattgcagcggggcactgggctgcaatgggcctaggccggagtttccaagccgccaggactctgctccccccgccggcctctatcgcctgcagggtccacgcggggcctgtccggcagcagagcactgggccttccgagcccggtgcgttccaaccgccgccgaaaccggtcatcgtggacaagcaccgccccgtggaaccggaacgcaggttcttgagtcctgaattcattcctcgaaggggaagaacagatcctctgaaatttcaaatagaaagaaaagatatgttagaaaggagaaaagtactccacattccagagttctatgttggaagtattcttcgtgttactacagctgacccatatgccagtggaaaaatcagccagtttctggggatttgcattcagagatcaggaagaggacttggagctactttcatccttaggaatgttatcgaaggacaaggtgtcgagatttgctttgaactttataatcctcgggtccaggagattcaggtggtcaaattagagaaacggctggatgatagcttgctatacttacgagatgcccttcctgaatatagcacttttgatgtgaatatgaagccagtagtacaagagcctaaccaaaaagttcctgttaatgagctgaaagtaaaaatgaagcctaagccctggtctaaacgctggggaacgtccaaattttaatattaaaggaatcagatttgatctttgtttaactgaacagcaaatgaaagaagctcagaagtggaatcagccatggcttgaatttgatatgatgagggaatatgatacttcaaaaattgaagctgcaatatggaaggaaattgaagcgtcgaaaaggtcttgattctgagaatgaatttggttagttgcagaagatacattggctctaagaggatatattttgagaccaatttaatttcatttataagaacatagtaattaagtgaactaagcattcattgttttattaatactttttttctaaaataaaacttgtacaccagtttattactctaaaaagagaattacacatgccaaatggaccaatgtccatttgcttattggaggcaaagctacaatagaagtcagagcatcaccagaatggtctttaatgagcatggaacctgagcaaagggaataggtgggatgaannnnnnnnnnaattgtgaaacaattcataagcacaatatgatttacagaataataaacattcatgtacccactatcaggttaagaaatagaacatttattaatatgtaggaatgttaagaaataaaacatttaataagatctcaa

SEQ ID NO: 76352 - DNA, 745 bp, Homo Sapiens
aaccaagcaaggagcaaatggcctcagcccagatctgtaaaaacaatgatagaaattgaattctgccccacatgttgacagtagagttggaactggattcttgggattacttatctaaaaaactggagcatcaggtccatttctgttctgctggtttggaatcttttccgtaatgctatttattgccaacaatggcctctctttgtgtccatatatgccttacaccgtgctgacctgggtatcatccatgtgctctgaagcatccaactttactttgcaggtgcatcaatgtagtcctgtccctgaactgagtaaccgtgttcctgaaaagtacactagggaaattcacctgcttgcttgtctttgtattggcatggcacttgtgattgcaccatggagcatgctcagagctattaaattggtctcccatctcccaccaggatatgaaaggtccatatgggaggccacgtaatcacttattacagtggttacataatacactggctcactgcagactctcttgttttttgatacagtttcgtgctggcttcatttgccaattgtgttgtttagttcggaagtaagagggtcttgagattgaggggtagggagggctacactgactgatccgtggcttaagacaggagattatctctgtactccagtggcatctccttagccaagatgtgaaattaaaatcatagttcgcctcatttaaaaattctaataaagcactcaaactttg

SEQ ID NO: 76353 - DNA, 954 bp, Homo Sapiens
taaagaatgtaacatgtggggacacacaggggcagatgggatggtttagtttaggattttattagtgcatgccctaccctctgggggaacgtcccatctgaggttttcttctcggtggggggatttaacttctgtcctagggaaaacagtgtctgatgaggagtgtttccaacacaggctacatgaattcccctataccagtgcgaaagcagccaggagtccccgttggaaaagaacaatgccactctcttttatgtatcttggttctgcaactcatttgttgtaagtagggttaatcgagtatcaggttcacagtatcctgcccttattattttatgattcactgactcaagttccacgaagtccttagaaatggacctcttcatgtaaaatatcttgagaataataaatgtgagggaataagaaaggcaagctttggacacagatatgataggtgcatcagcttcggaagagaagaatgatgtgcagagtgttaggaagacatccgggctgctgagactcgggattagaagaaagagaggtaaataaagtgggtcctggaatcttttaggacttctgctgtaggacaaacagctgcctttggtgttttaatgtctcccaaagtacccttcagccaataaataccatctgttggtgccccccaaaccgatcctcccaaaacaataacttgtccgggccgccttcggtccctcgacaagcttttcctaaacccctcccccttggcgccgccggtccccaccccggcgcaaatggaaccattgccccctctaccgctgttctcccccaagggccacccccgggtccctgcacattagggcgcatccgtccctcgccccataccaccccgccaccaccgccgccgcatttcacgcacattacgtcgccgctcgtgtctctcgccccgccaacacctatttttgttttggcgctaac

SEQ ID NO: 76354 - DNA, 764 bp, Homo Sapiens
  misc_feature (112)..(112): n is a, c, g, or t
tccccattcaaagcaggagctgagtcctggagggaagtgctcgcctgagtcccactgtgtagtggtggcaggactgaactcgttctccaacagcccagagctcactctttancacccagaggtggagcaggtggcttagggggtggttatgtacttcacaagccaattcccttcagccaggagctcctgggtgcatttccgtgtcagaaacagtaccgagtcccaccccctctggaggcacagctgttgcgtcaggcaaggtcacctgcatttatttattgagcagcagtgctgtgtcaggcccagggaccgagcccctctccctgttcccctatggtgtctccgaggccctctgggagggccccacatctggagcagcacctcagagtggacagaaagcattagcgtccacgagctcacccgacgccgagcctgtgaggtgggctgatggtgcccgtctaacccagcgcttcagggaggtcagaatggagccgaacccagggctgtgagcatcacctctggagccctttcactttatgactgcttcctggacgggtggtgggaaggcaggagcctgggtccttaggctgggggcctctctccatccacccacctttccctcattccctctcttggagcagcagccgcccaggcctttagggagggagggtttctggggcccttgggttggagtggggtcgcgttgcattgtgttcatgaccatgtagctcatgttgaaattaaagtttttggcttttctaaaa

SEQ ID NO: 76355 - DNA, 729 bp, Homo Sapiens
gaggataacagaggcagacagaatccagagggctacagagaacctgaattcaacccatgtgtccccaagagattcagagaaaagaggtcaatgttagggaacagagatgccagttgaggggagggcattacctgggctattggggaaatgtggtctctttcctactgagcacatattcttgttgtatttgtgccaggctgtgctttctaaggactgctcttagccagtgactgcagagcagggataccaaggcaggcctgttacactctccccaacctccttggactgcaaacaatctaggacacctccaccaaacctcctcttgcactttccctctggcttccctcccagccttccttggtttggatgttttgtcccctccttaatttatgttgaaactctacataaactgtttactgttgaaacagtgtaagtattaggaggtgggacctttgggaagtgattaagtcaagtcacgaagatagagctttgcgaatgggatcaggtgcccttatgaaaaggcttgatagagggagtttgtcctgtggcccttctattttctgctctgtgaggacacaatgctcctcccttccaaaagatgcagcatgaaggcatcatcttggaaacagacatgagccctcaacagacaactgcacctactgatgttttgatgttgaacttcccagcctccagaactctgggaaaataaagtcctctttatacaaaaaa

SEQ ID NO: 76356 - DNA, 929 bp, Homo Sapiens
  misc_feature (407)..(423): n is a, c, g, or t
tttataaaactgttgcatcaagagaaaggttgtgttttattttctgaaatgagcacaaagtacacctttcacaataacactgaaagcaggtgcaaagactgacagtgacctttgactaaaggtagctttgtaaaaagaaaaataccaaataaatcagtgccctttctgattgttgtaaaactggaggtggggaggggctgtttgttacataaaagttggtccaaacttacaaaaaaagcacaaatgtgcatagttcagaagatctgcaagagggccataaaaggcttatgcccctaaaattagcatccacttaaaactgcaagaatacaaaataaaattgttaactagaatttgtgaagatgtacaatcgatctagtttttagaacagcatgaatttaagcaaaggnnnnnnnnnnnnnnnnnaaactattgtatgcaagacccttctccacataaaaataaagctgttgttgaattattattattcaagtctcttggattgctgccttaaattgcagctagaaaagtctttccagataaaaatgatgtgcctgaggaaaaacagatactcagtatggtaaccctctgcctctgcctctgccagttgatgtgctaatatgtcccctgtatccttgtgaatatccaggtccttgggcaggagaagtccaggtctgtccatgcatgaggctggggccactcggattttcctgtaagttaccaccatagttatagttgtgcatctttgctggcaaaggatgagtactctctggccccgtggaagggtcactgctgtttgccaggactgcaataggaccatggctatattcaaatctatggtccttgtctccactaaacaacatgggaccagcattgaggtaaatgtctccatatccagctactgaactgggaaatgactcagaaaaggcaga

SEQ ID NO: 76357 - DNA, 1200 bp, Homo Sapiens
  misc_feature (83)..(83): n is a, c, g, or t
gtgaaactggaacgcggatatctcatcgtggatcaggctcacagaggagctggaacgagtttaatagtggcccttcatacctnttgggagtcgccagcgacagatcccagtccttcctggccagccagttccggctccccgacccacacagccacatcggtcctcggtaacaccagcggcctgtggtccaccactccattcagcagctccatttggtccagcaaccttagcagcgcccttcccttcaccactccagcaaacacgctggcaagcatcggcctcatgggcacagaaaactcccctgctcctcacgctccctccacctccagtccagctgacgacttgggacagacctacaacccgtggcggatatggagccccacgattggaagaagaagctcggacccttggtctaattcgcactttcctcacgagaattaaattaagcaaaaaacaaacaaacatagtgggccctcgtctagatcatgatgtgccagtttctgagacatctttttaaggctcttactgcagctcccctccccaccctcctcttctgtgcaaaacagacccaagcagggcaggctcagaccactcgcttctttcagatctttcttgcaattatgataacatgagatttgctgttgtgcttttagagaaaagtctggactcagccacaaactctaataagacctgtacatctgagaacctttcccgttactgcgttttcaccacctgtcttccccatgctttatttatctgtatgaacacagatttgacattacagctaaggaaataatttgagttgattcagaaatcctggcatgtgacaattttgttaaattaccaagtttggtttttaataatttctcaatattatgcgccaagatctaattttaaaactgtatgaggactttgtgctgaaaatagagtatttttttaaagtaaggctgtcttggtttaaaagcagattacagaaatgtaagtcaacttaagaacagtgaatgaatgtaaaaacattcagtcgagaccatatgcattttctgtgctgtttgtacttgaggtatgtaacatttgtatacctgaacttattttaaagatgaactgaaatgcacatagccaagtcttgagatacaagattgaatgtgtatttcttaaaaatacaactttgtgttgtactttgaaataaatgatgcttttttc

SEQ ID NO: 76358 - DNA, 547 bp, Homo Sapiens
tctcatgttatcataattgcaagaaagatctgaaagaagcgagtggtctgagcctgccctgcttgggtctgttttgcaaagaagaggagggtggggaggggagctgcagtaagagccttaaaaagatgtctcagaaactggcacatcatgatctagacgagggcccactatgtttgttaaattaccaagtttggtttttaataatttctcaatattatgcgccaagatctaattttaaaactgtatgaggactttgtgctgaaaatagagtatttttttaaagtaaggctgtcttggtttaaaagcagattacagaaatgtaagtcaacttaagaacagtgaatgaatgtaaaaacattcagttgagaccatatgcattttctgtgctgtttgtacttgaggtatgtaacatttgtatacctgaacttattttaaagatgaactgaaatgcacatagccaagtcttgagatacaagattgaatgtgtatttcttaaaaatacaactttgtgttgtactttgaaataaatgatgcttttttcaaaaaa

SEQ ID NO: 76359 - DNA, 512 bp, Homo Sapiens
  misc_feature (86)..(153): n is a, c, g, or t
  misc_feature (184)..(396): n is a, c, g, or t
aatttgaagaacactttaattgacacagaatacatttcacatatttaacctttacaataaggttgtgacacattttccatgaaacnnnnnnnnnnnnnnnnnnnnnnnnnnnnnnnnnnnnnnnnnnnnnnnnnnnnnnnnnnnnnnnnnnnnaatttctcactcttccttctccctctccccnnnnnnnnnnnnnnnnnnnnnnnnnnnnnnnnnnnnnnnnnnnnnnnnnnnnnnnnnnnnnnnnnnnnnnnnnnnnnnnnnnnnnnnnnnnnnnnnnnnnnnnnnnnnnnnnnnnnnnnnnnnnnnnnnnnnnnnnnnnnnnnnnnnnnnnnnnnnnnnnnnnnnnnnnnnnnnnnnnnnnnnnnnnnnnnnnnnnnnnnnnnnnnnnnnnnntttttgtataggtataccatgatttgttgatgaacaaatttacctgttgatgaacatttacgttgttaccaagatttttgctattgaaaataaagtttttatgaatatttttatat

SEQ ID NO: 76360 - DNA, 657 bp, Homo Sapiens
  misc_feature (47)..(57): n is a, c, g, or t
atttcttgtgctttccattgttatggactttgtgtgttcgttttgtnnnnnnnnnnntgtttcctaaatatttaacaccaggaaaaatatttttaaatacactggtgctaattgaaacagaaggaaattttcagatcgaagatgtacaatgttaaatgttcataccagttaaactgcactttcccaaggggacagctggcatctacttgaaatgggcatcaagagaccaccaaatgtttacagtttctgtggcccgtttaagtgtaaaatgcagaagtggctctgtccccccagagttaaggatttgctacactggtcctctggaagcatttaagtagaagaaaaggcttatagtcagaatcactttagtaatcgtcttctggtccttggacttttctgttctgtaatgcttgtaacaatgaatatggtgttgccaatctagtctgatatcattgttgacctgtacttactttgtggatggttctacctggggttgcactggcacaaacagagccagaacactggactttcaaaagaccattttgacttctacagtgtccacacacatgaatttaaatgcacttgtaactggttaattaccatgaagtaagtctaacttccacttaataaaagtttttgtgtatctgcttctaaaaa

SEQ ID NO: 76361 - DNA, 580 bp, Homo Sapiens
  misc_feature (129)..(129): n is a, c, g, or t
  misc_feature (161)..(161): n is a, c, g, or t
ccaattcagggcactgtcctgggagatgcagccgacgtactgcaagatccaaaagctcaccaatgccatcagtgccttcaccctgaccaacctgctgcttgtgggttttggcatcacctgtctcatcancaacttacacctccagtttgtgacctttgtcntgcacaccattgttcgaggtttcttccactcagcctgtgggagtctctatgctgcagtgtgagtctgttgggctgaaatgccttcctgagctttgcaaccgtgatcagagaaccccagggaagggttgggagggccccaggcatcccctaatgcacctctctctgagaccctctgatggcagggagctcacttccttaaaggcagcctatcctgctgtaattgactccccctgttggagtcttcccttagaggaagctgaaatacctggcttgatgacactttggttctatgtctgctgtttgaaacggccctcagatgatttcccccctccgcctccaggaagaaagaatgttactgccttaataaaaaatgaaaagagaatgatgctcaaaatctttccaaataaaatgttcccaat

SEQ ID NO: 76362 - DNA, 2925 bp, Homo Sapiens
  misc_feature (688)..(688): n is a, c, g, or t
  misc_feature (2724)..(2724): n is a, c, g, or t
  misc_feature (2731)..(2731): n is a, c, g, or t
  misc_feature (2770)..(2770): n is a, c, g, or t
  misc_feature (2832)..(2832): n is a, c, g, or t
  misc_feature (2883)..(2883): n is a, c, g, or t
tcccgggatatcgccgaccacgcgtcccggggctgaggacctgaaggaggggaagccttatctggtcctgggacttctgtggcaagtcatcaagattgggttgtttgctgacattgaactcagcagaaatgaagctctgattgctcttttgagagaaggtgagagcctggaggatttgatgaaactctcccctgaagagctcttgctgaggtgggctaattaccacctggaaaatgcaggctgcaacaaaattggcaacttcagtactgacatcaaggactcaaaagcttattaccacctgcttgagcaggtggctccaaaaggagatgaagaaggtgttcctgctgttgttattgacatgtcaggactgcgggagaaggatgacatccagagggcagaatgcatgctgcagcaggcggagaggctgggctgccggcagtttgtcacagccacagatgttgtccgagggaaccccaagttgaacttggcttttattgccaacctctttaacagataccctgccctgcacaaaccagagaaccaggacattgactggggggctcttgaaggtgagacgagagaagagcggacatttaggaactggatgaactccctgggtgttaaccctcgagtcaatcatttgtacagtgacttatcagatgccctggtcatcttccagctctatganaagatcaaagttcctggggactggaacagagtaaacaaaccgccataccccaaactgggaggcaatatgaagaagcttgagaattgtaactacgcggtagaattggggaagaatcaagcgaagttctccctggttggcatcggtggacaagatctcaatgaaggaaaccgcactctcacactggccttgatttggcagctaatgagaaggtatacactgaatatcctcgaagaaattggtggtggccagaaggtcaatgatgacattattgtcaactgggtgaatgaaacattgagggaagcagagaaaagttcatccatctctagtttcaaggacccgaagattagtacaagtctgcctgttctggacctcatcgatgccatccaaccaggttccattaactatgaccttctgaagacagaaaatctgaatgatgatgagaaactcaacaatgcaaaatatgccatctctatggcccgaaaaattggagcaagagtgtatgccctgccagaagacctggttgaagtgaaccccaaaatggtcatgaccgtgtttgcctgcctcatggggaaaggaatgaagagggtgtgaggcccaatggggctgggtgggaggcggtgcactcactcctgactgcccggcacagatgctccagggatgattcaagccattccaaagttcaacttggtgacactctataagattccaaaaagcacatattagtgcagccaagtagcctctcctgtatttaacaaaaagtgcttcattctttgcaggaggcccaacctcctatatataggtttctattcttgatttatttgcttcttcgaaaatctagaggaaaagaaagaagttattttccaggtacccttctcgcttttgccattagccaaggatagaagctgcagtggtattaattttgatataatctttcaaaccagcttcatgtggcttcccttttctttgttcaagatgagggccaggaggggaaacatcacacctgccctaaaccctgttcctggaggtcagcatttgatctgttgcaagcccctctttctgtcccctcttcctaccctgcctcccatgactttgctcctcacacttttggaaccatgccttccgggggggcccatctcttctggccgtccttgtctctgggccacttggagtgtgtgataaatcagtcaagctgttgaagtctcaggagtctctggtagcctgcagaagtaagcctcatcatcagagcctttcctcaaaactggagtcccaaatgtcatcaggtttggttttttttcagccactaagaacccctctgcttttaactctagaatttgggcttggaccagatctaacatcttgaatactctgccctctagagccttcagccttaatggaaggttggatccaaggagggtgtaatggagcatcaagccactcggcggcagcatggagctataactaagcatcctttagggttctgcctctccaggcatttagccctcacattagatctagttactgtggtatggctaatacctgtcaacatttggaggcaatcctaccttgcttttgcttctagagcttagcatatctgattgttgtcaggccatattatcaatgtttacttttttggtactataaaagctttctgccacccctaaactccaggggggaaaatatgtgccaatcaatagcacccctactcacatacacacacacctagccagctgtcaagggcagaatgaatctatgctggataagaaatggtggaactgcgttatgaagagctaatttactggacaaagaattccaaagcaaaaccagaacagtatgaatttgagcaggtctcataggttgagcaatttccccctaaaacaactgaaggctaaaaagcaacaggccattgtgaaccaatgcaagacgccctctatcatggtgaaaagctccatcaatgaggtatcttctttagtggtggtatgtaatggaacttagccatttttcaaagcaattgaaatgcattgctctggatctgtccntggcagntgactcagaaagcaacatgtggctcctcccagccaatancagtatttttgctgctttctgatacaattggttgggtttgactttcagatgacttactgtanctcagatgatttccccctcccgctcagaagaaagatgtactggctttatanaaatgaaagagatgatgtcaaatctttcaattaatgttctat

SEQ ID NO: 76363 - DNA, 910 bp, Homo Sapiens
tctgcagatcagaaagaaggggttcctggtcatacaccagtactaccaaggacagcttttttcctgcaagatctgttacctaaagcaataaaaaatggccagaggatcagtgtccgatgaggaaatgatggagctcagagaagcttttgccaaagttgatactgatggcaatggatacatcagcttcaatgagttgaatgacttgttcaaggctgcttgcttgcctttgcctgggtatagagtacgagaaattacagaaaacctgatggctacaggtgatctggaccaagatggaaggatcagctttgatgagtttatcaagattttccatggcctaaaaagcacagatgttgccaagacctttagaaaagcaatcaataagaaggaagggatttgtgcaatcggtggtacttcagagcagtctagcgttggcacccaacactcctattcagaggaagaaaagtatgcctttgtcaactggataaacaaagccctggaaaatgatcctgattgtcggcatgtcatcccaatgaaccccaaacacgaatggatctctttaatgctgtcggagatggcattgtcctttgtaaaatgatcaacctgtcagtgccagacacaattgatgaaagaacaatccacaaaaagaagctaaccccctttcaccattcaggaaaatctgaacttggctctgaactctgcctcacccatcggggtgccatgtggtcaacatagggggctgagggacctgaaaggagggaaagcccttatctgggtcctggggacttctgtgggcaagttcatccagaattggggttggtttgcttgaacattggaactccgccacgaaaatgaaagctcctggatttgcgtcctttttgaaaaccaagggggaacagcccttgggagggaa

SEQ ID NO: 76364 - DNA, 1044 bp, Homo Sapiens
gggggagagagtatgaagtcgacggcgcgccgaattcggcacgaggagatccacttcatccaagcccagcttcgcagacctctggcgcccggcgggttcccagttcccccgcttcttccgaggagacagcggaggcgaggccaccgggctgtcaggctgaagctccgtggccgccgggtcctgcacgcagagaagaccccagcgccggcgcggctcagggctgggcccacgggactccggacgcgccgcgaaagcgttgcgctcccggaggcgtccgcagctgctggctgctcatttgccggtgaccggaggctcggggccagcatggcccccacgctgcaacaggcgtaccggaggcgctggtggatggcctgcacggctgtgctggagaacctcttcttctctgctgtactcctgggctggggctccctgttgatcattctgaagaacgagggcttctattccagcacgtgcccagctgagagcagcaccaacaccacccaggatgagcagcgcaggtggccaggctgtgaccagcaggacgagatgctcaacctgggcttcaccattggttccttcgtgctcagcgccaccaccctgccactggggatcctcatggaccgctttggcccccgacccgtgcggctggttggcagtgcctgcttcactgcgtcctgcaccctcatggccctggcctcccgggacgtggaagctctgtctccgttgatattcctggcgctgtccctgaatggctttggtggcatctgcctaacgttcacttcactcacgggacggggttgctaccaaatccatcagaccacgctactgcaagatccaaaagctcaccaatgccatcagtgccttcaccctgaccaacctgctgcttgtgggttttggcatcacctgtctcatcaacaacttacacctccagtttgtgacctttgtcctgcacaccattgttcgaggtttcttccactcagcctgtgggagtctctatgctgcagtgttcccatccaaccactttgggacgctgacaggcctgca

SEQ ID NO: 76365 - DNA, 1290 bp, Homo Sapiens
  misc_feature (798)..(889): n is a, c, g, or t
  misc_feature (1085)..(1097): n is a, c, g, or t
agcatcctttaggttctgcctctccaggcatttagccctcacattagatctagtaactgtggtatgggctaatacctgtcaacatgtggaggcaatcctaccttgcttttgcttctagagcttagcatatctgattgttgtcaggccatattatcaatgtttacttttttggtactataaaagctttctgccacccctaaactccaggggggaaaatatgtgccaatcaatagcacccctactcacatacacacacacctagccagctgtcaagggcagaatgaatctatgctggataagaaatggtggaactgcgttatgaagagctaatttactggacaaagaattccaaagcaaaaccagaacagtatgaatttgagcaggtctcataggttgagcaatttccccctaaaccaactgaaggctaaaaagcaacaggccattgtgaaccaatgcaagacgccctctatcatggtgaaaagctccatcaatgaggtatcttctttagtggtggtatgtaatggaacttagccatttttcaaagcaattgaaatgcattgctctggatctgttccttggcagtggactcagaaagccaacatgtggctcctcccagcccataaccagtatttttgctgcttctgaatacaaattggttggttttgacttcagattgaacttactgtagcctcagatgatttcccccctccgcctccaggaagaaagaatgttactgccttaataaaaaatgaaaagagaatgatgctcaaaatctttccaaataaaatgttccctatnnnnnnnnnnnnnnnnnnnnnnnnnnnnnnnnnnnnnnnnnnnnnnnnnnnnnnnnnnnnnnnnnnnnnnnnnnnnnnnnnnnnnnnnnnnnccccgcttggggtgaccaagaggggcgccccaatagagggggggcggcgcataataaaagaccgcaggagccaaagggcggcgcgcacgtgttttaaacacacggcgcggccgtgcgtgggtggagaaaaacaagtgcgtgtatcggggggaaaacctcttgtgtggaaggaggagaaaccccaaaatcattgctnnnnnnnnnnnnnacatactatttggtgggggaaacatatcaactcctgaggaggagaattattgaaaggccccttcagggggaaaatataaaacaatttacagggtgttattaggggtgttcaaaaaaagagggtgtttataaaggggggtgtgaagaaagtggtcgcatcaagggacattatattgaggaacaatttttcaggg

SEQ ID NO: 76366 - DNA, 867 bp, Homo Sapiens
gggggaaatgcgtgttctagctttctgtgtgcttaggtgcccgagctactgagggtctaagtccgggcagccgaagagtgtggtaggtaacggtcctcagcgcaagggtcatttcgtcgctgggaagggacggccctcgcccgcggtgatggtggttagcaagatgaacaaagatgcgcagatgagagcagcgattaaccaaaagttgatagaaactggagaaagagaacgcctcaaagagttgctgagagctaaattaattgaatgtggctggaaggatcagttgaaggcacactgtaaagaggtaattaaagaaaaaggactagaacacgttactgttgatgacttggtggctgaaatcactccaaaaggcagagccctggtacctgacagtgtaaagaaggagctcctacaaagaataagaacattccttgctcagcatgccagcctttaagattgaattagattgtgttgttgtggttttatttctgaaagtaaaacttgccataaattagaaaacaatttcccaaaataaaatccttttttgtatgatggtatacagttttcagtaatgatgtatacattgtattgatttttttccctaaatgtgttattttaataaatatctcatgaatgagtttgaaagtttgcttggattttgacaatgacatgggacttagtctttattactaattcaccaagattgatgagcgcaaaagcaattaatgtagtataagtataaagtatgtacagttctctgtgttaacagcttgagaagtaaagcaacccttttctgactgcatatggtgtattcctcctttgagtccccataatattttataacctcgtcatccccatcttgtacta

SEQ ID NO: 76367 - DNA, 683 bp, Homo Sapiens
  misc_feature (606)..(623): n is a, c, g, or t
tgcatcctatttcatagtgccaaaaatgaatttttgtatcttgtcttgtctatgtccattataaactggaggatcacagttaagccttccatgaattcatagtttggaatcatttaccttaccattattatggatttttttcttattacagtgtcactacactgtattcatgtgggggaacaaacatgtaggtgcttgaacatgccccacagacacagttgtagccctagtatttgtgacggtcattattgacacagtgcagactttacagatggagcattatgctctcagaggactttaaaaatatgtatattaagcaattaactttctggagttggagttatcaaatcttgctgggaaattaacttccaagagctctgaattggatggaattccatctggcttcagagaacaatcagcctatatgaaacggagctttgaaatgtttttcttgtgcagaaatacgaactagaaagaaaagtgctgatctaatgctaagttttctctgtgtactgactcagttgccagaattataatgaaaactgtattttagtctaacaaatgtatagaattttttatgtaataaataaaattttataggaaagnnnnnnnnnnnnnnnnnngcctacagccgcggccgcaagcttattccctttagttgagggttaattttagcatggcac

SEQ ID NO: 76368 - DNA, 1994 bp, Homo Sapiens
  misc_feature (100)..(185): n is a, c, g, or t
  misc_feature (1091)..(1180): n is a, c, g, or t
ggtcctaggtagcgaggcctgggtggcgatttcggcacgaggggctgcggcggctgccggcggtgcccgcgggcgagcgcggcctgtgagctcggcagannnnnnnnnnnnnnnnnnnnnnnnnnnnnnnnnnnnnnnnnnnnnnnnnnnnnnnnnnnnnnnnnnnnnnnnnnnnnnnnnnnnnnctagcgtctcagagtgcctggtgaagaatgtgatgggatcactagcatgtctgcggagagcggccctgggacgagattgagaaatctgccagtaatgggggatggactagaaacttcccaaatgtctacaacacaggcccaggcccaaccccagccagccaacgcagccagcaccaaccccccgcccccagagacctccaaccctaacaagcccaagaggcagaccaaccaactgcaatacctgctcagagtggtgctcaagacactatggaaacaccagtttgcatggcctttccagcagcctgtggatgccgtcaagctgaacctccctgattactataagatcattaaaacgcctatggatatgggaacaataaagaagcgcttggaaaacaactattactggaatgctcaggaatgtatccaggacttcaacactatgtttacaaattgttacatctacaacaagttcagaccacagatgtgattaaaatcaaccctttcaaatagaacgactctggagggagacactatacagaactcagcttttgacctctgctggtgtagtgggtaaaaatgcccagaagagatgggtagcctggagatgacatagtcttaatggcagaagctctggaaaagctcttcttgcaaaaaataaatgagctacccacagaagaaaaccgagatcatggatagtccaggcaaaaggaagaggacgtgggaggaaagaaacagagacagcaaaacctggcgtttccacggtaccaaacacaactcaagcatcgactcctccgcagacccagacccctcagccgaatcctcctcctgtgcaggccacgcctcaccccttccctgccgtcaccccggacctcatcgtccagacccctgtcatgacagtggtgcctnnnnnnnnnnnnnnnnnnnnnnnnnnnnnnnnnnnnnnnnnnnnnnnnnnnnnnnnnnnnnnnnnnnnnnnnnnnnnnnnnnnnnnnnnnatcatcgcggccaccccacagcctgtgaagacaaagaagggagtgaagaggaaagcagacaccaccacccccaccaccattgaccccattcacgagccaccctcgctgcccccggagcccaagaccaccaagctgggccagcggcgggagagcagccggcctgtgaaacctccaaagaaggacgtgcccgactctcagcagcacccagcaccagagaagagcagcaaggtctcggagcagctcaagtgctgcagcggcatcctcaaggagatgtttgccaagaagcacgccgcctacgcctggcccttctacaagcctgtggacgtggaggcactgggcctacacgactactgtgacatcatcaagcaccccatggacatgagcacaatcaagtctaaactggaggcccgtgagtaccgtgatgctcaggagtttggtgctgacgtccgattgatgttctccaactgctataagtacaaccctcctgaccatgaggtggtggccatggcccgcaagctccaggatgtgttcgaaatgcgctttgccaagatgccggacgagcctgaggagccagtggtggccgtgtcctccccggcagtgccccctcccaccaaggttgtggccccgccctcatccagcgacagcagcagcgatagctcctcggacagtgacagttcgactgatgactctgaggaggagcgagcccagcggctggctgagctccaggagcagctcaaagccgtgcacgagcagcttgcagccctctctcagccccagcagaacaaaccaaagaaaaaggagaaagacaagaagg

SEQ ID NO: 76369 - DNA, 944 bp, Homo Sapiens
  misc_feature (71)..(123): n is a, c, g, or t
  misc_feature (173)..(224): n is a, c, g, or t
  misc_feature (359)..(416): n is a, c, g, or t
gcctgggtggcgcggcggcggcggctgggctgtttgttctggtctcccgcagccgaggagccgaagcagtnnnnnnnnnnnnnnnnnnnnnnnnnnnnnnnnnnnnnnnnnnnnnnnnnnnnnctgtgagctcggcagagcggcgggcgggccccggcgccgcgcaggcagcnnnnnnnnnnnnnnnnnnnnnnnnnnnnnnnnnnnnnnnnnnnnnnnnnnnncctagcgtctcagagtgcctggtgaagaatgtgatgggatcactagcatgtctgcggagagcggccctgggacgagattgagaaatctgccagtaatgggggatggactagaaacttcccaaatgtctacaacannnnnnnnnnnnnnnnnnnnnnnnnnnnnnnnnnnnnnnnnnnnnnnnnnnnnnnnnnagacctccaaccctaacaagcccaagaggcagaccaaccaactgcaatacctgctcagagtggtgctcaagacactatggaaacaccagtttgcatggcctttccagcagcctgtggatgccgtcaagctgaacctccctgattactataagatcattacaacgcctatggatatgggaacaataaagaagcgcttggaaaacaactattactggaatgctcaggaatgtatccaggacttcaacactatgtttacaaattgttacatctacaacaagcctggagatgacatagacttaatggcagaagctctggaaaagctcttcttgcaaaaaataaatgagctacccacagaagaaaccgagatcatgatagtccaggcaaaaggaagaggacgtgggaggaaagaaacagggacagcaaaacctggcgtttccacggtaccaaacacaactcaagcatcgactcctcctcagacccagacccctcagccgaatcctcctcctgtgcaggccacgccgggtaccg

SEQ ID NO: 76370 - DNA, 1455 bp, Homo Sapiens
cactgggccgggctgcctgtgtgctcacaggctgtttatttatccaagagtaaggaggagagagacaggatgaagagaaaaaccagactccccacggtggcagggctgaggggaaaaacaaacagaaaatctcctcttctttctcttgctgctgaccccagggtactccagcttcagatgggacctctgggggtggcttaggggcctcgaggaggcccggcagctcagctgttggctggggtcaggatccgcacaggggcaggtcccagactcggaatggcttctgtgtacacaaaatatctctctgcaaaaggcactggtggaggggggcagcaggaaggccaccccatcacaggcagagtccactctgtcctgcgtctgggtcctgggccccaagaccaatccagtctccctcagggttggggtttcggaggcccttgttcctctcctctcccttccctcagcccaggggtgagcaggcagtcggtggaggcccagctcaggccatgtcatggacacccctcttcagggctagtgcatccggcgacttctaggccaacagcccgaggcgggtgactttggccgacaggaaggagtggatgatgaagactatggttttgggacacgagtgcaggtccagctggatctcgccttcagcacctccaaaatccaggaaaaggagactggcaccgtcatctgaagacatctgcagcttctcgaagggctgtcgcaggagcacagctcgggctgcacctggctcagccgcccacagtgtgaagcccttgtcgatgtgcacagacaggctgcagggacgcccattccacgtgcaggctgtagacacctcctgcacaccctcggcggcccggtgacagccatccacaagctggcgggtccaggcagccagctcctgcggtgactccacgctgaacaggtgagtgtccacaccgtgacgcgtgcccgtgcgcagggcaaaagagagctctgcatcgtagggcactgagcccttggaggggcctgagtgcaccagtctggtggcgatgagtggggcagtacgggctggccggctcagggcctcgcgggtctcggggagagacaagtagaggagcagttccttttcagttagcagggccagggtgggggctgtgcccccatctgggcagctgctcagttagccagccaatctgcttgatgtcctggctcccagctgtgctggtggctgccaacagtgcctgcagctcatccttgacccgcggcgtcagagtattgacctgggcttggatggcagtcgcccacgacctcgcactagcctcatccttggccctcaggaagagggtgtcttgaccatctgccggagcagatctccagatacctgggctccgggtcattgggggtgcacatcttcgagacatatgcctcgtgccgaattaaacacccggcctcgtactagcctattgt

SEQ ID NO: 76371 - DNA, 1550 bp, Homo Sapiens
tctacgcccacaaggactcctgtgtgcgacaggcccagcactgtcagcggctcaccaagttgataactctgcagattcactttctgaacactggccagaacacaatgctcatcaacttgggccgccacaagctgatggactgtattctggccctacctcggttctaccaggcttctattgtggctgaggcctacgattttgttccagattgggctgaaattttataccagcaagtgattcttaaaggagactttaattacttggaagaatttaagcagcaaaggttattaaagtccagtatatttgaagagatttccaaaaaatataaacaacatcagcctactgacatggtcatggaaaacctgaagaaattactcacatattgtgaagatgtttacctgtattacaagttggcatacgaacacaagttttatgaaattgtaaatgtgcttctgaaggaccctcagacaggttgctgtctaaaggacatgctagcaggttagatgatttcataggtgtctgttttcttgtactgttagcagattctgacagatgtgatgagaagaagaatgcattggagatctttgctaaagttgaacaatcccggtactgtaccatatcagtcctttgtgggtagtaggtagcaagtaagaaacttttcaggaggaaattcctatttaaaatagattgattttagatgattgttcatccacaccattttatatagatactagtattaagatcaaaagcttcctcttcctcaggacagcttctactttagatgatccaataatgattaaagaatacctgtacctgcagattccagtttcaaagaaatttaattattatttacacagttaaggaacaggtgatacattttcatttgttagaaactgatctttctgtaataaaatagattttcaattcagtgtatgtcattattactgctaaggaaatcttagcccttgtctgccttaaaggaatctttatttaatttactgtaattattgctgtgtagtcactacttttgttaatttctcaaatcacttagatgatggtcttgttttccacttagtaggtatacagagctttgacgttcccattatttcctatataagagaaatttaaaacattttttgttctttctgtcttaggggaataaaaaaacactaaccacacatttggttaaactgcttaggagaagacataataaagattccccaatctatacttaacagccataaacctgagttacaggctcagttactccaaataaatagttcttataggtacttaattaattaggccttggtatctaaataacaaaataatgtccccaaataaataagaggaaggcagccctatacctttgttgctctatggtgacaacataaggacctggcaaatcactcatgttttaaagctgtaactatgtcaagcatttattaagatttagtagagaacgtagagaactgtactcccaagagctgtgttctatactctcaaaaagtatctcttgggaggtaacacaaaatttaagtcctcacacc

SEQ ID NO: 76372 - DNA, 1179 bp, Homo Sapiens
  misc_feature (84)..(118): n is a, c, g, or t
aaaaaaatgtaaatcactatagggcgctacgtctttcaagccgaacgacgagcgcagcgaagcagtgagcgaggaagcggccgnnnnnnnnnnnnnnnnnnnnnnnnnnnnnnnnnnncagtcgacggtaccggacatatgcccgggaattcggccattacggccgggggcttccgctggggaggtcctccatgcgcagtcatgagtcgcttcaagtttatcgatattggtatcaacttgactgaccctatgttcagaggaatttataggggggttcaaaagcatcaagatgacttacaggatgtaatagggagagctgtcgagattggtgttaaaaagtttatgattacaggtggaaatctacaagacagtaaagatgcactgcatttggcacaaacaaatggtatgtttttcagtacagttggatgtcatcctacaagatgtggtgaatttgaaaagaataaccctgatctttacttaaaggagttgctaaatcttgctgaaaacaataaagggaaagttgtggcaataggagaatgcggacttgattttgaccgactgcagttttgtcccaaagatactcaactcaaatattttgaaaaacagtttgaactgtcagaacaaacaaaattaccaatgtttcttcattgtcgaaactcacatgctgaatttttggacataatgaaaagaaatagagatcggtgtgtagggggagtggtgcattcatttgatggtaccaaggaagcagcagctgctttgattgacttggatctttatataggatttaatggttgctcactgaaaactgaagctaatttggaagttttgaagtcaattcctagtgaaaaattaatgattgagacagatgcaccttggtgtggagtcaaaagtacacatgctggatcaaaatatataagaactgcatttcctaccaaaaagaagtgggaaagtgggcactgcttaaaagacagaaatgaaccctgccatataattcaaatattggagataatgtcagcagtgagagatgaggatccactggaattagccaatacactatataacaatactattaaagtattttttcctggaatataattggtatatgtcttccactttccatcatgtatgtaaaatttcatagtaaaacttcctgatagtttcaataaagaaattatctgc

SEQ ID NO: 76373 - DNA, 389 bp, Homo Sapiens
ctctccccactgggtccgtgcgaggtagtgcagaattcggccccttggggcgccttaccacctctctgcctccgtccccgacttccaccccagaccgtcggagggctccgcccagagtctggtaagaggtttggggaagacaggcccctgggaagcagccggctttggggggtggggagagaaggggaggggctcgggcagagggaactgtgcagtccccaggccgccccggctccgggctagaggcaataaataaacccgatcctgcccggcacagccgcgaccgtccggcgccgtccccgggctgacgggggagggagcggagaagcgagcgcagattctgcgtataaatcagctctggagcagacacagcccggctgtgaaaagca

SEQ ID NO: 76374 - DNA, 1551 bp, Homo Sapiens
  misc_feature (65)..(65): n is a, c, g, or t
  misc_feature (143)..(143): n is a, c, g, or t
  misc_feature (152)..(153): n is a, c, g, or t
  misc_feature (161)..(161): n is a, c, g, or t
  misc_feature (989)..(1129): n is a, c, g, or t
  misc_feature (1142)..(1153): n is a, c, g, or t
  misc_feature (1159)..(1177): n is a, c, g, or t
  misc_feature (1184)..(1278): n is a, c, g, or t
  misc_feature (1392)..(1400): n is a, c, g, or t
  misc_feature (1444)..(1478): n is a, c, g, or t
tttgccatatctttcccgtattcatgcatgtagtctcagtattacactacccaaagcaatgcatntaaatcttctgagtggagaaattatctccttctatacgcttcccaacaaaaaacaactagtagtctactaatagaaantgcttactnntctttctntaggggtcaaggaccctctttatagctaccattgcctacaataaattatgcagcagtttgcaatactaaaatattttttatagactttatatttttccttttgataaagggatgctgcatagtagagttggtgtaattaaactatctcagccgtttccctgctttcccttctgctccatatgcctcattgtccttccagggagctcttttaatcttaaagttctacatttcatgctcttagtcaaattctgttacctttttaataactcttcccactgcatatttccatcttgaattggtggttctaaattctgaaactgtagttgagatacagctatttaatatttctgggagatgtgcatccctcttctttgtggttgcccaaggttgttttgcgtaactgagactccttgatatgcttcagagaatttaggcaaacactggccatggccgtgggagtactgggagtaaaataaaaatatcgaggtatagactagcatccacatagagcacttgaacctcctttgtacctgtttggggaaaaagtataatgagtgtactaccaatctaactaagattattatagtctggttgtttgaaataccatttttttctccttttgtgtttttcccactttccaatgtactcaagaaaattgaacaaatgtaatggatcaatttaaaatattttatttcttaaaagccttttttgcctgttgtaatgtgcaggacccttctcctttcatgggagagacaggtagttacctgaatataggttgaaaaggttatgtaaaaagaaattataataaaagggatactttgcttttcnnnnnnnnnnnnnnnnnnnnnnnnnnnnnnnnnnnnnnnnnnnnnnnnnnnnnnnnnnnnnnnnnnnnnnnnnnnnnnnnnnnnnnnnnnnnnnnnnnnnnnnnnnnnnnnnnnnnnnnnnnnnnnnnnnnnnnnnnnnnnttgcggcgcccgnnnnnnnnnnnnaaaaannnnnnnnnnnnnnnnnnngggcggnnnnnnnnnnnnnnnnnnnnnnnnnnnnnnnnnnnnnnnnnnnnnnnnnnnnnnnnnnnnnnnnnnnnnnnnnnnnnnnnnnnnnnnnnnnnnnncccccgcggaaagaaaacttcttttaaaaaaccaaaaaggggggtcggggcggattctcctgtcttttacccaaacaaagtcccagtcggaacccaaatttataattacctttnnnnnnnnngccctgttttaataaaagaaggggggggttttaatttaaaattnnnnnnnnnnnnnnnnnnnnnnnnnnnnnnnnnnnagtggtgtaaacctttatctcccacccgggggagtccccacccctgtccgccgctgggcgaaataaaatattt

SEQ ID NO: 76375 - DNA, 1095 bp, Homo Sapiens
atagtgtgtagatctactcttcttccccctgtgcttccaggcccccctgtatagctgctatccagcccgatttctcaccactggcccagggcttcctcctgccccgtggcttcacgtctctgaacacatcaatctctgatgttctctctccttccattgaattccaccagacacattcagggtttacttcgtaatgtcttcatatgagtatcaatcaacaccttccccaactcaattgtactaggttgtagagcacaaggatggtctcgtgctgctctgtggcacctgtgcctacactcctctgagctttgaggaggctgctctctttgctgaccccatgatcttttctgcccttctgttaagggcattggccacagcaacggggcaaatgccccaagctggctgtaagtgacccatccctttggctcccatgattagaccaaggagaggcatggggtccagctgagccattcagaaccattccttagcattttccactcaaaggttagagatgagattttctcttcccaaggctacctctggccatggttccagcttcatgggggcaatgggattaggaaaatgaggtcaacctgcaaaggaaagcagatgcaagagatggagacagaatgggggtgtcctggggatcttggagcctgaattcattggcacaaaaggcagcagcatcctcactgtatctgcagtccatttggactcaataaaaactttgaaagtcacatgtgttatggaattccttctcagtgacacattcatctgtgctcagttgtcccagcaagggtcagcccctcatacccctgcagcatccgctgctatgaagcagagctgtaaacgccctccctgtgtataggaaaagctacatggagcaaatcctcctgcctgaagaagtgcatctcagcatcacttcagctgtcggggcatttgtggggagaaccagaccacctctgcggaaggcagcagaccctcttccagccatggatggagttgaattctctataaacggttcaccagcaaaccaccaatacattccattgtttgcctagagagaaatttaaaaataaataaatgttcacttat

SEQ ID NO: 76376 - DNA, 1004 bp, Homo Sapiens
  misc_feature (27)..(27): n is a, c, g, or t
  misc_feature (82)..(82): n is a, c, g, or t
  misc_feature (98)..(98): n is a, c, g, or t
  misc_feature (127)..(127): n is a, c, g, or t
  misc_feature (131)..(131): n is a, c, g, or t
  misc_feature (283)..(283): n is a, c, g, or t
tgactgctctgcccgcagagtgttgcntgtccatgatgatgtgcgagccccatgagacagtgatgcgttgcgcatcagtccngctgggggcagtgtgntcgcccccgctccgcccgcgttgcgatcngccntgcttgagtgtgaccgtcctttccctgacatagccgaccatcctgagtggtgatcctgatggtgacgccagacggattctcagtcattgtatgtcgacatgatgctgctgcttggtgccaccaacccccggcccagcctgtctgaaagtcanggtttagccggaaaaaccccgtggggagggtggggagccggagctctttggcggggcttggaaagctggggtgccacttatttggggcgggacgggagccgccgttgtgactggcgtggtctggctgctgctcccgaacggaggggtcggggttggcttgctgggccctcagagcccagtgggtggctctgactcggctccctactccctgcacccagctgggcgcagccttggggcctgcggtctgaatgtatccctcccctcagttttaacctgagctgccgaacgcacagtgggccgggggcgaggctgggggaagcggggcccaattacggatcccgggagttacaggtgccgacgtgatgtcgcttctctggtgcccagctcccttcctggtctgagactagctctgggggtggcgggggcccccacacgctgctcccgctccaccctgcccgtgctgctgctctgtgcctgctgtcagagccctggtgggggaggatgtggccaccctgagacccggaggagacgggcgtctgcctgggtttgcggagagccgcttatgggtgtggtccgtccagacaccttgtttcaagggggatgggcgtgagcgggcaagcagagcatccccaccgctgagcaagaactttttcttgtttttaaaccatcacgtcctcatttcacattggaataaagtgagtttttgaaacctgaaaaaaaa

SEQ ID NO: 76377 - DNA, 1203 bp, Homo Sapiens
  misc_feature (193)..(243): n is a, c, g, or t
caccttcaaaagggtaacttcattactcaggagctactccacatcaggccaggtcatgagggaaggatgtaaaacgggacaatgccacgtagggcaggaatctttataccaagtcctcatgtggggtatcgtcctcaaaacaggacagccaagttgatgttctttcctggcaaaggagttctctgtagttccnnnnnnnnnnnnnnnnnnnnnnnnnnnnnnnnnnnnnnnnnnnnnnnnnnngatgatttcaaggtcctcacagtcctgataatctggttcttcccgaaactcccaaatatctatggagagctgttctagcttttgcacagggaaccagtggacagaggtatcattaaatatgtccatgtattgtgaagtctgaggaaacctcaagctcctccagtccttttaaaatccttgcaatgtaaggaaaattttttctgcagaatccttgccaacaacctctcctcaagtcctttgaaactgttcccaatgatgaccatcttagaaagggcatctactgacccagttactccataaaagattgttgtacaaggccgtcccacaatggagcatgtaaaagatggtaggctccccgcgaatactccgtttcccttcctcgttctcactgagaacagtcacaccaagggtgttaaggacttcaatttcaagttggctaaacagagggtcatatacccaacagtgacttctgggaatctggcacttttccaacaaaagcagcaaaaacgttagctggtttctagctacgatgcaggtggcaaagttcccaatgccgtaacacacacacttcaaatggcaggttcctgtgaccaagatctctcttgggatagaatcagtggccacatctgactcctctggcaatgagtcaagatgcaggtttccaaagatgtctgaaagagtccccacaggggtcttcagttgttccagatgttttgtgagacatctattgatggtttctagtgctgaactccagaaatcagagataaacaggtccttctcagcctcccagatgcgacgaagcacgactccgctgtcagactcgaactccgcctcggggccccggggcgccgcctctctcccccggggcgccgcctccctccgccgcggccgtcgagccgcggagcgcctcttccgcggagcagccgcctgccaggattccagcgccgcagctgcggccgc

SEQ ID NO: 76378 - DNA, 589 bp, Homo Sapiens
cagtagatgccctttctaagatggtcatcattgggaacagtttcaaaggacttgaggagaggttgttggcaaggattctgcagaaaaattatccctacattgcaaagattttaaaaggactggaggagcttgagtttcctcagacttcacaatacatggacatatttaatgatacctctgtccactggttccctgtgcaaaagctagaacagctctccatagatatttgggagtttcgggaagaaccagattatcaggactgtgaggaccttgaaatcatcaggaacaagagagaagatccttctgctactgactgaactcgttgtgaggtactcagtgttggctgaggtagaagctgccaccagagactaaagggaaggctgctatggaggaactacagagaactcctttgccaggaaagaacatcaacttggctgtcctgttttgaggacgataccccacatgaggacttggtataaagattcctgccctacgtggcattgtcccgttttacatccttccctcatgacctggcctgatgtggagtagctcctgagtaaagaagttacccttttgaaggtgatctaaa

SEQ ID NO: 76379 - DNA, 1235 bp, Homo Sapiens
  misc_feature (17)..(17): n is a, c, g, or t
ccggtccggaattcccngggatctccccacagatgaaggacgtgttcttcttcctcttcttcctcggcgtgtggctggtagcctatggcgtggccacggaggggctcctgaggccacgggacagtgacttcccaagtatcctgcgccgcgtcttctaccgtccctacctgcagatcttcgggcagattccccaggaggacatggacgtggccctcatggagcacagcaactgctcgtcggagcccggcttctgggcacaccctcctggggcccaggcgggcacctgcgtctcccagtatgccaactggctggtggtgctgctcctcgtcatcttcctgctcgtggccaacatcctgctggtcaacttgctcattgccatgttcagttacacattcggcaaagtacagggcaacagcgatctctactggaaggcgcagcgttaccgcctcatccgggaattccactctcggcccgcgctggccccgccctttatcgtcatctcccacttgcgcctcctgctcaggcaattgtgcaggcgaccccggagcccccagccgtcctccccggccctcgagcatttccgggtttacctttctaaggaagccgagcggaagctgctaacgtgggaatcggtgcataaggagaactttctgctggcacgcgctagggacaagcgggagagcgactccgagcgtctgaagcgcacgtcccagaaggtggacttggcactgaaacagctgggacacatccgcgagtacgaacagcgcctgaaagtgctggagcgggaggtccagcagtgtagccgcgtcctggggtgggtggccgaggccctgagccgctctgccttgctgcccccaggtgggccgccaccccctgacctgcctgggtccaaagactgagccctgctggcggacttcaaggagaagcccccacaggggattttgctcctagagtaaggctcatttgggcctcggcccccgcacctggtggccttgtccttgaggtgagccccatgtccatctgggccactgtcaggaccacctttgggagtgtcatccttacaaaccacagcatgcccggctcctcccagaaccagtcccagcctgggaggatcaaggcctggatcccgggccgttatccatctggaggctgcagggtccttggggtaacagggaccacagacccctcaccactcacagattcctcacactggggaaataaagccatttcagagg

SEQ ID NO: 76380 - DNA, 1436 bp, Homo Sapiens
gggccgccacagaggtggtgaacatcttgcggtccctgggtgtggtcttccggctgagcaacactgtgctggggctcacgctgctggcctgggggaacagcattggagatgccttctcggatttcacactggctcgccagggctacccacggatggcgttctccgcctgctttggcggcatcatcttcaacatcctcgtgggtgtggggctgggctgcctgctccagatctcccgaagccacacagaagtgaagctggagccagacggactgctggtgtgggtcctggcaggcgccctggggctcagcctcgtcttctccctggtctcagtcccattgcagtgcttccagctcagcagagtctatggcttctgcctgctcctcttctacctgaacttccttgtcgtggccctcctcactgaatttggagtgattcacctgaaaagcatgtgactgaagccgcttagtgctgtggcctcactgcaggcaggagccccgcccctcctgccgggggaggcccagggaccggagcatttctgcaaggcccttgtgggcacgagagtgcggcccttgctgctggagatctgaggtcactgctgtgagctgggagaactgctgtgtacctcttgctgccagcacccaacagccttgccgtggggaccttggaaacctggctttgctctggacaaagggttccagagagaagctagaagtcccccttgaatgacccccagagcccctctgagaagggctggagtttgggggaaggggatggctggatgtgctccaggccatgctggaggtacccccgaggcacaggcactgcccgttccccttgcctgggcttcaggccttctggcaccttctcaggacacaagtggctgcccaaccctgactcagagaatgagggtggcttggacccctgggaatcaggccgccgagggctgagctccagagccgcaccatctgccacaaacagaattcgagacatacttaattttgaatttctccttgccacgttaataaagccaaaagcagcgggtgctattcgtggcaacacacttcactgaacccacttgcttccaaaacgatgccagcccgaggcactgctacgccagcagctgccacatgggatggtggctcaggcgctccctccaggattctgcccctgcctgtccacagactcctttgtgctggaacctgggctcctccagctgccaggcaggagtcggtaggactgtgcctgtgcctccctcagcggggccctgggcggggttccaaggcctgcgagctgggaaaggacagatgaggggacctcgtgccttcttgctgtcatgcaatgaccccgccttatgttgccgaaataagcaactcttaggtttgcctgactgccttatgctggtaaagaaaagggattcaactgtctcttttccaaat

SEQ ID NO: 76381 - DNA, 1185 bp, Homo Sapiens
cggtccggaattcccgggatgcgtagcttccttgtcgtgtggcctcagtccttcgccgtccctcgccgtccttcgccatcgcacgccaccgcaccccatctctcgaaatctgcagacatcttgatttttcccacgctgtctgtcaggtctccgccgccactcgacgccagggcgccgggtgagtccacagcagggcgcatggtcggctccactctcaccatcgggggaaactgaggccccggggaaggcggccagagaggtcaggccctgtccttggtgcagtgtctcgtcctctttgccggagtgagccccccaggattcgcgtgtcctcgggaaagacactggcaggccttgtgggctgtgctgcacctcggacggcttcgcaccagccagcgccctctctctcctgcagcactctgatctgcaccccctgaggggcttccactgtccgcggggtgagaatgcccctgggagtgtcacatgactgccgccccatgtgtgtgagaggcgtcctctgggagagcatggatcctgaggtcccaggattgtcagctgacctctgtcctgtgtgcccagtggccccaggtgacgtgtcttcaagaagaggctgagctgcggtgcttgtaagagtcatgtgctgttcctggggcttggatgatgtaggggaagcaaggtgaaagtggtatcccgtggttccacgttctgtcctgctgtggggctgtccctcacatgctttcagtggctgttgcagaggaagagcctccggaaatctgcgtgggtaaagtctcagccttagatccaaggacagtccaaggaagtcctaagaccatggagttggtgatctgggatctgggtttgctgatatttctcaccgtgaatctcttggtggtgtttgtgggcacgagaggggcagagaatggagagtgaggctaccacatgaagcgtcaccagagctgctccctgctgcctgctcagagcaccccggatccactgttcaatctgcacaagattcggggtccagacatgggagacttcagctgcctcagaggaccgtggacagggaaggccagcctcgcatccctctgtccatgcctggaatgactttaataaccaagagttttatttttgaatttgtagctgtcgttcactttttacccacccattcaataaaccttacagaattgc

SEQ ID NO: 76382 - DNA, 1006 bp, Homo Sapiens
gaacaaaaacccacgcaagagagcaggcaaaagaggtgttaaaagaggcagtactataacggtctaaggtagcgaggctgggtggcgaattcggcacgagggtcgtgtggcctcagtccttcgccgtccctcgccgtccttcgccatcgcacgccaccgcaccccatctctcgaaatctgcagacatctgatttttcccacgctgtcgtcaggtctccgccgccactcgacgccaggcgccgggccttgtgggctgtgctgcacctcggacggcttcgcaccagccagcgccctctctctcctgcagcactctgatctgcaccccctgaggggcttccactgtccgcggggtgagaatgcccctgggagtgtaacatgactgccgccccatgtgtgtgagaggcgtcctctgggagagcatggatcctgaggtcccaggattgtcagctgacctctgtcctgtgtgcccagtggccccaggtgacgtgtcttcaagaagaggctgagctgcggtgcttgtaagatgggtccgctgtgtgcagaggctccatgggatgtgttgtcttcatagtagcaggtcgctggaccatgggtccgcaaggtctcagccttagatccaaggacagtccaaggaagtcctaagaccatggagttggtgatctgggatctgggtttgctgatatttctcaccgtgaatctcttggtggtgtttgtgggcacgagaggggcagagaatggagagtgaggctaccacatgaagcgtcaccagagctgctccctgctgcctgctcagagcaccccggatccactgttcaatctgcacaagattcggggtccagacatgggagacttcagctgcctcagaggaccgtggacagggaaggccagcctcgcatccctctgtccatgcctggaatgactttaataaccaagagttttatttttgaatttgtagctgtcgttcactttttacccacccattcaataaaccttacagaattgctcc

SEQ ID NO: 76383 - DNA, 831 bp, Homo Sapiens
gggaacgtgacggggaagtggttcgggcggccgcggcttactaccccagggcgaacggacggacgacggaggcgggagccggtagccgagccgggcgacctagagaacgagcgggtcaggctcagcgtcggccactctgtcggtccgctgaatgaagtgcccgcccctctgagcccggagcccggcgctttccccgcaagatggacggtttcgccggcagtctcgatgatagtatttctgctgcaagtacttctgatgttcaagatcgcctgtcagctcttgagtcacgagttcagcaacaagaagatgaaatcactgtgctaaaggcggctttggctgatgttttgaggcgtcttgcaatctctgaagatcatgtggcctcagtgaaaaaatcagtctcaagtaaaggccaaccaagccctcgagcagttattcccatgtcctgtataaccaatggaagtggtgcaaacagaaaaccaagtcataccagtgctgtctcaattgcaggaaaagaaactctttcatctgcaagtacttctgatgttcaagatcgcctgtcagctcttgagtcacgagttcagcaacaagaagatgaaatcactgtgctaaaggcggctttggctgatgttttgaggcgtcttgcaatctctgaagatcatgtggcctcagtgaaaaaatcagtctcaagtaaaggccaaccaagccctcgagcagttattcccatgtcctgtataaccaatggaagtggtgcaaacagaaaaccaagtcataccagtgctgtctcaattgcaggaaaagaaactctttcatctgctgctaaaagtggtacag

SEQ ID NO: 76384 - DNA, 744 bp, Homo Sapiens
  misc_feature (136)..(144): n is a, c, g, or t
gaaatgcaatgatagctctcatttataattcactaccctgtctttcaatagactaaggaaagcattttgactgtttagaaattgtgtacaggtttttacagtaagtgggtgtgttaattggttagaaatggctatnnnnnnnnnccaagaagtacaggaagtacatcacctagatgtcccacagacacatcagccgtagagcactggacttgtacagaaggtgtactcaaggagtaaacacgtgtctctgtagccaaaatattactatgttcagttagtaccaaaattagaccatttgatcttctacagaggatcattaattattataacagaatgggaagttacaacagtggatgaatataaataggtcacacacaacaggtagtaatcatggtgaagagaaagcagttataacaaggctgactttgtaatgtaatgtctcaaaatgggatacttgagagtggaggggggcatgaacgatgactagccagtgttaacccatggaccacagctaccctgatgttaaccacagtgagattactgtagcctcatggaagcaagatgtccctgaaggatgggcaagtcacttacttacttacttgtaaatttatataataaataattacagattgttctagatagaccttacctgtcacatatactatgaatcaggttttgttaatgaaatctatcaattccaggtgacttaactgaatatgaaaaataaaactttttgaagaatat

SEQ ID NO: 76385 - DNA, 1450 bp, Homo Sapiens
aggcggaagaagcaacggaagagaaagaagcaggacaggacgaacaggacaaagaaagtagaaagagcagaggacgaaaaagaacagcagaggaaatagaggaatggccaagagacaagagagcgcgacaagaccaaacgaagaagtcataagcacagaggcaggacgaatgatggaaccagcagggaagaaggtaaccaaaagaagcggggagatggtgaaaagaaggcacccggatacaggaggaaaaaagggaatgggaccgccccaaaagacaaagagcaccggatgcagagcacatgccggtgacaatgatagaactaaacgtagaggagcaacagcgagagagcgaatgaggaaatggcgagcaagaacacggaggtggggaactgggcagccggagagaatatggcaacacgtgcagagggatgaacaaactgtggtggagaatgtaacagagggtggcaaggaacttcctggatgcgtggggagacagcagaacccagaccagcacagtggaacgcgactgattactgcacagacaatgcagtcggaaaggcgaccccgaacgtcgagcccacgtgattgacaagttcctattgatgccctgccactccggatgggaccatgaccacggaggcctcttttaattccaggatgctgataacatctgccccacccagctggagtgggccatgaagctctggtggccacacagtgaagccatgaatgccttcctcatgggttacagtgacagtggggaccctgtgatgctgcacctcttataccaagtggctgagtacaccttccgccagtttcgcgatcccgagtacggggaatggtttggctacctgagccgagagggcaaggtggccctctccatcaagggaggtcctttcaaaggctgcttccacgtgccgcggtgcctagccatgtgcgaggagatgctgggcgccctgctgagccgccccggccacgtcccgctcccgcgggctgcacttagcctgcccagagttcagcgggcgataatcgagctgagtcccgtatccgatagaaaatgtatcaaagaatcaaagtagtcagcattacaagttgacaatcacaagattgacgcagagagcggtaacagcaccacgggcgacagtgtctaccggagccccgcgcacaaagctaacacttgcgctgcaccgtagcagcctgtgattcgacctcgcaacacggagctgtcaagtcgtaggaacgagcatgcgtcgcaacgcccagtcggaacaaggctcacctgcgacacagagagaggacaagctgcccagcgcacgcgcaacggggggcgcgctcaaggcgaattcggaaccacttgaccatcagctgggagggatcaaaagagcgcctcgaaacatcgatacgctgcacccagcaacgatcacagccgacgtctcatgagctgcggggc

SEQ ID NO: 76386 - DNA, 1118 bp, Homo Sapiens
  misc_feature (156)..(164): n is a, c, g, or t
attgtaaagtatctctgctttatccattgctgaattcgataggatgttgaaatgctggtcaccaaaaaaggaaactgagcaaattcatttcaacaacatcaaaacttcagcttctcatagtaaaaagctgaatgttactaatatttttcatatctnnnnnnnnnttcttagcaatgaaattgctgttaaaacacaaatttcaatcaaatacttttgtgtatagaaaatatgtatagtaggtagatagaaaagtataaaatgtttgttgaagtatcttattttagaatgaatggagaaatgccaaagatgaatccttcactgcattatgaaaatatttcacatgttctcttggactttatataaatctgtaatagattttagaattgaaaaattctttgtgaaggtcttctaaaagtgttccaatttatctcaaaatctccatatataggatcagcttaaaacataaagaaaaccttgaatttctcaaatgtttgagatgttcaagacagtctcttaatccgttaatgcttttggaaacaattgacaaaatagggcaggcagctcatctcatgtcctgaagttggaatttaaataattcctatttgcaaattagaatgacagtgttggaatttggaggcagtagttgagcatattctctagtatatagctacacctttaataaaatgaaggaatgtcttcaatcatattttagtgggctatttataaatagtcttgaagtcaatttagtttatttatttaaaagataatgcatcctgaaagggatcatttatgaataacaatctgaagtcttttcataaaaaaaattaataaactttagttgtacatttagccagtgttatttgaagtatgtaacttttaaaatattaagtgtcttgtatgattagaatatgtgaatgagtaacttattttgtatcaggaatgttttggtactgtgttttcactcaaaccactgacttaacagatactgctgtgtataacatgtactaaatattacagttattgtgcataacagattgttcctcttatatttgtgtgtatacaggcaattcatgttttaatgtaaataaataccattttgcagtttgttttttaaaaaa

SEQ ID NO: 76387 - DNA, 642 bp, Homo Sapiens
  misc_feature (12)..(12): n is a, c, g, or t
gacctcacttgngaggaagacagatgccaagggaaaccctgccagctccgctagcaaaggaaagaataaggcagcataatgacatcaatagaaaaatgaagaaatcctacagcataaagcacattgctgagccagagtcaaaagaactcttcttgtaaatcactttttaaattttctctcactgatgccctttggaaattattggaaatttctggactatcctctttggaaagagaaccatgaaaacaatgcctcaccagcagaagaacagaatatcaggatgccttaaatttatagtagtagactgtaaaagattcattttggggtgatatctgtatatataacttgtttttttaaaagatgccgtttaaaagcatgattgggaaaatgtatgttttttaagagtagattgattcaccctacccacaggacattcaccaagccactgataccattttatatttcatcaattgcatgagtatttgctaatgttgattgaacctccctttccccataatgtgggcagatttggctcagctccttcatgagatcaggtcagtggtattgtttctgtcaagagtgttttttctgtcatttctactttttgtataaaggaaataaaacaatgttaacagccaaaaa

SEQ ID NO: 76388 - DNA, 1000 bp, Homo Sapiens
  misc_feature (162)..(162): n is a, c, g, or t
  misc_feature (216)..(216): n is a, c, g, or t
  misc_feature (218)..(219): n is a, c, g, or t
  misc_feature (286)..(287): n is a, c, g, or t
  misc_feature (312)..(312): n is a, c, g, or t
  misc_feature (326)..(326): n is a, c, g, or t
  misc_feature (329)..(329): n is a, c, g, or t
  misc_feature (331)..(331): n is a, c, g, or t
  misc_feature (372)..(372): n is a, c, g, or t
  misc_feature (452)..(452): n is a, c, g, or t
  misc_feature (467)..(467): n is a, c, g, or t
tcaacgaacctttccgctgcgatatatatggagagtttcgatgaaggcatgggaaagattattggtgtattatggccccagttacattttgtcggttgttgtgtggatttgacggatacattcacacagaaaagtttgaatgatacgaataatagactcatntaggatttgccctggaggcaagaatcgcaggagggcaggagagcctgattttcntnnaccccagttccggaagtggtgagacagccagcgtgcatgacatggagaggaggcgagcctgaacccnnaacactgcccacgttcccctgacantgaagagaatccanaancnttggagaaacacccgcacgtttgttgccgcacacattcttntcaggctccgccccatacccgtcaatacagcatcaccttcccacccctgtcagaacgccctcacctcccacccctgtcantacagcctcacctcntacagccttaagtcccaggcccatgtctgcctgtccaagggctcaagactttctaactgggatgtggtagagggactgaaggtacctttgggggcaacagcaccctagtttcattctcaactctagccctgcacactcacctgtggcacggaatgaaaacagagcttcccgtgcaaaaagggtcacgcctcccacccccgccccctccctgcacctcctgtcctctcccagttcattcctggaaccagccaggccaggcaaccagtggcccccaaaggcaggcaggatcctcaggccccagccgcgggaggctggaagggctggcagatcgcttccctcatccacctccaccggtccaggtctttgctgctgtccccagacctcctgtgacaccacgccagatcacagggcaccaggccagagatagtcttctttttgtcctttctggcctctggctagtcagtttttcatagccttacagtatctggctttgtactgagaaataaaacacattttcatatttggttattttc

SEQ ID NO: 76389 - DNA, 668 bp, Homo Sapiens
ggcctctcacccccaaggctgtctctggccctgccgagcctatgagagtcccgggacagagtgcccactcccctctacttgctgctctgggcctccccacctttcctggggtctccacattcccactagtgggtcttatgtgtgtctgtgtcttctccttaaacactcgccctggagtctgttctcacacctgtgcgcaggtttgcacactcaagttctcatgggcaggctcaggtctgtcccgctgccctgggcacgaggtctcctgaggacctgggcctgttctgctcctaggagacctgagcccgttaccgcgtgactcccaccatccagctcgcgctcctcgtggattcagccatgcatggactggggtgttccctggcccatggtcacctgtgcccctcgtgtctcctcacatgggtgtctgtggttctctcctgtgtaaatgtcacgccccacccctgtttcatgtgggcactaacacgtgtgcgttcctggcgggcacactcaggaccgtgcctcacagggcccactccctgcctatgcctccctcttggggggccgaggagggcggctgctctgtcatgagaatgtacggcccgtggatgattaacgggcctttttcacttagaagctgcacattatggagcattaaacacttttgtcat

SEQ ID NO: 76390 - DNA, 618 bp, Homo Sapiens
gtaagctttgtgctccagatattctagttggaactttttctgattttgttaacttaagttattctgagagaggcagacctgcttagagtttcattattgccattgcagaaaatccaaaacaaaagcctgtatcctttattttttgtgtgtggctttccaaagagggctttccaaaatatgattttcagtagttcgaggttcttattacaattgaagagttagttttagttttgcagttgaatttctgtgtgaggaatttgttttattttttctagtttgtccaatctccactgaaatgggtttcttactatttggcaagtacttaaaaaacataattcagttttcaaagaatttatcttgctaagtattcagtaacacaaattgaaatgtaatagtttttttaatggaaaatattttcattggggggttagccaattttttcaataaagggtcagataaataagcttcgtaggccttctagtttctgtcctaactactcaattctcataatgcagaaaaaaaccatagacaatatgtaaatgaattagtgtggctatgttttaataaaacaatttataaaaacaggaagtgggctgaatttggcccaccagacatagt

SEQ ID NO: 76391 - DNA, 810 bp, Homo Sapiens
aatgaaaatacaaggcatggagatgtggaaagacaccttgctttattactgttattattagttctatagtataattcatatatcacaaaaatcaccatttttaagcatatatttcagtgtcttttaccatattccaaaagttctgcaaccatcaccactacctaattccagaatattttcataatgccaaaaagcatgcctgtacctatgggcagtcactctccaattccccacttcttacagtctctgacaaccactaatctactttctctatatatagatgtacttgttctgggcacttaattcaacaaatggtcctgggacaactaaatatccacatgtaaaagaatcaagttagactccctcctcgcacataaaaattaactcaaaatggatcagagacctaaaggtaggtggtaaaattataaatcacttagaaatagtaaatctttgtaatgtgggataagcaaagttttcacaaatatgactgaaagcacaagcaacaaaagaaaaaataaattgtattccatcaagttaaaaacatttgggctgaaaagtctatcatcaagaatgtgaaaagacagtacatagaatgacagaaaatatctgcaaatcatattatctgataagagacttgtatttaggatatattttttaaaaactattacagttcaatattaaaaagataaaccaattataaagtaggtaaaggatctgaacagacattctccaaagaagatacataatgactaataagtatcccggccgtaatggccgaattcccgggcatatgtccggtaccgtcgactg

SEQ ID NO: 76392 - DNA, 978 bp, Homo Sapiens
cggttaaaacacctttaatgatagagggaaagacactaatatctcccgtctgttcttgacattttactaggttaggaagctctggagcctacagcttgaggagaagccatcgttcaagtcagtcaatagcaaaaccctcactctctcctcctcagaactcctgttccaaatgatcctatgttaagagtaaatactacaactcattacaagacggagaggcagggaggacgccacctggagctggtctcccaaagtctgggactcttaagaaccagacaatgacaaagacacaagccccagcctacggataggcaaaatgggtaggggtcttgaaagaggaagataaggaaaatacaaggggccagggaataaaggagggagttatctaaaactagaagcatactagtgctaggaaatcccccatgatccctggtacacctctgcacactatgtcactattagcccaaaagaatattaacgagaatgtccacattcacaagaatttgaggccttttcccttacatcatgtccctttcttagtcacataggtaccagcaagccctatgttctagcaacattccttaactctctcatcattagttcatcaaccacgctgaccaaaaatgctccttaaagatacgaacttcacatttcccaaatatctcctgggagacctcttggcaagaaatcagcttgtttcccaactttgagaggtcatcatgaatgagaagctggagaggtcttggcacactgaccagccaaaacctttaccttaatgtgaccatcaggggatttactgggaaaattttcctatgcccttccttcatttctccctacttcctagggttgggtcaccaattactggagcatcttcagtaccgtcaccttctggagcagggggaggaagaaggaatgtacagtttgctacttcttgtctatgatgggcttctcagcaccccctaggttcaccaagctcaa

SEQ ID NO: 76393 - DNA, 1018 bp, Homo Sapiens
  misc_feature (915)..(915): n is a, c, g, or t
  misc_feature (973)..(973): n is a, c, g, or t
cccaacaacgacccccctaagctagtagagctggtgttaaatcggcacgaggcaggagcatggcggaagtctggaggacgctgaggggcggaggcgggagaggcgagctcgcgatgagtggtctcggcaggctcttcgggaaggggaagaaggagaaagggccaacccctgaagaagcaatacagaaactgaaggagacagagaagatactgatcaagaaacaggaatttttggagcagaagattcaacaggagctacaaacagccaagaagtatgggaccaagaataagagagctgccctacaggctttgcggaggaagaaaagattcgaacagcagctggcacaaactgacgggacattatccaccctggagtttcagcgtgaggccattgagaatgccactaccaatgcagaagtccttcgtaccatggagcttgctgcccaaagcatgaagaaggcctaccaggacatggacattgacaaggtagatgaactgatgactgacatcacggaacaacaggaggtggcccagcagatctcagatgccatttctcggcctatgggctttggagatgatgtggatgaggatgaactgctggaggagctagaggagctggagcaggaggaattggcccaggagttgttaaatgtgggcgacaaggaagaagaaccctcagtcaaattgcctagtgtaccttctactcatctgccggcagggccagctcccaaagtggatgaagatgaagaagcactaaagcagttggctgagtgggtatcctgataaatctgggcttgtcttcctaatgctacctttgttggtcctttcttccttaagtgccaagtgctgagctaaaggaggataacttttttgggggagtcatgctggaagggtggtagtggtgaccctgccctgnaaaaaaaggggtctcttacccctccccagcccctggctcaaacttctgaaagaagganccttttggcctaacgaaagggaagcccctttgggggctccccttc

SEQ ID NO: 76394 - DNA, 1016 bp, Homo Sapiens
tctaggtacgaggcctgggtgtgcgaattcggcacgaggggcgagctcgcgatgagtggtctcggcaggctcttcgggaaggggaagaaggagaaagggccaacccctgaagaagcaatacagaaactgaaggagacagagaagatactgatcaagaaacaggaatttttggagcagaagattcaacaggagctacaaacagccaagaagtatgggaccaagaataagagagctgccctacaggctttgcggaggaagaaaagattcgaacagcagctggcacaaactgacgggacattatccaccctggagtttcagcgtgaggccattgagaatgccactaccaatgcagaagtccttcgtaccatggagcttgctgcccaaagcatgaagaaggcctaccaggacatggacattgacaaggtagatgaactgatgactgacatcacggaacaacaggaggtggcccagcagatctcagatgccatttctcggcctatgggctttggagatgatgtggatgaggatgaactgctggaggagctagaggagctggagcaggaggaattggcccaggagttgttaaatgtgggcgacaaggaagaagaaccctcagtcaaattgcctagtgtaccttctactcatctgccggcagggccagctcccaaagtggatgaagatgaagaagcactaaagcagttggctgagtgggtatcctgataaatctgggcttgtcttcctaatgctacctttgttggtcctttcttccttaagtgccaagtgctgagctaaaggaggataactttttggggaagtcatgctgagggtggtagtgtgaccctgcctgaaaaaagggtctcttaccctcccagccctggctcaactctgaagaaggatcttgctacagaaggagcccttgggctcccttctctttgatagcagttataatgcccttgttcccaataaaactgggcagatggaatcctagtgtctatactgccttgtctacccctgaa

SEQ ID NO: 76395 - DNA, 637 bp, Homo Sapiens
acaaatgaaaacactttttattggtgggcagtcataattgtatgctatccatcaaacaataaaacctttatagctgagacacattcagcctgaagatgaagtgatatattgacttcttgatcaaatgccagaacttacagatgaatatgaaacagacatcaataattacagcttgcactgtagctgttggttcctaaggctttaaattcaatgaacaagtaaaaactggacagacacacccttcagaaattagaggtggaaaaggattacctcattccatacctgtcacatagcaggccccctgcagctattcagcgagaggcagcccagggtccaggagggggtgtgggctggagctgccaggatggtgccagtgggcaggcacgggggaaacctggcaggggagcacttaggagccgaggtttctcttgggcactaccctcccttcccctttcattcccttgtattctgcttccttgagaaacctggtccggatataaaagcacatacttaaattcaatttcttaaaaatgtcatctcacctggaaaacaaactttacttgaatctaaaaatgagttactactactactaataaaaagatattcctcagctaattcttgatttacatgcacatct

SEQ ID NO: 76396 - DNA, 738 bp, Homo Sapiens
  misc_feature (625)..(625): n is a, c, g, or t
  misc_feature (704)..(704): n is a, c, g, or t
ataacatgacatatctatgtacaacatggctgggacagttgaagaaactatacaatggtgttcagcattttccccttcccagatggactttaaggatgacagcatgaggaaatggagcaagaaacacaaaaattatatacaattacaagtgacagtcaaggagtttggggaccagggagtccagggatcctgctctctccattccttcctcaccaactttctcctatccaatttgaatgacagcctgaacactgaatggccagtcaggagaaaggcatatacacacctcatccccccacatgcacatcagcaagtctatcagtcattctcattgggccaaatgtttggcatatcagaatttgtgatgtgagagggcaagaggattacagaatcttgctctcttgagcattagttctcaccctggtcctctctgtcataactagcaagttgcgttcaataaaattctagccaagctggtggtaactagattgaagatgctggtcacctgcaacccctttcctccacctgttcatgagtcagcatggctacctctcctcatgataaaagagctgggttgctgagttctggggatgcagagatttctcagtcttcctcctctccctcnctaaccactttccccagcttcctccaaggtgaatcatcttctaagaacctgttcctccagccctgcaggagtaactccngccaggggctagctcagtttacccttcttccccc

SEQ ID NO: 76397 - DNA, 1005 bp, Homo Sapiens
  misc_feature (952)..(962): n is a, c, g, or t
tttactgcagcaaacacgtttaataagaatacaaaattcacactagaggcacattctggggaatgtaaatgaactatcacaagtagtaattctgctggaagaataaaataaggctctctgagtacaaatatacaggaaggaatgatttaaaataggtatgatttacaatcacattacattgtattaagcactcaaaacaggcatattaattaaaaagccagctaaaaggcatttgaacatatataacaaatcttacagtccacaaagttcatgtataacggtaattttaagtacttcatttcaacacagaagaaatgaacaggtgagggatgcctctcaaaatattaatttatgtctatgacaaaaactaaaagagctttacattgaaaatggattacactactgatagaaccatgtagtggacagggcaaccacattaaaacaaaaccaacagtgccgagcaactaaaacagtactggcctttccaatcctctttcttcctggtaccaccacactgtcccaaattacctcttcattacccaaatcaaagaatctttctgttttcccaatcctcaaaaggaatgaagaaaaaccaaagagcaaactcaaaagatgatttttaccataaacctcaaatgtggcttaacaagtacaaagaaacccaacattcatacatagtgctccattccatggaaggaatagacacatcaaacattatccaacaggggtttctttatggattttgtacattggttgaacaagaattactgtatctgagaaggcacatatctgtgatttaaggcttaaacggtattgttacatatggaagtcaataaaagctgtctatgtattcacttctatcaaaatggaactgacccaaaaactagttttctaagtacagatttctactccagaaaccattaagaatttccattcccacgtccacctgtcnnnnnnnnnnnttctcttaagcaggttttgttatgaaccaaaagaaaaaaagtt

SEQ ID NO: 76398 - DNA, 384 bp, Homo Sapiens
ccacgctgaatgtgttgtgtggcacaagccggggctgctcaggctcaaagctcaacagcagggctcccactattggtggccttcagttctcttcccaccttcaccttcagactttctctccctaatcacacctgcttcggggtacagcagctccccagcatacccgtgggctccagatgtggacatccaactgctcattgggcttatctacaaatgtcctgtctgagtaatgacccagccagatgccccatcaacagtccttgagtcctccctcccctgccaccctaatggtcagtgagtccatgatacctcttgagtctactccctaacctgagtttgcatttgaaaataatttatttttagtacaattccccgcgtttcccc

SEQ ID NO: 76399 - DNA, 1365 bp, Homo Sapiens
  misc_feature (17)..(17): n is a, c, g, or t
  misc_feature (1277)..(1313): n is a, c, g, or t
gcacgaggccacagtgngaggtggtggtgggtggcggtggcggggcctcacgacagcttggtgctggtaagaggaagcccgtggttctggataggctctcatgtccagacagcggggaccaggggaaaacccagccccttctgtaatcccccttcatttcctaccttccttcctcctctgtttagcaaaggagggcagctcacttggatgtccttacaacgcccctggccccaggttgagcaataagaaaccagaaccttgcggcccagtggcccgggccagttcaggccgcctccccctcctctgcctggggccattgagcccagcctccagggcccgggtgcgtttgcaggccagtggccactgtccgggctgtgatggcaccaaggcaggtggagcaccaggtaccacacagctgggcttcccaccaggctttcccgcgggggtctcagggagcttctccccagcgctgctcggagtctgcaggaactggccttgttctccttagcccgtcactccatacagtattaggtgaggatggatgcgggcgctgtccttgccgggaagtcactgttgaagttgcagtggcttgttcacacctgtgggaagagaagtgaagactttctccttgcattaaaaagtctgaactgtgaaaaaatcaaaactctaaacctgttgggaacaactcacccctaagtacgaaaaggctcctactcaataagtgcgacaacatcactactcgcaactaacgcacccggtccaacccaaagtgcctgccaaaacgcaatagggggcgtgtcccccacacggaagggcccccctccgcgcgcgggagtacatttctttaccacaaaccacccctatttttccattaaattcggcactgtgcctcaccttgactacctgcccgccctatgttccttacctttattcccgcctagcagtgcccacacactacaaatttaacggtacgcggggaaatcacacttaaatcccaccccctttccactttttcacctttcaccctattgcctaccaccacctccatttaaacctgtttggtacatcccttccccactaccgtgccccttaccgttccacctcacaacacagtttacccatccacctcactttcgacccacacttccacttaaccccccccgtttatacacgcgttcccatcgcacatttccccctcattaactctgtcacacaacttgtccgccgttcgtcttatatctttaccaactccacacaacggatgtattcccgcattnnnnnnnnnnnnnnnnnnnnnnnnnnnnnnnnnnnnngccgttctcattcgaaccccgttccacgtatcccgaacatcgcaccttattc

SEQ ID NO: 76400 - DNA, 664 bp, Homo Sapiens
gtgtgaacaagccttcattgtgcaagcgtgagcccaacaaacaaacaccaggtctgcgctggccgaagacgaagcgtcctccctggaggtgggaacaagtcacctctgaccacacctcctctgacgccatcacctcctcctggccccacccaagggctcgacacaagccccaaggtcggggggagaggggcggggcggaaccgagggcggaggcaaaggtgggattccaggaaggccttccgaaggatggaggtgggtcctgtccctccaggtagcttgtgggtgtggacagcaggacttgctggctcagtgtgggcacaaggacactgtgccactggttgagtgagtggtgagggattggaggtggctcccagaggcctccatctgcatggccctggccctgtggctccagcaggctgccctggctgtgggtagcccaggagccacatgcgcttagtggggccgctctggggcaggggctctcacaggacagcatgaaccactgaaccgcctggggagggcatgcaagcggggactgtggtgcatttgctccgtccctggagtctgtggcgaactgtgggcaaagtggaatgctgtcaactgggtcatagtccattccactctgctctcaagaagagcacgcaagagagaaactgggaagcgt

SEQ ID NO: 76401 - DNA, 493 bp, Homo Sapiens
tgtggttgtgtgaacaagccttcattgtgcaagcgtgagcccaacaaacaaacaccaggtctgcgctggccgaagacgaagcgtcctccctggaggtgggaacaagtcacctctgaccacacctcctctgacgccatcacctcctcctggccccacccaagggctcgacacaagccccaaggtcggggggagaggggcggggcggaaccgagggcggaggccaaggtgggattccaggaaggccttccgaaggatggaggtgggtcctgtccctccaggtagcttgtgggtgtggacagcaggacttgctggctcagtgtgggcacaaggacactgtgccactggttgagtgagtggtgagggatttgaggtggctcccagaggcctccatctgcatggccctggggtgtctcatcatcagctgtgtgcagggcaaggggcccaaacaaaggcccagcagtcactggctaagctgccgactggctctctgtgc

SEQ ID NO: 76402 - DNA, 703 bp, Homo Sapiens
cagtcgacggtaccggacatatgcccgggaattcggccattacggccgggggtcggcggctggagcattacccctactgcgggtcccgctgctggcagcgctggaaactgggtggacggcatgggttggtctcaggatttgttccgcgccttgtggagatcgctgtcaagggaagtgaaagagcacgtgggcacggaccaattcgggaacaaatactactacatcccgcagtacaagaactggagaggacaaactattcgagagaaaagaattgtagaagcagcaaataaaaaagaagtagactatgaagcaggggatattccaacagaatgggaagcttggattagaagaacaagaaagactccacctactatggaggaaatactaaagaatgaaaaacacagagaagaaatcaaaataaaaagccaagatttttatgaaaaagaaaaactccttagtaaagagaccagtgaggaactcctgcctccaccagttcaaactcaaattaaaggccatgcctctgctccatactttggaaaggaagaaccctcagtggctcccagcagcactggtaaaacctttcagccaggatcctggatgccacgagatggcaagagccacaatcaatgaatgcattatggtcaaatcttttcatgtatatggatgtgactattttaacaaataaaagaagtgaaaagttaaa

SEQ ID NO: 76403 - DNA, 392 bp, Homo Sapiens
  misc_feature (75)..(136): n is a, c, g, or t
ggggatattccaacagaatgggaagcttggattagaagaacaagaaagactccacctactatggaggaaatactnnnnnnnnnnnnnnnnnnnnnnnnnnnnnnnnnnnnnnnnnnnnnnnnnnnnnnnnnnnnnnaactccttagtaaagagaccagtgaggaactcctgcctccaccagttcaaactcaaattaaaggccatgcctctgctccatactttggaaaggaagaaccctcagtggctcccagcagcactggtaaaacctttcagccaggatcctggatgccacgagatggcaagagccacaatcaatgaatgcattatggtcaaatcttttcatgtatatggatgtgactattttaacaaataaaagaagtgaaaagttaaaa

SEQ ID NO: 76404 - DNA, 741 bp, Homo Sapiens
agaaaactaagaagtaagtgtaacttttaaagtaagtatatatcagtgagagtaggcttgttttacaaactatttctagccagtgagttgtgttttcatgtctcatcaaaagacaataccacattgcatcattttacaaaatatgttgtcattttcatttcagttgtaacataggaaaatagatatttcctagatgatttctgagtttcttactgcaaagaacagttataaattggtatacatgtgtctctgtaatagggataatattgatatatctgttgctacatatttaagaatcattctatcttatgttgtcttgaggccaagatttaccacgtttgcccagtgtattgaattggtggtagaaggtagttccatgttccatttgtagatctttaagattttatctttgataactttaatagaatgtggctcagttctggtccttcaagcctgtatggtttggattttcagtaggggacagttgatgtggagtcaatctctttggtacacaggaagctttataaaatttcattcacgaatctcttattttgggaagctgttttgcatatgagaagaacactgttgaaataaggaactaaagctttatatattgatcaaggtgattctgaaagttttaatttttaatgttgtaatgttatgttattgttaattgtactttattatgtattcaatagaaaatcatgatttattaataaaagcttaaattctcatctattt

SEQ ID NO: 76405 - DNA, 861 bp, Homo Sapiens
ggctagaaagaagaggaaagcacacgtgaaaaggcctgaccttcataagaagacccagagtaaacacagcctcgctgaaatcctacgttcggaatactcaagcggcatggaggccgacctcgccaaggtcaaaaagcaaaacgcacctggagagcctggtggccggcccctgcagcacagtctgcagccgacaccctgctttggccgtgggaaaacattaaaatggagaaaaacccaacaaaggtgtacagcgggacagcaagacttcccagaaagtctaaaatctctctgggtcttcgagtggaacctggaagccccgggtggcagtggattgatgtccagttcctgtcagaggagccttgtgaaaaataactgcgcctttgcctgaataccacgtccccaagaatcagaggggccacagcccttctcctccatgggaggccctggagcctgatagaaatcagtggtgtggggcactgtagagactagccagctcccgacggaaggggtctgtgtcttgtattgatcccatcagtgcccggcactcccttcacccaggtgctgacgtgccggggttgagctggcaccccgggatgtgatgtaagaacgccctgcgcgtcagcctggaacgggcttgattgctgcccttaactgtgttctgaagtttcacagcttggcttcagcctatcagcgcatacattggcatgaattttgtgaattagggtgttaaaaactggaattgaatttgtacaaaaagagaatatatttatcactaattattttcttaatgtaggaatgtaccgttaaaaaggaccaaaagtttttggtctgggtcaaaaaatacgaatgtgttctcaaaaa

SEQ ID NO: 76406 - DNA, 770 bp, Homo Sapiens
  misc_feature (34)..(34): n is a, c, g, or t
acacaaagttgtgtctagaaaagccactgggccnatcagtgctgaggcatgcccagcagggagcttctctgtgaagtctttgggtgacctcatggaacttgtcttcttgtctctaacactgtcagacctcccagttattgatatcttgaagattgagtatatccaccaagagactgccactgtgctgggtactgagattgtagccttcaaagagaaggaggtgagagccaaggtgcagcattatatggcctactggatgggccaccgagagccccagggagttgacgtggaggaggcttggaagtgccggacgtgtacctatgcagacatttgtgagtggagaaagggcagtggagtgctcagctctacactggcgccccaagtcaaaaaagccaaatgaatagaaggtatgctttcaagaatgttgatccttcctgctcctgttgtacctaagcaaaagaggaccagtctctgagcttggcttttatggagagtgttcttattttggttcttttttttatttccacaacctcaaccacattcagtccaggaccaaggctcagggatgagtgggagagatgggttatactgtccctggagcttcatcatgattgcctgagaagacagatgctcatcatggctggaatgaaggtatccttcagtaaactttgctttcctaagaaaattcttcagtttctgataagtcatccctatttttatcttgatcaaggctttctacagttacataataaaatgaaatgctgtccagg

SEQ ID NO: 76407 - DNA, 720 bp, Homo Sapiens
  misc_feature (111)..(111): n is a, c, g, or t
gagaggagcaagagccaccctcccatgtgctctagacaccacgtggctcattagccccagcgtctgtgccggctccaggtgcctgcctctgggtgtgtgagtgggagactntgctccctggcctcatcctagagaggcccctggtgcctagtgctgaggcctctggggctggaaagcctcagcagaaaggaggcactactgagcaactatgcattgtcattgtcgggtttggggctttcggtggttccttggtgactgggaattgcttgtgtgcatgtgttgggtgcatgcttccgggtctcagctgccccaggcccgcacaggcaaccccttcccatccaaagccattggtggagcttctctggaatcatttgccaaaagcccaaggcagaatccaagggtccaagaccatttccatggagctcatgtttttcttttctgtaggaacttttttttaaccagcacccaccataattccgaaggccacgtttcatctttcctggatcactacagtgaagtattacagttgtacagttcccagtctggccttggcttgctcggataaaactttgtatgtattttgtatggcatagattctatattgtaatgatgtcctatgcaaaaagaaaaattaacgaaattgtaaattttattgttttaacgtgtatgcatgtttagtgacgtttacattttgaaataaaatttatgattcattatttt

SEQ ID NO: 76408 - DNA, 1028 bp, Homo Sapiens
  misc_feature (60)..(60): n is a, c, g, or t
  misc_feature (84)..(84): n is a, c, g, or t
  misc_feature (407)..(407): n is a, c, g, or t
gtagatatcaatgaatatgaaagggtcaaatggatctattatagtaagcacaaaaatcanctgacaccagcaaagtaaacccanaatttttaatggtattttaatagatcaagaggagcaagcagatttttgagacagttgtctcctactttctctatcacagggagtaattttaaaagaaaaatggagggtaagtttctttaagagaaaattgtagtttaaaacaggtcatgggataattagaaataatttaatttctttagaggattttaatctttcaactgcttgcaattagatcctaaggcaataaaagaataaggagatttggaaaaccattgtctgtaatctctgaagaaaagtggacattaggggagtcagttgaaaagcaaagctatcaccattttctnaaagaggaaaaaggtgaacctcacaaactatagaccaaaaaaataggacatcgagagaaagaatatgaagctagcataggttcacaaagaatgagtcaaatcaaacaacatgcattttttatttataaagcatgacttgttcattgtcaattcatgttagcttaatcattaggcattaatgccatcactgcaatgcatatgtcagcaataaataatcaaagaccaggcttccatcattctgtttaatatcttcaagtaatgcttaagtttgcaaatgctcttttaacacattctccatatgcagcctgcccagcactgcacacaatagacctgttacttccccctcacgagcactcctaatatttcatgtgctcatccaattgacttctcccactggtgcctcatattgaatttgtagaatcacacctgctcctttttcaaaactcttctgagttttttcttaaataattcactgaccccaaagttgtcagatatttgaagactactcgcacaattttaatattataaatgtataatgtaaatgtaattaagatttgtataatgtacgatgtactttggtaaataaaagtatgctgtgaataaatacgtatgatccaattc

SEQ ID NO: 76409 - DNA, 747 bp, Homo Sapiens
aagttaagcagaggactccaccaccctactgattgctagcttgtacaagcgcccgttcttttcctcggtctgaaattctaccacctattaatagaaagcaatgtcaggggcccttccgagatatcaccgaagtattagaacaacgctacaggcctttggagccaacgttgcgggtggcagaaccaatcgatgagttaaagttggccagagaggagctcagaagagaggaatggctgcaaaatgtaaatgacaatatgtttttgccattttcttcataccataaaaatgaaaagtacatcccatcaatgcatttatcaagcaagtatggtcctatttcttacaaagaacaattccgaagtgaaaatcctaagaaatggatctgtgacaaggatttccagactgtattaccatcatttgagctcttctcaaagtatggaaaattatattcaaaagctggacagattgtataaagaaaacagaagatgaaatgtaaaactgagattaaggtgtgaagtgagtgtgaatagaagaccccacactgcctggagtcctggattcttccacgtctgatgagtgaccttggatctcttaatctctctagttttctctctcttaggcgtcagaagaagaaactgaagccatctgcattttaaaacttaacagttctgaaaggaaaacacagatgaagatcctgtaggaaatatacttgctatgattcaataaactataaaattttgtagctctaaa

SEQ ID NO: 76410 - DNA, 1028 bp, Homo Sapiens
  misc_feature (30)..(30): n is a, c, g, or t
  misc_feature (44)..(44): n is a, c, g, or t
  misc_feature (51)..(138): n is a, c, g, or t
  misc_feature (140)..(141): n is a, c, g, or t
  misc_feature (182)..(182): n is a, c, g, or t
  misc_feature (199)..(199): n is a, c, g, or t
  misc_feature (203)..(203): n is a, c, g, or t
  misc_feature (209)..(209): n is a, c, g, or t
  misc_feature (222)..(222): n is a, c, g, or t
  misc_feature (228)..(228): n is a, c, g, or t
  misc_feature (249)..(249): n is a, c, g, or t
tatggagtagtcactcatagcaccccagcnttacacttatgctnccgctcnnnnnnnnnnnnnnnnnnnnnnnnnnnnnnnnnnnnnnnnnnnnnnnnnnnnnnnnnnnnnnnnnnnnnnnnnnnnnnnnnnnnnnnngnnccctcgagcccaagaattcgcacgagctttgaaagtcgttncagagaccatgatgcanttanggaagncactggaggagtntgcagnaatgaaagaaagagagagagnaaggctaacctcgaaagggaagagaagaaaagagatacccaagcccgaaagatgcataccctcctcagcacaaagcagattccaggaatatacaattcacccttcagaaaagagcctgatccatgggagctgcaataccaaaaggcaaagcctttaacacaccgaagacctaaagttaagcagaaggactccaccagccttactgattggctagcttgtacaagcgcccgttcttttcctcggtctgaaattctaccacctattaatagaaagcaatgtcaggggcccttccgagatatcaccgaagtattagaacaacgctacaggcctttggagccaacgttgcgggtggcagaaccaatcgatgagttaaagttggccagagaggagctcagaagagaggaatggctgcaaaatgtaaatgacaatatgtttttgccattttcttcataccataaaaatgaaaagtacatcccatcaatgcatttatcaagcaagtatggtcctatttcttacaaagaacaattccgaagtgaaaatcctaagaaatggatctgtgacaaggatttccagactgtattaccatcatttgagctcttctcaaagtatggaaaattatattcaaaagctggacagattgtataaaggcgtcagaagaagaaactgaagccatctgcattttaaaacttaacagttctgaaaggaaaacacagatgaagatcctgtaggaaatatacttgctatgattcaataaactataaaattttgtagctctaaaa

SEQ ID NO: 76411 - DNA, 685 bp, Homo Sapiens
  misc_feature (27)..(27): n is a, c, g, or t
ctcagcactgtcctccatagcctccantacggcagccagcagtgcccacgccaagacaggcagcaaggacagcagcacacagactgacaagagtgccgagctcttctggcccagcatggcctcccttcccagccgcggccggctgagcacgacccctgctcacagccccgtcctgaaacacccagcggccaaagggaccgcagagaaactggagaactctcctggccatgggaagtcgcctgaccacagaggccgggtcagcagcttgctgcacaagcccgagttccctgatggagagatgatggaagtcctcatctaactgccatccctgtggaatttcagtacagaacactgacaaacaaggaaagcggcagagaaagaagaaagacctagaaggttgtagatgggaaatcaggaatgatttgaactgataaagatttcagactcataagaacacattttataaatgttaaacacaaaaactacatgactgaagatagaagagaatgcgatggattttattacacatggtggaagagagaagaggcgtgtaggtttgcaaacaaagttaagaaataggaaactgaatttttcattgtacagaaaatgtatctcttggggagggcctgtgtacccccattctctgattataaacagataaaccccaaatgtggatcatccttgg

SEQ ID NO: 76412 - DNA, 815 bp, Homo Sapiens
  misc_feature (366)..(455): n is a, c, g, or t
ccctaagatgacagcttgattttatcatctgcagtcaaataactgagccaatccaaatttaaatgatagatgctttaattgagtttttaagtagctgaaactgctgagacactaaactttaaccttctgatgactttttaaaatgcctcaaatgtgcacatgtatataggatatttttataacttccctgatgaataatctgatattaaagtagtatttggacccagagccagaactcggtggtggaggctgctggtctctcctcaccaccttcttttgcacttggaaagaacagcaacatctggatagagttctagctttgacttctcatttccttgtctttttgggtgcattcctcagcacacnnnnnnnnnnnnnnnnnnnnnnnnnnnnnnnnnnnnnnnnnnnnnnnnnnnnnnnnnnnnnnnnnnnnnnnnnnnnnnnnnnnnnnnnnncaatgatgtgcttgcccagctaacttttgaattgcactttttaataaatattcttaacaatttttgaagaaggatattttatctcatttgagatcatggtaggttaagaaaatatgcctgttgatgaaagctaaaagcaaatttatgaaactaaaagggtgattgacatccatgtttacactccgctctaatgtttgatatataaataagttattttcaaattaggaaaaaacagtgagtattacaaagggcttcagatgtttagagtactaggttatttatgttttacaaagtttgaatcttctataaactaagaaaggggatgatccttagatttgcattaaaatatagaagtctttt

SEQ ID NO: 76413 - DNA, 1375 bp, Homo Sapiens
ccagaaagcagtggggcctgagatcaccaagacagacctggtccctgccttccagaacctgatgaaagactgtgaggccgaggtgagggccgcagcctcccacaaggtcaaagagttctgtgaaaacctctcagctgactgtcgggagaatgtgatcatgtcccagatcttgccctgcatcaaggagctggtgtccgatgccaaccaacatgtcaagtctgccctggcctcagtcatcatgggtctctctcccatcttgggcaaagacaacaccatcgagcacctcttgcccctcttcctggctcagctgaaggatgagtgccctgaggtacggctgaacatcatctctaacctggactgtgtgaacgaggtgattggcatccggcagctgtcccagtccctgctccctgccattgtggagctggctgaggacgccaagtggcgggtgcggctggccatcattgagtacatgcccctcctggctggacagctgggagtggagttctttgatgagaaacttaactccttgtgcatggcctggcttgtggatcatgtatatgccatccgcgaggcagccaccagcaacctgaagaagctagtggaaaagtttgggaaggagtgggcccatgccacaatcatccccaaggtcttggccatgtccggagaccccaactacctgcaccgcatgactacgctcttctgcatcaatgtgctgtctgaggtctgtgggcaggacatcaccaccaagcacatgctacccacggttctgcgcatggctggggacccggttgccaatgtccgcttcaatgtggccaagtctctgcagaagatagggcccatcctggacaacagcaccttgcagagtgaagtcaagcccatcctagagaagctgacccaggaccaggatgtggacgtcaaatactttgcccaggaggctctgactgttctgtctctcgcctgatgctggaagaggagcaaacactggcctctggtgtccaccctccaacccccacaagtccctctttggggagacactggggggcctttggctgtcactccctgtgcatggtctgaccccaggccccttcccccagcacggttcctcctctccccagcctgggaagatgtctcactgtccacctcccaacgggctaggggagcacggggttggacaggacagtgaccttgggaggaaggggctactccgcccacgtcagggagagatgtgagcatcccgggtcactggatcctgctgctgtaatgggaacccctcccccatttacttctccacctcccgtcctccccatcattggttttttttgtgtgtcgtcaactgtgccgttattcttctactaaaggaggatctactctacag

SEQ ID NO: 76414 - DNA, 982 bp, Homo Sapiens
  misc_feature (74)..(74): n is a, c, g, or t
  misc_feature (170)..(170): n is a, c, g, or t
  misc_feature (201)..(201): n is a, c, g, or t
gtacattccacagaacacttgctggtacgattatcgactccttaggattgcctcgagccagaatcgcacgagcnggttcctatgtgccagactgtcttgactctgcctcgtgaccgccccctcgcctctcaaagtgtgggatctgtgttttgtcactcccacttaagtantcatagggagcacattacagggatgtctatnaacatgaaaacaggctagtttcaagcaacagcaatgtcggttggaaagcaggcgtcatttgccttgaaaaaagccttttgacaacatacaggcattcttttaaaaccaggctgaaacattttatttccgagacttaacgttgtgtttcctgtttcttaaacctagcacctctgtgtatttgaaaataatgagacatctttcattggattttggaaaattgttccccatgggattctaacctcactaccaaatgagtgaaagcttgattaagagttcttccatatactagcctccttggaagaagtgatcagaaggtgataagaaggacagaaaggactattttaaagttggactgaaggagaaaaaagcaaaattcttgtttcatcccaattctagttagaacaaagttaaacccccgtaatcttaaagagaaaatctttggaggttttaattaaacattttatacatttaaagtcttgttaatggtgctttaagtgtcaatgtagcatgtaaaaggctttgtacagacaggtaaaagttccatttctgagtgatgaaatgtaacacttcttcatctttaacttgaaatcaaaactatcagattttatttttgtataatttaaggaaggtaaagttaggggactagaagactctaaattggcttctacagatcaataatttaaatgtaactagttgggattttatagttaaaattatatttgtgtatataacataactaatctgtaaattgtaataaatatatttgcaattattaaatgtt

SEQ ID NO: 76415 - DNA, 669 bp, Homo Sapiens
ctaccctttactctcttttctactcagttactcttttgtgctatgttagaaacttgaaatatattggtgatgtggagattttgtccctgactgcccactgtacaggacaagagagtacagtgtttcagttggaattcaggactcctggttttgaggtagaggatgatcactgcagtacttggtttggaattgccacaggggtagctaaaccaaaggagggttatatctgcaagggaggtgtaagaaggcaaaataaggaaaaggaggaatgggttttctatttgttcagtttcatcaactaatttatacacttaatacaacttcagtgtcaattgctattaagaaatttttagttgggctgagctggttctcttgtgaaattgtgctggttatctttaagcttatcagttatttgtccaattaaacacttttcaccagtatttagtccgagttgtacagacgatgtatttggattttgtcatggttcatctacagactcaaaacataatcattttaaagtaccttgggagtgtgtagagtaacttctataatagctttatgatcctgatgatgttttttaaacacaataaagttggatcttccatgttacaatcacagaattaaaaccagtatttaaagtggaaaagtattaaaatattatggacaaat

SEQ ID NO: 76416 - DNA, 1063 bp, Homo Sapiens
  misc_feature (932)..(945): n is a, c, g, or t
gaagaacatgagaaacagctgaaagccacagaagagcgggtggaagaggcggagatgattctgaagaatatggaaatgctcctccaagagaaagtggataagctgaaggagcagtttgaaaagaacacgaagtccgacctgctgctgaaggagctgtacgtggagaacgcccacctggtgagagcacttcaggccaccgaggagaagcagcgaggcgccgagaaacaaagccgcctcttggaagaaaaagttcgcgctctcaacaaactcgtcagtaggattgcccccgcagccctctctgtgtaaagacagattattttctaggattcattcgaaagcacatcttttaaattaagccactgtgctgccttagattccgtgggtcatgagccatgagtcctgggacatctgaggattgggattctttgttcaccccgcagatagttaatgaatggtctgccctgggcaagatggaggtgggggctgggggaatatgcatgttgcagaagccggcgtttttattagcggtcctgagtaatttcccttggcaaaattcccagttttgccactctctggagccagatcctgggagctgtcagcaaggagcaggtaagtgagcagttatggacagcactttccatgtggtgcttccgaccctggctgtcagagtgaaatgtaaagtcagggctctgtacagttttgccatttcactgttctgctttaagcttagcttattagaactcttggtggagggtgcgtacacacattccagaaaaggcttcactcgctgggaacgtcaacccagcgagaaaggaggggaagccccttctccggggaccttatctgtggactcaggaatgatggtgtttattgcaaatgcacaatctttttcccattgaaatgtcatcacactggaaattgtactatatgtnnnnnnnnnnnnnngtatagttttatatttgaaatgtatgcaaattatggccatatggctgattggaatgtactactgtaatataaaaagtcactgtatttgcaataaattcttttctattaaaattgaaaa

SEQ ID NO: 76417 - DNA, 882 bp, Homo Sapiens
aagaatgctcctggggaagcataggaaaacatcatggtgctgatgattccagattcagtattttagctctatcattcacaagtttggataaaattaatctagagaaagaattagaaaatgaaaatcataactaccatataggatttgaaagtagcattcctccaacaaattcatccttctcaagtgacttcatgccgaaagaagagaataaaaggagtggacatgtgaacattgtggaaccatctttgatgcttttgaaaggctctcttcaacccggaatgtgggaaagtacatggcagaagaatatagagtcaataggttgttccattcagctagtggaagtacctcaaagcagcaatacgagtctggcctctttttgcaacaaagtaaaaaaaatcagagaaagatatcatgcagctgatgttaatttcaattctgggaagatctggagcactactacagcatttccgtatcagctcttttctaagaccaagtttaatatacatatttttattgataactcaacacaacctcttcattttatgccatgtgctaattatcttgtcaaagatctaattgcagaaattctgcatttttgcacaaatgaccagctactccccaaagatcatattctaagtgtatgtggctctgaagaatttttacaaaacgaccactgtttggggagccacaaaatgtttctaaaagataaatctgttattcagctccacctgcagaaaagtagggaagctccaggaaagctatctcgaaaggttaggacacagcaagaaggaagctgtctgcacacaggaaaagggctctgaccctgattataaactttgcagcctatagaacgaagagaaataaatgtatgttgtttaagcc

SEQ ID NO: 76418 - DNA, 219 bp, Homo Sapiens
tttaataatgtttacaatctgcctcaatcactctgtcttttataaagattccacctccagtcctctctcctcccccctactcaggcccttgaggctattaggagatgcttgaagaactcaacaaaatcccaatccaagtcaaactttgcacatatttatatttatattcagaaaagaaacatttcagtaatttataataaagagcactattttttaatg

SEQ ID NO: 76419 - DNA, 574 bp, Homo Sapiens
  misc_feature (68)..(118): n is a, c, g, or t
gcaaacccagccccagcccctgtccccagcctgcggcgccggagggcccggaacagccccggcatccnnnnnnnnnnnnnnnnnnnnnnnnnnnnnnnnnnnnnnnnnnnnnnnnnnngtgggggccgctggacgacgtgcgcttcctcatcgcctgcacttcctggtactgacggcgtcctccgcaggatgtcgcccgtctgtccgccgtcccctgtggttcttgcctgccttgtctcctctccccacgtccctgcgtctcttacaccccctcccacccgaggctccccagagatagcagagaattcgaagaggtcgccggggactggaaagaagtcccggcagggccgccttcgcagtctacaccccagcctgcttcccagcctacacccagacccagctcagaccttcgtgaccaccccatccctttctccggctggctgggtcgggggcatccctctctgtcgctggcttccagaggcaggacaggcctcctggtaagcccgcaaagttgctgacctcctgacttcgtctgccttttattaatatctgtattgctgataaccgtgaaaaa

SEQ ID NO: 76420 - DNA, 436 bp, Homo Sapiens
  misc_feature (45)..(117): n is a, c, g, or t
gcaaacccagccccagccccagccccagcctgcggcgccggaggnnnnnnnnnnnnnnnnnnnnnnnnnnnnnnnnnnnnnnnnnnnnnnnnnnnnnnnnnnnnnnnnnnnnnnnnngtgggggccgctggacgacgtgcgcttcctcatcgcctgcacttcctggtactgacggcgtcctccgcagaatgtcgcccgtctgtccgccgtcccctgtggttcttgcctgccttgtctcctctccccacgtccctgcgtctcttacaccccctcccacccgaggctccccagagatagcagagaattcgaagaggtcgccggggactggaaagaagtcccggcagggccgccttcgcagtctacaccccagcctgcttcccagcctacacccagacccagctcagaccttcgtgaccaccccatccctttctccggc

SEQ ID NO: 76421 - DNA, 513 bp, Homo Sapiens
  misc_feature (243)..(293): n is a, c, g, or t
cacacaccacaaaccaccaacaaacccaaacaacccgcgaacataggctaggtacgaggctgggttgaaatcggcacgagggtcggtacgcggtggtggcgtacggcgccagctcctcccgacgccgagaccatgggggctcagctaagcggcggccgcggcgccccggagcctgcgcaaacccagccccagccccagccccagcctgcggcgccggagggcccggaacagccccggcatccnnnnnnnnnnnnnnnnnnnnnnnnnnnnnnnnnnnnnnnnnnnnnnnnnnngtgggggccgctggacgacgtgcgcttcctcatcgcctgcacttcctggtactgacggcgtcctccgcaggatgtcgcccgtctgtccgccgtcccctgtggttcttgcctgccttgtctcctctccccacgtccctgcgtctcttacaccccctcccacccgaggctccccagagatagcagagaattcgaagaggtcgccggggactggaaagaagtc

SEQ ID NO: 76422 - DNA, 1024 bp, Homo Sapiens
  misc_feature (934)..(974): n is a, c, g, or t
cccgcacaagtcctaagtagcgaggcctgggtggcgattcaaaacgaggcggccctcccccaggcgacaaggaccaaggtgctgctaaggccactctagcgcccagacaccccagtagctgagctctgctcctatggctacagagctggggcagaagctgaccccatttctggaggaagatccgagtttgtgaccgtcctccactcccctctattgtcactgtccccagctctgctccagtctgtcacttgcagcctggagctcagcctcaccagttaggtgaggcagagatggctgcagggccaacactggcagagcctgggagtccttcggaaggggaccagggcgtctgaagtgctcagtgcccccactactctgaggccgactccagctactctgaggccgactcaatctctcggctggaagcagtgttttcccagagcttggcccttgctgacctcgctcactgggcccatcttcccacactgctcttagaaggacacccctaccggtagcagccccaagctgagggggctccctttttgaccttcactggcccgccccttcactgtctccagcagggagttcctagggcttggcctgccttgctccacggtacggcggaggcagccctgcttgtcactgaggagccctagacaaggccaatgggttcatcaatgcccactggttctctgccaaagcctaaaaaggggtcatggcagtctccagcggggttggccgggttctcggatgccaccccctggctcccttgaaacctgcattgggccttggccccccgaacccggtgggtctactgggaattggggggtcggacttaacccggttaacaaaagaacccgggaccttccttgcctgcccttggggaagcctggccccacccgcaaaaaaccgtcctctgtccgcccaaaaacgnnnnnnnnnnnnnnnnnnnnnnnnnnnnnnnnnnnnnnnnntgggcgcacaacaatcaccttggggggctttgtctcccaacaaattatac

SEQ ID NO: 76423 - DNA, 2687 bp, Homo Sapiens
  misc_feature (92)..(154): n is a, c, g, or t
gcggccgcggcgccccggagcctgcgcaaacccagccccagccccagccccagcctgcggcgccggagggcccggaacagccccggcatccnnnnnnnnnnnnnnnnnnnnnnnnnnnnnnnnnnnnnnnnnnnnnnnnnnnnnnnnnnnnnnngtgggggccgctggacgacgtgcgcttcctcatcgcctgcacttcctggtactgacggcgtcctccgcaggatgtcgcccgtctgtccgccgtcccctgtggttcttgcctgccttgtctcctctccccacgtccctgcgtctcttacaccccctcccacccgaggctccccagagatagcagagaattcgaagaggtcgccggggactggaaagaagtcccggcagggccgccttcgcagtctacaccccagcctgcttcccagcctacacccagacccagctcagaccttcgtgaccaccccatccctttctccggctggctgggtcgggggcatccctctctgtcgctggcttccagaggcaggacaggcctcctggtcatgtcccaggtcatggagaagcccgtgccacagtgaccctccccatactcctgggggggctgctctccatcctggatcgtaaggaggcatcatcaggctgtgttcctggaaccccaataaccctgggcccccagggccagcctgttgtagagggaggctatctgaccgccggtctggcagaggagatgggtgggcagctcccagacaccccaaaggacccggttctcttcccagagcgtcctaaggttactcttggaacctgatctttgttccctcatcccagggaaatgacacactctgtatttctgttttatttagaaatgatttaaaaaacattatacaaaggctgatcagtttaaaatgtgactgacactgaaatgctgtgatgtcccccaggctgaggggaagctaggctctggggcccccagtgctttgcccctctgtctgccctgtcctggggtgatggacaaacagatgaccacaggcaggagaatctgagattggaagcctctaggctgagccctctgggcctggccccacatccctcacctctgcagcctgggctgcctgcctccatctcctgttcattctcagctggcctgccaggagccaatggggagcctggcgggaggcgggggtgcctagagctttcaagaagtgagagcaccaacctgaggagtggacagggaccaggaagtgggggaagggaggccaggaagaggtggatacaggagacacttctcatctcatctcagaccctagaggggtccacagatggggacacaagacccagccagcccactggatggcccgggcaagtaacaacctctctgtgcttcatctgagggcacggtgagagttaccgtcggcctcccagggcctaacacgagtttcatgtgagtggacaggtgtgagctaataaagtgctttgcaaagtataaaacactgtacaaacctatgaatcactaatatctccgcagttgttccctgcctgtcccagggagcctgcccttggccaaaatgagaaaaaacaaggatgatgacaggggacacagcggacccacatgggcacctctgggacaagagattttgcttgagacagctcccagggcagcaggagtccctgtctgtgctacagggtaagccgaccccaatcccagagaccacagggtcgggggcaaggcccatgcagggcccagtgagcaggggtggcatcccgagacccgcggccagcaccgctggagactggcctgacacctttttggctttggcagagagccagtgggcattgatgaacccattggccttgtctagggctcctcagtgacaagcagggctgcctccgccgtactgtggagcaaggcaggccaagccctaggaactcctgctggagacagtgaagggcgggccagtgaaggtcaaaaagggagccccctcagcttggggctgctaccggtaggggtgtccttctaagagcagtgtgggaagatgggcccagtgagcgaggtcagcaagggccaagctctgggaaaacactgcttccagccgagagattgagtcggcctcagagtagctggagtcggcctcagagtagtgggggcactgagcacttcagacgccctggtccccttccgaaggactcccaggctctgccagtgttggccctgcagccatctctgcctcacctaactggtgaggctgagctccaggctgcaagtgacagactggagcaaagctggggacagtgacaatagaggggagtggaggacggtcacaaactcggatcttcctccagaaatggggtcagcttctgccccagctctgtagccataggagcagagctcagctactggggtgtctgggcgctagagtggccttagcagcaccttggtccttgtcgcctgggggagggccgctatgctggcctcatcaccaagacagtcacctctagttcacctaaagcctcaagcagcctttgcaaaatgggacagtagtgacaggacatttaaatattcacgatgtgacagctgggtccttgtcagacccagctgggccacagccctgcctgcagcatgtgaccctaaatcctgggtctccgaagagatcttgagaaaggagcagtttcctgcctcggtatgaacgccacccagg

SEQ ID NO: 76424 - DNA, 1072 bp, Homo Sapiens
cagtcgacggtaccggacatatgcccgggaattcggccattacggccgggaagttattttactttctggtaatgtcttcagtaaaatattttctttatctaaatattaacattctaagtctaccaaaaaaagttttaaactcaagcaggccaaaaccaatatgcttataagaaataatgaaaagttcatccatttctgataaagttctctatggcaaagtctttcaaatacgagataactgcaaaatattttccttttatactacagaaatgagaatctcatcaataaattagttcaagcataagatgaaaacagaatattctgtggtgccagtgcacactaccttcccacccatacacatccatgttcactgtaacaaactgaatattcacaataaagcttctgagtaacactttctgattactcatgataaactgacatggctaactgcaagaattaaatcttctatctgagagtaataatttatgatgactcagtggtgccagagtaaagtttctaaaataacattcctctcacttgtaccccactaaaagtattagtctacacatttacattgaagttaaacacaaaattatcagtgttttagaaacatgagtccggactgtgtaagtaaaagtacaaacattatttccaccataaagtatgtattgaaatcaagttgtctctgtgtacagaatacatacttattcccatttttaagcatttgcttctgttttccctacctagaatgtcagatgtttttcagttatctccccatttgtcaaagttgacctcaagataacatttttcattaaagcatctgagatctaagaacacaattattattctaacaatgattattagctcattcacttattttgataactaatgatcacagctattatactactttctcgttattttgtgtgcatgcctcatttccctgacttaaacctcactgagagcgcaaaatgcagctttatactttttactttcaattgcctagcacaatagtgagtacatttgaattgaatatataataaatattgcaaaataaaatccatctaaatag

SEQ ID NO: 76425 - DNA, 1171 bp, Homo Sapiens
atacggctaggtacgaggcctgggtggtgaattcggcacgaggccgggtggcggtggcagctgcgaaacccagggagccgatgccacgtgacccaatgtggacttcttttaaacctttctaatgcccataacccagcctcagacccatggagcccacgagagactgcccgctgttcgggggcgccttttccgccatcctccccatgggggccattgacgtaagcgacctccgaccggtcccggacaatcaagaagttttctgccatcccgtgacggaccagagcctgatagtggaacttctcgagctgcaggcccacgtacggggcgaagcggctgcgcggtaccactttgaggatgttggtggcgtgcagggggctagggctgtccatgtggagtctgttcagcctctcagtttggagaacctggccctgaggggccgctgtcaagaagcctgggtcctctctggcaagcagcagatagctaaggaaaaccagcaggtgagggcccgagagtgtgtaatgtcctggaagggcggtagcggggacgcagagatccaggtaagcatcctgactctgatccccttaggtagcaaaggacgtgacacttcatcaggccttgctgaggctgccccagtaccagactgatctcttgcttaccttcaatcagccccccgtaaggaggaagggaacggggcgggtatctcatgactgggttcccaggagaatcgggctgggagggacagaacagggagactcactggtgggatcctccaaggaagcaggagtgggccagaggtttggggtaactgatacccaggtcctctggggaacaggaattggcaatttccaaacctcaggcctggatgatgttctgtctccatctgttcccccaccccaagccctgacaacaggtcatctcttggccccgaaaatctgtcacctgcaccctggagcctgggtgactttgaacagctggtgaccagtctgacccttcacgatcctaacatctttggtccccagtaaaggcgctgaagcactgcatgatgttgctgagaacttggggactcggttctgtgagggggaaaagaggttgaaaagagggtttcctcttatttcttccctgtgcgtaaacataagacaatccctcttcagaataaacttgctttataatc

SEQ ID NO: 76426 - DNA, 1009 bp, Homo Sapiens
  misc_feature (75)..(109): n is a, c, g, or t
gtcctacctcatatggcgcatcctgctgtagccgaacgacgagcgcagcgaagtagtgagcgaggaagcggccgnnnnnnnnnnnnnnnnnnnnnnnnnnnnnnnnnnncagtcgacggtaccggacatatgcccgggaattcggccattacggccggggaatcttaaaggatccgggagctaagccagacccgggtggcggtggcagctgcgaaacccagggagccgatgccacgtgacccaatgtggacttcttttaaacctttctaatgcccataacccagcctcagacccatggagcccacgagagactgcccgctgttcgggggcgccttttccgccatcctccccatgggggccattgacgtaagcgacctccgaccggtcccggacaatcaagaagttttctgccatcccgtgacggaccagagcctgatagtggaacttctcgagctgcaggcccacgtacggggcgaacgcggctgcgcggtaccactttgaggatgttggtggcgtgcaccgggggctagggctgtccatgtggagtctgttcagcctctcagtttggagaacctggccctgagggccgctgtcaagaagcctgggtcctctctggcaagcagcagatagctaaggaaaaccagcaggtagcaaaggacgtgacacttcatcaggccttgctgaggctgccccagtaccagactgatctcttgcttaccttcaatcagcccccccctgacaacaggtcatctcttggccccgaaaatctgtcacctgcaccctggagcctgggtgactttgaacagctggtgaccagtctgacccttcacgatcctaacatctttggtccccagtaaaggcgctgaagcactgcatgatgttgctgagaacttggggactcggttctgtgagggggaaaagaggttgaaaagagggtttcctcttatttcttccctgtgcgtaaacataagacaatccctcttcagaataaacttgctttataatcaaa

SEQ ID NO: 76427 - DNA, 1784 bp, Homo Sapiens
  misc_feature (27)..(27): n is a, c, g, or t
  misc_feature (42)..(42): n is a, c, g, or t
  misc_feature (88)..(88): n is a, c, g, or t
  misc_feature (155)..(155): n is a, c, g, or t
  misc_feature (166)..(166): n is a, c, g, or t
  misc_feature (194)..(194): n is a, c, g, or t
  misc_feature (216)..(216): n is a, c, g, or t
  misc_feature (257)..(257): n is a, c, g, or t
  misc_feature (329)..(329): n is a, c, g, or t
  misc_feature (1138)..(1156): n is a, c, g, or t
ctgctagctaggtggacacgctgactnagtagctagcacttnccagcagagtgttctcccgaagacgcagacctgggaaggtgacttntgggcccctgctgagacagtcaagactccctaactgtagagctgctgaggggcgagggggcagaacncccggctgatncatctcccgcttcacttttcctcagtcntgtggacagagtcaagtagatntcaaaagtgctccagaaagcccgggatagtcatgtagtgantgaaaaggcagtcacaaaactgcttaagaccagctgtcttgccagtaattgcagtgctttaagatttaatanaaaagccgcctgcctttaacccaagaacacttggtattagggcaccatgtcttggtcacggctgctacgtgtatctgatgtagttaaccatggcctgtcatgattatattgctataaggaagggaacaaaatctttatagtgtccaaagataattaattcttggtttaaatctttgccagcaaagcaaatatccgactgactgctccttagtctgtgatctttgctctccgtgcacattacccagcctaattaaaacaggtgtgtgtggtggagccagctatccccaccaccattcagcagagacacgatcacaccagttcagagagctacactttatgggtaacagtttcacctgtgatacagttccctagaacattttcccaaaagtagtgaactgcaaagtgcttaggtttgacatttattgtagcagaacagtaatatcacagtatgggacaaaggtttacactttgcagggtattctttgggggaatgttaaatactgtaataaaaacatgttcaatcatggtaaaatgttcaacttgttaaaattacaaatgaacaaaaaaaatttttttctcatatattgcctaaataccaaatgaagagcttaaacttaagattcaatgtgaaaacgagtaaatatgttcctaaatttgcagaaaataaaagataaactgtagaaaaaggtattttgatttacagttcacaaaactgtatctgaacatttccccagaaaaatctaagtttcatttcaagatcgtaaactacgttcactgtgtccatagttaacaaataactaccccaaatnnnnnnnnnnnnnnnnnnncttgcagccacattgcaaagttcacagatcctgcggcaaccgctagtgttctgcagaggcccctcctgcactcagaagctcgatttcctccaatccaatgcagctggtcgggtgggcggttacggactggacaaaacaatttaacaaccccacttcctttccgaggacactcttcacttcgtagctcccatcttcaccggcggcaaacctcagcagggaggaaatgctgcgctgcaacagcttgaccttcactctgcactgcggtcttgagcggcagtccaggaagacctgcagcgtgcctcttgagaacaggagatgtgaccacccgggagcagtccccacaggaaaaggcgcctctgtcttccggcctctgttccaatctcccgttgccacacatgtcacacacaggccatgagaaagcagtgctctcgtccacgccaaccacagtgccttgaacactgcagatggagttgacaggtgttgcagagtccaggctgtcgagcatcaccgggccaggcagctaacaggaacttgcaccagagaccacactcaaaaggggcttctgaagcaagaggacagttcgttcagcacaaacatatccgacctgccgacagagacacttcaggtc

SEQ ID NO: 76428 - DNA, 566 bp, Homo Sapiens
ccccctcactgctgtatcccttccactatgcctgaaactcatgtgtcaccagcagaacaccctctagttcctcaacctcttctcagaatgttttctggagcctgttctgatgaaaacctggctgtccctgacggatgctgcctcactggagtcttgctggtggtgcctgttttctctcataggccccagcgctgggccagaccattctccctcctccagaaacctctagctttgactcccatgtgatcagaccacaccgcccctactccttcctgttcttgtcatctaccaacccaggtcactggccctcagctcctgctcactgtcactgcaacactcctcctcgctcctgattcttggtgattacatctatatcaacgatccttccaaaacaatgaccttttgatcctctgccctctcctccagcgactctggtcttcatccaatttcaaagcactccctcctctggtcgcattccaccctgcctttaacccaagaacacttggtattagggcaccatgtcttggtcacggctgctacgtgtatctgatgtagttaaccatggc

SEQ ID NO: 76429 - DNA, 849 bp, Homo Sapiens
  misc_feature (402)..(527): n is a, c, g, or t
gggggtttctttgcagaaagaaacctccagcaagggaagagaggtgtgtgtccacaggaaggggctccgtggggatcccatgaagggatttgagctctttcagctccatgtcatttaacttttttgtttaaccaccttggctttctctccttttttgctgtcctccttacggaccagttaccagattcagaggctaacagttagttacttgttaatgctagtcacagccaggaggtcagaaggaattttctacttctggatccaaatgttacctcttaggggaagttatgccccctcaactattgtcttattataatgaatctttcctttttggtccttttaagtaaccactcaaaacttttcatttcactgaaaaaatatgaaaaaccatgacaatagggnnnnnnnnnnnnnnnnnnnnnnnnnnnnnnnnnnnnnnnnnnnnnnnnnnnnnnnnnnnnnnnnnnnnnnnnnnnnnnnnnnnnnnnnnnnnnnnnnnnnnnnnnnnnnnnnnnnnnnnnnnnnnntaaaagatacctgagagctcactttaatatcaaggtatttgcatccattcccaccctgttagctcttaagggaggagggaaatcaattccaaccatactttcctgtgatggaagatgtttcctcttgaaaaaatgccaatacagatttttaaaacctattgttttccaaatgcactttgtaagtttttgcttttaaaatagcttcttggaaccaattttattgtatttgtacttaatttttgttctcatctaaatgtgcattttctgactgtatagaagaagctttggtatgtaatttaataataaattagaaatctaaatg

SEQ ID NO: 76430 - DNA, 1645 bp, Homo Sapiens
aatgtgactataacagtcgtaaaaaagcggtggtacggtcggtatcccgggatatcgtcgacccacgcgtcgccacgcgtccgctggtgcatcaggagaagctggagggagattttaggttcaagcacatgcagattcgggtgaatgcggagcctgctgctttctacagtcggcatcaacacctttgactatctgggcagcatcctgagttacgttgtcatcgcaatccccattttcagcggggtctatggagacctgagtcccacagagcttagcaccctggtcagcaagaatgcctttgtgtgcatctacctcatcagctgcttcacccagctaatcgacctgtccacgacgctctcagatgtggctggctacacgcacagaattgggcagcttcgggagacgcttctggacatgtccctgaagtcacaggactgcgagatcctgggcgagagcaagtggggcttggacacacccccaggtggccagcggcagagccagcagacacagcatttctccttgagcgggtctccatctctgccccctcctctgacaaacccctaatcaaggatctgagcctaaagatctccgagggacagagcctgctcatcacaggcaacacgggcactggcaagacctacttggctccgggttctgggtggcctctggacgagtacacggagctcagtgcagatgctgacggactttgggccccatgggggtgctatttcctgccacaaaaagccattcttcacttgacggggacccttcgggagcaggtgatatatcctctgaaggaggtctaccccgactcatgtactgccgatgatgagaggatcttgaggttcttggaattggcaggcctgtccaacttggtggcaaggacagagggcctggaccagcaggtggactggaactggtatgatgttcatgtccccgggggagatgcaacggctctcctttgcccgactcttctacctgcagccgaagtacgcagtgcttgatgaagccaccagtgccctgacagaggaagtggagagcgagctctatcgcatcggccagcagctggggatgacgttcatcagtgtgggacatcggcagagccttgagaagtttcattccttggttctgaaactctgtggaggaggaagatgggagctgatgagaatcaaagtggaatgaagctctggcttttggaaggagagccacactgtggcgggtcggcggccctcaggagagaccaggaggactgacagcgaagatcgagctcaggttcgccacatagatcccgtgcaggagccacatgggtcctgtgcaggacccctagcagtggtgggctgagcccaggtctaggtttctgtgggggacactgaatctcccagtgttcagtctcccaggactctgctgcctcagccagagcctccatatgcttgaagtgctgattacctacaaatgatttcagatcatgtttgctaaagagaaatctggaagtgtgagatctgtaagaaatgaaagaaatgactcttggagtcaagagatctggaaatcttttaatcagttaaattgtgcagcaatagatttttaactttaactgaccatttaagttttttaataagttttttacaaagaaaagttaaacattaaa

SEQ ID NO: 76431 - DNA, 834 bp, Homo Sapiens
tctcattatttcaaaatgatagacatataccaaaaacaagtctataatgtgagtagttactaaaatttacacatcttaaaagtgtgtaaatgcttaaatttcagaattaccatcagaacctcaattgacattcctttgaataggctaataagtgacaaataagattaataagatttttcaaaatcgccaggactggtgaatataaatgatgattgaactggaataatattggggaccaaatcaaatgaatgattaaattatgaagctcatatccttttgaaggtagttgcaaagagacatttcaaaactgccctaggccattgcagcatccttagatgggacgcataatcattaccttaaagcatcaccactcattttgaccatatagattttattatgttagtttaaaaggtcaatcagcctcatgactttatagttatgtcttgtatttaaaaacattttttatacatttggttatgttgataaaccaaaaacatttgattaataaaatatctatttgaataaattatgagctatcctttcaaacagctattggcaagttttaaacccaaaatatatacacatagttctgtaataaaactgtgtgacttctcaagtaacatgacttccttatttctgaacagtactggttactttcaaaatgaatttttattgagattttccattaactatttttttcaaagactcaaattttgtaccaagtaaatccaggctttatgtacaaacatgttgtttgttttatttggggctgggggaggtatatgatgagcagacttctcggaattcataataaattttctaaaagcctaaaaa

SEQ ID NO: 76432 - DNA, 1571 bp, Homo Sapiens
tgccgcggctttgcggggacgggggagtggtagtgggggctgcagctgccggacccaggcactgacccttgacctccggtggctcccccatctctcaggcgcgatggctacgggcgcggatgtacgggacattctagaactcgggggtccagaaggggatgcagcctctgggaccatcagcaagaaggacattatcaacccggacaagaaaaaatccaagaagtcctctgagacactgactttcaagaggcccgagggcatgcaccgggaagtctatgccttgctctactctgacaagaaggatgcacccccactgctacccagtgacactggccagggataccgtacagtgaaggccaagttgggctccaagaaggtgcggccttggaagtggatgccattcaccaacccggcccgcaaggacggagcaatgttcttccactggcgacgtgcagcggaggagggcaaggactacccctttgccaggttcaataagactgtgcaggtgcctgtgtactcggagcaggagtaccagctttatctccacgatgatgcttggactaaggcagaaactgaccacctctttgacctcagccgccgctttgacctgcgtttgttgttatccatgaccggtatgaccaccagcagttcaagaagcgttctgtggaagacctgaaggagcggtactaccacatctgtgctaagcttgccaacgtgcgggctgtgccaggcacagaccttaagataccagtatttgatgctgggcacgaacgacggcgggaaggaacagcttgagcgtctctacaaccggaccccagagcaggtggcagaggaggagtacctgctacaggagctgcgcaagattgaggcccggaagaaggagcgggagaaacgcagccaggacctgcagaagctgatcacagcggcagacaccactgcagagcagcggcgcacggaacgcaaggccccccaaaaagaagctaccccagaaaaaggaggctgagaagccggctgttcctgagactgcaggcatcaagtttccagacttcaagtctgcaggtgtcacgctgcggagccaacggatgaagctgccaagctctgtgggacagaagaagatcaaggccctggaacagatgctgctggagcttggtgtggagctgagcccgacacctacggaggagctggtgcacatgttcaatgagctgcgaagcgacctggtgctgctctacgagctcaagcaggcctgtgccaactgcgagtatgagctgcagatgctgcggcaccgtcatgaggcactggcccgggctggtgtgctagggggccctgccacaccagcatcaggcccaggcccggcctctgctgagccggcagtgactgaacccggacttggtcctgaccccaaggacaccatcattgatgtggtgggcgcacccctcacgcccaattcgagaaagcgacgggagtcggcctccagctcatcttccgtgaagaaagccaagaagccgtgagaggccccacggggtgtgggcgacgctgttatgtaaatagagctgctgagttccgaaaaaacg

SEQ ID NO: 76433 - DNA, 701 bp, Homo Sapiens
aacgggtgatgcggttgataaaacacctcatgccgtgccgtgcgccgtcgctcgtgcccagcatcaaatactggtatcttaaggtctgtgcctggcacagcccgcacgttggcaagcttagcacagatgtggtagtaccgctccttcaggtcttccacagaacgcttctgaggagcaagacagggtagaggaatgaacattcaggggcatgtggaagagatggcataaaagtagggcctgctagacccagaagctgggcacccatgcaaatacacaatggctcaccttgaactgctggtggtcataccggtcatggataacaacaaaacgcaggtcaaagcggcggctgaggtcaaagaggtggtcagtttctgccttagtccaagcatcatcgtggagataaagctggtactcctgctccgagtacacaggcacctgcacagtctactagcacagagggacacagtaggggcatgcccgcatgatgtcatgtccagcaggctccaggccccagtgaccacagctgctcctgtttgttgccagaccctgggcctgtgcccctgcagcatggagtgaggaaagaacttgtctgcttgactagaggtcctagcagggtttgggactgtagcctgcctctgatttattccaggatcaacttcactgtctccagctccagagcctcagtcatgggacacacactc

SEQ ID NO: 76434 - DNA, 946 bp, Homo Sapiens
  misc_feature (842)..(842): n is a, c, g, or t
tggctagtacgaggctgggtgggaattcggcacgaggggacaaaggatccattcagaagttcgtgccctacctcatagcaggcatccaacacggctgccaggatatcggggcccgcagcctgtctgtccttcggtccatgatgtactcaggagagctcaagtttgagaagcggaccatgtcggcccagattgagggtggtgtccatggcctgcactcttacgaaaagcggctgtactgaggacagcggtggaggccgaggtggtggaggggatgcaccccagtgtccacttttgggcacagcctccctccataactgagtggtccacagatttgcactacgggttctccagctcctttccaggcagagaggaggggaggtcctgaggggactgctgcccctcactcggcatcccctgcagagtcaggactgctcccggggccaggctgccctgggagcccccctccgagcccagccagccaggctctcaggccctgcgcctgcctcaggtctttcttgctgcagcctgctccagcctggcccccaccccaggggcaggcggcccctcctggcttctcctgtagggcacctccctgcccctagcctcccaggaaatggtgctctcctggccctgcctctggcccttcccgggccgctgcccctcagccatgtggcacttctgagctcctgacctaggccaaggggaggtctctgcccccttccccggccctgggctacccttgggtcctgctcctcaggccgctcccctgtccctggccatgggtaggagactgccctggtcatggccgcctgcctgtcattcctgactcaccaccgtccccnaggtgaaccattcctcccttctcctcagctgcagtcgaaggctttaactttgcacacttgggatcacagttgcgtcattgtgtattaaatacttggaataaatc

SEQ ID NO: 76435 - DNA, 1192 bp, Homo Sapiens
caagacgcaggcgcaaccacggctgctgcggggatccttgtggcccttccggtcgatggaaccaatccgtgcacagagaagcggggcgaactgaggcgagtgaagtggactctgagggctaccgctaccgccactgctgcggcaggggcgtggagggcagagggccgcggaggccgcagttgcaaacatggctcagagcagagacggcggaaacccgttcgccgagcccagcgagcttgacaacccctttcagccaccaccagcctatgagcctccagcccctgccccattgcctccaccctcagctccctccttgcagccctcgagaaagctcagccccacagaacctaagaactatggctcatacagcactcaggcctcagctgcagcagccacagctgagctgctgaagaaacaggaggagctcaaccggaaggcagaggagttggaccgaagggagcgagagctgcagcatgctgccctggggggcacagctactcgacagaacaattggccccctctaccttctttttgtccagttcagccctgctttttccaggacatctccatggagatcccccaagaatttcagaagactgtatccaccatgtactacctctggatgtgcagcacgctggctcttctcctgaacttcctcgcctgcctggccagcttctgtgtggaaaccaacaatggcgcaggctttgggctttctatcctctgggtcctccttttcactccctgctcctttgtctgctggtaccgccccatgtataagggctttccggagtgacagttcattcaatttcttcgtttgcttcttcattttcttcgtccaggatgtgctctttgtcctccaggccattggtatcccaggttggcggattcagtggcctggatctctgctctggtggtgccgaagggcaacacacgcagtatccgtgctcatgctgctggtcgccctgctcttcactggcattgctgtgctaggaattgtcatgctgaaacggatccactccttataccgcgcacaggtgccagctttcagaagggccagcaagaatttgctgctggtgtcttcttccacctgcggtgcgaaccgcagtgcaatgcagcgtggggctgtgaaatgctttcgggccgtgagcctgactggatgctggctgtattgggggctggttatccggcctaa

SEQ ID NO: 76436 - DNA, 1562 bp, Homo Sapiens
atcacgtgggggcactttcgtcttagcttttggacaagacgcaggcgcaacccacggctgctgcggggatccttgtggcccttccggtcggtggaaccaatccgtgcacagagaagcggggcgaactgaggcgagtgaagtggactctgagggctaccgctaccgccactgctgcggcaggggcgtggagggcagagggccgcggaggccgcagttgcaaacatggctcagagcagagacggcggaaacccgttcgccgagcccagcgagcttgacaacccctttcaggacccagctgtgatccagcaccgacccagccggcagtatgccacgcttgacgtctacaacccttttgagacccgggagccaccaccagcctatgagcctccagcccctgccccattgcctccaccctcagctccctccttgcagccctcgagaaagctcagccccacagaacctaagaactatggctcatacagcactcaggcctcagctgcagcagccacagctgagctgctgaagaaacaggaggagctcaaccggaaggcagaggagttggaccgaagggagcgagagctgcagcatgctgccctggggggcacagctactcgacagaacaattggccccctctaccttctttttgtccagttcagccctgctttttccaggacatctccatggagatcccccaagaatttcagaagactgtatccaccatgtactacctctggatgtgcagcacgctggctcttctcctgaacttcctcgcctgcctggccagcttctgtgtggaaaccaacaatggcgcaggctttgggctttctatcctctgggtcctccttttcactccctgctcctttgtctgctggtaccgccccatgtataaggctttccggagtgacagttcattcaatttcttcgttttcttcttcattttcttcgtccaggatgtgctctttgtcctccaggccattggtatcccaggttggggattcagtggctggatctctgctctggtggtgccgaagggcaacacagcagtatccgtgctcatgctgctggtcgccctgctcttcactggcattgctgtgctaggaattgtcatgctgaaacggatccactccttataccgccgcacaggtgccagctttcagaaggcccagcaagaatttgctgctggtgtcttctccaaccctgcggtgcgaaccgcagctgccaatgcagccgctggggctgctgaaaatgccttccgggccccgtgacccctgactgggatgccctggccctgctacttgagggagctgacttagctcccgtccctaaggtctctgggacttggagagacatcactaactgatggctcctccgtagtgctcccaatcctatggccatgactgctgaacctgacaggcgtgtggggagttcactgtgacctagtccccccatcaggccacactgctgccacctctcacacgccccaacccagcttccctctgctgtgccacggctgttgcttcggttatttaaataaaaagaaagtggaactggggctgaaaaa

SEQ ID NO: 76437 - DNA, 1705 bp, Homo Sapiens
  misc_feature (44)..(83): n is a, c, g, or t
  misc_feature (87)..(121): n is a, c, g, or t
aaaaagaaaactttgttattacatatgggcgctactcgctgaannnnnnnnnnnnnnnnnnnnnnnnnnnnnnnnnnnnnnnnccgnnnnnnnnnnnnnnnnnnnnnnnnnnnnnnnnnnncagtcgacggtaccggacatatgcccgggaattcggccattacggccgggagaatggttaacactcaaccctttttaaaaattttgctaaaatgcgacaaatctcaccatactgaaattatttttgttgatggtgtaagcagtgtaagcaagtgttttctcctgaactagcacaaaagcacttatgcctgaaagaaagcataaagaagttctaactctgaaactaactactttcatttcgctcatggccttcaactttctacaggtcttccctgaagattcagcagtactctctcaaaggtttgacagtactcttgtgggaaatcaccaaatgctgtcatagttttgttttaactgtctccttgagggcagagggaagggtgagagaaaatctgttttcatgggtatttgtagtacagcctttttttctttcaagtggctgtatcaaattcactggtcttactaatcactgtctttaccagtgagtacaaaaagttaaggcaactaggacaggtactgctctataccaagaagagaatgattctttggaaattgttatttttaagcttctgttaatttttccagaagtttagtgcgtttcttttccatactttctcccctaattcttttatttgaagaagagaacttaatggcaaataaacaacaaaccaggacatgcattttaataccctaaggaaaaatggaaccctcaaatataactcctcccacaaccaccctaatgtgcctcagtctggggcagcaggtggacttctcaatagttcttttccacattctctacaaatcacatctaccgttaaggaatatgttatgaatcctttctgttaattgagaaagcaatgttattgtctgtgatttccagtctttgctcattttattatccctgtcaaataatgtaatattggtacctgcagttgaatttgtaatattgtaattgaatttttagttgatcttcgatcagtttttatagcatctatggacatagaaaatcagtcactgaaaaaaataaacacagctttcaatgtctcactcaacatgtaacattcaaaattgtgatcttcataaagacattgttaccattcgtcttgcaaatttaagacaactgaatgaaaagccaattttttgaaagaatgtggcatataattagatatacaactgaaacaggatatacaactgcatacaatttgtttttaatgatattttaaaatagcctgttagcaggaaaatagtccctatttatctgctaatggtcaaaaagagttaggatataaatcgtaccaaaatgtttccaatcactcagaaaaactgattcatgtctggctttgcaacaccttaaacatttattctgtcatagatagtaaagccccatctcagtttatttagtcctgaggttggcagcatggggtttgactatatgagctaaaagatacacaaagagataacgctgtttcataataaacaggaattgactatacaaataggtaaaccagcatatctacctgtatttctcagagtttagatgtgtgctttatgtttacattaaaataaagcctaacgccacagtaaa

SEQ ID NO: 76438 - DNA, 1128 bp, Homo Sapiens
  misc_feature (658)..(733): n is a, c, g, or t
acaggtattagttgagctgatgccccacttgagtttatagactgtttgataactgcctgtcctccaaattgtgtatgtatatgttacgatggtttaattcttgagtcagggccagcacgcatttatattttctaccaattaccttgatagaaatatcttagaaattgctgacctggaacggttgtgagaagactcctggcttctttcttgcctcacttaacaaatattttaaggtcaaagcaatatctgtgcacggctttccttttgctcctccagacaagtgaggctgttggtatagtcctcttcaccctctgcatgtagcttcaccctagatcagacttttgtctcttgggtcccagatggcacaggagcactgcatgcttgttttctagagcccagccagtcatgggtgctagcctagtctccacacaccagcaagtagaacccaagtgtattgtataaatatttcctgagtaccagtaagagaatgcattcttttctcatctaggccaggaatgttgaaaatgctcagccttacatagaaactcctagattttcactaacgcatttcacaaaagtaaataagtatttcatataattcagaggatgtttaaattgtcagcattttaataaatacttgcattatcacaaaaaacannnnnnnnnnnnnnnnnnnnnnnnnnnnnnnnnnnnnnnnnnnnnnnnnnnnnnnnnnnnnnnnnnnnnnnnnnnnttttaacatataccctccacctaccacaatccccttttgttttgtttcccgcccctcccggtctcctaagaaacgttttctcctcaaaaccatttcttgctgcggggggccggggggccccccaggaagggaaaagcggaaacgcggggccataagccgtgttttttccgaagagaaaatttccgggctaatagcaacaaagggtgtgtgggtgtatctccccaccaccaacaaaaaacccgcgccgggtggggacaaccccaggacttcctctttaaaaaactcttctcctgatatgggcctcttctggacggtcccattattaggggggacctcttatacaagagggtggggcccgagcggcgggcgcttccaaatacacaaaataaccgccc

SEQ ID NO: 76439 - DNA, 653 bp, Homo Sapiens
ccaagcccggcactggcagatgctccacccccgtcacatgggtggagctgggcagccgggccggggtcatgtctgaccgaagctggttccaggatggcagagccaggacagtatctgaccatcgctgcttccagtcctgccaggcacacgcttgcagcgtctgccactccctgagctccaggatcgggagcccgcccagcgtggtgatgctagtgggctccagccctcgcacctgtcatacctgtggacgcacacagcccacccgtgtggtgcagggcatgggccagggcactgagggccccggggcagtgtcttgggcctccgcctaccagctggctgccctgagtcccaggcagccgcatcgccaggacaaagcggccacagccatccagtccgcctggaggggctttaagatccgccagcagatgaggcagcagcaaatggcagcgaagatagttcaagccacctggcgaggccaccatacccggagctgtctgaagaacacagaggcgctcttgggaccagcagacccctcggccagctcacggcacatgcattggcctggcatctaggaccctggctccctgcagtggggacttcgtgggaggcactcatggctctctgggtctaatgaataaagtcctccacagcct

SEQ ID NO: 76440 - DNA, 2178 bp, Homo Sapiens
  misc_feature (36)..(81): n is a, c, g, or t
  misc_feature (84)..(118): n is a, c, g, or t
  misc_feature (1099)..(1099): n is a, c, g, or t
  misc_feature (1860)..(1860): n is a, c, g, or t
  misc_feature (1943)..(1943): n is a, c, g, or t
  misc_feature (1970)..(1970): n is a, c, g, or t
  misc_feature (2023)..(2023): n is a, c, g, or t
  misc_feature (2025)..(2025): n is a, c, g, or t
aatcgtatagactcactatagggcgctagctcgttnnnnnnnnnnnnnnnnnnnnnnnnnnnnnnnnnnnnnnnnnnnnnncgnnnnnnnnnnnnnnnnnnnnnnnnnnnnnnnnnnncagtcgacggtaccggacatatgcccgggaattcggccattacggccgggtgagctggacctcatgttctgcatagacgaagaaaacttggacagacatatcaagtggatttgaagcccaatgggtcagaaataatggtcacaaatgaaaacaaaagggaatatatcgacttagtcatccagtggagatttgtgaacagggtccagaagcagatgaacgccttcttggagggattcacagaactacttcctattgatttgattaaaatttttgatgaaaatgagctggagttgctcatgtgcggcctcggtgatgtggatgtgaatgactggagacagcattctatttacaagaacggctactgcccaaaccaccccgtcattcagtggttctggaaggctgtgctactcatggacgccgaaaagcgtatccggttactgcagtttgtcacagggacatcgcgagtacctatgaatggatttgccgaactttatggttccaatggtcctcagctgtttacaatagagcaatggggcagtcctgagaaactgcccagagctcacacatgctttaatcgccttgacttacctccatatgaaacctttgaagatttacgagagaaacttctcatggccgtggaaaatgctcaaggatttgaaggggtggattaagcaccctgtgcctcgggggtggttgttcttcaagcaagttctgcttgcacttttgcatttgcctaacagacttttgcagaggcgatggcagagagcagctgcaggcatggtccctggagccgagccttcaccacgcactcgtccaagttcggatgcgggaacctggtcccagcttgagttcctgcctttcccaccacaaattatcaactggttgatgtgtacactaattacatttcaggaggacttaatgctatttatgttgtgcctctgcaggcaaagcccttaataaatattttacatcctttcttgnacgaaaggaaggggaacatgattatacttgaagtgatgtgcgaatcgagccctggacctacccccatcacttccccacgccaatagttaccactactcaggtaacacccagtctcacaccctcttggacgccgcgtgcaatagcgaacccacctgaacgcctgcttataccaactcaaggaagaatagactgggtatcgttccttcgcgccgcgcccacaccccacacaaaaaaagcgtccctcacaccactctgatcttttgcggaccgcgcgccctccccacacacgaaacaccaacacccgccgttctagctgttggtaccccgaaggaacaccccgccggaagacatgacagggggcgtgtggttgcctcccaccaaagaaacaagacgtcgcggcgcgcgcggctccccctgttcttcgcctctagaaaccaaacccaattaagagcgcttctgcgcggcactcccttcccttagtcccccaccccatcaagcgagacatcaccacgaccgctgacttacaacactaaagaaccacaccccgccccccgcgcccgctagcccacacacaaataaaagtgatagggaagggacgcatcattacataggaatacaactccccttccggccgcagcgggtggggaggcgtatatatcacaacgaaggcgcgttcctttacgctgaaccctcatcgcttacctagtctagagcgctggtcatcacacgcactctctcatctccgctcccatacacgatantaaataaaatacaaaagcgccagcgcaccacactctcagaacacacagacgtgcaggacacacacagataaagagtcgcgctnctcactgtcggggccgcgccgcggttnattcatccctccatcctagacggggcggcgtgtcacactactcatccgcacananagatcgtgcctcctacgcgtctctccgtcgtacatctacacacgctttctcccgtcgactgtgagtgcaaactcagtcttttagtgacgagagagaaatgagctgaccgccttgcgtttattccactctgcgccatcattaaactccacagag

SEQ ID NO: 76441 - DNA, 891 bp, Homo Sapiens
  misc_feature (28)..(28): n is a, c, g, or t
  misc_feature (698)..(795): n is a, c, g, or t
  misc_feature (797)..(831): n is a, c, g, or t
agcaaaactgataatgcatatcggtttnaaaaagcgaattttcaccttgaatctttctcctataagaccactgggaacagaacgctaatgtattctggcctccctccaattctgccattatagattcaccttcttaacccataatacatataattccttcttcctagtgcctgccttattgaggccatgcacacatgtgaccactcatccagcatatttgctgggagaactgaggtaccatgacttggtgctgcagttgattagcctagaaatcttaagaccattccaagagcacgattttatggccctctgattcatgctatggatatgtaacatgatttctgatctgtgggagctgccagataggcctgtcccaaataaagatcgtcacaaatctttactgaatgatattattgggaagtgcacaattatggcaccctgtaaccacctccagaactttccatggtaggcatgggcccaccccattcccttaccctgaattggttcaatactgtatctggacataacaggttacttccaaccataatctgcatcgtggatagacataaggaaaaacagctttctcaaccacctacgtaataacagcaaaccactgtttcccaaactcagtgggttaaaagactcacctgaaaagctttcaaaaatacagattttggctgggcatggtggctcacacnnnnnnnnnnnnnnnnnnnnnnnnnnnnnnnnnnnnnnnnnnnnnnnnnnnnnnnnnnnnnnnnnnnnnnnnnnnnnnnnnnnnnnnnnnnnnnnnnncnnnnnnnnnnnnnnnnnnnnnnnnnnnnnnnnnnngaccgcgtatgcggccgcaagcttattccctttagttgagggttaattttagctaggcac

SEQ ID NO: 76442 - DNA, 678 bp, Homo Sapiens
atgcaagtgccagagtgtctgagcccagcttctactcctgttaatgatcacaggagcctcatacacaaccattgtgcatggcggctggagtatggagtagtaaatggtatccagaaaggcaggtctacggtggcatatgggatttcctggtacttcttctttaatagaaactatcttcacagatcatgacatcaggtcagctgcagttctcactgggaccaataaacaatagaagcaacaaccataaagacttaagaggacaaaggaaaccaaacctcactgtgtgtcttcaagatctgttcacatagttgcaggaagttgctgtagacaaagtacattactaaagaatgaagcccacccaggacatcacagcaacgaaagaactatttctggtaactgtggaccaggtgagagccacactgtagaacagcagtgctgccctctcttctttggcgaatgttatgaagacattctgatgcacttaggatcatgattcatgttaaatgtaaattaattgtaaaaataatacatcttgctccaaaatgtggtgacaatttagaagctgtccacatagccagaccactctgtaaatcacagaacctagaaagtaaaaatgtgccataattaggacagcagaaagtaacagtaaaataaagttttaataaaaaaaacagaaaa

SEQ ID NO: 76443 - DNA, 805 bp, Homo Sapiens
cggccggatgatgtcatagaaaaagtctcgattcacattaaaagtacacaaacaaacaaatctacaggcatgtctttatataccatcaggtctaagttttcaaagaaaatggtagatataactgtgcagataactcattacagtcataatctctgcccatgtgtatggagagggggcagtttgcacgaaaaagaattatgggcccatttaataattcagctttaaatagacttggtcatatgcatgaatcatcagagatgaaactgtttgagagactcatgtgaccttacgaaaattacaacagcagtcttaaagtatgaaaaagatgcatcacagcagagacattatggcccagttgatatcaaatgtaaaatgtaaatgcatgtaaatgcacacttcattttatgtattatttagtaatttgcagtggtatgtgtttaatatttttgccacctacacattaggcaaaaaaaagatgtaaataatttgggagaaaaagaggaagaacagtgtaaaataaaactttctataagtactccatttcaatgtgttcaacatcatcctaaaaggcaagattttcccacgcaggtgacaaggtggtttatgtactatttaagggcggaaggtgcgtgcccgttcaataagcatgttttttgccaggtaggaaatatgttccatatctttacttatcattgcatttcagatgggaactagaaaaactggagagaaaaatgtaatgaaactgctgctgtaaattattccttttagcatgtattcacttgctaaatacacatttcttcaaaat

SEQ ID NO: 76444 - DNA, 828 bp, Homo Sapiens
ggctaggtacgaggccggggttaatcggcacgagggcgcgccgcaccgcgcgcctcggctcggtgcaggcagcggcgcgccgcgagacagctgcgcgggcgagcatccccacgcagcaccttggaagttgttttcaaccatatccagcctttgccgaatacatcctatctgccacacatccagcgtgaggtccctccagctacaaggtgggcaccatggcggagaagtttgactgccactactgcagggatcccttgcaggggaagaagtatgtgcaaaaggatggccaccactgctgcctgaaatgctttgacaagttctgtgccaacacctgtgtggaatgccgcaagcccatcggtgcggactccaaggaggtgcactataagaaccgcttctggcatgacacctgcttccgctgtgccaagtgccttcaccccttggccaatgagacctttgtggccaaggacaacaagatcctgtgcaacaagtgcaccactcgggaggactcccccaagtgcaaggggtgcttcaatggccatatgtggcaggagatcaacaacgtggagtacaaatgggaccgtctggcacaaaagactgcttcacctgtagtaactgcacagcaagtccatcgggactgggaagcttcttccctacagggggaggaccttcactgcgtgatatgacatgagaacaaagttgccaagcctgcggaagtgcacaggccacactctggggcacactaccggatcagccggcatccgagcagggggaccggcagaaagggagaggcccgtggggcaatatgggaggacaagggcaaggggaaca

SEQ ID NO: 76445 - DNA, 1955 bp, Homo Sapiens
tgggtggcgaattcggcacgagggcggccgccgccgccgagacagctgcgcgggcgagcatccccacgcagcaccttggaagttgttttcaaccatatccagcctttgccgaatacatcctatctgccacacatccagcgtgaggtccctccagctacaaggtgggcaccatggcggagaagtttgactgccactactgcagggatccctaaaggggaggacttctactgcgtgacttgccatgagaccaagtttgccaagcattgcgtgaagtgcaacaaggccatcacatctggaggaatcacttaccaggatcagccctggcatgccgattgctttgtgtgtgttacctgctctaagaagctggctgggcagcgtttcaccgctgtggaggaccagtattactgcgtggattgctacaagaactttgtggccaagaagtgtgctggatgcaagaaccccatcactgggtttggtaaaggctccagtgtggtggcctatgaaggacaatcctggcacgactactgcttccactgcaaaaaatgctccgtgaatctggccaacaagcgctttgttttccaccaggagcaagtgtattgtcccgactgtgccaaaaagctgtaaactgacaggggctcctgtcctgtaaaatggcatttgaatctcgttctttgtgtccttactttctgccctataccatcaataggggaagagtggtccttcccttctttaaagttctccttccgtcttttctcccattttacagtattactcaaataagggcacacagtgatcatattagcatttagcaaaaagcaaccctgcagcaaagtgaatttctgtccggctgcaatttaaaaatgaaaacttaggtagattgactcttctgcatgtttctcatagagcagaaaagtgctaatcatttagccacttagtgatgtaagcaagaagcataggagataaaacccccactgagatgcctctcatgcctcagctgggacccaccgtgtagacacacgacatgcaagagttgcagcggctgctccaactcactgctcaccctcttctgtgagcaggaaaagaaccctactgacatgcatggtttaacttcctcatcagaactctgcccttccttctgttcttttgtgctttcaaataactaacacgaacttccagaaaattaacatttgaacttagctgtaattctaaactgacctttccccgtactaacgtttggtttccccgtgtggcatgttttctgagcgttcctactttaaagcatggaacatgcaggtgatttgggaagtgtagaaagacctgagaaaacgagcctgtttcagaggaacatcgtcacaacgaatacttctggaagcttaacaaaactaaccctgctgtcctttttacacgtctcaaattaatattatagtatcaattgatagcaaaatagtttatgggtttggaaacttgcatgaaaatattttagccccctcagatgttcctgcagtgctgaaattcatcctacggaagtaaccgcaaaactctagagggggagttgagcaggcgccagggctgtcatcaacatggatatgacatttcacaacagtgactagttgaatcccttgtaacgtagtagttgtctgctctttgtccatgtgttaatgaggactgcaaagtcccttctgttgtgattcctaggacttttcctcaagaggaaatctggatttccacctaccgcttacctgaaatgcaggatcacctacttactgtattctacattattatatgacatagtataatgagacaatatcaaaagtaaacatgtaatgacaatacatactaacattcttgtaggagtggttagagaagctgatgcctcatttctacattctgtcattagctattatcatctaacgtttcagtgtatccttacagaaataaagcagcatatgaataaa

SEQ ID NO: 76446 - DNA, 1430 bp, Homo Sapiens
agtgtttgccggagccatggaatttgctgaaggctctacggtttctccagaagaattcctctaagtttcatttcagacgcaccaggatgttgccggttagtggcgcattccacacccgcctcatggagccagccgtggagcccctgacgcaagctttaaaggcagtcgacattaagaagcctctggtttctgtctactccaacgtccacgcgcatagatacaggcatcccgggcacatccacaagctgctggcccagcagctggtctccccagtgaagtgggagcagacgatgcatgccatatacgaaaggaaaaagggcagggggttcccccaaactttcgaagtaggccctggcaggcagctgggagccatcctgaagagctgtaacatgcaggcctggaagtcctacagcgccgtggatgtgctgcagaccctcgaacatgtggacctggaccctcaggagcccccgagatgactgcagggggctcaaatgcgatgaccccctctgtcctcctgaggagaggctgtaggctgtgcctgtcgccccctaccttcctaatggctcctcctctgaggagtgaaagggatttgtttgcaacgtgctttgaaggccacataaaaagccctaaaaatgagtatttctttacatgacccagtccatttctcccccttggaaaaacgtttggacgttgggaagaatgatgccacagggctggtgtgtggggaagctagaatcctggccccgcctctgccagccctgcaccataggcaggtgtgccatctcagcgggaaggggaggactggctgctgcagcctgtcctgctctgtgagtgctgagaacatgctggtgtggcctcaatttcagccagtgccaggtgagcccctccaccacccccagcctgccccccagggctcctttgtcacaaatctgaaaggttttagaacccagttggccttggcagttttgttcacctcctcacttgacagctgggagacagaggcccacatttatggacatacccaagagatatgtattgcctgctgtgtgctagagagtgagtgcgctctgttctggtagaaaggtccttgagtgaggtgcggggtgtgggggagtgccaggtagggagggcgactgaggccctggtcctaggggtggaaccatggaggaacaccctggtcacccactgggactgcgggtctgcggggcgccagagggagcacagcacatacctgctcggaatgaacctgggtcatgcccgtctcagagagtccgcgcattaatttaaattcagtcgtgggtggtgtcacatccacatacgcaattactggaagacctgagtgtaactgtcacaggtacacatctgatgtcatttcatttactgtgttcaagccagcttggacccattgagactcgggggggcgaacaagg

SEQ ID NO: 76447 - DNA, 915 bp, Homo Sapiens
  misc_feature (427)..(527): n is a, c, g, or t
  misc_feature (539)..(551): n is a, c, g, or t
  misc_feature (662)..(670): n is a, c, g, or t
tgcccacgcctttcacctatgccttcatttgtgctgccaccctgcccctccctcgtcctcctctcccacttcctcctctctgtgtgcctcagtctcctgccggaagaaatgggttgagcccgaaaggaggctgtctgaggaagggagagggagggcctggggtgggtcccccactccccaccccaagccacagggactcccaccagggtttgggagaggacggagctggctctgtggcgtcgtggccccattactgctgccttgcttcagccacctctcctgcccctccctagtccccactgctgtccaccatgagtaggagggaggtgcagtccccagcccccacccctcaggtctgtgttacttggtttttaagcgactggttgggatagaaccctaaagaaataaacttccagtggataccggnnnnnnnnnnnnnnnnnnnnnnnnnnnnnnnnnnnnnnnnnnnnnnnnnnnnnnnnnnnnnnnnnnnnnnnnnnnnnnnnnnnnnnnnnnnnnnnnnnnnnccttgccgcccnnnnnnnnnnnnnaaaaatttttctaaacctttctttgggcccccggccccaaaaggaaaggaaactgggccaaattggttcccaagaaaacccgggcaagaacaagggctggaattccccccnnnnnnnnncccccgggggaacccgagggttttaaaaaaacccaaagggagtttgggggcctttatgggatcttccacagggattccaagcggagctcgaatataaatttacgccccgcccggccattctttcgaaaaagggtggaaattcttaaaacatttcggcccaaccgggaaaccccctcccaaaggggcctttatgaacctttaaattcccccagggggatattagacccctttgggccccttggggg

SEQ ID NO: 76448 - DNA, 726 bp, Homo Sapiens
  misc_feature (44)..(44): n is a, c, g, or t
ataggactcagggctcccctcaggaagctgggcccagctgggantgccgaggggcccctagccctggcagcggtcctgggctagtcggctgcctggccggggaacctgcaggctcccacaggaagaggtgtggagacctgccctcgggggcctctcacagggtccagcctgagcccccaccaggggtctctgcccagcacaggaagctgaccctggcccagctctacagaatcaggaccaccctgctgcttaactccacgctcactgcctcggaggtctgagcagagggaggcccccaagagtgccattgaccaagagacagcagacagcctgcctcctggggcgtgccggcacctgcttcagctactgcctcctgtatgcatgagccggatgctgggcaggatccctgcctacgcccgggcccgatttgcgctttgccggactggatggagtggaggaggcccaggccacagtaccaccccacctgcccaggcagcccctcgtcacctactccccgaagttaccagctcagctcgagtcttcagggctgggctcctaggctgcccatcctacttctaccctcactggcctccagtgggattcactcctgccctgcccccaccttcccagtcccacaggccacccctggcttgggctgggttctgtgaagttacgtatttattgagcttttggttcttttataaagacttgtctagactccaaaaa

SEQ ID NO: 76449 - DNA, 950 bp, Homo Sapiens
  misc_feature (123)..(124): n is a, c, g, or t
  misc_feature (163)..(163): n is a, c, g, or t
  misc_feature (233)..(258): n is a, c, g, or t
ggccggggaccccttttcccccccggtaagccgggccctttgaaccattttttgggtccactgccaggccagtccctgagttggcgccatgcccccggaccctgcagggatttttttgtgttnncgggaggtgcgggcgggccacagagccttcacctggtantggccctctatcgtgagggctctggcacttcggggccaatcctggccagctgcaagcccagctggggcannnnnnnnnnnnnnnnnnnnnnnnnntgctgaccctggctgggctggccgtgtgccaccaggagctggaagaccctggagaggcccgggcatgctgtgagaaggccctgcagctgcttggggacaagagcctccaccctttgctggcaccctttctggaggcccatgtccggctctcctggcgcctgggcctggacaaacgtcaatcagaggctcggctccaagccctgcaggaggcaggccttaccccccacaccaccccccagtctcaaagaattgctcatcaaggaggtgctggactaacccttgcctagatttaaggccactgtgaggagaggggttgccccagaaggcaggggaaggacctgatgagaacagaatagctgggaggctgcagagggtgctgggagcccctagaagttccaaaagagaatgtgaagcagatcaaggaaacttctgttgagctaggctcagggtgagctttggctggggttgcccttgtgtagtacagggaagtctgacacagcctctccagcctataaacagccggggggctgtggcacaggttggggcaatgttcccttgttggtgggcccccaagctggcaaggcctcttggctgaaggccagggactctgcccctggagtcctggagttaagggatgaaggcaaggctgcaggtctggcccaggggaattaaaagccagccactccagtggt

SEQ ID NO: 76450 - DNA, 1489 bp, Homo Sapiens
aaagcaggctggtacggtccggaattcccgggatatcgtcgacccacgcgtcggctttctcgcgggcttgcagctgcggcaagtgctggcggcggctgctcgcgcaagtcagctggcgtgggaactaccctttgtagctgagaacggcttgtttattgctacaaagactctattgacattggtagcttcagcggcagcagcttcttacggtataaagctgttgcttcctgaagaggctacaagcatccttccctaggactgctgtaagctttgagcctctagcaggagacatgcctcggggacgaaagagtcggcgccgccgtaatgcgagagccgcagaagagaaccgcaacaatcgcaaaatccaggcctcagaggcctccgagacccctatggccgcctctgtggtagcgagcacccccgaagacgacctgagcggccccgaggaagacccgagcactccagaggaggcctctaccacccctgaagaagcctcgagcactgcccaagcacaaaagccttcagtgccccggagcaattttcagggcaccaagaaaagtctcctgatgtctatattagcgctcatcttcatcatgggcaacagcgccaaggaagctctggtctggaaagtgctggggaagttaggaatgcagcctggacgtcagcacagcatctttggagatccgaagaagatcgtcacagaagagtttgtgcgcagagggtacctgatttataaaccggtgccccgtagcagtccggtggagtatgagtccttctgggggccccgagcacacgtggaatcgagcaaactgaaagtcatgcattttgtgccaagggttcgtaaccgatgctctaaagactggccttgtaattatgactgggattcggacgatgatgcagaggttgaggctatcctcaattcaggtgctaggggttattccgccccttaagtagatctgaggcagacccttgggggtgtaaaagagagtcacaggtaccccaaggagtagatgccagggtcctaagttgaaaatgatgtcgattgggggcgggggacactgtatttgatatttgtgatcagtgatcattgttcaactgcgaaatagagtgtttgcttttgataatggaaaattgtattcgttttaaaattccgtttgttgagaataacaatatgtttaaaaatataattgaacaaatttttttctttgtttcctgtcattgacatttagtataacagttttgctaacgttctaaaatgaagtcgttccatcataatctatgatcttgtacagcacttatagaaataagctgttcttttgaagttgaaatacccagtaaaatgttgaagaaggatggaggatttcttcatatctgacgtttctgaaaccctttgtgtctgctgttgtgtgaagattgacatttaccatgattttccttagttactgcagaacatagagaaaaataaaagcctaacgaatagtacaaaaaa

SEQ ID NO: 76451 - DNA, 675 bp, Homo Sapiens
gcggccgccaacaacgtggaactgacctagaggggccaaattggggagactgcccactcccccctccatgctggggttggatcctcctgtcttcctccttgtcccatgaaggccacaccccccagctctggggactcctaggtcacttgggaactacctgcatcttcagtccccttgaacttctgccctctgttcagggctgacacaagccccacaggctggggggctccggttccctgagggatgagccttcagcctccctttgtaatgctgctcctctccactgcccagcaccatgagttgggtgcagacacctagaaggagagacttcttggaacgctcatcccccgctatacctccccttcctcctgcatctccccttctttccttccccctcaggagagagaaaacttagtgcttccagcccttcttggagccttcatggtccaggggtaggggccccactggcctgagcatgccattttgaggggagggtagttgtgcctacttatcccctggcagaggggatgccaggaccatggacatgaggcttgcccatccctgccaacttacacagcctgtaccactgtccccccttccttggctactttgacatgtgcctgctcctggcatttcaataaaacccggcttgggtctgtgtcttgagtgtttttt

SEQ ID NO: 76452 - DNA, 1017 bp, Homo Sapiens
ggggggccgcagcccgccctcctggtgagcgctgggcagggctcgtggtggcatcagcagcagagacgaagcctttctgtaacatgcggccgtcccgccgagaggggcagttttgctcttttgtacattttccgaaactacagttaaagcagaagtctgttttcaggaaaagtttcaagggagaagggcaagtttatcaaaaacattgtttcaggagaagggagcataagtttacagcctacaggacgtacacaatatcctgctgctgggaaaaccacagcattttatctattttttattttaataggtttggtgcttatcttctaataagatttaaatgtcacaaactgtagcacaaataatataatttataatttacaaattgactaaaattgggtatagtatggtatttgaaagaataagcatatgcttctgtttattaaaaaaagaaaccttccaatgtccaaaactgctaaccctcgacgtggccgccaagttagtcgctccttgctaaccggtgagtgaccgcggccccgagcctggggctggacgcaggtcccaggacatgctgctcccttgtgtgagtgaccacggccccgagcctggggctggacgcaggtcccaggacgtgctgctcccttgtgtgagtgaccacggccccaagcccagggctggaggcaggtcccaggacgcgccgctccctcatgctgcccgggcccttcctccaagaccctacagagcctgaggggcaccttggcttccgcctgtgctagctttgccatgtcatctggaataatacttgaaattttgatttttggaaaaaaaagttttttatcttttgttgaaatcacctgttatccttgtttgtaaactgataacttttttgcttcttctcaggaatacagttttcaactgttgtcttgctcttgatagaaactgagaagcagcaatctgtatttgtggaggaaagtcctctcttttgcatattctaataaatgagccgcgtttgctccaaaa

SEQ ID NO: 76453 - DNA, 1479 bp, Homo Sapiens
  misc_feature (556)..(623): n is a, c, g, or t
  misc_feature (1272)..(1314): n is a, c, g, or t
gggagactagcgaacaatacagtcaggatggctaaaggtgaccccaagaaaccaaagggcaagatgtccgcttatgccttctttgtgcagacatgcagagaagaacataagaagaaaaacccagaggtccctgtcaattttgcggaattttccaagaagtgctctgagaggtggaagacgatgtccgggaaagagaaatctaaatttgatgaaatggcaaaggcagataaagtgcgctatgatcgggaaatgaaggattatggaccagctaagggaggcaagaagaagaaggatcctaatgctcccaaaaggccaccgtctggattcttcctgttctgttcagaattccgccccaagatcaaatccacaaaccccggcatctctattggagacgtggcaaaaaagctgggtgagatgtggaataatttaaatgacagtgaaaagcagccttacatcactaaggcggcaaagctgaaggagaagtatgagaaggatgttgctgactataagtcgaaaggaaagtttgatggtgcaaagggtcctgctaaagttgccnnnnnnnnnnnnnnnnnnnnnnnnnnnnnnnnnnnnnnnnnnnnnnnnnnnnnnnnnnnnnnnnnnnntgaataaagaaactgtttatctgtctccttgtgaatacttagagtaggggagcgccgtaattgacacatctcttatttgagaagtgtctgttgccctcattaggtttaattacaaaatttgatcacgatcatattgtagtctctcaaagtgctctagaaattgtcagtggttaacatgaagtggccatgggtgtctggagcaccctgaaactgtatcaaagttgtacatatttccaaacatttttaaaatgaaaaggcactctcgtgttctcctcactctgtgcactttgctgttggtgtgacaaggcatttaaagatgtttctggcattttctttttatttgtaaggtggtggtaactatggttattggctagaaatcctgagttttcaactgtatatatctatagtttgtaaaaagaacaaaacaaccgagacaaacccttgatgctccttgctcggcgttgaggctgtggggaagatgccttttgggagaggctgtagctcagggcgtgcactgtgaggctggacctgttgactctgcagggggcatccatttagcttcaggttgtcttgtttctgtatatagtgacatagcattctgctgccatcttagctgtggacaaaggggggtcagctggcatgagaatannnnnnnnnnnnnnnnnnnnnnnnnnnnnnnnnnnnnnnnnnnacaaactatagaactcttcattgtcagcaaagcaaagagtcactgcatcaatgaaagttcaagaacctcctgtacttaaacacgattcgcaacgttctgttattttttttgtatgtttagaatgctgaaatgtttttgaagttaaataaacagtattacattttt

SEQ ID NO: 76454 - DNA, 512 bp, Homo Sapiens
  misc_feature (199)..(211): n is a, c, g, or t
aaaaatgtaatactgtttatttaacttcaaaaacatttcagcattctaaacatacaaaaaaaataacagaacgttgcgaatcgtgtttaagtacaggaggttcttgaactttcattgatgcagtgactctttgctttgctgacaatgaagagttctatagtttgtttaaaaacaaacagtttaaaaactaccgcacttnnnnnnnnnnnnntattctcatgccagctgacccccctttgtccacagctaagatggcagcagaatgctatgtcactatatacagaaacaagacaacctgaagctaaatggatgccccctgcagagtcaacaggtccagcctcacagtgcacgccctgagctacagcctctcccaaaaggcatcttccccacagcctcaacgccgagcaaggagcatcaagggtttgtctcggttgttttgttctttttacaaactatagatatatacagttgaaaactcaggatttctagccaataaccatagttaccaccac

SEQ ID NO: 76455 - DNA, 1017 bp, Homo Sapiens
  misc_feature (55)..(55): n is a, c, g, or t
  misc_feature (63)..(63): n is a, c, g, or t
  misc_feature (65)..(113): n is a, c, g, or t
tcaaaaagtgaaaataaaaagcaagaaaatggagccaagaaatatatgaagatgntgaggatntnnnnnnnnnnnnnnnnnnnnnnnnnnnnnnnnnnnnnnnnnnnnnnnnncatgagcctgatgtctcctcaaagtcgtcttcagtgtagactccagtttagaccacagacataaacagaaagtcttacatgacacaatggatctgaatcatctcttgaaagcttttctgcaattagataaaaaaggaccacaaaaacatcactttgaatcagccttcagtagcacccgggaaaaactacttctttcacaagagaaagaggtgagacagatcgatcgggaaaaatcagaggcttttgaaagaactgtcaagacaggcggaaaagccgggaagcaaaaagtacaattcctagatcggctgatcatcccccaaagttatatcacagtgctctcaacagacagaaggaacaacaaaggattgagagagaaaacttggctttattgaaaaggcttgaggccgtgaaaccaacagttggtatgaaacgttcagaacaactgatggactatcatcgcaatatgggctatctcaactcatcaccattgtcaagacgggccagatccactcttggccaatatagcccattaagagcttccaggacatccagtgctacgagtggtctcagttgtaggagtgagcgatcagcggttgacccctccagtggccaccctcgaagaagacctaaaccccctaatgtccgtacagcttggttataaaacacttttttactttaaacattgttcacacaacttttcttgaagtgctcgtgcatattcctataattctctgtgtaaacatctagaataccgttttagcaattgaaggtgtacaacagtgagttgtaatgtattgttattcagtgcaaaattattgtcaaaaaacgatttaatgtaaaaagtgtttcctgaggatgtatttatatgagatgtatgtgttcttaatagagaaatagtggtaaa

SEQ ID NO: 76456 - DNA, 693 bp, Homo Sapiens
cctcgtgccgcctggcccggccttgccttgcgctgcgcgctcaccatggtgggccccgcgccgcggcggcggctgcggccgctggcagcgctggccctggtcctggcgctggccccggggctgcccacagcccgggccgggcagacaccgcgccctgccgagcgggggcccccagtgcggcttttcaccgaggaggagctggcccgctatggcggggaggaggaagatcagcccatctacttggcagtgaagggagtggtgtttgatgtcacctccggaaaggagttttatggacgaggagccccctacaatgccttgacggggaaggactccactagaggggtagccaagatgtccttggatcctgcagacctcacccatgacactacgggtctcacggccaaggaactggaggccctggatgaggtcttcaccaaagtgtacaaagccaaataccccatcgtcggctacactgcccggagaattctcaatgaggatggcagccctaacctggacttcaagcctgaagaccagccccattttgacatcaaggacgagttctgatgttccccctgcaggagcaggttcttgggagcgtgaggcaggaagacactaggtgctgaatctcctgcaaaactggctgcctggaggccctgagccacccagatctgaataaaacagatgcttaccctg

SEQ ID NO: 76457 - DNA, 860 bp, Homo Sapiens
tcggcacgaggccttgcgctgcgcgctcaccatggtggccccgcgccgcggcggcggctgcggccgctggcagcgctggccctggtcctggcgctggccccggggctgcccacagcccgggccgggcagacaccgcgccctgccgagcgggggcccccagtgcggcttttcaccgaggaggagctggcccgctatggcggggaggagagttttatggacgaggagccccctacaatgccttgacggggaaggactccactagaggggtagccaagatgtccttggatcctgcagacctcacccatgacactacgggtctcacggccaaggaactggaggccctggatgaggtcttcaccaaagtgtacaaagccaaataccccatcgtcggctacactgcccggagaattctcaatgaggatggcagccctaacctggacttcaagcctgaagaccagccccattttgacatcaaggacgagttctgatgttccccctgcaggagcaggttcttgggagcgtgaggcaggaagacactaggtgctgaatctcctgcaaaactggctgcctggaggccctgagccacccagatctgaataaaacagatgcttaccctggaagagcaaatgcctcctgttgtccttggtcaggggttctgtctacctggggacccctgtctgcacaccagggatcaataagagccaaagtgggacacctcctagatgtcagtatcagctggctgggcagtggaattttgagcgacctttactttatacttttctgtgcttgacagattttcagccatgaccatgttcactttataatcaaaacaaaaataaaggtcccatttttacaaaagg

SEQ ID NO: 76458 - DNA, 1130 bp, Homo Sapiens
cgtgagaagtgagagctgcccctgccctactgatggggagacaggtacaggtgacgggagcgttagccgagatgtccaccatccaccacacgcctaatgggcacccttgtgccatgagggctcagcctgggccctggtggaagcaggtaccgggtcgatgctacctgcagcctcatcagagcctagctcttgggcagcgggcgtggttctggcctcttcacagccgaagtgcagacaggggctgtgggccaagctcctgaaatttccgccgacaagggcatctttcatgagtcttccttctgggccccctgttttgaaaccaaacaaggatgcagattcctgccaatcccgatgagctcggcatgagcacaggctctgttcccacgcggaggtgatgtcagccccgagcagagacaggcgcttggcattccacgagcctgggcggccgcgtcagggacagacacagtgtctgacagctggctttgagaaatactgacaccagttcacagactccattcctaccttcagggacccccagaaaggtgaaaggaccccaggttgtgtgaccagtcacctgatccagccccttcttgtcctggttctcccatcacagaggggccagggcagggcaggagtgggcctgagagcccatggctggtttccacatgcgccatgattaagctcctgcactcggcatttcagtaaagccatcttgtggtacagacagtgctgacatcagaaccttccgtggatccagcctcctacctccgggtacctgctgtgtgggagtcactcccctcccccagccctggatgctcctccagtcatcccagtagctcagggccagcccctgggatgtgtctaagaacatgagtggacaaatagatggactgcccagagcagggtttctgagacttcgctgcaggatatgtcatcgccctgcaaaaaactacccccaccctaggaccccccgagttttggggtttgtaagaaattacatgtctcatttattttgaacaggtgaattttgcagtcaaattcttgtgttccattttagtacaaaaatagcattatcttttcaaaagtaacattttgaaattactcgtcaaataaattgatgcttcaggaag

SEQ ID NO: 76459 - DNA, 1048 bp, Homo Sapiens
ctcaacctgttagtagaaatgttgacttcgattttttgcaccctcttcacaggacctcataagttgcctctgttcttggaaagcaatgggaataaaaatatgctgttgaaaatagtgcatggggcatgcattttagtttaggaaacccccctcccttcccagttccagagggagaaattataagctatactgtgccaaaagtgagtggggctgcagagaatggtgccttttctcaccttctgagttaatgcccgacatctgccattggattcattgaccaaaggaagtcatttctactgtataaactcaggagtatcatagcccaacaagtaaataataaatgttcattggttttggaaggaaggaaaggtgagtattaccccaccaaataccagcgaagagcaccctggctttggccatctttccaaggttcataattgctgtgggcctggtgagccctgttcccaggtatgcaagggagggcttctccaggccagacatttctgtaggttttcaggtagcaactcccccatcatattttgggtgtcattccccactatctctccccacttctcagcctgtgccccagaaacaacaagtagaatagagccatctaaagttattaataatgagttcagggaaatagatgaattttttcctggcatagtcaatatttatatctcacaacaagtcaaaaataattttccatttggaaaacaaaacacaccatgactgtaattgttaaggcatataatcatgaacttcacatgctccctcaacaaacgttactgctctagggaaatcatagaaaaggaccctcttattccccaggggatcaaagcaagtccccttaggaatttcatgtgtgccatgggtctgtttttatttcacagtgactagtcatatactggagtagctctgttgttcattatttgtaacaggtccatgtaacagtcaagttagcattcaagcaattatggatgtgatactatgatgtacttttgttatgattgtatatgattaataacaaagttatttttataaaaaa

SEQ ID NO: 76460 - DNA, 694 bp, Homo Sapiens
  misc_feature (540)..(549): n is a, c, g, or t
cacccaatagaagggaaaatggcagagggaaagtcctagtggaaagagacctcagtctcagctaattgtggtgacaatatattgcttttgcaaattgtacataaacatatgaccaggtgaatgtatcgccaaggctcctgccaaggcctgggatggaggcctagagaagatgcccgaaagtttatgctgtgtgagcttcacagaagacctgccttccatgtatacccattttacaggactctccagaactctaagatgtcagaacaaactttgggacatagctggtcttgtagcaaaggatacaaagaatagacgaactacacctggctcttcgagtgtctgatagaagaaacacaccttacccacagccatgttacattggccaaaacaggtcacgtggccacacttggggccagtgaagtagagaaggataatatttctacagaaaagggataccacagggaggagcagccaacattttgaacagaaatataatctgctatataggacatttcataaagtaggtcaaatatttttggnnnnnnnnnngaggggagtctatgtatggtcagttaagtttaggaactcctacataatacccatctctagagctatgcaatgtaaaccagcacaccgaaggctctcagaagtcctgcaatagaaaaataaaatcaagattgtttaaccccaaaaa

SEQ ID NO: 76461 - DNA, 1032 bp, Homo Sapiens
  misc_feature (763)..(813): n is a, c, g, or t
  misc_feature (909)..(949): n is a, c, g, or t
cagtcgacggtaccggacatatgcccgggaattcggccattacggccggggagttcacaccattagtgaatagcaccatgctgaaacatttcacagcttccaactctgggaaataatggagagagtttaaaaatgtaaaacttcagttagtttggggctgaacttgcttacttgaaaaatctggtgctaggcacatatatctgcctctcctttgtaaataccactccaatattattctttactattcagatccaagcttcatgttctacttgttcttcatgttctttaaatcatttgaaagttgtcaactgagagaaacatttcagaggggggaggcttttggcactggtgataaacatccccccaagagaaccgtctggggttctcttctatttgtggttggtggtttttattcttttaaaaacagctttcattgttgtgtactttttgtgtaatacaaacaaaatgtaggaatcatagtttattgatttcaaatggctgacaaagaatgagtaaaaccattctttatggttttacgattcagactcatttggaaaagcgaatgtaatttttacctcctctttccaccccaagttttgtttctgcttttggagagggttgtatttcccctacttttaatccctagggaatattattgcacagatttagtcttaaaaactaaaacacaaatacaaagtggtaaacctgttcaaaagaaaattaaaatgtgaatcattcttgagctgggcgtggttgctcatgnnnnnnnnnnnnnnnnnnnnnnnnnnnnnnnnnnnnnnnnnnnnnnnnnnnagtccaggagttcaaaaccagcctgagcaacatagagagaccctgtctctacaaaaaaattttttaaatttgctcggtatggtggctcatgcttgnnnnnnnnnnnnnnnnnnnnnnnnnnnnnnnnnnnnnnnnnttgagcctgggggtttggggctgcaatgagctgtgatcatgccattgcactctagcctggattacagagcaagaccctgtctc

SEQ ID NO: 76462 - DNA, 669 bp, Homo Sapiens
  misc_feature (494)..(514): n is a, c, g, or t
tgactggttcatagggctttaattatacaatttacccctctaattagtactatatgtatgtgcttccctccccctgccagaatactccttggtcaattgtaggtattctttttggtttaatttttgccaatgtaattaaaaaatggtatgtcatttttaaaatttgtatttctttcattacaaataagattgttatatcagtattgttattggcttttcgtattcctcttaacgtgaaccgtctgttcattgtttttacctgttttcgttttagcaagtagtacttaatttaaagtgtgaacttaatatataagatgccaggaccatcatattgatgacaaaagtctattatgtggttgtagtgcatgtcttggagttaaactcttaagtatcaagaagtaaaataatttcattgtttctgttactaacattaaaagtgtgcaaattgtataaaattaggtacttcgattagtaaaagaaaaaaatttgaatgnnnnnnnnnnnnnnnnnnnnnagcatgcccagttatgccaagcatagtaaataaaggtcaagtagcatttataatagaggaagtattgttatccctagcatgagtgtaatggtgatatgaaaaactttgtcttgtcattataataataaaaaaatgaacatttattatggaaaaaa

SEQ ID NO: 76463 - DNA, 1101 bp, Homo Sapiens
  misc_feature (358)..(382): n is a, c, g, or t
gccttgaggcagatcccactggagagaatcatcgtggaaacggatgctccctatttcctccctcgccaggttcccaaaagcctttgccagtatgcccacccgggcctggccttgcatacggtccgagagattgccagagtcaaagatcagccactctccctcaccttggctgccttgcgtgagaacaccagtcgcctctacagtctttaagcagagaagggcgaccagcagcctgacagaacacaggctggcttgaagtctgtgtctcaggtcgaggatgtgattagagagctgattggaacacagaaaaccaggacaggatgttttcctccaagcgggtcataaggcttcagcttcnnnnnnnnnnnnnnnnnnnnnnnnncatggaatgaggggtatggggactgcctgtaatagcactgggattttgcctcccagccaaaatgctccagggtaggcagcaaagaagaaagagtgcgatatgagggtacagtgagtttggcagtccaaattctgttctctgcagcctgtttttgagtagtttgtgaataaagtcacccgcctacttgtctaagcacatgtgggtgtgtaactcagttcctggttctcggttctaaaaacagacttccaactgggaaactttttgggggaaattaactggacacctatctcggaggtttattttcttgcaaccagtgaagtcgtcctcctcccttccctggataactcttcagtttgactgtcactgttctggtgtcaactccagcgtcggcacaggcagaaggacttcagctgctggtctcattggttccactgccattgaaatgggggggtgcagaggagcactcattgtccatgatggagatccaggacagactgggggactccgggaagaggctttcttggggaagaggaccccaaaggaggtacttcctcctcactgatgccctcagggctgctgtgtggatgagttaagctgataaggttcagtttgcggcggaaactacctgctagtcttgtgtcaggggctgccagcctccttttgtttcacttttgcccccttcttgggaacatttgaccaaaaataatcctcaggtcaaa

SEQ ID NO: 76464 - DNA, 721 bp, Homo Sapiens
  misc_feature (417)..(524): n is a, c, g, or t
cagagagcaaaggcccaggcagtaaggtagaaatagagataaaaatcatcccttccttgtgatccaaagctggtcgagcagctttcctggaggaaaaggttaatgaacttcaggtccctgcaactcagcccccaccacaaacacagccctggaaacatacagtggcgcaaggtcctcttgaaatgttaatggttaatgttcccaaaccagagaatgctttgaaaatgtatcattcagtgtaaattaattacatacatatttttctatatatttgtttcaaactgtaaaaataacataatatgtaatttgtgtattagtgagaggtgaagccagctggacttcctgggtcgagtggggccttggagatcttttctgtcttacaagaggattgtaaaatgcacccatcagtgctctgtnnnnnnnnnnnnnnnnnnnnnnnnnnnnnnnnnnnnnnnnnnnnnnnnnnnnnnnnnnnnnnnnnnnnnnnnnnnnnnnnnnnnnnnnnnnnnnnnnnnnnnnnnnnnggattctaaaagtagacaatcacagggaggattgaaaaaaagggcactctgatagggcaaaaacggaacatgggaggggacaaataagggaataaaatctggccaccccagccagcagcggcaacctgttcaggtcgcctgctgctgtggaagctttgtccttttgctcttcataataaaccttgctactgttcaaa

SEQ ID NO: 76465 - DNA, 802 bp, Homo Sapiens
tttttttgtcattaatatgatctttaataaacggaataacgcaccattttacagcaagcctttttaaacctaaagaactgccttaaaatctccttctccaatgtctctgtatcaatacaatctttttatttaggtttatatatatcaaagcatttacttacacttattcatagaaaactctttagtggcttaatgtcagctttcatagtggcatccatagataatacaaaagaaaagtgatttgctttattttatactcacactgatccatcaaacacaacttatacagcatagcaaggcttcagacagcttatacaaaagcaaaataactgaaattattcataaagtcatatatgatagtctatctgtaatgtaagagcaaaacacaccaacaaaagatacccgttaacaagaaagagggttctgaggaagtgcgagtattttctagcctttctttttccggaaaagcatcctcagaagtgaatactccgtagcttatgtttctcctgtccattcagaaaaagcatgacagctacgcatctccatgtttcagctactacaacaccctaagagttagtgtattttacaattatccatgtatctttatttgaaaaattatcagcaaaaaactgaggatgattccagcttacataaacactgatacaatataatctctatggaaatgaaataacaaggcatacaaaaattgcttaaataaataaatgtggccagaaaaagaaaagccacagaagtcaagcaattcagtgttaaactgggacctatctttgaattgcatctttta

SEQ ID NO: 76466 - DNA, 975 bp, Homo Sapiens
  misc_feature (460)..(460): n is a, c, g, or t
  misc_feature (488)..(488): n is a, c, g, or t
ggggttgtctttgaaaaggaaagcaatcacttctcactttgcataattgcctgcagcaggaacatctcttcactgggctccacctgctcacccgcctgcagatctgggatccagcctgctctcaccgctgtagctgtggcggctggggctgcagcttgcagggagaagcaagaagcatcagttgacagaggctgccgacacgtgcctcttccctctcttctctgtcaccctcctctggcggtccttccaccttcctctgtcctccggatgtcctctttgcccgtcttctcccttgggctgagcaaagccatcccctcaattcaggggaagggcaaggagccttcctcattcaggaaatcaaatcagtcttccggtctgcagcacggaaaagcacataatctttctttgctgtgactgaaaggtatccctcgtttatcatcccctttgtttgtgattgctngctaaagtcagtagtatcgtttttttanaaaaaaagtttggtgtttttaaccatgctgttccagcaaagatgataccttaaactcccactgcaagcccatgaacttcccagagagtggaacggcttgctcttctttctagaatgtccatgcacttgggttttaatcagcagttccctattattctgattttaagctgttcctgtgatgaacttagagacagcatcggtgtctgctgctgtgtccccaggtcttgtgtgggtggcacagatctgggcagttagatagtgctctgtgcctaaggtgaagccacactagggtgaagcctcacttccctgtttgagcaatgcagtgcctgctgcccgtgtgcatgaaggtacagccattcagataagtggaactattgagttacataaagaaaatagatttgcatttgtcaggcagacgtttatacaacaccacggtgcttttatacattgtgcttattttaataaaactgaaattaaatgtatggcct

SEQ ID NO: 76467 - DNA, 665 bp, Homo Sapiens
  misc_feature (74)..(339): n is a, c, g, or t
gctgtcctcccatggcagaagatggaagggcaagggagagctaacatgctcccgcaaaccctttttataatggnnnnnnnnnnnnnnnnnnnnnnnnnnnnnnnnnnnnnnnnnnnnnnnnnnnnnnnnnnnnnnnnnnnnnnnnnnnnnnnnnnnnnnnnnnnnnnnnnnnnnnnnnnnnnnnnnnnnnnnnnnnnnnnnnnnnnnnnnnnnnnnnnnnnnnnnnnnnnnnnnnnnnnnnnnnnnnnnnnnnnnnnnnnnnnnnnnnnnnnnnnnnnnnnnnnnnnnnnnnnnnnnnnnnnnnnnnnnnnnnnnnnnnnnnnnnnnnnnnnnnnnnnngatatgagtgagactcaaggcatgattcatcatgagacaaaggatgtacatttgcaatgtttgtcatgtcagacaaaacaaaaatatgtaaatatccatcaatagggaactgctgaaaaatttttttgtataatcataaaatgaaacatgcagatgtttaaaccaatgagctagatctcaacgtgctgatatggaaagtgcttcagaatgtattaaggacataaattaagtgtacaataatgtgtgtgtgtgtatatatgtatatgcttacgtgtgtatggaaagtatctcagcagatacaataaaaacttaattgtgattaaaaa

SEQ ID NO: 76468 - DNA, 1200 bp, Homo Sapiens
tcataacatttgataaaaatcttttgtctttgtttcatgtttaccttttcctactaaaataaacctgttcgggggaacagctactagatgaatttaagggttttatgcaccttatagaacttatagcaaaaatagttttagttgatttcattataaataacgttttcaagaacctgtgcaaaactgtcaataatttcctaaagcacaattgatcagaaaaatccatgattgttcagccttcacacccttcttcatgtaagaacacctttctgtacatctcacagttacttattaggttgaaaggtatatggagaatggtcattagacgtctcgacagccacctgctgttgaccacttgcctcctcaacaggaaccgctgtcgtctgcatatgtgcatactgtggcaagtaggctccttgcatagctgacgttgcaggcatgtatgttccggtgctgcctagtgacagatgactcatctgctgggccagagggctgatcattgatgcgggctgtagtgacatggtgtgctccattgagggagttaacacggcaccagggtgctgtagaatatatggttgaggttgcatccacgaaggactttgcacctggtaggcagatacaggagatgcaatatagggtgtaatagaagtttgagtgatcattcggtttgtagcaatactgtatggtgaaggataaaatccgttctgtatagcagctgtagttgggtcgtaagtaagtgtcattccagcaagtctcacctctccttctctatgccatggtcttccattagggatgtatttgtttgggttctgtctctttttctgtcctccatcagcaaacttacacaataaaggttctgtgggggcagaaactcctggtggtgtcttaataaattttccattaaaacgaccaataacagcttcacatttttctgttgatcccatcctagcaaagccaacaccacgacttgtaccactggaatcacgtagtatccttgtagaaataacttgtccaaatgggttgaggcatattttctagttcttgctcatccatggagagtggcaaattagaaatgtagaggttggtaggatcttgttcctgttgctttgccatttgagcttgaaccccactggccttcagggcagacacagctttttgagctgctgcagggctgtcaaagtcgacaaaaccataaccttt

SEQ ID NO: 76469 - DNA, 983 bp, Homo Sapiens
  misc_feature (73)..(73): n is a, c, g, or t
  misc_feature (848)..(848): n is a, c, g, or t
  misc_feature (857)..(857): n is a, c, g, or t
  misc_feature (861)..(861): n is a, c, g, or t
  misc_feature (872)..(872): n is a, c, g, or t
  misc_feature (969)..(969): n is a, c, g, or t
atttaaaattaaaccctgtttcggggggaaacagcttacttaggatgaattttaaggggtttttatgccaccnttagagaacttaatagcaaaaactagttttagggtgattttcattataaataaacgtttttcaagaaccctgtgcaaaaactgtcaataatttccaaaagcacaattgatcagaaaaatccatgattgttcagccttcacacccttcttcatgtaagaacacctttctgtacatctcacagttacttattaggttgaaaggtatatggagaatggtcattagacgtctcgacagccacctgctgttgaccacttgcctcctcaacaggaaccgctgtcgtctgcatatgtgcatactgtggcaagtaggctccttgcatagctgacgttgcaggcatgtatgttccggtgctgcctagtgacagatgactcatctgctgggccagagggctgatcattgatgcgggctgtagtgacatggtgtgctccattgagggagttaacacggcaccagggtgctgtagaatatatggttgaggttgcatccacgaaggactttgcaccttgatagcagagccccgatacttgttttctctggtttcctttgccacctggtaggcagatacaggagatgcaatatagggtgtaatagaagtttgagtgatcattcggtttgtagcaatactgtatggtgaaggataaaatccgttctgtatagcagctgtagttgggtcgtaagtaagtgtcattccagcctctccttctctatgccatggtcttccattagggatgtatttgtttgggttctgtctctttttctgacctccgtcggccgncttgcgcgnttgnggttctccccncgcgtccgcggtcgcgtaagcggtcgcgttggtcgtcgattcccaaaaattccggtccggtaccaggcctgttttgggaacggttggtctctttccntttgtccccccccg

SEQ ID NO: 76470 - DNA, 1192 bp, Homo Sapiens
gcctgggtgtgaatcggcacgaggagtcatggagatgatgatccagtacggcttcaccaccatcttcgtggccgccttcccgctggcgccgctgctcgcgctcttcagcaacctcgtggagatccgcctggacgccatcaagatggtctggttgcagcggcgcctggtgccgcgcaaggccaagggacatcgggacctggctgcaggtgctggagaccatcggtgtgctggcggtcattgccaatgggatggtcattgccttcacatctgagttcatcccccgagtggtctacaagtaccgctatagcccatgcctgaaagaaggcaactctactgtcgactgcctcaagggctacgtcaaccacagcctgtccgtcttccacaccaaggacttccaggaccctgatgggattgagggctcagaaaacgtgactctgtgcagatacagggactaccgcaatccccccgattacaacttctccgagcagttctggttcctcctggccatccgcctggccttcgtcatcctctttgagcacgtggccttgtgcatcaagctcatcgccgcctggttcgtgcccgacatccctcagtcggtgaagaacaaggttctggaggtgaagtaccagaggctgcgtgagaagatgtggcatggaaggcagaggctggctggggtgggggccaggctctcggcccccaatgcctgcccatcccaccccagcatccatcttcagtgccaggagcacagacgtgtagggccagagcccgtccagaggccaccaggagctgagacagtgccaccaccagcacctcccacaagcccaccgctgtgcgtgttgaggggtgctgtgagaaggctgtgcccatgtggggccgcaggaatcccctgtatgttcagggctgtgagctgccaccctattccgcctgctccgtctttgtgggggctctcaggcttggcacagccctgacttgaactctgggtgaccctgggcacccacagaactgggagtgagggctcctcaggcagccacaaggcaggaaaactggcgcaaatttcctgggcctccctctgacttctgggcgccagatcctgccgtgcccccatcctggctgttgggggtgtcctgagcccacctcgctggcctgttcccttcagccaacccgtttctgcagtaaaattaagcctgtcaaa

SEQ ID NO: 76471 - DNA, 1099 bp, Homo Sapiens
gaaatcttccttggcttgcacaagatagtttttgatccccggtacttacttctcaatcctaaagagagaaaacaggtgtttgatcagtatgtaaagaccagggcagaggaagaacgcagggaaaagaaaaataaaataatgcaagccaaggaagatttcaaaaaaatgatggaagaagcaaaatttaatccaagagcaacttttagtgaatttgcagccaagcatgctaaagattcaagattcaaagcaattgaaaagatgaaagaccgagaagccttgtttaatgagtttgtggccgctgctaggaagaaagagaaagaagattcgaagaccagaggtgagaagattaaatcggatttctttgaactattatctaatcatcacttggacagtcagtctcgatggagcaaagtaaaagacaaagtagaaagtgatccacgttacaaagcagtagatagttcatcaatgagagaagaccttttcaaacagtacattgaaaaaatagccaagaatttagactcagaaaaagaaaaggagcttgaaaggcaagcccgcattgaggcaagccttcgagaacgagaaagggaggttcaaaaggcccgttcagaacaaacaaaagaaatagatcgagagagagagcagcacaaacgagaagaagctatccagaatttcaaagctcttctgtctgacatggtacgttcttcagatgtgtcatggtctgatactcgtaggaccctccgaaaagatcaccgctgggaatctggatccttattggaaagagaggagaaagagaagctttttaatgaacacattgaagcacttaccaaaaaaaagagagagcactttaggcaacttctggatgaaacttctgcaattaccttaacatccacgtggaaagaagtaaaaaaaatcattaaggaagatcctcgatgtattaagttctcctccagtgacaggaaaaaacaaagagaatttgaagaatatatcagagacaaatatatcacagccaaagctgacttcaggacgcttttgaaagagaccaaatttataacatatagatccaaaaaattaatccaagaatcggatcagcacctgaatg

SEQ ID NO: 76472 - DNA, 846 bp, Homo Sapiens
  misc_feature (803)..(803): n is a, c, g, or t
  misc_feature (806)..(806): n is a, c, g, or t
aggggcgtacgcgggcaagatggaggcgactacggctggtgtgggccggctagaggaagaggcgttgcggcgaaaggaacggctgaaggccctacgggagaaaaccgggcgcaaggacaaggaagatggggagccaaagaccaagcatctcagagaagaggaggaagaaggcgagaagcacagggaacttaggctgcggaactatgtcccggaggatgaggacctgaagaagaggagggtgccccaggccaaaccggttgcagtggaggagaaggtgaaggagcagctggaggccgccaagcccgagcccgtcatcgaggaggtggacctggccaacctcgctcctcggaagcctgactgggacctcaagagagatgtggccaagaagctggagaaactaaaaaagcggactcagagggccattgccgagctgatccgtgaaaggctgaaaggccaggaagacagcctagcctctgcagtggatgctgccaccgaacaaaagacctgtgactccgactgaggcatgccctgccccaccactcgcccatcaggcctgtcctgcaggggatggtcttgggcagggatgggggctaggcttgccatcacctccagtttggcttctgagcagagactccctgcccatcaagtctgaaacccccatggatgaggtcagctccttgtctgctgggtggcccctgccattctgaatggaggcagaaccagcaacaactctgggcgtgcctgtgtctgcacatgtggatgtacatatgtctgtatatatgtatatattttgaactttctanaanaaaatctggaaatagaaacaagtaaacccctgtgtgtggc

SEQ ID NO: 76473 - DNA, 1139 bp, Homo Sapiens
  misc_feature (83)..(83): n is a, c, g, or t
  misc_feature (134)..(134): n is a, c, g, or t
  misc_feature (214)..(214): n is a, c, g, or t
  misc_feature (229)..(229): n is a, c, g, or t
  misc_feature (234)..(234): n is a, c, g, or t
  misc_feature (1044)..(1069): n is a, c, g, or t
cctgcaacagagctccgactgacgcgctcgagtaccgttgccgtccagtgcctgcagtggtgacttcagcgagacctattacntgtcaaactgtaaagttcgactctcacgattttctaaatgcatctccgatnttaatgtcttgtgttgatgtattaatatctccctaatggtgacattccttggtcctgtgtccgagggctgcccggactgngctctcccaagggtntattntattctgaaatctaaagaacagtattgggcaggaggaaaaggcttggtgtctgcggggggtgtcttccctgcctgtggcatttgtgtgttggctttgcagctgctgtctgagtagtggccactggggtgccttcactgggccagtcaacggggggctcctgcccaggccacagagaacctgagttcccgggagctgggccctgcctgcagccagggctggggttgccagaggccctggagggaaggacagtccctgctggggaagaacagccccggggccccctggtcaccgagactcagcctctgctggagaaagccacgccctccctgctagcacagaggcctgactgacttttttgcttaacttccatgttctgggtgatggaaactgccaaacctcctgtcagtgaggactctttccgactgcccagaaagtgggggtggaggaccgaggctacagctccacacgccccggtcccccagagcatctgccccaggtacacctccccctgcgccccgcacgactgcgggagccagactgtccagggaaacagcctctctcttttctacacactcagccacaaagccccccagctcccacaccgcgtcccagctcccctcttttgtaagtatgtgaaaaggaaaaaatgcaaacgttggagtttgggctggagctcctccctccagctgcgacttttaactatgtaataatgtacagaggaagctgttggtgttctaagactctgtgtggctgtgcaatttctgtacatttgcaattagaaatattaaagatttatttagctatttttnnnnnnnnnnnnnnnnnnnnnnnnnnggccgcgtatgcggccgcaagcttattccctttagtgaggttattttagttgcactgcgtctctccaacc

SEQ ID NO: 76474 - DNA, 1570 bp, Homo Sapiens
  misc_feature (500)..(500): n is a, c, g, or t
caggaaccggcccggagccgtggacgccctacagctgagaaggggacccaaggggtcggccgcggccaaggcccctaggaccgccgccccagctcacgctgccgacggcagctatagacattctgcgtcaggtccgggctcctggacttcgcctttcccgagccctggaggtggggagaaaagtggaagaactggccagagagtctggaagtttgggttctggtcctggctgtgccactgactcactgtgaccttgggatcttgtgctgtgaagacatttcccaagtgcttcatgttagccagcaaatctgacccacaaggcctggaaagaggtgattgttaggttgcgcagaggtggtcttatccagctcagcttcccctgggacccaccgtgggacctgaggcagaactggggtggacttggcctcctccatggcacaccggctgcagatacgactgctgacgtgggatgtgaaggacacgctgctcaggctccgccnaccccttaggggaggcctatgccaccaaggcccgggcccatggggctggaggtggagccctcagccctggaacaaggcttcaggcaggcatacagggctcagagccacagcttccccaactacgacctgagccacggcctaacctcccgccagtggtgggctgggatgtggtcctgcagaccttccacctggcgggtgtccaggatgctcaggctgtagcccccatcgctgaacagctttataaagacttcagccacccctgcacctggcaggtgttggatggggctgaggacaccctgagggagtgccgcacacggggtctgagactggcagtgatctccaactttgaccgacggctagagggcatcctggagggccttggcctgcgtgaacacttcgactttgtgctgacctccgaggctgctggctggcccaagccggacccccgcattttccaggaggccttgcggcttgctcatatggaaccagtagtggcagcccatgttggggataattacctctgcgattaccaggggcctcgggctgtgggcatgcacagcttcctggtggttggcccacaggcactggaccccgtggtcagggattctgtacctaaagaacacatcctcccctctctggcccatctcctgcctgcccttgactgcctagagggctcaactccagggctttgaggccagtgagggaagtggctgggccctaggccatggagaaaaccttaaacaaaccctggagacagggagccccttctttctccacagctctggacctttccccctctccctgcggcctttgtcacctactgtgataataaagcagtgagtgctgagctctcacccttcccccactaaccagctcctagcctctgccctccctcattctcattcacacctgtgtcccttttccactaggagtcgacttcacatccaaaggattcacagagggccccactagcttcaaaaccaggcactttcaaacttggttttagcagcagagtcctttagttatgggcgatctgaaaccccattatgcaaaactaaaaacagaccctg

SEQ ID NO: 76475 - DNA, 1034 bp, Homo Sapiens
gaacccccggtgttgggggcaatttcccttcagggttgtccttaaggcccctttccaaacacctgtcaaggtgcagggggtgggttgaagttctttttaaagctgtttaagccgatgggggggtaccagccttgagcattcctggacaccccgccaggttggaaggtctgcaggacccacatccaagccaaccactggcgggaggttaggccgtggctcagcccgtagttggggaagctgtggctctgagccctgtatgcctgcctgaagccttgttccagggctgagggctccacctccagcccatgggcccggcccttggtggcataggcctcccctaaggggtggcggagcctgagcagcgtgtccttcacatcccacgtcagcagtcgtatctgcagccggtgtgccatggaggaggccaagtccaccccagttctgcctcaggtcccacggtgggtcccaggggaagctgagctggataagaccacctctgcgcaacctaacaatcacctctttccaggccttgtgggtcagatttgctggctaacatgaagcacttgggaaatgtcttcacagcacaagatcccaaggtcacagtgagtcagtggcacagccaggaccagaacccaaacttccagactctctggccagttcttccactgtaccatgagatatatttggattttaaaaattggtgaaccttttctccccacctccagggctcgggaaaggcgaagtccaggagcccggacctgacgcagaatgtctatagctgccgtcggcagcgtgagctggggcggcggtcctaggggccttggccgcggccgaccccttgggtccccttctcagctgtagggcgtccacggctccgggccggttcctgggcccaggacccacctgactcacaaggaagcagattgaaaacgcagccgcaaggcccgcgagctcgcacgcgtgggtcgacgatatcccgggaatatccggagcgtaccagcctgcttttttaaacccactgttcatattccatgcgc

SEQ ID NO: 76476 - DNA, 629 bp, Homo Sapiens
  misc_feature (46)..(46): n is a, c, g, or t
  misc_feature (78)..(78): n is a, c, g, or t
atgttcactaaaaatcctattgccttgtgtgattcttaatctcttntgcgaacctttcagtctccgctagctctttcntaatgagctttacagcagaagctgttttatcgttaagtgccccacagagacactttaccaggaggctgggagagttctccagatttgggagaggcgcagagacagtgtgtgagccgagccctgtctcagcaatccacctggaggagctagagtatcctcctccctttaccattcagaccgagagaaaaagcccagcttgtgtgcaccctcgtggggttaaggcgagctgttcctggtttaaagcctttcagtatttgttttgatgtaaggctctgtggtttgggggggaacatctgtaaacattattagttgatttggggtttgtctttgatggtttctatctgcaattatcgtcatgtatatttaagtgtctgttatagaaaacccacacccactgtcctgtaaacttttctcagtgtccagactttctgtaatcacattttaattgccacctcgtatttcacctctacatttgaaatctggcgtctgtttcaagccagtgtgttttttcttcgttctgtaataaacagccaggagaaaagtgaaaaaaa

SEQ ID NO: 76477 - DNA, 1101 bp, Homo Sapiens
  misc_feature (123)..(150): n is a, c, g, or t
  misc_feature (995)..(995): n is a, c, g, or t
  misc_feature (1049)..(1049): n is a, c, g, or t
caaactatgtgtaaataagttcaaataatcatgttaggctattatgcagttaaaaaatactggcaccaaatgacatttcaaataaaagtgacttgagcccatattgtgtttggctgaaggacnnnnnnnnnnnnnnnnnnnnnnnnnnnntcttgtcgttaatctctaaagtttcatggtgaccagttcccattgaacattcaccagaactgccataaaagctagccatgtacttgaaagctctattttcatgcaaaagtagtaaatatccttctggtttcatttaacagtcttcattctcccccagctcccaccattttttagtgctgaatacaacacgcagaatatgtaaattagatcaattaaagaagtacgattcgtagatgttgtgggtggataaaccagtctacccttgcggttttggaaagcatttcttcttgggtgtgggagtgaattaaggaagaaggatcagagaagagattcccggactcacagttgccttgtgatttttttctccgagaggattatgggagtaccgaggagtgcttctaagggtggtcagttcatgctgtccttatggctgctccggtctgtgttgtggttgttttgatcgtggttcttccactggatgcttgttccgttcatggggaccgaggtcatcagacttttggactggtaacagcagcagcagaggcatgactggaaacaatttttaaatttcttgctcacaaaatacagagctatggggtttatacatgaattcatggttgccaagttaataccgatgtaatccatgagcagtaagaaactaagtaattcacatcggttcttgtccatctcgttatacacagttttcttcaatatacggcttaaatgaagagggaacccgcaaagagcagaaattacatccaagcagaaaactgtttttgcccactcccgacgccgcttagaatgttccctaagggcaatcctcaggtcgccattcctccggtcanaactcccaaggtcttgaggtgttagagatccacttggcaaccaggggttacggnatgaaaccgcagaggccccaatccctataaccttggaggaaccccggaattt

SEQ ID NO: 76478 - DNA, 483 bp, Homo Sapiens
ggtgggacacaagagccaaaccatatcactgctgttgtgggtaataggggaggtgaaattggggggacaattcggcctctttgtgtccagaggttgtgcagttatcgagtgaggtcgatcagaagtctaaagggatctttcaaatggatagtgagttgccttttcctataggtgacaatcagagatttaatgttttaagtatcatataataggtttttctcctgattgtgaattgtaagtgttggtaatacagaaaatgagaaagtataaaccacccccaatcccaatgcccatagaaacgttgttaacattttggagtactttctattagtgtttatttttcccaatcctagtatttttagtaaaactactgtttagtaaatgatttttggtaactaatttcaaaatttatacttcaaccgtttattattagaatgtaatgcaagatgtattgcaataaaacttgagttttaaaagtttaaa

SEQ ID NO: 76479 - DNA, 925 bp, Homo Sapiens
  misc_feature (786)..(786): n is a, c, g, or t
  misc_feature (789)..(789): n is a, c, g, or t
  misc_feature (863)..(863): n is a, c, g, or t
ggtaccggtccggaattcccgggatatcgtcgacccacgcgtccgaggggcccgagcggagccggccgcgatgagcggggagccggggcagacgtccgtagcgccccctcccgaggaggtcgagccgggcagtggggtccgcatcgtggtggagtactgtgaaccctgcggcttcgaggcgacctacctggagctggccagtgctgtgaaggagcagtatccgggcatcgagatcgagtcgcgcctcgggggcacaggtgcctttgagatagagataaatggacagctggtgttctccaagctggagaatgggggctttccctatgagaaagatctcattgaggccatccgaagagccagtaatggagaaaccctagaaaagatcaccaacagccgtcctccctgcgtcatcctgtgactgcacaggactctgggttcctgctctgttctggggtccaaaccttggtctccctttggtcctgctgggagctccccctgcctctttcccctacttagctccttagcaaagagaccctggcctccactttgccctttgggtacaaagaaggaatagaagattccgtggccttgggggcaggagagagacactctccatgaacacttctccagccacctcatacccccttcccagggtaagtgcccacgaaagcccagtccactcttcgcctcggtaatacctgtctgatgccacagattttatttattctcccctaacccagggcaatgtcagctattggcagtaaagtggcgctaccacccaaaaanatngagcacagcgcccgtggcctcgctcagaaatcgcgcagcccggcgggccgctctcccaagtttcccctaggggnccggggggggccccctctaaaagtttccccccgaaggggccccacttttaccggtaccccgg

SEQ ID NO: 76480 - DNA, 908 bp, Homo Sapiens
  misc_feature (59)..(61): n is a, c, g, or t
gcgcgcccaaagaaaggtctagaaaagcttctggaggcccgaggcgggcccacaagggnnngggtttgtgttgtgtggttttttccctggtagcgcccctttattgccaatagctgacattgcccctggttaggggagaataaataaaatctgtggcatcagacaggtattaccgaggcgaagagtggactgggctttcgtggggcacttaccctgggaagggggtatgaggtggctggagaagtgttcatggagagtgtctctctcctgcccccaaggccacggaatcttctattccttctttgtacccaaagggcaaagtggaggccagggtctctttgctaaggagctaagtaggggaaagaggcagggggagctcccagcaggaccaaagggagaccaaggtttggaccccagaacagagcaggaacccagagtcctgtgcagtcacaggatgacgcagggaggacggctgttggtgatcttttctagggtttctccattactggctcttcggatggcctcaatgagatctttctcatagggaaagcccccattctccagcttggagaacaccagctgtccatttatctctatctcaaaggcacctgtgcccccgaggcgcgactcgatctcgatgcccggatactgctccttcacagcactggccagctccaggtaggtcgcctcgaagccgcagggttcactggggagtcaagagatggggctgggctggggattcgggggtggggcctcccgtggacccacctccgtccggcccgcgggaccagggtgcgggtcctccagccggggccgctcaccagtactccaccacgatgcggaccccactgcccggctcgacctcctcgggagggggcgctacgacgtctgccccggctccccgctca

SEQ ID NO: 76481 - DNA, 603 bp, Homo Sapiens
  misc_feature (105)..(121): n is a, c, g, or t
tttaatataaagatatattccataaaagagtttggcagtcaaagagaagcatcacacttccgaaaaacacaagcattcttctcctagtctacagagaattgtgtnnnnnnnnnnnnnnnnntcatcatcaacagccaccagtatacaccacactagaatgtacactccggcaagtaaattaaggttgcagtccatccctgaacgatgagaagtggtctgagctatggcaaagtgttagaaagtagcccagctagacaaatgccccagctatccccaggggagttattcagtacttaagacttcatttccaagagcagccccagaaaagccctgacaggaagggtggaccagtgatcaccgatatcccattaggggcggtcaccagaaacaaaatgcctggagcttctgagcagctgcagcctggggttgtggctaggcacggggtgtggttgcagaagaacggctgtctccggggacaggcaaatggcaggccagccagccctgggtacatggccacaagaggagccctggccaacagtttcaggctggccatcttgggctgggctcctgccgttgttcttcgacaaaggtagccgagctcga

SEQ ID NO: 76482 - DNA, 459 bp, Homo Sapiens
gcatccatacggaaagtcgtttgacagagcatgctctgcgttgttggtttcaccagcttctgccctcacatgcacagggatttaacaacaaaaatataactacaacttcccttgtagtctcttatataagtagagtccttggtactctgccctcctgtcagtagtggcaggatctattggcatattcgggagcttcttagagggatgaggttctttgaacacagtgaaaatttaaattagtaacttttttgcaagcagtttattgactgttattgctaagaagaagtaagaaagaaaaagcctgttggcaatcttggttatttctttaagatttctggcagtgtgggatggatgaatgaagtggaatgtgaactttgggcaagttaaatgggacagccttccatgttcatttgtctacctcttaactgaataaaaaagcctacagtttttagaaaatta

SEQ ID NO: 76483 - DNA, 1305 bp, Homo Sapiens
  misc_feature (609)..(744): n is a, c, g, or t
ttcaccacgccggatgtggttcgtagactggacgccgctggttagggctcgttaccatagtctggtatatcgtatacatgctgcatagttgacgcggggggggtgtgtttctaccagctatacctcgtcatccgtcgcgctcgttggcctagttgacggacgctcggggcgtggcgcggcgtctctgcggcgcagggtcggccatagtatactcccctttgtctttaaacccggcggcgggagtattcgtgttctcctacataaattccttggggacgaatttttgttccccgcgccgagaataagtggctggggggtccagcactacaacctcccttgtgtgttattccccggggggcgattaaatacttcgcatgggggggttgctctccatattggtcgccctcgccctaaaggggggggttctctcctccaaattatgccccagccacgtgttggtcggctctgcaacagtgttttgtatgtgctggcctcgtgtgtgtcgtatttaataagtcgccccttccattgtgggaggccccgtttcctcctcaccaaataaggtggtgggcgggattcttgtccgtggtgccccccgctggggggtannnnnnnnnnnnnnnnnnnnnnnnnnnnnnnnnnnnnnnnnnnnnnnnnnnnnnnnnnnnnnnnnnnnnnnnnnnnnnnnnnnnnnnnnnnnnnnnnnnnnnnnnnnnnnnnnnnnnnnnnnnnnnnnnnnnnnnngcagccccaaaggggcaaaaagagactttaattaggggagggaggatccaccagaatcagaaaagggacagctagcgtgggagcagaggagccagaacaggcaggaggagggcccggccaggaagctctggaggactcacctcgccacctctggcacaggcactggcactgacggacaaggcgaaacagcggcccctctcaactgggagggcacccaatggcccctgtagccagaggttgcccggcttttgggccccaggtcctaggcatgactggtggtcaccaatttggcccttgtccccaaccagtgctggggggccatctttaggcagaactcaggaagctggcagagagttcccaacacttatactggggccaaggaggcttgggaataaaagggcaagggagaaactggagtctgaaacctccctccctccccacctggggtggcataggagagaaaaaataagtcgccttctggctccaggcccgcccagacccacagcaaccaataacgtataatcactgggaccagtcacagccactggaggtggaggttta

SEQ ID NO: 76484 - DNA, 1243 bp, Homo Sapiens
  misc_feature (850)..(871): n is a, c, g, or t
ccacgcgtccgccgctttccggcccagccagcgcccgcgatgactgccactctccgcccctacctgagtgccgtgcgggccacattgcaggctgccctctgcctggagaacttctcctcccaggttgtggaacgacacaacaagccggaagtggaagtcaggagtagcaaagagctcctgttacaacctgtgaccatcagcaggaatgagaaggaaaaggttctgattgagggctccatcaactctgtccgggtcagcattgctgtgaaacaggctgatgagatcgagaagattttgtgccacaagttcatgcgcttcatgatgatgcgagcagagaacttctttatccttcgaaggaagcctgtggaggggtatgatatcagctttctgatcaccaacttccacacagagcagatgtacaaacacaagttggtggactttgtgatccacttcatggaggagattgacaaggagatcagtgagatgaagctgtcagtcaatgcccgtgcccgcattgtggctgaagagttccttaagaatttttaaaccatctggctggatctcgtggccttccccctcagactacccatgtctccacgaaggcgtcctggagtcactccccgagcagcgcggcggcggcagggagttgggttggggtgggcatttgatgcgggaggtgggtggtgtgcttgctagctgggcaagaaagcagcagtggacctgccccaaggccacacgtgcctggtcaggctggcttctgatgttcagtcccctgggccgggacagattttttttaacgtcttgaaacttaaactctgtgcttgtaggatactggtaaccctttttgtcnnnnnnnnnnnnnnnnnnnnnnaaacctccacctccaggttggctgttgactgtggtccccagggattatacgttatgggtgggcggggggtcttgggcgggccctggagcccaaaaagggcgacttattttttctctcctttgccaccccagggtggggagggagggaggttcgcagactccagtttctccctgtgcccttttattcccaagcctccttggccccagtataacgtgtggggaactctctgccagctctcctgagttctgcctaaagatggcccccagcactggttgggggacacagggccacaatgggtgacccccagtcatgcctaggacctggggccaaaagccgggcaacctctgcctacaggcgccttgggtgccctca

SEQ ID NO: 76485 - DNA, 1708 bp, Homo Sapiens
  misc_feature (255)..(283): n is a, c, g, or t
  misc_feature (1211)..(1272): n is a, c, g, or t
aaatgattaaataatacacaattaaatgtcaggatagcatctcttgcaaagtgaccagtgcagcagaattgtctttctatccatatttgagcttagagaaacatttcccatgtcctaagttcttagaagcaattactttagcgttggggagcattgttctaccagacccatttatgcaggggagatgaagcttaaaagacgggatgtggggtgggagtgtgtttcttaagccgaagctgttgcaggctgggggannnnnnnnnnnnnnnnnnnnnnnnnnnnngactgcagattctgtacatctgtctgtgggaggagagttgctactcaggacaggatttaagagacacattccagtgacctttaagaatctgcatggcgggaggtccttctccaggagtgtgggttggtccactctgggacccaccacactaagaagggggagatgataaaataacattaaaggaagaatggcctccagcctgcaggttttgttggaaagaaataaaaagggagtcattaagaccataaattcagattgaggcctcttgaaaaggttgatgtgggctagcaacctgcctgtcgaaacagtccttggttcatcagcagtgtgggaaggcagccaaggctcctgcagattcctggcatcgaccttggaaagcctctgcgatacttgtgtgtacgaatacagcagaggacagggaggtccttgttctgtggtctctgtttagtgactgaaacttaaacccaaaggcaagcccagattgtctggccgttcatccccatgctttgataggggttaggaggaaccctttccgtatgaaagacaggccctactagggcttacaaccaagccaaaggaccatctcttctttcttccacctcccttcacccctgccccgcagcagagacgagatgtgagacattcactgtcacggagcaaggagacaaaggcaagttcaagttgagaagcatatggcagcaaacagaaatgaaaaccatatgtcccagcaaggggaaaagcagtcatttccagattataaaaatcaatgaagtactctccacctaggtcagctgaaattcgagccctcacagtcaggcctgtcagagaagttaagcagaaacatctcggggggacttctaaaatttagtgaagacaaggccttgcaactccaaagaaactttttttcccccccttgaaacagggtctnnnnnnnnnnnnnnnnnnnnnnnnnnnnnnnnnnnnnnnnnnnnnnnnnnnnnnnnnnnnnntgggctcaagcactatccccacctcaacctccttagtagctgggactacaggtgcacaccaccatgcccagctaaccacagaaactttcatctcttcattttttctttgggcaccattaatacctaagacaggtagaaagggtcccagaaagacaccattggtaatggccgattgccggctgcagtcatcgcccccagatcaggctggtacaggatgccttaaggtgatgagaggtgagggtgcatgaagaataatgagcacagggaagagagaagcaggacaaagtagcagataaaatgccggcaaagcacagatgaatgtcttcaagaagctcttgtatttctctgcacagtgtaaatatccttgctatttcaggatggcggctggcctgctcagtaacatacatgttccaaataaagattttgcatgaaaaaa

SEQ ID NO: 76486 - DNA, 901 bp, Homo Sapiens
cgcaagcctcgcctcgccccgcgccgcgcgcgttgccagggtgatcaggtgactcccggttcgcggcgctgggagcggccgtgacgtcaggcgcccggctgctcctcacttgctctgagacaggtgcggcaagtctactgcgggctggtccgggctcctcaggttcagacccgaccgttatccagtcggttcgtggagaggagaggtgcactttacaggtccccgatgaaccaagagaaccctccaccatatccaggccctggtccaacggccccatacccaccttatccaccacaaccaatgggtccaggacctatggggggaccctacccacctcctcaagggtacccctaccaaggatacccacagtacggctggcagggtggacctcaggagcctcctaaaaccacagtgtatgtggtagaagaccaaagaagagatgagctaggaccatccacctgcctcacagcctgctggacggctctctgttgctgctgtctctgggacatgctcacctgaccagaccagcccagccgtcctgtcctgccagctctgctgccacctctgacaggtgtgcctgcccccatctcttctgattgctgttaacaaatgactagctttgcacagacacctctaccttcagcactatgggattctagattaatgggggttgctactgtttaattcagtgacttgatctttttaatgtccaaaatccatttcttattgatctttaaagatgtgctaaatgacttttttggccaaaggcttagttgtgaaaaatataatttttaaattatacattcaaggtagtggccaaatgtaacacatcaatcatggaatgatttctctgctaacagccgcctgtatgtttcaataaatttgtccaaagctcaaaaaa

SEQ ID NO: 76487 - DNA, 466 bp, Homo Sapiens
  misc_feature (359)..(368): n is a, c, g, or t
gtttcatgttatgcctgttgcaggcaaatgtaaagtcctagaaaataatgcaaatgtcacggctactctatatacttttgcttggttcattttttttcccttttagttaagcatgactttagatgggaagcctgtgtatcgtggagaaacaagagaccaactttttcattccctgcccccaatttcccagactagatttcaagctaattttctttttctgaagcctctaacaaatgatctagttcagaaggaagcaaaatcccttaatctatgtgcaccgttgggaccaatgccttaattaaagaatttaaaaaagttgtaatagagaatatttttggcattcctctaatgttgtgtgnnnnnnnnnngtgtgtgctggagggaggggatttaattttaattttaaaatgtttaggaaatttatacaaagaaactttttaataaagtatattgaaagtttcctggg

SEQ ID NO: 76488 - DNA, 771 bp, Homo Sapiens
aaggctaggtacgaggctgggttcgaattcggcacgaggagcgagcggatccagcagatgcagcgggcggagactcgggcatcagccaatgccccgcgccgccggcctcgggttctggcccaaccccagccatccccctgtctgccccaggagcaggcagagccaggtgaggtccgggtatgtggttggcagaggtggtccccgctggagtagtggtcctgactcgatcctcttttcgcattcagggctcctgcctgcctttggacacgtgctggtatgtgagctggccttcccactgacatgtgcccaggagtctgtccccctgggtcctgctgtctgggttcaagctgccatacctttgtcaaagcagggaggcagcccggatggccagggtctacatgtttccaatttgcctaagcaagaccttccgggcatccacgtttcagctgctacccttttgcctgagcaaggaggttcccggcatgtccaggctccagccgccacacctttgcccaagcaagaaggccccctgcacctccaggtgccggctcttacaactttctctgatcaaggccacccagaaatccaagttccagccaccactcctttgcctgagcataaaagtcacatggttataccagctccatccaccgccttttgtcctgagcagggacactgtgcggacatccacgttcccaccactccagctttgcccaggagatttgttctgatttcacagtttcagtcaccacccctatgcccagaggccgg

SEQ ID NO: 76489 - DNA, 929 bp, Homo Sapiens
gcctgggtggcgaattcggcacgaggggcattccgctcttgctcagaaatccggagcgcctggcaggcattggaacagggacagctggcccggccaggcttcccagagccactgctgatcctggaggattcggatctgggtggagacagcgggagcgggaaggcaggagccccgagttcagaaaggacggcgtcccgagtgcgagagctggcccggctttacagcgagcggatccagcagatgcagcgggcggagactcgggcatcagccaatgccccgcgccgccggcctcgggttctggcccaaccccagccatccccctgtctgccccaggagcaggcagagccagggctcctgcctgcctttggacacgtgctggtatgtgagctggccttcccactgacatgtgcccaggagtctgtccccctgggtcctgctgtctgggttcaagctgccatacctttgtcaaagcagggaggcagcccggatggccagggtctacatgtttccaatttgcctaagcaagaccttccgggcatccacgtttcagctgctacccttttgcctgagcaaggaggttcccggcatgtccaggctccagccgccacacctttgcccaagcaagaaggccccctgcacctccaggtgccggctcttacaactttctctgatcaaggccacccagaaatccaagttccagccaccactcctttgcctgagcataaaagtcacatggttataccagctcccatccaccgccttttgtcctgagcacggacactgtgcggacatccacgttcccaccactccagctttgccccaggagatttgtttctgatttcccagtttcggtccccaccccttgtgcccaagcaagaaggcaccctagaaagggagaaccccaccccatattcccctggacaaaggca

SEQ ID NO: 76490 - DNA, 612 bp, Homo Sapiens
  misc_feature (15)..(15): n is a, c, g, or t
  misc_feature (49)..(49): n is a, c, g, or t
gtgaagaacccaccntgatgttgatggggtgataggggagatccggctnagcgtcgtgcacactgtacgcttctctgagatccacttcctggctctggccattggctctgcctgtgcactgatgatcataatagtaattgtagtggtcctcttccagcataaccggaaaaagcgatgggccgaaagagctcataaagtggtggagataaaatcaaaagaagaggaaaggctcaaccaagagaaaaaggtctctgtttatttagaagacacagactaacaattttagatggtaaggttcacaaataggttgatttctttcttcagctttctgacatgtccagcccatctctaatgaggactcccagatcatcactttatggctgttaggtgtttcccatatgaaattagaggagctgggtcagggagacaaaagtcttctattagtcttatggatagctcctccttgagtgtattttgtgcaaaagattaagaagctggactctactgccattaaagctgagagaatcctaaggttatttgtggcttcggggttatatttattactactactactaataaatattcaacaagtaaataaatcttttttaaatc

SEQ ID NO: 76491 - DNA, 727 bp, Homo Sapiens
cagtcgacggtaccggacatatgcccgggaattcggccattacggccgggatggtaaaataaggtgtctgctttaaaactctggagttcccgaatcagaacccaaactgtattcccttacattctgaaaagtctctaagttcagaggtgtgaatattattaattagatggcaccagtttagctctgtgtaaacttcaatctactcccaagtgcatgtaattcttccaaaaatatgggggaaaaataccttacctgaagcttctgtgggatttacccacttgcttcttgtcttgttcacctgacatttggtttctgcttgttacagaaaagaagaggaaaggctcaaccaagagaaaaaggtctctgtttatttagaagacacagactaacaattttagatggttaaggttcacaaataggttgatttctttcttcagctttctgacatgtccagcccatctctaatgaggactcccagatcatcactttatggctgtcaggtgtttcccatatgaacattagaggagctgggtcagggagacaaaagtcttctattagtcttatggatagctcctccttgagtgtattttgtgcaaaagattaagaagctggactctactggccattaaagctgagagaatcctaaggttatccgtggctacggggttatatttattactactactactaagaaatattcaacaagtaaataaatcttttttaaatc

SEQ ID NO: 76492 - DNA, 1286 bp, Homo Sapiens
  misc_feature (41)..(75): n is a, c, g, or t
ccctgtatgcgcagcgagtcagtgagagaggaagcggccgnnnnnnnnnnnnnnnnnnnnnnnnnnnnnnnnnnncagtcgacggtaccggacatatgcccgggaattcggccattacggccgggggggctgagtcacaggcacaggtgaggaactcaactcaaactcctctctctgggaaaacgcggtgcttgctcctcccggagtggccttggcagggtgttggagccctcggtctgccccgtccggtctctggggccaaggctgggtttccctcatgtatggcaagagctctactcgtgcggtgcttcttctccttggcatacagctcacagctctttggcctatagcagctgtggaaatttatacctcccgggtgctggaggctgttaatgggacagatgctcggttaaaatgcactttctccagctttgcccctgtgggtgatgctctaacagtgacctggaattttcgtcctctagacgggggacctgagcagtttgtattctactaccacatagatcccttccaacccatgagtgggcggtttaaggaccgggtgtcttgggatgggaatcctgagcggtacgatgcctccatccttctctggaaactgcagttcgacgacaatgggacatacacctgccaggtgaagaacccacctgatgttgatggggtgataggggagatccggctcagcgtcgtgcacactgtacgcttctctgagatccacttcctggctctggccattggctctgcctgtgcactgatgatcataatagtaattgtagtggtcctcttccagcattaccggaaaaagcgatgggccgaaagagctcataaagtggtggagataaaatcaaaagaagaggaaaggctcaaccaagagaaaaaggtctctgtttatttagaagacacagactaacaattttagatggaagctgagatgatttccaagaacaagaaccctagtatttcttgaagttaatggaaacttttctttggcttttccagttgtgacccgttttccaaccagttctgcagcatattagattctagacaagcaacacccctctggagccagcacagtgctcctccatatcaccagtcatacacagcctcattattaaggtcttatttaatttcagagtgtaaattttttcaagtgctcattaggttttataaacaagaagctacatttttgcccttaagacactacttacagtgttatgacttgtatacacatatattggtatcaaaagggataaaagccaatttgtctgtta

SEQ ID NO: 76493 - DNA, 1072 bp, Homo Sapiens
cagtcgacggtaccggacatatgcccgggaattcggccattacggccgggcagaatactgttctcagaccatgaaaccagacaacacatgtattggtttaaactcgataatgacaggaaaattccaaactagagcagtaaattcaaatggtaagatgaatcctagaaggcctctgattgcagcatgttgacaccaacctcacgttacgaacaattcacagagaatttgcctttgtggcaactgaagatggaagtctggggggcacagacaaccttatcaaacaatataaaagccaatataaattctcataagcactatagaatttgcaaattcagaacattttatacctaaaagtaattctgtctttcctaaagtgtttttaacatgaaaattagtaggaagatgtggttactatttggaaagtgtaatgtaacaaaactctcttttgttaccacaaattttgtgagtttagtactctacagattgccccataagagcagtagcttttgaaactcataattctctgaaataaatgaaagacatttaattcaaggatcaaaaattgtggccatctttgcaaatgactacctatagcctgtgaaaatacatttcaaaaaatgttatgtgcaatgaacactaaatttaagagcagttaacagtgtgactcactcatgtttaaaaaaaatcgaagagctaaaaaatacgtctaatttatgtaacccattggaatgtatttctaggttctcttcaggattaattaaataaacatgcaatttatgaaaacatataaacaattatttatcacttttatgacccaaatcacaataaaattgtcatttaggataaactggggagaatagactgaacatatggttatattcacagttatttattaacttaaatgttattccaacattagagctaatgttaaaaagatttaaactgtaacgtctaatatttggaataatatattaaagtattagcactgtggttgattttcttgaattatgttgcatcttgtactactaagcttgtgaaaataaacatttggatgttttaaaaggtaaacatt

SEQ ID NO: 76494 - DNA, 531 bp, Homo Sapiens
  misc_feature (31)..(31): n is a, c, g, or t
  misc_feature (36)..(36): n is a, c, g, or t
  misc_feature (105)..(105): n is a, c, g, or t
aaatggggggcccaccttggcaaatggcccnccccnatagcccggggaaaataccatttccaaaaaaaggttatgggccaatggaacacctaaatttaagagcangttaccagtgtgacctcaccccagggtttaaaaaaaatccgaagagcctaaaaaataccgtcctaatttatgtaaccccatgggaatgtatttcctaggttccccttcaggattaattaaataaacatgcaatttatgaaaacatataaacaattatttatcacttttatgacccaaatcacaataaaattgtcatttaggataaactggggagaatagactgaacatatggttatattcacagttatttattaacttaaatgttattccaacattagagctaatgttaaaaagatttaaactgtaacgtctaatatttggaataatatattaaagtattagcactgtggttgattttcttgaattatgttgcatcttgtactactaagcttgtgaaaataaacatttggatgttttaaaaggtaa

SEQ ID NO: 76495 - DNA, 787 bp, Homo Sapiens
aatataaaatggtcaaatagaaatgacgatcaggtggaaggactccaatatctagcttctcgatatgatttcattgacttagatcgtgtgggcatccacggctggtcctatggaggatacctctccctgatggcattaatgcagaggtcagatatcttcagggttgctattgctggggccccagtcactctgtggatcttctatgatacaggatacacggaacgttatatgggtcaccctgaccagaatgaacagggctattacttaggatctgtggccatgcaagcagaaaagttcccctctgaaccaaatcgtttactgctcttacatggtttcctggatgagaatgtccattttgcacataccagtatattactgagttttttagtgagggctggaaagccatatgatttacagatctatcctcaggagagacacagcataagagttcctgaatcgggagaacattatgaactgcatcttttgcactaccttcaagaaaaccttggatcacgtattgctgctctaaaagtgatataattttgacctgtgtagaactctctggtatacactggctatttaaccaaatgaggaggtttaatcaacagaaaacacagaattgatcatcacattttgatacctgccatgtaacatctactcctgaaaataaatgtggtgccatgcaggggtctacggtttgtggtagtaatctaataccttaaccccacatgctcaaaatcaaatgatacatattcctgagagacccagcaataccataagaattact

SEQ ID NO: 76496 - DNA, 689 bp, Homo Sapiens
  misc_feature (23)..(23): n is a, c, g, or t
gccccataaaagtgacaaaaggntgggtgtggcaccatggcatgaggaagaaacaaggtccctgagcaggcacaagtcctgacagtcaagggactgctttggcatccagggcctccagtcacctcactgccatacattagaaatgagacaatcaaagcccccccagggtggcacacccatccgtttgctggggtgtggcagccacatccaagactggagcagcaggctggccacgctcgggccagagagagctcacagctgaagctcttggagggaagggctctcctcaccctgccaggaagcttcttaacatgtgacaggaccagggaccaggagcatggtgaagccaagtggcagatgggagccaacctggatgggggtttggggaaggagggcatgtgtagcagagaacttaggggggcctccttgcctttctcattcttttgccctgcatcctgtcatttctgttcttgtccctcatacatctttggagaaccgggctccagactttgttccctgactcatagctgccgcttgttaggttagggttagatggggagagacagggcacagaggacctgtctccccggctactcttgccttatggctctagtgtgtgacctacagagcatgctccacaagcccctgcctcacctcactgtcatcactaataaacatcatgcacagtc

SEQ ID NO: 76497 - DNA, 1956 bp, Homo Sapiens
  misc_feature (1000)..(1009): n is a, c, g, or t
  misc_feature (1056)..(1108): n is a, c, g, or t
  misc_feature (1854)..(1854): n is a, c, g, or t
  misc_feature (1906)..(1906): n is a, c, g, or t
cgattccgcacgtcccttacccgcttcactagtcccggcattcttcgctgttttcctaactcgcccgcttgactagcgccctggaacagccatttgggtcgtggagtgcgagcacggccggccaatcgccgagtcagagggccaggaggggcgcggccattcgccgcccggcccctgctccgtggctggttttctccgcgggcgcctcgggcggaacctggagataatgggcagcacctgggggagccctggctgggtgcggctcgctctttgcctgacgggcttagtgctctcgctctacgcgctgcacgtgaaggcggcgcgcgcccgggaccgggattaccgcgcgctctgcgacgtgggcaccgccatcagctgttcgcgcgtcttctcctccaggtggggcaggggtttcgggctggtggagcatgtgctgggacaggacagcatcctcaatcaatccaacagcatattcggttgcatcttctacacactacagctattgttaggttgcctgcggacacgctgggcctctgtcctgatgctgctgagctccctggtgtctctcgctggttctgtctacctggcctggatcctgttcttcgtgctctatgatttctgcattgtttgtatcaccacctatgctatcaacgtgagcctgatgtggctcagtttccggaaggtccaagaaccccagggcaaggctaagaggcactgagccctcaacccaagccaggctgacctcatctgctttgctttggcatgtgagccttgcctaagggggcatatctgggtccctagaaggccctagatgtggggcttctagattaccccctcctcctgccatacccgcacatgacaatggaccaaatgtgccacacgctcgctcttttttacacccagtgcctctgactctgtccccatgggctggtctccaaagctctttccattgcccagggagggaaggttctgagcaataaagtttcttagatcaatcgcnnnnnnnnnncaggaaaacgaagcacagcaacacaccgaacagccaaaaagacagcnnnnnnnnnnnnnnnnnnnnnnnnnnnnnnnnnnnnnnnnnnnnnnnnnnnnncaagacgggcgcgcgcctcctacaactcccccgagcaggggcgccttatcccccaccaactccccttcttttgcgcaaaaagcggggccccaaactggagccagccaaataacacctcggcaggcgggcgacctttttgctcaacccgactacagcacgtacacaacccgccagctcgcgtgtaattttagacagacagacactcaaaccctggcggggcgggaacatacgcgcgcgaacaatctcctccagcacttttaacacctcgcgcgccgccagcaataaacaactcatttctcaccagcacaacggggctcaacccaccaatgcgacccatcatcaccagcggccgcgccaaaacacacccgtcccccgcacaacgctccggcttcaaactgtaaattatttatcaccaggtgcagacccaggcatacgtacgtgcaccgaggggatcctcttaaaatcatcactccgcgctcgccacgcctcctctctacggcccccatcctcactccatcccagctcccacgcaggaggcgaaacctgaccaatctcgctcacaccactccccttctttacacctcgtctccacttcgacactatctacaaacacctccgatccacacccctctcactatcgcatcgtcgcctctacacccgtacgtcacgccgcccacacgactccacacgccacacgatcacaaagctatatatcgctcatcatcccgcacgcgtcgagtctactntgtccgcaccaatgtccgctgtgcacactcgcgcaaagcaccatatcccccnctagcctcacctcacgcagtcactctctccgcgcgccgcccgcagcatct

SEQ ID NO: 76498 - DNA, 702 bp, Homo Sapiens
gtagaaactattgactcaaaagagtttctggctgatctgtgctttgcctccaccatccctaaccaacctctcatcacagctttgtgtgtgggctgagtgctggccttaaccctaggcgtggaagagaaaatgtgaggttgtttagatactcatcaggacctcacaggagctgagacttatcagccagaatgtgttcttcggacagtcgtacacatcttacagaaaaccctccttgtagagttggttgtggtatgtgtttgatgctataaagctcatttttaatgtgtacacctgctctagggacgattcgtttgaaagagagtaagatgcattaacagaaactatcctgggattaggtgaaaaatgtctagcaaaagaaacaaagtctttaatagagtggcctctttcgctcttcgattatgactgctgcagttttaccccagcagtcagctgtctttgtcaaccatacgtttttggagattgggtctagcacatgtcacccttgtccacgttgtttcacatctggttagggggcagattttaaaatgtagttttgtaatgttacatttaagcatgataaatgattagactaccagatgttactagtgctaactttgtattcttagacattaaaatgattgacataaactctttgtgccttgaaaatgaaacaaattataaaaatgtttaaatggaaccaaa

SEQ ID NO: 76499 - DNA, 662 bp, Homo Sapiens
  misc_feature (18)..(18): n is a, c, g, or t
  misc_feature (116)..(116): n is a, c, g, or t
  misc_feature (280)..(320): n is a, c, g, or t
gggggtaatatagtttcntaggtctaggggtgagaggtgggagtagaaccagaagtgccctggaatccagccgtgtcagccctcaccccagggcccccaggaaagcatggcctgcntgaagccctctgctccctgcagaaactggggcgaggaggagctttttccttcagttagatctttcccttccctgctgcctcgctcccttagctttggagccctaaagttagtggacaagacactgggataaagctctatggctgctggaaggaggtctgagtcnnnnnnnnnnnnnnnnnnnnnnnnnnnnnnnnnnnnnnnnncctcatttgcagaagtcttgctaccagttagggtgttaagagcatctccactgggcggagacctggcatttgttttccactgttaagagaatgacacaccccctgtcatgtaagggaggagctattgagttagacattttccctatgggaatcctcggtttggtttgtgggaaaggagggaatggataagtgatttttatctctaatcgtcaacacagctgttcttccactgaatttgtgctattgcatacatgtagccatctttcttttcactgcagcagtgtttatcagtagttcaaaatgatttatttgctcctggggagtaaaaccttttttattaaa

SEQ ID NO: 76500 - DNA, 775 bp, Homo Sapiens
caggagtctgggtgcacagcctccttctctctgagattcaagagtctgatcagcagcctcttcctcctccaggacccagaagccctgagcttatccccatggagctctgccggtccctggccctgctggggggctccctgggcctgatgttctgcctgattgctttgagcaccgatttctggtttgaggctgtgggtcccacccactcagctcactcgggcctctggccaacagggcatggggacatcatatcaggctacatccacgtgacgcagaccttcagcattatggctgttctgtgggccctggtgtccgtgagcttcctggtcctgtcctgcttcccctcactgttccccccaggccacggcccgcttgtctcaaccaccgcagcctttgctgcagccatctccatggtggtggccatggcggtgtacaccagcgagcggtgggaccagcctccacacccccagatccagaccttcttctcctggtccttctacctgggctgggtctcagctatcctcttgctctgtacaggtgccctgagcctgggtgctcactgtggcggtccccgtcctggctatgaaaccttgtgagcagaaggcaagagcggcaagatgagttttgagcgttgtattccaaaggcctcatctggagcctcgggaaagtctggtcctacatctgcccgcccttccagcccttccccagcccctcctcttgtttcttcattcattcaacaaaatttggctgggaacaaataacaagaaagagaaag

SEQ ID NO: 76501 - DNA, 845 bp, Homo Sapiens
  misc_feature (519)..(536): n is a, c, g, or t
  misc_feature (671)..(691): n is a, c, g, or t
  misc_feature (699)..(733): n is a, c, g, or t
  misc_feature (736)..(799): n is a, c, g, or t
gcttatccccatggagctctgccggtccctggccctgctggggggctccctgggcctgatgttctgcctgattgctttgagcaccgatttctggtttgaggctgtgggtcccacccactcagctcactcgggcctctggccaacagggcatggggacatcatatcagccatctccatggtggtggccatggcggtgtacaccagcgagcggtgggaccagcctccacacccccagatccagaccttcttctcctggtccttctacctgggctgggtctcagctatcctcttgctctgtacaggtgccctgagcctgggtgctcactgtggcggtccccgtcctggctatgaaaccttgtgagcagaaggcaagagcggcaagatgagttttgagcgttgtattccaaaggcctcatctggagcctcgggaaagtctggtcccacaatctgcccgcccttccagcccttccccagcccctcctcttgtttcttcattcattcaacaaaatttggctgggnnnnnnnnnnnnnnnnnnccaactacacaacaccgactgcccgcccgtgtccatcactctccggtaacagcccttgcccccaccaaacacccgaattttcttctccaaaccaatcgcaaacgaaaccccaaaaattttcccttgtgtccgcgnnnnnnnnnnnnnnnnnnnnnaaaaaaannnnnnnnnnnnnnnnnnnnnnnnnnnnnnnnnnnggnnnnnnnnnnnnnnnnnnnnnnnnnnnnnnnnnnnnnnnnnnnnnnnnnnnnnnnnnnnnnnnnaaaaaagcttgtgctcccccaaaaaagaaaaacaacccggcgggcc

SEQ ID NO: 76502 - DNA, 1036 bp, Homo Sapiens
  misc_feature (43)..(63): n is a, c, g, or t
  misc_feature (387)..(399): n is a, c, g, or t
  misc_feature (818)..(818): n is a, c, g, or t
  misc_feature (879)..(879): n is a, c, g, or t
  misc_feature (901)..(901): n is a, c, g, or t
  misc_feature (945)..(945): n is a, c, g, or t
ccctcaactaaagggaataagcttgcggccgcggctgtaggcnnnnnnnnnnnnnnnnnnnnnatctaacacatttaattttggaacaaaggagcaactcctttaaagtttgagagtcgcataaatatttcatatacagcttaaacctaagctttgtaacgattatttttgagcagcagaaaaggaaggctagagaaatgctagagatgtccttactagtgacacattcttgctgaagaacaagttctctggaagtgaaactcaaataggagagaacaagagatacaggtaggtatcagttctgctagggtcttcagagagaccgagggccccaaaacagtgctactcaaagatgatctgcagacttgtgctggtcagtgaacaccnnnnnnnnnnnnncaccagtctgtgacatggtgaattagaaattgagagtgtttaaaaactttttagcatttcaatgttgctgtgatatccaagtacatgatcaatggacttaacctacagaacagtctggccagtttgggtgctgtcaaacttgccgggtcggcagcacacagtgtgaactccatacctgtcatcggcaataggaatgcatattgataagtgaaggactggaaaacaaaaaacctggtcctttaccatacatagtttgagaaagactgccctagagtaccataactccaccacaagtcctggaataattccaaaagtttttggaacaaagtgtgacctgaggtcaacctgctcacattcaatcaaaatcaaaataaaaatgagtgccttgggaacaaagataaagtggactagggcatctnatttagatcctgggagtagcctggctaggctagcaaagtgagatcctgtaagaaactggtngacagaggacaggtcataaganggtctttgtctcctctctctctactgtcagtttggtgagcttangaaatatgcactagccagacatcaagtaactgtttttcactctgcaacaaacttaatcaatcggtctcagcctgtaggaagatggatccaa

SEQ ID NO: 76503 - DNA, 909 bp, Homo Sapiens
ccatttatatttttattataaacaaaacttaattaaaagtttaacaaactgggctgaaaactcaccaagtgtcagactcaccagcaatttaaaaaatgataatttaccagcatctcctcatcagagttccctctccagtaagggtatacctacatctgtaagggtcagtggactctgaatcaattttatggttgttttaaaatcaccgtgtattaggatactaatgatagtccctatatccatccagaaatgctggcagaaagcactggccaccatacaggacagaccacaccacagctccatacccagcgtctgcctggaggctcccccacgctgaggtccgggagaatgcctggtttcagtcatttccggactaactgtgacaacgcgtgagcagggagcaccgtgcgagtctccgggagggaatcctcctggggcccagagactcctccacccctggggagggcagacaggctcgggagggcctggccaggccactggaggctggcagggagcaggcatgtccacccgcaagcctgggaggctaactctggcattcctggccggagccgccatgctcattggtgggccagtttgggacatccccgtactcaaagaccatatggcagcctctgggaaaacaaaaccaaaacatcaccttctattaaactctgtatattattattttttacaatagaaagttaaaaatcaagacttagatttactatacattttttctctcagattacaaagtttatattatataactggggttccctaaattgatttcttttaaaacagtcttaaagagaccagaagtgaatacaaaagaactaaacaaaataaaaaattagaatgtgctgtagctgaaagctgtctatacctgtaagcctccaagtttcatacaaa

SEQ ID NO: 76504 - DNA, 1721 bp, Homo Sapiens
  misc_feature (169)..(169): n is a, c, g, or t
  misc_feature (316)..(360): n is a, c, g, or t
  misc_feature (426)..(435): n is a, c, g, or t
  misc_feature (590)..(721): n is a, c, g, or t
cgcgccccaaaggcggcgcgccaaaagaaggtgtggtccctaatattatccccgccttgggggggagtattttaccagggtgttctccctccacacctccgcccgcttttgtgtcgtggagagaggggttcttacacccatattttgtggcgcgcgaaaaagaacgcgngtttataataggacagatattctctcccatcacccatggtttttctgttctctgaatatattagattttgctcatgcgtgcggggggtgggggcggtgggaaattattcggaattattccggagagcgttcccgctttgggagcttnnnnnnnnnnnnnnnnnnnnnnnnnnnnnnnnnnnnnnnnnnnnnaagaagctcacttttttgggatttttgtttacaaaaacccttctggggtttcccccccgggggggnnnnnnnnnnggggggaggtatccaaaccctctttctctggcgccagggttttttttgggaaaaaaactatgtgccccagtttccttttctctttagggggccgcgcgcgcaaaaacaaaaggttttggaaaaacttttgagggggcggaggggggcggacaagnnnnnnnnnnnnnnnnnnnnnnnnnnnnnnnnnnnnnnnnnnnnnnnnnnnnnnnnnnnnnnnnnnnnnnnnnnnnnnnnnnnnnnnnnnnnnnnnnnnnnnnnnnnnnnnnnnnnnnnnnnnnnnnnnnnngaaattttcaaaattatgtttattaatgttttagtatacacattatattctcttagaattgggggaaaaggaaaaccccactcaagtgaggtaacaaacttgccatcttttacaaaatttcattagaactgacaatgttatggtgagtccttaattcctgagaatttgaattattaagttttctgtgaacttaaaacaaacgctcacattaattgttaagattacagtatgtctgaaaaaataaaattaatggttaatgttatcaagaaaaatcatcatcccaaatgtacaatattaacgctattagatgtgaatattactgaagccctgttgcttctgcagtttgacaccatttaaattcgtttccaggatcttatttcaaatatatgaacttataatttatccagatagcagtgacattattttgacctaaaggaaaaataattgtctgtcattttcttctcaactgtaggtatccagggagtcagcatgtgaactctatctagtattgataaaataattaatttacatgtgtagggataatgaacacagaacatgtgattctcttctagtaacaatttctatcccttaataggagatgatttcagagaagttagagaagaaaaacagagaaaacaatactgttgctatgaaatgacgaatttgatataatcaaatgcaagatcattaatataaacacttataataatgaaaatataaattattaattatgcagcatgctttagggccatttctacagttattatgaattacaaatattaaatgcctttaatctatccactgttcataattctgtaagccatgtttacataataaacaaaaacatttcctacatattctgtctcttctgacttttaacgattaaagtatttatcttgggctggcaagttaccctgaccctaaccagtaagtacaaacagggcattgtacccggccgtaatggccgaattcccgggcatatgtccggtaccgtcgactg

SEQ ID NO: 76505 - DNA, 1356 bp, Homo Sapiens
  misc_feature (1280)..(1296): n is a, c, g, or t
tttgtcttccgcctctgctttttattccccgcctcacaccacgctggtaccggtccggaattcccggcatatcgtcgacccacgcgtccggagctgcatcgcgggaggcgcatggcggggatggcgctggcgcgggcctggaagcagatgtcctggttctactaccagtacctgctggtcacggcgctctacatgctggagccctgggagcggacggtgttcaattccatgctggtttccattgtggggatggcactatacacaggatacgtcttcatgccccagcacatcatggcgatattgcactactttgaaatcgtacaatgaccaagatgcgaccaggatcagaggttccttggggaagacccaccctacgaagttggaatgagaccatcagatgtgataagaaactcttctagatgtcaacataaccaaccttataaagactaaaattcatgagtagaacaggaaaatcatcctgactcatgtgttgtgttctttatttttaattttcaaagaggctcttgtatagcagtttttgtctattttaacattgtagtcatttgtactttgatatcagtattttcttaacctttgtgactgtttcaatattacccccgtgaaagcttttcttaatgtaactttgagtacattttaattgccttctatttttaaaactcaaaatcattagttgggctttactgttcttgctattgtatggcatatacatctgcctggatatatttctactcttgaccaaagttttgtaaagaacaatataagatttcgggtaggggtatgggggagggaagatattttattgagaactacttaacaaaagatttatctgtaagcttgaactcaggagtacagttttagctatctagactctaacagcttttgctttaaaattattaaagtgtttcttaatgaaaaagaaaagatcttgctaaagttaaaataaggaacatttcaccttttaaatatttaattcttatgtggacttatttccagaaaactttggtgataattcttgagacaaaaggtggttaagtagcattattatgtaatgcttatataccatagagtttttaatagaagagaaatccatttcctccgagggtcactattaacaatgtacttccttaaatttagtttaatgattgtaatgggtgctgcatttgcacattgcattaagttatgatgagacgaattgttgttaaaaattatagcaaaaagaaatgtaaacttggttaaaatcctttcactctttgtattgnnnnnnnnnnnnnnnnnattccttaaatgtaaaatgactacctaattttttgatgtaaatacattaaattcaaagag

SEQ ID NO: 76506 - DNA, 1659 bp, Homo Sapiens
  misc_feature (19)..(19): n is a, c, g, or t
  misc_feature (100)..(134): n is a, c, g, or t
atacttgaaacgctaaccnctaagattgagggggccaggcccttaaggctctcgagccgaacgacgagcgcagcgaagtcagtgagcgaggaagcggcgnnnnnnnnnnnnnnnnnnnnnnnnnnnnnnnnnnncagtcgacggtaccggacatatgcccgggaattcggccattacggccggggagactgacgtgtgagctgcatcgcgggaggcgcatggcggggatggcgctggcgcgggcctggaagcagatgtcctggttctactaccagtacctgctggtcacggcgctctacatgctggagccctgggagcggacggtgttcaattccatgctggtttccattgtggggatggcactatacacaggatacgtcttcatgccccagcacatcatggcgatattgcactactttgaaatcgtacaatgaccaagatgcgaccaggatcagaggttccttggggaagacccaccctacgaagttggaatgagaccatcagatgtgataagaaactcttctagatgtcaacataaccaaccttataaagactaaaattcatgagtagaacaggaaaatcatcctgactcatgtgttgtgttctttatttttaattttcaaagaggctcttgtatagcagttttgtctattttaacattgtagtcatttgtactttgatatcagtattttcttaacctttgtgactgtttcaatattacccccgtgaaagcttttcttaatgtaactttgagtacattttaattgccttctatttttaaaactcaaaatcattagttgggctttactgttcttgctattgtatggcatatacatctgcctggatatatttctactcttgaccaaagtttgtaaagaacaatataagatttcggggtaggggtatggggagggaagatatttattgagaactacttaacaaaagattcatctgtaagcttgaactcaggagtacagcttaagctatctagactctaacagctttggctttaaaattattaaagtgtttcttaatgaaaaagaaaagatcttgctaaagttaaaataaggaacatttcaccttttaaatatttaattcttatgtggacttatttccagaaaactttggtgataattcttgagacaaaaggtggttaagtagcattattatgtaatgcttatataccatagagtttttaatagaagagaaatccatttcctccgagggtcactattaacaatgtacttccttaaatttagtttaatgattgtaatgggtgctgcatttgcacattgcattaagttatgatgagacgaattgttgttaaaaattatagcaaaaagaaatgtaaacttggctaaaatcctttcactctttgtattgttttttttaaggtttctattccttaaatgtaaaatgactacctaattttttgagggaagtagattaactctcggcgacattcacagcccaattgggcgggccgcccttatagttacccctcgagggggccccagtcttaccctgcaccgcagcttcccccggtacaaaggcgggtcccgccaacctggggcgccggtaattttcgagccctcgggcccaccgtgtggccgtggagggttacacgcggccctgttcatggtgccggggggtgtacac

SEQ ID NO: 76507 - DNA, 863 bp, Homo Sapiens
cagtcgacggtaccggacatatgcccgggaattcggccattacggccggggagactgacgtgtgagctgcatcgcgggaggcgcatggcggggatggcgctggcgcgggcctggaagcagatgtcctggttctactaccagtacctgctggtcacggcgctctacatgctggagccctgggagcggacggtgttcaattccatgctggtttccattgtggggatggcactatacacaggatacgtcttcatgccccagcacatcatggcgatattgcactactttgaaatcgtacaatgaccaagatgcgaccaggatcagaggttccttggggaagacccaccctacgaagtgggaatgagaccatcagatgtgataagaaactcttctagatgtcaacataaccaaccttataaagactaaaattcatgagtagaacaggaaaatcatcctggactcatgtgtcgtgttctttatttttaattttcaaagaggctcttgtatagcagttttggtctattttaacattgtagtcattggtactttgatatcagtattttcttaaccttggtgactgtttcaatatttacccccgtgaaaagcttttcttaatgtaacttttgagtacattttaattgccttctattttttaaaactcaaaatcattagttgggctttactgttcttgctattgtatggcatatacatctgcctggatatatttctactcttgaccaaagttttgtaagaacaatataagattcgggtaggggtatggggaggggaagatatttattgagactacttaacaaagatttatctgtagctgaacctccggagtaccgtttagctatctaagactc

SEQ ID NO: 76508 - DNA, 980 bp, Homo Sapiens
  misc_feature (106)..(106): n is a, c, g, or t
  misc_feature (116)..(117): n is a, c, g, or t
  misc_feature (123)..(536): n is a, c, g, or t
ccagggaacgcctggatcttttagtctgtcggtttcccacctctgattgaggtcgattttgatgctcgtcaaggggcgagcctatggaaaacgccagcacgcgccnttttacgtcnntgcccnnnnnnnnnnnnnnnnnnnnnnnnnnnnnnnnnnnnnnnnnnnnnnnnnnnnnnnnnnnnnnnnnnnnnnnnnnnnnnnnnnnnnnnnnnnnnnnnnnnnnnnnnnnnnnnnnnnnnnnnnnnnnnnnnnnnnnnnnnnnnnnnnnnnnnnnnnnnnnnnnnnnnnnnnnnnnnnnnnnnnnnnnnnnnnnnnnnnnnnnnnnnnnnnnnnnnnnnnnnnnnnnnnnnnnnnnnnnnnnnnnnnnnnnnnnnnnnnnnnnnnnnnnnnnnnnnnnnnnnnnnnnnnnnnnnnnnnnnnnnnnnnnnnnnnnnnnnnnnnnnnnnnnnnnnnnnnnnnnnnnnnnnnnnnnnnnnnnnnnnnnnnnnnnnnnnnnnnnnnnnnnnnnnnnnnnnnnnnnnnnnnnnnnnnnnnnnaagaattcggcacgagggatatctttgctgacttaactgtaaaaccaaaagaaaagtccaaaaagaaagtggaagccaagtctatatttgatgatgatatggatgacatcttctcctctggtatccaggctaagacaaccaaaccaaaaagccgatctgcacaggccgcacctgaaccaagatttgaacacaaggtgtccaacatctttgatgatcccctgaatgcctttggaggccagtagagcacacagggtatccacaggttaccctgcagctacattgttgagttagtgatgatgttgtatatgctgatggtcttaactggattacaaaaagcaaatactagaacagctagctcatcgttcacccaatgtacttggtatttttctgcactggtttaatcatgcttaatactacaaaacaaaaataaatatttcacagtgg

SEQ ID NO: 76509 - DNA, 2027 bp, Homo Sapiens
gcggccgcggctgtaggtttttgctggcaccaaaaaaaccaagctgttagagccaagtgttgggagcctgtttggggatgatgaagatgatgatcttttcagctctgccaagtcccagcctttggtacaagagaaaaagagagtagtgaaaaaagaccactctgttaactctttcaaaaaccagaaacatcctgaatccattcaaggtagtaaagaaaaaggcatatggaagccggaaacacctcaggactcatcaggtctcgctccatttaaaaccaaagaaccatccactcggatcgggaagatacaagcaaatttagcgatcaacccagcggccttgctgcccacagcggcttcccagatctctgaagtaaagcctgttttgccagaattggcttttccttcatctgaacacagaaggagccacggtctggaaagtgtgcctgtccttcccgggagtggggaggccggtgtgagttttgatcttccagctcaggcagacaccttacacagtgcaaacaagagccgtgtcaagatgagagggaagcgtagaccgcagacccgtgcagctaggcggctggctgctcaggagtccagcgaggctgaggacatgagcgtccccagaggacccattgcacagtgggctgatggcgccatttccccaaatggccatcggccacagctcagagcagccagtggagaagacagcactgaggaggccctggcagctgccgctgcaccttgggaaggtggtcctgtgcctggagtggacacaagcccctttgcaaagtctctgggtcattccagaggggaggctgacctttttgattctggggacattttttccacgggcactggatctcagtccgtggagagaacaaaacccaaggcaaagatagcagagaatcctgccaacccaccagtgggtggtaaagcaaagagccccatgtttcctgctctaggcgaggccagcagtgatgatgatctctttcagtctgctaaaccaaaaccagcaaagaaaacaaatccctttcctctcctggaagatgaggatgacctctttacagatcagaaagtcaagaagaatgagacaaaatccagtagtcagcaggatgtcatattaacaacacaagatatttttgaggatgatatatttgctacggaagcaattaaaccctctcagaaaaccagagagaaggagaaaacattggaatctaatttatttgatgataacattgatatctttgctgacttaactgtaaaaccaaaagaaaagtccaaaaagaaagtggaagccaagtctatatttgatgatgatatggatgacatcttctccactggtatccaggctaagacaaccaaaccaaaaagccgatctgcacaggccgcacctgaaccaagatttgaacacaaggtgtccaacatctttgatgatcccctgaatgcctttggaggccagtagagcacacagggtatccacatgttaccctgcagctacattgttgagttagtgatgatattgtatatgctcatggtcttaactggattacaaaaagcaaatactagaacagctagctcatcttttacccaatgtacttagtatttttctgcactggtttaatcatgcttaatactacaaaacaaaaataaatatttcacagtggttggtttgttttgtttttaaaccacagtttgatttagttagccttgctggggccataatatgcttcagggtgtgtaaaagaagaaatctctttgtggctttcatgggcagggaatctcagagatagcaaatgccacctgaccagaagtctttgttatatggatgggaaccctaacttagggcttgggcaggggaaagagaaagaaggtgagagattatacttcatgagtcttagcaatatgggagcaggttttcactgaattctgagggtgcctctgcatgtcctccaaggcaaagtttggcaaactgtggcccccccactgtcatattttgttaataaaattttattggaacacaaaaaaaa

SEQ ID NO: 76510 - DNA, 1203 bp, Homo Sapiens
  misc_feature (469)..(469): n is a, c, g, or t
gcttaagcggtgcgaggctgcggtgaaatcggcacgaggagcctgggcagtacaggcggcggtgcgcactctgcggcggcctctgcgcctcgggcgggcgggagagagaggccgcggccgccagcgtggggatgtctaggagctcgaaggtggtgctgggcctctcggtgctgctgacggcggccacagtggccggcgtacatgtgaagcagcagtgggaccagcagaggcttcgtgacggagttatcagagacattgagaggcaaattcggaaaaaagaaaacattcgtcttttgggagaacagattattttgactgagcaacttgaagcagaaagagagaagatgttattggcaaaaggatctcaaaaatcatgacttgaatgtgaaatatctgttggacagacaacacgagtttgtgtgtgtgtgttgatggagagtagcttagtagtatcttcatcttttttttnggtcactgtccttttaaacttgatcaaataaaggacagtgggtcatataagttactgctttcagggtcccttatatctgaataaaggagtgtgggcagacactttttggaagagtctgtctgggtgatcctggtagaagccccattagggtcactgtccagtgcttagggttgttactgagaagcactgccgagcttgtgagaaggaagggatggatagtagcatccacctgagtagtctgatcagtcggcatgatgacgaagccacgagaacatcgacctcagaaggactggaggaaggtgaagtggagggagagacgctcctgatcgtcgaatccgaggatcaggcatcagtggacttatcgcacgaccagagtggggattccctcaacagtgatgaaggagacgtgtcttggatggaggagcagctgtcctacttctgtgacaagtgccaaaaatggataccagccagtaaggagcttctcaattcctttgatttgtcaattcctgtgtgaaggtttgtttttccaacctgtgaaagaaacgtgaatgtaaaagagacctaaataaaaggataattatatttattctctagttgatcagctataaatttatataaaacataggcatgtttgtactaatgaaacgtactgtcaacctctatcacattgttaaattaacacttttggtggtaactcaataaaattgagaaaattggaaacaaaacacacaaac

SEQ ID NO: 76511 - DNA, 1311 bp, Homo Sapiens
  misc_feature (1020)..(1029): n is a, c, g, or t
  misc_feature (1043)..(1043): n is a, c, g, or t
gcggatcggcgtccgcagcgggcggctgctgaggtgccccctgataagtgccgatgtgccgtgggcagcatcctgagtgaaggtgaggaatcgccctcccctgagctcatcgacctctaccagaaatttggcttcaaggtgttctccttcccggcacccagccatgtggtgacagccaccttcccctacaccaccattctgtccatctggctggctacccgccgtgtccatcctgccttggacacctacatcaaggagcggaagctgtgtgcctatcctcggctggagatctaccaggaagaccagatccatttcatgtgcccactggcacggcagggagacttctatgtgcctgagatgaaggagacagagtggaaatggcgggggcttgtggaggccattgacacccaggtggatggcacaggagctgacacaatgagtgacacgagttctgtaagcttggaagtgagccctggcagccgggagacttcagctgccacactgtcacctggggcgagcagccgtggctgggatgacggtgacacccgcagcgagcacagctacagcgagtcaggtgccagcggctcctcttttgaggagctggacttggagggcgaggggcccttaggggagtcacggctggaccctgggactgagcccctggggactaccaagtggctctgggagcccactgcccctgagaagggcaaggagtaacccatggcctgcaccctcctgcagtgcagttgctgaggaactgagcagactctccagcagactctccagccctcttcctccttcctctgggggaggaggggttcctgagggacctgacttcccctgctccaggcctcttgctaagccttctcctcactgccctttaggctcccagggccagaggagccagggactattttctgcaccagcccccagggctgccgcccctgttgtgtctttttttcagactcacagtggagcttccaggacccagaataaagccaatgatttacttgtttcacnnnnnnnnnnacccacctaaaaanaaccctgttcggccgccctccggccctcgaaaaaactttcctaaaccatttcggtttggccgcccgggccccactaggttaagtggaacatgggttcttaacctgtttcccaaggaagattccgggccatgaactaagtggcttggaattcctcccccaataaaaaaaccgcccgggcgggaaacccgaagggttcttgaaacaaattccagaaggggaagtcttgaaggccccttcaccggggaactcttcaacccgggagttccca

SEQ ID NO: 76512 - DNA, 990 bp, Homo Sapiens
cgtaaccgaaccctgagccgcctgcgcggatcggcgtccgcagcgggcggctgctgagctgccttgaggtgcagtgttggggatccagagccatgtcggacctgctactactgggcctgattgggggcctgactctcttactgctgctgacgctgctggcctttgccgggtactcagggctactggctggggtggaagtgagtgctgggtcaccccccatccgcaacgtcactgtggcctacaagttccacatggggctctatggtgagactgggcggcttttcactgagagctgcagcatctctcccaagctccgctccatcgctgtctactatgacaacccccacatggtgccccctgataagtgccgatgtgccgtgggcagcatcctgagtgaaggtgaggaatcgccctcccctgagctcatcgacctctaccagaaatttggcttcaaggtgttctccttcccggcacccagccatgtggtgacagccaccttcccctacaccaccattctgtccatctggctggctacccgccgtgtccatcctgccttggacacctacatcaaggagcggaagctgtgtgcctatcctcggctggagatctaccaggaagaccagatccatttcatgtgcccactggcacggcagggagacttctatgtgcctgagatgaaggagacagagtggaaatggcgggggcttgtggaggccattgacacccaggtggatggcacaggagctgacacaatgagtgacacgagttctgtaaagcttggaagtgagccctggcagcccggaagacttcagctgccacactgtcacctggggcgagcagccgtggctgggatgaacggtgacacccgcagcgagcacagctacagcgagtcaggtgccagcgggctcctcttttgaggaactgggacttggagggccgagggggccccttaggggaagtcacgggctgggacccctggggactgaaacc

SEQ ID NO: 76513 - DNA, 1383 bp, Homo Sapiens
  misc_feature (746)..(755): n is a, c, g, or t
cagtcgacggtaccggacatatgcccgggaattcggccattacggccggggttatgataaacactgaaatagcatgttaaacagttgcctatactttaatataatcagttggggaaaactggccttttctcccccactgtatgattgtttcttgaaaggtaaattgctaattttatacagtgtaattctgttcttcacaaaataggtttcattattctatatttaaactgttggtcagaaaatgatctgcaattcaagtaagtctgcattacttttttctttaaaaagtactttaacatgcctttatttattatattagcaaatgagctaataacagatgaaattttcattttttgacagatataaccttgcataagtagtatttagggtgattttgatactatctttagagttttgcattggatattaaaaaatatattggcacaatgtattggaagaaaatgagtagtatctggtttaatttttaatatttagggacattttaaaaaatcaatgttttaattagactaaaaattctttatattttttatttactttttaaagaaacatctgtcaaagtaatattgattccaaactgatgtttgtgtgaatttacatgtctattttcatgaactaagaatagagtttctttgagttgaggagaaaaaaatatatatgtgggtccatttattaggttaaagttgacccattcagtgtaaaaataaccatagtgtgtgagctaaagnnnnnnnnnngtaaatttctcctttatattctaagaagctttaaaagaacaattcaggggttattgataactgctactctgtcggtcattgtctctatatgcagtaaaattttatggtccctttataggaatataaagaattcaaaacagtttttcaaaagatttttttccttggacataaaaaattttgatgctattctatttttgtttttattacagcttaactgtatgctgttaaactctaggatgtatctgaatctttccttttttcccccctcctccaaatatataaatctgtgctctcacatgtaatgtatttaatttttggaaaatttaatgctatatagtaaatcaagtgtgtgatttaaagtaatcagatcactttgattcttttaagttttcagaatttcttttttccacaggtaattttggagaaaataattaccaattaactgataataagcacgctgtcctctgctgtaaaaagtctgaatagatactgtgtatgtttttatgtccatgaacttgagctactcgtgtgcaattatgtgtatgggaatggagtagtgttcatgatttgtatctacatcatcatatggatgtatatttattaataaagtcattactttaaaaccaaa

SEQ ID NO: 76514 - DNA, 994 bp, Homo Sapiens
  misc_feature (69)..(70): n is a, c, g, or t
  misc_feature (146)..(146): n is a, c, g, or t
  misc_feature (214)..(214): n is a, c, g, or t
  misc_feature (234)..(234): n is a, c, g, or t
tctaccccgtacatttcccgctttgtttgatgacgaacatcaccagacagtgactgtagatatcgctcnntagattgcctggccagatcgcagagagacctggcgatagagatagacgtaagagacagagccaccggacagccacncagccttgaagttgtgcgtaccccatacgacagtgagtccggtcagcccagtccagagctgacctgcntgggacagagttcccactcntgcggcgcatcccgtgcgccgtgcctcccaccaccccatgtatctagtccccagccaaccccaccaggtcccgaagctaaggagccaggcctgggggtggacttcattcgtcacaatgcacgagctgccaagagagccccccggaggcattcctgctcactgcaggtcctggcacaagtgctagagcagcagcggcaggcccaggagcactacaatgccacgcagaagggccatgtgccacattacttgttggagcgcagggacctgtggcggcgggaggccgaggcccgcaagcagagccagccggaccctgccatgcccccaggccacacgcgcatgcctgagaaccagcggctggaaacactgaccaagctgctccagagccagagccagctgctgcgtgagctggtactgctgcctgctggggcagactcactgagagcccagagccaccgtgctgagctggaccggaagctggtgcaggtagaggaggccatcaagatcttttctcggcccaaagtcttcgtgaagatggacgactgagcccctttgggggacagtggcaaggagctccatgctgaggatcgccacatggctgcaaaggacagggttggacccaatcccagagcagaggtctgaagacaggagcaggggggtggccagtgtccctagagcactcttcccagtcaccagtggctgcagaagggccaccctagccttttaactgctttgtcaaaattaaacattttgtacacagaaa

SEQ ID NO: 76515 - DNA, 639 bp, Homo Sapiens
  misc_feature (37)..(37): n is a, c, g, or t
  misc_feature (121)..(121): n is a, c, g, or t
gaaagaagcaagacacgtggcctcgtgaggggcaagntaggccccagaggccctggaggtctccaggggcctgcagaaggaaagaagggggccctgctacctgttcttgggcctcaggctntgcacagtcaagcagcccttgctttcggagctcctgtccaaaagtagggatgcggatcctgctggggccgccacggcctggctggtgggaaggccggcagcgggcggaggggatccagccacttccccctcttcttctgaagatcagaacattcagctctggagaacagtggttgcctgggggcttttgccactccttgtcccccgtgatctcccctcacactttgccatttgcttgtactgggacattgttctttccggccaaggtgccaccaccctgccccccctaagagacacatacagagtgggccccgggctggagaaagagctgcctggatgagaaacagctcagccagtggggatgaggtcaccaggggaggagcctgtgcgtcccagctgaaggcagtggcaggggagcaggttccccaagggccctggcacccccacaagctgtccctgcagggccatctgactgccaagccagattctcttgaataaagtattctagtgtggaaaaaa

SEQ ID NO: 76516 - DNA, 663 bp, Homo Sapiens
ctcgctcccttcaagacgaggggcagggaaggacaggaccctcaggaattcagtgccttcaacaacgtgagagaaagagagaagccagccacagacccctgggagcttccgctttgaaagaagcaagacacgtggcctcgtgaggggcaagctaggccccagaggccttggaggtctccaggggcctgcagaaggaaagaagggggccctgctacctgttcttggggcctcaggctctgcaacagtcaaagcagcccttgctttcggagccacttcccccctcttcttctgaagatcagaacattcaagctctggagaacagtggttgcctgggggcttttgccactccttgtcccccgtgatctcccctcacactttgccatttgcttgtactgggacattgttctttccggccaaggtgccaccaccctgccccccctaagagacacatacagagtgggccccgggctggagaaagagctgcctggatgagaaacagctcagccagtggggatgaggtcaccaggggaggagcctgtgcgtcccagctgaaggcagtggcaggggagcaggttcccaagggccctggcacccccacaagctgtcctgcagggccatctgactccaagccagattctcttgaataaagtattctagtgtgga

SEQ ID NO: 76517 - DNA, 1028 bp, Homo Sapiens
  misc_feature (103)..(103): n is a, c, g, or t
  misc_feature (142)..(142): n is a, c, g, or t
  misc_feature (217)..(217): n is a, c, g, or t
  misc_feature (928)..(940): n is a, c, g, or t
atatcgatccttggattgcctgagccagatggcagggcattcccagtattcaactgactggcttgtgatcatggtgggtcccctacgcagcaacgtgcagtcntgatcgggctgagcactcagacctttgaggcccccactntggcccaaattgcaaggtgtagatgagctgcctgtgagaatggtgtgaggagaagctgttccaacaaagacactntcatctgtgagatgctgtgtgagcaacttacgagcctacgtgtgtacctgaattttccccgtaactcatttcttccatatgaagaaacaccaaactatgtacagagaactttttacaaaaggcagaccttttttaagctgtgtaacccacatagcctaaccacctggcagaatgactacgaataggggtcattgtgctggtaaaagcctctattacgactgtaagtaagttggatgttggcaaaattaaattgttacagtatttagagctgctgtagctgttccttcacaacataaaataggataaatgactagtacgtctttcaggtgggtggcaagcagaacatgcgtaatattctctacctggtctgtagctgtaactgtgatgtacagacaaagcaaaaattaaaagaacttatgaaaacaaatgcaatgatactaggatatacacttttgtatttttattcttatataaggttatttgctggctattgttggcctctagttcagtctgtgttatttaaattctaatatatgaattatttgaattgaattcatgttcggggccacgttgttgtatgtattgatgtacagccttgaatgtgaataattattgtaaactatattttacaactttttttctggctttattatataaattttctattgggtcagtgatttaatcatataatttaatgaatctgtttatccnnnnnnnnnnnnnccaaatacttgtgctttaggtgtagttaccagatgatgaattttcctcgtatggtcagtagtcttgtaataaaaagcatgtagagtgt

SEQ ID NO: 76518 - DNA, 655 bp, Homo Sapiens
gaaaaattacattaacagcataaaattcaaaagttatacagaagaaacaataagaagtaaatctttcgtcctgtcctgtgccccatctagtaccttaagacaatcagtgatagtagtttcttggctgtaccttcacaaatattctaggtatttatattatttattttcccgtacacaacaacagcatattatagacaacattctctcctggcttttttcacttactctttatccatattgatatatagaggactgtctcattctgcttaacagctgcatagtattgtgttttatggatatatcatactttgtttaatttctattctggtaatagtcatttgggttgattaccatctttacgctatgataaccaagtatttcagtacttatctatgtattcattacattgtgtcataacgagaccagtttatttgtaggatatataatgaggagtggaattcctgggttaagggcatacatatttgtaattttgacaaacacaaaattacatagagagggctgtaccaacttatatgtctaccagcaatctgtgcctgtgtcacgtttcctcttactctggccattccagtgttagcaacttttaaaatttgcgaatctgatttttaaaaatgacatcgttcctcgtgccgaattc

SEQ ID NO: 76519 - DNA, 964 bp, Homo Sapiens
  misc_feature (648)..(648): n is a, c, g, or t
  misc_feature (680)..(680): n is a, c, g, or t
ggattcccgggatatcgtcgacccacgcgtccggggatggccgcggagccgggcggagctggcttgcggctcccggggccggctctccggccggagacatggcccgggggcccggcccgctaggcaggcctcgccccgatacggtcgccatgcccaagagaggaaagcgactcaagttccgggcccacgacgcctgctccggccgaggtgggcgaggggggcaggggcgctgaaacattttgggggctggcggctgggagggggctggaccgtgccgaggtgagcgctcgcgtgcccgcggctggagggcggctcggtccgggggcctgcagcgaggaggaggtgttggcggggaagacgctgacgagagaaggcctcttccttgagggttggtgctgtgttgcagtgaccgtggcggattacgccaactcggatccggcggtcgtgaggtctggacgagtcaagaaagccgtagccaacgctgttcagcaggaagtaaaatctctttgtggcttggaagcctctcaggttcctgcagaggaagctctttctggggctggtgagccctgtgacatcatcgacagcagtgatgagatggatgcccaggaggaaagcatccatgagagaactgtctccagaaaaaagaanagcaagagacacaaagaactggacggggctgngaggagaagagtatcccatggatatttggctattgctggcctcctatatccgtcctgaggacattgtgaatttttccctgatttgtaagaatgcctggactgtcacttgcactgctgccttttggaaccagttgtaccgaaggcactacccgctggatgcttccctgcctttgcgcctgcgaccaaaatccatgggaaaagctgcgctgtctccggggtttgggtgatccccatctcttgaccctatggtttggaccatttggctgcccgactctcccaaaacc

SEQ ID NO: 76520 - DNA, 2565 bp, Homo Sapiens
  misc_feature (1774)..(1832): n is a, c, g, or t
  misc_feature (2109)..(2137): n is a, c, g, or t
gctggtaccggtccggaattcccgggatatcgtcgacccacgcgtcatggccgcggagccgggcggagctggcttgcggctcccggggccggctctccggccggagacatggcccgggggcccggcccgctaggcaggcctcgccccgatacggtcgccatgcccaagagaggaaagcgactcaagttccgggcccacgacgcctgctccggccgagtgaccgtggcggattacgccaactcggatccggcggtcgtgaggtctggacgagtcaagaaagccgtagccaacgctgttcagcaggaagtaaaatctctttgtggcttggaagcctctcaggttcctgcagaggaagctctttctggggctggtgagccctgtgacatcatcgacagcagtgatgagatggatgcccaggaggaaagcatccatgagagaactgtctccagaaaaaagaaaagcaagagacacaaagaagaactggacggggctggaggagaagagtatcccatggatatttggctattgctggcctcctatatccgtcctgaggacattgtgaatttttccctgatttgtaagaatgcctggactgtcacttgcactgctgccttttggaccaggttgtaccgaaggcactacacgctggatgcttccctgcctttgcgtctgcgaccagagtcaatggagaagctgcgctgtctccgggcttgtgtgatccgatctctgtaccatatgtatgagccatttgctgctcgaatctccaagaatccagccattccagaaagcacccccagcacattaaagaattccaaatgcttacttttctggtgcagaaagattgttgggaacagacaggaaccaatgtgggaattcaacttcaagttcaaaaaacagtcccctaggttaaagagcaagtgtacaggaggattgcagcctcccgttcagtacgaagatgttcataccaatccagaccaggactgctgcctactgcaggtcaccaccctcaatttcatctttattccgattgtcatgggaatgatatttactctgtttactatcaatgtgagcacggacatgcggcatcatcgagtgagactggtgttccaagattcccctgtccatggtggtcggaaactgcgcagtgaacagggtgtgcaagtcatcctggacccagtgcacagcgttcggctctttgactggtggcatcctcagtacccattctccctgagagcgtagttactgcttcccatcccttgggggcagcctcgagtgtagtccattagtaatcagattccagtttggacagggtggctggattgtatatctcgttagtaatgtacatgctcttcaggttctagggctcctgttaggggagggagaaatgttgaatcaagagggaaaacaactactatgatttataaacatattttaatgtaaaaatttgcatttaaaaggagtggccctgttttctgtgttaaaaccccatttggtgctattgagtttgttctttattcttttatcccagtgaaaattgttgatcttgctgtagggaaaaattaaactctttgaatctccaaacaaggaagtttcagcattcccttatggatcagaggaaccttagaggcctgaaattgttgcttccagtttagctgcccctcaaattcaagtgaatattttcccttctccctttacccttctccagaaataaagcaggtgacagggttttcagaatcttaccatattgacttgtgtatcttttttaaaaaataannnnnnnnnnnnnnnnnnnnnnnnnnnnnnnnnnnnnnnnnnnnnnnnnnnnnnnnnnngcatgaggctgataatggtgatgatgactttatacccttggtactatactaggaactttacatagtatctctacttctcacagtcttgcaaagtaggtgatattattcccattttatagttgagaaaacggaattagtgactgtacctataacaccagtaaatgcagagccaagattctgacccaggtctttttgttgtaccataagtttaaaagatgagtctcatttttcttgtggtagatggtggtaaaaaggagtaggcagagtgtacatagannnnnnnnnnnnnnnnnnnnnnnnnnnnnttgattgtggtatatgttattctaatcagccaaaaaagtttagaagattgatgaaatgatcttttaaatatgtatttctgaataaaatgtaaaaccaagaaagttatttcaggaaggatagtgaccctttcattgaactgttagaagggcatttattaggctaaaacgtcattaacaaaatgcattgcatgttgaaaccagcctcttgaaccataagcacttagcgactttgctctgccctgtactgtgctgcttctgctgtcatcctgtgtgccgacagaagcctggtcttccgtccatgcagaaatgcttatgtcctcctgttgtttagatgactcctattgttcaggtgtactctgagaagagaatcacgtttttctgttttgctaaggagaaaaccttgctgcttgtctctcctcccaccctcc

SEQ ID NO: 76521 - DNA, 1296 bp, Homo Sapiens
tgagcgcgcctggtgtgggtctgcagcggaggcctcagcaacctgctcttccgctgctcgctcccggaccacctgcccagcgttggcgaggagccccgggaggtgcttctgcggctgtacggagccatcttgcagggcgtggactccctggtgctagaaagcgtgatgttcgccatacttgcggagcggtcgctggggccccagctgtacggagtcttcccagagggccggctggaacagtacatcccaagtcggccattgaaaactcaagagcttcgagagccagtgttgtcagcagccattgccacgaagatggcgcaatttcatggcatggagatgcctttcaccaaggagccccactggctgtttgggaccatggagcggtacctaaaacagatccaggacctgcccccaactggcctccctgagatgaacctgctggagatgtacagcctgaaggatgagatgggcaacctcaggaagttactagagtctaccccatcgccagtcgtcttctgccacaatgacatccaggaaggtaggagaaggcatctgagtctcctaacccaagatggaagagccagagggctctggagtgagcagaacctcaccccattcccccagggaacatcttgctgctctcagagccagaaaatgctgacagcctcatgctggtggacttcgagtacagcagttataactataggggctttgacattgggaaccatttttgtgagtgggtttatgattatactcacgaggaatggcctttctacaaagcaaggcccacagactaccccactcaagaacagcagttgcattttattcgtcattacctggcagaggcaaagaaaggtgagaccctctcccaagaggagcagagaaaactggaagaagatttgctggtagaagtcagtcggtatgctctggcatcccatttcttctggggtctgtggtccatcctccaggcatccatgtccaccatagaatttggttacttggactatgcccagtctcggttccagttctacttccagcagaaggggcagctgaccagtgtccactcctcatcctgactccaccctcccactccttggatttctcctggagcctccagggcaggaccttggagggaggaacaacgagcagaaggccctggcgactgggctgagcccccaagtgaaactgaggttcaggagaccggcctgttcctgagtttgagtaggtccccatggctggcaggccagagccccgtgctgtgtatgtaacacaataaacaagcttcttcttccaaaa

SEQ ID NO: 76522 - DNA, 627 bp, Homo Sapiens
ctgctgctctcagagccagaaaatgctgacagcctcatgctgtgtacttcgagtacagcattataactatagggctttgacattgtgaaccatttttgtgagtgggtttatgattatactcacgaggaatggcctttctacaaagcaaggcccacagactaccccactcaagaacagcagaggcaaagaaaggtgagaccctctcccaagaggagcagagaaaactggaagaagatttgctggtagaagtcagtcggtatgctctggcatcccatttcttctggggtctgtggtccatcctccaggcatccatgtccaccatagaatttggttacttggactatgcccagtctcggttccagttctacttccagcagaaggggcagctgaccagtgtccactcctcatcctgactccaccctcccactccttggatttctcctggagcctccagggcaggaccttggagggaggaacaacgagcagaaggccctggcgacgggctgagcccccaagtgaaactgaggttcaggagaccggcctgttcctgagtttgagtaggtccccatggctggcagccagagccccgtgctgtgtatgtaacacaataaacaagcttcttcttcc

SEQ ID NO: 76523 - DNA, 842 bp, Homo Sapiens
  misc_feature (679)..(703): n is a, c, g, or t
aaggggaaaaatgggaaatagtctgattttaatgaaatcaaatgtatgtatcatcagttggctacgttttggttctatgctaaactgtgaaaaatcagatgaattgataaaagagttccctgcaaccaattgaaaagtgttctgtgcgtctgttttgtgtctggtgcagaatatgacaatctaccaactgtccctttgtttgaagttggtttagctttggaaagttactgtaaatgccttgcttgtatgatcgtccctggtcacccgactttggaatttgcaccatcatgtttcagtgaagatgctgtaaataggttcagattttactgtctatggatttggggtgttacagtagccttattcacctttttaataaaaatacacatgaaaacaagaaagaaatggcttttcttacccagattgtgtacatagagcaatgttggttttttataaagtctaagcaagatgttttgtataaaatctgaattttgcaatgtatttagctacagcttgtttaacggcagtgtcattcccctttgcactgtaatgaggaaaaaatggtataaaaggttgccaaattgctgcatatttgtgccgtaattatgtaccatgaatatttatttaaaatttcgttgtccaatttgtaagtaacacagtattatgcctgagttataaatannnnnnnnnnnnnnnnnnnnnnnnnaatagcctgtcataggttttaaatctgctttagtttcacattgcagttagccccagaaaatgaaatccgtgaagtcacattccacatctgtttcaaactgaatttgttcttaaaaaaacaaaatatttttttcctatgg

SEQ ID NO: 76524 - DNA, 792 bp, Homo Sapiens
  misc_feature (25)..(25): n is a, c, g, or t
  misc_feature (94)..(94): n is a, c, g, or t
gagtcagctgtaaagccatttaacntgcaatctggacaggaagtgacgctcaccactttgggtaagagctgctctgactgtagggccccctatntgttgtcctaacccagaagcagctctgggctgccaggatggtggatggaataccagagagttcacactagggaggaagcaatgcctgccccctggagtctcctagggggcagcagttagaataagggaagaggatttgctggtcactgtttgctgacatgggtttccatggtgagttcaggcctgaggacagcagtgtctgcaaaaccacatggcccttgagaaatgtccttgcacattgggcttcaaactcctcttctagggaatccatcttggcctgaaagcagaggtacaacaccagccccaaaggcaattctgttttcagattggttgctctggaaaggaaggctggggtgagggggcattttacttgcacagaggctgaccctgcctcccctcttcactgaccccatctccaaggtagacctcagccatgtcagtccctgttctgggaggtgctgggctgggccacagccagggttatgtaggtaattaacctgtccaaccctgagcctcgcctccccacaccagcaacacagtggtctctctgtggtgaccattcacagcataacattctgcttagcctcaaactgaaagcattgcaactgatgtcaaaaccagatgagatcttacagggagagagattgggtgcaatttgcctctttctttgaataaaaagctctttgctcaccctcaaaa

SEQ ID NO: 76525 - DNA, 688 bp, Homo Sapiens
  misc_feature (246)..(264): n is a, c, g, or t
ctcatgtaagcattacattttgaagactgaatatacttcacagcagatcaaacacatgtatggcatgcactgacctcttcttggagcccagaactttatagagttgcctaccagggttactgtaatggaatttatgatcttaagaaattactagttgtattatttatcctatgattcattcattcaataagcttttactgcataaactttacatccagcctggcgacagagcgagacaccgtctcnnnnnnnnnnnnnnnnnnnttgtgcaaagcataggtaaatatttttctttattaagcttctcactgagaagccctctttattttggtaaatgtcactctgtttgttaggagatgtctgcttttccatgaaatgaaatagtggctaaagccctgaaagaggcaagactacaatgggctgaaacagttggtatagcaaccccagagaagtgcttcattttctttttatagtagaagcaggtccatgtcttttgtggtttcctgcacatctttggagtagttatgacttctcagtttttccccccttaaactgcattgcctattcttttttcctgacatgctatcaggtatcagtgtgttgaatacataatgcttgtgtatcagacttacgttactgtcatcaccattaaaagaattgcagccttgtgccccatgaccttcaaaaa

SEQ ID NO: 76526 - DNA, 1560 bp, Homo Sapiens
  misc_feature (74)..(108): n is a, c, g, or t
  misc_feature (1141)..(1149): n is a, c, g, or t
aattaaatcatatagggcctagctttagcagccgaacgacgagcgcagcgaagtagtgagcgaggaagcggcgnnnnnnnnnnnnnnnnnnnnnnnnnnnnnnnnnnncagtcgacggtaccggacatatgcccgggaattcggccattacggccggggaccggcaagatggcggcgcggacagcgttcggtgctgtgtgccggcgcctctggcagggattggggaatttttctgtaaacacttctaagggcaatacagccaaaaatggtggcttgcttctcagtaccaatatgaagtgggtacagttttcaaacctacacgttgatgttccaaaggatttgaccaaacctgtggtaacaatctctgatgaaccagacatattatataagcgcctctcggttttggtgaaaggtcacgataaggctgtattggacagttatgaatattttgctgtgcttgctgctaaagaacttggtatctctattaaagtacatgaacctccaaggaaaatagagcgatttactcttctccaatcagtgcatatttacaagaagcacagagttcagtatgaaatgagaacactttacagatgtttagagttagaacatctaactggaagcacagcagatgtctacttggaatatattcagcgaaacttacctgaaggggttgccatggaagtaacaaagacacaattagaacagttaccagaacacatcaaggagccaatctgggaaacactatcagaagaaaaagaagaaagcaagtcataaagcctcagggaggccatttttgcctaaatttgaaatgagggtgggccagatgagtatgtttaagtggagagtgcttccagctgagatgatttgagtctgccctaactgctccattgagttctcgtgccctcatcagctgagggcagggaatggaactttaatggaagaaccacttttatctattctttttattcattgtttcagttctgatttcagcaaacatgagcaaaccactttgactgaaagcagaaagagtgaaaattctattttgttacgctactggtgttcaattattagtttgtaccatttttaatttatgtcagttgatgcatctgaaaataagtgcttggagtgttcgtacccttannnnnnnnnaagattcctagaaggaatctttggttaattcagattgagcagttaaagtttttgctatttacctttgtgcaggctggcatatgctaatttgggggtggtaaccaaccgattttatctcatgtaagcattacatttttgaagactgaatatacttcacagcagatcaaacacatttatggcatgcactgacctcttcttggagcccagaactttatagagttgcctaccagggttactgtaatggaatgtatgatcttaagaaattactagttgtattatttatcctatgattcattcattcaataagcttttactgcataaactttacatccagccactgtagttaagtacccaaaattgaatagaaataatggcttttgaaattgcacaaagcagggcccaggcacggtg

SEQ ID NO: 76527 - DNA, 815 bp, Homo Sapiens
  misc_feature (656)..(656): n is a, c, g, or t
acgagggcacagcccgcccccctacagccccggtccccacgcctagaagacagcggaactaagaaaagaagaggcctgtggacagaacaatcatgtctgactccctggtggtgtgcgaggtagacccagagctaacagaaaagctgaggaaattccgcttccgaaaagagacagacaatgcagccatcataatgaaggtggacaaagaccggcagatggtggtgctggaggaagaatttcagaacatttccccagaggagctcaaaatggagttgccggagagacagcccaggttcgtggtttacagctacaagtacgtgcatgacgatggccgagtgtcctaccctttgtgtttcatcttctccagccctgtgggctgcaagccggaacaacagatgatgtatgcagggagtaaaaacaggctggtgcagacagcagagctcacaaaggtgttcgaaatccgcaccactgatgacctcactgaggcctggctccaagaaaagttgtctttctttcgttgatctctgggctggggactgaattcctgatgtctgagtcctcaaggtgactggggacttggaacccctaggacctgaacaaccaagactttaaataaattttaaaatggcgccaggcccccccacgtaaaagaaaanaacttgttcggccgccctcggcccctcaaaaaacttttctaaaccctttcgtttgggcccccggggcccacttaggtaagggaaaaatggggcctaaacctgtttccctaggaaaatcccttggccatgaactaagggcttgggatttcctcccccaat

SEQ ID NO: 76528 - DNA, 768 bp, Homo Sapiens
cagtcgacggtaccggacatatgcccgggaattcggccattacggccgggaagacagcggaactaagaaaagaagaggcctgtggacagaacaatcatgtctgactccctggtggtgtgcgaggtagacccagagctaacagaaaagctgaggaaattccgcttccgaaaagagacagacaatgcagccatcataatgaaggtggacaaagaccggcagatggtggtgctggaggaagaatttcagaacatttccccagaggagctcaaaatggagttgccggagagacagcccaggttcgtggtttacagctacaagtacgtgcatgacgatggccgagtgtcctaccctttgtgtttcatcttctccagccctgtgggctgaaagccggaacaacagatgatgtatgcagggagtaaaaacaggctggtgcagacagcagagctcacaaaggtgttcgaaatccgcaccactgatgacctcactgaggcctggctccaagaaaagttgtctttctttcgttgatctctgggctggggactgaattcctgatgtctgagtcctcaaggtgactggggacttggaacccctaggacctgaacaagcaaagacctttagaagtaacgttttacacatgccaaagactcgggagaatccgtctaaaagaaacaaaacaagcgatacgaagaaagagcctgtgtgaggccagtggacgcccggagaaggttttggaacagaggtggggggggcggacaaagggagaaggaa

SEQ ID NO: 76529 - DNA, 700 bp, Homo Sapiens
tagagaaagaagggtaccgaaggcagaggccacaagaaagatctggatggtgactctaaagggctcattgtcaaggggaggagccacctgaaccatgaaaaggagatgtttgcccaagaccatcctgaagtcaactccctggaggaggtggtgaggctggtgaagcccacagccatcatagggccgagggatttttgccagtggaagtccttttaagagtgtgactctggaagatggcaagaccttcattcctgggcagggaaacaatgcttacgtgtaccccggggtggcactgggagtcatcgccggcgggatccggcacatcccagatgagatcttcctcctgacagcagagcaaattgcccaggaagtctctgagcagcatctgtcccaggggagactctacccaccaatcagcaccatccgagacgtgtctttgagaattgccatcaaagttctcgactacgcgtacaaacacaaactggcttcctactaaccagagactaaggacaaggaggcttttgtaagatccctggtctacactccagactatgactcctttacactggacagctacacttggcccaaggaagccatgaatgttcagacggtctgaggcagtctcagaggctagtatggggctagatgaagcccagagtaacacccaccaatataaatgggttccaaaatggcccaagtg

SEQ ID NO: 76530 - DNA, 803 bp, Homo Sapiens
  misc_feature (39)..(39): n is a, c, g, or t
gaagtcaactccctggaggaggtggtgaggctgtgaagncccacagccatcataggtgttgctgccatcgcagaagcccttcacggagcagattctgagggacatggcctccttccacgagcgccctatcatctttgccctgagcaaccccaccagcaaggccgagtgcacggctgagaagtgctaccgggtcaccgagggccgagggatttttgccagtggaagtccttttaagagtgtgactctggaagatggcaagaccttcattcctgggcagggaaacaatgcttacgtgttccccggggtggcactgggagtcatcgccggcgggatccggcacatcccagatgagatcttcctcctgacagcagagcaaattgcccaggaagtctctgagcagcatctgtcccaggggagactctacccaccactcagcaccatccgagacgtgtctttgagaattgccatcaaagttctcgactacgcgtacaaacacaacctggcttcctactacccagagcctaaggacaaggaggcttttgtaagatccctggtctacactccagactatgactcctttacactggacagctacacttggcccaaggaagccatgaatgttcagacggtctgaggcagtctcagaggctagtatggggctagatgaagcccagagtaacacccacaatataaatgggttccaaaatggcccaagtgaatccttgtcgctgtgttttttcttttaaactttctggtgtgagaggagatgccaaggcatacagtgaataaaagccttgtctctg

SEQ ID NO: 76531 - DNA, 612 bp, Homo Sapiens
ctcattttagacctaagagttttttgttataagacaccccagttaagaaatattgaaacataagagacttgaccatcaagggagaaaagaagccaagagtgaaaaatgctatgaaagtaactccagacctgggcggggcgggaggtaggaggaataaggagaaaaggaggcataagtggaaaagccaggggcctgtcatctcagcagctccgagacttgtcatgtttgaaagtgcaaatgtcaatggattttaaccatcttgaggttgtgatcttttaaaaagctcaatgaatgaggaagtcaattccttcaaatgcaaaatagctggctttctggctggaggtttgttgggtctggggtatttcttccccatctacctcctctcccacccccaccccattccccaaagaaaggtacaaaaggttgcagttctgcagcattaccgttacagggaaggcactggttacccaccagcgggcggaaggaagacagggtcgtgtcacttcaaagctaagtgccatagtgccttaagtattactaggggctggatgtctgtcagggaggagaagtaaggtggggcagaaaatgtggacagagaggaataagggtaag

SEQ ID NO: 76532 - DNA, 681 bp, Homo Sapiens
ccaacacacccccacatcccctttccctcaccatcaggcacgaaagtccttcctaagtcgcaaatgcaaatctaactgactggcttccttcttacagaccaaccacagctacttgtctttgaaattcaacttcaaggaagacagaaaagtctatttttaatcagagaaaaacctcaaattgagtgcgaattactgcctaggccctgttgaatgcacactagaatcacttttgagatgatcactaattttatggagtgatatacaccagaatgaacttctagcctgctttataatcaatcagttaatcaacaagtctgagtggagcgtgtatgctttgcgttatctgcagtgcggcctgaggttacgggagaaaaaaatggcactgtgtattgcttgaatgctcagggctgcgttcaactaattttaaccattgaatcaaaatgatcaggtagagggcaggaaatgtagaatggcttgaacaactacctcatgaaaacatgcagtatgcatttgtaattcagcatcttaaaatgtctcttttggcagtatttctttacaaatgtggcaaagcatgatatctttgagtaaatttttaaacttcacaaaagtttctgaaaaaaatatgtacaatcaaagaaaaacacttggaaataaattctgtctatagtttatgcacattta

SEQ ID NO: 76533 - DNA, 1043 bp, Homo Sapiens
  misc_feature (33)..(33): n is a, c, g, or t
  misc_feature (177)..(177): n is a, c, g, or t
  misc_feature (202)..(203): n is a, c, g, or t
  misc_feature (211)..(211): n is a, c, g, or t
  misc_feature (277)..(277): n is a, c, g, or t
ccccgcgtgcgatcatatcagtgcagaagtccngatgaagcgcatgagccacgcatattgagtagtcatcatagcacccagctacattatgctccgctcgatgtgttggatttgagcgatacaattcacacaggaacagtatgactgatacgattatacgactcactataggattgnccctcgagccagaaatcgcacgagnngaagatgnaaatggaaagaagagctattaagagacgctgagatctctgaggagtgacttgctgttctctcctcntggtggtgggagacaggctttttctctccctctggcgaggactctcaggatgtacgggacttgtgaaatatttactgtctgtccaccacggcctggaggacgggaggttgtggtcgcgatggacgagatgatcttgtctggaagtctagagtctttgtttggttagaggactgcctgtgatcctggccactaggccaagaggccctatgaaggtggcgggaactcagcttcaacctcgatgtcttcagggtcttgtccagaatgtagatgggttccgtaagaggcctggtgctctcttactctttcatccacgtgcacttgtgcggcatctgcagtttacaggaacggctccttccctaaaatgagaagtccaaggtcatctctggcccagtgaccacagagagatctgcacctcccggacttcaggcctgcctttccagcgagaattcttcatcctccacggttcactagctcctacctgaagaggaaagggggccatttgacctgacatgtcaggaaagccctaaactgaatgtttgcgcctgggctgcagaagccagggtgcatgaccaggctgcgtggacgttatactgtcttcccccacccccggggaggggaagcttgagctgctgctgtcactcctccaccgagggaggcctcacaaaccacaggacgctgcaacgggtcaggctggcgggcccggcgtgctcatcatctctgccccaggtgtacggtttctctctgacattaaatgcccttcatggag

SEQ ID NO: 76534 - DNA, 1122 bp, Homo Sapiens
ggcttaggtacgaggcctgggtgttgaattcggcacgaggaagaagcagatccagccattccaagtgctcaccacccgcaaacgcaaggaggtggatgcgtctgagatccaggtgcaggtgtgtttgtacgccttcgacctcatctacctcaatggagagtccctggtacgtgagcccctttcccggcgccggcagctgctccgggagaactttgtggagacagagggcgagtttgtcttcgccacctccctggacaccaaggacatcgagcagatcgccgagttcctggagcagtcagtgaaagactcctgcgaggggctgatggtgaagaccctggatgttgatgccacctacgagatcgccaagagatcgcacaactggctcaagctgaagaaggactaccttgatggcgtgggtgacaccctggacctggtggtgatcggcgcctacctgggccgggggaagcgggccggccggtacgggggcttcctgctggcctcctacgacgaggacagtgaggagctgcaggccatatgcaagcttggaactggcttcagtgatgaggagctggaggagcatcaccagagcctcaaggccctggtgctgcccagcccacgcccttacgtgcggatagatggcgctgtgattcccgaccactggctggaccccagcgctgtgtgggaggtgaagtgcgctgacctctccctctctcccatctaccctgctgcgcggggcctggtggatagtgacaagggcatctcccttcgcttccctcggtttattcgagtccgtgaagacaagcagccggagcaggccaccaccagtgctcaggtggcctgtttgtaccggaagcaaagtcagattcagaaccaacaaggcgaggactcaggctctgaccctgaagatacctactaagccctcgccctcctagggcctgggtacagggcatgagttggacggaccccagggttattattgcctttgctttttagcaaatctgctgtggcaggctgtggattttgagagtcaggggaggggtgtgtgtgtgagggggtggcttactccggagtctgggattcatcccgtcatttctttcaataaataattattggatagctaaa

SEQ ID NO: 76535 - DNA, 294 bp, Homo Sapiens
cataaataattacaagaacaagcaaataatttctccttttattgctgaggctaaagaaaagcagtaaaattttattgggaaacatttgagcttttcattacatatttgcaattgctatgtatgtgcacataggttcagtagtatgttgcactagcatttggaaactataatctgtggaaagtgtgacactcctagattggcagatatttgcgtgtttgaattgtgatacgtgaccactggtcttattttttgtgtcaaaagaatgatcttttccaataaagtcttaaagtcttt

SEQ ID NO: 76536 - DNA, 930 bp, Homo Sapiens
tgagccaccatgcctggcctcttggaatatttaataagctaaaaaattcttatacacaggtagattaattaggtagccaggagtggcccctgaaagtatgtctggcaaaacctagaactgcatcctagccatcactgtaccttctgccctccctgctgtctcctctgccagttacagttaaaaggttgtgggtgaggacgctgggcagagtcccaggcgtctgctgtcagctccccagcccggcctgcctgccgagccatctgggcgtcccacggtggagagtgtggtgcttgtgacgcggtggtgctgggagccatcctggtggcagatgtgggctctcactgcaagtcagtgtaagtccccagggactgtcagcagcacgtcctgctgcccctctctctgcagaagccctggtaacctgcgtttggaaaaatctctaaggatttctgaggagctgtcaggccatgtccttgtccaccctgtgtggggcacggcttcgacatggctctgctcccgtcgtgggctgagaaggagcaggtggggctgtgccttggaaaggaggccctcccgacatgcctttgtgcgaggtccctgtccatgctgtctccatcccggagccttacggcgatgggtggccacagagcctattccaagagtctggtttagggctgggtcttcccatcttcacctctgagtcttaggcgatgcgtgaccacgcagccccttccaggagtctggtttagggctgggtcttcccatcttcacctctgagtcttaggcggtgcatgaccacgcagccccttcccggagtctggtttagggctgcgtgctcaagagtctggtttggggctgggtcttcccatcgccctggaggaggcttttgtctcatctcatgattcacattaaactctgtgccatgaagcttaaaaa

SEQ ID NO: 76537 - DNA, 693 bp, Homo Sapiens
  misc_feature (54)..(54): n is a, c, g, or t
  misc_feature (94)..(94): n is a, c, g, or t
  misc_feature (609)..(617): n is a, c, g, or t
cactattctcacattgggagcagtgtataagtgattcagcctttcctttcttgntggactccttacccttcagacaaattccacatatagcatntggaatgacctttggctggaagggtagaagagggctataaattcaatgccagaagagcttactatgggtttaaaaggaattctgttactttattgccctatttttacttttggtaacttgctaatgaggaccattttgaaagacaaaacttgacaggagtctgcctacaatgtaagactgcctactgaagaaagcattaatttcatcataaaatttggtaaacagcatgatctcgtaagattaaatgtagcattctatactccctacatgcacagtaagatttgtttaatgaatggaaggaaagactaaatacaatgtcaaatgtcactattaattggacaagaaaatccaagtagcaaatgaccattatgtgtaagacttactctaaaaagaccattttaaatagctcatatattaattttgtttaaaacctgctattttccaaaactgcaaaactagagctataaaatctaagttaaaaaatcagcttatcctcattggtatagtggtatttnnnnnnnnntcagtttaaacatttttaattgaaagatgtctcatgcatacattggcgtgtacataaacgtttgtggaaaacttaa

SEQ ID NO: 76538 - DNA, 1602 bp, Homo Sapiens
gctgatggcggcggcggccgggcccggggctgcgctgtccccgcggccgtgcgacagcgacccagccacccccggagcgcagtccccgaaggatgataatgaagataattcaaatgatgggacccagccatccaaaaggaggcgaatgggctcaggagatagttctaggagttgtgaaacttcaagtcaagatcttggttttagttactatccagcagaaaacttgatagagtacaaatggccacctgatgaaacaggagaatactatatgcttcaagaacaagtcagtgaatatttgggtgtgacctcctttaaaaggaaatatccagatttagagcgacgagatttgtctcacaaggagaaactctacctgagagagctaaatgtcattactgaaactcagtgcactctaggcttaacagcattgcgcagtgatgaagtgattgatttaatgataaaagaatatccagccaaacatgctgagtattctgttattctacaagaaaaagaacgtcaacgaattacagaccattataaagagtattcccaaatgcaacaacagaatactcagaaagttgaagccagtaaagtgcctgagtatattaagaaagctgccaaaaaagcagcagaatttaatagcaacttaaaccgggaacgcatggaagaaagaagagcttattttgacttgcagacacatgttatccaggtacctcaagggaagtacaaagttttgccaacagagcgaacaaaggtcagttcttacccagtggctctcatccccggacagttccaggaatattataagaggtactcaccagatgagctgcggtatctgccattaaacacagccctgtatgagccccctctggatcctgagctccctgctctagacagtgatggtgattcagatgatggcgaagatggtcgaggtgatgagaaacggaaaaataaaggcacttcggacagctcctctggcaatgtatctgaaggggaaagccctcctgacagccaggaggactctttccagggaagacagaaatcaaaagacaaagctgccactccaagaaaagatggtcccaaacgttctgtactgtccaagtcagttcctgggtacaagccaaaggtcattccaaatgctatatgtggaatttgtctgaagggtaaagagtccaacaagaaaggaaaggctgaatcacttatacactgctcccaatgtgagaatagtggccatccttcttgcctggatatgacaatggagcttgtttctatgattaagacctacccatggcagtgtatggaatgtaaaacatgcattatatgtggacaaccccaccatgaagaagaaatgatgttctgtgatatgtgtgacagaggttatcatactttttgtgtgggccttggtgctattccatcaggtcgctggatttgtgactgttgtcagcgggcccccccaacacccaggaaagtgggcagaagggggaaaaacagcaaagagggataaaatagtttttgactctaatactgtatatgcatttaagtggaatatttggtgccatttacaacattattttcatgccaataaaagattttttttgcaaatta

SEQ ID NO: 76539 - DNA, 1079 bp, Homo Sapiens
  misc_feature (140)..(140): n is a, c, g, or t
  misc_feature (267)..(276): n is a, c, g, or t
  misc_feature (413)..(443): n is a, c, g, or t
tttgggcgctctctggggtgtggcccagaaatgtggaaaatggtgttttttgagagaaaaagacgtttttcctcttcgaggaggagacccgagagaggagcccggacccccaagaacacagagaggcagttcggcgctgnagcacgcaggcgagcaggtatgataggcgggggcagatggtcatacaagggtggccctgggttaaaaaagagtggttctgttaacaaaagtgagcgcctgtgttccacaggcccaaggaaattattnnnnnnnnnnagggtgtgccgttggaaaaaaaaggaaaattgcgagcttgttgttaaagaaggcgccttcccccccaaggctcttgtacccagggggtgagaggaccagggggaagggggggagaacaaaacaaggggtttgctttnnnnnnnnnnnnnnnnnnnnnnnnnnnnnnntttttccccccgggcgaaaacttggggggtcttgttttttgggccccccgtgttttggcgaaaggtttattggatttaggctggtttttgggaaattttccaaggggaaaagggattggttaccttttctttaaaaagggttccggtatgccaccggtatgggcaatttgcattctctccccattcccccttgaccttgcaaggaatttgggcatggcattgattcccattgattaagtttacattttttccttaaattaagggaactcatagtgccctttctcaccacaaaatccagagaggaatatcattcatgatagctaaggcagaagagtttagatgggcttaaaattcagtccagtaaagataatttttcattctatactaacaatttttttcctaggtcgctggatttgtgactgttgtcagcgggcccccccaacacccaggaaagtgggcagaagggggaaaaacagcaaagagggataaaatagtttttgactctaatactgtatatgcatttaagtggaatatttggtgccatttacaacattattttcatgccaataaaagattttttttgcaaattatgagcttaaaatctgcagttatttctgttaaaagctacgcttaccc

SEQ ID NO: 76540 - DNA, 527 bp, Homo Sapiens
caagaattcggcacgaggttgtgacccaaagtcagaccaacttcacctgccccattacaaaggaggaaatgaagaagccagtgaaaaataaagtgtgtggccacacctatgaagaggacgccattgttcgcatgattgagtccaggcaaaagcggaagaaaaaggcctattgccctcaaattggctgtagccacacggatataagaaagtcagatcttatccaggatgaagcacttagaagggcaattgagaaccataacaagaaaagacatcgtcattccgagtaggaaaagccacctgcctgcagggacaccagcagcctacctcctaccccagctgtctgttgagagcagtgctgaccccagcagttagggactggctgcatagcatacttgttgggggtaaaacttgttgcttttatgtgtgcttgaaaacatttttcaaagttacacaacagaaatgcaatcatattgtttatttttaagtgttctataatgttaaataaaactttgatcatctgaaaaaaa

SEQ ID NO: 76541 - DNA, 1112 bp, Homo Sapiens
  misc_feature (1010)..(1044): n is a, c, g, or t
gagattttacagccatttattgtgctccagtgaaatagaaaaaaaagaaagtgctctcattacaaacgccactgtcacatccacatagtatgccagtcgctgcaaaccaaaccgcgtgtgtccgctgggtctctgggcatgcagtttgctcccactgcgggaatggggtgggggcaggccgagcctgggctctgggggctttgctgggggagcttctggtcctgggggtacccacttgtgagggagtggggggacaactggaatagcgttgctcagtgcgtcctttgggcgctgttggggacacccggctctatgttggaccctgtagcactacagagcggagggtccccttccccccaatgggccccccgccagtctgctctctccaaactctaaaccctgtagaggttgagttctacaggggctggaggatgccatgcagggagagggggtcggctgggcctggctgggtccagccaagagcagcagcagcctcccttggggggaaaacagggaaggccttgtggccctaggcggaattgtagtagttgtgtgcgtggtggttgtgggcgggctcacccagctctgggtactcgggagtcagacagtacttggggtcgtagacctggcgtggcagcccatacaccgtcatgccccgctgcgaggcgcccttgttgctgcccatctgcaggctgacattgagcgtgtcgcagtgctccatgcccagccccggctcgaagatctgccgcttggtccctggcgcagtcatgccagcctggctggctcctttgttggtgcccatctgcaggctgatggtcgcctggtccagaggctggtctgtgcccagcttggggtcgtagaggtggcgccgggtgccataggccgtcatgccctgctggctggcaaacttgttggtgcccatctgcagcccaatgatgttccgcccttctcttagcttccccggccgtaatggccgaattcccgggcatatgtccggtaccgtcgactgnnnnnnnnnnnnnnnnnnnnnnnnnnnnnnnnnnncggccgcttcctcgcttcactgactcgctgcgctcggtcgttcagacgaggccgagcagcgcccatgt

SEQ ID NO: 76542 - DNA, 1018 bp, Homo Sapiens
gagcttcaaaacatgtgaggagggaagagtgtgcagacggaacttcagccgctgcctctgttctcagcgtcagtgccgccactgcccccgccagagcccaccggccagcatgtcctctgctcacttcaaccgaggccctgcctacgggctgtcagccgaggttaagaacaagctggcccagaagtatgaccaccagcgggagcaggagctgagagagtggatcgagggggtgacaggccgtcgcatcggcaacaacttcatggacggcctcaaagatggcatcattctttgcgaattcatcaataagctgcagccaggctccgtgaagaagatcaatgagtcaacccaaaattggcaccagctggagaacatcggcaacttcatcaaggccatcaccaagtatggggtgaagccccacgacatttttgaggccaacgacctgtttgagaacaccaaccatacacaggtgcagtccaccctcctggctttggccagcatggcgaagacgaaaggaaacaaggtgaacgtgggagtgaagtacgcagagaagcaggagcggaaattcgagccggggaagctaagagaagggcggaacatcattgggctgcagatgggcaccaacaagtttgccagccagcagggcatgacggcctatggcacccggcgccacctctacgaccccaagctgggcacagaccagcctctggaccaggcgaccatcagcctgcagatgggcaccaacaaaggagccagccaggctggcatgactgcgccagggaccaagcggcagatcttcgagccggggctgggccatggagcactgcgaaacgctcaatgtccagcctgcaagatgggccagcaacaaggcgcctcgcagcggggcattgacaggtgtatgggctggccacgccagtctaagaacccaagtactgtctgattcccagtaccagaactggtgagccggcacaaacaacaggcaaaactttaaattccctagggcccaggctcccgtttcccc

SEQ ID NO: 76543 - DNA, 1476 bp, Homo Sapiens
  misc_feature (320)..(320): n is a, c, g, or t
  misc_feature (1346)..(1360): n is a, c, g, or t
  misc_feature (1365)..(1428): n is a, c, g, or t
tttttgaatttacggtacattcaccggaacacttgactggtcgatttcagactcattaggaattgccctgagccagattcgcccgagagggcaaatgttttttagccattgtccaatcaataatagaggaaactggatcctaacgtacatgaatagaatcttcctgcacgtatgttctatgtgatgaaaaatgatttccagacagatactttgtcctctagtttgtactcccattgtcgacctattgtagacagtttatataatgaatctgggttcttttgtgacttttttgtgtcccaatccaacagcatcctgttttntaaaagagagaattagaaaatattaaatcctgcatgtaatatatctgctgtcatcttagttggaccaacttcccatttatttatcttaaaactatacagttacatcttaattccatccaaagaagatacagtttgaagacagaagtgtactctctacaatgcaatttactgtacagttagaaagcaaagtgttaaatggagaagatacttgtttttattaaacattttgagatttagataaactacattttaactgaatgtctaaagtgattatcttttttccccccaagttagtcttaaatcttttgggtttgaatgaaggttttacataagaaattattaaaaacaaggggggtgggtaataaatgtatataacattaaataatgtaacgtaggtgtagattcccaaatgcatttggatgtacagatcgactacagagtacttttttcttatgatgattggtgtagaaatgtgtgatttgggtgggcttttacatcttgcctaccattgcatgaaacattggggtttcttcaaaatgtgtgtgtcatacttcttttgggaggggggttgttttcttctgtttattttctgagactcctacaggagccaaatttgtaatttagagacacttaattttgttaatcctgtctgggacacttaagtaacatctaaagcattattgctttagaatgttcaaataaaatttcctgaccaaattgttttgtggaaatagatgtgtttgcaatttgaagatatctttctgtccagaaggcaaaattaccgaatgccatttttaaaagtatgctataaactatgctactctcatacaggggacccgtattttaaaatctccagacttgcttacatctagattatccagcacaatcataaagtgaatgacaaaccctttgaatgaaattgtggcacaaaatctgttcaggttggtgtaccgtgtaaagtggggatggggtaaaagtggttaacgtactgttggatcaacaaataaaggttacagttttgtaagnnnnnnnnnnnnnnngggcnnnnnnnnnnnnnnnnnnnnnnnnnnnnnnnnnnnnnnnnnnnnnnnnnnnnnnnnnnnnnnnntggctatatgatcttaatcattcattttcccttccccccctccccacg

SEQ ID NO: 76544 - DNA, 1966 bp, Homo Sapiens
  misc_feature (1528)..(1547): n is a, c, g, or t
ccacgcgtccgggaagaaatggatgatatggatagagacctaggagatgaatatggatggaaacaggtgcatggagatgtatttagaccatcaagtcacccactgatattttcctctctgattggttctggatgtcagatatttgctgtgtctctcatcgttattattgttgcaatgatagaagatttatatactgagaggggatcaatgctcagtacagccatatttgtctatgctgctacgtctccagtgaatggttattttggaggaagtctgtatgctagacaaggaggaaggagatggataaagcagatgtttattggggcattccttatcccagctatggtgtgtggcactgccttcttcatcaatttcatagccatttattaccatgcttcaagagccattccttttggaacaatggtggccgtttgttgcatctgtttttttgttattcttcctctaaatcttgttggtacaatacttggccgaaatctgtcaggtcagcccaactttccttgtcgtgtcaatgctgtgcctcgtcctataccggagaaaaaatggttcatggagcctgcggttattgtttgcctgggtggaattttaccttttggttcaatctttattgaaatgaatttcatcttcacgtctttctgggcatataagatctattatgtctatggcttcatgatgctgggtgctggttatcctgtgcattgtgactgtctgtgtgactattgtgtgcacatattttctactaaatgcagaagattacaggtggcaatggacaagttttctctctgctgcatcaactgcaatctatgtttacatgtattccttttactactattttttcaaaacaaagatgtatggcttatttcaaacatcattttactttggatatatggcggtatttagcacagccttggggataatgtgtggagcgattggttacatgggaacaagtgcctttgtccgaaaaatctatactaatgtgaaaattgactagagacccaagaaaacctggaactttggatcaatttctttttcataggggtggaacttgcacagcaaaaacaaacaaacgcaagaagagatttgggctttaacacactgggtactttgtgggtctctctttcgtcggtggcttaaagtaacatctatttccattgatcctaggttcttcctgactgctttctccaactgttcacagcaaatgcttggattttatgcagtaggcattactacagtacatggctaatcttcccaaaaactagctcattaaagatgaaatagaccagctctcttcagtgaagaggacaaatagtttatttaaagcatttgttccaataaaataaatagagggaaacttggatgctaaaattacatgaataggaatcttcctggcacttagtgtttctatgttattgaaaaatgatgttccagaaagattacttttttcctctttattttttactgccattgtcgacctattgtgggacatttttatatattgaatctgggttcnnnnnnnnnnnnnnnnnnnncccaatccaacagcatccttttttttaaaagagagaattagaaaatattaaatcctgcatgtaatatatctgctgtcatcttagttggaccaacttcccatttatttatcttaaaactatacagttacatcttaattccctccaaagaagataccagtttgaaaacagaaaggtactctctacaatgcaatttactggaacatttaaaaaagcaaactgttaaatggaagaagatactttgtttttatttaaccatttctgagaattaaaatacacctacattttaactggaatgggccaaaagggaattaatcttttttttcccccaaagttaagcctttaaatttttttggggtcttggaaatgaaggctttttaccctaacaaattctattaaaaaaccaagggggggtgtgggct

SEQ ID NO: 76545 - DNA, 657 bp, Homo Sapiens
caggacaggcccatttgtaggagcccattggtattccaagtgagaccaccaactttatagtccccatgtccctgtcccaactccacagcttctagagaatccagctgcaggggaagcctgtccccaactcccattctcctgtctggaggcagagacgggatcaaatgagcccccaggggccccaggaggccactgcctctgcaggagtcagcctgcttcacactgggagaagggaagagggggcaagagagagacaagaaaccaaagcttgctaaaatgtttctgagatggcatggggtgtggttatattctgtatcaaaattggaagtgccttccttccacattacctaagaaccagttaggactctgaagacaccacaagagtgagaaatggttaagttcagtgtccgtgacaaaaatctcctttgtacaagataaaattatccttggggaggaggactgactgactaggaggcagaagggaaacagttcccatgtacagacttggcatggggatcaaaagcgggatgagggctgactgttcccataagccaaggacccatggttcgtcctcccacccaaagtgacaatcacactcacactgtggtgtgttttatattttttaataaagtttgtaatccaatggacacacaaaac

SEQ ID NO: 76546 - DNA, 652 bp, Homo Sapiens
tgcagtcgctctggaaaacagtatggcgttcctcaaaagaattaaaccagaattaacacatgatccagaaatttcatagtactcaaaactactgaaagcaggaactcaaattgatatctgtacaccagtgttcatagcggcattattcacaatagccaaaaggcggaaacaacccaaatgtccattgacgcatgaccagtgtgatagttaatttcatgtgtcaacttgaccagcccagggaatacccggatagctggtagaaaattatttctgggtatgtctgtgagagtgtttctggaagaggttagtatttgaatcagactgagtaaaaggatccaccctatccaacataggtggccatcatcgaatccactgagggcgcaaatagaacaaaaaggtgaagaaaaggtgaattctctcctttcttgagctgggacatccaacttctcagacatcagagctcctggaggccttcagactccgagacattacaccattggctcacctggtcctcaggtctttggacttggaatgaattacaccattggctttccaggtcttccagcttgcagatggcagattgtgggacttttcagcctccataactttgtcatccaattcccataataaatcgcctcttatatctgtaaaa

SEQ ID NO: 76547 - DNA, 1438 bp, Homo Sapiens
gggggctaccggccgcgactccgggcttggccccggccctagctcgtcggctgtgtattggggcgcgtggaggctgcagtcacggtggcgcccgcggggacggaggagggaatgagtgaagaggagcaaggctccggcactaccacgggctgcgggctgcctagtatagagcaaatgctggccgccaacccaggcaagaccccgatcagccttctgcaggagtatgggaccagaatagggaagacgcctgtgtacgaccttctcaaagccgagggccaagcccaccagcctaatttcaccttccgggtcaccgttggcgacaccagctgcactggtcagggccccagcaagaaggcagccaagcacaaggcagctgaggtggccctcaaacacctcaaaggggggagcatgctggagccggccctggaggacagcagttctttttctcccctagactcttcactgcctgaggacattccggtttttactgctgcagcagctgctaccccagttccatctgtagtcctaaccaggagcccccccatggaactgcagccccctgtctcccctcagcagtctgagtgcaaccccgttggtgctctgcaggagctggtggtgcagaaaggctggcggttgccggagtacacagtgacccaggagtctgggccagccaccgcaaagaattcaccatgacctgtcgagtggagcgttcattgagattgggagtggcacttccaaaaaattggcaaagcggaatgcggcggccaaaatgctgcttcgagtgcacacggtgcctctggatgcccgggatggccaatgaggtggagcctgatgatgaccacttctccattgggtgtgggctcccgcctggatggtcttcgaaaccggggcccaggttgcacctgggattctctacgaaattcagtaggagagaagatcctgtccctccgcagttgctccctgggctccctgggtgccctgggccctgcctgctgccgtgtcctcagtgagctctctgaggagcaggcctttcacgtcagctacctggatattgaggagctgagcctgagtggactctgccagtgcctggtggaactgtccacccagccggccactgtgtgtcatggctctgcaaccaccaggcaggcagcaagtgaagccccagctggactcatggatgtgcaccctttgctccctgctctttctgcctctgggctcatgtatctgcgcagctctggtaccctctgtgggtgccatctctacctctgacacagactgcctgccttgaagctgagaaggcacagggcaaggagccaaggaccacagagcctcagccagcccaggatccgtcctcattttattggtgatgatgaatgggaatgaaatcagggggctgtctactagagcctggaataaatatgctgctttgtggattttt

SEQ ID NO: 76548 - DNA, 1072 bp, Homo Sapiens
  misc_feature (170)..(170): n is a, c, g, or t
  misc_feature (209)..(209): n is a, c, g, or t
  misc_feature (297)..(297): n is a, c, g, or t
  misc_feature (325)..(325): n is a, c, g, or t
  misc_feature (343)..(343): n is a, c, g, or t
  misc_feature (356)..(356): n is a, c, g, or t
  misc_feature (369)..(370): n is a, c, g, or t
  misc_feature (376)..(376): n is a, c, g, or t
  misc_feature (393)..(393): n is a, c, g, or t
  misc_feature (422)..(422): n is a, c, g, or t
agaaagacaaacaatatggtccccaaccctaagggacttgaccgctgagaccctttttttccattattcatctgagactccgtttatgtcacagtgaacccatcattttgtctaacagaccccccatgaatgagccctgtttccctagcattgagtgcaccccgtgtctntcaggactgtgtgccaaaagctgcgttcccggatacacngtacccagagttggccagccaccgcaaagaatcaccatgactgtcgatggacgttcattgagatgggagtgcacttcccaaaaatgcnaaagcgaatgcgcgccaaaaatgctgcntcgagtgcacacggtgcntctggatgcccgngatgcaatgagtnnggagcntgatgatgaccacttcnccatggtgtggctcccgcttggatggtcnttggaaaccgggcccaggttgcacctgggaattctctacgaattcagtaggagagaagatcctgtccctccgcagttgctccctgggctccctgggtgccctgggccctgcctgctgccgtgtcctcagtgagctctctgaggagcaggcctttcacgtcagctacctggatattgaggagctgagcctgagtggactctgccagtgcctggtggaactgtccacccagccggccactgtgtgtcatggctctgcaaccaccagggaggcagcccgtggtgaggctgcccgccgtgccctgcagtacctcaagatcatggcaggcagcaagtgaagccccagctggactcatggatgtgcaccctttgctccctgctctttctgcctctgggctcatgtatctgcgcagctctggtaccctctgtgggtgccatctctacctctgacacagactgcctgccttgaagctgagaaggcacagggcaaggagccaaggaccacagagcctcagccagcccaggatccgtcctcattttattggtgatgatgaatgggaatgaaatcagggggctgtctactagagcctggaataaatatgctgctttgtggattttacaaccatacacaaccacaacaaaacaaaaagggcg

SEQ ID NO: 76549 - DNA, 1463 bp, Homo Sapiens
  misc_feature (1247)..(1264): n is a, c, g, or t
  misc_feature (1266)..(1278): n is a, c, g, or t
  misc_feature (1280)..(1283): n is a, c, g, or t
  misc_feature (1285)..(1290): n is a, c, g, or t
  misc_feature (1292)..(1295): n is a, c, g, or t
  misc_feature (1297)..(1298): n is a, c, g, or t
  misc_feature (1300)..(1307): n is a, c, g, or t
cagtcgacggtaccggacatatgcccgggaattcggccattacggccgggggcttacatatgttttatttaacaaaattctagtcaagggataagggcataatgaagacaagcttcagttatgaaagtacaaactatttgtgtgattaatttttaaaaatgacattaagaagcccattgtaaaataatatttgcagtcaaatggtttttcttgctgtaagtcctgttgtagctatgtttagggtagtggttctcatctaccttggagtgcataagacttacctagcaggcttgtttaaaaagttcagattcctagctttgtacccagggattgcctcaggtggtatgggctgtggtcctggagtcatcacttttataaatagtggttcagagaccacagagagagactgcttcatcgaatgggaagtaccaaggagaaagtacaattcagtattgtctggaggcaagtggacactttgtacctgaggtttagaataggtggtctcttgccagtacaatccccaggcgttttctgtgttcagaagtagtaagaatgcctttaattcagaggattatctaagctctttaaagctgtttttctccattgtcatagtgccttctctgaaaaatgaatgtacaggtatcctattttctaatgtaattaggattttttaaaagcaatttttgatagtttttcttttaaaaagtaaaattcagcactgtgacttgaacccccaaatctttcacatacaggtgaaacattaagccacaaataaaaataatgaacaagaaagaagacaagatcctaattcctgtcattagtgacctaagtaccccatatcagaaactttgcaaaacagatctagggacagaagggctttgaaagacatttttctttggggcaaatttcgtgtgccagaactacagtttaaatgtttttatgagcaagggaaggtagcattgattcccatagctttctaattagatacatgctgtcatggatgtaagccttaaaggagttaatactaatcttgtacatacacaaattttcctcaggtttttttattttaaaaaatgatttgttaaaagtactgtctgctagacccttgcctttgagtggctttgaaacttaatatagtttttaaaaagtgcaatgggatgagattatgctattagtatattaaaagcatgtttctgttttactccaatttgtaagatcatttaatggaataaagatcacaacacccnnnnnnnnnnnnnnnnnnannnnnnnnnnnnntnnnnannnnnnannnnannannnnnnnnaaaaatggtcggcccgccctcgcccctcaagaaagctttctaagaccatttcgtttgggcgcgcgggccccagtaaggaaagggaacatgggccataacctggtttcctaaggaaaaccccggggcaatggaactaagggccttgaaatttctccc

SEQ ID NO: 76550 - DNA, 815 bp, Homo Sapiens
  misc_feature (187)..(187): n is a, c, g, or t
cctgaactgtatgggcactctcagccctggtttttcaatccccaggtcgggtaggacccctactggcagccagcctctgtttctgggaggatgacatgcagaggaactgagatcgacagtgactagtgaccccttgttgaggggtaagccaggctaggggactgcacaattatacactatttatttnatttattctccttggggttggtgtcaggggcgagccaaaccccacctctatgccctgagccctggtagtccagagaccccaactctgccctggcttctctggttcttccctgtggaaagcccatcctgagacatcttgctggaaccaaggcaatcctggatgtcctggtactgacccacccgtctgtgaatgtgtccactctcttctgcccccagccatatttggggaggatggacaactacaataggtaagaaaatgcagccggagcctcagtccccagcagagcctgtgtctcaccccctcacaggacagagctgtatctgcatagagctggtctcactgtggcgcaggccccggggggagtgcctgtgctgtcaggaagagggggtgctggtttgagggccaccactgcagttctgctaggtctgcttcctgcccaggaaggtgcctgcacatgagaggagagaaatacacgtctgataagacttcatgaaataataattatagcaaagaacagtttggtggtcttttctcttccactgatttttctgtaatgacattatacctttattacctctttattttattacctctataataaaatgatacctttcatgtacagagcctc

SEQ ID NO: 76551 - DNA, 1040 bp, Homo Sapiens
cttgagaaggagaaagcagaaattgaacgcatgcgaaacctgactgaggaagagaggagagctgaacttcgggcaaacggcaaagtcattaccaacaaagctgttaagggcaaatacaagttcttacagaagtattatcaccggggtgccttcttcatggatgaggatgaagaagtatacaagagagatttcagcgctcctaccctggaggatcatttcaataaaaccattcttcctaaagtcatgcaggtcaagaactttggacgctcaggtcgcaccaaatacactcaccttgtggatcaagataccacctcctttgactcagcttggggccaagagagtgcccagaacacaaagttcttcaaacaaaaggcagctggggtacgagatgtatttgagcggccatctgccaagaagcggaaaactacctagggtccaactgcttattcttccaactgtggaacacaaggggagtctcagcatctggtccttgatttggttttttcattgtttccttggcccctgtatccagatattggacttactgctatacttgtgatactgggtagcccagactttgaaggtgctttgtgaggtttggactcatgctgagaaacccacaggaaagcactgtccaggtaggattagaggcttcccacttaaaactatttctgagaaatcttaggttttatcactgctatggtttcccatatttacttgggactgttctgactttctttttccagcccttagcttgggttagaaaagtggacatgtaagtgaacaatgcattacttctaccttaggtttaggagtaatatacccggaaatctaagctcatggaaacatgttttccatttttgcttggagtccgtttttctagttgtacatactttttgatccatatatgtgtgcatgtcaagaaataaaagaatcacacaacaaggagatttttagcatgatactggaaataaaatgtccaagctgacaagtattaattgcctattaaagtaaaagataacaattgtcaggcaaaaaaa

SEQ ID NO: 76552 - DNA, 728 bp, Homo Sapiens
tccacactgaccccaatgccgaggaggcccctgagaacttaccctacctctcggacaaagatggcagctccagccacaggcagcccacgtcgaaagccgagtgccccaatctctgttttgaaggaaaccttaccccaaagcttctacactctgacttagctcctactctgctggagtgaaaatctacccacgacgctcacaaacttataattcctcctcaccacaagtttatgtgttaaaaaccatcatcataaaaggaaatgagacccgtatctgaaggaaacagatgttcggtacacggacgacgccgactctcccatcaccaagctgccctcggttgcccaggagagccacagtgccttgagaacataagcaatttagtgaacagagttcttttcagaatttcctttttcttaagtaagcatctctgttacttaatttctcaccacagctagatgtctataatctgccccaaaaagaaaagaaagcgtgtagatgatttacctcttaagtctcaatctcatggtgaaactcctcacacggtacctgcttctgttggccggaggacgatgccctgaacctcttggagcctttttctgttttaattaaatgcatggcctgcctttatatggcctcaaataagtgggttccagaactccatccctgggaagttaccattggaagtcccaagaggaatactgcttctttcataaacatggtcctctcct

SEQ ID NO: 76553 - DNA, 1007 bp, Homo Sapiens
  misc_feature (133)..(142): n is a, c, g, or t
tagctagtacgaggctgggtgttaattcggcacgaggcaagacagcagcagttgctaaagaaaattgaacacgctcggacttgctagacgcttctcaaaactggacagtcactgccactttgcacattttgannnnnnnnnnaaacaaacattgtgttgacattaagaatgttggtttactttcaaatcggtcccctgtcgagttcggctctgggtgggcagtaggaccaccagtgtggggttctgctgggaccttggagagcctgcatcccaggatgctgggtggccctgcagcctcctccacctcacctccatgacagcgctaaacgttggtgacggttgggagcctctggggctgttgaagtcaccttgtgtgttccaagtttccaaacaacagaaagtcattccttctttttaaaatggtgcttaagttccagcagatgccacataaggggtttgccatttgatacccctggggaacatttctgtaaataccattgacacatccgccttttgtatacatcctgggtaatgagaggtggcttttgcggccagtattagactggaagttcatacctaagtactgtaataatacctcaatgtttgaggagcatgttttgtatacaaatatattgttaatctctgttatgtactgtactaattcttacactgcctgtatactttagtatgacgctgatacataactaaatttgatacttatattttcgtatgaaaatgagttgtgaaagttttgagtagatattactttatcactttttgaactaagaaacttttgtaaagaaatttactatatatatatgcctttttcctagcctgtttcttcctgttaatgtatttgttcatgtttggtgcatagaactgggtaaatgcaaagttctgtgtttaatttcttcaaaatgtatatatttagtgctgcatcttatagcactttgaaatacctcatgtttatgaaaataaatagcttaaaattaaatgatgcaactcaa

SEQ ID NO: 76554 - DNA, 958 bp, Homo Sapiens
  misc_feature (472)..(484): n is a, c, g, or t
  misc_feature (581)..(758): n is a, c, g, or t
  misc_feature (770)..(770): n is a, c, g, or t
  misc_feature (786)..(786): n is a, c, g, or t
  misc_feature (898)..(898): n is a, c, g, or t
tggtgtgtgtgttaatttaatcatacaaatattcatttatacaataaggaaaaacctcctcatctttatctcctcctaggcaccatgaggccccaccacaaacatccagctggctttctacacacaccactgtccaggtgggaagggcagccactgctgctcctgcattcacccaaggaaacaaaggaaaggtgcggcgaggcagggtggggtgagtaatcagcttgcacttctgagccctggcaaccctaccatcctctcctgctgggctcagattgaatttggggaggtatttattctcatgcccatttcccaccatggccaccctcaggccacaccagctgtttggtgaggttctctccaggctggaagtaactttgatgggcttaaggttacagccagtccttatgggggagagaaggctgactgcttcttgtagaaaaatgccccaaattcaactgtcctcacggcnnnnnnnnnnnnngcatgcacacgtgcacatccatccacacacacacaccttactccatgcacactgacagattcttcccaagtctgaaccccctcgtgccgaattcttnnnnnnnnnnnnnnnnnnnnnnnnnnnnnnnnnnnnnnnnnnnnnnnnnnnnnnnnnnnnnnnnnnnnnnnnnnnnnnnnnnnnnnnnnnnnnnnnnnnnnnnnnnnnnnnnnnnnnnnnnnnnnnnnnnnnnnnnnnnnnnnnnnnnnnnnnnnnnnnnnnnnnnnnnnnnnnnnnncgctttcagtcnggaaactgtcgtgcanctgcattatgatcggcaaccgcgggaaaggcgtttgcgtatggcgctctcgctctccctaaatatcctcgttgtcttcggtgcgggagggtacaccatcaaagggtgtcgtntcaagacacggaaccaggaaaattgtaaagcacaaagcagacttaaaggcgtttggtttt

SEQ ID NO: 76555 - DNA, 2790 bp, Homo Sapiens
  misc_feature (162)..(216): n is a, c, g, or t
  misc_feature (2612)..(2658): n is a, c, g, or t
  misc_feature (2664)..(2676): n is a, c, g, or t
gcgatggaatatgacagtggttaagaaagcaggctggtacgctccggaattcccgggatatcgtcgaccacgcgtcgtgttgaggctaccaagaagaaatccatgcagccacttgggtttagttataggcatcagtctaacaagtcattgaggtcactcggnnnnnnnnnnnnnnnnnnnnnnnnnnnnnnnnnnnnnnnnnnnnnnnnnnnnnnnttattttgcctacagaaaggttgtagtttgagcacatgttaatttttttccctctttccccactttgtatttttttaaataagggataacatattctttatagaatagtgcttgttctggaagagattcaggtgaaaagttggcgtggcatgtttgaggactctgcggatcagtgctacaggagtacatctgccctgccacatgactccagaagtctctgaccccatttgtttttaatggcatcagccaatgagttatcacccttttcctcctcttttctctttaatcttctgttgatttacacctttgacatttgtattcgtcaaccctgtggcttgttagcatcagaacctctctgaagaccaaacttccctgtgtggccagcagaggaagccttgaggatagatctcgggtgacgtgggattttctaagcctgagaggtgtccttctgcacacccttgtaacaattaaaattgcttttcttccatgtttctcttggcagagagaaatgccatcatgcttactgctcttttggattcttcatgcagtggcttcccatttgctctgggaacagtgcctctgtgctggttatatgtatgcaccacatgtgcacacacgggtgtcggtgcaactcaccagcaggtgtgcagtaggcaagcttgaaggtggcccatgcttctctgttgtcacacaacacctttccctgtttctcttcagttgtcctctgatattttcacagcctgttagtggcggctgatctgtagaggtatgaaaatacagccccaaagggggaatttgtcatgggaaagggccagccactgactacttgatcttggagaccacatttagatggaaatgagaggacctccacagccccgcctccctgccaggatgctagattattggctgggaggtgggcaagtggcagcccagctgaagcaagaggctgattgactggctgctcactcaggcaggtggcctgccctggcatcctgtagattctgagcaggttgagatgtggatatctccatgggaagcttgaaccaggctagaacagctgtctgccaaagatacaagaatatgcaaagtccctcttacccccctccttccctcaagtcttagttggtttgagagccagggatatggatccagggtgctgttgcagggtcacctgcctgttaccacacccccatccagctgggtggtgggtgagggtgtgagacaggcagggagaccaggtaatgagtggctgcaaggagtcatatagcctgggtgtgggtgagggtctgcctgcctgtttctgtctgggtgtctgagttccaaaaaatgtgtgttgtttgttcctcctcatcctcttctgagactgttgtttttttagagcttgattgtgggagaaaagcttgtgtgaaattccctcttcacctccccaccccccaaaaaataaaagggggcataaactttattccactggagaagccctgggggtggctggagccagcctgctgagaagcgtggtgcagctggggtctgggacttcactagagcttactctggagcacctattttctgtgcacatgggagtgctccactccctaacagagcagagggaagtctctgccaggtacccacgccacaggcctcaggatggctttttgtctgagggcctcattaggcccagactgctgctgctggtaccagtctcctgagacactgcctccctggagcccatgcatgcccagctgttcttactgcttaatagccctggaagcagcacatctccactggtccctggcacgattgtgggaggcttcacaacccctgctttcctgacttcctcttctgcccaacactgggtgccccttcccagtttcccagcaggggcttcatgggccaccgtcagtgggtctgggcctgccagagtcgtcttgctcttcctcttgcttctaggcaaccacacttggcaagttaaatgtcccaagcaccttgtctcccttcccaagaacaaaccatttctgtgcacatccttggaggcgagatgagctccttgcagagggccagagtaagtgcaagtcatggagtgcaggcagaggggtccatggcttccccagcccagggaaggtatcaggatcattcattctctctcccctcactggtatggggttcagacaaatgcctagggcccctctctgctcccctgcctagtggggtggtagtggctacctctcagccccaatagtccctgctcctcttagaatcttcaccaagtggcaggccacctctgggcaggaccacctgcgtctggcacccaggaggtgaggcagacaccatggttaggtgatagggtctgaacccagttggggagacagaggggttcagacttgggaagaatctgtcannnnnnnnnnnnnnnnnnnnnnnnnnnnnnnnnnnnnnnnnnnnnnncatgcnnnnnnnnnnnnngccgctgaggacagttgaatttggggcatttttctacaagaagcagtcagccttctctcccccataaggactggctgtaaccttaagcccatcaaagttacttccagcctggag

SEQ ID NO: 76556 - DNA, 841 bp, Homo Sapiens
  misc_feature (58)..(58): n is a, c, g, or t
  misc_feature (201)..(201): n is a, c, g, or t
  misc_feature (555)..(570): n is a, c, g, or t
  misc_feature (572)..(573): n is a, c, g, or t
  misc_feature (575)..(575): n is a, c, g, or t
  misc_feature (577)..(577): n is a, c, g, or t
aaaacgttcagtatccagtccctttcaaagacatgaagagctcatatggagataaccntacgtaagaatgtggaaagctttcattatcacacaaccttcgaatacctgtgaaaatgaatagtggaggacaggtctacaagtatctacatatctaaagaatatggaaagtcttcagtttgctttctgggtttcagacttgtntgggagctcacccctttctcctgtttctcacttttggaataggaatctctatcctgtgcctgtctcatattttggaaatacatgactagtttggttttcaccggttcggagctgaagaagaattttgcctcagcatgaattgagtctcatccatatctgagtgatgtgatattgagatgacactttggagtttgagtttaaacattaggcttcatgctggaattaactgagacttttgaggcctttgggatgagatgaatatattttacatgtgatgacatggattttgggggccagaggtgtaatgttttggctgagtgtatgccacctcagattcatatgttgaaaccttannnnnnnnnnnnnnnntnnancnacaatgtgatggtatttggaggccctgtctctggtggtttttaggattggaggacatcatgaagatggaggccttgtaattgggattagtttcctgataggaatccctagagagctagctttgcccttcaccatgagagggtgcagtgagaagatagctatctttgaaccgggaagcaggcccttaccagacatggactatgccagtgccttgatattggacttcccagcctcccaaaccatgagaaataaatgtttgttgatt

SEQ ID NO: 76557 - DNA, 1112 bp, Homo Sapiens
gggactggccttggtcacaggttgagggggttctttccccgggcggtttggggtattggagtgaggtcaggggcgtgcccttggagtgcgcggccgctgtgacctctggccccttacccacattttactttctgccctgtgacctctgatccctgccctctcctccccgtgcccggtccggcgtgttctgtcctacctcaggtgcggggagcggcatcggccgagcggtcagtgtacgcctggccggagagggggccaccgtagctgcctgcgacctggaccgggcagcggcacaggagacggtgcggctgctgggcgggccagggagcaaggaggggccgccccgagggaaccatgctgccttccaggctgacgtgtctgaggccagggccgccaggtgcctgctggaacaagtgcaggcctgcttttctcgcccaccatctgtcgttgtgtcctgtgcgggcatcacccaggatgagtttctgctgcacatgtctgaggatgactgggacaaagtcatagctgtcaacctcaagggcaccttcctagtcactcaggctgcagcacaagccctggtgtccaatggttgtcgtggttccatcatcaacatcagtagcatcgtaggaaaggtggggaacgtggggcagacaaactatgcagcatccaaggctggagtgattgggctgacccagaccgcagcccgggagcttggacgacatgggatccgctgtaactctgtcctcccagggttcattgcaacacccatgacacagaaagtgccacagaaagtggttggacaagattactgaaatgatcccgatgggacacttgggggaccctgaggatgtggcagatgtggtcgcattcttggcatctgaagatagtggatacatcacagggacctcagtggaagtcactggaggtcttttcatgtaactgcctcaaggaccctggactctgctcacccccccaccactctgcctggcctcctgctgatgaggactctaagttcccaggatacaaaaggggtggcagtgtatggttcaggaatgctgaatatgggaagcaggggtgcttgtgaccctaataaattccaagtcctcttccctgcc

SEQ ID NO: 76558 - DNA, 1070 bp, Homo Sapiens
  misc_feature (29)..(29): n is a, c, g, or t
  misc_feature (84)..(84): n is a, c, g, or t
  misc_feature (112)..(112): n is a, c, g, or t
  misc_feature (134)..(134): n is a, c, g, or t
  misc_feature (140)..(141): n is a, c, g, or t
  misc_feature (143)..(143): n is a, c, g, or t
  misc_feature (148)..(148): n is a, c, g, or t
  misc_feature (150)..(150): n is a, c, g, or t
  misc_feature (153)..(153): n is a, c, g, or t
  misc_feature (159)..(562): n is a, c, g, or t
  misc_feature (836)..(854): n is a, c, g, or t
ccgcagtcgaccgagagccacgagagctncagggaacgctgtatctatagtctgtccgttccccactctgactgagctcgattntgtatctcgtcagggggcgagcctatgnaaaacgccagcacgcgcccttntacgtnncntgccntntgntgcccnnnnnnnnnnnnnnnnnnnnnnnnnnnnnnnnnnnnnnnnnnnnnnnnnnnnnnnnnnnnnnnnnnnnnnnnnnnnnnnnnnnnnnnnnnnnnnnnnnnnnnnnnnnnnnnnnnnnnnnnnnnnnnnnnnnnnnnnnnnnnnnnnnnnnnnnnnnnnnnnnnnnnnnnnnnnnnnnnnnnnnnnnnnnnnnnnnnnnnnnnnnnnnnnnnnnnnnnnnnnnnnnnnnnnnnnnnnnnnnnnnnnnnnnnnnnnnnnnnnnnnnnnnnnnnnnnnnnnnnnnnnnnnnnnnnnnnnnnnnnnnnnnnnnnnnnnnnnnnnnnnnnnnnnnnnnnnnnnnnnnnnnnnnnnnnnnnnnnnnnnnnnnnnnnnnnnnnnnnnnnnnnnnnnnnnnnnnnnnnnnnnnaagaattcggcacgaggatatccccaaaaaagtgtacaatatgcacacttggaaaatacaaaattaaaaaaattgtaagcaacaggtgagcttcatatttataagaatgtgaaaagaagtcccatttttagcactgttgtataaagaattgtcttttgatgcgaagttcatgaattgtcctcctgttgggaccacactttacaaaaacactgtgtttttgaaacgagattacagagcaagatagagcatcttagcaatgtcatcttagtaaagnnnnnnnnnnnnnnnnnnnactactttatcaaaacatgtcccttaggtgtgtaggattcatttttaaaattcttcctagaaataatatacaaaggagaggcatattgtacacttttttggggatatgcttagtaatgctacgtgtgatttttctggaggttgataactttgcttgcagtagattttccttaaaagaatgggcagttacatgcatacttcaaaagtattttcctgt

SEQ ID NO: 76559 - DNA, 1738 bp, Homo Sapiens
  misc_feature (1269)..(1280): n is a, c, g, or t
ggaccgcgtcaagaagggcggggaagaagagcggcaagaagagttacctcagcggcggggcgccgcggcgggcggcggggcgccgacccgggcaacaagaagtgggagcagaagcaggtgcagatcaagaccctggagggcgagttctcggtcaccatgtggtcctcagatgaaaaaaaagatattgaccatgagacagtggttgaagaacagatcattggagagaactcacctcctgattattcagaatatatgacaggaaagaaacttcctcctggaggaatacctggcattgacctctcagatcccaaacaactggcagaatttgctagaatgaagccaagaaaaattaaagaagatgatgctccaagaacaatagcttgccctcataaaggctgcacaaagatgttcagggataactcggccatgagaaaacatctgcacacccacggtcccagagtccacgtctgtgcagaatgtggcaaagcttttgttgagagttcaaaactaaaacgacaccaactggttcatactggagagaagccctttcagtgcacgttcgaaggctgtgggaaacgcttttcactggacttcaatttgcgcacacatgtgcgaatccataccggagacaggccctatgtgtgccccttcgatggttgtaataagaagtttgctcagtcaactaacctgaaatctcacatcttaacacatgctaaggccaaaaacaaccagtgaaaagaagagagaagacccttctcgaccacgggaagcatcttccagaagtgtgattgggaataaatatgcctctcctttgtatattatttctaggaagaattttaaaaatgaatcctacacacctaagggacatgttttgataaagtagtaacaggttactatcaaacactttactaagatgacattgctaagatgctctatcttgctctgtaatctcgtttcaaaaacacagtgtttttgtaaagtgtggtcccaacaggaggacaattcatgaacttcgcatcaaaagacaattctttatacaacagtgctaaaaatgggacttcttttcacattcttataaatatgaagctcacctgttgcttacaatttttttaattttgtattttccaagtgtgcatattgtacacttttttggggatatgcttagtaatgctacgtgtgatttttctggaggttgataactttgcttgcagtagattttctttaaaagaatgggcagttacatgcatacttcaaaagtattttcctgtnnnnnnnnnnnngttatataggttttgtttgctatcttaattttggttgtattctttgatgttaacacattttgtataattgtatcgtatagctgtattgaatcatgtagtatcaaatattagatgtgatttaatagtgttaatcaatttaaacccattttagtcactttttttttccaaaaaaatactgccagatgctgatgttcagtgtaatttctttgcctgttcagttacagaaagtggtgctcagttgtagaatgtattgtaccttttaacacctgatgtgtacatcccatgtaacagaaagggcaacaataaaatagcaatcctaaagcaagaatatggcagaacaagatctgtaagcacagtcttattttcttttgttgtccagaatacttataattcttgagcctcccagaaattggaagctaaataaagcaactcaagtttcctttattttgcaaaaaaaa

SEQ ID NO: 76560 - DNA, 1043 bp, Homo Sapiens
  misc_feature (541)..(551): n is a, c, g, or t
  misc_feature (560)..(577): n is a, c, g, or t
  misc_feature (851)..(859): n is a, c, g, or t
gagagatggacatgcgtcccctccctccccccgccaagtgctcacacacaaccacacacgcagatggaggcgcctcactgggaggtgccccgccagccctgggcagtgtcaggcaggactcactcaccgctgagcagatgagagaagttttagtcttggcgggtggaaatgagacgaagccacagttatcacactccagactcctgcccttttattttctccagccccttcttccttcagcaaaatctaggactcccgagtggcttccagggggccgtcagtcctcagccgcgcctgtgtccggtgcccgaggggcgggcggcggtgtctgtatgtatgtgtacatatgcacatagaccttagagtgtatagttaacaaacgcccatctgctcacccatgcccacccagcgccgccgccgctggctctcggggcacctggcaggaggcgggtgtgtgaatagcatatatttttacatgtactatatctaggtgtgtgtacaagtgtgtgtaaaaatatataccttgtgtgtaagcagcccnnnnnnnnnnnggtctccannnnnnnnnnnnnnnnnngcactcctaagggcccatctgcccagcctctgagttttctgttctatttctttcttaaccccaattatccttctctctctcctgcccccgcatcccactcccagggtgtcacgagccctgagctgcaatggcccgggcctgcagggcggggtaggggagggcaggggctcagccccgaagccagctcagtacctgaggggctgctctatgctgtgtatgcgcctctctggcatccgagacatcctcttggctggcgcttgctgcaggggggaannnnnnnnngtccccaggtgaaccaagggtctgctccggggcccatttccagcttggccgccgtctgtgaccttgggcaagtcacttgacctctgtgtgcctcaacttcctcctctgtaaaacggggacagtccctgcccctccctacctcacaggcatgttgtgagaataaatgaggtaacgtgtaaaaaaa

SEQ ID NO: 76561 - DNA, 1061 bp, Homo Sapiens
ccccgtgccgttataatcagtgccgcaggttccgttgaagggccgtgcgcacccattattgtgtgtccatcatagcaccccgggttacattgtgctcaggtcgtatgtgtggaatgtgagcggatacatttcacacagaaacgttttgacggattcgaatttatacgctcatataggggaattggccctgagcccaagaattcgcaccgagggcggcttcgtgggcagcgagagtcacagacaagacagcaagcaggatggagcactaccggaaagctggctctgtagagctcccagcgccttccccaatgccccagctacctcctgatacccttgagatgcgggtccgagatggcagcaaaattcgcaacctgctggggttggctctgggtcggttggagggcggcagtgctcggcatgtagtgttctcaggttctggcagggctgcaggaaaggctgtcagctgcgctgagattgtcaagcggcgggtcccaggcctgcaccagctcaccaagctacgtttccttcagactgaggacagctgggtcccagcctcacctgacacagggctagaccccctcacagtgcgccgccatgtgcctgcagtgtgggtgctgctcagccgggaccccctggaccccaatgagtgtggttaccaacccccaggagcaccccctggcctgggttccatgcccagctccagctgtggccctcgttcccgaagaagggctcgagacacccgatcgtgaagacctgctgagccagcctgttctccgggcctgaatgtctggggtgcttgtgccttttctgagaagcgttgtgactgctcaacatccccatcaaggtttgagtccacaaaagtggacctccctatcatgcttccccttccctctagcatgtgggaagggactgctgtgaagaatgacagatgtggggcctctgccaagttctgcattgctaaataagggcttcctctgccttctacctacagtgcatttgaactgccttctgaaagaggtccagggagggatttaggaaataaagtttctacctatttgaaa

SEQ ID NO: 76562 - DNA, 481 bp, Homo Sapiens
aactagttctgaaagtgtcaagaatagctgccctttccaccctacctaggttccctccttgctggcataaaggccaagcagtgaaatgaaccttgggttagagttatggtaggcaaaaagaaaaggagaatttaggaaataaatatgctataaacaaggtacagtacagtgagagttaacaatcctaggaatcctgcctgtcacaagctcccagttccctgtcattttatcttcatgattagaactgatcttccatttaactattacagaaagcagtaactattgcaactatctaatagttcacacaaaagaattaaaagcttaaaaataatttttaggaaacacaatattcaaaatctaaacacactgataaattattaagattaagattatttatgtgataaatgaaatctcctaccaatccatccagcctttaccagggaagaaaagcaattatttcatttcagatagaaatacaaaa

SEQ ID NO: 76563 - DNA, 1487 bp, Homo Sapiens
ggctttttcttttgaggaagaaattattcactccagatgcatgccctgagccagacctcactgctgcactttccaaggtgctaagattgctgctctccaatgctaactttctgacacagtgctctagaaccctgcctgtggtcctgagcactgatcagcttagctagaccatggttgactcttcttggagattttcacttggtcctagaatgtggcaacgtagttgtgctcgccagaacgtgggaccaaattggcctcaggtgttgagtccagacttctgcttttgagagagggctgcactttttcatggtatttctaggggaggtggtaggctgcatgtgccacttggtcttgtagtgagtatgctgacaccagaaactcagagccagcttgtggcaagcagttggggtggggggtctctgacttgctcaggacaaactaggccagtggttttcaaactgcttggcagagccctgaagtttcctaggggttgcctcaggagtccttggggagatgaagggggtggggagctgagcaggctgggcaatttgccctcaaacagaacagctccccttgtagctgtcttacatatcggggttcagggtaagattttatttgcattaaggggttgctgctgaaaaaaagttggaaaaccactgactagaccatcggctccaaattggagtctgtgcttccttccccaggtatggagcacactcttcaccctaccctctaccacaggacacatatccctgttagcattccccgggacctttagccaagaggagctgcagggaccatggccaggttaccaaaatgccctgctctgaagccttgacacctgggtggaaagagaggctgttttctgaaagggtaaagggcttggtctggattcccagaagcatagcttagatgggaccacagtgggcaattttgacctgtcctgcccttcttagcttgaagggaaaccccagagactcttctgtcagggaaaactagggactctcttctagagccatatagttccttgggattagctcttggccaagaaggctgagtatggttcccaatttttaaatccatttcattttttaaaaaataagggaaataaatgtaattgccatttttcaaagattaagtaggaggagaggggtttcttgctctccagagcccaaagggacaaatagggactttgtttaggccaaggaaggagcggaagtagggcaactcggtcctgcgattattaatcccactccccacttattctagggcacacaaacactattttacttttttaaaatcataaaacggcagaacagatttggttagtttagaagaaaagaaagctctataaatataaatctatattcctgtatttttatttaataatttataaataccaagttcatttgacttttatttttgtgtaatatgtaatgatcgtattaaaaacaataaataaagcccagaagtttaatgagaaggcc

SEQ ID NO: 76564 - DNA, 709 bp, Homo Sapiens
gcagggtagtaacccagtgatgtttcttacagaagcacaatatgttgaaaatcctgggtgtgaccaatatggaataaagaagaaggcagaaagagagcaaatgaaaaatttcaacttgtatattcattttttacattttgctttgacttttaaatttaggaagtccgtttttacctgagaacaaatgtttaaagttcctgcgtcactctcagtactctcactgcccctcccaaaccctatagctccttacgctgggaaagctggttttttaaaaaaataataataaaatatttaatcttattaagtgttcatttaaaatgcgtaatgctttggaaataatgggtaacagatagcgagaggatatgtttataaagtgagcatgttggtcccatttataaatatatgtatgatttataagcttttttaaaacaaagctcaaattgttggtatttttctaaaatgtgcacagctgtattttacatgaaggctctttctaatgggttgttatactgtactcaacattttggacagcacatgaagtctgccaatgtacttaataaaacatgactttgtttatttaaagtttcttgctgtgaaaaagaactccctacctgtgagttcctttatttataattcttgaaaccaaaatgtataatgtacagttttcacaactgtatctgctctaataaaaaaaagttggttattaaaa

SEQ ID NO: 76565 - DNA, 961 bp, Homo Sapiens
  misc_feature (71)..(71): n is a, c, g, or t
  misc_feature (86)..(86): n is a, c, g, or t
  misc_feature (99)..(99): n is a, c, g, or t
aaagaacatttcccatgcatctacaagcttgagaaataggattttcacagtggggaagtgggttacaatantggaataggaaaatntgatgctgtaatntgggtcctgtatttttccaaacaactgtgcttcttcagcactaatatttctgggatttaaatagtaatgtttaaattatggtaaatgtaatttaaaacatctcaattaagtctgtctatcaatattgttcttcaagcatgttttagacctagaaaagtatggtttgggggaggctattttattgtgtggttagcacaaggaatctaatttatagcaagtgtgaaatagttaccattttttcctgatctgtcatcttcatagcacaacaaaacgaaatgatggaaatgctcttgagctcacaacatttgtttttcttttaaagtaaatgcaagtaccaaagctcactactgcggtttgcctgtgcctggacaatgaggcggagccactgttggggcacccccttccctccccgggtttgcaaatagaggctaccgggtgctgtattcagcaacacctgttttactatttgttattaaactatcatctccaccttccttttgattagcaatttgtactaagaaacgaaacaatgttatttggtggtgtataattctacttttctagtagattactgtgtggaattctgtgaaaaatatttgagaaaaggcctgtattgcataaataaattctttgtatgttgtgaactttgatctctatttctcttgcaacagacttcaagtggtccctctttttttcctacacactcagctcttctctaaaagcaaggatttggaatgaacaattcagtttgacagaaaaagctgaataaaatggcatctgtaattgaattgttggaaatgcctgttttgctcctaaattttaaacatcatcattaataaaataatgattcacaaagaaaaaa

SEQ ID NO: 76566 - DNA, 425 bp, Homo Sapiens
atgatggaaatgctcttgagctcacaacatttgtttttcttttaaagtaaatgcaagtaccaaagctcactactgcggtttgcctgtgcctggacaatgaggcggagccactgttgttggggcacccccttccctccccgggtttgcaaatagaggctaccgggtgctgtattcagcaacacctgttttactatttgttattaaactatcatctccaccttccttttgattagcaatttgtactaagaaacgaaacaatgttatttggtggtgtataattctacttttctagtagattactgtgtggaattctgtgaaaaatatttgagaaaaggcctgtattgcataaataaattctttgtatgttgtgaaaaatatttgagaaaaggcctgtattgcataaataaattctttgtatgttgtga

SEQ ID NO: 76567 - DNA, 2878 bp, Homo Sapiens
  misc_feature (1831)..(1887): n is a, c, g, or t
  misc_feature (1902)..(1997): n is a, c, g, or t
  misc_feature (2592)..(2592): n is a, c, g, or t
  misc_feature (2706)..(2706): n is a, c, g, or t
  misc_feature (2748)..(2748): n is a, c, g, or t
  misc_feature (2759)..(2759): n is a, c, g, or t
  misc_feature (2821)..(2821): n is a, c, g, or t
  misc_feature (2824)..(2824): n is a, c, g, or t
agaaaggggtgcggcagcactgccaggggaagagggtgatccgacccggggaaggtcgctgggcagggcgagttgggaaagcggcagcccccgccgcccccgcagccccttctcctcctttctcccacgtcctatctgcctctcgctggaggccaggccgtgcagcatcgaagacaggaggaactggagcctcattggccggcccggggcgccggcctcgggcttaaataggagctccgggctctggctgggacccgaccgctgccggccgcgctcccgctgctcctgccgggtgatggaaaaccccagcccggccgccgccctgggcaaggccctctgcgctctcctcctggccactctcggcgccgccggccagcctcttgggggagaatccatctgttccgccagagccccggccaaatacagcatcaccttcacgggcaagtggagccagacggccttccccaagcagtaccccctgttccgcccccctgcgcagtggtcttcgctgctgggggccgcgcatagctccgactacagcatgtggaggaagaaccagtacgtcagtaacgggctgcgcgactttgcggagcgcggcgaggcctgggcgctgatgaaggagatcgaggcggcgggggaggcgctgcagagcgtgcacgcggtgttttcggcgcccgccgtccccagcggcaccgggcagacgtcggcggagctggaggtgcagcgcaggcactcgctggtctcgtttgtggtgcgcatcgtgcccagccccgactggttcgtgggcgtggacagcctggacctgtgcgacggggaccgttggcgggaacaggcggcgctggacctgtacccctacgacgccgggacggacagcggcttcaccttctcctcccccaacttcgccaccatcccgcaggacacggtgaccgagataacgtcctcctctcccagccacccggccaactccttctactacccgcggctgaaggccctgcctcccatcgccagggtgacactggtgcggctgcgacagagccccagggccttcatccctcccgccccagtcctgcccagcagggacaatgagattgtagacagcgcctcagttccagaaacgccgctggactgcgaggtctccctgtggtcgtcctggggactgtgcggaggccactgtgggaggctcgggaccaagagcaggactcgctacgtccgggtccagcccgccaacaacgggagcccctgccccgagctcgaagaagaggctgagtgcgtccctgataactgcgtctaagaccagagccccgcagcccctggggccccccggagccatggggtgtcgggggctcctgtgcaggctcatgctgcaggcggccgagggcacagggggtttcgcgctgctcctgaccgcggtgaggccgcgccgaccatctctgcactgaagggccctctggtggccggcacgggcattgggaaacagcctcctcctttcccaaccttgcttcttaggggcccccgtgtcccgtctgctctcagcctcctcctcctgcaggataaagtcatccccaaggctccagctactctaaattatgtctccttataagttattgctgctccaggagattgtccttcatcgtccaggggcctggctcccacgtggttgcagatacctcagacctggtgctctaggctgtgctgagcccactctcccgagggcgcatccaagcgggggccacttgagaagtgaataaatggggcggtttcggaagcgtcagtgtttccatgttatggatctctctgcgtttgaataaagactatctctgttgctcacaannnnnnnnnnnnnnnnnnnnnnnnnnnnnnnnnnnnnnnnnnnnnnnnnnnnnnnnntatagaacagacacnnnnnnnnnnnnnnnnnnnnnnnnnnnnnnnnnnnnnnnnnnnnnnnnnnnnnnnnnnnnnnnnnnnnnnnnnnnnnnnnnnnnnnnnnnnnnnnnttgactgtgggtggaagggcccctacccccacaacaaaattcttataaaaaacatttttttgtggggcgcgagagggccaataagagaaaaaagtagcaaacggggtcttcaattcttcaaacaaaaagagagcacagtgggcaccaaacagagggtgttgtgatatcctccacacaaataaaaataaaagcacctcgcggggtgaaaaaccaaagtcggtgttacgtaaaatatacatcataaacgaagtctgtcgaggggctgtatatacggagaacatcaccacacaagcagcaaacaacacaatatggtagtcatcataattcataaagataaattgaccacacgcccggccagcagaacagaaaccatgaagacagacataagtcgggaggataacatatatcaaaaacacacacaatatactcgaccaaggacacgtaaggaaaacgtcccaatgacacaaactgtctcggcgctagcgaagaatacatagttaatataccatcgcagcagacggaagatagagactatgcgcacgcgactaacatagctacgaggcctctacgatatatataaatataagtatttctnacaccataagagcacacaacgaaactaatcccggcacaaataaaatacacaatcattgtagtcccaacactttgtagggctcaccaccatcataatatataactacaacaaatngatgcgcagcagcaatagcgactcaccacgcacacgatgaancgtacgccgtngtgagaatacacgcaacacaatatataataatctcctcttcgccgtcaagaacacatctacnttntctcgagaatcgacacatagaccacgatcgccgtcgtctacatcatcgccccac

SEQ ID NO: 76568 - DNA, 1397 bp, Homo Sapiens
ccagttagcagcttagcccccctagcaaaccccaaggcacaaagtgggcatcctgactcatctctaggtctgtggtttctcccctcttcccttggcagagttattgagggcatgatctcagggctgctaagataacatttctgaggattctagatgatcctcttaaagaataaaagcacatccgtggatcggacatggctgcatgtgcctgcttaacagggccaacttagttcctactgttctgtgcccttcagtggatggaacgtgagtgtctgatcatctctcttggaagttttctgaaccttccaagctctgtggtgaggacaaaccagtgtttgaatcatatgctgataactgtttgcctgtgaccctcacaccttgttcttcagggttttaatgattttctgttgacaacttttgcaatgctttcccaccaaagtgcttacttgtaaagaaaactaaatccttctgtgtccccggcagcctcagtgcagcaacagaagccaagggagaatgctgctggtttggcccatggcacagccagcttctctgaccagtaatccggggtgacttgagggtctgcaaaggcatagaactccccagtgttttcacctcattctcccagattgagctcccttccaaaggatcgttcctctcattgcacagccatattacaaagggtttcctgctcaagtgatgttttggtaagaacttcgctgagttccactgtggattacagtttgtatggactactactgtaaattatagcttgtttggagggatattagtcattattttattcatgacaggtagactacaattcgaacttagggttacctcagtctttagccattactgcttatttcttttccccaagtcacaaaaaacttgtaagctgctgggttaaagcagaggccacctgtcagatctaccctacccttatttggttacatggcacctgagagtttcactcagaccagggatcttccttaggagggtcaaagtgcagatcagaccatgcaggtaaggtgaaccagctgcacggaccaggttcccgcaaaacattgccagctagtgaggcataatttgctcaaagtatagaaacagcccacctgtgcccactttgaccattggtgaggatagatataaaatcacttcttccaacgaagcctaggtgaaaatctatttataaatggaccacaactctggggtgtcgtttttgtgctgtgacttcctaattattgctaaagaactactgtttagttggtaatggtgtaaaattacattcagctccttcttgtcatataaaaggaatttggagggtgtcgcttaaaattttattccacctgtacatttgtcactttaaaattaaaattgagctggtatgagaaaaaaaa

SEQ ID NO: 76569 - DNA, 728 bp, Homo Sapiens
  misc_feature (45)..(45): n is a, c, g, or t
  misc_feature (716)..(716): n is a, c, g, or t
caggtaaaccagaagtttaataaaaatgagcaaaattacaacatnggcgggccagcaatgggctgcttcagaaggtctgaggtgttggtcagcctgacgtcctggcttccatggttctgagaggtcacaggattggtccctcacacccaaggttcactttcctcaatcaccctgttcccaatggggaggactctgtctctctggtgtaatttttggccaggctggttctgaaccccctcagcctgtgaagaaggctgccttagtctgaccttcaccccgtgatgatgaggatgtcctttatattgttttcctaagtccacactcccaccccagactctgaggatggcagacagaggaaagcccattttatggagaattaagagctttgggaatgctggagcctcctccacagaagacagccacagctcccagggtctcctggcttgcctgcaagctcttctgaattccttgggcccatctctcttgcaaagtgctcaggacgcccgggtgctggtgctgagctgggtccaaaagtctgcacagaagggagccccgctgggcccagacctccctggcggccactgcaggtcaggccagttaggaggtgctgctcctcctccgtgggtggagggctttcctcctggcgatgtcctcctcagtgtcactctcacagttcctcaggtcctcatccggcctcaggtgcacttcttcatcancgagcgggtgag

SEQ ID NO: 76570 - DNA, 1426 bp, Homo Sapiens
  misc_feature (938)..(948): n is a, c, g, or t
gcggccgtccccgaagccccgccccctccatcgcctcaggcatcatcacttccggtaaccccgccggccgccagctccaggagggagaatgggagaggggcaaggagggaacgagtggaagattgcgtcacgacgcacataaagacgtacgaagccgtcgccaaatgacaacggcaacacgacaagaagtccttggcctctaccgcagcattttcaggcttgcgaggaaatggcaggcgacatcagggcagatggaagacaccatcaaagaaaaacagtacatactaaatgaagccagaacgctgttccggaaaaacaaaaatctcacggacacagacctaattaaacagtgtatagatgaatgcacagccaggattgaaattggactgcattacaagattccttacccaaggccaattcatctgcctccaatgggccttaccccactccgaggccggggacttcgaagccaagagaaactgaggaaactttccaaaccagtatatctcagatctcatgatgaagtttcctaatctagaggaaagtttatttctgcaaatgatgagccaactagttattgaatgtaaaccagatggcaaaacacttcttgattaggggcaaaaattcaaatgtcttcttaaaacctccacaattgattctccccctgtgatgtaaacttagatatccctagagtttctcagcatctttcttcctgagtggatggcattatccctagaggtcatggaccttacatcctcactgcagtcacctttggaaacaagaccgaggcctgtagaaggaaagcggaaggatgtaagagctgttcatgggaattccattcaccacacatgccagctgatgcaaagaaatttgccagtcactggaagttactgtggctactataaaactatgtaccactctcagaatattcttaggcnnnnnnnnnnncaagttatagatttgcttaaagtgaggttttttggtgtgtgcttttttgttgtcttttgacccttccagtttccagacaaacttgtcttaaaaagtgcatcattggattgaccatggtttttcatgaaattttatgagatttctgccttaacaaaatgcatatattccttatcttaaagcctgtcattacttaggatgcacttataggatctgaaaagctcactttaaactcatactacattcgttacgagtattttacgttaacataattgaaaagtacaaggtccaagctggctttcaaattatgtctaaacagaaatgggacaaatagacttgaaaatagaagggatttattccacccctgcaagggtagagtcaggtgagagtcccttggtgagtcatttgtacatcagtgtcatttcttcttaacctctgaagaagatgggcatcagaaataaagacaaagcactatcaaaaa

SEQ ID NO: 76571 - DNA, 1129 bp, Homo Sapiens
cagtcgacggtagcggacatatgcccgggaattcggccattacggccgggggagagaagacgtgcaggaccccgcgcacaggagctgccctcgcgacatgggtcacccgccgctgctgccgcatgctgctgctgctccacacctgcgtcccagcctcttggggcctgcggtgcatgcagtgtaagaccaacggggattgccgtgtggaagagtgcgccctgggacaggacctctgcaggaccacgatcgtgcgcttgtgggaagaaggagaagagctggagctggtggagaaaagctgtacccactcagagaagaccaacaggaccctgagctatcggactggcttgaagatcaccagccttaccgaggttgtgtgtgggttagacttgtgcaaccagggcaactctggccgggctgtcacctattcccgaagccgttacctcgaatgcatttcctgtggctcatcagacatgagctgtgagaggggccggcaccagagcctgcagtgccgcagccctgaagaacagtgcctggatgtggtgacccactggatccaggaaggtgaagaagggcgtccaaaggatgaccgccacctccgtggctgtggctaccttcccggctgcccgggctccaatggtttccacaacaacgacaccttccacttcctgaaatgctgcaacaccaccaaatgcaacgagggcccaatcctggagcttgaaaatctgccgcagaatggccgccagtgttacagctgcaaggggaacagcacccatggatgctcctctgaagagactttcctcattgactgccgaggccccatgaatcaatgtctggtagccaccggcactcacgaacgctcactctggggaagctggttgccatgtaaaagtactactgccctgagaccaccatgctgtgaggaagcccaagctactcatgtataaaatgccatgttggagatagaagccccaaatgtttcagccatctcagcccaggcaccagacaagtgggtgaaagaagccaccttggacatgtagccccagcagatgtgatatagagaagaaacaggaaacttggctatattagtttcctagggctgctgtgataaattattacaaactttataact

SEQ ID NO: 76572 - DNA, 1550 bp, Homo Sapiens
  misc_feature (241)..(264): n is a, c, g, or t
gccgagccagccccttcaccaccagccggccgcgccccgggaagggaagtttgtggcggaggaggttcgtacgggaggagggggaggcgcccacgcatctggggctgactcgctctttcgcaaaacgtctgggaggagtccctggggccacaaaactgcctccttcctgaggccagaaggagagaagacgtgcagggaccccgcgcacaggagctgccctcgcgacatgggtcacccgccnnnnnnnnnnnnnnnnnnnnnnnnccacacctgcgtcccagcctcttggggcctgcggtgcatgcagtgtaagaccaacggggattgccgtgtggaagagtgcgccctgggacaggacctctgcaggaccacgatcgtgcgcttgtgggaagaaggagaagagctggagctggtggagaaaagctgtacccactcagagaagaccaacaggaccctgagctatcggactggcttgaagatcaccagccttaccgaggttgtgtgtgggttagacttgtgcaaccagggcaactctggccgggctgtcacctattcccgaagccgttacctcgaatgcatttcctgtggctcatcagacatgagctgtgagaggggccggcaccagagcctgcagtgccgcagccctgaagaacagtgcctggatgtggtgacccactggatccaggaaggtgaagaagggcgtccaaaggatgaccgccacctccgtggctgtggctaccttcccggctgcccgggctccaatggtttccacaacaacgacaccttccacttccctgaaatgctgcaacaccaccaaatgcaacgagggcccaatcctggagcttgaaaatctgccgcagaatggccgccagtgttacagctgcaaggggaacagcacccatggatgctcctctgaagagactttcctcattgactgccgaggccccatgaatcaatgtctggtagccaccggcactcacgaaccgaaaaaccaaagctatatggtaagaggctgtgcaaccgcctcaatgtgccaacatgcccacctgggtgacgccttcagcatgaaccacattgatgtctcctgctgtactaaaagtggctgtaaccacccagacctggatgtccagtaccgcagtggggctgctcctcagcctggccctgcccatctcagcctcaccatcaccctgctaatgactgccagactgtggggaggcactctcctctggacctaaacctgaaatccccctctctgccctggctggatccgggggacccctttgcccttccctcggctcccagccctacagacttgctgtgtgacctcaggccagtgtgccgacctctctgggcctcagttttcccagctatgaaaacagctatctcacaaagttgtgtgaagcagaagagaaaagctggaggaaggccgtgggccaatgggagagctcttgttattattaatattgttgccgctgttgtgttgttgttattaattaatattcatattatttattttatacttacataaagattttgtaccagtggaaaaa

SEQ ID NO: 76573 - DNA, 814 bp, Homo Sapiens
ggattcggcaggagaagcagcttggggtacacaggaccatcccaagtcctgggccagcttcttcccttttccttccttatcctggtggtgtagcctggaaatggaaatttaagtcatttctaaactgtcatttgctcctcatttctgagaagggtttggcgttggacgtatttgagaagagatatcaagaggatgatgagattggaatggtttatagaccctgattgggcttcatggaccaaatgtacaattctggaatttattctacatccacaaaaatgtaaatatgtgcagaagaaggaaataaacttctaggaaagctctaagtctgagcatggcctgaagcaaacactaagaacatatgcttaacttctgacctctgccatgggccttgcttattcagttagaacgcccacctcccatttgatttctgtaccatgtctttcatgactgcaagacagctgcagtgttgcaggagactgctactctgccatggccccatgacaggcccagaacctctccccagtcactccctccacctcctttacagtgattcggaatgtcaagtttaagatcctggatgcggtggttgcccaggagcccctgcaccggggcgcgggccagatcatccccacagccaggagagtcgtctactctgccttcctcatggctactcctcgtctgatggagccttactactttgtagaggtccaggcccctgcagattgcgtctctgcagtttataccgtcctgcacaggcgcagggggcacgtgactcagatgcacccatcccacgcaggctcctctcactaca

SEQ ID NO: 76574 - DNA, 3485 bp, Homo Sapiens
ggaagagtatgaagtcgaggcgcgccaattcggcacgaggcggaagcacgatctccggcagcggcctgggaactcttagctgagcaggcgagagcatcatggataccgacttatatgatgagtttgggaattatattggaccagagcttgattctgatgaagatgatgatgaattgggtagagagaccaaagatcttgatgagatggatgatgatgacgacgacgatgacgtaggagatcatgacgatgaccaccctgggatggaggtggtgctgcatgaggacaagaagtactacccaacagccgaggaggtgtatggtcctgaggtggagaccatagttcaagaggaagacactcagcctctcacagaacccattattaagccagtgaaaaccaagaaattcactctgatggagcagacattacctgttacggtgtatgagatggatttcttggcggatctgatggataactcagagctcatcagaaatgtgaccctttgtggacatctccaccatggcaagacatgttttgtggattgtttaattgaacagactcacccggaaatcagaaagcgctatgaccaagatctgtgctatactgacatcctcttcacagagcaagagagaggtgtaggcatcaaaagcactcctgtgacagtggtcttgccagacaccaaaggaaaatcttatctcttcaatatcatggacactccaggacatgtgaatttctctgatgaggtcacagctggcttgcgcatctcagatggagtggtccttttcattgatgctgctgagggggtgatgctgaacacagagcggctgatcaagcatgcggtgcaggagaggctggcagtcactgtgtgcatcaacaagattgaccggctgatcctggagctgaagctgcctccaactgatgcttattacaagctgcgccacattgtggatgaggtcaatggattaataagcatgtattccactgatgagaacctgatcctttccccactcctgggtaacgtctgcttctccagctcccagtacagcatctgcttcacgctgggctcctttgccaagatctatgccgacacctttggtgacattaattaccaagaatttgctaaaagactctggggtgacatctacttcaaccctaagacgcgaaagttcaccaaaaaggccccaactagcagctcccagagaagtttcgtggagtttatcttggagcctctttataagatcctcgcccaggttgtaggtgacgtggacaccagcctcccacggaccctagacgagcttggcatccacctgacgaaggaggagctgaagctgaacatccgccccttgctcaggctggtctgcaaaaagttctttggcgagttcacaggctttgtggacatgtgtgtgcagcatatcccttctccaaaggtgggcgccaagcccaagattgagcacacctacaccggtggtgtggactccgacctcggcgaggctatgagtgactgtgaccctgatggccccctgatgtgccacactactaagatgtacagcacagatgatggagtccagtttcacgcctttggccgggtgctgagtggcaccattcatgctgggcagcctgtgaaggtactgggggagaactacaccctggaggatgaggaagactcccagatatgcaccgtgggccgcctttggatctctgtggccaggtaccacatcgaggtgaaccgtgttcctgctggcaactgggttctgattgaaggtgttgatcaaccaattgtgaagacagcaaccataaccgaaccccgaggcaatgaggaggctcagattttccgacccttgaagttcaataccacatctgttatcaagattgctgtggagccagtcaacccctcagagctgcccaagatgcttgatggcctgcgcaaggtcaacaagagctatccatccctcaccaccaaggtggaggagtctggcgagcatgtgatcctgggcactggggagctctacctggactgtgtgatgcatgatttgcggaagatgtactcagagatagacatcaaggtggctgacccagttgtcacgttttgtgagacggtggtggaaacatcctccctcaagtgctttgctgaaacgcctaataagaagaacaagatcaccatgattgctgagcctcttgagaagggcctggcagaggacatagagaatgaggtggtccagattacgtggaacaggaagaagctgggagagttcttccagaccaagtacgattgggatctgctggctgcccgttccatctgggcttttggccctgatgcgactggccccaacattctggtggatgatactctgccctctgaggtggacaaggctcttcttggttcagtgaaggacagcatcgttcaaggtttccagtggggaaccagggagggccccctctgtgatgaattgattcggaatgtcaagtttaagatcctggatgcggtggttgcccaggagcccctgcaccggggcgggggccagatcatccccacagccaggagagtcgtctactctgccttcctcatggctactcctcgtctgatggagccttactactttgtagaggtccaggcccctgcagattgcgtctctgcagtttataccgtcctggccaggcgcagggggcacgtgactcaggatgcacccatcccaggctcccctctgtacaccatcaaagcttttatcccggccatcgactcttttggctttgagactgatctccggactcacacccagggacaagccttttctctgtctgtcttccaccactggcagattgtgcctggtgatcccctggacaagagcattgtcatccgccccttggagccacagccagctcctcacctggcccgggaattcatgatcaaaacccgccgtaggaagggcctcagtgaagatgtgagcatcagcaaattcttcgatgatcctatgttgctggaacttgccaaacaggatgttgtgctcaattaccccatgtgagtgcgtggactcctgggagctcctgctccctacagtgggctgcaactcctgtacttgaagctgagacctcatatgacgtggccttcgtgttgtcagagagtgtctggaagctgctgttgccatcttgaacaactcaccaacctccaacccagagccccagtgagagaggagcatttggcctcctgcttccttctgtggcctctgccgggctccattcccaaggaaaagagaggagcttgggctcacagaaagagaaggggatgaaaccccaaggggccctatctttgggatttacatggaattttattttctacaagtttgaccttagccatggtttgcaagtgaacagaacattctgacctctgtcttgctctgctcctttcatcctcgtctcccctgccccgtctggtgcttacattctgaatatatgtcatctcccaagaggcttcactgcctctgcttccaaaa

SEQ ID NO: 76575 - DNA, 1057 bp, Homo Sapiens
  misc_feature (872)..(882): n is a, c, g, or t
aattagctaggtacgaggcctggtgttgaattcggcacgagggcacggggccgctttggatctctgtggcaggtaccacatcgaggtgaatcgtgttcctgctggcaactgggttctgattgaaggtgttgatcaaccaattgtgaagacagcaaccataaccgaaccccgaggcaatgaggaggctcagattttccgacccttgaagttcaataccacatctgttatcaagattgctgtggagccagtcaacccctcagagctgcccaagatgcttgatggcctgcgcaaggtcaacaagagctatccatccctcaccaccaaggtggaggagtctggcgagcatgtgatcctgggcactggggagctctacctggactgtgtgatgcatgatttgcggaagatgtactcagagatagacatcaaggtggctgacccagttgtcacgttttgtgagacggtggtggaaacatcctccctcaagtgctttgctgaaacgcctaataagaagaacaagatcaccatgattgctgagcctcttgagaagggcctggcgagaggacatagagaatgaggtggtccagattacgtggaacaggaagaagctgggagagttcttccagaccaagtacgattgggatctgctggctgccgttccatctgggcttttggccctgatgcgactggccccaacattctggtggatgatactctgccctctgagtggacaaggtcttctggtgcagtgaacgacaagcatcgttcacgtttccgagtgggggacaccaggggaggccccctctgtgatgaatgattcggaatgtcaaggttcacgaatccctggatgcgggggttgcccaggagccctgtcnnnnnnnnnnnccaaacatccccccagccaggagaatgtaacctgcgcccaggggaatccgggtgatgggcccatatagggagagcacgccccaaagggtctggtacacacggcgacggggaggaaagacaccacggcgcgtaacaattcgcccattttaggcgcacaggcttttctccagggcat

SEQ ID NO: 76576 - DNA, 1298 bp, Homo Sapiens
  misc_feature (365)..(365): n is a, c, g, or t
tagataaagagatacagggtaggggatacggtgcacacgattcacttgtcgatatggttgtctcgtcccacagcgcgataggactgcccaattgcatgtctgccgcacacgtctttctctccgcaagcgaagacgaggttcggttatgacgcgaggagatttctcagagagcctgtcggcatgtcacagaggtccatagggggtagcggcacgaggcgctacacaaagtatatcgagcggagggagcaatagttcatcgtaccagatcgggtgagggcttatatatgcaccacaaagatgttgcgagtcggagcccatatggatatacacatatctgccgacttgtcttttttgttgccccaaangtcggggggtttcgccgagctcggggagcgccattttgtgtgcgaggttcattaaaggacgggtagtcggtgggtgttcctttacggcaaaagcgacgagccttctgcttttcccgagctgaacgccgtctctgaccccttgcatccccaggccactgttgtaatagggtcaaaaagggctggccgaactgttgtgttcactagggagacgcccggttcccgtggagagattcccagtgggagggagaaaaatgtgggaacgctttaatccggggattcttaatacgtcgttggcaaaaggagcgcccagaaagggaacaaaggaggtttgtccgccgttcctcgtttcgtgggcacgtgggagaagaacttccccagttctctggccagcgtgaaacaacgtgtcccttagaaggccacataggcagggcacctgggggcgctcccccacagaggcagggtgtgcaaaaaccaccaagagtcgcgttgatccaggcaagagaagtgcacgggaccctccgaaacagagacaaaacaaacagaaaacttcctaccccagtgtcatccaggtaggaactccctaagttattgcagccatgagagctctccttccacatgctggtcaagctcggaaaggctaagtccctccctgtctttaaaacagactgttttgaggctcaactttttttcttcaaaataaaagttgtacagctggttcagcagccccatgtgagtaccctctgaaagtttgttctcttaaaataagaactgtatacaaattaatgaagaaagataggctcgggttgcatggctggctctgcttcagattataattattttacggtaaaaccggacgcgtgggtcgacgattcgaaggaatccggaccggaccagctttttttgctggtcccccctaaccccattagtgaaaaa

SEQ ID NO: 76577 - DNA, 596 bp, Homo Sapiens
actattgagatgacttactggtcacagtaaaagcaagttgataaaggtggccagtgggggaacagagcttatgtgcctcctgagaaagccagtcgctggaaactggactgagagccctgatttggagcacgaggaaaccttaaaaaggcctattccactagaagcaagatggctgaactcaatactcatgtgaatgtcaaggaaaagatctatgcagttagatcagttgttcccaacaaaagcaataatgaaatagtcctggtgctccaacagtttgattttaatgtggataaagccgtgcaagcctttgtggatggcagtgcaattcaagttctaaaagaatggaatatgacaggaaaaaagaagaacaataaaagaaaaagaagcaagtccaagcagcatcaaggcaacaaagatgctaaagacaaggtggagaggcctgaggcagggcccctgcagccgcagccaccacagattcaaaacggccccatgaatggctgcgagaaggacagctcgtccacagattctgctaacgaaaaaccagcccttatccctcgtgagaaaaagatctcgatacttgaggaaccttcaaaggc

SEQ ID NO: 76578 - DNA, 1168 bp, Homo Sapiens
  misc_feature (69)..(120): n is a, c, g, or t
gggtccggaattcccgggatgcgggagcgaggggcgccggctggggtgtgtgctcctggtgagtgacannnnnnnnnnnnnnnnnnnnnnnnnnnnnnnnnnnnnnnnnnnnnnnnnnnnagtgtccctgcgtggggcggccgagccggagttgtgtcagtgaaggaatccagtccgggggccgagctggctgcgccctccgccaagcgccggcagcgcggggcgagctccggacggcgcgcggcccaggcagcggctcccgctcggcccgccctccgagccgcaggggccgccaccgccgcggcgcctcccctggcgaccgcgcccccgggccccggctccggcccgggacggaggagccggcgctcgacacagagagctcttcagaaaccaggctgctttcaggaacattgctgtggattcccagggcctattccactagaagcaagatggctgaactcaatactcatgtgaatgtcaaggaaaagatctatgcagttagatcagttgttcccaacaaaagcaataatgaaatagtcctggtgctccaacagtttgattttaatgtggataaagccgtgcaagcctttgtggatggcagtgcaattcaagttctaaaagaatggaatatgacaggaaaaaagaagaacaataaaagaaaaagaagcaagtccaagcagcatcaaggcaacaaagatgctaaagacaaggtggagaggcctgaggcagggcccctgcagccgcagccaccacagattcaaaacggccccatgaatggctgcgagaaggacagctcgtccacagattctgctaacgaaaaaccagcccttatccctcgtgagaaaaagatctcgatacttgaggaaccttcaaaggcacttcgtgggggtcacagaaagcaacagactactgcaacagaaactatccttagatgggaaccccaaacctatacatggaacaacagagaggtcagatggcctacagtggtcagctgagcagccttgtaacccaagcaagcctaaggcaaaaacatctcctgttaagtccaaatacccctgcagctcatcttgaaataaagccagatgagttggcaaagaaaagaggcccaaatattgagaaatcagtgaaggatttgcaacgctgcaccgtttctctaactagatatcgc

SEQ ID NO: 76579 - DNA, 2192 bp, Homo Sapiens
  misc_feature (356)..(408): n is a, c, g, or t
aatagtgaatataccaggtgtaaaaagcaggctggtacggtccggaatcccgggatatcgtcgacccacgcgtcggcgagcgggagcgaggggcgccggctggggtgtgtgctcctgagctcttcagaaaccaggctgctttcaggaacattgctgtggattcccagggcctattccactagaagcaagatggctgaactcaatactcatgtgaatgtcaaggaaaagatctatgcagttagatcagttgttcccaacaaaagcaataatgaaatagtcctggtgctccaacagtttgattttaatgtggataaagccgtgcaagcctttgtggatggcagtgcaattcaagttcnnnnnnnnnnnnnnnnnnnnnnnnnnnnnnnnnnnnnnnnnnnnnnnnnnnnncaagtccaagcagcatcaaggcaacaaagatgctaaagacaaggtggagaggcctgaggcagggcccctgcagccgcagccaccacagattcaaaacggccccatgaatggctgcgagaaggacagctcgtccacagattctgctaacgaaaaaccagcccttatccctcgtgagaaaaagatctcgatacttgaggaaccttcaaaggcacttcgtggggtcacaggcccaaatattgagaaatcagtgaaggatttgcaacgctgcaccgtttctctaactagatatcgcgtcatgattaaggaagaagtggatagttccgtgaagaagatcaaagctgcctttgctgaattacacaactgcatcattgacaaagaagttccattaatggcagaaatggataaagttaaagaagaagccatggaaatcctgactgctcgtcagaagaaagcagaagaactaaagagactcactgaccttgccagtcagatggcagagatgcagctggccgaactcagggcagaaattaagcactttgtcagcgagcgtaaatatgacgaggagctcgggaaagctgcccggttttcctgtgacatcgaacagctgaaggcccaaatcatgctctgcggagaaattacacatccaaagaacaactattcctcaagaactccctgcagctccctgctgcctctgctgaatgcgcacgcagcaacctctgggaaacagagtaacttttcccgaaaatcatccactcacaataagccctctgaaggcaaagcggcaaaccccaaaatggtgagcagtctccccagcaccgccgacccctctcaccagaccatgccggccaacaagcagaatggatcttctaaccaaagacggagatttaatccacagtatcataacaacaggctaaatgggcctgccaagtcgcagggcagtgggaatgaagccgagccactgggaaagggcaacagccgccacgaacacagaagacagccgcacaacgcttccggcccaaaaacaaagcggtgccaaaaatcaagaggcttccttggggatgaagacccccgaggccccggcccattctgaaaagccccggcgaaggcagcacgctgcagacacctcggaggccaggcccttccggggttagtgtcggtagggtttcacagtgcaatctctgccccacgagaatagaagtttccacagatgcagcagttctctcagtcccggctgtgacgttggtggcctgagctaggaggaaaaagagcagttttcactcagttttggttccctgcccgaggtgctgacccaattcgctgccaaaagagtgtcaatcagaatatacaaatcccgtatggttgtgtcatcctctcttaatcatttttactaattctaataatcagctctagcttgcttcataattttcatggctttgcttgatctgttgatgctttctctcatcaagactttgcagcattttagccaggcagtatttactcattattaggaaaatcaagatgtggctgaagatcagaggctcagttagcaacctgtgttgtagcagtgatgtcagtccattgattgtctttagagagttaatgttacaaaaaagaattcttaataatcagacaaacatgatctgctgaggacacatgcgcttttgtagaatttaacatctggtgtttttctgaaaaaatatatatacatatattgctttatttgaaacaaattaaaatatgctgcattttgaaagctcccctacaaaagtaaaaaaattaacttg

SEQ ID NO: 76580 - DNA, 1377 bp, Homo Sapiens
  misc_feature (22)..(22): n is a, c, g, or t
  misc_feature (26)..(26): n is a, c, g, or t
  misc_feature (92)..(126): n is a, c, g, or t
  misc_feature (617)..(627): n is a, c, g, or t
  misc_feature (1115)..(1143): n is a, c, g, or t
aaacaaaacctatacttgaccnctcnatatggcgcatcgctgctgcagccgaacgacgagcgcagcgagatagtgagcgaggaagcggccgnnnnnnnnnnnnnnnnnnnnnnnnnnnnnnnnnnncagtcgacggtaccggacatatgcccgggaattcggccattacggccggggctggcagctgagaaattttaaaggtaattgataattagtatttataactttttaaagggctctttgtatagcagaggatctcatttgactttgttttgatgagggtgatgctctctcttatgtggtacaataccattaaccaaaggtaggtgtccatgcagattttattggcagctgttttattgccattcaactagggaaataaagaaatcacgcagccttttggttaaatggcagtcaaaattttcctcagtgtatttagtgtgttcagtgatgatatcactggttcccaactagatgcttgttggccgcgggaagggaaatgacttgttctaattctaggttcacagaggtatgagaagcctgaactgaagaccattttcaagagggacggtatttatgaatcagggttaggctccatatttaaagatagagccagnnnnnnnnnnnaaatagaacccaaattgtgtcaactgttaatggggttttttaaacattgttttatcaagtcactgttaagtagaagaaagccatggtaaactgatacataacctaaattataaaagcagaaacctaactcactcgtcaaggcgaagttaccttttggaggaaagttaacagtaccttttttccctatctggtattctatagcaaacaaccccagaacttacaaactttctccaaagattttattgattgttatatcaaatcagaatgtaaacatgaactcttgcatatatttaaaattgtgttggaacatttgaacatgaatgctgtttgtggtacttaagaaattaattcagttggattatcattatgtgatactggcagattgcagtgcaaccttatgccaataaaatgtaatttaacagccccagatattgttgaatattcaacaataacaagaaaagcttttcatctaagttttatgctttaannnnnnnnnnnnnnnnnnnnnnnnnnnnngtttccttggtaccaattttaatttttatttggaagggagcagtataaaccttatttgtatttagtagtgcatctcatagatacagacaaggcaagacacgataagctgtttaaatagtgtttaatattgattgggggtggggacaaagaaaaactgtattacttaaacatactacatacgttttgtatatcattaaatctttaaaagaaatgaaataaatttattgtttacag

SEQ ID NO: 76581 - DNA, 482 bp, Homo Sapiens
attaagatttcaaactgggttacacactggaaaaggctgggttaagggccgaaatttaataaatctgtactgataactaaaggctacagagatttcatatattttttttaacttttagaaatcagagtgcttataaaatggctggctcatggctctgtcacccagcacctctgacgccgcctcctagccttcgttggtgagataaccaggaatagtgattccatgcgtaaacaacaagaatactaaaccaataaaactagcttatcatgcaaatattaaggcatctagaaagtcagttaaaatatattgtcatagagacagaacatctatttcccagcggacttcatgtaacaaaggctacgttgcaggggctgcgatctaccatcagtgaaatatcatcgaccctttttatgtcattacagtttcaaccttaagggaattagtgattgtaagtgctgcaattgctggtctattatcttctt

SEQ ID NO: 76582 - DNA, 659 bp, Homo Sapiens
  misc_feature (15)..(15): n is a, c, g, or t
  misc_feature (27)..(27): n is a, c, g, or t
acaccagtggggttnatcgagggaccnagaggggcctcaggctttcagatgaaatggctcctcctactcacccactttattcctctccatgtaattcaggacaagctgcaacttcccccagcttaacacaatgcccatacctcatacgatatgcgccctcccgttccatccctggccccctcaaacgagacttctcacaaggctgattacagatggtcaaacctggcttccaaggacagaattgcctctcggaagccagctgtggatctgagtccagagttggccacttgtgtgggtcctcacaagcaaagagagcactaaacttgacattgggggtccaccactccaactttgctttctgaaggttttggtgtacattgagccccagaaggaaaggagagtatctgtgagtgggggcctcccttgaccccagtacgaagtctatgccctgaatccccagagtagcccttcctggtgcccaactggcctggggacaaacagcgtccactacatctaggactgccggctaagtggacacacttcttgacctcctaccaggaactttggtaaaagctagctttggggaaggggttgggtgtaaatatgagagggtggagggagaccagctggtagcaataaacatgggtagaactaaaaaa

SEQ ID NO: 76583 - DNA, 914 bp, Homo Sapiens
  misc_feature (60)..(60): n is a, c, g, or t
aaggggggggccaccaattttggtcctcttttcgccccccggttacatatttcccccctntttttggatttggggcaacaatcccacagaaaacttttactgttccaaatttaaccctccttttgggaattgccctcggccccaaaattcggccgggtgaatgcaaaagaatcccttttttgggggaagaaggttccctttgtgatttggcccgttggtgtccactttttcccctaggggtgggaggggaaacccattttcaaacaacccccttattcccaataccccacgctcgtatagtcctgaaactgcaggaccagtttctctcccaaggggaggagttggagaccacagttgccccgttgtgtgaggccagtagtaggcatctggaatgctccagtctgatcttcccttctgcccacccctacctcacccctagtcactcatatcggagcctggactgccctccaggatgaggatgggggtggcaatgacaaccctgcaggggaaaggactgccccccatgcaccattgcagggaggatgccgccaccatgagctaggtggagtaactggtttttcttgggtggctgatgacatggatgcagcacagactcagccttggcctggagcacatgcttactggtggcctcagtttaccttccccagatcctagattctggatgtgaggaagagatccctcttcagaaggggcctggccttctgagcagcagattagttccaaagcaggtggcccccgaacccaagcctcacttttctgtgccttcctgagggggttgggccggggaggaaacccaaccctctcctgtgtgttctgttatctcttgatgagatcattgcaccatgtcagacttttgtatatgccttgaaaataaatgaaagtgagaatcctct

SEQ ID NO: 76584 - DNA, 481 bp, Homo Sapiens
atccttacaacatatatctttaattaaatttatattggtgggtttaaaaaacattaagtcaggagatgatagctagggaaataaggtatcctgtgagtatttataacaaaatatttaaaatttaaaaagaataagaaacatcaattggctttttgtaacttaaaagagactaaccaagtgttgtttcccagttctgtacaagcagaggccacaggaggattcttacataagaagcacagggaaaagaattgttaattctgcgtgtgtgtttttgtttctcagaattgtttggaagaactttgtccagtcagaaatgagtaaaaacaagatgtaagaaacattaaaacagggggcatatggtcttaagagataatcttggagaatatagcaaaagacaaattgctccattagatattataatttggtatgtaacatgaacatttaaaattctgattaaagtgactaaaagggtttgtttttt

SEQ ID NO: 76585 - DNA, 521 bp, Homo Sapiens
  misc_feature (181)..(201): n is a, c, g, or t
  misc_feature (251)..(276): n is a, c, g, or t
gcttacacacatgtcagcaagatagggagtgtggataggggagggctggtagctaacaaggggcctcacagagaaatattagtgactttaaccaggtttcagaatctgggccttacctttacaggttcaacaaaagaatggcatcaatagaggcagaagtatagacattgttttaaaaatnnnnnnnnnnnnnnnnnnnnnaaacattttagcattatagctgtctgaatccttcaataagaaggagaggnnnnnnnnnnnnnnnnnnnnnnnnnnaaactcaacaaccataaaacaaccctgcatgttataaaaggcagaattaaattttatttatttaaatccatggaactctggtaggccaggatatattatagtaccattatcaatgtgatattctgaaaatatgaactgagcgtcattaacaattgttggtacctaaacacaaaatgaatttcaaaagttactttgttctcaagatatgtcattcttttgggaataaatacttctggtgaaaaaaa

SEQ ID NO: 76586 - DNA, 807 bp, Homo Sapiens
  misc_feature (408)..(416): n is a, c, g, or t
cagatccctgttagagtcgattgatgatatgatgtgtagccagatatgcttgagatctaatgacagtttctcagcttcacagcgcatcgaactccatttaaaccacagcagaggctttatagaaagcatccgcccagctcttgagctgtctaaggcctctgtcaccaagtgctccataagcaagttggaactcagcgcagccgaacaggaactgcttctcaccctgccttccctggaatctcttgaagtctcagggacaatccagtcacaaggtatacctgtatatattttggatgactattctgatgtataatttctttttcttactttaagtggttgaaaacttctgaggccatgaaagcatgcatgctcattgatagaacagatataaaataaaccttcactaannnnnnnnngacagtagcatgaattagtgaaaagtccttgaataatagaatggttttcaaataactcagacaaaatgaataaaatatttatattaaattattgaaggttcttaataaagacatgaattatctgttattagtaaaagaattagctatatgtaagatgatgcttagaaattaccttcaccctagctgcctaaaggaagaaaggcctgtagtccctgggaaataaataaattaatgggaaataatatcttcatctatttgtgtcttaactcctctaagcactatttgatagttttcagtgtagacttaacccatctttcattaaatttattcctagatactcatatcttttgaaagtattgtaaatgtcattaaaaatattttttcattttct

SEQ ID NO: 76587 - DNA, 965 bp, Homo Sapiens
  misc_feature (884)..(884): n is a, c, g, or t
tcctaggtagcgaggcctgggtggcgtttcggcacgagggcctggatacaccgttaaggcgcagccgacggctgggaggcctaaggcccgaatcccccgagagcctcacctcagtttcgcggacgagacgggcccttgtggagttcgagtcgaacccagaagaaacgagggagcccgggtctcctccgagtgtgcagcgggctggcctggggtcccccgaaaggccgccgaagacaagcccaggatcaccccgtctgcagcagggtgcaggcttggagtcaccccaagggcagccagagccaggcgcagcgtccccccagcgtcagcaagacctacacctggagtcgcctaaagacagccagagtacagtcctgaatccccacgatgtcagccgaagccaagtgaggaggcaccgaagtgttctcaggaccagggagtactggcctcggagttggcccagaataaggaggagctgaccccgggggccccccagcatcagctaccgccggtcccaggatcaccagagccttaccccggtcagcaagctcccggtccggagccctctcagccactactggagctgacacccagggcacctggctccccccggggtcagcatgagccgagcaagccacctccagctggggagacggtgacagggcggcttcggggcaaaagaagcgaaaaagttctttcatccccaggccccagcgtccaagaagttgaataaagaggagcttcctgtaatcccgaaggggaagcccaaatcggggcgagtgtggaaggaccgctccaagaaaagattctcccagatgcttcaggacaagcccctgcgcacatcgtgccagcggaagatgaaggaacgacaggagaggaagctggcncaggactttgcccgtcaccttggaggaggagaaagagaggcgccgccaagaagaagaacagcgccggggctggaaaactgt

SEQ ID NO: 76588 - DNA, 2166 bp, Homo Sapiens
catggccgcctcagcaacagcccccctcctgtgcgtcacggacgcggcgactcctgacgtcataggaaggcgccggtttcggcgggggctgcacgtgcgcaggggtgtggaaacttaccggctgagccatggatacaccgttaaggcgcagccgacggctgggaggcctaaggcccgaatcccccgagagcctcacctcagtttcgcggacgagacgggcccttgtggagttcgagtcgaacccagaagaaacgagggagcccgggtctcctccgagtgtgcagcgggctggcctggggtcccccgaaaggccgccgaagacaagcccaggatcaccccgtctgcagcagggtgcaggcttggagtcaccccaagggcagccagagccaggcgcagcgtccccccagcgtcagcaagacctacacctggagtcgcctcaaagacagccagagtacagtcctgaatccccacgatgtcagccgaagccaagtgaggaggcaccaaagtgttctcaggaccagggagtactggcctcggagttggcccagaataaggaggagctgaccccgggggccccccagcatcagctaccgccggtcccaggatcaccagagccttaccccggtcagcaagctcccggtccggagccctctcagccactactggagctgacacccagggcacctggctccccccggggtcagcatgagccgagcaagccacctccagctggggagacggtgacaggcggcttcggggcaaagaagcgaaaaggttcttcatcccaggccccagcgtccaagaagttgaataaagaggagcttcctgtaatcccgaaggggaagcccaaatcggggcgagtgtggaaggaccgctccaagaaaagattctcccagatgcttcaggacaagcccctgcgcacatcgtggcagcggaagatgaaggaacgacaggagaggaagctggccaaggactttgcccgtcacctggaggaggagaaggagaggcgccgccaggagaagaaacagcgccgggctgagaacctgaaacgccgcctggagaatgagcggaaggcagaggtcgtccaagtgatccgaaaccccgccaagctcaagcgggcaaagaagaagcagctgcgctccattgagaagcgggacaccctggccctgctgcagaagcagccgccccagcagccggcagccaagatctgagctcaggacggcccgaggccttccatggccaacaaccatgtcagacacagcacctcaggccgctgctcagatgcctctgctggagctggcactccaaacccatggctccagaacagggacccccaccccgaccggggctcctcagcctttgaaggcttccaggcaggtctgtgtgggacagaagcccagagggggcctgggacctggcagagatgggggcgggaagagattcagctcccatccctccttcctctccttctccaagtgccttcaaaccaagaactgtacattcttctggttcctcagtgagctggtgactggcaggtgactccctcagcagtgtatgccctttctcagcatcctaggtccatcccaggcctggaggctgacagttgggaatccagcttcccccacaccttcccaaaggctgctctgagcacctccacaccccactgcctctgtccccagcaaactgaatccggttcctctccacttttcaatactgaaagattaaaatggggaggttgcagggagcagagcttttccctagcacccactttcccaaaccagtctctgcagaagccccagagaatctaactcatgcctgtccagtctacagcaaaaatatttattgagtgcctgttgcatacaggcacaatcctaggcaccggcaaatacagacaatagaccaaagtccctgccctcgaggagctttcattctgatggagagaaaacataataaacaagcaaaatgcaccacgtgtccaatgggggaagtgctatgagtaaagggggaagggatgggagggagcaggggcgaggtgtcaacacagggtggctctgcagctagctgggcacctcactgttccctttgctcagcacctgctgtgggccaggccttcagtgaccctggcctttggtggcagaaaaaacacaggaccaagatctcaagagt

SEQ ID NO: 76589 - DNA, 558 bp, Homo Sapiens
  misc_feature (37)..(37): n is a, c, g, or t
  misc_feature (62)..(181): n is a, c, g, or t
caacatggcaaaactccgtctctgcaaaaaatacaanaatgagcccggtatgttggcatatnnnnnnnnnnnnnnnnnnnnnnnnnnnnnnnnnnnnnnnnnnnnnnnnnnnnnnnnnnnnnnnnnnnnnnnnnnnnnnnnnnnnnnnnnnnnnnnnnnnnnnnnnnnnnnnnnnnnnnnnttgtctcaaaaaacaacaacaacaaaaagtcaaagtcataataagcaaattattggcttctttcttctagactaaaagaaattaaagagatgaaacaatcaattgcaagggtcaaaactagattggatcttggtttgaatgaaaaaaagcataaaatattcttgcaataattgtaaaaatttgaatgtggactaagtcctagattatattaaaatatttttaattttttaagcttgacaaatgcactgattgttatactttaaataactaaaaatctgagaatccacagtgctacagacaataaatgataaaatgggaaaaaatagtgaagatcttcttttaggaaaactaccaataaatgtagaatggatgattcc

SEQ ID NO: 76590 - DNA, 576 bp, Homo Sapiens
  misc_feature (132)..(349): n is a, c, g, or t
tttcattcaaaccaagatccaatctagttttgacccttgcaattgattgtttcatctctttaatttcttttggtctagaagaaagaagccaataatttgcttattatgactttgactttttgttgttgttgnnnnnnnnnnnnnnnnnnnnnnnnnnnnnnnnnnnnnnnnnnnnnnnnnnnnnnnnnnnnnnnnnnnnnnnnnnnnnnnnnnnnnnnnnnnnnnnnnnnnnnnnnnnnnnnnnnnnnnnnnnnnnnnnnnnnnnnnnnnnnnnnnnnnnnnnnnnnnnnnnnnnnnnnnnnnnnnnnnnnnnnnnnnnnnnnnnnnnnnnnnnnnnnnnnnnnnnnnntgactcacgaacggttggttgtatatttttcattttctcctaatgttcgggtgcaccagatctatttctttccctttcctttaatttcatgctagagcttcttttaaggacaataaaaaaatacatcttatatgatagaaataagataaattgtccaaaagagtaacacatttttctcagtgaagttaagaatatgattccctgaaaaatttgtaaaatagaaattt

SEQ ID NO: 76591 - DNA, 690 bp, Homo Sapiens
tactcacccccggagtctattctttctcttgccccaagaagagccctgttggtgctttaccaccgcttggagtctcccgaggacacaaacaggcagagagggacgtgtagggagagttctttcctgttttctgtgctttccttttaacacgactcccggaaggccactcatggccatgccaggagctttctcagaaacagtcataaacgatctcttgagtctctttcttgtcctcccagctgagctttcttattccaccctttctggtgtctataggaatgcatgagagaccctggacgtttttctgctctcttctggccctccatggagccatgggcctcggcctcggcggctcctcaccctcacaatttatttcctcctcccgtgccagcccttcttttgtgtctgaaaccggttttaaaatgtgactctcccagagaagaagccgctggctgtatgaaacttgacggcgcttttgtaaggtgccacccccaaactttaaggtagctaaaccaatttttaaaagattcaatggcttgttcatcctccagatgtagctattgatgtacacttcgcaacggagtgtctgaaattgtggtggtcctgatttataggatttcataattaaaatgtctgctgaataaatttggcttttgttttggaaataaaaaatacatatcggggatcctc

SEQ ID NO: 76592 - DNA, 1348 bp, Homo Sapiens
tctggatggcaacaaagatcacggagattcaggagaaactcgaaacccagtccaaggaatgtaggaaatccaataaaatgattcaagatctgagaggctgaacccctgacagcgtttgcatcctctatgcccgtatctcccacgcccgctgatggccttgccgattttcttcctgcaggaccttcactacaacgaagatgacgcaaaaggacaggaagaccagggctggtggctccagcttcccccgaaccaccccctgaggtcactcctgatgtggctttgctctgcagggagacgttcaggtagacctgctgagagccgagagggttctgagctctgcaggtgaattcagctgcatccctcaggtgcacccaaggcagctccagcacccccgggtttgagggctgtgaggggcacagggtcaggcctctccagctcaggctcagcctggcagggggattgctgtcaactgcatcaactgcacagaccaggcgcagagactggccctctgggagtgacagagatgagccattccccagagactgtggatactgtgccgtctccttggaagacagtcacagtcaagttctgaggagggtaggacacatggagatggacggtcctgttcgtggtcacgccggccccagggaaggtcacctgacaggtgaggctggtgccatggtcctggggctgtgggatgagggtgagcaccgaggagcgggtggtggaggggtccaggggggacacggaggtccctatccaggagatcatagggggtgtcccctgctcacaggcccagggcacagagcaggtcagattctgggggcagccggactccagggtgcctgggatgaggatgttgggcctgtgggtcaaggctgtcacattcacagagagccggtgatgtttataattccattttatacttcctttctccatacgaaagaagtatctccccgcatcacttcttctggcatctctgatgctcagggtgcaattcttggtatgtgggtccccaaggaggtggaatcggtcccgagtctcctcccacactgcccgagctgggttgtttgtggccactggagcatcctggtctgtattggccccttcccggaaccagtagccatgaactactgggccagggtaaatccagccatgcgaggggtaggagaaggagcagggcacatggacacacaggccttcctgcaccgtcacggaactctgcatcgtcagcagtttacttgtctgtccttccgccctctccctcccccagagcaggggcagcagcagcagcagcatgtctggggttagaggtgccagggccgcgagggaacgtctgttcctcagg

SEQ ID NO: 76593 - DNA, 1128 bp, Homo Sapiens
tagatgagcatttgcaaatgatttgatgtgatggaatatactaaactttcaacctcattaaccaaaatattgtgtctctccacagtaattcaattttgctctgattgtaatcattctcagttattactgtattttgatttcatcagtaagaatttatggacattttaatctcataaatacctataaaatatctttgattttgcctcttactccacaaattctacaatatttgttatctagtacttcatagaaaaagtttactgatccttgctttagatgtttggaatgattttatagcaaatctgaatgctttaggggtctaaaatgattttctccctgttaaaaatttcttcttttctttaggtgaaaggaagcatgtttacaccaatgccaaaaagcagatgctaatttctcttgctcctcctgttcttactcttcatttaaagagatttcagcaggctggttttaacctacgcaaagttaacaaacacataaagtttccggaaatcttagatttggctcctttttgcacccttaaatgtaagaatgttgcagaagaaaatacaagggtactctattccttatatggagttgttgaacacagtggtactatgaggtcggggcattacactgcctatgccaaggcaagaaccgcaaatagtcatctctctaatcttgttcttcacggtgatattccacaagattttgaaatggaatcaaaagggcagtggtttcacatcagcgacacacatgtgcaagctgtgcctacaactaaagtactaaactcacaagcgtacctcctattttatgagagaatactgtaataatatcaaaagcactttttctggaaacacatttatggcttttataatggctgaaataacgataaaaaaagactaattaaaatcatgttcacttaacattaaatacatgccagaagaaatcatgtttatttaaatattgaagggaaaaatacctaaaaatgtacaaaggttttatattgtcatagtggtttttattcctgctttgtttctggaaaggaaatcctgaattacttaagtactttgtgtttaatatatctgggtgatggatcacaacacatcaataaactgacttaccctaaaaaac

SEQ ID NO: 76594 - DNA, 999 bp, Homo Sapiens
  misc_feature (101)..(101): n is a, c, g, or t
  misc_feature (827)..(827): n is a, c, g, or t
  misc_feature (840)..(840): n is a, c, g, or t
gtcgctaaagaacagttataaatgccacacccatccccacccacagtgtcccctatctccagacctcattcgcaatgaagtagaatgtctgaaagcagatntcaaccacagaatcaaggagttctcttcaactccctcttcagtgcctactatgttgcatttctccccctgtgttttgtgaagagtacccagtactatgacatgcgctggtcatgtgagcacctcattatggtgtggatcaatgcttttgtcatgctcaccacgcaactgttgccatccaaatactgtgatttgctacataaatcagctgctcacctgggcaagtggcagaagttggaacatgggtcctacagcaatgctccacagcacatttggtcagaaaatacaatatggcctcaaggggtgctggtgcggcacagcagatgtttatatagagccatggggccttacaacgtggcagtgccttcagatgtatctcatgcccgcttttatttcttatttcatcgaccattaaggctgttaaatctgctcatccttattgagggcagtgtcgtcttctatcagctctattccttgctgcggtcggagaagtggaaccacacactttccatggctctcatcctcttctgcaactactatgttttatttaaacttctccgggacagaatagtattaggcagggcatactcctacccactcaacagttatgaactcaaggcaaactaagctgcctctcaacaatgagggagaactcagataaaaatattttcatacgttctatttttttcttgtgatttttataaactatttaacgatacttttatatntttgtatactatntatgttttggaaagtcgggaaagagtaacgggatattaaaatgtaatccgtaaacaagggtgatgggtgatctttcaattgtggtttagtaatatttcgaataatatacatatgaggaaggtatggcctgttccagtaaaggagattgggtttttggtt

SEQ ID NO: 76595 - DNA, 901 bp, Homo Sapiens
  misc_feature (109)..(136): n is a, c, g, or t
  misc_feature (827)..(827): n is a, c, g, or t
tccttttcttcagagtttattttgaattttcatttttggataaccaagcagctctttaagaagaatgcacagaagagtcattctggcacttttggatagtacataagannnnnnnnnnnnnnnnnnnnnnnnnnnnaatagtcacattcagctcgcttgctcaaaccagactcccacattggggtgagcaagatgagcccataggattccagagttaatacgtaaccgtatatacaaacagccaaaaaaccataatggtgccacagggatggagcagggaagggcatctctaacgtgtcctctagtctatcttcgctaaacagaacccacgttacacatgataactagagagcacactgtgttgaaacgaggatgctgaccccaaatggcacttggcagcatgcagtttaaagcaaaagagacatcctttaataactgtataaaatccaggcagttccattaaaggggttaagaaaaccaacaacaacaaaaagcgagggactgtctgttgtcactgtcaaaaaggcacttggagttaatgggaccaggattggaggactcttagctgatacagatttcagtacgatttcattaaaaggcttggatgttaagagaggacactcagcggttcctgaagggagacgctgagatggaccgctgagaagcggaacagatgaacacaaaggaatcaaatctttacaaccaaattgcatttaagcgacaacaaaaaaaggcaaaccccaaaacgcaacctaaccaaagcaaaatctaagcaaaatcagacaacgaagcagcgatgcatagctttccttttgagagaacgcatnaccttgagacgctacgtgccaacctaagttctcaacgacagcttcacagtaggattattgtgataaaaatctcg

SEQ ID NO: 76596 - DNA, 2378 bp, Homo Sapiens
  misc_feature (1749)..(1749): n is a, c, g, or t
  misc_feature (1760)..(1800): n is a, c, g, or t
ctactggtgtgtgcagcaagacaatgagcagttagcgcgatctggtacaaactgtttagagaatgttgttattctgaatggtgaaaaatttaccctagaaatctgggataaaacttgcaactgcacactggatatcttcaaaaccacaatcccacatgcgctgttgacctggcgacccaattctggagaaactgcccccccacctccatctcctgtaagtgaaaagccattggatacaatatcacagaagtctgtagatattcatgattctattcaaccaaggtctgtggataacagaccacaagcaccactggtttctgcgtctgctgttaatgaagaagtcagcaaaattaaatctacagcaaaatttccagaacaaaaattgtttgctgccctgttgattaaatgtgttgtgcagctggaactcatccagactatcgacaacattgtcttcttcccagccacaagtaagaaagaagatgcagaaaacttagctgcagcacagagagatgcggtggactttgatgttcgcgttgatactcaagaccaaggaatgtaccgctttttaacatcacaacaactttttaagctactggactgcttattagagtcacatagatttgcaaaagcgtttaattccaacaacgaacagaggactgccctgtggaaagcaggattcaaaggcaaatccaagcccaaccttctgaagcaggagaccagcagcctggcctgtgggctgcgcattctcttccggatgtacatggatgagagccgcgttagtgcctgggaggaggtccagcagaggcttttgaatgtctgcagtgaagcactaagttacttcctcactctaacatcagaaagtcatcgagaagcctggactaacttactgcttttgtttctaactaaagttctaaagataagtgataataggtttaaagctcatgcatcattctactaccctctcttatgtgaaattatgcaatttgacttgattcctgaacttcgtgctgttcttagaagattttttctgcgaatcggagtagtttttcagatatcacaaccacctgaacaggaacttggaataaacaagcaatgatgggaacttaatatttttgttggcatttacatccctctgctctttaaaaggacgctggagctgaggtttcctacctgaaaaatgatttctctggattgcagtgtctgagttactggtaaagatgcttagaagtcttactcaaacttgcaacactccagtcccttttagtgctggtggattttgtgtgttatattggcctcatgttgagcagaaagcctgtttaaacagtgtcagctcatgctcacgggtccttccctgtcttccacggcaggaaaagccccacgtttttggcaggtgtggaagtgaaacttacccaaagaactatagatgtaaagattgaacttctacaagaagtacaactcaggagagctgtattttgaaggataaaatgtttataattggggagtggggagagaagaagaaattattgttcatggtaaaagatatttagcaactatggtattcttattctgaagattttgcacactcaggctatctgagatactggtaatcatcctgtgaaaaatgtacagagatgcaggtctgtaatataaaaatcttaaaacattatatagttcttcctgcactgtgttctgtattgtcttattcatttgctaaatacccataatattgtgtcaaatgcactaaacatntgggtggaacnnnnnnnnnnnnnnnnnnnnnnnnnnnnnnnnnnnnnnnnntggtaggtggtgattttgaggctgtaacatgcccagaagctgttgtggccgacacttcaacaatagggaaaaaaaggtagaaaatatccctactgacagtaactacctgtcacatatttctcttaggacttttaaagatgagccattaaaatagaatgatcctttatggaccaaaacttgaatcactgcaaaatgaatccagattgctgtcattttcttttcttttgggtggtggggcttgatgtagattttactctatgtacagaatttaacgttgaatatattaaaataacaaatctggcatggtttgcggaggttagatttactggaaatgtattcatactgtgaattgtgctctgatggttaaaagacaagattgtcaagcattccgtattaacagtggatgtagaaaattttttcagatggacaaaatgtatatggtacagatgtaaagttttctatgtaaaaaattctgtacaactttctgtacaatattgattcccatctggcatattctaatcaggttataggtcaataaagtttttgaattatttcatcagtgcaatcaaaacctgtat

SEQ ID NO: 76597 - DNA, 1004 bp, Homo Sapiens
  misc_feature (569)..(569): n is a, c, g, or t
ataacatttatccatctatgctgcagaaaaactgggaagcacaaagaaaaaaattaaaatcacccatcatcttgcctccagagagccagacatacacacacacgtatgtgtatgtaatgttggatagaaactgtgatggttatcctatgcattgttttagaaaataaaaaggaggtgatacatggtacagaggcagaggtgcctagtggttaccactcactctgtgaacttgggaaaacacgcatgtagtttttgaggatgaaatctatgaacatatgtgtctggcacatcgtttatgctcagtaactattacccagcatttttattaaacactttccagtgtctctatgttagtctgttttgtactgctatgaagaaatacctgagactggatcatttacaaagaaaacaggggttactttggctctcagttctgcagcctgtacaagcacggcaccatcatctgctcggcctctggtgaggcctcgggaagcttttacgcacagtggaaggcccgggggagcccacacatctcatggcgagagaggaggtggtcccaggctctttanacaaccaactctgcctgaactaacaaagtgagaagtcactcactactgtgaggacgacacaaagccattcataagggatctgcccccatgacctaaacattcctgctaggcccacctccaaccctggaggccacatttcaacatgaggtttggagggaacaggtgcaagccatgtcagtcactaagtattcttcctcaacgggactttgacatggctacatgctgttacattgtataggcattccccaatttactgaaatgtcttctactggggccatttagattattaaaagtccaccttaaacaggcatgggaatgcacgttagatgtgcagacaacagaatggctacctcaaagccaacccgaaacttctggattcctcgccaaggctgcagcaataaaaacatggttttgttgattccagaaaagtctgct

SEQ ID NO: 76598 - DNA, 1273 bp, Homo Sapiens
cagtcgacggtaccggacatatgcccgggaattcggccattacggccggggggcttcccattgtttctggcctctaataggttgggaagttttagcgtgttttatgcaatttcagtgctaacaatttcttcctttcctgcttgaataagatacactctaatggcatttgaacatgtaatcaccagagattctgaaatgactggtttatgttaagctatttttaggcatcttcaccttgctttaagtaggttgaagtttttgcaaaggcatttaaaaattcaatttcttgtcagatactacaaataattttcttaaaagtctaagatagcagaaaatacagtaaaaacacaggagaagaagctgagctatcggaacaggaaatagaaggaactctagtttctgtttgaagtgaggattttctgaattatctaatatcatctaggttttctttaaaattttatttcgttcttcagcttcaagcatcttctcactaatgtttttcactataacagagaattcatttcaatttgagttggttctctcaatgttctattgatcattacaccctaactctccttccttggctcaaacaatattttccctataacaaaggcaataggacacaaaattcacatcctgctgggcctttttttcatcaagtcaggctgatataaaaacattggaagtcttttcaccaaaccctgactttattgaatgctagtagaagatgtagaaattagagacatctgatttgtttatcaccttagcaggaaaaaccacagtccaaaagacaagcaaattaagaatgggagcttaaccatgcctccatggggaagtctagactttgagccaggtacagtaagaaaaattagcctctgattcattaagtttgccacatgacttattttgatattttggatacattaactcacttaggagaattcagaaaagaatgggtgattaaagttcattacagctgaataaatgtgtctaaaacagactcttgtattctgaaagtacagtctacaactgataaaaccttatgattcttttctcccccattatgcccctatatatatcaagatttgggtactttattttagtagaaaatatatatcttttacatatgtatgtatttataaatgcatagatatatgtataaaaatttgtaagcgttagcggcattaattcaccaatgcatttggacaacttgatgtaactgactttattttatgtgactataataaaaagcataattttctcattctgtcaa

SEQ ID NO: 76599 - DNA, 3217 bp, Homo Sapiens
  misc_feature (788)..(797): n is a, c, g, or t
aattaggtgaactatagaacaagtggttaaaaaagcaggctggtacggtccggaatttccgggatatcgtcgacccacgcgtccgcgtttctcagagggatagagaagaggcccttcaccagttccgctcaggaaaaagcccaattttagtggctacagcagttagcagcaagaggactggacatttcaaatgtgaaaacatgttatcaattttgacttgccaagtgatattgacagaatatgtacatcgtatgggtcgtacgggaacgtgtaggaaaccttggctggctaaccgtcattctttaacagagaggaacataaatattactaaggatttgttggatcttcttgttgaagctaaacaagaagtgccgtcttggttagaaaacatggcttatgaacaccactacaagggtagcagtcgtggacgttctaagagtagcagatttagtggagggtttggtgccagagactaccgacaaagtagcggtgccagcagttccagcttcagcagcagccgcgcaagcagcagccgcagtggcggaggtggccacggtagcagcagaggatttggtggaggtggctatggaggcttttacaacagtgatggatatggaggaaattataactcccagggggttgactggtggggtaactgagcctgctttgcagtaaggtcaccctgccaaacaagctaatatggaaaccacatgtaacttagccagactataccttgtgtagcttcaagaactcgcagtacattaccagctgtgattctccactgaaannnnnnnnnnaagggagctcaaggtcacaagaagaaatgaaaggaacaatcagcagccctgttcagaaggtggtttgaagacttcattgctgtagtttggattaactcccctcccgcctacccccatcccaaactgcatttataattttgtgactgaggatcatttgtttgttaatgtactgtgcctttaactttagacaactttttattttgatgtcctgttggctcagtaatgctcaagatatcaattgttttgacaaaataaatttactgaacttgggctaaaatcaaaccttggcacacaggtgtgatacaacttaacaggaatcatcgattcatccataaataatataaggaaaaacttatgcggtagcctgcattagggctttttgatacttgcagattgggggaaaacaacaaatgtcttgaagcatattaatggaattagtttctaatgtggcaaactgtattaagttaaagttctgatttgctcactctatcctggataggtatttagaacctgatagtctttaagccattccagtcatgatgaggtgatgtatgaatacatgcatacattcaaagcactgttttcaaagttaatgcaagtaaatacagcaattcctctttcaacgtttaggcagatcattaattatgagctagccaaatgtgggcatactattacagggaaagtttaaaggtctgataacttgaaataggtttttaggagaattcatctacttagactttttaaatgcctgccataaatgaaattgaaatggtagaatggctgaccacagcaatgaccagccctcattagggccctggatgatttttggtctaataacgcatgctagtgttgatgttttttggtcaagagggtatgaacaggaagaattaaatgcagcaggctttattttaaatgccgattcacattactctgttcaagctgcgttgagatgttaaactggcttactatagacttcgtaaaaatggctccagaagagtaacaaactgaaatctttgagatcacacaggttggaaatatgtacataactgcacaaggtgtcaattctgctctacagtgcagttttagtcagttttagttgcataggtttccattgtatttatagtctgtttatgctaaatctggccaaagatgagcattgtccaccactaaaatgcctctgccactttgaattctgtgctaattttgtggccagaatgcggtgatcaaaacgctccatctttttacagtggcataggaagacggcaaaaatttcctaaagtgcaatagattttcaagtgtattgtgccttgttctaaaacttttattaagtaggtgcacttgacagtattgaggtcatttgttatggtgctatttcaattagtctaggtttaggcccttgtacattttgcccataactttttacaaagtacttcttttattgcacattcagagaattttatatatatgtcttgtgtgcgtgtccttaaacttccaatcttacttgtctcttggagatgttgaacgcagctgtctaggaaggggatgggactagattctaaaatttatttgggaccatgggaatgatagttgggaagaaaactatttgcacacgacagatttctagatacttttgctgctagttttatgtaatatttattgaacattttgacaaatatttatttttgtaagcctaaaagtgattctttgaaagtttaaagaaacttgaccaaaagacagtacaaaaacactggcacttgaatgttgaatgtcaccgtatgcgtgaaattatatatttcggggtagtgtgagcttttaatgtttaagtcatattaaactcttaagtcaaattaagcagacccggcgttggcagtgtagccataactttctgatgttagtaaaaacaaaattggcgacttgaaattaaatcatgccaaggttttgatacacttgtcttaagatattaatgaaacacttcaaaacactgatgtgaagtgtccagattctcagatgtttgttgtgtggattttgttaagtggtgtgttgtgtttgattttcagtgaatgtctggcacattgcaatcctcaaacatgtggttatctttgttgtattggcataatcagtgacttgtacattcagcaatagcatttgagcaagttttatcagcaagcaatattttcagttaataaggtttcaaaaatcatgtaaggatttaaacttgctgaatgtaaagattgaacctcaagtcactgtagctttagtaattgcttattgtattagtttagatgctagcactgcatgtgctgtgcatattctgattttattaaaataaaaagttgaactgcacagtctcctttgttgttgtcaattgtggtttattttcagaggtgtaaataaagtgctcttgcctgaaacctcttgcc

SEQ ID NO: 76600 - DNA, 833 bp, Homo Sapiens
tgtaatatgaacgtggtaaaaaagcaggctggtacggtccggattcccgggatatcgtcgacccacgcgtccggggtctttcattttgtgatcttttcccttgacattcagcaaaagccctgacagtggtagaataaaggcaggatgggtgagtgcagagtgattctgcttttgttgggtttcagggaaacccataggcagattctgaacctggtggttgattctacatgtgggaattgtggctttgaagacctctggacatgagaacatatttccaagacagaggattctatggggacgggtcaccattaaatggtgtgcaagcataattctgttcaaaaatgaaggcatgtttagaggtgtgtcacagttaaaaaccaacctgaactttgcagttagattttaaaagatggtcagttagagtagaaatagcttagaatattccattgagtctaagatacagttagaaatcaacatctttgaaattagggtgtgtcttttaatcagttgatgtcagagtttaacgggcagcatttttttctttcttgggattacaaaaaatgatggtgcattctataattggcagcatcttagatctgaggaagtatgatacttgtttgacggaatggttgacggcagaattttgttaaaaagctatatcttcactgtattttaacacattatctaatttaagaaattgttaagatcccccacctggcagaggacccagtacaaaataggcactcaatagatgttacaccaactttggaagggcaaacatatttcttaatgagaggcagtccttcatgttttgcaataaaatgacttttaaa

SEQ ID NO: 76601 - DNA, 1060 bp, Homo Sapiens
  misc_feature (854)..(858): n is a, c, g, or t
  misc_feature (860)..(862): n is a, c, g, or t
  misc_feature (871)..(872): n is a, c, g, or t
gcggccgccaagcactgccggacgaggtgtatcaatgctggggatggggtcggagagcaccccacccaggccctgctggacatcttcaccatccgtgagagctgggaactgtcaatggcatgacgatcacgatggtgggtgacctgaagcacggacgcacagtacattccctggcctgcctgctcacccagtatcgtgtcagcctgcgctacgtggcacctcccagcctgcgcatgccacccactgtgcgggccttcgtggcctcccgcggcaccaagcaggaggaattcgagagcattgaggaggcgctgcctgacactgatgtgctctacatgactcgaatccagaaggaacgatttggctctacccaggagtacgaagcttgctttggtcagttcatcctcactccccacatcatgacccgggccaagaagaagatggtggtgatgcacccgatgccccgtgtcaacgagataagcgtggaagtggactcggatccccgcgcagcctacttccgccaggctgagaacggcatgtacatccgcatggctctgttagccaccgtgctgggccgtttctagggcctggcttcctcagcctcttctctttaggcccagctgctgggcaaggaattccagtgcctcctacgggggcagcacacttagatattcctggacatccagatagctcacatgtgctgaccacacttcaggctctggactggagctctctggcatgggggtggggcctcagatgctggggcccagtctgccccatcttcattcctgcaccttaaacctgtacagtcatttttctactgacttaataaacagccgagctgtcccccaaaaaannnnngnnnacaaaaaannaaaacatgtcggccgccctcgggccctcgaggaagcttttctagaaccattttcgttttggcggcgccggggccccagcaagggtaaagcggaaccatgggtccaataggcctggtttcccatagggaagaaacccctgggtccaatggaactaaggtggcttttggagaatctcctccaccccaaat

SEQ ID NO: 76602 - DNA, 1963 bp, Homo Sapiens
  misc_feature (628)..(628): n is a, c, g, or t
  misc_feature (1536)..(1585): n is a, c, g, or t
cttggattctgtcggatggacttggggctagctgcggcggggctggaggaggccagataaccatgtcagccacagttgtagatgcagttaatgctgcacccctatcggggtccaaagaaatgagtttggaagaaccaaagaagatgaccagagaggactggagaaagaagaaggagctagaagaacagcgaaaattgggcaatgctcctgcagaagttgatgaagaaggaaaagacatcaacccccatattcctcagtatatttcttcagtgccatggtatattgatccttcaaaaagacctactttaaaacaccagagaccacaaccagaaaaacaaaagcagttcagctcatctggagaatggtacaagaggggtgtaaaagagaattccataattactaagtaccgcaaaggagcatgtgaaaattgtggggccatgacacacaaaaagaaagactgctttgagagacctaggcgagttggagccaaatttacaggtactaatatagctccagatgaacatgtccagcctcaactgatgtttgactatgatgggaagagggatcggtggaatggctacaatccagaagaacacatgaaaattgttgaagagtatgccaaagttgnatttggcaaaacgaacattgaaagcccagaaactccaagaggaattagcctcaggaaaattagtggaacaggctaattctccaaaacaccagtggggagaagaggaaccaaattctcagacggaaaaagatcataatagtgaagatgaggatgaagataaatatgcagatgatattgacatgccctgaacagaattttgactccaagagacgaattactgtccggaatctcaggattcgagaagatattgcaaaatatttgaggaatttagatccaaattctgcctactatgatccaaaaactagagcaatgagagagaatccttatgccaatgcaggaaagaatccagatgaagtgagttatgctggagataactttgttaggtacacaggagataccatttcaatggctcagacacagttgtttgcatgggaagcctatgacaagggatctgaagtgcatctacaggcagatcctacaaagctagagctgttgtataagtccttcaaagtcaaaaaagaagatttcaaagaacagcagaaagaaagcatcctggaaaagtatggtggccaagaacatttggatgcccctccagctgaattgcttttagcccagactgaagactatgtggagtactcaagacatgggacagtcatcaaaggacaggagcgggctgttgcctgctctaagtatgaggaggatgtgaagatccacaatcacacacatatctggggatcgtactggaaagaaggccgatggggatacaaatgctgtcactcttttttcaagtattcctattgtactggagaagctgggaaggagattgttaactctgaggagtgtattataaatgagataactggggaagaatctgtgaaaaaacctcaaaccctcatggagctgcatcnnnnnnnnnnnnnnnnnnnnnnnnnnnnnnnnnnnnnnnnnnnnnnnnnncatcgaaagagcagttcagatagtgatgatgaagaaaagaagcatgaaaaattgaaaaaggcactgaacgcagaggaggcccgccttcttcatgtcaaggagaccatgcagattgatgagaggaagcggccttacaatagcatgtatgaaactcgagaacctactgaagaggaaatggaggcatatagaatgaaacgtcagaggccagatgaccccatggcctctttccttggacagtagcaactagtcagaagaccatccaagatagatgcagctgatacattcttttcagcttcttattgatgattgtagatagaaaaatccttgtttattcttcttgctgcctggctttaataaatatttcagatgcctcacagt

SEQ ID NO: 76603 - DNA, 980 bp, Homo Sapiens
  misc_feature (964)..(964): n is a, c, g, or t
tgcggccgccctcccacccctgttgcgcccactgctgccgcctgccctgcagggtgctctccagcagtggctggggcctgcgtggccttggcgggccaagatcgccatcggcctgctggagttcgtggaggagctcttccacggctcttacgggactttctacatgtgtgagaccacactggccaatgtgggctacacagccacctacgacttcaagatggccgacctgcagcaggtggcacccgaggccaccgtgcgccgcttcctgcagggccgccgctgcgagcacagcaccgactgcacctacgggcgcgactgcagggccccgtgtgacaggctcatgaggcagtgcaagggcgacctcatccagcccaacctggccaaggtgtgcgcactgctacggggctacctgctgcctggcgcgcccgccgacctccgcgaggagctgggcacacagctgcgcacctgtaccacgctgagcgggctggccagccaggtggaggcccatcactcgctggtgctcagccacctcaagactctgctctggaagaagatctccaacaccaagtactcttgatggggcagtgaggggcctggccacccttcctggagctggccaggtgccagggtccagccctccctcaaggaatcctgtcagaagatgtgaaatgcaactgtgttgcaaaatcactcccctaccgtcagggctctggattccagcaccacagacatgagaccccagctcggagcaaaggcggacatggacatcccggcaggagagtcctccaagggggtttgttactctgaagaacgtaatgtcaataaacagcttttatgtaatgcccagggctgagcaccctgagcccccatcgatgctgtgtgtgggacccttcgccccgctgtggatccacccagcccaggcactcaggctggggttgagcccctgaatccttcctggcgaggnagccctccagggggtt

SEQ ID NO: 76604 - DNA, 697 bp, Homo Sapiens
  misc_feature (19)..(19): n is a, c, g, or t
  misc_feature (85)..(125): n is a, c, g, or t
cacgtgtccacgagagtcngtcccccaaatcccccctgcccgccggggtccgagcccggcccctccgggctggaaatcggcagcnnnnnnnnnnnnnnnnnnnnnnnnnnnnnnnnnnnnnnnnngtactgccagatccagtaccggcccttctttcccctgaccgccactctgggcctggccggcttcaccctgctcctcagtctcctggcctttgccatgtaccgcccgtagtgcctccgcgggcgcttggcagcgtcgccggcccctccggaccttgctccccgcgccgcggcgggagctgctgcctgcccaggcccgcctctccggcctgcctcttcccgctgccctggagcccagccctgcgccgcagaggactcccgggactggcggaggccccgccctgcgaccgccggggctcggggccacctcccggggctgctgaacctcagcccgcactgggagtgggctcctcggggtcgggcatctgctgtcgctgcctcggccccgggcagagccgggccgccccgggggcccgtcttagtgttctgccggaggacccagccgcctccaatccctgacagctccttgggctgagttggggacgccaggtcggtgggaggctggtgaaggggagcggggaggggcagaggagttccccggaacccgtgcagattaaagtaactgtgaagttttc

SEQ ID NO: 76605 - DNA, 1248 bp, Homo Sapiens
ataatcccgtacccggcccccccggaggcccctctccaacaaaggctggtaccggtccggaattcccgggatatcgtcgacccacgcgtccgctcccgcccggaagtgcccgaggggccgcgatggagctgggggagccgggcgctcggtagcgcggcgggcaaggcaggcgccatgaccctgattgaaggggtgggtgatgaggtgaccgtccttttctcggtgcttgcctgccttctggtgctggcccttgcctgggtctcaacgcacaccgctgagggcggggacccactgccccagccgtcagggaccccaacgccatcccagcccagcgcagccatggcagctaccgacagcatgagaggggaggccccaggggcagagacccccagcctgagacacagaggtcaagctgcacagccagagcccagcacggggttcacagcaacaccgccagccccggactccccgcaggagcccctcgtgctacggctgaaattcctcaatgattcagagcaggtggccagggcctggccccacgacaccattggctccttgaaaaggacccagtttcccggccgggaacagcaggtgcgactcatctaccaagggcagctgctaggcgacgacacccagaccctgggcagccttcacctccctcccaactgcgtactgccacagccacgtgtacacgacacttcggtcccccaaacgccaccctggccctggccggcgtcacccagccccgcaccctccgggcctttgcaatgtaccgcccgtagtgcctccgcgggcgcttggcagcgtcgccggcccctccggaccttgctccccgcgccgcggcgggagctgctgcctgcccaggcccgcctctccggcctgcctcttcccgctgccctggagcccagccctgcgccgcagaggactcccgggactggcggaggccccgccctgcgaccgccggggctcggggccacctcccggggctgctgaccctcagcccgcactgggagtgggctcctcggggtcgggcatctgctgtcgctgcctcggccccgggcagagccgggccgccccgggggcccgtcttagtgttctgccggaggacccagccgcctccaatccctgacagctccttgggctgagttggggacgccaggtcggtgggaggctggtgaaggggagcggggaggggcagaggagttccccggaacccgtgcagattaaagtaactgtgaagtttccacc

SEQ ID NO: 76606 - DNA, 1038 bp, Homo Sapiens
agcgtggaggcgcagagcaagcacctggccaagctcatctccaagcgctgtcccagctgtcaggctccaatcgagaagaacgaggggtgcctgcacatgacctgtgccaaatgtaaccatggattgctgctggcgctgcctcaagtcctggaagccaaatcacaaagactattacaactgctctgccatggtaagcaaggcagctcgccaggagaagcggtttcaggactataatgagaggtgcactttccatcaccaggcgcgggagtttgctgtgaacttgcggaaccgggtgtctgcaatccatgaagtgcctcccgcccagatccttcaccttcctcaatgatgcctgccagggactggagcaggctcggaaggtgctggcctacgcctgcgtgtacagcttctacagccaggacgcagagtacatggatgtggtggagcagcagacagagaacctggagctgcacaccaatgccctgcagatcctcctggaggaaaccctgctgcggtgcagagacctggcctcctccctgcgcctcctgcgggccgactgcctcagcacgggcatggagctgctccggcggatccaggagaggctgcttgccatcctgcagcattctgcccaggatttccgggttggtcttcagagtccatcagtagaggcctgggaggcaaaaggacccaacatgcctggcagtcagccccaggcctcctcagggccagaggcagaagaggaggaggaagacgatgaggatgatgtgcccgagtggcagcaggatgagtttgatgaggagctggacaatgacagcttctcctacgatgagtctgagaacctggaccaagagactttcttctttggtgatgaggaagaggatgaagatgaggcctatgactgagggggcagatgcaggaaacacctagagcagccccagagtcacggggctgagggggcgggagctgcccctgtcatagggagggggattcccagcgtctgtagtgcttcctgtttgctgaataaaggtctctttctcacac

SEQ ID NO: 76607 - DNA, 1815 bp, Homo Sapiens
  misc_feature (613)..(642): n is a, c, g, or t
  misc_feature (1371)..(1387): n is a, c, g, or t
gacggcaaagtcgccgccctggccgccagcccggcctcggtggcagtggactcgggctctgaactcaacagccgctcctccacgctctcctccagctccatgtccttgtcgcccaaactctgcgcggagaaagaggcggccaccagcgaactgcagagcatccagcggttggttagcggcttggaagccaagccggacaggtcccgcagcgcgtccccgtagacccgtcccagacacgtcttttcattccagtccagttcaggctgccgtgcactttgtcggatataaaataaaccacgggcccgccatggcgttagcccttccttttgcagttgcgtctgggaaggggccccggactccctcgagagaatgtgctagagacagcccctgtcttcttggcgtggtttatatgtccgggatctggatcagattctgggggctcagaaacgtcggttgcattgagctactgggggtaggagttccaacatttatgtccagagcaacttccagcaaggctggtctgggtctctgcccaccaggcggggaggtgttcaaagacatctccctcagtgcggatttatatatatatttttccttcactgtgtcaagtggnnnnnnnnnnnnnnnnnnnnnnnnnnnnnntcgggacaagtgaacacattaacatgattctgtttgtgcagattaaaaactttatagggacttgcattatcggttctcaataaattactgagcagctttgtttggggagggaagtccctaccatccttgtttagtctatattaagaaaatctgtgtctttttaatattcttgtgatgttttcagagccgctgtaggtctcttcttgcatgtccacagtaatgtatttgtggtttttattttgaacgcttgcttttagagagaaaacaatatagccccctacccttttcccaatcctttgccctcaaatcagtgacccaggggagggggggatttaaagggaaggagtgggcaaaacacataaaatgaatttattatatctaagctctgtagcaggattcatgtcgttctttgacagttctttctctttcctgtatatgcaataacaaggttttaaaaaaataataaagaagtgagactattagacaaagtatttatgtaattatttgataactcttgtaaataggtggaatatgaatgcttggaaaattaaactttaatttattgacattgtacatagctctgtgtaaatagaattgcaactgtcaggttttgtgttcttgttttcctttagttgggtttatttccaggtcacagaattgctgttaacactagaaaacacacttcctgcaccaacaccaataccctttcaaaagagttgtctgcaacannnnnnnnnnnnnnnnnaatgtccaaaagtgggggaaagtgctatttcctattttcaccaaaattggggaaggagtgccactttccagctccacttcaaattccttaaaatataactgagattgctgtggggagggaggagggcagaggctgcggtttgactttttaatttttcttttgttatttgtatttgctagtctctgatttcctcaaaacgaagtggaatttactactgttgtcagtatcggtgttttgaattggtgcctgcctatagagatatattcacagttcaaaagtcaggtgctgagagatggtttaaagacaaattcatgaaggtatattttgtgttatagttgttgatgagttctttggttttctgtatttttccccctctctttaaaacatcactgaaatttcaataaatttttattgaaatgtcaaaaaaa

SEQ ID NO: 76608 - DNA, 1188 bp, Homo Sapiens
  misc_feature (42)..(76): n is a, c, g, or t
  misc_feature (930)..(982): n is a, c, g, or t
ggaacgacgagcgcagcgagtcagctagcgaggaagcggcgnnnnnnnnnnnnnnnnnnnnnnnnnnnnnnnnnnncagtcgacggtaccggaccatatgcccgggaattcggccattacggccggggagagcggagggggctcgggagaggagtggacgccgctggccaggatggtgctggagagcgtggcccgtatcgtgaaggtgcagctccctgcatatctgaagcggctcccagtccctgaaagcattaccgggttcgctaggctcacagtttcagaatggcttcggttattgcctttccttggtgtactcgcacttcttggctaccttgcagttcgtccattcctcccgaagaagaaacaacagaaggatagcttgattaatcttaaaatacaaaaggaaaatccgaaagtagtgaatgaaataaacattgaagatttgtgtcttactaaagcagcttattgtaggtgttggcgttctaaaacgtttcctgcctgcgatggttcacataataaacacaatgaattgacaggagataatgtgggtccactaatactgaagaagaaagaagtataataataataacaatattttctcattctttgtgtatagaaaattttaaaatggtggtcttaattattactactggttgaacaattatttcttccaatttattttcttcctgcactactgtttgtatttgatcctttgtctattcagtcacttaattagaaattaaattgtcaagcctcttattctgacttcaaagaattaatgtatcttccaacaataaaatcacttctgattttaatctaggaaaacctaaattgtggctatggatccaaagctgtttgtttctttgaatatcaatattttcaacaggatcttgtatttaaaattcccacctacattgttaaatatgttannnnnnnnnnnnnnnnnnnnnnnnnnnnnnnnnnnnnnnnnnnnnnnnnnnnnggccttccaaactgcatttggttaggtgaattaagaaaaatattgccatcaagaattacttgtgttttcacagagatagactctttgctttatagagattgttgtgtatttaatatgaatatcccagctttagaaaagaagtaaactggatacaaaaagttccattgaggaacagttatttacagtataaaagatttgtttacttt

SEQ ID NO: 76609 - DNA, 892 bp, Homo Sapiens
  misc_feature (370)..(404): n is a, c, g, or t
  misc_feature (595)..(669): n is a, c, g, or t
  misc_feature (784)..(849): n is a, c, g, or t
aattgtggctatggatccaaagctgtttgtttctttgaatatcaatattttcaacaggatcatgtatttaaaattcccacctacattgttaaatatgttattttttcatatctcttttggttttgataatctgaagtgtttttttctcgttttggccttcccaaatgcatttggttaggtgaattaagaaaaatattgccatcaagaattacttgtgttttcacagagatagactctttgctttatagagattgttgtgtatttaatatgaatatcccagctttagaaaagaagtaaactggatacaaaaagttccattgaggaacagttatttacagtataaaagatttgtttactttacaaaaggctnnnnnnnnnnnnnnnnnnnnnnnnnnnnnnnnnnnattttaaactgactcagtgacagctggggtggaatggcaagaacacttacaaccaaactcatgggctgctgcaatttgaagataattggtaataaacataagacattaattcatattaaaatagttcagtgttcaaaattgtgtttatgtggatatttttctctttttaacactataaaccattaaaatannnnnnnnnnnnnnnnnnnnnnnnnnnnnnnnnnnnnnnnnnnnnnnnnnnnnnnnnnnnnnnnnnnnnnnnnnnacagaaagtcttgcagaacccatatgtagaaaagttggccctccagttgaccctccgtacacatgagtttcacatcccatgcacaaatgctgatctgtgtgacctcacctgcatnnnnnnnnnnnnnnnnnnnnnnnnnnnnnnnnnnnnnnnnnnnnnnnnnnnnnnnnnnnnnnnnnnccacaaaaagtttgtgaaataaacgtacaggagaatctttaaa

SEQ ID NO: 76610 - DNA, 537 bp, Homo Sapiens
  misc_feature (517)..(517): n is a, c, g, or t
gtgcccgccggccgcttccgctcccggcgcaggcgctgcagcttggccagagcggagggggctcgggagaggagtggacgccgctggccaggatggtgctggagagcgtggcccgtatcgtgaaggtgcagctccctgcatatctgaagcggctcccagtccctgaaagcattaccgggttcgctaggctcacagtttcagaatggcttcggttattgcctttccttggtgtactcgcacttcttggctaccttgcagttcgtccattcctcccgaagaagaaacaacagaaggatagcttgattaatcttaaaatacaaaaggaaaatccgaaagtagtgaatgaaataaacattgaagatttgtgtcttactaaagcagcttattgtaggtgttggcgttctaaaacgtttcctgcctgcgatggttcacataataaacacaatgaattgacaggagataatgtgggtccactaatactgaagaagaaagaagtataataataataacaatattntctcattctttgtgtataga

SEQ ID NO: 76611 - DNA, 1737 bp, Homo Sapiens
  misc_feature (50)..(304): n is a, c, g, or t
  misc_feature (838)..(882): n is a, c, g, or t
  misc_feature (885)..(894): n is a, c, g, or t
  misc_feature (897)..(899): n is a, c, g, or t
  misc_feature (902)..(922): n is a, c, g, or t
  misc_feature (926)..(928): n is a, c, g, or t
  misc_feature (930)..(933): n is a, c, g, or t
  misc_feature (935)..(935): n is a, c, g, or t
  misc_feature (942)..(942): n is a, c, g, or t
  misc_feature (945)..(1043): n is a, c, g, or t
  misc_feature (1060)..(1060): n is a, c, g, or t
  misc_feature (1078)..(1078): n is a, c, g, or t
  misc_feature (1135)..(1136): n is a, c, g, or t
  misc_feature (1161)..(1161): n is a, c, g, or t
  misc_feature (1203)..(1205): n is a, c, g, or t
  misc_feature (1241)..(1242): n is a, c, g, or t
  misc_feature (1307)..(1307): n is a, c, g, or t
  misc_feature (1392)..(1392): n is a, c, g, or t
  misc_feature (1420)..(1420): n is a, c, g, or t
  misc_feature (1450)..(1450): n is a, c, g, or t
  misc_feature (1530)..(1530): n is a, c, g, or t
  misc_feature (1556)..(1556): n is a, c, g, or t
cagtcgacggtaccggacatatgcccgggaattcggccattacggccggnnnnnnnnnnnnnnnnnnnnnnnnnnnnnnnnnnnnnnnnnnnnnnnnnnnnnnnnnnnnnnnnnnnnnnnnnnnnnnnnnnnnnnnnnnnnnnnnnnnnnnnnnnnnnnnnnnnnnnnnnnnnnnnnnnnnnnnnnnnnnnnnnnnnnnnnnnnnnnnnnnnnnnnnnnnnnnnnnnnnnnnnnnnnnnnnnnnnnnnnnnnnnnnnnnnnnnnnnnnnnnnnnnnnnnnnnnnnnnnnnnnnnnnnnnnnnnntgactcaccatgcccagccacttagttttttcttattcccacctttctatcccatagaacactcttttttatcttccctgaaccatattgatgagataaatagggctgggggctgggccccgctggtcactcaacagagtatttcccttggccgagatggaagttttgtcccaatagatgagctgctgagtatcaacaaggtgacatttttctgctgcccatttgtgtcctggagacggtggtaccctgaaggcagaggccagctgccgcaagacagcaatgacagtccacctgccgacctgattcctgcatcatggaataaccacatggctaccttctatcctctgttcccaaatggtggtggcacttatcctgaagtcgtcaatgatttccctttgaaactactttattttactaatttaaactattttgtactgatgtagccctgaggtagttcatgaaaatgctgtgcactcattccatggaataaatgttggaaagctgatcttttctgatataaaatgttgaatgatnnnnnnnnnnnnnnnnnnnnnnnnnnnnnnnnnnnnnnnnnnnnnaannnnnnnnnnaannnaannnnnnnnnnnnnnnnnnnnnaaannnannnnanaaacccnaannnnnnnnnnnnnnnnnnnnnnnnnnnnnnnnnnnnnnnnnnnnnnnnnnnnnnnnnnnnnnnnnnnnnnnnnnnnnnnnnnnnnnnnnnnnnnnnnnnaacaactcaaatagggngcacaccacacggaagcnccccaagggaactgcgcgccgccccgccaggcgcacgcggaaaacccacaaagcaannaagaggagaccgctcgtggggggcnaccagcaaaccagtctacccaacccggcccctccttggagannntgtgtataaaagcaccattaacggggaggcccgtanntgagaggaggaccgcccttggagccgcgcccgcttttattccgccagttccccggcgcccccgcntcgttgattgcaaaagcagtcgcgacagacggacgtcatggcgagcgtcacgtttctcgtcaaaccgcccagcgccggtgcacgncttcccgaatcggaatacaccgttccgnacatgccaagagagtaccaggccggcggancccgatgaagctgatagatccccaaatgcggctccgccgcgcaccgctagtcttgtggtcgcaccaccctattggtagtnctcacaacacacacacccgcgcgccnccatacacatgtggtttggtgtcggtagagggaggaggtgacatcataaaacaattattgtctcacaacatagacaagagtagtcgggtcacatagtgaggattttggctactgaacaacatgccccacgtcgagatactgaaatattctgcgttcgatgggtagcggagcgactgcgact

SEQ ID NO: 76612 - DNA, 853 bp, Homo Sapiens
  misc_feature (461)..(495): n is a, c, g, or t
gaaaatgtaacagcaaattaaaacatgaatggcaacctcttaggtgggagaagacaattctccccctttcacccaaaggttactctgacaaggctatgaatgaaaatgccacgtctctgacagcgatttacctgaaatgtgtcatctccctgcacacccccagccctcacccctcagcatcctctctctgctgccaactcacagccctatggatgagtgaagcctttttacagcagcaaagagtcaaccagaggaggcagagcatgctctgaaagggcaggagtcagagggagagtgccctgacttcatggggaaatctattttttcatagggagagagcaatgcatgggtattgaactcgcctctcatttgtgcctggcaccccgagggaaggtgaaaacagagcccagtcccatctttttcttggtctgatttgcttctattcatcacttttttcttgnnnnnnnnnnnnnnnnnnnnnnnnnnnnnnnnnnntgcaagaatttggagtcaaatcttgaagcagaaagaaaagagtaatgccgtttgcagtcaggaaacagaaaaacctaaatatgcccacagaacagtaaggcagtgttctcaaatgcgtgtgctgatattccagccagagtgtggctcatatgctgtgtcccacatggcgacgtcggggaaccacacaccctaagcaaacaggagctgagagggaacgggagtgatttacagtttaaaagggccttcttcctcttcctaagaaactgctgcttctgaggaacaaagcaaatctactatgattatttatgggtccatcaacagatctgaatcacctcaccttagtacgaaacgagatgga

SEQ ID NO: 76613 - DNA, 620 bp, Homo Sapiens
ccccagctccgccctctgggtccacatgaggacagggaagctcgggaaggggaagggagactggccctgcccagccggtctctagcccctcagcccccgctgggcactctctgtcccatccctctaggacagggaagctggcctggtccagggcactgatggtgcttggattccagcctaaggaaggctggccgtggtccaggagttaagggcttgggtctggggtttaagtggccacccatccaggccctggccagtgtgggaccgggacgggaaggaagaaggaggctaggagcagggggaaaaggtgcacttggccagtggcgcctgccaggagtgagtccatgcgttgtctgcccacccctaccacagtgtttgtgccttcagctgagggggcagcctctgggccctgaacccctgctggggctccacgaccctgagagaaggggtgagaagaatcatctctgcacctcgggtctctgccagaggaagacttaagcatccctgcgacctcacattctagacagagatgaggtccaggggttggcccctgctgccttctcacaatttgcaatagatgtaaataggaccaataaatcctttggaagagccatggggtg

SEQ ID NO: 76614 - DNA, 1397 bp, Homo Sapiens
  misc_feature (84)..(100): n is a, c, g, or t
agttggatagcctggatactttgttagatgagtatttagctgtgtctgcaaatcttaaaagccattagcaaagagtcgtggtannnnnnnnnnnnnnnnnaaatgtttgggcaccaaacctaaaagcaaaagattgacgaagcatgtttctcttaaggctacttgtattttacaatacaatattaaattatttaatttgagaaatttagttttgcttatatgcactttttaaatatatactattttgaagattccttatgtaaatgcaaatttcctagttaaaaccgaataacagagatctgaaatgactgagaaaaacttttttattaaaggaaggaattaatttaaggcaatttttaactatgtagaactaattgcccatgtttaattatagcagacacgccattctaacaggtatttgataccattggatgcattattctaggttttttctttaataaaaatggaacaagttttcatttacattccaagctgtcaggaaatgaagaatattttattatctaggattttatctgatgtagttgcttaaagatctgatgtgctataattccatgaatcagaaataataaaatgctatcattctggatctgaagacttttgatactttttcaaaagcaaaattaatttcaggaacctttgataagttgttgttataattaatctaattttgtatagtttttgtaaataaattaccatccttccacaattagggatgcttttatccccccatcactaattgcagttgtttgataccaaaataaatttacgtagagatccttaacttaaaataaattaattttttcaaaaaacataaatctggaactgttgtttctatatttgataacaaatacagtatattttatttataagccatggtctactgatactgtatgaggactttccttatatataaaagttgcagggattgtgttttattagctgctttaattatgttaattttagagagtttttaaatggaaatagaggacatttatgaaacgctggaattgcagttacaaattctttttgttgttgttgttcctgaacatgccttggaataattctaccattttttccccctccataaatctttctaataaagcatagaaaaagcctatatgattttaaatgcttctcttaagctggtaaacagatttgagttatgagttcattgttattgcttcaagatgaaaagacagtgatataatttttctatttcaacttaaaagtaatagttaatatgctaaagtagtacagaataaactttattgctgcttactaactacaaaatactgtagatggcatctgtatgattaaacatataaagtaaaacaggtctgagggctttgtagatgattaaagtctccaccttcatg

SEQ ID NO: 76615 - DNA, 1056 bp, Homo Sapiens
  misc_feature (993)..(1013): n is a, c, g, or t
  misc_feature (1036)..(1036): n is a, c, g, or t
aattaaggggttttggttttgttttctgtttactttgtgtgcaactacctgcttttaatgactcactttgatcaaatgacagtgaacaaagccagcccaagctggtaaggtgctgttcacttgaacaggtgctgttgcgcagaaaggaaactctgtgactaatttagatagtggctttccttcttctggattcttttcattgaattctcacagtaaatatttacggagttttcaaattgcagcaaatatactgtatgagaaaatattaatacagattaaaagcctttctaacatcttgaaaattttctaatatttgagaatttcacagggatgttttttatattggacccttttgactttccagtcctgtgactttctacttttagtagagagtcagaatctctggactggagaataatgaagaagttcactgactgtgcactgtgcttagagaccctgccgcaccacagtgccaatgcttgtcagacacatgcccttcggcagcattccagaacaggagggaagagaaagagaaaactttcttcccttctactaaaagattcaggcagcttaaaaccttagtgctttctttcttaacatacccaaatttcaattctttccattatttgaacacttgggtagaactcttgctttgtattaaacctctttgtctacacatgtaaaacttaccttttgttattgagcaggcctatctctttcagatagttttatgattcacacaggtttgaggatgctggggagagggggagggggctgtggtggtgttctgttggttacaagaaagttataccatttaaagctggcaccagagacccgatagggacttattaactatattgaacattttttcctttgcctttgaccctatgtatagttacgatgccagattagatttatagcagcctcaagttgtattaaatgatattttgcttcctgtaatactattataaaataaagtttgtttattctctnnnnnnnnnnnnnnnnnnnnngaccgcgtatgcggccgcaagcnttattccctttagttgaggt

SEQ ID NO: 76616 - DNA, 433 bp, Homo Sapiens
cctataaatctaatctggcatcgtaactatacatagggtcaaaggcaaaggaaaaaatgttcaatatagttaataagtccctatcgggtctctggtgccagctttaaatagtattacaggaagcaaaatatcatttatatacaacttgaggctgctataaatctaatctggcatcgtaactatacatagggtcaaaggcaaaggaaaaaatgttcaatatagttaataagtccctatcgggtctctggtgccagctttaaatggtataactttcttgtaaccaacagaacaccaccacagccccctccccctctccccagcatcctcaaacctgtgtgaatcataaaactatctgaaagagataggcctgctcaataaccaaaaggaagttttacatgtgtagacaaagagttaatacaaaagcagagttcta

SEQ ID NO: 76617 - DNA, 775 bp, Homo Sapiens
cagtcgacggtaccggacatatgcccgggaattcggccattacggccgggcgcatgtaaacagaatatttgaatctttgtacctccatacaagtgttagcctgccaggctgtaagcttaccttaattaaactttcagtgaaagtggaattattaagatataaatttatatttgtgctttttgtcagtgtgtaagctgtgtagaaattctttgatgtattagttgtattaatgtaaagtagaaacccattgttgaaactcctgtagctattatgcttttaatattgttttaatgatcttccttagaaataggcccataaaaatggtctggaagccaaaccaaagtatggtataatgtagatattgtaaagcagtaaactgaaaacatgtcctggcatgtattcagccatgtttaagtgacttttctgtaattgtaaaataaaaacttcaaatgggacctaaaacagtgatgtaaaagaactggttttggaaatttagcctaatttatctataagatggctgctaaattgatttttcagttctttttatcatctagaatataatagatatagaaatgaataatatgaagaacagtagtttgctttgaaatactaataaacttttatttaaaatgcttcatttttacttcttaaaatgtgctttggattcttaaattttgtttcactgaatgttcaatgttttaaatggcgattaaaatactctgctgtatatagtagtttttgagtaaatatttgcaataaaaatctgcccccgaat

SEQ ID NO: 76618 - DNA, 480 bp, Homo Sapiens
ggacccaaggtggagcccgagtttgaagacccagttagagccctgagtttgagacccagctggaaccccgagtttgaggaagaggagatggagtaggaagaggaggagatagccactggccaggcattccccttcacaacagtagagacctacacagtgaactttggggacttctgagatcagcgtcctaccaagaccccagcccaactcaagctacagcagcagcacttcccaagcctgctgaccacagtcacatcacccatcagcacatggaaggcccctggtatggacactgaaaggaagggctggtcctgcccctttgagggggtgcaaacatgactgggacctaagaaccagaggctgtgtagaggctcctgctccacctgccagtctcgtaagagatggggttgctgcagtgttggagtaggggcagagggagggagccaaggtcactccaataaaacaagctcatggcaaaaa

SEQ ID NO: 76619 - DNA, 731 bp, Homo Sapiens
  misc_feature (103)..(131): n is a, c, g, or t
gcggccgcggctgtaggcttttttttaatcaaaactgttctgtttaattcatgaattgtatagttaagcattacctttctacattccagaagagcctttattnnnnnnnnnnnnnnnnnnnnnnnnnnnnnactgagctgtaacaaagcctctttaaatcggtgtatccttttgaagcagtcctttctcatattgagatgtactgtgattttactgaggtttcatcacaagaagggagtgtttcttgtgccattaaccatgtagtttgtaccatcactaaatgcttggaacagtacacatgcaccacaacaaaggctcatcaaacaggtaaagtctcgaaggaagcgagaacgaaatctctcattgtgtgccgtgtggctcaaaaccgaaaacaatgaagcttggttttaaaggataaagttttcttttttgttttcctctcagactttatggataatgtgaccgggtcttatgcaaattttctatttctaaaactactactatgatatacaagtgctgttgagcataattaaataaaatgctgctgctcttgacaagtaaagagaaggacagtattctagattcagctgtatctggtataaacttgcgtgtacaaaccaggggaatttaaaaatgagattagatcagtcattcttttccttttctccaaagatgtctcatggttggacctgagaagaatgtgcactccaaaatgtgcactcaaatgttta

SEQ ID NO: 76620 - DNA, 1957 bp, Homo Sapiens
  misc_feature (45)..(91): n is a, c, g, or t
  misc_feature (93)..(222): n is a, c, g, or t
  misc_feature (1091)..(1724): n is a, c, g, or t
  misc_feature (1848)..(1849): n is a, c, g, or t
  misc_feature (1871)..(1871): n is a, c, g, or t
  misc_feature (1892)..(1892): n is a, c, g, or t
cttccattctttcttcctccagtctgttctcacataacagagtannnnnnnnnnnnnnnnnnnnnnnnnnnnnnnnnnnnnnnnnnnnnnnannnnnnnnnnnnnnnnnnnnnnnnnnnnnnnnnnnnnnnnnnnnnnnnnnnnnnnnnnnnnnnnnnnnnnnnnnnnnnnnnnnnnnnnnnnnnnnnnnnnnnnnnnnnnnnnnnnnnnnnnnnnnnnnnnaaatataaatctgatcacccccctgcttagaacccttctgctttctattacccctcatttaaaatgtaaactcttcaccttggtttatgagaactggttcttgccttccccttgaacctcattaaatggtgatttcttgctaagctccagcccgagtggtctcctctcagcttctaattttgtgctctttcctgcccttttcctgggccttctcagctctccacccccaccactcttgactcaggtggtgtccttcttcctcaagtcttgacaattcccgggcccttcagtccctgagcagtctacttctgtgtctgtcaccacatcttgtcttttcccctcattgcatttattgcagtttatatatatgctacttttacttgttcatttctgtctcccctaccaggctgtaaatgagggcagaaaccttgttggttttattcaccatcatgtaccaagtgcttggcacatagtgggccttcattaaatgtttgttgaataaaagagggaagaaggcaagccaaccttagctacaatcctaccttttgataaaatgttccttttgacaatatacacggattattatttgtactttgtttttccatgtgttttgcttttatccactggcatttttagctccttgaagacatatcatgtgtgagataacttccttcacatctcccatggtccctagcaaaatgctaggcctgtagtagtcaaggtgctcaataaatatttgtttgggtggtttgtgagccttgctgccaagtcctgcctttgggtcgacatagtatggaagtatttgagagagagaacctttccactcccactgccaggattttgtattgccacctcgtgccgaattcttnnnnnnnnnnnnnnnnnnnnnnnnnnnnnnnnnnnnnnnnnnnnnnnnnnnnnnnnnnnnnnnnnnnnnnnnnnnnnnnnnnnnnnnnnnnnnnnnnnnnnnnnnnnnnnnnnnnnnnnnnnnnnnnnnnnnnnnnnnnnnnnnnnnnnnnnnnnnnnnnnnnnnnnnnnnnnnnnnnnnnnnnnnnnnnnnnnnnnnnnnnnnnnnnnnnnnnnnnnnnnnnnnnnnnnnnnnnnnnnnnnnnnnnnnnnnnnnnnnnnnnnnnnnnnnnnnnnnnnnnnnnnnnnnnnnnnnnnnnnnnnnnnnnnnnnnnnnnnnnnnnnnnnnnnnnnnnnnnnnnnnnnnnnnnnnnnnnnnnnnnnnnnnnnnnnnnnnnnnnnnnnnnnnnnnnnnnnnnnnnnnnnnnnnnnnnnnnnnnnnnnnnnnnnnnnnnnnnnnnnnnnnnnnnnnnnnnnnnnnnnnnnnnnnnnnnnnnnnnnnnnnnnnnnnnnnnnnnnnnnnnnnnnnnnnnnnnnnnnnnnnnnnnnnnnnnnnnnnnnnnnnnnnnnnnnnnnnnnnnnnnnnnnnnnnnnnnnnnnnnnnnnnnnnnnnnnnnnnnnnnnnnnnnnnnnnnnnnnnnnnnnnnnnnnnnnnncgcttctcatagctacgctgtaggtactcagtcggtgtaagtcgtcgctccagctggctgtgtgcagaacccccgttcaccggacgctgcgcttaatcggtactatcgtcttgagtcaacccgnngtagccgactatcgcactggcncaccactggtacaagatacanacgaggatttggcggtgtaaaagtctttaatggtgctactacggtacctaaaaaactatgggatc

SEQ ID NO: 76621 - DNA, 1278 bp, Homo Sapiens
  misc_feature (1214)..(1224): n is a, c, g, or t
ggcacgaggagtcatttaggatccatgcagctttttttgtctttttaagattattggctcataagcatatgtatactggtttatggaactttatttacactcctctatcatgcaaaaaaattttgactttttagtactaagcttaatttttaaaaacaaaatctgtagggttgacaaataaatagttgctcttctacactaggggtttcacctgcaggtttgacacgcagttgctcgcttttcctgccctgtcaagcttctctgttctggcgtgagttgtgaaagagttgaagacagcttcccatgccggtacacagccagtagcctaaatctccagtacttgagctgaccattgaactagggcaagtcttaaatgtgtacatgtagttgaatttcagtccttacgggtaaacagattgagcatggctctctattccctcagcctaagaaacactcatgggaatgcatttggcaacccaaggaaccatttgcttaaacctggaacatctcacctttttaaatcctaaaaaacactggcagttatattgtaaattagtttttatttttatgatggttttatcaaaagacttttattattagattgggacccccttcaaacctaaaaatcaagttatttccttttataatacttttcttccccatggaacaaatgggatcaatttgtgagttttttcctttaatgataactaaaatccctctaatttctcatttatgcttttgtcttttttatgaaatatttcttttaaaagccccagtctcacctacgaaatatgaagagcaaaagctgattttgcttacttgctaaactgttgggaaagctctgtagagcatggttccagtgaggccaagattgaaatttgatactaaaaaggccacctagctttttgcagataacaaacaagaaagctattccaagactcagatgatgccagctgtctcccacgtgtgtattatggttcaccagggggaactggcaaaagtgtgtgtggggaggggaagggtgtgtgagtggttctgagcaaataactacagggtgcccattaccactcaagaagacacttcacgtattcttgtatcaaattcaataatcttaaacaatttgtgtagaagtccacagacatctttcaaccaccttttaggctgcatatggattgccaagtcagcatatgaggaattaaagacattgttttttnnnnnnnnnnntcatttagatgcacttttttgtgtgttctttaaataaatccaaaaaaaatgtga

SEQ ID NO: 76622 - DNA, 707 bp, Homo Sapiens
  misc_feature (440)..(527): n is a, c, g, or t
  misc_feature (665)..(665): n is a, c, g, or t
  misc_feature (676)..(676): n is a, c, g, or t
ctttggttcaaaacatttaatggatagaaaaaacatttaatgcttacccatttctcaccagattaagtgcacatgccacaaccagtcattaaaggctttttctagtctaaattcctgttcttcaaacgtcaaaccgcccttctactctactgacctgaaacacacagcctcaccctccacatctctgcagacccaccgcatttgccacctgccctagggagcttttcctgatcttacctcggatgcctttcactgctcccacatctgaattcctttaactcactccatgtttttctcaaaggcagaccaaggtatttatgcaaacatggtgtctccctagtcttgggtgaggtctttgacatcactcactgcagcgattcatctcccctactctgcactgtcagactctaaagaagggtgcaacaaatacttgtccattnnnnnnnnnnnnnnnnnnnnnnnnnnnnnnnnnnnnnnnnnnnnnnnnnnnnnnnnnnnnnnnnnnnnnnnnnnnnnnnnnnnnnnnnttcattgaacgttgctgaaggaattgaacgtacatactacaagccctgcagatgcagatacaggaggggttgacggcacagtgcttagggtggaactggaggcacacctctcctgaggggtgatgcgccgcttcctgngcaggctcggnggagctcgctcaaatgcctgcctctctgtag

SEQ ID NO: 76623 - DNA, 518 bp, Homo Sapiens
ttttccagcgtttgggctacagagaggcaggcatttgagcgagctcccccgagcctgcccaggaagcggcgcatcacccctcaggagaggtggtgcctccagttccaccctaagcactgtgccgtcaacccctcctgtatctgcatctgcagggcttgcagtatgtacgttcaattccttcagcaacgttcaatgaatgagtgcctactgtgtaccaagcactgttctaggcactggagatacaaaaggccaaaattcctgctctcagggtttgccggcagtctaaatggacaagtatttgttgcacccttctttagagtctgacagtgcagagtaggggagatgaatcgctgcagcgagtgatgtcaaagacctcacccaagactagggagacaccatggttgcataaatacctttggtctgcctttgagaaaaacatggagtgagttaaaggaattcagatgtgggagcagtgaaaggcatccgaggtaagatcaggaaaagctccctagggcagg

SEQ ID NO: 76624 - DNA, 1555 bp, Homo Sapiens
cggtccggaattcccgggatgtcagccgagcacgtcccccacgtcctctccttctcgccacttattatttattcgttttcccaaagaagcgactagggacccaagtttaaaaattcctccccccacccaatgcgagacgtggccagatcccatccaacacacggtttaattttcatggggctctgggatcaaaagaacagaaacagcaacaacaaaagcccagccgctgtctgattttaagctggcaaagtgggaaaaataaagtgttgagtaaacagaccaagttggatcatggggaatttcagaggtcatgccctccctggaaccttcttttttattattggtctttggtggtgtacaaagagtattctgaagtatatctgcaaaaagcaaaagcgaacctgctatcttggttccaaaacattattctatcgattggaaattttggagggaattacaatagttggcatggctttaactggcatggctggggagcagtttattcctggagggccccatctgatgttatatgactataaacaaggtcactggaatcaactcctgggctggcatcatttcaccatgtatttcttctttgggctgttgggtgtggcagatatcttatgtttcaccatcagttcacttcctgtgtccttaaccaagttaatgttgtcaaatgccttatttgtggaggcctttatcttctacaaccacactcatggccgggaaatgctggacatctttgtgcaccagctgctggttttggtcgtctttctgacaggcctcgttgccttcctagagttccttgttcggaaaaatgtacttctggagctattgcggtcaagtctcattctgcttcaggggagctggttctttcagattggatttgtcctgtatccccccagtggaggtcctgcatgggatctgatggatcatgaaaatattttgtttctcaccatatgcttttgttggcattactgcagtaaccattgtcatcgttggaatgaattatgctttcattacctggttggttaaatctagacttaagaggctctgctcctcagaagttggacttctgaaaaatgctgaacgagaacaagaatcagaagaagaaatgtgactttgatgagcttccagtttttctagataaaccttttcttttttacattgttcttggttttgtttctcgatcttttgtttggagaacagctggctaaggatgactctaagtgtactgtttgcatttccaatttggttaaagtatttgaatttaaatattttctttttagctttgaaaatattttgggtgatactttcattttgcacatcatgcacatcatggtattcaggggctagagtgatttttttccagattatctaaagttggatgcccacactatgaaagaaatatttgttttatttgccttatagatatgctcaaggttactgggcttgctactatttgtaactccttgaccatggaattatacttgtttatcttgttgctgcaatgagaaataaatgaatgtatgtattttggtgcaaaacctcgtgc

SEQ ID NO: 76625 - DNA, 1145 bp, Homo Sapiens
  misc_feature (43)..(77): n is a, c, g, or t
gaacgacagagcgccgcgagtttgtgagcgaggaagcggccgnnnnnnnnnnnnnnnnnnnnnnnnnnnnnnnnnnncagtcgacggtaccggacatatgcccgggaattcggccattacggccggggggccccgcggggggaacagatgaagcacatctggacagctgtgcggcctcctcgcgggccgacgtcagccgagcacgtcccccacgtcctctccttctcgccacttattatttattcgttttcccaaagaagcgactagggacccaagtttaaaaattcctccccccacccaatgcgagacgtggccagatcccatccaacacacggtttaattttcatggggctctgggatcaaaagaacagaaacagcaacaacaaaagcccagccgctgtctgattttaagctggcaaagtgggaaaaataaagtgttgagtaaacagaccaagttggaaacttttcagcattacctaagaagcaaaggctcaattcttggctgcttcattcttatctcttctgccacagttctaacgtgcctgatctactgagaccaaggatgaccaatgactcagaagggaaaatgggatttaaacacccaaagatcatggggaatttcagaggtcatgccctccctggaaccttcttttttattattggtctttggtggtgtacaaagagtattctgaagtatatctgcaaaaagcaaaagcgaacctgctatcttggttccaaaacattattctatcgattggaaatttcggagggaattacaatagttggcatggctttaactggcatggctggggagcagtttattcctggagggccccatctgatgttatatgactataaacaaggtcactggaatcaactcctgggctggcatcatttcaccatgtatttcttcttagggctgttgggtgtggcagatatcttatgtatcaccatcagttcacttccttgtgtcccttaaccaagttaatgttgtcaaattgccttatttgtggaggcctttatcttctacaaaacactcattgcccgggaaaatgctggacatctttgtgcaccagctgctggttaagggcgactttcctgacaaggcctcgtttgccttcctaagagttccttgttccggaaca

SEQ ID NO: 76626 - DNA, 870 bp, Homo Sapiens
cgtcagccgagcacgtccccacgtcctctccttctcgccacttattatttattcgttttcccaaagaagcgactagggacccaagtttaaaaattcctccccccacccaatgcgagacgtggccagatcccatccaacacacggtttaattttcatggggctctgggatcaaaagaacagaaacagcaacaacaaaagcccagccgctgtctgattttaagctggcaaagtgggaaaaataaagtgttgagtaaacagaccaagttggttctaacgtgcctgatctactgagaccaaggatgaccaatgactcagaagggaaaatgggatttaaacacccaaagatcatggggaatttcagaggtcatgccctccctggaaccttcttttttattattggtctttggtggtgtacaaagagtattctgaagtatatctgcaaaaagcaaaagcgaacctgctatcttggttccaaaacattattctatcgattggaaattttggagggaattacaatagttggcatggctttaactggcatggctggggagcagtttattcctggagggccccatctgatgttatatgactataaacaaggtcactggaatcaactcctgggctggcatcatttcaccatgtatttcttctttgggctgtgggtgttggcagatatcttatgtttcaccatcagttcacttcctgtgtccttaaccaagttaatgttgtcaaatgccttatttgtggaggcctttatcttctacaacacactcatggcgggaaatgctggacatctttgtgcaccagctgctggtttggcgtctttctgacaaggccttcgttgcttcctagagttcctgtcggaacatg

SEQ ID NO: 76627 - DNA, 1042 bp, Homo Sapiens
  misc_feature (16)..(16): n is a, c, g, or t
  misc_feature (21)..(21): n is a, c, g, or t
  misc_feature (65)..(65): n is a, c, g, or t
  misc_feature (80)..(80): n is a, c, g, or t
  misc_feature (155)..(155): n is a, c, g, or t
  misc_feature (169)..(170): n is a, c, g, or t
  misc_feature (181)..(181): n is a, c, g, or t
  misc_feature (186)..(186): n is a, c, g, or t
  misc_feature (191)..(191): n is a, c, g, or t
  misc_feature (205)..(205): n is a, c, g, or t
  misc_feature (241)..(241): n is a, c, g, or t
  misc_feature (248)..(248): n is a, c, g, or t
  misc_feature (251)..(251): n is a, c, g, or t
  misc_feature (284)..(284): n is a, c, g, or t
  misc_feature (312)..(312): n is a, c, g, or t
  misc_feature (461)..(461): n is a, c, g, or t
tcttaccccgcagtgntgcgntgtgggccggctcacacgctatgggaccccgcgtcacaggccantggagctgcagatcntcgtccgagaaacgggatgcagccccggaccgtgcagacaggcccgtcagagtgattgtgtgcatcttagcaggntgcacaaactgcanntgggaccgggngtccnttccntcaggagtcctatnggaggcagaccctcacccagtgagggcacggagccnccggggnccntggagggaggagcgaccgcaggctctctgggcncccgtgactgctgtgactcaggttcctntgcaggtgtgcacagcagagacgccctgactctcgccctctccgtggcaggaggtgtccaggccacgctggtggtcctggccttggccatggtgcccatcctgctgcttggcacacccctgcacctgttgcaccgccaccgccgccgcntgcggaggaggcccgctgaccgacaggaggaaaacaaggccgggttgctggacctgcctgacgcatctgtgaatggctggagctccgatgaggaaaaggcagggggcctggatgatgaagaggaggccgagctcgtcccctccgaggtgctcatgcaccaggccatccacaccatcgagttctgcctgggctgcgtctccaacaccgcctcctacctgcgcctgtgggccctgagcctggcccacgcccagctgtccgaggttctgtgggccatggtgatgcgcataggcctgggcctgggccgggaggtgggcgtggcggctgtggtgctggtccccatctttgccgcctttgccgtgatgaccgtggctatcctgctggtgatggagggactctcagccttcctgcacgccctgcggctgcactgggtggaattccagaacaagttctactcaggcacgggctacaagctgagtcccttcaccttcgctgccacagatgactagggcccactgcaggtcctgccagacctccttcctgacctctgaggcaggagaggaataaagacggtccgccctggc

SEQ ID NO: 76628 - DNA, 738 bp, Homo Sapiens
  misc_feature (45)..(45): n is a, c, g, or t
tcatcaacatgtcctcttctcccacagccccagcaacagctgctntacccccgacaggaggtggtccaggccacgctggtggtcctggccttggccatggtgcccatcctgctgcttggcacacccctgcacatgatgcaccgccaccgccgccgcctgcggaggaggcccgctgaccgacaggaggaaaacaaggccgggttgctggacctgcctgacgcatctgtgaatggctggagctccgatgaggaaaaggcagggggcctggatgatgaagaggaggccgagctcgtcccctccgaggtgctcatgcaccaggccatccacaccatcgagttctgcctgggctgcgtctccaacaccgcctcctacctgcgcctgtgggccctgagcctggcccacgcccagctgtcgggggttctgtgggccatggtgatgcgcataggcctgggcctgggccgggaggtgggcgtggcggctgtggtgctggtccccatctttgccgcctttgccgtgatgaccgtggctatcctgctggtgatggagggactctcagccttcctgcacgccctgcggctgcactgggtggaattccagaacaagttctactcaggcacgggctacaagctgagtcccttcaccttcgctgccacagatgactagggcccactgcaggtcctgccagacctccttcctgacctctgaggcaggagaggaataaagacggtccgccctggc

SEQ ID NO: 76629 - DNA, 1696 bp, Homo Sapiens
ggctggaccggtccggattcccgggatcacgtcttcccgtttctgcagcaggaggaggcccgcctcggggccctgcagcagctgcaacagcagagccaggagctgcaggaggtcctcggggagacagagcggttcctgagccaggtgctaggccgggtgctgcagctgctgccgccagggcaggtgcaggtccacaagatgaaggccgtgtacctggccctgaaccagtgcagcgtgagcaccacgcacaagtgcctcattgccgaggcctggtgctctgtgcgagacctgcccgccctgcaggaggccctgcgggacagctcgatggaggagggagtgagtgccgtggctcaccgcatcccctgccgggacatgccccccacactcatccgcaccaaccgcttcacggccagcttccagggcatcgtggatgcctacggcgtgggccgctaccaggaggtcaaccccgctccctacaccatcatcaccttccccttcctgtttgctgtgatgttcggggatgtgggccacgggctgctcatgttcctcttcgccctggccatggtccttgcggagaaccgaccggctgtgaaggccgcgcagaacgagatctggcagactttcttcaggggccgctacctgctcctgcttatgggcctgttctccatctacaccggcttcatctacaacgagtgcttcagtcgcgccaccagcatcttcccctcgggctggagtgtggccgccatggccaaccagtctggctggagtgatgcattcctggcccagcacacgatgcttaccctggatcccaacgtcaccggtgtcttcctgggaccctacccctttggcatcgatcctatttggagcctggctgccaaccacttgagcttcctcaactccttcaagatgaagatgtccgtcatcctgggcgtcgtgcacatggccttttggggtgggtcctcggagtcttcaaccacgtgcactttggccagaggcaccggctgctgctggagacgctgccggagctcaccttcctgctgggactcttcggttacctcgtgttcctagtcatctaccagtggctgtgtgtctgggctgccagggccgcctcggcccccagcatcctcatccacttcatcaacatgttcctcttctcccacagccccagcaacaggctgctctacccccggcaggaggtggtccaggccacgctggtggtcctggccttggccatggtgcccatcctgctgcttggcacacccctgcacctgatgcaccgccaccgccgccgcctgcggaggaggcccgctgaccgacaggaggaaaacaaggccgggttgctggacctgcctgacgcatctgtgaatggctggagctccgatgaggaaaaggcagggggcctggatgatgaagaggaggccgagctcgtcccctccgaggtgctcatgcaccaggccatccacaccatcgagttctgcctgggctgcgtctccaacaccgcctcctacctgcgcctgtgggccctgagcctggcccacgcccggtggaattccagaacaagttctactcaggcacgggctacaagctgagtcccttcaccttcgctgccacagatgactagggcccactgcaggtcctgccagacctccttcctgacctctgaggcaggagaggaataaagacggtccgccctggc

SEQ ID NO: 76630 - DNA, 1127 bp, Homo Sapiens
cagggacgccatgactctcgccctctccctggcaggaggtggtccaggccacgctggtggtcctggccttggccatggtgcccatcctgctgcttggcacacccctgcacttggtgcaccgccaccgccgccgcatctggaggaggcccgctgaccgacaggtgggaccggggcttaaggtgtggggggctgcttgcggggagaggccactgtccggtgtgtccctgactcctcgcttcctgacagactcctgagtggccaggagcaggcctggcgggtggtgggggacctcctggggctggagtgctgccaacactgcctgctatgccccaggaggaaaacaaggccgggttgcggacctgcctgacgcatctgtgaatggctggagctccgatgaggaaaaggcaggggcctgggatgatgaagaggaggccgagctcgtcccctccgaggtgctcatgcaccaggccatccacaccatcgagttctgcctgggctgcgtctccaacaccgcctcctacctgcgcctgtgggccctgagcctggcccacgcccgtgagtgacctggccaccgacggctggccccagctcctggcttctcacataccgctgctggctgggcgggttgcttctctctgggcctcagtttcccctctgtaaagtgggactgtccaaggaggtccctcgctggccccccgtgcagggagggcttcaggctgcggcaggtaggtagggggctggcaggcacccacttgccgttggcccccactgtctcctttgcttgcagagctgtccgaggttctgtgggccatggtgatgcgcataggcctgggcctgggccgggaggtgggcgtggcggctgtggtgctggtccccatctttgccgcctttgccgtgatgaccgtggctatcctgctggtgatggagggactctcagccttcctgcacgccctgcggctgcactgggtggaattccagaacaagttctactcaggcacgggctacaagctgagtcccttcaccttcgctgccacagatgactagggcccactgcaggtcctgccagacctccttcctgacctctgaggcaggagaggaataaagacggtccgccctggcaaaaaaaa

SEQ ID NO: 76631 - DNA, 884 bp, Homo Sapiens
tggccctgaaccagtgcatcgcgagcaccacgcacaagtgcctcattgccgaggcctggtgctctgtgcgagacctgcccgccctgcaggaggccctgcgggacagctcgatggaggagggagtgagtgccgtggctcaccgcatcccctgccgggacatgccccccacactcatccgcaccaaccgcttcacggccagcttccagggcatcgtggatgcctacggcgtgggccgctaccaggaggtcaaccccgatggggaaatggaggctcagagaggtgaagtggctgggccaaggtcacacagctcctaagtgctccctacaccatcatcaccttccccttcctgtttgctgtgatgttcggggatgtgggccacgggctgctcatgttcctcttcgccctggccatggtccttgcggagaaccgaccggctgtgaaggccgcgcagaacgagatctggcagactttcttcaggggccgctacctgctcctgcttatgggcctgttctccatctacaccggccttcatctacaacgagtgcttcagtcgcgccaccagcatcttcccctcgggctggagtgtggccgccatggcccaccagtctggctggagtgatgcattcctggcccagcacacgatgcttacccctggatcccaacgtcaccgggtgtcttcccgggaccctaccccttttggcatcaatcctatttgggagcctggctgcccaccactttgaagcttccctaactcctttcaagaagaaaaatgtccggcatccctggggcggtcgtggcccttgggcccttggggggtggggtccccgggagtcctttaaaccacctggcactctttgggcaaaaaagaaacccggcttggctgc

SEQ ID NO: 76632 - DNA, 745 bp, Homo Sapiens
  misc_feature (49)..(49): n is a, c, g, or t
gcaaggcccacgggctggatgtcacttccccgactgtctcttgttggcntgtccttgtgcaagacccagcctgtcacgacagagcctgggcacttcagaggaggagccaggatcgaatggaaggggggaattggggtccaccatagtcttctgctctggtcctccacgggtggaccaggatggagtctcttgcctacctcactgcattgcactggacctgggatgcctatccaccctctggcagaagacactcaccaggttatctgtgaagagactctgggatcccatcacctcaaagccagagggtccccaagtcaccgctgagagcacttgagcctcaaggatgtaagcctgaccataggaccttgactccaacagcggcaaccccaacccccattgtggtccgtccttaacccatccactcttcttcggaggcaactgagaacacataaagcaagcagctacctagcatccccctcctaaagctttagactcagagcccagggtcccccacaagcctcaaggtagcctcaggtttctctaatttcctccactcccagttcgaagcaaacagcttactgcctagtccccgccaatcccaagggcgggctggctgatggcagcatggtgggctggcctgggtgtggagtgaaagagtcactgtggtgggggcgagaggaggacttgggagctggaggtgtgacaccttcagttctgttcctattaaaggaccttctgaagggca

SEQ ID NO: 76633 - DNA, 644 bp, Homo Sapiens
  misc_feature (623)..(623): n is a, c, g, or t
agaattcggcacgagggcagatggaagggcgagaacgtgtccacgcacgaggtggagggcgtgttgtcgcaggtggacttcttgcaacaggttaacgtgtatggcgtgtgcgtgccaggttgtgagggtaaggtgggcatggctgctgtgcagctagcccccggccagactttcgacggggagaagttgtaccagcacgttcgcgcttggctccctgcctacgctaccccccatttcatccgcatccaggacgccatggaggtcaccagcacgttcaaactgatgaagacccggttggtgcgtgagggcttcaatgtggggatcgtggttgaccctctgtttgtactggacaaccgggcccagtccttccggcccctgacggcagaaatgtaccaggctgtgtgtgagggaacctggaggctctgatcacctggccaacccactggggtagggatcaaagccagccacccccaccccaacacactcggtgtccctttcatcctgggcctgtgtgaatcccagcctggccataccctcaacctcagtgggctggaaatgacagtgggccctgtagcagtggcagaataaactcagatgtgttccccccggacgcggccgccccngcagaaaggtacgtggtgggc

SEQ ID NO: 76634 - DNA, 724 bp, Homo Sapiens
  misc_feature (43)..(43): n is a, c, g, or t
ttaaaaatatataggttttaataatcttaattttcttttagtntgaaatgtatatactcattttattcattagtctaagataagaattgtaacacttctctaacctattatagaattgttaatacctttacccttctcttgaacacatcaaaggatgtcattgagtgttggtattggagtatagcatatctattattctgctcaattagaagatattgttcatgttgtatagagataataagtaattgtattgatctgcagatgcatccatctcttggattctcattccttctaccactgcagaactttcacctgtaatcactttcctttggccttaaggataacttttagggttacttttctactaaatttccaatttttgaccagatataatcttatattgtgctcttcctgaaaaatactattgttgtggatagaaatctgggttggtagttatttcttcagcaatttgaccatgtcattccactgtgtccctggcctcctgtatactggatgtgaatggatacaattatatattgtgtttatagttttcctgtgctataggaacagtattcgaatctgatgcaaaggacaacacaccctagagattgtaacagtgagatgaaccaagtgattggatggggttttgagttgctggaataatggagttacagtgtacaatgcataagcaacataataaattatatatctggtgaacaaatgg

SEQ ID NO: 76635 - DNA, 1379 bp, Homo Sapiens
  misc_feature (30)..(30): n is a, c, g, or t
  misc_feature (64)..(103): n is a, c, g, or t
  misc_feature (106)..(140): n is a, c, g, or t
  misc_feature (1112)..(1112): n is a, c, g, or t
  misc_feature (1306)..(1306): n is a, c, g, or t
caaaaggaaaaagtctgaataaattggacncccctcaaccctatgggcgctagctcgtcacagnnnnnnnnnnnnnnnnnnnnnnnnnnnnnnnnnnnnnnnncgnnnnnnnnnnnnnnnnnnnnnnnnnnnnnnnnnnncagtcgacggtaccggacatatgcccgggaattcggccattacggccgggggggagacctgcagagagtgtgggtgctagagccttctgcagggctcaggacacattccccaacacacccaggccaataatttgcactgggatacagagaggaggctcggggcctctgtcaacagattgccatccacttagatgagtaaatggcatccagcacagtcctgggcacatgaattggtgctgatgctgctgaaggagtgaatgcaggccagaaggaaggagtgctggggaacgaagtgagccatggagcaggcaggaaccacggacagaggcctcccagttcactcggggacatatccgcagatgtgagaactcagagagatgttcaagtttcctaagagggcttcaatcatggctcacagactactaatttccagtttcttctctaccagtctggatgcccatggtgaactttagagatatccatcagctccatcaattccctcaactacatctacctagcttttgagcccagaagaacccaatcatgtgtgttctcctcagctcccaggctgctgagcaatgctggagaaaaatcacaaaactatacagtttggtatctctccagaattatggtttccagcttgagttggaaattcagaattacttcaaaatgtttaaatttgtttctggtcagtttcctccttcatttcccagtttcatttatcactctatttaacttgttacccatcgctgtctgctattaaccttgcctccttttacacgagaaaacagagggccatcaaatggcattttcccatcaactccatcactccacctctgtcaatgaatccaccagtaacatctcagagatccttctgtctaggcactgatgatcttattgtatcagtttactccttcttccttttgtattttcaatgctcctattggccaccaacatgctttagctgttctnatctaaagaaacaataacaaccacaataaactaacaaacaataaaccatctttaacagaccttaccttttcctcttttgcgccaccttcaagcttcctaaactcagatttattcctcaatccattacaatctggtttctaattaaacaattttttgccagcatcaccaaaaacttctgaattgctagtctccanaggtcctttcttcaacctcattgttttctttcttttaaaagtcaagttcactgaagtataatttacgtacaat

SEQ ID NO: 76636 - DNA, 701 bp, Homo Sapiens
ccaaaacctcactttattccaatgtgaaatgaagacatgatggtttaaaaatgagaaaaagttcctgataagctgtgggggtgcttcacttgccagctcatgcccattccctctgaaacaaggtgtctgttacccataaacaactctctgtaaagccccaggtagaggtcacagctggacgtggctccctcaggctcacagggtagcaatctcctcccccagtccaggcttccacagcaggcacggacaggtgcagagagggagtggccatggcctgtggggtcccctgccaccctcagagctagtctctgcagaaggtgctgtgtggtaagcagcagggctccacagagaggtgacaacccttcctgtgtctgcaacctttccccaggatccatgattcaaccctggctccctaggccccttacccagcacaccctccgtgtgtcaggcagctcaggttaaaatggggagaatgatatattccgactgtagacccgaaggttctgtccatctggggtacagggagtagggacgccagtcagagcctgtggtagcgcctcctgctgggcctgagggcagacaggccagggctgggcacagggacatctgggggaccaccactgacaaacctgtccctctcagcctggagctacggccaggccaatcatgattaataaaaccactgcagccttcatcctgcc

SEQ ID NO: 76637 - DNA, 500 bp, Homo Sapiens
gcacgaggggaatggacagttcattgcactgactctgggatctcagccctgctcctgggagctggaagagcacttggagatcctaagggaccacacccttcctccttcccctgcccacagaggcagagggcacaggaaagaagccgggccaagctcggaattaatgtgccacaagtgttgtggccttcctgaactgggaagtccctggctggcccccgggggagaggggcaaatgcctccgggactgacactccaggcagctttgccttctctcccctgtcatttccagatttcattacctcctacttgccattcacccatcaatgtgaaagtcagggtcacagctggtctgtgtgtccagttccctaaaagcctgttctgttgggcagcctgaggctgttgcccgaatcctagttcagttttttgacttcctttgccctttttcccttttctccatgcttaatggtgtgaggcgtcaggagagaggccaagtacataaa

SEQ ID NO: 76638 - DNA, 1158 bp, Homo Sapiens
cggcgctgctccggcctgggcccccgcccatcgccccccacccatctctggagagccgctctgcacccaaagaggactagagatgccgaacggcccatgagagagagcggaaggagcagctgatgcccagagcggggccagagcggcgggtctatgttcaacgtccccccagcagcaggcggaaccacccagccagggcactcagtgcactggactgtccacatgttcttgaggaaagccggtggaagattactggaatgccgtgcggatgaactttcagcacccgagtcagtcccagctcatcctccccagtttaccactttgttctaataggagatgggaacacgagaagtttgatggctttgccctgggctgggaatacctcacccacgcccagttccagaaaggcctccagctgagcagacggccccgatcccgccagaacggccttttgcttccagccaaagaacaccgccaacacgcacacctccaacctgggacatcccacgctgggcctcgcacggaggaacctgcagaatttggattctgagggtagtcgggaggcctcggtagccaggcagaacaggatatctgccaaagggtgtctgatgtggggtggggctggcatcctcccaggaaggttctaggtgggaccccgtcttctgggggcgggggtgtcttttcatcttccctggtttcctagaactcacttcctttgacggcgtgtgttggtcccatctctcagaccagctcactgaggcagaggagttgctcagaggctcacatgggcacccccattggttcgtgtgagcagctgcccagccccaggcctgccctcggcctggtccagcatgaaggcgtttccatctgcaaggatgcacggtaccctccccgagagcaggcctgtcccctacccaactgggaataaactggaagctgggtctctttgttgctatgtttttttgtttgaagttcccaggaatatttgaggggttccggtgatgtgtttagggatcttctctgtgggggaaaaggaagaggagggtcttgttctcccatctgtttattctttgggctctgggaacaggggactactttggggctttctccagacttttgtatgttgttattaaaagcgagctattgcatttcaaaaaa

SEQ ID NO: 76639 - DNA, 710 bp, Homo Sapiens
  misc_feature (161)..(161): n is a, c, g, or t
gtcttggcacaactctggatagattgcaggtgtggaatttgctggagtttgggactttcgtcaaattcctttggattctgttccgccaaatcagcagtctcgtcctgtggatgcagtgactggaatttcccatctgcaaagcatctctgtagcccagattntgtggagccttaagacactccctcaatgccaccctgaccccacggctggagaaccctgtgcttatgtggtgggcagggccactgttgatggaggatggcggggacggggtggtgctcaaaggatctgtggtgctggaggtctacacgcctctcaggacagcgtgtcaggaacctcagagcagcttcacatctgccaaagctgagagggagtgaacttgggaagcattttgctcattgtcctacccaagtattaatagcataatagttgatgccaaaggagatggtgacgtcccttccactgtagttgctgtcacaaccttgacgtctttaagctaatggccgtttgcatctgtgtcttcaaacagatcctggttacagccattttgtgtgattcacttcgggggttaagtaatgcaggattctgcaaacaaggtgtcgccgtccaaatgtactgtcctggcatagagagcactgctttgttttccactgttgtagagaaaactagggagaactttatttttcaataaacttttcttgtgtgaaaaaaaa

SEQ ID NO: 76640 - DNA, 671 bp, Homo Sapiens
  misc_feature (614)..(614): n is a, c, g, or t
  misc_feature (643)..(643): n is a, c, g, or t
  misc_feature (661)..(661): n is a, c, g, or t
tttaagaaagatagtaaaagccagactcctttagggctttgaactgtacctacagaaaatcagagtgcagtgaacataatgttcagtcctacagtcaggatgcagttgctccttcccattccacaagatactgcacctttccatcaagtgtcacccgacgtgccaaaactcggtatttttcgccacatgctattctacctgcagcaccaaaataactggtaatggagttctttagatgattgagttgtaactcctgatctgctaagttattcagaatctctgtgttgagttcatcaaactgataatcttctttgccttcatcatcttttacaatttctgagttctgagtctggagtgctcttcttggaagacgacctcttcttctccgcaaatgtggtattgcagcaggccaagatcttcctgtacgcgttctttttctggagtcagataatccataatgcctggaaatgctagacgaggtagtttcttttgcactggaagcacccgtgaaatccacatctgaggtattggatgaatgtgcagttccctcagttctccctatagaacaaggtaaatccaaagtaggattctctgaaattgattcctttatccanaagtggctcagcagttttttgaatcattnttcttgtatatgggccangtggacgacc

SEQ ID NO: 76641 - DNA, 786 bp, Homo Sapiens
aaaggctagctttttaaagtgggggttgcctatgtgattaaatgattttcagtcccacaaatcttttaattcaagcagatacagagagctgctttgaaagacaagactctcaagcttcctctatttcagtcttcagaatagaaagaaatattttcatggccatgtaaaactccaatatgaaaagattacttcattatttgagcctttccattttcagaccaaaaataaaccagagtaaatcttaaaagtttataaataacaagatcaggtggctggctcatccttgtgtcttctagacatattgcatggatccattcaccactgccttccaaactgcaggtgctggcatgtgtgacagatatcatccatgaaggctctgctagaagaattccttttgctgaagaagtatgatgttttaccagttgaaagaaatttgtttattatcctttcccactctctccagaagctggatattctgtctccaagggttcagtggagaaagtggacccctgacgtcaaaagctctccgtggtcttggctgtatctgtggttctaggatcactccttgcacctctggtaggagagaagcactgaaatagagagctgaatatagatttaaggaaaaattcttattaagaaattacattctctggtcatttgagtttgtaatggcttaatcctcaggataaaaaggagctaccactattaagaagggacctgtattggtctaagccataacacactctgtgataaaccactcaactctgagtggaagaccaaatcaaa

SEQ ID NO: 76642 - DNA, 1039 bp, Homo Sapiens
  misc_feature (102)..(102): n is a, c, g, or t
  misc_feature (121)..(121): n is a, c, g, or t
  misc_feature (125)..(125): n is a, c, g, or t
  misc_feature (131)..(131): n is a, c, g, or t
  misc_feature (210)..(210): n is a, c, g, or t
  misc_feature (214)..(214): n is a, c, g, or t
  misc_feature (220)..(221): n is a, c, g, or t
  misc_feature (315)..(315): n is a, c, g, or t
tattaggaactctcctttggaaagaaaaatctgatcacataagttcccagaggagcatccccaattcagagcagtttttacccaccctcatggagtttcacntgcagcttcaagtttcctntgtntgatgnttgaggatccaactgcccaaaaatgggtctaaagtagcatcccgtcacgtcgtgtaaaaagtaatactccttaaagtancacntatganntgattgaatgcatgaatgattgagtcagtttggatgaagttgcctcaaatagagtctaaatatagatttcatactcgatagtgtcatttcagantcaggaaaattaggttactcccatgtgtttctacagcttttccccaatatcatgttaaagttttggcttttatcttatttcacttatttcattttgagtcatgtcttatggctccagctcagcttcctagagataattcattaggcccgagagctgctccagagtgggattagaacccgtgtagtacatagtcacattaaactgagatcggctaattaatcgctcttctccgtgtaactgagcgatcgcgctccttccccgaggaattgcaatttcatggttcctaatgatggtgcgattacattatgtggatcacttaggctgtgggtgtcaggagcggtacttggagcctctctcggtggggatgggagaagtcacttctaaaaccggggagatggaggaaagcagttagaatgtctgttactaatttttgttaacgtgctgctgtttcctacatctcattcaggcattagtttcaagttccattttcccccagcaccgtgtggcaccttccccagaaccctcacattttttttctaatattcacagggttattgtttgtaaaaaatctatttatttgctttattccatcaagtaatttattttcatgagatttcttggaaatgtggctctacatatcgttagtacaagtaatacattttgattgttgtttcctggaataacttgtattatttgatgagttaaataaaatgcctaattctaa

SEQ ID NO: 76643 - DNA, 831 bp, Homo Sapiens
  misc_feature (184)..(200): n is a, c, g, or t
  misc_feature (579)..(587): n is a, c, g, or t
gggttcagatgatgctattaaagaaatgtgtgtactaagcaaaaatatataaatagtgacaaatacacattaccaagcttatcttgcaagggagttattttcatctaacatagaaagtgtgttttatcagacaaatgcttttattttcattctaataatttgatacagaaattagtaaaggcannnnnnnnnnnnnnnnnccagtaaatacattgggtctataaatgtgcatttgtaagggccacaaaagtgaacgtgtggtactgtagtaccacgtgggagacctctggttatggtttagtcctagttcctttgttactcctgtgagcaccgagaagaactgggcgactcccagtcccacctgtgctgtgacagtcccacgtggctatgacagactgtttagtacttacccttctcaggttcctcagtgcaggggtgcatcagggcctcaataataggggtatacctgggaggatccagcagtaatccccagggtactaggattactagtactctgatggaactagtcttccttccttattcctcgaacatgcagtacataaaagggggaaaaggagnnnnnnnnngccttactttgttttacttgccatttattgtaaggaaactttaaagcattttttaggaaatactcaaaagcaaggttggaaaatgttttatctttctatagaaagttgggtacagtatgtaactgcgggaaacccactgcccctttgtaagctgtggaacccaaactgtatggggatatttgatgttttcagaaagaggaagaaaatatggtccaaattaaattttccaaagatacctcaaaaa

SEQ ID NO: 76644 - DNA, 666 bp, Homo Sapiens
gagcactgaaaacctcttaaagaaaaagcatttgtgtgttttccttgaactgtctgtatcaagacgtgttacttcgagatatccattcactttataattttgactgcaaaatattttgtaaatacacttttttacttttcaaacgagtaaaataatgtgcaatgatttttatacaaatgattttcaagttgtttggtatatttcctctaggttttgcttgactcaaagtagatcgttattttgatcaaactgtgcaaacagtagtaccacgtgtagcattttgaaacattattttttaaaaaatgctgtcttgctttagctattaatggggcattgtgaggaactgtgcaaagacatttttgttacaaacctgtgggcctgttgcaatactttaaaaataaaaaattttattccatttgcttgttttgtatagacatttctattgcttctaaatatacttaaaatattttctttccttatgtactgtacagttaatcttatttgccatcatcttgaacacaaaatgtgtatttagaatatttgtataactgtgtaaaataaaaaaggaattatgtggtcagtgcattgttttttaaactggaaatcattttgttttaaaagttaataatggaaaccatattaaaattgaataaattataaaataat

SEQ ID NO: 76645 - DNA, 966 bp, Homo Sapiens
cttttaaataaaaatgctgcaaggtttccgcctctgcgttccccttgtgatggctggcaggtggtctggaagcgtcccggatggcggccaagccgcgctggggcaggtgtcctggcagcgaagggcagcccggccgcaggccacgtcactgcacagcggcgtccgggtggctctggtatcgctgcctccaaacctcctggatcttcctgcaccacttgtgtgcgttcccgctggggtccatcagataatacgtcctgttaggcgtgtggacaaagaaagttttaaaattcttggcctctggtcgaagttcttgtgaccaaggaatttcacctttcagaactttgttgacaggatccacataatataaatgtggtccttctgtgagcaacagctgtcgtcgtcttgcaaataaacccttccgcttatccactgggcccatctttagtattaaattattttctacaaactggtgccaagggtttccgccagcctgcttctccaacaacaacctcttctcatcttcggaaaactgtaagtccagttcaaaggagttcgagtccagatcgtgaatgtactgctctatgttgctgcctgacctctggggcaggcccgtgtcggaggctgacagggagtgtgaggaggaggacgaagacacctgcatgcagccaaactggctcaggagattgtcataattgccatagcagtcctcgtcgtcttccgacatagccggcaggtaagcggtgagcttcggaggcgtctgctggtgcaggttctcccacgtgacggactcgaagaacgggtgtgctttaagaggtccgtatccttccatttcctcacagcctaaccgctttgtggcatctaaaaccaaaagtttctccacgaggtctcttgccttagggaagaatttttctggaaagtcatattccaacttaatgatcttctgaaatataagatactcgtttctgt

SEQ ID NO: 76646 - DNA, 1470 bp, Homo Sapiens
agattcggcccgagggtgaagtctggcaacaagaggtcttcatctcactctagcccaggtagtccaaagaagcagaagaatgaaagcaactcagcgggatctcccgcagacatggagctcgattcagatatggaggtaccacatggttctcagagcagcgaaagttttcagtttcaaccaccattacctcctgacactcctccactcccaaagggcaccccgccgctgactcccagtgactcaccccagaccagaacagcatctggagctgtggatgaggacgcactgactctagaagaacttgaagaacagcagaggcggatctgggcagctcttgagcaggccgagagcgtaaacagcgactccgacgttcctgtggacacacctttaactggcaattccgttgcctcatcaccttgtccaaatgagctagacctccctgtcccggagggaaaaacatctgaaaagcagacgctggatgagcctgaggtaccagagatttttacaaagaaatcagaagctggacatgcctccagtccagactctgaggtgacatcactttgtcagaaggaaaaagcagagttggctccggtaaacactgaaggtgcccttcttgataatggcagtgtcgtaccaaactgtgacatcagcaatgggggcagccagaagctctttcctgcagacaccagtccttcaacggccactaaaattcatagccctatacctgacatgagcaaatttgcaactggaatcacgccatttgaatttgagaatatggcagaatctactggaatgtacctcaggataagaagcttgttaaagaactcaccccgaaaccagcagaaaaacaaaaaggcctctgaataatggcttgacttagcactgagagctatttaataactttgttccgttaattagtactaattaagtggatagatagaatggttttcctgtttgtccctcccatgtttaaaaatctatccaaggttcatgttccaaagtcaagcctattttaaagaaagactgagctcactagttcagtatattttattctcactgacaaaacttggggggagatgtgaatatgacctggtttagagagggtttgttaaggtttatactatttttggattgtgactatccgtcgagagtgatggtttttatctgtcttttgtacattgttttccctttctacattttgctaattatcctgtatataagtttaatatatcactttttaaaagaaaaaattctaccattttaaattcatgtttcaactcctacaaccaaatgagaaaaatcagggatgagcagctttatcccatttggggtatttttgtaagtgatttacatgtgtcaattttagtaatacttttacttttttgtaacttcatccttcatatatgcttgctatacaggtatgttcatctttgtgtacagaggtttaataaattagttttcatatacata

SEQ ID NO: 76647 - DNA, 582 bp, Homo Sapiens
  misc_feature (362)..(371): n is a, c, g, or t
ggcggggtgccctttgggagtggaggggtgaagacgggtggaggagttccccgggggagtggaggagtgtcaggaggtaatggtggttgaaactgaaaactttcgctgctctgagaaccatgtggtacctccatatctgaatcgagctccatgtcggcgggagatcccgctgagttgctttcattcttctgcttctttggactacctgggctagagtgagatgaagacctcttgttgccagacttcacacctggcgcttggaagttagaagtaaggtaattggcaaacacatccttctgctgacatgcctgcattggtatggaaccaaagatcctccattcctaatgatgaaaagagaaggnnnnnnnnnncacatgtatttggaaaatgtcatgttttgagattttgctcaaaggaggtacagtggagatctcaaattacatttttccttcttatgttacttttcctttattggaaattaaggaaaataatgtgttgaaggaaaactaaacctgcctgcaaaataattaagactgaatactaaaagactacctgacacaatcccttggccaaaaaaggttc

SEQ ID NO: 76648 - DNA, 698 bp, Homo Sapiens
gggggtggagaacaatttgttctgtgtttgtgtggggcaaggcctgtcttcaggctctctccaaccacgtacgctctggctggagcttctgaaaggacacagttcttgcatagaagttgctttctccagcttgcccaccaggcagtatggcttcagacatctatattccccttttaagtcaatttgactgtttaagtggaatgtttgtgtcagtctgataattgttaattcatttgatcctcataccaacccttacttgcctccttttacagatggaaaaatcaaacttggacagtaatttccacaaggaaaagccccacagctggaaagcggtgggagcaggaggccacactgggtacaggagtacccatctccccacaggagccccacactgtctcacccttaggaagcccaaatgctcactccttgagtttctaatgcattctttctgatgtacaggaagaggggaaggaaggaagagcttttccatttggtgctccaatgtctcctgctggacccatctgcctagtggaaggcagcaaaatttcaagaaacaggtgaggttgagcagcttggtgcaaccccatggggcctggagttggagctcaacagcaatggatttcagagaccaccctgaaactcccagtaaaaaagacttgggagacatgttaataaactcaagcatttgatcgacccac

SEQ ID NO: 76649 - DNA, 711 bp, Homo Sapiens
  misc_feature (153)..(187): n is a, c, g, or t
gggaaagagaaaaggttgggtccactgaacatcatgtttgtagacgctgacaggtggggtcctaatgagagccaacacatgctcactgccagctcctgtcctgagtactgggaagtttctcctgaagccctgtgagatggctctgtggctggnnnnnnnnnnnnnnnnnnnnnnnnnnnnnnnnnnncggcctggcctggcttcacacacatagccgactcaggagagggatgcccatgggggaacatgtgactctcagcattggaaggacagagctaggatgatggctttccggtggcactcgttcaggtttttgcccaagtctcagcttggccaaggcctgtcactgactggtttaccaaagtcgatgtgaggaggaggctttatacctgaggggatgatgttaacttcagacaagatggagctgctcacttttgccgggtttggtggccacttcacccccaaccctgtctcacccccattatccctcctcaattggaggctggacagagctgaataggaaagacttgctattgcctaaggctatgtgtgacaccctcctgaggacctccccaccccagtgtaatggcccttcatggcagggacagaaaggtggactgggggccatttgcttcctgtggccttcagcagaccaggccctgtccctacctggagcctcacctccaaggaaattcatgttctccttaatgg

SEQ ID NO: 76650 - DNA, 1189 bp, Homo Sapiens
  misc_feature (28)..(28): n is a, c, g, or t
  misc_feature (50)..(50): n is a, c, g, or t
ttcttcctcttccctgcacagagatttntccatcaacttgcttgtttgcnttctgctactcagctgcacgctgagcaccaagagcttgtgatcaaaattctgttggacttgacaatgttttctatgatctgaacctgtcatttgaagtacaggttaaagactgtgtccactttgggcatgaagagtgtggagacttttcttccccattttccctccctcctttttcctttccatgttacatgagagacatcaatcaggttctcttctctttcttagaaatatctgatgttatatatacatggtcaataaaataaaactggcctgacttaagataaccattttaaaaaattgggctgtcatgtgggaataaaagaattctttctttcctactacattctgttttatttaaatactcattgttgctatttcactttttgacttgacttttatatttctttaaaaaattccttccttttaaaaaatataaaagggactactgttcattccagttttcttcttctttgtagttcttctagtgtgacttttcaagtgtaacagccattcttcctgactttaatattgtccagttctggtcttttctgtgaattaccactgggccccttacctcaatgctttttgttgatgcccactctggttcccttgtttatctgagtctgttggtaccccaaatgaccccacacccatcttaaagtactttttttcaccttccctgtttagtactggccagatgagttttttctagagctctgtcactatctgaaaagaaagaggctatgggaaacatagaaatggtatgtattaataactgatcataggctgaggagaaaaaatgtagctggctgcaaacccagtgctgtgaggtgacttatatgaggttccagatcaaagacaggccgtgtgagccagtccaggagggtgtaagttctgaatggttccttgctgactttgggtgacacatgtaccacatactggctcagtttaagtcatggttctattgtagatttatttttatattagttaataaatgactttaaattgtcaccaattgaaaatcttgtcactcttttggttttctttatatagctcagccaaatcttgttttatgtcctgtcctcatctcttaagctaaatctgtttggatcatattaataaactaaatgaaattaca

SEQ ID NO: 76651 - DNA, 617 bp, Homo Sapiens
ctcctgagaaaaaagcttccgcttggagcagaggggctgaatagcagaaggttgcacctcccccaaccttagatgttgtaagtctttccattggatctcattggacccttccatggtgtgatcgtctgactggtgttatcaccgtgggctccctgactgggagttgatcgcctttcccaggtgctacacccttttccagctggatgagaatttgagtgctctgatccctctacagagcttccctgactcattctgaaggagccccattcctgggaaatattccctagaaacttccaaatcccctaagcagaccactgataaaaccatgtagaaaatttgttattttgcaacctcgctggactctcagtctctgagcagtgaatgattcagtgttaaatgtgatgaatactgtattttgtattgtttcaattgcatctcccagataatgtgaaaatggtccaggagaaggccaattcctatacgcagcgtgctttaaaaaataaataagaaacaactctttgagaaacaacaatttctactttgaagtcataccaatgaaaaaatgtatatgcacttataattttcctaataaagttctgtactcaaatgtagccacc

SEQ ID NO: 76652 - DNA, 1245 bp, Homo Sapiens
ggtccagtgcccatcaaagttcaggtgcccaacatgcaggataagacggaatggaatctgaatgggcaggtgctggtcttcaccctcccactcacggaccaggtctctgtcattaaggtgaagattcatgaagccacaggcatgcctgcagggaaacagaagctacagtatgagggtatcttcatcaaagattccaactcactggcttactacaacatggccaatggcgcagtcatccacctggccctcaaggagagaggcgggaggaagaagtagacaagaggaacctgctgtcaagtccctgccattttgcctctcctgtctcccaccccctgccccagacccaggagcccccctgaggctttgccttgcctgcatatttgtttcgctcttactcagtttgggaattcaaattgtcctgcagaggttcattcccctgaccctttccccacattggtaagagtagctgggttttctaagccactctctggaatctctttgtgttagggtctcgatttgaggacattcatttcttcagcagcccattagcaactgagagcccagggatgtcctacaggatagtttcatagtgacaggtggcacttggctaatagaatatggctgatattgtcattaatcattttgtaccttgacatgggttgtctaataaaactcggacccttcttgtgaaatcagttaaataagacttgtctcggtcacctgtgccctgtccagactcgaggcagtggtaacactgcacagtgctatgtggcttctctttgaggatttttgggttttgtaactaaattcttgctgccctcatactttttatgtattagaatcatattcgtattgcccttttaaaacattgggatcctccaaaggcctgccccatgtatttaacagtaatacaggaagcatggcaggcaccatgcaaaccaaggatggatggtgcagtccctgtgtcagtgggcggtggtttcctgctggcctggaatcactcatcacctgattgattggctctgtggtcctgggcaggtgcctcataggtgtgtggatatgatgacgtttctttaaaatgtatgtatttaacaaatacttaattgtattaaggtcatgtaccaaggatttgataaagtttaaataatttactctctacttttatccattttatccattttaactcatgtaatcctcatgtgagtattcctgtttaacacttgagtaaactgaggcacagagaac

SEQ ID NO: 76653 - DNA, 1674 bp, Homo Sapiens
  misc_feature (23)..(23): n is a, c, g, or t
tcagggctaagaggtagcgaggncccgcgcgcgggctgttgaaaatcggcacgagggcgaacctgagactgactactgtgcattaggaaagacctggagtcaggactttggtgggatttggagctccgaggcagtaataactgaacaagcagccctgtcccctaggctgcagaagcttgaatgcatcctctcccagaacctgccacaggaaactgggggctttgtcaggtcagcccaactgcatgcaaaagaccaccatcctcagaagccaagttgtcttttatgaagaggcaaggaaaggggaaacccacatgtgaccctgattttggtatggcttgatagagttccctgaaaactccttgtatgtgtgctaaaaccagggaagcatgtgactgccaagcaggcaacccctgatgatttgtaaagccaggtggcagggccttggggagccccagcacaatgatattgtgtggtcttccctcctgtggaatcgaggggaaattattcttcccaataccttgatttgattttcagtttcataagcttcttcctctgaatcttattgagggactatggtaccaagcaggtaggactgttcacctggtggaacagttcttgctctgccttctaggcttcatcccagaaatccagcctctttctggagaccccaaagctggagggagatgggctttcctctgggcctctctcctactttgccatccacactgctcctggctaaccccagcaataaccaacaaatggtaggaagccccatctattgctttttctcaattatgactgcatagtttatggaaacaaagatcttgaggaacatgagggaagccctcccctcttcacagtcccccatctcttctcctttggacctggcaacaccagagttcagtgtttaaacagacaaaatataaagtattgagtaggtggttcatatgccgaatccacttggtaggaagaaaccaccagctttatagtgtgcctgatagattttaaacattcctgggcacccactcaagagtgctctttttatcaccttctggaaatccgcaaagttgcaggggcctctggagtgtctcttctctagagagaattggtggacccccctcagtgcagtggccccaactagtggagggagagaggacttaagtcagatggactcaacagaaatgggtttccagaagaataatgaaaagttgtgggtaggaaaatgaatcatttggactcttcaatgaaatggagtgagcccaggagagctcagccaacagaggcactctgggaacctgttagtaaagccaggctggccaaatgccatttgattttgaacctcgtaggtccccactcaccctctgccaggagctaagtaaggcaggagagctgacttgggactcctggctcggccccaacagggagcccccttcccaccatccttcggcaagctcaccacctcatccttctgccaaggcagctttcctttcttttgtgtgttttctgtgttcttagcctccaccctcctcctgccacccttgtggactaggaccaggtcctgaccccagtcagaaaatgatgatatgtacagtggcacaccttaaccagtcactaattttcactgttgtgaaagtgatttgatttagaattaaacaaatggttttacattaaaaa

SEQ ID NO: 76654 - DNA, 1284 bp, Homo Sapiens
cagtcgacggtaccggacatatgcccgggaattcggccattacggccgggggttcaacaacaagcttccaagatgccgcccaaaggaaaaagtggttctggaaaagcggggaaagggggagcagcctctgggagtgacagtgctgacaagaaggctcaaggtcccaaaggtggtggcaatgcagtaaaggtcagacacattctatgtgaaaaacatggcaaaatcatggaagccatggaaaagttaaagtctgggatgagattcaatgaagtggccgcacagtatagtgaagataaagccaggcaagggggtgacttgggttggatgaccagagggtccatggtgggaccatttcaagaagcagcatttgccttgcctgtaagtgggatggataagcctgtgtttacagacccaccggttaagacaaaatttggatatcatattattatggtcgaaggaagaaaataaaatcatatgaaagactgaataagttttatacattttgtttctttaaaaggtattacatattcttttgagctggagctgcaaggaaatacaaaaatttttaaaaagaaaagatattggatgctccttgtattctgtgaaagctctaagtatgggtttgtaggtgtaagagagggtggggctaagtgaatgtcaactgtagtaggtattcagtcagtctttctcaaagagaagtcaagcagactccctttaacctgtattctctttcctcccagaactatatctgactctcagtctgtcccataaattaattcagaaaccatcttcaggggaagcagatatcaactcacactattcacacaactgaaaatattgggcatcaaatagattagtgtgtgagaatcataaaataagttcctagacaacatttgttttacatgttagtcaactctgatcttccaggacaggtggtattagctccactgtcttaacatagtacgtggcacgttatgcctttcagtgttaactcctttctttttaaataaatgtttattggaggaaaaaagcactcagttgttccatgagttgttttgtactagactaaccgagtgctggttaaagggagggatgtcagcataaaaatgtcattccctcatcttcagtgtatgggttacattaagactgtcctttccagggccaatgttctgtgcatctaaatttttaaaatttaaaatgccatatttatgacatataaaaaagtataaagattactaatataaatactatactgcttcaaaaataaaactttgccaacacaaa

SEQ ID NO: 76655 - DNA, 1113 bp, Homo Sapiens
  misc_feature (418)..(418): n is a, c, g, or t
  misc_feature (420)..(435): n is a, c, g, or t
  misc_feature (448)..(505): n is a, c, g, or t
  misc_feature (1070)..(1070): n is a, c, g, or t
cagtcgacggtaccggacatatgcccgggaattcggccattacggccggggagttcagagttcaacaacaagcttccaagatgccgcccaaaggaaaaagtggttctggaaaagcggggaaaggtcagacacattctatgtgaaaaacatggcaaaatcatggaagccatggaaaagttaaagtctgggatgagattcaatgaagtggccgcacagtatagtgaagataaagccaggcaagggggtgacttgggttggatgaccagagggtccatggtgggaccatttcaagaagcagcatttgccttgcctgtaagtgggatggataagcctgtgtttacagacccaccggttaagacaaaatttggatatcatattattatggtcgaaggaagaaaataaaatcatatgaaagacnannnnnnnnnnnnnnnnccacccaaccccnnnnnnnnnnnnnnnnnnnnnnnnnnnnnnnnnnnnnnnnnnnnnnnnnnnnnnnnnnttgttgggccgccctcgggccctccaagaagcttttctaaaccatttcttttgggcgcgccgggcccaagtaggaaaggggaacttgggcccatagctgtgttccctaaggaaaatccttgggcccatgaacataggggcttggaatttccccacccaataaaaaaagcccccgggggggaaacccgaagcggttttggaacaaaaatccccagaaagggaagttcccggaaggggccttttaacggggaaactctatccaaccagggggagtccccaaggcggagccttccaataatttaatattaacgcccccggcccctggccacctttatttaaagaaaatggggggaaattccctataaaccattttcggcccaacacttgggaaaccctctcaaaaaaggggaatgtaataaaaccttgaaatccccccggggggcgttcaaacactctttggtgccccctttggcgtatataaatattttgccccatgggggggaaaaaccggggggcgcaaacaaaagtttgtcccaatttttgggccccccctttttaaaattccnaaactgtgggggaaaactccccccccgcggggtattgtggttt

SEQ ID NO: 76656 - DNA, 695 bp, Homo Sapiens
gtgagattcaatgaagtggccgcacagtatagtgaagataaagcaaggcaaggggtatgttgctctattattataattttctctcaaggtaagaaagcaaagtaaaaatgacaaataataaaataagataaaaattctccatcctccacagaagaaacacagaagtagggatcattcctttgttcaaccattggttgtagcgatattttggtttaaagatctcaaaagcagaaatgtccaacttgtaaatagtagaataagggtcatctatgtcaaaacctatgcatgaccaaacttgcacggctaacttcaaagtccagcagtgttgagagtacttatgtgttcagtctagttagacttcttctacctatttgtccttattgagcctattcctgtattgctcttaggaatatacctcgtaaccttagcaaaatgttgggaaattctctcaagctacagtagaactgttccctcttctgggccacttgatatcacttatcttttgggtttttcagggtgacttgggttggatgaccagagggtccatggtgggaccatttcaagaagcagcatttgccttgcctgtaagtgggatggataagcctgtgtttacagacccaccggttaagacaaaatttggatatcatattattatggtcgaaggaagaaaataaaatcatatgaaaggctgtaaa

SEQ ID NO: 76657 - DNA, 887 bp, Homo Sapiens
  misc_feature (78)..(112): n is a, c, g, or t
ttatacatcactatagggcggctactcgttcgcagcgaacgacgagcgcagcgaagtcagtgagcgaggaagcggcgnnnnnnnnnnnnnnnnnnnnnnnnnnnnnnnnnnncagtcgacggtaccggacatatgcccgggaattcggccattacggccggggacaccacagacccgcgccgccgacgacccagcagccgccatggctctgctccgaggtgtgtttgtagttgctgctaagcgaacgccctttggagcttacggaggccttctgaaagacttcactgctactgacttgtctgaatttgctgccaaggctgccttgtctgctggcaaagtctcacctgaaacagttgacagtgtgattatgggcaatgtcctgcagagttcttcagatgctatatatttggcaaggcatgttggtttgcgtgtgggaatcccaaaggagaccccagctctcacgattaataggctctgtggttctggttttcagtccattgtgaatggatgtcaggaaatttgtgttaaagaagctgaagttgtcttatgtggaggaaccgaaagcatgagccaagctccctactgtgtcagaaatgtgcgtttaggaaccaagcttggatcagatatcaagctggaagattctttatgggtatcattaacagatcagcatgtccagaaccccatggcaatgactgcagagaatcttgctgtaaaacacaaaaataaagcagagaagaatgtgacaaatatgccctgaagtcacagcagagatggaaagctgctaatgatgctggctacttaaatgatgaaatggcaccaattgaagtgaagacaaccgacaaggaaacagacatgcggtagacgagcatgctcggcccaaacaactg

SEQ ID NO: 76658 - DNA, 1217 bp, Homo Sapiens
atagctaggtacgaggctgggtggtgaattcggcacgaggcggagacaaaggggaagagtcatcgcctgtcggggctaggatatgatgggtgagaggtgtcaaaccaaattctctcggtttggaaacggagaaaatctaaaaatgaggatgtgaggaaagagtccgctctcaaggcgcgttgtggtctatccgagccccgtcccctgggctccctcgggctggggtgaggcgggcagcgctacgcgtggggtaggaccatcttacgctgggaccccgccaaggagccccaggaagtaggtgaaagggcaggggcgtggctctcggggcgccacccacgctcttgaaatctgggtgattgcgagcggccgctcagcgtcccccacaccacagacccgcgccgccgacgacccagcagccgccatggctctgctccgaggtgtgtttgtagttgctgctaagcgaacgccctttggagcttacggaggccttctgaaagacttcactgctactgacttgtctgaatttgctgccaaggctgccttgtctgctggcaaagtctcacctgaaacagttgacagtgtgattatgggcaatgtcctgcagagttcttcagatgctatatatttggcaaggcatgttggtttgcgtgtgggaatcccaaaggagaccccagctctcacgattaataggctctgtggttctggttttcagtccattgtgaatggatgtcaggaaatttgtgttaaagaagctgaagttgttttatgtggaggaaccgaaagcatgagccaagctccctactgtgtcagaaatgtgcgttttggaaccaagcttggatcagatatcaagctggaagattctttatgggtatcattaacagatcagcatgtccagctccccatggcaatgactgcagagaatcttgctgtaaaacacaaaataagcagagaagaatgtgacaaatatgccctgcagtcacagcagagatggaaagctgctaatgatgctggctactttaatgatgaacatggcaccaattgaagtgaagacaaagaaagggaaaaccgaccatgcaggtagaacgagcatgctcgggccccaaacacacccctgggaacagttacagaaaacttcctccaggtattcaaaaaaagatgggaaccggttactggcagggaatgcatccgggtgtaccctgatgggtgcctgggaactg

SEQ ID NO: 76659 - DNA, 1614 bp, Homo Sapiens
ggctaggtacgaggctgggtgtgtgaatcggcacgaggcacagacccgcgccgcgacgacccagcagccgccatggctctgctccgaggtgtgtttgtagttgctgctaagcgaacgccctttggagcttacggaggccttctgaaagacttcactgctactgacttgtctgaatttgctgccaaggctgccttgtctgctggcaaagtctcacctgaaacagttgacagtgtgattatgggcaatgtcctgcagagttcttcagatgctatatatttggcaaggcatgttggtttgcgtgtgggaatcccaaaggagaccccagctctcacgattaataggctctgtggttctggttttcagtccattgtgaatggatgtcaggaaatttgtgttaaagaagctgaagttgttttatgtggaggaaccgaaagcatgagccaagctccctactgtgtcagaaatgtgcgttttggaaccaagcttggatcagatatcaagctggaagattctttatgggtatcattaacagatcagcatgtccagctccccatggcaatgactgcagagaatcttgctgtaaaacacaaaataagcagagaagaatgtgacaaatatgccctgcagtcacagcagagatggaaagctgctaatgatgctggctactttaatgatgaaatggcaccaattgaagtgaagacaaagaaaggaaaacagacaatgcaggtagacgagcatgctcggccccaaaccaccctggaacagttacagaaacttcctccagtattcaagaaagatggaactgttactgcagggaatgcatcgggtgtagctgatggtgctggagctgttatcatagctagtgaagatgctgttaagaaacataacttcacaccactggcaagaattgtgggctactttgtatctggatgtgatccctctatcatgggtattggtcctgtccctgctatcagtggggcactgaagaaagcaggactgagtcttaaggacatggatttggtagaggtgaatgaagcttttgctccccagtacttggctgttgagaggagtttggatcttgacataagtaaaaccaatgtgaatggaggagccattgctttgggtcacccactgggaggatctggatcaagaattactgcacacctggttcacgaattaaggcgtcgaggtggaaaatatgccgttggatcagcttgcattggaggtggccaaggtattgctgtcatcattcagagcacagcctgaagagaccagtgagctcactgtgacccatccttactctacttggccaggccacagtaaaacaagtgaccttcagagcagctgccacaactggccatgccctgccattgaaacagtgattaagtttgatcaagccatggtgacacaaaaatgcattgatcatgaataggagcccatgctagaagtacattctctcagatttgaaccagtgaaatatgatgtatttctgagctaaaactcaactatagaagacattaaaagaaatcgtattcttgccaagtaaccaccacttctgccttagataatatgattataaggaaatcaaataaatgttgccttaacttcaaaaaa

SEQ ID NO: 76660 - DNA, 836 bp, Homo Sapiens
  misc_feature (638)..(638): n is a, c, g, or t
taggtacgaggctgggtgtgttaatcggcacgaggcggagacaaaggggtaagagtcatcgcctgtcggggctaggatatgatgggtgagaggtgtcaaaccaaattctctcggtttggaaacggagaaaatctaaaaatgaggatgtgaggaaagagtccgctctcaaggtgtgtttgtagttgctgctaagcgaacgccctttggagcttacggaggccttctgaaagacttcactgctactgacttgtctgaatttgctgccaaggctgccttgtctgctggcaaagtctcacctgaaacagttgacagtgtgattatgggcaatgtcctgcagagttcttcagatgctatatatttggcaaggcatgttggtttgcgtgtgggaatcccaaaggagaccccagctctcacgattaataggctctgtggttctggttttcagtccattgtgaatggatgtcaggaaatttgtgttaaagaagctgaagttgttttatgtggaggaaccgaaagcatgagccaagctccctactgtgtcagaaatgtgcgttttggaaccaagcttggatcagatatcaagctggaagattctttatgggtatcattaacagatcagcatgtccagctccccatgngcaatgactgcagagaatcttgctgtaaaacacaaaataagcagagaagaatgtgacaaatatgccctgcaagtcacagcagagatggaaagctgctaatgatgctggctactttaatgatgaaatggcaccaattgaagtgaagaaccagaaaggaaaaccagacatgcaggtagacggagcatgctcggcccaaaa

SEQ ID NO: 76661 - DNA, 1166 bp, Homo Sapiens
cattctgtagatatgtttgaatatagaaactttttttaccccaactactgaatccaggagtaccaaataatatatagtaaaactaagatttaaggttgtgtcaaaaaggtacagtgattcagccatttccatttgtcatttgtttcaaccttttttaagttgagtgtttttatttctgcagttattagttggatcctccacatcttgcatatatacatgggctcaattattatgtttgtcaggatattcaaatgaaaatactagttcagtgatcagcattgaatggttgttaggcagccatgtgctcaacactgatttcacctcttgagtataaactttttaaatttaaattggtttacatgaaagtggattaaaaggcctttcaaaagaatgggtttgaaaaacctcagtaccctttaatacatgtacatttctttccttttttcatttaatgtaacatgtctgttgtaactatgtttcttaaatattattttaaggttatgtgttctttaattatggtcaaatataatttggtcaccaaaaatgaaataatagtttaaaacaagtagctgttactaagtgtgctaaaaatactcattttataattaattttagttttcttagtatattattataaattgtgccctaagtcaggtacaaatgtacacatcaaaatgcccatattgtatctatctgtagtcgtttaatgtgaattatatgtgaatttttttcaaaattttactaaccagaattctgttataggcacctaaccacgcagcatgaggaaaacggcacaacacaatcttgaggtgccttctgaatcatcagattaaattatgcttcatatgtttttgcttttactgtatttctttaaaaactctaaatctttattcatgtgtcactggattaatttatctgataatgtgtctcacaagaatctgttagatcgtttattcttcagttgtactttgaatggtggggtggaagtttcaggtgaacaatggataacaaaaagcaagttatggaagattgtgaagaggatggaaaaactgaatacaagataccaaaaatgaaaaaaagtgtcccatttttaataactatattctattattttataaatgtgtaataaaggggtccctctttattggttgttctccacttaaaaa

SEQ ID NO: 76662 - DNA, 2476 bp, Homo Sapiens
tacggctaggtacgaggccgggtgttgaattcggcacgaggatttagagccgggtaggggagcgcagcggccagatacctcagcgctacctggcggaactggatttctctcccgcctgccggcctgcctgccacagccggactccgccactccggtagcctcatggctgcaacctgtgagattagcaacatttttagcaactacttcagtgcgatgtacagctcggaggactccaccctggcctctgttccccctgctgccacctttggggccgatgacttggtactgaccctgagcaacccccagatgtcattggagggtacagagaaggccagctggttgggggaacagccccagttctggtcgaagacgcaggttctggactggatcagctaccaagtggagaagaacaagtacgacgcaagcgccattgacttctcacgatgtgacatggatggcgccaccctctgcaattgtgcccttgaggagctgcgtctggtctttgggcctctgggggaccaactccatgcccagctgcgagacctcacttccagctcttctgatgagctcagttggatcattgagctgctggagaaggatggcatggccttccaggaggccctagacccagggccctttgaccagggcagcccctttgcccaggagctgctggacgacggtcagcaagccagcccctaccaccccggcagctgtggcgcaggagccccctcccccggcagctctgacgtctccaccgcagggactggtgcttctcggagctcccactcctcagactccggtggaagtgacgtggacctggatcccactgatggcaagctcttccccagcgatggttttcgtgactgcaagaagggggatcccaagcacgggaagcggaaacgaggccggccccgaaagctgagcaaagagtactgggactgtctcgagggcaagaagagcaagcacgcgcccagaggcacccacctgtgggagttcatccgggacatcctcatccacccggagctcaacgagggcctcatgaagtgggagaatcggcatgaaggcgtcttcaagttcctgcgctccgaggctgtggcccaactatggggccaaaagaaaaagaacagcaacatgacctacgagaagctgagccgggccatgaggtactactacaaacgggagatcctggaacgggtggatggccggcgactcgtctacaagtttggcaaaaactcaagcggctggaaggaggaagaggttctccagagtcggaactgagggttggaactatacccgggaccaaactcacggaccactcgaggcctgcaaaccttcctgggaggacaggcaggccagatggcccctccactggggaatgctcccagctgtgctgtggagagaagctgatgttttggtgtattgtcagccatcgtcctgggactcggagactatggcctcgcctccccaccctcctcttggaattacaagccctggggtttgaagctgactttatagctgcaagtgtatctccttttatctggtgcctcctcaaacccagtctcagacactaaatgcagacaacaccttcctcctgcagacacctggactgagccaaggaggcctggggaggccctaggggagcaccgtgatggagaggacagagcaggggctccagcaccttctttctggactggcgttcacctccctgctcagtgcttgggctccacgggcaggggtcagagcactccctaatttatgtgctatataaatatgtcagatgtacatagagatctattttttctaaaacattcccctccccactcctctcccacagagtgctggactgttccaggccctccagtgggctgatgctgggacccttaggatggggctcccagctcctttctcctgtgaatggaggcagagacctccaataaagtgccttctgggctttttctaacctttgtcttagctacctgtgtactgaaatttgggcctttggatcgaatatggtcaagaggttggaggggaggaaaatgaaggtctaccaggctgagggtgagggcaaaggctgacgaagaggggagttacagatttcctgtagcaggtgtgggcttacagacacatggactgggctgggaggcgagcaaaggaagcagctgagactgttggagaacgcttacaagacttcatgcaagcaaggacatgaactcagaacactgaggtcagaagcatcctgctgtcatgacaccgctcgagtgaccttgaccttgaccaagtctgtcctgtttaggactgatttttcctattaggctagggtttggacctgatgttctcaagatgtctagaattgcatggctggccttgtggaatagatggttttgcattccagccaagtgtgctgtaaactgtatatctgtaatatgaatcccagcttttgagtctgacaaaatcagagttaggatcaagtaaagga

SEQ ID NO: 76663 - DNA, 599 bp, Homo Sapiens
cacacagccccattcctggagcacactggggattcacacctcagcccttggagccatcccaagagtaggggcaggaggtagcattcacaaccacccttgtcctggtatctgacacctccctctgcctgtcacagcccccacaaccccccagcacctcagtcactaagtctcagcctctagccctggaatttgcctagagaccctcctccctgcctattcccccatttgtctaacaggcccttagatggatctgtctccccactccgtgccccatcccaccccgctgagacccacctgtaccctccaatgacatctgggggttgctcagggtcagtaccaagtcatcggccccaaaggtggcagcagggggaacagaggccagggtggagtcctccgagcgtgtacatcgcactgaagtagttgctaaaaatgttgctaatctcacaggttgcagccacgaggataccggagtggcggagtccggctgtggcaggcaggccggcaggcgggagagaaatccagttccgccaggtagcgctgaggtatctccccggccgtaatggccgaattcccgggcatatgtccggtaccgtcgactg

SEQ ID NO: 76664 - DNA, 1545 bp, Homo Sapiens
tgtttctccctaagtgcttctttggatctcaggctctaggtgcaatgtgaaggggagtccctgggcagactgatccctggctcagacagttcagtgggagaatcccaaaggccttttccctccttcctgagcctccgggcaaggagggagggatcttggttccaggtctcagtaccccctgtgccatttgagctgcttgcgctcatcatctctattaataaccaacttccctcccccactgccagtgctgcccccacgcctgcccagctcgtgttctccggtcacagcagctcagtcctccaaagctgctggaccccaggagagctgaccactgcccgagcagccggctgaatccacctccacaatgccgctctcaggaaccccggcccctaataagaagaggaaatccagcaagctgatcatggaactcactggaggtggacaggagagctcaggcttgaacctgggcaaaaagatcagtgtcccaagggatgtgatgttggaggaactgtcgctgcttaccaaccggggctccaagatgttcaaactgcggcagatgagggtggagaagtttatttatgagaaccaccctgatgttttctctgacagctcaatggatcacttccagaagttccttccaacagtggggggacagctgggcacagctggtcagggattctcatacagcaagagcaacggcagaggcggcagccaggcagggggcagtggctctgccggacagtatggctctgatcagcagcaccatctgggctctgggtctggagctggggcgtacaggtggtcccgcgggccaggctggcagaggaggagctgctggcacagcaggggttggtgagacaggatcaggagaccaggcaggcggagaaggaaaacatatcactgtgttcaagacctatatttccccatgggagcgagccatgggggttgacccccagcaaaaaatggaacttggcattgacctgctggcctatggggccaaagctgaacttcccaaatataagtccttcaacaggacggcaatgccctatggtggatatgagaaggcctccaaacgcatgaccttccagatgcccaagtttgacctggggcccttgctgagtgaacccctggtcctctacaaccaaaacctctccaacaggccttctttcaatcgaacccctattccctggctgagctctggggagcctgtagactacaacgtggatattggcatccccttggatggagaaacagaggagctgtgaggtgtttcctcctctgatttgcatcatttcccctctctggctccaatttggagagggaatgctgagcagatagcccccattgttaatccagtatccttatgggaatggagggaaaaaggagagatctacctttccatcctttactccaagtccccactccacgcatccttcctcaccaactcagagctccccttctacttgctccatatggaacctgctcgtttatggaatttgctctgccaccagtaacagtcaataaacttcaaggaaaatgaaaaaa

SEQ ID NO: 76665 - DNA, 609 bp, Homo Sapiens
ctgagtatacccagtctggaaaaggggagcagtctccacatgttgagcccagtcaagttcagtgtggccgtaggcagtgccctgcaagctctgggccagctgcacagccagagagagcccttgagggagggattaggggagtgtgacccttccttccttccttgtcagcttccagctcttctgatgagctcagttggatcattgagctgctggagaaggatggcatggccttccaggaggccctagacccagggccctttggtgagaacccgaaggctctggaagaggggatgccaatatccacgttgtagtctacaggctccccagagctcagccagggaataggggttcgattgaaagaaggcctgttggagaggttttggttgtagaggaccaggggttcactcagcaagggccccaggtcaaacttgggcatctggaaggtcatgcgtttggaggccttctcatatccaccatagggcattgccgtcctgttgaaggacttatatttgggaagttcagctttggccccataggccagcaggtcaatggcaagttccattttttgctgggggtctaaccccatgggtcgctcccatggggaaatat

SEQ ID NO: 76666 - DNA, 995 bp, Homo Sapiens
  misc_feature (183)..(191): n is a, c, g, or t
tttttttaaacatacttattacacatatttatcaacaaggcatcacaaataagtcacaaaaagtaggcttagtttagttcacaatataaatcccgtgaaaacacatttttcatctctgcagtttataatactctacgtatatgaatttaaagcagttaaacaacatttgagattaaattggtnnnnnnnnnttgtaattgaattcagacttcagaaaattgtgaagtaaaaggccatgatggagaaatattaagaatctgtagaattactaaactgtcacagtattattttcctttacaaaagcatctcagtaaaacaaaaactacagaaaacgcaaagtaaaatcagagattttggtttagtactttccctgagtctcttgttttaaaaatcaaagtaaggccagttcaaaattgacccacaggtcttgcctcctccatgctgccatggggagtacatttaagacaagaggctacgcatgttgaggtggtcccagggctttattcaaatgccaatttgcccgtgtcactgccacagggttatctgacccactgctgcatgtgggcttaaagagctgtcaaaattttatcttggcctgctataatataatatgcgagactatataccaaaggaagacaaacagtttcagttattaataaatattaaatttctaaatggatctggacactatatacatcaaaatatggtaacataacagaaacaaacacttttatgttaaaaaattcttacataaacaaaggtttggggtcaagtcatcttaaacttctaatctcagatgttacaagaaaaaacttcaaaaaagaaatcaaattcattagatcttaatatagtagaaaaaagtgattataagatgatacttggacttggattgtaagttgatactaattccccaaagtggttgtctctttgatccttaaacaaaactggcccctattgtgtctgtacttgatcacttaattgcaataatatttacc

SEQ ID NO: 76667 - DNA, 2238 bp, Homo Sapiens
  misc_feature (426)..(484): n is a, c, g, or t
  misc_feature (960)..(1066): n is a, c, g, or t
  misc_feature (1227)..(1227): n is a, c, g, or t
  misc_feature (1237)..(1237): n is a, c, g, or t
  misc_feature (1844)..(1945): n is a, c, g, or t
aggccagagccccattgggtctatcctgagccaggggactgtgtgatcagcaaagtcctgaccttggacctcaccaagtacccagatgccaacccaaccccaaatgagcagtagcagtatttttgccctcccgccctgtctggatccctaagctgtccctctcccaatctctggatatttgactcccaaccttccccctacctcctggccctttttggtgtagtcatgggatttaggcactgctaatcaagcatgaagaggaacagaggtgatgttaggtctggagcaaaaattcctgaacgacagggagtattctggcctctgaaaggaggtgctgagctgaacagggccatctgttcatcacacacacccccttcctccccctcatcacccataatcgtgggccccttgggcctcttgcccacnnnnnnnnnnnnnnnnnnnnnnnnnnnnnnnnnnnnnnnnnnnnnnnnnnnnnnnnnnnttgcaaaataataaaggatattggagacctgttttagaaggagcctaggctgaatttgattccaagagagcttaggatgacagcacccctgagctgggcaaaggtactcaggacctcataggagtctcaggcagttacctgaaactgccttcattcactcatttgtgtattcattcatttatgtattcatcagacacataccgaacaccctctatttgtcaggctctgtgcttggaatacagagttgaatcagacatgatctctaccctcctagtaaggagatacagtgggttcatgaatgactatagttagctgaatgtcatatgtactttgaatttgagaagtgagtgatcccctctaggcttcctggaggtcacatttaagctagaccttgacaaattggtaggatttggtcaggcactaggagtggagcatgagctctggggacagacagttatgggttctggtcccacttnnnnnnnnnnnnnnnnnnnnnnnnnnnnnnnnnnnnnnnnnnnnnnnnnnnnnnnnnnnnnnnnnnnnnnnnnnnnnnnnnnnnnnnnnnnnnnnnnnnnnnnnnnntaatgatgtcaagctcctcactggaggccttatcccttcgtggagccccactaggtgccgacccctcagaatataaccctcatgcctggacccctgagagcttctgatcccagctattagggacagaagaagcctccaaatctggaaagtgctgaatgccntgctgactgngaaagtttcagggcactgatgggtctacctggtaagcggagggcctgaggaaacctgtagcttcaatcatgtctggtaaccgggtgcctgagccccaatctgggttgtgaggaaataggggagaggtatcctgggccacatcccagcctaacacctgtgaggttcattttaggaactaacctcattagctataaggatcatgcagaggcagcaaagccgggtgcgatgagctcagcctttactcattcacatacaccatcacactttaattccaatctgtatattgcttttaaaaagttaagtccattctaatttacccaaatatgcatgaattcattctccttttgagaagttagattgctaaagatagtctcattcagctaccaaccactccttgatccttcccttcttagtggctgttgtttgttgtacttccgtttagactttgttttaatgcttgtacgtacatatgtgaactcattggaaatattgtgtgtttaatgcaaatgatatattgaattgtttagcaatttgttttctttgcttaacgatgtttttgagatctgtgcatgttacttaatgtagctcaatccatcttctgtaattnnnnnnnnnnnnnnnnnnnnnnnnnnnnnnnnnnnnnnnnnnnnnnnnnnnnnnnnnnnnnnnnnnnnnnnnnnnnnnnnnnnnnnnnnnnnnnnnnnnnnnacaggagcatcactatgcctgtgtgaaagtatatgtatgaaagtttacctagggttgattcctagaagtggaattgcaaagtcataggatatttatatattggtttttaataatacttccaaattgccctcctgtactatttactcagtatttttcttgaggttgatctgaggtctaacattgttatcctatatcattttcatcccaagtagtgatatctgtgaaatcacaggtttgatgtgtgctaattatgtattcttctaatacatattaaaagacataactatcaaaac

SEQ ID NO: 76668 - DNA, 667 bp, Homo Sapiens
ttttttgttttgatagttatgtcttttaatatgtattagaagaatacataattagcacacatcaaacctgtgatttcacagatatcactacttgggatgaaaatgatataggataacaatgttagacctcagatcaactctcaagaaaaataccgagtaaatagtacaggagggcaatttggaagtattattaaaaaccaatatataaatatcctatgactttgcaattccacttctaggaatcaaccctaggtaaactttcatacatatactttcacacaggcatagtgatgctcctgtgtagtattttgtaatagcaaaacctaaaaacagtcttaatgtccatcacaaaagaaatgcgtaagtaaaatgtggtaatcatatgatgacaatctatacagcaattacagaagatggattgagctacattaagtaacatgcacagatctcaaaaacatcgttaagcaaagaaaacaaattgctaaacaattcaatatatcatttgcattaaacacacaatatttccaatgagttcacatatgtacgtacaagcattaaaacaaagtctaaacggaagtacaacaaacaacagccactaagaagggaaggatcaaggagtggttggtagctgaatgagactatctttaacaatctaacttctcaaaaa

SEQ ID NO: 76669 - DNA, 1016 bp, Homo Sapiens
  misc_feature (59)..(60): n is a, c, g, or t
  misc_feature (94)..(94): n is a, c, g, or t
  misc_feature (195)..(195): n is a, c, g, or t
cagcagcagcggacgggccctttccttcacactgaccgtcagctgagtacaagtctacnntcctccccagatgacatcagaaaggcaaactgancaggctggatggttgggtcagcgtggttggagggcagcctgtggatccctgcactggagtcttgcagtctccgatgcaggttggatcatacattgttaccntcctactgtatgcctcaccctggaatagcagaatgctcagggggagatccgagaacgagaaggtgctcccagccaccaggagcttccagtctggctatgatccttgcccgacctagaggaaacctccacacacgccccttttgtgctaatggtgcagtttgtgtccccctctgcccatcactgtgctgtgcttgttcctgcctctgtgccttcccctatactgctcggacatgtcccctttcctctcctctacccagctaagcccttctgatccacggggcccggcttcccaaaccacccagcccacattcctccttcctgctccgaacaggtcccgtgtgagcccctgcccccgaattgcgtgctgtcccatggacgctccagtctcttccgtgtgtgtcttgagtccctaactagacagttagctccctgagggcaagggactgtcatttcctcttgagtcctaccagggtctagcacaggactgggctcctaactctcaggaaacacttgtcggctgactggtgcctcaagcgctggagcttgtcggtggccggtaatgggcagtgcacgtggggagagggtatgtgagttaactcaagggtgccttttcttgggctgtgggctggctcccctgggtcaaaagtggatgtcggaggcctcaggctcttacctccttggggcagtgggagcatcagggacccccacccccaccccggctctgcaggagtgcacggaagtggtcgtccagcctggatatttctacaggttgctgactcctgcgggagctgactgagtggaataaatgttctctcaacatc

SEQ ID NO: 76670 - DNA, 1004 bp, Homo Sapiens
  misc_feature (88)..(88): n is a, c, g, or t
acagccgacccttggggggaccggggtgcccaccaggcgcccgccggccactgcaaccagccccgtgccgcagagaacatggccaatnagggtcgacgagaagctgggagagacaccacttgtccctgaacaagacaattcagtaacatctattcctgagattcctcgatggggatcacagagcacgatgtctacccttcaaatgtcccttcaagccgagtcaaaggccactatcaccccatcagggagcgtgatttccaagtttaattctacgacttcctctgccactcctcaggctttcgactcctcctctgccgtggtctttcatatttgtgagcacagcagtaagtagtgttggtgatcttgaccatgacagtactggggcttgtcaagctctgctttcacgaaagcccctcttcccagccaaggaaggagtctatgggcccgccgggcctggagagtgatcctgagcccgctgctttgggctccagttctgcacattgcacaaacaatggggtgaaagtcggggactgtgatctgcgggacagagcagagggtgccttgctggcggagtcccctcttggctctagtgatgcatagggaaacaggggacatgggcactcctgtgaacagtttttcacttttgatgaaacggggaaccaagaggaacttacttgtgtaactgacaatttctgcagaaatcccccttcctctaaattccctttactccactgaggagctaaatcagaactgcacactccttccctgatgatagaggaagtggaagtgcctttaggatggtgatactgggggaccgggtagtgctggggagagatattttcttatgtttattcggagaatttggagaagtgattgaacttttcaagacattggaaacaaatagaacacaatataatttacattaaaaaataatttctaccaaaatggaaaggaaatgttctatgttgttcaggctaggagtatattggttcgaaatcccaggg

SEQ ID NO: 76671 - DNA, 3272 bp, Homo Sapiens
  misc_feature (123)..(123): n is a, c, g, or t
  misc_feature (571)..(621): n is a, c, g, or t
  misc_feature (780)..(790): n is a, c, g, or t
  misc_feature (2300)..(2308): n is a, c, g, or t
ttgaatgtcttggtgacaatatctggcaaaaaggataagttacgtgtctactatttgtcctggttaagaaataaaatacttcacaatgatccagaagttgagaagaagcagggatggacaacncgtaggggatttggaaggatgtgtacattataaagttgtaaaatatgaaagaatcaaatttctggtgattgctttgaagagttctgtgggaagtctatgcgtgggcaccaaagccatatcacaaatttatgggccttttaagtcatttgggagaattgggtacataagccattactggtggatctcactgttgaggaaggccagaggttgaaagtgatctatggatcctgtgctggattccatgctgttgatgtggattcaggatcagtctatgacatttatctaccaacacatatccagtgtagcatcaaaccccatgcaatcatcatcctccccaatacagatggaatggagcttctggtgtgctatgaagatgtgggggtcctggccaagaactcagtcatttttctgtgtaccaggttgcctaaatcatgtgcagatggttctnnnnnnnnnnnnnnnnnnnnnnnnnnnnnnnnnnnnnnnnnnnnnnnnnnncgtgtgcattttgtataatggccagaactttgtcgtgtgacagtattagcactgcctcagttaaaggtttaatttttgtttaaacctagacgtgcaacaaaagttttaccacagtctgcacttgcagaagaaagaaaaaaattcaaaccacatgtttannnnnnnnnnngcctacctcattgttcttaatgcattgagaggtgatttagtttatatgtttttggaagaaaccattaatgtttaatttaatcttaataccaaaacgaccagattgaagtttgacttttattgtcacaaatcagcaggcacaagaactgtccatgaagatgggaaatagccttaaggctgatgcagtttacttacaagtttagaaaccagaatgctttgtttttaccagattcaccattagaggttgatggggcaactgcagcccatgacacaagatctcattgttctcgatgtagaggggttggtagcagacaggtggttacattagaatagtcacacaaactgttcagtgttgcaggaaccttttcttgggggtgggggagtttcccttttctaaaaatgcaatgcactaaaactattttaagaatgtagttaattctgcttattcataaagtgggcatcttctgtgttttaggtgtaatatcgaagtcctggcttttctcgttttctcacttgctctcttgttctctgtttttttaaaccaattttactttatgaatatattcatgacatttgtaataaatgtcttgagaaagaattcgtttcatggctgcatggtcatcactcaagctcccgtaaggatattaccgtctcaggaaaggatcacgactccatgtcacagtcctgccatcttactttcctcttgtcgagttctgagtggaaataactgcattatggctgctttaacctcactcatcaaaagaaacttgctgttttttaggcttgatctttgtcctttgtggttaattctcctgtatattgtgaaaatgggggactttccctctgctcccacccacctaaacacagcagccatttgtacctggttgcttcccatcccacttggcacccactctgacctcttgtcagtttcctgttcctggttccatctttttgaaaaaggccctcctttgagctacaaacatctggtaagacaagtacatccactcatgaatgcagacacagcagctggtggttttgtgtatacctgtaaagacaagctgagaagcttactttttggggaagtaaaagaagatggaaatggatgtttcatttgtatgagtttggagcagtgctgaaggccaaagccgcctactggtttgtagttaacctagagaaggttgaaaaattaatcctacctttaaagggatttgaggtaggctggattccatcgccacaggactttagttagaattaaattcctgcttgtaatttatatccatgtttaggcttttcataagataaaacatgccacagtgaacacactcgtgtacatatcaagagaagaaggaaaggcacaggtggagaacagtaaaaggtgggcagatgtctttgaagaaatgctcaatgtctgatgctaagtgggagaaggcagagaacaaaggatgtggcataatggtcttaacattatccaaagacttgaagctccatgtctgtaagtcaaatgttacacnnnnnnnnntgcaaatggtgtttcattggaattaccaagtgcttagaacttgctggctttcccataggtggtaaaggggtctgagctcacaccgagttgtgcttggcttgcttgtgcagctccaggcacccggtgggcactctggtggtgtttgtggtgaactgaattgaatccattgttgggcttaagttactgaaattggaacaccctttgtccttctcggcgggggcttcctggtctgtgctttacttggcttttttccttcccgtcttagcctcacccccttgtcaaccagattgagttgctatagcttgatgcagggacccagtgaagtttctccgttaaagattgggagtcgtcgaaatgtttagattcttttaggaaaggaattattttccccccttttacagggtagtaacttctccacagaagtgccaatatggcaaaattacacaagaaaacagtattgcaatgacaccattacataaggaacattgaactgttagaggagtgctcttccaaacaaaacaaaaatgtctctaggtttagtcagagctttcacaagtaataacctttctgtattaaaatcagagtaaccctttctgtattgagtgcagtgttttttactcttttctcatgcacatgttacgttggagaaaatgtttacaaaaatggttttgttacactaatgcgcaccacatatttatggtttattttaagtgactttttatgggttatttaggttttcgtcttagttgtagcacacttaccctaattttgccaattattaatttgctaaatagtaatacaaatgacaaactgcattaaatttactaattataaaagctgcaaagcagactggtggcaagtacacagcccttttttttgcagtgctaacttgtctactgtgtattatgaaaattactgttgtccccccacccttttttccttaaataaagtaaaaatgacacct

SEQ ID NO: 76672 - DNA, 949 bp, Homo Sapiens
  misc_feature (197)..(197): n is a, c, g, or t
  misc_feature (245)..(255): n is a, c, g, or t
ggggggaggaaattccaaaggcgcctaattcagtgaccccagggattttccctggggaagaccaggctagtggagccagggttccagtttaacgttgctggggccgggcgggtccaaaaggaaatggtctaagaaagccttttttgagggccggaggcgggccgacatattaatatgggtggtgggagttggagggntttaacagcaccagctgcattgcagccttgatttattttggagtaagnnnnnnnnnnngaatggggataaactggtatataagaggaacaggaaggaggggagagaacccaacacatgaggtctgcacacacagctgtcctggttgccctcggtgcagctccgagctccagttacaaggaattccaagttctcaggatcttgaagactctggaggccagtaatccctggatcacactgcttctaccagctcagaagagaagtcctgcctaaggtcatgaaataaacctgactgctgccaccagaccgaacagaggcaaagaacaccttgtcattgcgttcacacaagaattttagtctttgagcccttttgtgcatgaacacaccatccaagtgaccagtttccacagatcggatctctatggccttctctccccagcccattgtctgattggatcgaatatatgctactgatgtaggcatctctccccactgtagaactacatccttggtgatccttccatatgtgtttacataaaccccctcatcttcatagcacaccagaagctccattccatctgtattggggaggatgatgattgcatggggtttgatgctacactggatatgtgttggtagataaatgtcatagactgatcctgaatccacatcaacagcatggaatccagcacaggatccatagatcactttcaacctctggccttcctcaacagtgagatccaccagtaatggc

SEQ ID NO: 76673 - DNA, 678 bp, Homo Sapiens
  misc_feature (397)..(405): n is a, c, g, or t
  misc_feature (434)..(535): n is a, c, g, or t
ggcacgagggagtagccgagggagagtcttggggccaagaagggcccagggtgggtcaggcgtgtgcactgtggaacagagctgagaccccggccccccttggactggcacagggtcctacagagtcagaggaggcctgagatttcgaatgggcagtgaatggcctcttctgccagccacaggcaggatgctccttgatcacggcatcccccggcggtagtacagggtgagcttgcaggagggtctgcaagtgcagacagcagctggggccaaagaggtgttaggttcaaaggctgcgaagagaataggctactggaaaaccaaacccaacagaattcacgtccaaaaatccacattctccatcgcttctcagccttttggctaagattaagtattnnnnnnnnnccaggctctgccaggcgcagtggctcatnnnnnnnnnnnnnnnnnnnnnnnnnnnnnnnnnnnnnnnnnnnnnnnnnnnnnnnnnnnnnnnnnnnnnnnnnnnnnnnnnnnnnnnnnnnnnnnnnnnnnnagattaaaaattagctgcgtgtagtagcatatgcctttcaacgtagctactcaggaggctgaggtgggaggatcccttgagccgaggagtttgagtctgcagtgagctatgatcgccccaatgcattccaggccccattttgg

SEQ ID NO: 76674 - DNA, 1387 bp, Homo Sapiens
  misc_feature (35)..(35): n is a, c, g, or t
  misc_feature (160)..(160): n is a, c, g, or t
acgtctctgagcagaaggtgtgcagccgcatcgcntgccatgaggagcccgtcatggaccttgactttgactcccagaaggccaggggcatctcaggctccgcggggaaggcgctggctgtctggagcctggactggcagcaggccctgcaggtgcgtgngactcatgaactcaccaatcccgggatcgccgaggtcacgatccggccagatcgcaagatcctggccaccgcaggctgggaccaccgcatccgcgtgttccactggcggacgatgcagccactggccgtgctggccttccacagcgccgctgtccagtgcgtggccttcaccgccgatggcttgctggccgcgggctccaaggatcagcggatcagcctctggtcactctacccacgcgcatgactcacccactcccttcccgggagacgaggagggcgggcagggaggtgggcatcaggccccagccttggcctgaaacctcaagggcctctgaggaccagcaagtcatggcccaaggaccatggagtccccgctgtcttcatgaggttggtatttccttttgtggagtgcctcatcacaggacggtgactctgggggccagccagagccctggccgtccgaggcctgcaggagacgttggcttgggcctgctgtgttgccagctgagggtattttataataaatttccattgccaaaaaaggacatagaataataatagaacagaataagaagaaaaaagaatggattaaaaaggaaacgcaagaatgacaggaagaccgagaagcaaaatgcagcaacgcgaggaaaacagcagccgaggatggagtcgcccaaccacgatgaaatcgagccgggcgagcagcgccgacacaaggcgggaggaaccagcaacggatccgtagacaccacaccgacggaccacagcacccaccccccattggcagagggcaccaaaatagcggccacgagggcgaggagagcaaggcaggcagatgagagcagaagaggcacaaacctggccggcgggatagcagcacagaagggtaggcacgcacagtagcagaagcacggctccataaataacagagagaagacgagatcgcagtagcagcatgagggagagtagacacacctgagcagagggggaagagaccaagcaagaacacaggcgcaacgaacagcacagaactcgacgcgcacacagcgcgcagaggctcgggcccataggcgcagaacacaaacacacgagcggagagaagcaagagcaggggacgagcgagacaacacgacccataagagagggcgtacagcggaggaagaaaagaggaacagacagagagccacccgcggagcagagcagcagcagacacacgacaggcacacc

SEQ ID NO: 76675 - DNA, 1368 bp, Homo Sapiens
  misc_feature (86)..(142): n is a, c, g, or t
  misc_feature (756)..(756): n is a, c, g, or t
  misc_feature (1296)..(1296): n is a, c, g, or t
  misc_feature (1304)..(1304): n is a, c, g, or t
  misc_feature (1330)..(1330): n is a, c, g, or t
ttttctaatagtaagagaccgaaggtcttccgttattttgtcccaggctgtttttcgaaccccttggggctcaaggagatttttcnnnnnnnnnnnnnnnnnnnnnnnnnnnnnnnnnnnnnnnnnnnnnnnnnnnnnnnnncagccctgtgtccctcccctcgtttttacaaatgaataaagagatgctggataagcccgaggtcacaagctttgcagtgtagcatcccccaacttgatcccctgtctctttggctccaaaacctacactcagtcctgggagcgattagcgccaacagctcagagaaaacgtgacgaaaaccagtctgtaaaacccgagcctgggagaggggcttcggtgcgcggggggaatttgcagacgctccctgctggcggagatttcctgacctgtccttcggcgcgggactttcggcgggtcccggccgggcagacccaagtgccggcggcggagactgcagtggagccagtaccggctgtagtggccggggccgtggcgggagagtcatgtcagagccgcagccgcggggcgcagagcgcgatctctaccgggacacgtgggtgcgatacctgggctatgccaatgaggtgggcgaggctttccgctctcttgtgccagcggcggtggtgtggctgagctatggcgtggccagctcctacgtgctggcggatgccattgacaaaggcaagaaggctggagaggtgcccagcccctgaagcaggccgcagcgccagggntgaccgtggctgtggtgggacacctttgtatggcaggctctagcctctgtggccattccgggcttcaccatcaaccgcgtgtgtgctgcctctctctatgtcctgggcactgccacccgctggcccctggctgtccgcaagtggaccaccaccgcgcttgggctgttgaccatccccatcattatccaccccattgacaagtcggtggatttcctcctggactccagcctgcgcaagctctacccaacagtggggaagcccagctcctcctgatcatactctggtacctggcctgtgcatcggcctcctgcttcatgtcaacctcctactcctgccagggaatgtggacacctggctcccctggggtccaaagaccctggcacctgggtggggttggagctggacaaaaagcttaaagacaaagggcttcaagaagcagtggtgcagggagtcacagaagggcaggacctgaacgctgtctgcttcctggaatcaagatgctgagtggaagtggacctgggtgggccggcctgtcttttnaaggagtnagtacagggacactcaggacagattnctggcagccttcctgaccaataaatctgaagagttgtt

SEQ ID NO: 76676 - DNA, 364 bp, Homo Sapiens
tatacggcgcgagaagacgacagaagggcaggacctgaacgctgtctgcttccctggaatccaagatgctgagtggaagtggaccctgggtgggcccggccctgtctttttcaggaaaattacatcctcccatggaggatgagagactgaggctcagggagggcaaggaataggcccaagatcacttggcaagctgggcacccaggacccccaggtgcttgacagagtcaccccatggtggtatggctgaacaaggagcggcagacaactcagggagaaactcaggagtgcagtaccagggacacctcaggacagattctctggccaggcccttccctgacccaataaatcctgaagaggttat

SEQ ID NO: 76677 - DNA, 1184 bp, Homo Sapiens
aaccccaaaggtaaaactctttaatctcagagcgcccctcccaactgccgatcccccaacccctcactctctcccccacaccagggccggagagtgagggcccctgccccccaccttgggtggacgagggccctttaaggcacctgtggaggtggggggcgaggggcgggagctggtaccatcctggatgcagggacgggcttcgattggcaggctgttgtggggatggatggaaccaatgaaagggggtgccagaggcagggacagtttggggccatccctgagggggtcagggaacaagttgtcgggacgtgggcaaagacgaccccagtccccgtagtgtaaagaacgtaaattgaaggccccgggccaattctgggaagaggagggcttggccacgcccccaggaagctggagccaattgggagggagaactcaggaaaagcggacggtgactatgtagagactggtcaagccctttacaggatttgagccaatcaaaaaaaagagctgtccagcgactaggggatggagccaatgccgtgcgagcaaatcccttgtcgctaggcggaaaacaaaggagttgacccatttagagcttagaactcagcgagccaatcccttaatagaaggaatctgtcgctaggcggagagagacgacagacccaatcgggaaacgggacagatgccgctcctcggcgcggcaggtcgtgggctggaaggacggcggggattggcagaggcgggacaatcttgggaatgggagacgcaaggaggccggtcccggatcggcctcagattagcaggccccgggagtggggcgggggcgtagtgtgggacggggcggacgcggcccggggcgctccctccctggacttcaatatttccgcttcagcttctggaagtcgctggtgttaagccgcggccgtggcaggtccccgaagacctgggtgtcctcggcctctcgcagcaccagcgcgcgcatgctcgccgcgatgcggtccaggtcgggcgaagagggcggcccattctcctcatctgatgaccgcgcctctgtcctcttctccttgaagccccagacgggcacagacacaggcagggacttggcgtactgctgtgtgggtagggctgaggctggcctcgtgccgaattcaccacccaggcctcgtacctagccgtaagtt

SEQ ID NO: 76678 - DNA, 844 bp, Homo Sapiens
  misc_feature (333)..(381): n is a, c, g, or t
  misc_feature (387)..(434): n is a, c, g, or t
  misc_feature (606)..(615): n is a, c, g, or t
ggactggggtcgtctttgcccacgtcccgacaacttgttccctgaccccctcaggatggccccaaactgtccccgcctctggcaccccctttcattggttccatccatccccacaacagcctgccaatcgaagcccgtccctgcatccaggatggtaccagctcccgcccctcgccccccacctccacaggtgccttaaagggccctcgtccacccaaggtggggggcaggggccctcactctccggccctggtgtgggggagagagtgaggggttgggggatcggcagttgggaggggcgctctgagattaaagagttttacctctgagatnnnnnnnnnnnnnnnnnnnnnnnnnnnnnnnnnnnnnnnnnnnnnnnnngggggnnnnnnnnnnnnnnnnnnnnnnnnnnnnnnnnnnnnnnnnnnnnnnnnggtgtttttgtgtgaaaagagggggcccccctatagatggagcgtgcattttattatacgcagaaagcaggaggagcccgggattttaaacaacgtttggagagtggtggaaaaccacgccgccatacagtggaaaaaatttgtggtaaaaggagaaacctaattgctggcnnnnnnnnnnagcacaaatattggggtgggacaaaatatcctccacaacgagaagataatttaaaagccgctctctgaaagggggcaaaaatatataagaaattgttaaggcggttactaaaagtggggtgaaaaacaaacctggggtcgatttatgtttgtggtggggtgaagaaaaaatgtgtgttaataacgggtattggtgcattgatgaaaaaacaatttttttacccgggggg

SEQ ID NO: 76679 - DNA, 968 bp, Homo Sapiens
gcagagctggatattgcatttctaaggcttgcattgctttcccctcgcccgcggttcttggcgcatggaagaggcggtccagccatctgatgttgatcctgtctcagtctccccactgcctgtcaggatgagttagtcattgtttttctccgaggcggcctgcttgccacagccctgctccccaaggcctggtggctttgccgaagctctgggaccgcagccccagcgaggcccccaacctcacccagacgaggccaggagccccgccaccctccacgggatgtgcaccctcagaccccattctctctgttcgtccttccttgaccagtctgtaaaccttcactgtttggggatcgtcctgtccatccatgtaaatgtaaatgttggccgagtcggtatttattctgattgatttttattttattctattattttctccgagggatgagggtggggggtgtggaaagggtaccacagatcaggccggggcagctgtaggggcgggggcccagacagccaggccgccaccagagcagccccatggggtgccccagacgcgggcctccaagaagccaagtcccagtctgttttctggcatcagacaccggcccgtgttccttgtcagacagacagactctcaggcctgcctggggagtcgtgtccctcagctgcagggcactgtgttgggaaaccattggctgggcctttgaggacacagatcagaagaaagaaagacaactttcctctgcgcggaacactcacacggaagggctggccgcctccctgagccggctgggagtggacgacaggacctacctccccagagcaagggcctggggcttcccgccaaagctgccgcggaaccccgctagtgcgaccaccctccctccgtcggtatgtcctgctttccagctgaacccaaactacaagtgggtttaaaaaaataaacaaacaccaccaccaaaaac

SEQ ID NO: 76680 - DNA, 2415 bp, Homo Sapiens
taagccgggtgtagtcggacgaggactctgtccaggacatagggcagggggcctcactgcttgttggtctccacttgttcctacctctgcaggcctctttggcgtctcccctcttgcctcaggaaacccggtggcacctgtggctccaggtgactgtcttgaacagagcgggcttcttcatggctgcgttgttgctgagtttgaactgctcctccctggcctgcgtgactgaatcacagctttggtccctgtcttgcaggggctgaggtgtcaggaggggacttctggcccaccttgccttcagccctggagtgggcagagagtattgtggggaggcatggccagtgggactagtgttccctccatctggccacagcttttgggagatggggtgggcaggggtggttctgggtgggattggctgtgagcgcggcggtgagtgagtgtggcgcagcttgcccggtttgacgaggtggcggctggctggggccttaatgtgaaaagacaagtggcaggcagctggagtagagcgagcccagcagccctaaaaggctgccttcatggcacatctagccccagttcagggcagcatccatagcccacaagccagcgtgggtggggcgggggtggtcccacagactgggttccacgctgaagagcctccgtgcctcggagcaggagaggcaggctatggctgccaacctccctcctgcctgtgtcccggtgagaactgacctgagtccccttccaaacccagacccacctcctgccccaggcccactgaagcatgttccagtttctaagaaagcccagagttcagtgtgtcccaaggaaaacccaaagtggaggtgctcaggtccaggggagtccagtgggcaggacccttggcaggcaagcccctcccttcactcccaggacctaccttctgctagtaaaggactggcttcattctaattatggcccacagactgccccggagacctggaggacagcagtgctggcacttgggtgtccatgggcccgtctgccggctctgcctgtgctgcaagtgttggcccgtgcggtccagccaacaactcccctacgtcctgtgtggggccctgcccaagtggatgaggcattccttgaggagtatcattttccctgacaatccccatcacctttaggggttccctgcttggctcctttccagctgaaaaactagacctgtgccattggggaagctggacaaagtctaagggggcccgcctggtagagggtcccgggaagctggatctgtcagcctcggccctgaggcccctgttaactcaagactgtgagctgcctctaggtggtcacgtctgggagctagcttgtatggcttctgaccagtatcaggatttctgttctgagagcagcgtgggcagcaaggcagggcagcccagaggtggcagcggcaggcaatctggtcactaggtctttgtgatgccaaaaataaaagagggtggggtgggtgctttctgttcctctgatcggatggagtccgccagcaggcatggggctacattccagtgcctgactatagggaggcactcctgattccatggagcagcccggactttgagaatgggctctggtttgcggggggcaggcgtaccagactgcaagaccccccagtacctcaccgtgccaaataggaagaggtggccttggtgtagccaaatggatctttttaacagtgtgcctttggggagggacccatgtccatggcttcgttgagggccatccatatgccagctgggggccagcccacagtggccatattggctgcagcaggaatggtgcccacctcggcgaattgaagggctaagagtcccagatagctaggccagagctggaagcagacagtaaggggaagagctgctcccacaggagagggagagattccagctcactgcgcagcctgggaggaggcgtggatcctggcacgctgagcctcaggcaccagcctccctgtgctcgacagcaaagtcttgactccttcctgctgagcactgtgctaccttcactgctccaaagccagactaacagctctccaagcccttggggtgactcggcttccaggagctgttggagaaatgaggatgtctgtccctgtctgcctgggcaggccagattcctccccagcagccgggtctctccagaccctgattcggtgcctttctgtttaccagctacttcaatcccaaagtttgaatctgcagataccttactcccagccactttgccttcttactgtgttgtgtgtttttcctggtgcttcaagagcgtgtgcagggcaagtgccgtcactgggaactgcaccagatgctcagacttggttgtcttatgtttaccaataaataaaagtagactttttctatttttatttgctgc

SEQ ID NO: 76681 - DNA, 536 bp, Homo Sapiens
cgcacccagcctcatgttgaccctggccctggatagcagctttgtttgtagaggcaggtggtgggagagaccctaggacagcctgagagtaactggacctggtattggtgcggagtggggaatatcccttgtctaaatgcagagcagctgagagaagttagcggggctcttcctccgttctcattgtttcctgctttccttccccacccaccccttcctcagcactctgtgttgtagcctgtactatcctgcttcaagcctccgtgtcccttgtaccttccccctaccttgagttgccagttctttactccctcaaatgttcccatgccacctctggggtttctgttatctgacatccctggctgctttcctggtagatgccattcccagagaggccaacagcgttcccaggcgtggctggctggtccgcatctctcagactcactctgccaggctacagttttgagaataccttttttgttgttgttttgtacctggagaactttttatgaatgagtaaatcttcagaaaggaaa

SEQ ID NO: 76682 - DNA, 2345 bp, Homo Sapiens
  misc_feature (2295)..(2305): n is a, c, g, or t
gctattttccccagagcggctttgtctttggatttagcgtttcagaattgcaattccaaaatgtgtaagacgggatattctcttctgtgctgtcaagggacatggatttgattgacatactttggaggcaagatatagatcttggagtaagtcgagaagtatttgacttcagtcagcgacggaaagagtatgagctggaaaaacagaaaaaacttgaaaaggaaagacaagaacaactccaaaaggagcaagagaaagcctttttcgctcagttacaactagatgaagagacaggtgaatttctcccaattcagccagcccagcacatccagtcagaaaccagtggatctgccaactactcccaggttgcccacattcccaaatcagatgctttgtactttgatgactgcatgcagcttttggcgcagacattcccgtttgtagatgacaatgaggtttcttcggctacgtttcagtcacttgttcctgatattcccggtcacatcgagagcccagtcttcattgctactaatcaggctcagtcacctgaaacttctgttgctcaggtagcccctgttgatttagacggtatgcaacaggacattgagcaagtttgggaggagctattatccattcctgagttacagtgtcttaatattgaaaatgacaagctggttgagactaccatggttccaagtccagaagccaaactgacagaagttgacaattatcatttttactcatctataccctcaatggaaaaagaagtaggtaactgtagtccacattttcttaatgcttttgaggattccttcagcagcatcctctccacagaagaccccaaccagttgacagtgaactcattaaattcagatgccacagtcaacacagattttggtgatgaattttattctgctttcatagctgagcccagtatcagcaacagcatgccctcacctgctactttaagccattcactctctgaacttctaaatgggcccattgatgtttctgatctatcactttgcaaagctttcaaccaaaaccaccctgaaagcacagcagaattcaatgattctgactccggcatttcactaaacacaagtcccagtgtggcatcaccagaacactcagtggaatcttccagctatggagacacactacttggcctcagtgattctgaagtggaagagctagatagtgcccctggaagtgtcaaacagaatggtcctaaaacaccagtacattcttctggggatatggtacaacccttgtcaccatctcaggggcagagcactcacgtgcatgatgcccaatgtgagaacacaccagagaaagaattgcctgtaagtcctggtcatcggaaaaccccattcacaaaagacaaacattcaagccgcttggaggctcatctcacaagagatgaacttagggcaaaagctctccatatcccattccctgtagaaaaaatcattaacctccctgttgttgacttcaacgaaatgatgtccaaagagcagttcaatgaagctcaacttgcattaattcgggatatacgtaggaggggtaagaataaagtggctgctcagaattgcagaaaaagaaaactggaaaatatagtagaactagagcaagatttagatcatttgaaagatgaaaaagaaaaattgctcaaagaaaaaaggagaaaatgacaaaagccttcacctactgaaaaaacaactcagcaccttatatctcgaagttttcagcatgctacgtgatgaagatggaaaaccttattctcctagtgaatactccctgcagcaaacaagagatggcaatgttttccttgttcccaaaagtaagaagccagatgttaagaaaaactagatttaggaggatttgaccttttctgagctagtttttttgtactattatactaaaagctcctactgtgatgtgaaatgctcatactttataagtaattctatgcaaaatcatagccaaaactagtatagaaaataatacgaaactttaaaaagcattggagtgtcagtatgttgaatcagtagtttcactttaactgtaaacaatttcttaggacaccatttgggctagtttctgtgtaagtgtaaatactacaaaaacttatttatactgttcttatgtcatttgttatattcatagatttatatgatgatatgacatctggctaaaaagaaattattgcaaaactaaccactatgtacttttttataaatactgtatggacaaaaaatggcattttttatattaaattgtttagctctggcnnnnnnnnnnnttttaagagctggtactaataaaggattattatgactgtt

SEQ ID NO: 76683 - DNA, 1112 bp, Homo Sapiens
  misc_feature (81)..(115): n is a, c, g, or t
tgatcgatcactatagggcgccctagctcttccgcagccgaacgacgagcgcagcgaagtagtgagcgaggaagcggccgnnnnnnnnnnnnnnnnnnnnnnnnnnnnnnnnnnncagtcgacggtaccggacatatgcccgggaattcggccattacggccggggtctgaatgtataccagacgtgtgagagacacatgcccacttcatgcaactcctaaactcaaagtctaaatcagatatttttattaacaatgacaacttgttgccaacctccctgtttctaatgaccaaagacccagggtacctaaaaggactttgcaaccaagcaaagtcactgtcttcaaatctggatacacactttcccctctgtagattcaaaaggtgcttccttcccggctgtctccagcttccgttactctcttttctgggatttctttttctcttctttctgctcttcctccactgctgaactggtccctaactgaaacagcccctgacttatcccaagcatgcttcctttagctgctgtgagaatttgtcttcctcaccagccaggtcctcaggcaaagtcctcagccagtgctttagagcaacttcccgcaaatcagaaactcactgtgattccaaaaatgtttctgagccctggacccctgcccccaaaatattttcatctttcccccaaacctcctttaaaggagcatgcataacagtgtgctgaaagacagttgttggttttttgattttagcatattatttcctgtatgaaatatgttttatataatctcctattatttttatcttatgttttgtattgttgataaatcctttttgtccttctaagatgtcctattgtaaaatcacttataaggtatgattactctttatgctattactttatatgccatttggtaataaatagtaaattgttgatgatatgattgactgatgcgcagtccagagcatgtatgaataatctcataaaacagtatcacagacattaagctaaactgtttcgtttttttgaaagaacaactcatactttggaacagttgtcaatattaatttgttgcaaatatttaatttaaataaacatttttgtaccatgaaaa

SEQ ID NO: 76684 - DNA, 1283 bp, Homo Sapiens
  misc_feature (741)..(781): n is a, c, g, or t
  misc_feature (784)..(821): n is a, c, g, or t
tggacgaggcatggccaatgtggtcggctttctggctgggctgccttcagcaccattgccaagcactacagttggagcacagccttctgggtggctgaagtgatttgtgcggccagcacagctgccttcttcctcctacgaaacatccgcaccaagatgggccgagtgtccaagaaggctgagtgaagagagtccaggttccggagcaccatcccacggtggccttccccctgcacgctctgcggggagaaaaggaggggcctgcctggctagccctgaacctttcactttccatttctgcgccttttctctcacccgggtggcgctggaagttatcagtggctagtgaggtcccagctccctgatcctatgctctatttaaaagataacctttggccttagactccgttagctcctatttcctgccttcagacaaacaggaaacttctgcagtcaggaaggctcctgtacccttcttcttttcctaggccctgtcctgcccgcatcctaccccatccccacctgaagtgaggctatccctgcagctgcagggcactaatgacccttgacttctgctgggtcctaagtcctctcagcagtgggtgactgctgttgccaatacctcagactccagggaaagagaggaggccatcattctcactgtaccactaggcgcagttggatataggtgggaagaaaaggtgacttgttatagaagattaaaactagatttgatactgnnnnnnnnnnnnnnnnnnnnnnnnnnnnnnnnnnnnnnnnngannnnnnnnnnnnnnnnnnnnnnnnnnnnnnnnnnnnnnagtttccgccttccccgttttttgtgtccaaggtgggcccccttattaggggagctcgctttttattaagccatgagccccgtgccgcggtcgtttttaacaccacgttctgcgtgacgctggggacaaaacggtgtctagccggcggccaccttttggggagggacccctttaccctccggggcgggtgtcaccatatttgtgggcaccgaaaaccctcccctcacgagaagttatttttggaaggcccccttagaagggaggaaacaatcatatatacaactttcttgaagaggggtggttttctaacggggtgggttttacaccatatgacccgcgacaatagattgccctggcacgtgccttttggaagaagtcttggggcctcccacgcggagcatttagtgaattcttggtgacaaaaatttttttattaccccgcgggacgctatggtcaaaaaa

SEQ ID NO: 76685 - DNA, 1138 bp, Homo Sapiens
cagtcgacggtaccggacatatgcccgggaattcggccattacggccgggtacatttgtttttaacatatgtgtttgagaaaagcatatggagtgtttcaccgcaggcacttctgagtaccattccatggcttccagaattttatcctctttgaggtcttctgtgctatgaatattagatttctttccccaagggattatgtggcaggtcattatggccttcttttttttggccatattaagtaacagttttgctatattccagtagtaccgttgtgtgttttctgcaatgtggagttgacttagcttggcattttagatttgttaaaactattttttccataaatactttgaaacgtatttatatatttcaatttaaggaatctttttgccatgtgtatgcaaatattattttcttcatacattcattttcttttcaggggaaaattttgggatgggggactcaggaggacctgtgaagcatgtagttatctagatctgggtaatttcatgtttattaaactcgaactttggctagttaaactcatattgaaacttcatctagtctcttaattttttaacactaaattcaagtcatttgttttaagtctctaaaaaagaagattgcagtcatccattcatatgcatggggtctgatcgcaaatacactaaatgtggagtgtaggaaccaaaatgaaacctgctgtatggaaactactttcacttatggttcattggtttttgtaccaatattttttatgcacttcagtgcaagtcttgtcagttaaccttactttatgagtaagctaaataacccaaattacatttctttaaacctgttttactactatggcactttgataaaatggtcaggaaccaactttactggcaaaagggtccatgtaccaccatgtgctggagcatctgttctacatgtggatatctatgaatggtaatgttttccttcatgtaagtgcctattcagagtttcagaattttaaaatgccaaatattttcatggtcatttgcatgtagtaagccagaaaatattcaaagagattttgaaaaccaattgtatttaaccagcctcaaattgtgcaaccatgatgtataataaagaatttgaaacagaaaaaaaa

SEQ ID NO: 76686 - DNA, 311 bp, Homo Sapiens
agtccctccgcctggaccccaagggcaagtccctgaaggatgaggatgttctgcagaagctgcccgtgggcaccacggccacactgtacttccgggacctgggggcccagatcagctgggtgacggtcttcctaacagagtacgcggggccccttttcatctacctgctcttctacttccgagtgcccttcatctatggccacaaatatgactttacgtccagtcggcatacagtggtgcacctcgcctgcatctgtcactcattccacagctctccagcacccggaataaagcccgcctgcaccagtcgg

SEQ ID NO: 76687 - DNA, 1329 bp, Homo Sapiens
  misc_feature (22)..(22): n is a, c, g, or t
  misc_feature (78)..(112): n is a, c, g, or t
ctgtaatacactcatatagggnccctcgtgtaacgaacgaacgagcgcagcggaagtcattgagcgaggaagcggcgnnnnnnnnnnnnnnnnnnnnnnnnnnnnnnnnnnncagtcgacggtaccggacatatgcccgggaattcggccattacggccgggggcggggcggacgcagagccgcgtttagtctatcgctgcggttgcgagcgctgtagggagcctgtgctgtgccgcgcagttaggcagcagcagccgcggagcagtagccgccgtgggagggagccatgaagcattacgaggtggagattctggacgcaaagacaagggagaagctgtgtttcttggacaaggtggagccccacgccaccattgcggagatcaagaacctcttcactaagacccatccgcagtggtaccccgcccgccagtccctccgcctggaccccaagggcaagtccctgaaggatgaggatgttctgcagaagctgcccgtgggcaccacggccacactgtacttccgggacctgggggcccagatcagctgggtgacggtcttcctaacagagtacgcggggccccttttcatctacctgctcttctacttccgagtgcccttcatctatggccacaaatatgactttacgtccagtcggcatacagtggtgcacctcgcctgcatctgtcactcattccactacatcaagcgcctgctggagacgctcttcgtgcaccgcttctcccatggcactatgcctttgcgcaacatcttcaagaactgcacctactactggggcttcgccgcgtggatggcctattacatcaatcaccctctctacactccccctacctacggagctcagcaggtgaaactggcgctcgccatctttgtgatctgccagctcggcaacttctccatccacatggccctgcgggacctgcggcccgctgggtccaagacgcggaagatcccataccccaccaagaaccccttcacgtggctcttcctgctggtgtcctgccccaactacacctacgaggtggggtcctggatcggtttcgccatcatgacgcagtgtctcccagtggccctgttctccctggtgggcttcacccagatgaccatctgggccaagggcaagcaccgcagctacctgaaggagttccgggactacccgcccctgcgcatgcccatcatccccttcctgctctgagcgctcacccctgctgaggctcagcccctcaacccggtggcattctgggggaggagtggggcccacagctctccagcacccggaataaagcccgcctgccccagtcggaaaaaaa

SEQ ID NO: 76688 - DNA, 972 bp, Homo Sapiens
ttaggctaggtacgaggcctgggtgttgaatcggcacgagggtgctgtgccgcgcagttaggcagcagcagccgcggagcagtagccgccgtgggagggagccatgaagcattacgaggtggagattctggacgcaaagacaagggagaagctgtgtttcttggacaaggtggagccccacgccaccattgcggagatcaagaacctcttcactaagacccatccgcagtggtaccccgcccgccagtccctccgcctggaccccaagggcaagtccctgaaggatgaggatgttctgcagaagctgcccgtgggcaccacggccacactgtacttccgggacctgggggcccagatcagctgggtgacggtcttcctaacagagtacgcggggccccttttcatctacctgctcttctacttccgagtgcccttcatctatggccacaaatatgactttacgtccagtcggcatacagtggtgcacctcgcctgcatctgtcactcattccactacatcaagcgcctgctggagacgctcttcgtgcaccgcttctcccatggcactatgcctttgcgcaacatcttcaagaactgcacctactactggggcttcgccgcgtggatggcctattacatcaatcaccctctctacactccccctacctacggagctcagcaggtgaaactggcgctcgccatctttgtgatctgccagctcggcaacttctccatccacatgggccctgcgggacctgcggcccgctgggtccaagacgcgggagatcccataccccaccaagaaaccccttcacgtggctctttcctgctgggtgtctgccccaactacacctaccaagtggggtccctggatcgggtttcgccatcatgaaccagtgtctcccagtggcccttgttcctccctgggtggggctttcccccaaatggaccatctggggccaaagggcaaac

SEQ ID NO: 76689 - DNA, 1227 bp, Homo Sapiens
  misc_feature (59)..(119): n is a, c, g, or t
  misc_feature (985)..(1004): n is a, c, g, or t
  misc_feature (1101)..(1135): n is a, c, g, or t
  misc_feature (1138)..(1183): n is a, c, g, or t
taagagacaaggtcttgctatgttgctcaggctgatctcaaattctcaggctcaaaaannnnnnnnnnnnnnnnnnnnnnnnnnnnnnnnnnnnnnnnnnnnnnnnnnnnnnnnnnnnnaccacatatgatcttttaacagtaaacactatagttcttagaacatctgattgttccaagacatattcttcaacagatatgtaagacctaagctgcactgctgtgaaacctacactacccttttatgttcctcacctgaggggaaatcacagctgctcttcacatacaccataaataataatctattccatgcatatagggaacctaccgagtgtcaagcactggtggaaacaagaaggaataaggctcctgctgacattcctctctagtgagagaaataagatacacaaaaccacggagaaaaatatcagtgatagatccaataccactgacagattcaatccaatcagtgaccagtgatagatcagtgatagatccaactgaaaaataccagtgatagaaataatccaatcagtgatagatccaaacaaggatatgatggaaaacaactgcccgatgattttagatttgagagtgacacaaggcctcagagacgtgaaactgaagccaagaactaaaccccagaagacaagtaaagatcagagagaagagtagtgcaaagaccctgacacacaaagaagtttgtattggtcaaagacaagagaaaagctcagtgtggctacagcaaaatagggtaggtggagggcagtactgaatgagatcaaacagccaagggtcagctcacgcatgggtttgtaagacaaaagaagaagctgggaatttcttccaagtgaagatgaaggccctaagagggttttagacatgggagtaacatgatctggctgatattgtcaaaagttcatcctatttgtcacatagagatgtaatataaataacatgaaactagcaatccaattctttcactnnnnnnnnnnnnnnnnnnnncacaacttaacagaatgccaagaaaagattgtatttgctgaaaggtcccggccgtaatggccgaattcccgggcatatgtccggtaccgtcgactgnnnnnnnnnnnnnnnnnnnnnnnnnnnnnnnnnnncgnnnnnnnnnnnnnnnnnnnnnnnnnnnnnnnnnnnnnnnnnnnnnnaaaagagctagcgccctatagtgatctataccaaaggttctttt

SEQ ID NO: 76690 - DNA, 1119 bp, Homo Sapiens
  misc_feature (1025)..(1076): n is a, c, g, or t
gggggtatttaaccatatttgcctttaattttgaacatacttaaggtttttagagttagaattaagacctttaaaattgtctcatgcatctcagttggctagacttataaccattaatattttgggattttgtcactacaaaaattcttagcatcaacttctattaataggatgaatcacattaatcagccatttatttgtcagtctccatagtaattatttaactcttctgtgtttaaagactaatgtgctttttactgacttgtacacacatttccacaggaggttgttcataaggagcttactaactgtggtttgcaccctaacactctggagcaacttagtcaaataccgttacttgggaaatcatctttacggaatgtggtgctgagagactacatttataattggagatcctgaacaccaaagtaagcctaaaaggaatctttgaggaaaaaagccttctagcaaggaaattcaagattcttgaagttgaaggaatatactgaaatgtttataaacataacttttactacagtagcatctaaggttttaaatgtgttttactattttcagattagatttttagatataaagatgaaaaactcagataactcaaatgagatatctatatccctacaacctaattgtatattgagcagaaactgaattaatatgcttccttgcaaatgggaaatcacatagcagttaccccatggcattgtgactaatggcatcagggcaaaaatatgttactttacgatttacctgttagcaggttcttgtttcataaaggtagaaaataaatacagacaacatctactgagctagttgattggtgatgcttctaccttaatatctttcctactgatttataattcctttattttcacatatactaaaactttttaaatgcatgttaattcagataaaaaggcattttgtattccacatagaatagtgttaagaattgtgaagtacactgagctgtcacggcaaagtagtatttaatgtgcttatagggnnnnnnnnnnnnnnnnnnnnnnnnnnnnnnnnnnnnnnnnnnnnnnnnnnnnagggggggactgtataattcacatttttaaaataaaagtgctt

SEQ ID NO: 76691 - DNA, 530 bp, Homo Sapiens
tttagatatcatattgagctttaattaagaaacactttattttttagattgctgcagcaaaaccaactccaccaaaaagccaggtaacattaacaaaagaattccctgtatcatctggatctcaacatcggaaaaaagaagcggatagtgtttatggagaatgggttctatagattagttgtcatcgcctcttgcccttggtttccaaagcccagacttttgccaaggactggactaggtatctgatgcccatctggacatttttcttgcagttcttggatatgtagatcagagacacctgtactcttcactgtaggttcccttccttggcttggccatatcatcatcttccagtaaacacctccaattctacaaataaatcctttctttctttggataggatcagttcttaagagcagccccggtaactggaggaatgggagccgttttgatgagaaaaatgggtttggtgttcaggatctccaattataaatgtagtctctcagcaccacattccgtaaagatgattt

SEQ ID NO: 76692 - DNA, 1559 bp, Homo Sapiens
gccgcactccaaccgccggagaagatcaggtctgtggtaagaagacgaagcttcagtatctcaccagtcagattaaggcgatcaagaacacccttaagaagaaggtttagcagatctcccatccgtcgtaaaagatccaggtcttctgaacgaggcagatcacccaaacgtctgacagatttggataaggctcaattacttgaaatagccaaagctaatgcagctgccatgtgtgctaaggctggtgtccctttaccaccaaacctaaagcctgcacctccacctactatagaagagaaagttgctaaaaagtcaggaggagctactatagaagaactaactgagaaatgtaaacagatcgcacagagtaaagaagatgatgatgtaatagtgaataaacctcatgtttcggatgaagaggaagaagaacctcctttttatcatcatccctttaaactcagtgaacccaaacctatttttttcaatctgaatattgctgcagcaaaaccaactccaccaaaaagccaggtaacattaacaaaagaattccctgtatcatctggatctcaacatccggaaaaagaagcggatagtgtttatggagaatgggttcctgtggagaaaaatggtgaagaaaacaaagatgatgataatgttttcagcagcaatttgccctcagagcctgtggacatctctacagcaatgagtgaacgggcacttgctcagaaaagactcagtgagaatgcatttgatcttgaagccatgagcatgttaaatagagctcaggaaaggattgatgcctgggctcagctgaactctattcctggccagttcacaggaagtacaggagtacaggttttgacacaagaacagttggccaatactggtgcccaagcctggattaaaaaggatcagttcttaagagcagccccggtaactggaggaatgggagccgttttgatgagaaaaatgggctggagagaaggagaaggattaggaaaaaacaaagaaggcaataaggaacccatcctagttgattttaagacagaccgaaaaggtcttgttgcagtaggagaaagagcacaaaagaggtctgggaacttctctgctgcaatgaaagatctgtcaggcaaacatcctgtgtctgctttgatggagatctgtaataaaagaaggtggcaaccacctgaatttctattggtccatgatagtggccctgatcatcgcaaacattttctctttagggtattgagaaatggaagcccttaccagcccaattgtatgtttttcttgaataggtattgataaatggaagcgcttaccagcccagctttgccagccctaataagaagcatgctaaagccacagcagctactgtggttcttcaagcaatgggccttgtaccaaaggacctcatggctaatgccacttgcttcaggagtgcctcacgtagatagattgaggttttataataatcatttccaaaattttactcctgcatcacaatgggatttccctcctttaatgttggaaaatatttggccattttaagacattgt

SEQ ID NO: 76693 - DNA, 1262 bp, Homo Sapiens
caaaagaggtctgggaacttctctgctgcaatgaaagatctgtcaggcaaacatcctgtgtctgctttgatggagatctgtaataaaagaaggtggcaaccacctgaatttctattggtccatgatagtggccctgatcatcgcaaacattttctctttagggtattgataaatggaagcgcttaccagcccagctttgccagccctaataagaagcatgctaaagccacagcagctactgtggttcttcaagcaatgggccttgtaccaaaggacctcatggctaatgccacttgcttcaggagtgcctcacgtagatagattgaggttttataataatcatttcagaattttactctgcatcacaatgtatttcctctttaatgttgtaaatatttggcaatttaagacattgtgtaaaaagcaatctgtaaaaacatctccaggctttgatttttgtaccatggaaattgtatttaaccatacagggttttggtatgtttatattgtttaccttagtgatgtatttgtttaagtggctaacatccaaacgactgtttgaaggcatcagagtaatcttcagtgtggaatgttaaataacgcttttatactgtattttgtactatgatgtaactccccttccttatggctaggctactgtaacacttgcctgtaatcagtgaagggctgtgcaccttgtactatttcacaatgggttctgctggacagataatgggccagtgttattgaggtgatcaagatctgttccacagggctaatgccaccatctcccctcaaaattttgtagaggttctaaaaagaaagtggtatgttgtgtgatgatcagcactaagtcctgcattcctgttaaagccacttgggtcataagaagggagtaaaaaatgaagtctgactagaattctattgcagaggccaagtacatttagtatggcattgagttgtgatatagttttactttgatgtgcattttgaatttcagctacacctagatagacgtaaaatgataattaaaatgctgtaaccaacttatctaataaaattggcaaccagccactattttgttgactatgagaaagttaaaagtttatgttaatttttagggtctgatagaatatttcatgtgtattacagtggtattcatatgctatgtctctaaactttattttcaaaagcttaaggcccaaatacaaacttctctggaataaacgtggtgttttattttctgggttataaagtgaaaa

SEQ ID NO: 76694 - DNA, 581 bp, Homo Sapiens
ttcgatctgtgtgaaaagtctgtgcaagcaaaactactctttacagtaggctccagtcactatatcagtcacttcatttgcatttatttgaagactgttaagactgattttcccatttgtttgttaacaaataacattttctatttgtaatgggcctgtggatgacttttgcccctttatatgttgggattgtttctgattatcatatgcttgcacaagcttctcatatattaatcatgtattgaacctttctcttcctctgaatatacttaaggcagcaagtgacattcatctcccatacctacaaaattttatacttggatatgctttaatttctcattttctgcatgggtcctttacattgtcatttttcttcaggtctgttctataaaatgtattcagacttttattcagagatatctccttattctggggctttttgcattaagaaacagtataatgtcatctaactcttaagaactacaatgtattaatgtgcagattgaatagctgttaactcttaggttttacattggggtagtagatcagaagttcttaagaaataattgcttctatttaaa

SEQ ID NO: 76695 - DNA, 792 bp, Homo Sapiens
  misc_feature (701)..(701): n is a, c, g, or t
ttttcgttagtacacaaatagtttatgcagtaaataactgtggttacagttcattgttgtcagcaatacagcattttccatcacaattataggtgaaacaaaacctcatgaagtagtcatagcacattcatgctagcgagagcatattacaaagcaatgcacgtgcattataggggcagacaaaactggggaagggctatattttcactcacctctggttaactttgtgtattttgtcattaagacttacattatgtttgggtcaaacaaaaaacccaaagagattttataaaagtttacaaccattaaacagtattgtttaatcccacaaatggataaagcaaactactatagctcaacaatacacaaaccaggactaaaaatagtcaatctatgtatatagctagctaccatacaatagatattgaatatgctgagtctttacaaaggcattgactattttagacgagcaggttccagaaatacacttgtttgtttccaatgagaactaactgtagtgccatttcagttgaagactatgcactcctcagtgtcagacgtgaggataagcaaactacgggaaggcagaggagggttaggagggagacctgagcggactctttggacagctcagcattactttctctgtgcagatccagacctggttcacaaagtagaacaaagtgtattgaaatttttgncctcaaaaagggcatttgtacaaagtcccatacttacagcacagattgaatggtaactgagtgcctctcaaaatgaactcttctatgttag

SEQ ID NO: 76696 - DNA, 757 bp, Homo Sapiens
gatgcgtactaccagagcccggagacgcggctgaggttcatgcgggccatgcacggcatgacgaagctgactgcgtgccaggtggccacggccttcaatctgtcccgcttctcctccgcctgcgacgtgggaggctgcaccggtgcactggcccgagagctggcccgtgagtaccctcgtatgcaggtgactgtgtttgacctcccagacattatcgagctggccgcccacttccaaccccccggaccgcaggcagtgcagatccacttcgcagcaggtgactttttcagggaccccctccccagcgctgagctgtacgtcctgtgccggatcctgcatgactggccagacgacaaagtccacaagttactcagcagggtcgccgagagctgcaagccaggggccggcctgctgctggtggagacgctcctggatgaggagaagagggtggcgcagcgcgccctgatgcagtcactgaacatgctggtgcagactgaaggcaaggagcggagcctgggcgagtatcagtgcttgctggagctgcacggcttccaccaggtgcaggtggtgcacttggggggtgtcctggatgccatcttggccaccaaagtggccccctgaagcccaggcagcatgttcattatagggatgtcctcccccaggctgcaggtggaccgcccggtccccaagtaccataggacagtcacataggagcgtgtagtcgtgactgaataaagaaagcaaaagcctgaaaaaa

SEQ ID NO: 76697 - DNA, 512 bp, Homo Sapiens
tgtctctctcccctcccctacctgtgtgggccccctggccaagggttctcagcagcctctgctcaccgttctgagctcctgttgcctgctgtgtcccctgcgtcctgctgaaggatccccgcctggctggccaggactccagctctctgctgtctccctcaggggccggcctgctgctggtggagacgctcctggatgaggagaagagggtggcgcagcgcgccctgatgcagtcactgaacatgctggtgcagactgaaggcaaggagcggagcctgggcgagtatcagtgcttgctggagctgcacggcttccaccaggtgcaggtggtgcacttggggggtgtcctggatgccatcttggccaccaaagtggccccctgaagcccaggcagcatgttcattatagggatgtcctcccccaggctgcaggtggaccgcccggtccccaagtaccataggacagtcacataggagcgtgtagtcgtgactgaataaagaaagcaaaagcct

SEQ ID NO: 76698 - DNA, 686 bp, Homo Sapiens
ccaagaattcggcacgaggttttttttcatagcaattggcagactttaatattcaagaaaaattaatttcatcatacacattaaaaatataggaaatttcatgcagacatgaagcttccaattcagcttttgtggcaacttttagaatgagagttacatataaatacagtacattttacagttaccaaacttcataattttatactgtgatttttacagcttctccttatattgtacatgttccaccttgctcacttgattagcataccctatatctgcactgcttcagaatatagaaattaaacaaaaaaacataagcacagtggactatctcctcccatttcataaagtaaatgaaaatgtttgtgtataaagctaatttaagaaaaacattttaaactttaaggcttacatactttagtagctaggactaaaattaagaaatacaaagctaaataaatcctccagtgatacttctattattgattgataccacattttcaagtttagaatatattaactgcaaaagctgtaagaaaagaagtgatgcaaatttgtatagaacatttaaaaaacaatattcatgatatgagggataaattaacaaatgaagtaactgatttcagaattaactaaaacatatgctataatttagaaatttaacattattaaagaaaacctaatag

SEQ ID NO: 76699 - DNA, 919 bp, Homo Sapiens
  misc_feature (95)..(95): n is a, c, g, or t
atatgacccagcaagtccactcctgggcatatactgaaaagaactgaaaacaggtgttcaagcaaaaactttcacgcaaatattcatcgcagcantagtcacagtagccaaaaaagaggaaacaacccaaatggccatcagctgatgaatgaataaacaaattgtggtatctccacacggcacaatagaatattcagccataaagagaaatgagggactgatacatgctaaagcatggatgagccttgagcgcatttttgccaagtgaaagaaggcagacacaaaaggcaacgtattgcatgagtgcatttatatgaaatatccaaaataggcaaatccatggagacagaaagcagataaatggttgtaagaagctgagagaaaggagtggggagagattgctaaaaaggagtttccttctagggtgatgaaaatgttctggaactacttattggggatgattgcacaacatggtgaaggtactcaatgtcactaatggtaaatttcacatacactttaccataatttttaaaaagctttattagctacattatgttatgatacttaaatgtcataacaatagcattctgtacgcttcactaggataaaaacttcggatttatatgcatctggaagagaaatttttcactgtaatttgcaaataaatgaatttctaaaaatctaacagaaaggctcttaaatcttaatttcaacctaagaagggagtgagaaacaacgagaaccatgaggggagagttaacggggaacttccccaccgtccggtacatggcaggcattccacaaatgttttttgaaagttgaaatagacatcttttcatgaactctgtaatatttgaaattattgataactcttacacaaaaacaaatattcaataaaatgatatttaatttcactgtg

SEQ ID NO: 76700 - DNA, 1221 bp, Homo Sapiens
  misc_feature (228)..(315): n is a, c, g, or t
  misc_feature (333)..(348): n is a, c, g, or t
gacatgagcctgtaaacatatattcatatatgtacctgcacatgtacccacctgatgtaggtcttattcctttagtatggacttaaagtacttattcatataccttgtaactaaaaattagaacagctccctagaattatgaacttttaagagtctgactagaaatttgcaacttataaaaaagttacttttaaaaatataagttagggctaggcacagtggctcatnnnnnnnnnnnnnnnnnnnnnnnnnnnnnnnnnnnnnnnnnnnnnnnnnnnnnnnnnnnnnnnnnnnnnnnnnnnnnnnnnnnnnnnncagaccccatctctattnnnnnnnnnnnnnnnnaaacttagagtttttatcttcccctaaaagaggccgtgatatttgcagcagcctcaaattgctcttaaggggtttaggtgtgcagaagctttcctttccctacccagtaaccatgtgactactaacgtggtatattgatttattttgtttgctgtctgtctcccctgccccactgctggaacagaggctccaagaaaacagggaccttattattcattactgcatccccagtaatgaaagtacttagaaaataattattgaatgaatgaaatctaaactgtgaacctgagggtgtttgtggcagtgtttgttttactgaattgtagaaggacataaccgtgttttcagtgtttctatggaacaaacttgtacattttatttcacttgtgtttagtcttaaaccctactgctggaaacaattttatgtaataagcaatgggcccaaaagtctaggagttttagtacttagtgaatttgtatgcaacagagatgctgcagcttgatgcctttaaaaggtattcactcatggaagagctgaggcctgtgccttggtgttacaagagcccagggttgagcatcctgaaggagccactgcagcggtcactgtacccagaagcctgtgggagatagagccggtatgcttgcattttctttcccggtctaagacatggatggagctccagtcttcatggatgacgttgccagtggtatggcataggcttggttctgaacttaactggtggccttcacaagtaagtctcttcagaataagtgctccaggaggccttaacctcaaagaaacaaactcccggggtgggcacttactggactggatccgtatacggtggactcaacactgtgtaagcctatacg

SEQ ID NO: 76701 - DNA, 712 bp, Homo Sapiens
acaaaccactgtggtacacaacgctacagatgggatcaagggctccacagagagctgcaacaccacgacagaagatgaggacctcaaagtggagaaaacaggagatcattaagattacagaacagctgattgaagccatcaacaatggggactttgaggcctacacgaagatttgtgatccaggcctcacttcctttgagcctgaggcccttggtaacctcgtggaggggatggatttccataagttttactttgagaatctcctgtccaagaacagcaagcctatccataccaccatcctaaacccacacgtccacgtgattggggaggacgcagcgtgcatcgcctacatccgcctcacccagtacatcgacgggcagggtcggcctcgcaccagccagtcagaagagacccgggtctggcaccgtcgggatggcaagtggctcaatgtccactatcactgctcaggggcccctgccgcaccgctgcagtgagctcagccacaggggctttaggagattccagccggaggtccaaccttcgcagccagtggctctggagggcctgagtgacagcggcagtcctgtttgtttgaggtttaaaacaattcaattacaaaagcggcagcagccaatgcacgcccctgcatgcagccctcccgcccgcccttcgtgtctgtctctgctgtaccgaggtgttttttacatttaag

SEQ ID NO: 76702 - DNA, 1308 bp, Homo Sapiens
cacatttgtatgagtctgtgatgtatcaagtgctccaactactcaaggtagcgcagaagggaaaacaggcacaggccggggggttttgggtgattacacaaatgggcttggcctccttaccccactgcaaactgctgaggcgcaagggagctcccagccctcagcctggaccctgggaccgtgccacctgagcccgaggctctgaagcactgcgtgatgacagttcccacctgcaactcagcagccagggaatgaatgagagttaggggtggcaggggccccggccatcagtggggcctgcgctgccgcctccgctgcactgcctggcgcagagcctccagcagctgctcctggttgttgcagacattgtaatgtgtcaggtgcagcagcttgtccacgtcctcctggctgtaggtcaccttcgtgtagtggtagggagagtccgatgaagacaggttcacctccccagctgccgcctcctcgggtgtccgccggaccccaggggccgagtactcccggaaggagtcgctgaccagaggaaagtgcagcaccgcaggggctccggggcaggtggggtcggagaaggtgtggcactcccgaggctggagctgctcttcggggctgggcgagatgggtgggaacgggatcccctgctcctggcagaaccggcccaggagctgcaactgctggaaggctccgtggaggttgtagtccaatgacaggatgaggtccacgtcccgagtgggctgcaggaggggcaggcagctggtattgatgaggtagccaacatccagcaggcacaggtggggctccgagggtgtcagctggttggggagcccatccagagtggtagctttccatgtggagaagtgaggatgctgaaagtagtctttgtggaaatggaggccacgcaggaaattatgtgtggcctgggccagtggacgccacgtcagaagatcggtgaaaaactcagctattctgccggctgttgagggtggttcttctatcttcagaagggggacctgctccttgtccaggttggcctggttcctgacccagcggtcccagaactggctgggctctgaggcccagtataagctgtcctggaggttggctgcatacaggttgctccagataccttctaagaagcagatgcgggactcaggaagcctcttcatcagctgccccataaagaactcggagccaaagagctcagaggggatgaaggccccgacttaggggaagccgacctcgtagggagagaactcgcaccactccccaaaatcaaaagtgtcagctcagcaggtc

SEQ ID NO: 76703 - DNA, 673 bp, Homo Sapiens
gtaaggagtgactcgtggcttgccttggtctcttgggaatacttttctaactagggtgctctcacctgagacattctccacccgcggaatctcagggtcccaggctgtgggccatcacgacctcaaactggctcctaatctccagctttcctgtcattgaaagcttcggaagtttactggctctgctcccgcctgttttctttctgactctatctggcagcccgatgccacccagtacaggaagtgacaccagtactctgtaaagcatcatcatccttggagagactgagcactcagcaccttcagccacgatttcaggatcgcttccttgtgagccgctgcctccgaaatctcctttgaagcccagacatctttctccagcttcagacttgtagatataactcgttcatcttcatttactttccactttgccccctgtcctctctgtgttccccaaatcagagaatagcccgccatcccccaggtcacctgtctggattcctccccattcacccaccttgccaggtgcaggtgaggatggtgcaccagacagggtagctgtcccccaaaatgtgccctgtgcgggcagtgccccgtctccacgtttgtttccccagtgtctggcggggagccaggtgacatcataaatacttgctgaatgaatgcagaaaaa

SEQ ID NO: 76704 - DNA, 712 bp, Homo Sapiens
tgattctcttgccattcatcgacagtcagcatgtcatccacaagtatttcctgccccgagcctatgctgtcgccatcccactggctgcaggcctcctgctgctcctgtttgtgggactgttcatctcctacgtgatgctgaagagcaagagagtgaccaagaaggctcagtgaaggtcccgcagggatgaggctgccagccccttctctgcttcccctccagcacagggaccaagtgggggagcctgcagaacctgtccaggcacagtggctcctcaagcctgcctgtcctgcagagtccccatggcatggagcttacacctgactgactggagccccctccccgactcccacttccagaagctaggagggagggatacctggaagactccggtcacctccttcttgctcagggcctaaaagatgctggtcctcccaacctcactctcagactccctgccaccttttcccctgggttctgccgtcttgcctcacttcccctcctgtcacatgctgacgttggacttagcaggttctaaggccacatgtgtgacctctctgacttctcttcctccaccaaggcagctttccttaccctgacacagccccagaccccacaaagccttctggacctggaaagcctggggaaggactgacagaccccagggctggcccgtttgggacagctgaccaataaacactgatggtgtgtt

SEQ ID NO: 76705 - DNA, 945 bp, Homo Sapiens
gctggaccggtccggattcccgggatatcgtcgacccacgcgtccggagcgcgcggggaaatggccacggggacagaccaggtggtgggactcggcctcgtcgccgttagcctgatcatcttcacctactacaccgcctgggtgattctcttgccattcatcgacagtcagcatgtcatccacaagtatttcctgccccgagcctatgctgtcgccatcccactggctgcaggcctcctgctgctcctgtttgtgggactgttcatctcctacgtgatgctgaagagcaagagagtgaccaagaaggctcagtgaaggtcccgcagggatgaggctgccagccccttctctgcttcccctccagcacagggaccaagtgggggagcctgcagaacctgtccaggcacagtggctcctcaagcctgcctgtcctgcagagtccccatggcatggagcttacacctgactgactggagccccctccccgactcccacttccagaagctaggagggagggatacctggaagactccggtcacctccttcttgctcagggcctaaaagatgctggtcctcccaacctcactctcagactccctgccaccttttcccctgggttctgccgtcttgcctcacttcccctcctgtcacatgctgacgttggacttagcaggttctaaggccacatgtgtgacctctctgacttctcttcctccaccaaggcagctttccttaccctgacacagccccagaccccacaaagccttctggacctggaaagcctggggaaggactgacagaccccaggaccagccctggggctcagggcagccaccccgggccgctgaccgactgacctctcctcacggaggcccagccccaaagccccagggctggcccgtttgggacagctgaccaataaacactgatggtgtgttaaaaaaa

SEQ ID NO: 76706 - DNA, 1015 bp, Homo Sapiens
  misc_feature (109)..(363): n is a, c, g, or t
ttccgcgtatccctgatctgtgataccgtatacgccttgagtgagtgatacgctcgcgcaccgaacgacgagcgcagcgagtcagtagcgagaagcggagagcgccatnnnnnnnnnnnnnnnnnnnnnnnnnnnnnnnnnnnnnnnnnnnnnnnnnnnnnnnnnnnnnnnnnnnnnnnnnnnnnnnnnnnnnnnnnnnnnnnnnnnnnnnnnnnnnnnnnnnnnnnnnnnnnnnnnnnnnnnnnnnnnnnnnnnnnnnnnnnnnnnnnnnnnnnnnnnnnnnnnnnnnnnnnnnnnnnnnnnnnnnnnnnnnnnnnnnnnnnnnnnnnnnnnnnnnnnnnnnnnnnnnnnnnnnnnnnnnnnaccaagaattcggcacgaggatgaccctcatcaacttgctacttaaagtccttgggcccatacatgagagaaacctcacattgctcctgctgctgctgcagatcctgggcagtgccatcaccttctccattcgatatcagctcgttcgactcttctatgatgtctgagtcccttgatcattgtcctttacctcacagtctctaggattcctgactcaggctgacctctctctctggtcccagactgcctccttgcccaggcctctctcactcttcatagtcctccagattttgttctcagcattttcctttctctgtgatcattggcatcctgggcgtttcttgccctctgctgactactgattggattttacctatggctttctgcaacttgctactctctccctctccatcccatctttgcagcctcatagggtgggatacagcagctttttttgcagttatccacactcacatttcagagtcctgactctcaaggaaccactggtttttgggatagaacttgggccagggctaggaacacaggctccacggtgacatgtcatttgattgtaaattaagtgttctgattagtaagaactaagcagggggccacatgctctcaatggagacaataaagtgttgtctttttt

SEQ ID NO: 76707 - DNA, 1871 bp, Homo Sapiens
  misc_feature (1781)..(1796): n is a, c, g, or t
ggtccggaattcccgggatccggtgtcccgacggcggctcaagtcagagttgctgggttttgctcagattggtgtgggaagagcctgcctgtggggagcggccactccatactgctgaggcctcaggactgctgctcagcttgcccgttacctgaagaggcggcggagccgggcccctgaccggtcaccatgtgggccttctcggaattgcccatgccgctgctgatcaatttgatcgtctcgctgctgggatttgtggccacagtcaccctcatcccggccttccggggccacttcattgctgcgcgcctctgtggtcaggacctcaacaaaaccagccgacagcagattttgtggccctgataggtgccctccttgccatctgctgcatgatcttcctgggctttgcggatgatgtactgaatctgcgctggcgccataagctgctgctacctacagctgcctcactacctctcctcatggtctatttcaccaactttggcaacacgaccattgtggtgcccaagcccttccgcccgatacttggcctgcatctggacttgggaatcctgtactatgtctacatggggctgctggcagtgttctgtaccaatgccatcaatatcctagcaggaattaacggcctagaggctggccagtcactagtcatttctgcttccatcattgtcttcaacctggtagagttggaaggtgattgtcgggatgatcatgtcttttccctctacttcatgatacccttttttttcaccactttgggattgctctaccacaactggtacccatcacgggtgtttgtgggagataccttctgttactttgctggcatgacctttgccgtggtgggcatcttgggacacttcagcaagaccatgctactattcttcatgccccaggtgttcaacttcctctactcactgcctcagctcctgcatatcatcccctgccctcgccaccgcatacccagactcaatatcaagacaggcaaactggagatgagctattccaagttcaagaccaagagcctctctttcttgggcacctttattttaaaggtggcagagagcctccagctggtgacagtacaccagagtgagactgaagatggtgaattcactgaatgtaacaacatgaccctcatcaacttgctacttaaagtccttgggcccatacatgagagaaacctcacattgctcctgctgctgctgcagatcctgggcagtgccatcaccttctccattcgatatcagctcgttcgactcttctatgatgtctgagtcccttgatcattgtcctttacctcacagtctctaggattcctgactcaggctgacctctctctctggtcccagactgcctccttgcccaggcctctctcactcttcatactcctccagattttgttctcagcattttcctttctctgtgatcattggcatcctgggcgtttcttgccctctgctgactactgattggattttacctatggctttctgcaacttgctactctctccctctccatcccatctttgcagcctcatagggtgggatacagcagctttttttgcagttatccacactcacatttcagagtcctgactctcaaggaaccactggtttttgggatagaacttgggccagggctaggaacacaggctccacggtgacatgtcatttgattgtaaattaagtgttctgattagtaagaactaagcagggggccacatgctctcaatggagacaataaagtgttgtcttttttnnnnnnnnnnnnnnnnggcgccgctctagagtatccctcgagggcccaagcttaccgcgtacccagctttctgacaatgtcgcatatatta

SEQ ID NO: 76708 - DNA, 1301 bp, Homo Sapiens
ggtccggaattcccgggatagataggcgggtgcagcggggcagaacataggttgccttagagaggttccccggtgtcccgacggcggctcaagtcagagttgctgggttttgctcagattggtgtgggaagagcctgcctgtggggagcggccactccatactgctgaggcctcaggactgctgctcagcttgcccgttacctgaagaggcggcggagccgggcccctgaccggtcaccatgtgggccttctcggaattgcccatgccgctgctgatcaatttgatcgtctcgctgctgggatttgtggccacagtcaccctcatcccggccttccggggccacttcattgctgcgcgcctctgtggtcaggacctcaacaaaaccagccgacagcagatcccagaatcccagggagtgatcagcggtgctgttttccttatcatcctcttctgcttcatccctttccccttcctgaactgctttgtgaaggagcagtgtaaggcattcccccaccatgaatttgtggccctgataggtgccctccttgccatctgctgcatgatcttcctgggctttgcggatgatgtactgaatctgcgctggcgccataagctgctgctacctacagctgcctcactacctctcctcatggtctatttcaccaactttggcaacacgaccattgtggtgcccaagcccttccgcccgatacttggcctgcatctggacttgggaatcctgtactatgtctacatgggggctgctggcagtgttctgtaccaatgccatcaatatcctagcaggaattaacggcctagaagctggccagtcactagtcatttctgcttccatcattggtcttcaacctggtagagttggaaagtggattgtcgggatgatcatggctttttccctctacttcatgatacccttttttttcaccactttgggattgctctaccacaactgactcaatatcaagacaggcaaactggagatgagctattccaagttcaagaccaagagcctctctttcttgggcacctttattttaaaggtggcagagagcctccagctggtgacagtacaccagagtgagactgaagatggtgaattcactgaatgtaacaacatgaccctcatcaacttgctacttaaagtcccttgggccatacatgagagaaacctcacattgctcctgctgctgctgcagatcctgggcagtgccatcaccttctccattcgatatcagctcgttcgactcttcctatgatgtctggagtccctgaatcattgtcc

SEQ ID NO: 76709 - DNA, 1019 bp, Homo Sapiens
  misc_feature (52)..(52): n is a, c, g, or t
  misc_feature (104)..(104): n is a, c, g, or t
  misc_feature (111)..(111): n is a, c, g, or t
  misc_feature (137)..(137): n is a, c, g, or t
  misc_feature (169)..(169): n is a, c, g, or t
  misc_feature (276)..(276): n is a, c, g, or t
  misc_feature (284)..(284): n is a, c, g, or t
  misc_feature (300)..(300): n is a, c, g, or t
gtgtcacctgtggggaatcattcttggtgacgggattccacctgagtctctntgttcagcttgacatctggctggagtacgtgtcacaatgaggaccaacattnacgcccncagacatctgtcaccttacaggacgngatgatggagattgaagaccctctgacccgtntgcacatgactgcggagtggcagacccctgctgtgctcctctgatgccaacactctgggaaggtgcccagtgcatctgtgacacttgcttacctgcgtcatgcggcntggaccgncagcaagccctgctcntttgcccggccatgaacaccgccatgtggagcacccgatcacagcgcagcaggtagaccagctcaaggcctttggctatgtcgagatcccctgtgtggccaagaagctggtgtgcggagatgaaggtctcggggccatggctgaagtggggaccatcgtggacaaagtgaaagaagtcctcttccagcacagtggcttccagcagagttgacctgggatttctgtcatgggtgtccctctgtactcagaatgggttcaggccaagtcggtgaagatggatgttggcaaaataggaggataccctcatttgctgaatgggggacctgctctgagcctgcccaggggccaggcctgctccaggttaaactggacggaaggcccaggtctcagtttctttcaaccaggagaggccgctgcctagagcccctccccaccttttcctggatgggtgaggcaagccaggagagcaagcagtgttgtcctcacgggaggaggactgagcgactgggaaaactcggctctacatctcacccagaacggcttttagaaacaccacagctggagagtcctggctgagccttgggagtttcagctctttggcggggtgcccaggtgccatgcgatcagcgaagcctgcgagttggcaggactctgaggtttcctgcagaccatgccatgagattgaaggtgcggggaaataaagaaaaatcaccattaaa

SEQ ID NO: 76710 - DNA, 1252 bp, Homo Sapiens
  misc_feature (66)..(100): n is a, c, g, or t
  misc_feature (945)..(953): n is a, c, g, or t
aactaattgggcgatctgccgagcggaacgacgaggcagcgagtcagtgagcgaggaagcgtgcgnnnnnnnnnnnnnnnnnnnnnnnnnnnnnnnnnnncagtcgacggtaccggacatatgcccgggaattcggccattacggccggggggaaattaactgaacaaataaaaagtttttgatataacttcaattaattgtaccacatgctaatcctgaagagatgtgtagaatttggaaagggtctaattcatacatgcttaaagtataacctacgttagatagtttgttgtcaaagtctgttctagtaaagtgaagattcaagtcagttgttcagttacttgaagcaaaacgaaatctttcatttcagtcaaatcactgcagtcatgaaatactgaacaattgccttaagtctttgcttgactcactgggatagactgaggctttgggtgtgtctgtattagcatttcattagtacttcacatgcttttgatgtactcttgagattgctttaaattttgtattgaaacaacaatacattttgcactgtagtaatgggagcactaactcttacaacagttagtgaatcgttttaaagaatcagttcagtgtagacattttgaaaagattgtttcctgtgctttacgatagcttagtgcaatgtgcacttctgttttacttgccattttcctgctctgttttctctgtgacatgaagcaacagaaactgagatcaaagttaagattatatcctgtttgtagtatcagatatttttctgtgtacaattataggattgtaatctaaactggaatttttaggcagtaagtcaccacaaaatgttttagataagacacaataaaattattataaataaaagcttaatgtttgtaaaaaatctcctttttactatttcttttttcacatgaaagaagtggtggctgctnnnnnnnnngctacactgcttattaagggtctttttgatttatgtaaatatctgtaaattggtcagtgcctgtaaatttaaatataaaaagtaaccttgaaaacagttttaactttttcaaaagaactatgtccaacattttttagacctgctgtagtacagttttgtacctctaacgtatcttttttttgcagaccaaatgctaaaacttttgcttttctttgacttgtaaaaggtgcacattttcattttcttccttaagttcaaatttttgtatgatgtcaaatgcaataaaatttttatcctgg

SEQ ID NO: 76711 - DNA, 1583 bp, Homo Sapiens
gtggaccggtccggaattcctgggatgatttgtgtgtgcaccgcgtctccagcgatcccggatccactgcgctgccaggggcctgggggtgggtctcttgctgtctctgcgacgacatccttacgtttcggcactctaatgctgggtttgtgcgtgtgtgtctgcttagcggtctagcgggctgttaggctccctcgcccccagctccttggctcgctcagctcctccaccgcagcccagcagtgagacgcgcgcgcagccagctccccacgagatggaacagaccgaagtgctgaagccacggaccctggctgatctgatccgcatcctgcaccagctctttgccggcgatgaggtcaatgtagaggaggtgcaggccatcatggaagcctacgagagcgaccccaccgagtgggcaatgtacgccaagttcgaccagtacaggtatacccgaaatcttgtggatcaaggaaatggaaaatttaatctgatgattctctgttggggtgaaggacatggcagcagtattcatgatcataccaactcccactgctttctgaagatgctacagggaaatctaaaggagacattatttgcctggcctgacaaaaaatccaatgagatggtcaagaagtctgaaagagtcttgagggaaaaccagtgtgcctacatcaatgattccattggcttacatcgagtagagaacatcagccatacggaacctgctgtgagccttcacttgtacagtccaccttttgatacatgccatgcctttgatcaaagaacaggacataaaaacaaagtcacaatgacattccatagtaaatttggaatcagaactccaaatgcaacttcgggctcgctggagaacaactaaggggcaccaaaccctctgaggttttactttaaggttcgctgtatgtttgccttggacaaaaaggctacctaccacgtgctatccagtaatatacttaaataagccaatacttagatctactgtaaggcagatgctaattataaggcattaagtaagcaaatagtgccctcagctactgcagaagaaaagtcccactgaggaaaagaaagtcttgtgatttttaaaggcaagttttcaagtgctctcatagttctatcctctaattccattaaatccatactaggagcgtcagtgagggttttcatagcttttggaaatactttggtctctgaactgtaattagcaagaagtaaaaacagaaacgtcaaacgtcaaatgtttgctttgttacctggaggactaaatgtagatgtctttagtatactttgtatgttcttaatattggaagataattttgtgaatctgtagattttattttttcagtcttaccttacaaatttcttttctatgaataatagaggaacttacggcactctgccatttgttaatgaaaggaagtgcagaggatttagaaaagtacatgatccccagaccacaacaaaccaaaacataaactcatgtctgtgtcccatggtcatagtcaaagattttgtactgctaaaattaccaaataatttaaataaagtggatttgaacacaaaaaaaa

SEQ ID NO: 76712 - DNA, 2221 bp, Homo Sapiens
  misc_feature (1403)..(1431): n is a, c, g, or t
  misc_feature (2036)..(2083): n is a, c, g, or t
ggggggcgccagggatttgaaccgcgctgacgaagtttggtgatccatcttccgagtatcgccgggatttcgaatcgcgatgatcatcccctctctagaggagctggactccctcaagtacagtgacctgcagaacttagccaagagtctgggtctccgggccaacctgagggcaaccaagttgttaaaagccttgaaaggctacattaaacatgaggcaagaaaaggaaatgagaatcaggatgaaagtcaaacttctgcatcctcttgtgatgagactgagatacagatcagcaaccaggaagaagctgagagacagccacttggccatgtcaccaaaacaaggagaaggtgcaagactgtccgtgtggaccctgactcacagaatcatgaaaagcaggaaagccaggatctcagagctactgcaaaagttccttctccaccagacgagcaccaagaagctgagaatgctgtttcctcaggtaacagagattcaaaggtaccttcagaaagaaagaaatctctctacacagatgagtcatccaaacctggaaaaaataaaagaactgcaatcactactcccaaactttaagaagcttcatgaagctcattttaaggaaaatggagtccattgatcaatatattgagagaaaaaagaaacatttttgaagaaacacaattccatgaatgaactgaagcagcccatcaataagggaggggtcaggactccagtacctccaagaggaagactctctgtggcttctactcccatcagccaacgacgctcgcaaagcccgggcctgtggccctgcaagtcaaagtaccttgggtctgaaggggtcactcaagcgctctgctatctctgcagctaaaacgggtgtcaggttttcagctgctactaaagataatgagcataagcgttcactgaccaagactccagccagaaagtctgcacatgtgaccgtgtctgggggcaccccaaaaggcgaggctgtgcttgggacacacaaattaaagaccatcacggggaattctgctgctgttattaccccattcaagttgacaactgaggcaacgcagactccagtctccaataagaaaccagtgtttgatcttaaagcaagtttgtctcgtcccctcaactatgaaccacacaaaggaaagctaaaaccatgggggcaatctaaagaaaataattatctaaatcaacatgtcaacagaattaacttctacaagaaaacttacaaacaaccccatctccagacaaaggaagagcaacggaagaaacgcgagcaagaacgaaaggagaagaaagcaaaggttttgggaatgcgaaggggcctcattttggctgaagattaataattttttaacatcttgtaaatattcctgtattctcaacnnnnnnnnnnnnnnnnnnnnnnnnnnnnngctgtcatccccactttagtcacgagatctttttctgctaactgttcatagtctgtgtagtgtccatgggttcttcatgtgctatgatctctgaaaagacgttatcaccttaaagctcaaattctttgggatggtttttacttaagtccattaacaattcaggtttctaacgagacccatcctaaaattctgtttctagatttttaatgtcaagttcccaagttccccctgctggttctaatattaacagaactgcagtcttctgctagccaatagcatttacctgatggcagctagttatgcaagcttcaggagaatttgaacaataacaagaatagggtaagctgggatagaaaggccacctcttcactctctatagaatatagtaacctttatgaaacggggccatatagtttggttatgacatcaatattttacctaggtgaaattgtttaggcttatgtaccttcgttcaaatatcctcatgtaattgccatctgtcactcactatattcacaaaaataaaactctacaactcattctaacattgcttacttaaaagctacatagccctatcgaaatgcgaggattaatgctttaatgcnnnnnnnnnnnnnnnnnnnnnnnnnnnnnnnnnnnnnnnnnnnnnnnnaccaaatgtacttcttattcattttatggaaaagactaggctttgcttagtatcatgtccatgtttccttcacctcagtggagcttctgagttttatactgctcaagatcgtcataaataaaattttttctcattgtc

SEQ ID NO: 76713 - DNA, 470 bp, Homo Sapiens
  misc_feature (284)..(328): n is a, c, g, or t
aataacaagaatagggtaagctgggatagaaaggccacctcttcactctctatagaatatagtaacctttatgaaacggggccatatagtttggttatgacatcaatattttacctaggtgaaattgtttaggcttatgtaccttcgttcaaacatcctcatgtaattgccatctgtcactcactatattcacaaaaataaaactctacaactcattctaacattgcttacttaaaagctacatagccctatcgaaatgcgaggattaatgctttaatgctttnnnnnnnnnnnnnnnnnnnnnnnnnnnnnnnnnnnnnnnnnnnnnaccaaatgtacttcttattcattttatggaaaagactaggctttgcttagtatcatgtccatgtttccttcacctcagtggagcttctgagttttatactgctcaagatcgtcataaataaaattttttctcattgtcaaaa

SEQ ID NO: 76714 - DNA, 705 bp, Homo Sapiens
gggaaagttaagagtggcgccagggatttgaaccgcgctgacgaagtttggtgatccatcttccgagtatcgccgggatttcgaatcgcgatgatcatcccctctctagaggagctggactccctcaagtacagtgacctgcagaacttagccaagagtctgggtctccgggccaacctgagggcaaccaagttgttaaaagccttgaaaggctacattaaacatgaggcaagaaaaggaaatgagaatcaggatgaaagtcaaacttctgcatcctcttgtgatgagactgagatacagatcagcaaccaggaagaagctgagagacagccacttggccatgtcaccaaaacaaggagaaggtgcaagactgtccgtgtggaccctgactcacagcagaatcattcagagataaaaataagtaatcccactgaattccagaatcatgaaaagcaggaaagccaggatctcagagctactgcaaaagttccttctccaccagacgagcaccaagaagctgagaatgctgtttcctcaggtaacagagattcaaaggtaccttcagaaagaaagaaatctctctacacagatgagtcatccaaacctggaaaaataaaagaactgcaatcactactcccaactttaaaaaagcttcatgaagctcattttaaggaaatgggagtccattgatcaatatattgagag

SEQ ID NO: 76715 - DNA, 953 bp, Homo Sapiens
  misc_feature (545)..(553): n is a, c, g, or t
  misc_feature (638)..(699): n is a, c, g, or t
cggtccggaattcccgggatatcgtcgaccacgcgtccgggcaggagccactgactgcctccatgctggctgcagcacccccccaggaacagaagcagatgctgggagaacgcttgttcccactcatccaaacaatgcattcaaatctggctgggaagatcacgggaatgctgctggagatagacaactctgagctgctgcacatgttagagtcccccgagtctctccgctccaaggtggatgaagctgtagcagttctacaggctcatcatgccaagaaagaagctgcccagaaggtgggcgctgttgctgctgctacctcttagacaaggaaaaaccgattcaaaagccaaataaccccttatggaattcaactcaaggtttgaagacttcctagcttgtcctatggacctcaacaccaaggattacaaattgcaaatttaataggtcattttgtatcaaaaggtcaattatgaagcacctagaatttttcaattatacgaatatgttctttgggttctgctgtggcccagacagtgttaacnnnnnnnnnattgcgggttttgattttctcccccccgaaattggttttatttgatgaacccaagccttacgtctttcccattaaacaaaccaannnnnnnnnnnnnnnnnnnnnnnnnnnnnnnnnnnnnnnnnnnnnnnnnnnnnnnnnnnnnnttactcggggcgggccataccggggcgcccctagaacctgttttaaaaccaacccaccctggtgctaggggtcccccctatttacacttctcccaaaacccttttccctagcacccctattaccacccccgtgggtccgcactcaatagcgtattgtaaatcctcgcccaatcaacccgcccccctctagcagaaaccattcgggggcttgtccatgccactttccctcactacccttttctataaagtgatcc

SEQ ID NO: 76716 - DNA, 849 bp, Homo Sapiens
  misc_feature (643)..(653): n is a, c, g, or t
gcggccgctacatgtatttagtaatttctagtttgaactgtaattgaatattgtggcttcatatgtattattttatattgtacttttttcattattgatggtttggactttaataagagaaattccatagtttttaatatcccagaagtgagacaatttgaacagtgtattctagaaaacaatacactaactgaacagaagtgaatgcttatatatattatgatagccttaaacctttttcctctaatgccttaactgtcaaataattataaccttttaaagcataggactatagtcagcatgctagactgagaggtaaacactgatgcaattagaacaggtactgatgctgtcagtgtttaacactatgtttagctgtgtttatgctataaaagtgcaatattagacactagctagtactgctgcctcatgtaactccaaagaaaacaggatttcattaagtgcattgaatgtggctatttctctaagttactcatattgtcctttgcttgaatgcaatgccgtgcagatttatgtggctgctatttttattttctgtgcattactttaacaccttaaagggagaagcaaacatttccttcttcagctgactggcaatggccctttaactgcaataggaagnnnnnnnnnnnggtttgtgtgaaaattggtgataactggcacttaagatcgaaaagaaatttctgtatacttgatgccttaagatgcccaaagctgcccaaagctctgaaagactttaagataggcagtaatgcttactacaatactactgagtttttgtagagttaacatttgataataaaacttgcctgtttaatctcaaaaaaa

SEQ ID NO: 76717 - DNA, 2133 bp, Homo Sapiens
  misc_feature (344)..(344): n is a, c, g, or t
  misc_feature (630)..(643): n is a, c, g, or t
  misc_feature (1410)..(1424): n is a, c, g, or t
ggagagatcacaagccttcacgaagtgccgtatagacggtgcagacagttcaggtggagcgcagtagcgaagaaatatgtatgaagcaacatagcacccagcgttacggttatgtacgaatgagtatggtagatgtgagcgctaaaattcacacggaaccgcgtggctgatccgaattatacgaccaatgtaggagattgccttcgagccacgatcgagcacgagacaaaagcaagatgtaaaggaaaagcaagtgtaagtaacagatccaaatgtccacaataactggggaagaagaatgtgtaattacttagcgtacgtgaaaagaaacgggctaaaggtgntgcatacaaatacattactttctggggaaagaaaagaatcccaagaatgtttgcaataatggcctccagtactgaaacaaccaaaagcaggtgaaatgaggctgaaatcaaggctgtttcattttagctgaagacctgcaaagctgcgtggatttatagcagatgaaaacctaacctgcaattgatgcttaatcatccatccacatgaacatgcagtcagctatacgcatcaagactcgtttgcaaaaaccattgatttttcagtatgtgggataagggtttgggnnnnnnnnnnnnnnggtctgtataaggaattatgtgtgtgtgagttgggatgtatggatatgtgatagtcatattttcaaggtatggatgtttggtgataacgtctcagagcatgcctaaaagagcactgcaagattatttttgaagaaatgttattttattagatctaactcttcatagtatgtaaatgttagaacattttaataatattttaaaactgggctttcccagtatttcaaaaagaaataatatatctgttaacgttattggaatgctgctcagttctctgatcagtgcttatgttatgattgttgataactaaccaaagtagatgcctgcagagactttaaaatgtaaaataaagatgtatgctgcctgtcagctattctcattagaaaagttttaacttattttactccatatagaaactgtagagactaaaaccagttattttcttgtacatttgtgccatgcactgttgttatacaagaataggtgtacaaagctaaagaaaaattgtggtcattgatgatggaatatatgacttgcaggctttgaagtctgcagaattcaagaaaagagctgcaaatgcatttttgtatctttattcaggactcacatgctttaccctaaagaaacctggggctaggggaaatgaaaggaagcctgaagactgactaccaaaacatgcaatatacttattcactgtctaagtctgtagtataacatgaactggagtctctatccttttctaaaatcgcattttgtaagaaaagaaagnnnnnnnnnnnnnnngaatgtagtcccacaactcctgatttgaaagaaacaccttgtattttttatatacatctcttatccactgtgacttttcttttaaactgggctctgtgattccagagtttagaatgtagaaatgaaatgcttagctttaccttttcttggggggtgtggaccctgccagaaatgtaattacgtatgctcaagtgcattaattgaaggcactgtgcacaccattggactgctgaccacagttaaacatttccagtaaaatttcgtaactggtcacagctcattcataatcactgtattttttgaccctgataaagacaattattttgatggtgttctggtactgtaattggtatcctttaaattatttaaaacttttgggtgtggggcaggcagagagggatggtgtccagagatacatcacactttacatcctatcttactgtcctctgtttttcttaccctccttacatcctttttgttaaaaataaaaagcattgtagctgttggtttgtgttgtattttaacaaagaatgaatgattacagtgtgcatcatttagaaacctttcaaatgttaccttcttgaattgccctagaaaagaacaaaattagttgactacccaaccaaacctttcagttgatatttgctttttgtgtttatttatatgtaactaagtctattaatataataaaaatgaatatacctgcaaa

SEQ ID NO: 76718 - DNA, 938 bp, Homo Sapiens
  misc_feature (467)..(467): n is a, c, g, or t
  misc_feature (473)..(473): n is a, c, g, or t
  misc_feature (585)..(585): n is a, c, g, or t
aatgagaatagctgacaggcagcatacatctttattttacattttaaagtctctgcaggcatctactttggttagttatcaacaatcataacataagcactgatcagagaactgagcagcattccaataacgttaacagatatattatttctttttgaaatactgggaaagcccagttttaaaatattattaaaatgttctaacatttacatactatgaagagttagatctaataaaataacatttcttcaaaaataatcttgcagtgctcttttaggcatgctctgagacgttatcaccaaacatccataccttgaaaatattgactatcacatatccatacatcccaactcacacacacataatcccttatacagaccaaaaaaccaaaaaaccccaaacccttatcccacatactgaaaaatcaatgggttttgccaaacgagtcctgatgcgtatagctgacngccatnttcatgtggatggatgattaagcatcaatgcaggttaggttttcaactgctagaaatcccaagcagctttgcaggtccttcagctaaaatgaaacagccttgatttcagccntcatttcacctgcttttggttgtttcagtattggaggccattattgcaaacattcttggaattcttttctttccccagaaagtaatgtatttgtaggcatcacttttagcccttttcttttcacgtaggttaagtaattaaaaaattccttcttcacgcagttattgtgggagatattggcagctgttaaaatatcagatgtttttttctttcagatctttgtttttgatgatacagtttgacattagttacactaaaaagtagatgctgccagaaagttatcagtgaatgcaagggtccataaaaggtgcttggttaatattcttcatcatcttcagtttagtttctttcct

SEQ ID NO: 76719 - DNA, 923 bp, Homo Sapiens
cagtcgacggtaccggacatatgcccgggaattcggccattacggccgggggactgcgcggacctggagcttccgcgcggtggcttcactctcctgtaaaacgctagagcggcgagttgttacctgcgtcctctgacctgagagcgaaggggaaagcggcgagatgactgaccgctacaccatccatagccagctggagcacctgcagtccaagtacatcggcacgggccacgccgacaccaccaagtgggagtggctggtgaaccaacaccgcgactcgtactgctcctacatgggccacttcgaccttctcaactacttcgccattgcggagaatgagagcaaagcgcgagtccgcttcaacttgatggaaaagatgcttcagccttgtggaccgccagccgacaagcccgaggagaactgagactctgccttaccaccgcagtgcggggcacctctcccagcgtttctccggtttgccaatcctcttaagtattcctgtctccaaaggaccggctctccatggctcctgcgcctcgtgctttccgcgtacagaagtgcttgcccggggagtcccgcctgacctgccttcatgtggacccttagaacagcactgggagaccagcaggactcctgagaactgtgctggtggagaggtcctagagccggcgagcgtttgagaagagggcatggcgctggagtgagatgggatttggcgtctcgtttttggctaattgattgtcattggctttttccataaagtttagaaatcgttcagaaaaaacacccaacaaaaaacactcgagggcatctatatcgggtggcggacacacaggggctcccgacttcgccccttggccttccctgttcccggacccagcgtttctggtcacacagtgggtaaatctgccggctccctaatt

SEQ ID NO: 76720 - DNA, 368 bp, Homo Sapiens
gcttcagccttgtggaccgccagccgacaagcccgaggagaactgagactctgccttaccaccgcagtgcggggcacctctcccagcgtttctccggtttgccaatcctcttaagtattcctgtctccaaaggaccggctctccatggctcctgcgactcgtactgctcctacatgggccacttcgaccttctcaactacttcgccattgcggagaatgagagcaaagcgcgagtccgcttcaacttgatggaaaagatgcttcagccttgtggaccgccagccgacaagcccgaggagaactgagactctgccttaccaccgcagtgcggggcactctcccagcgtttctccgcgatcgaacagtgg

SEQ ID NO: 76721 - DNA, 989 bp, Homo Sapiens
aactaaggctaggtacgaggccgggtggcgaattcggcacgagggttatagaccgctaacacctgtcactggccactggtttcccggagttagcggcaacgaccttgcagcctggacactagccaggcgctccctcttctcacagcggcccacgtctccttgcttgggagcccatcgtcctggctccggtggcctcgctgggtctcggggaggcagaggactgttctttcctgtggcgaaaagccggagtcggccctagacacccacgactcgcagggtccatggttccggaggccgtgagacctgccggggctgacaggtgccagggcccatgctgcgggagcctgtgtgctcagccttcttgcggacggtaaagaagctaagtggaagagtgtttcctcctctggccgtaaagcagctgtccccgccctactccggaccggcccaaagactccatgggatggacctgagtcagccgaatcccagccccttcccttgggcctgctgtggtgctggacatcagtgacagacggaagcaggagaccatcaaggctacgggaggcccggggcgcttgcgaagatgaagtttggctgcctctccttccggcagccttatgctggctttgtcttacaatggaatccaagactgtggagactgcgctgcgtcccctgctgagcagcctagcggaactgtaccatcgcgcgtccacatttgctcacagggtactgggaaggcgatgcctgggcgggagctgctggtggagagactcgggatgactcctgtcagattcaggccttgctcacgaaggggaaccgtttggtcgaggcgtgacagcggccccgttgacttggggaatttggattgccgaagatttatccgggaggttgtgactggaaacaggtgttctgtgcactgagagagttcctgctgggtgtaaccccgtgtgtgggggccctaggagggcgggtttgggacacaccgcctggtt

SEQ ID NO: 76722 - DNA, 1079 bp, Homo Sapiens
aacccgttgcagtaactctaacggtcctaaggtagcgaggcctgggtggcgaattcggcacgagggggacgacgggagctgcatgaaagccgaagttatggaccgctagcatctgtcactggccaccggtttccgggagtaagcggcagctaccttacagccctgacacgagccgggtgctctctcttctcaccgcggcccacgtctcctcgctggctccggtggcctcgctgggtcgcgaggaggcggaggactgtactctgaggccaaaagccagagtcggccctgaacgcccacgactctcagggtccagaggccgtgagaccggccgcggctgaaaggtaccagggcccctgatgccggagcccgtgtgctcggccctcttgcagacggtaaagaaaccaagtggaagagtgtttcctcctctggccgtaaagcagctgtccccgccctactccggaccgccccaaagactccatgggatggacctgagtcagccgaatcctagccccttcccttgggcctgctgtggtgctcgacatcagtgacagacggaagcagcagaccatcaaggctacgggaggcccggggcgcttgcgaagatgaagtttggctgcctctccttccggcagccttatgctggctttgtcttaaatggaatcaagactgtggagacgcgctggcgtctctgctgagcagccagcggaactgtaccatcgccgtccacattgctcacagggactgggaaggcgatgcctgtcgggagctgctggtggagagactcggggatgactcctgctcagattcaggctggtcaggaaagcgaaaagctggcgagagtgatagcgggatcggtgacctgcggaacttgcatgcccgaaattaatccgatgaggtgtggacagaaccagctgtggccacctgaacgagtctgcgggtcacccggggtctgggcctacaggaggggggggtcccgggaccccccgccccgctgaagggaggggcgcggagggaaacaaggcctcggggggaagaaaatcggcccccaccaaggggggccccgcagcgccgacagcaag

SEQ ID NO: 76723 - DNA, 1362 bp, Homo Sapiens
  misc_feature (1103)..(1151): n is a, c, g, or t
  misc_feature (1166)..(1169): n is a, c, g, or t
  misc_feature (1233)..(1249): n is a, c, g, or t
gggagctgcatgaaagccgaagttatggaccgctagcatctgtcactggccaccggtttccgggagtaaagaaaccaagtggaagagtgtttcctcctctggccgtaaagcagctgtccccgccctactccggaccgccccaaagactccatgggatggacctgagtcagccgaatcctagccccttcccttgggcctgctgtggtgctcgacatcagtgacagacggaagcagcagaccatcaaggctacgggaggcccggggcgcttgcgaagatgaagtttggctgcctctccttccggcagccttatgctggctttgtcttaaatggaatcaagactgtggagacgcgctggcgtcctctgctgagcagccagcggaactgtaccatcgccgtccacattgctcacagggactgggaaggcgatgcctgtcgggagctgctggtggagagactcgggatgactcctgctcagattcaggccttgctcaggaaaggggaaaagtttggtcgaggagtgatagcgggactcgttgacattggggaaactttgcaatgccccgaagacttaactcccgatgaggttgtggaactagaaaatcaagctgcactgaccaacctgaagcagaagtacctgactgtgatttcaaaccccaggtggttactggagcccatacctaggaaaggaggcaaggatgtattccaggtagacatcccagagcacctgatccctttggggcatgaagtgtgacaagtgtgggctcctgaaaggaatgttccagagaaaccagctaaatcatggcaccttcaatttgccatcgtgacgcagacctgtataaattaggttaaagatgaatttccactgctttggagagtcccacccactaagcactgtgcatgtaaacaggttcctttgctcagatgaaggaagtagggggtggggctttccttgtgtgatgcctccttaggcacacaggcaatgtctcaagtactttgaccttagggtagaaggcaaagctgccagtaaatgtctcagcattgctgctaattttggtcctgctagtttctggattgtacaaataaatgtgttgtagatgacaannnnnnnnnnnnnnnnnnnnnnnnnnnnnnnnnnnnnnnnnnnnnnnnnaccactaaaaaaacnnnnccctgggggggcccgcccttgggcccctccgaaaaaagtttttttagaaaccatttctcttttnnnnnnnnnnnnnnnnnccccctataaagggaaaaaggggagaaaagtgggggctcatagaggttgtgggtttccccccaagagagagaaacccggcgggggccactaggaacacaaagagggggctctg

SEQ ID NO: 76724 - DNA, 915 bp, Homo Sapiens
  misc_feature (659)..(659): n is a, c, g, or t
ggcctgggtggcgaattcggcacgagggttcttcgtgaaagggatgacgggagctgtatgaaagcggaagagttatagaccgctaacacctgtcactggccactggtttcccggagttagcggcaacgaccttgcagcctggacactagccaggcgctccctcttctcacagcggcccacgtctccttgcttgggagcccatcgtcctggctccggtggcctcgctgggtctcggggaagcagaggactgttcattcctgtggcgaaaagccggagtcggccctagacacccacgactcgcagggtccatggttccggaggccgtgagacctgccggggctgacaggtgccagggcccatgctgcgggagcctgtgtgctcagccttcttgcggacggtaaagaagctaagtggaagagtgtttcctcctctggccgtaaagcagctgtccccgccctactccggaccgccccaaagactccatgggatggacctgagtcagccgaatcccagccccttcccttgggcctgctgtggtgctggacatcagtgacagacggaagcaggagaccatcaaggctacgggaggcccggggcgcttgcgaagatgaagtttggctgcctctccttccggcagccttatgctggctttgtcttanatggaatcaagactgtggagacgcgctggcgtcccctgctgagcagccagcggaactgtaccatcgccgtccacattgctcacagggactgggaaagcgatgcctggcgggagctgctggtggagagactcgggatgactcctgctcagattcaggcccttgcttcaggaaggggaaaagtttggtcgagggaatgataacggggactcgtttgacattggggaaaactttggcaatgcccccaaggacttaacct

SEQ ID NO: 76725 - DNA, 1007 bp, Homo Sapiens
  misc_feature (757)..(757): n is a, c, g, or t
  misc_feature (823)..(823): n is a, c, g, or t
  misc_feature (915)..(915): n is a, c, g, or t
  misc_feature (971)..(971): n is a, c, g, or t
caaggtagcgaggcctgggtggcgaattcggcacgaggcatctgtcactggccaccggtttccgggagtaagcggcagctaccttacagccctgacacgagccgggtgctctctcttctcaccgcggcccacgtctcctcgctggctccggtggcctcgctgggtcgcgaggaggcggaggactgtactctgaggccaaaagccagagtcggccctgaacgcccacgactctcagggtccagaggccgtgagaccggccgcggctgaaaggtaaagaaaccaagtggaagagtgtttcctcctctggccgtaaagcagctgtccccgccctactccggaccgccccaaagactccatgggatggacctgagtcagccgaatcctagccccttcccttgggcctgctgtggtgctcgacatcagtgacagacggaagcagcagaccatcaaggctacgggaggcccggggcgcttgcgaagatgaagtttggctgcctctccttccggcagccttatgctggctttgtcttaaatggaatcaagactgtggagacgcgctggcgtcctctgctgagcagccagcggaactgtaccatcgccgtccacattgctcacagggactgggaaggcgatgcctgtcgggagctgctggtggagagactcgggatgactcctgctcagattcaggccttgctcaggaaaggggaaaagtttggtcgaggagtgatagcgggactcgttgacattggggaaactnttgcaatgccccgaagacttaactcccgatgaggttgtggaactagaaatcaagctgcactgaccnacctgaaagcagaagtacctgactgtgatttccaaccccaggtggttactggagcccatacctaggaaaggagggcaaggatgtattcccangtaaacatccccagaaccaccttgatcccttttgggggcatgaaaatggtgacaantggtgggccttccctgaaaggaatggtttccaaaaa

SEQ ID NO: 76726 - DNA, 854 bp, Homo Sapiens
  misc_feature (682)..(682): n is a, c, g, or t
tcccgggatcgacgggagctgcatgaaagccgaagttatggaccgctagcatctgtcactggccaccggtttccgggagtaagcggcagctaccttacagccctgacacgagccgggtgctctctcttctcaccgcggcccacgtctcctcgctggctccggtggcctcgctgggtcgcgaggaggcggaggactgtactctgaggccaaaagccagagtcggccctgaacgcccacgactctcagggtccagaggccgtgagaccggccgcggctgaaaggtaccagggcccctgatgccggagcccgtgtgctcggccctcttgcagacggtacttgcgggctggggtttctttcccctgggtttcgggcagagaacccgtgcggggcgcgcccgaagcgccctttggtgtcccttgctctccccatggtctcggcccccctccttctaagcgcgtgtacccgcgacctgcgtctgcaagtgctgctccacacacagcggccccatctcggcccggtcttccctgcctcccgcttggcccctgtgctgtaagctcgcctggaccccaggccgggcggtgcatagctctgtggcctgtggccccgtgctcagcatgacctaaccagaattaagcagtggacaatgggatttaggccccccaaaccctcgtccgatgacaantgggaggggaagtgtgatttttctcccctcggatggagcgtgctcagctgtaggaatgtgactcaacttgctgaaatgattttctgctctgcggactggtgcaccctgtgacccagacagaatgtggaggttcccaccgctctgattagcagaacccaaccgtgaatgaggt

SEQ ID NO: 76727 - DNA, 814 bp, Homo Sapiens
  misc_feature (56)..(56): n is a, c, g, or t
  misc_feature (87)..(87): n is a, c, g, or t
cggccgagattcccatggtccccggaaaatggcgacgaccagcttctgacggagancccccggaaggtacgtcatgggccacttcgnctgggacgaatcgggccgccgcaacagcagcagcagcggcagcagcggcgcagggcagaagcgcgaggacgtctcagcgggcgaaagactgcggcccgctgcctgagggcggccccgagccccgcagcgatggtgccaagccgggcccgcgcgagggcaagcgctcctactccatggagcacttccgctggggcaagccggtgggcaagaagcggcgcccagtgaaggtgtaccctaacggcgccgaggacgagtcggccgaggccttccccctggagttcaagagggagctgactggccagcgactccgggagggagatggccccgacggccctgccgatgacggcgcaggggcccaggccgacctggagcacagcctgctggtggcggccgagaagaaggacgagggcccctacaggatggagcacttccgctgggcagcccgcccaaggacaagcgctacggcggtttcatgacctccgagaagagccagacgcccctggtgacgctgttcaaaaacgccatcatcaagaacgcctacaagaagggcgagtgagggcacagcggggccccagggctaccctcccccaggaggtcgaccccaaagccccttgctctcccctgccctgctgccgcctcccagcctggggggtcgtggcagataatcagcctcttaaagctgcctgtagttaggaaataaaacctttcaaatttcacatccaaaaaa

SEQ ID NO: 76728 - DNA, 762 bp, Homo Sapiens
  misc_feature (54)..(54): n is a, c, g, or t
tcatatgtcataacctgagtgtactctcccggtgtccggaggtcacattcatgntgcggggttggtatgaaattaaatcttggtgatgtgaccctacattctcttctggtccctagaatcggcttctggtctcctgataactgaagtggagacagaagttgagcctgttgcccaggcaaactaaagctgcttttgttcttcggaatctgctttgcctccgtcagcctgcttccttccccacacatgctggccgcactgtccccactccagacctctgctgtgtgtcctgggcagggccgcgttttggcagtaccctttcaactcatcctaagcttcgtgtagattactttagtatatattttttataaaacataaagcctttcctctcgatggaaatcaaagcttaccatgtgagcactcgaacttctaagttgtgacaggaataacaaaactgcaaggagtggaaaagatggaaaagcctgtgggaaatccgaggccttttgaaagaagggagctgatgacttcacgaccagctcctggagcccctcctttctgctgaagccgcggcatttccctccgtggccacacgagggcacccttggcccttttatcaaagcgccttcacttccccgtgggaatggagacaagtctgtccacggtgttttcttgaaatacccagttgctacccagatttgtatttttatgtaaacaaatacattttcacagaaataaaatttgaaaaataaaagtagaaagagaaaa

SEQ ID NO: 76729 - DNA, 3145 bp, Homo Sapiens
  misc_feature (2926)..(2930): n is a, c, g, or t
  misc_feature (2932)..(2934): n is a, c, g, or t
  misc_feature (2936)..(2938): n is a, c, g, or t
  misc_feature (2940)..(2940): n is a, c, g, or t
  misc_feature (2942)..(2943): n is a, c, g, or t
  misc_feature (2945)..(3015): n is a, c, g, or t
gtctaaggtagcgaggcctgggtggcgaattcggcacgagggcgagctgggcccgtgtttcggccgccgccatggccgcggtggacctggagaagctgcgggcgtcgggcgcgggcaaggccatcggcgtcctgaccagcggcggcgacgcgcaaggcatgaacgctgctgtccgggctgtgacgcgcatgggcatttatgtgggtgccaaagtcttcctcatctacgagggctatgagggcctcgtggagggaggtgagaacatcaagcaggccaactggctgagcgtctccaacatcatccagctgggcggcactatcattggcagcgctcgctgcaaggcctttaccaccagggaggggcgccgggcagcggcctacaacctggtccagcacggcatcaccaacctgtgcgtcatcggcggggatggcagccttacaggtgccaacatcttccgcagcgagtggggcagcctgctggaggagctggtggcggaaggtaagatctcagagactacagcccggacctactcgcacctgaacatcgcgggcctagtgggctccatcgataacgacttctgcggcaccgacatgaccatcggcacggactcggccctccaccgcatcatggaggtcatcgatgccatcaccaccactgcccagagccaccagaggaccttcgtgctggaagtgatgggccggcactgcgggtacctggcgctggtatctgcactggcctcaggggccgactggctgttcatccccgaggctccaccccgaggacggctgggagaacttcatgtgtgagaggctgggtgagactcggagccgtgggtcccgactgaacatcatcatcatcgctgagggtgccattgaccgcaacgggaagcccatctcgtccagctacgtgaaggacctggtggttcagaggctgggcttcgacacccgtgtaactgtgctgggccacgtgcagcggggagggacgccctctgccttcgaccggatcctgagcagcaagatgggcatggaggcggtgatggcgctgctggaagccacgcctgacacgccggcctgcgtggtcaccctctcggggaaccagtcagtgcggctgcccctcatggagtgcgtgcagatgaccaaggaagtgcagaaagccatggatgacaagaggtttgacgaggccacccagctccgtggtgggagcttcgagaacaactggaacatttacaagctcctcgcccaccagaagccccccaaggagaagtctaacttctccctggccatcctgaatgtgggggccccggcggctggcatgaatgcggccgtgcgctcggcggtgcggaccggcatctcccatggacacacagtatacgtggtgcacgatggcttcgaaggcctagccaagggtcaggtgcaagaagtaggctggcacgacgtggccggctggttggggcgtggtggctccatgctggggaccaagaggaccctgcccaagggccagctggagtccattgtggagaacatccgcatctatggtattcacgccctgctggtggtcggtgggtttgaggcctatgaaggggtgctgcagctggtggaggctcgcgggcgctacgaggagctctgcatcgtcatgtgtgtcatcccagccaccatcagcaacaacgtccctggcaccgacttcagcctgggctccgacactgctgtaaatgccgccatggagagctgtgaccgcatcaaacagtctgcctcggggaccaagcgccgtgtgttcatcgtggagaccatggggggttactgtggctacctggccaccgtgactggcattgctgtgggggccgacgccgcctacgtcttcgaggaccctttcaacatccacgacttaaaggtcaacgtggagcacatgacggagaagatgaagacagacattcagaggggcctggtgctgcggaacgagaagtgccatgactactacaccacggagttcctgtacaacctgtactcatcagagggcaagggcgtcttcgactgcaggaccaatgtcctgggccacctgcagcagggtggcgctccaaccccctttgaccggaactatgggaccaagctgggggtgaaggccatgctgtggttgtcggagaagctgcgcgaggtttaccgcaagggacgggtgttcgccaatgccccagactcggcctgcgtgatcggcctgaagaagaaggcggtggccttcagccccgtcactgagctcaagaaagacactgatttcgagcaccgcatgccacgggagcagtggtggctgagcctgcggctcatgctgaagatgctggcacaataccgcatcagtatggccgcctacgtgtcaggggagctggagcacgtgacccgccgcaccctgagcatggacaagggcttctgaggccagccatgcccacgcccctccccagcccccacccatgccagcgcagcgccagggctcagatggggcctgggctgttgtgtctggagcctgcaggcaggtgggggctgcgtccctgctcagcccatcccctgcctctatccctggccacctgccaggcctccctccggctggtgtcttgagaccagcctgccaggccctccagcaggaggacagagtgccctggggcatccaccttcctgcccaggggacgtggcgctgtcggtgtttggaggctgctgccccctggctttggcgccccatgggccctcagcgtctccccatgctgggctcactacatgggccagcccttgctctacctggccggtaggctgctggcgcctaggttgtgttgagagggggatgcccctggccctgcctcactgtgacctgctcctgcccacgtgcagcacctgtcaccttttctagaaataaaatcaccctgactgtggggtgcatcggtctccggaannnnnannncnnncnannannnnnnnnnnnnnnnnnnnnnnnnnnnnnnnnnnnnnnnnnnnnnnnnnnnnnnnnnnnnnnnnnnnnnnntgtgggccgcctcggccctcaaaaagttttcaaaacccttctttgggcgcgcggccccagaaggaaagggaacggggcataccgtgtttccaaggaaacccgggccaggaatagggctgggatccccccc

SEQ ID NO: 76730 - DNA, 1184 bp, Homo Sapiens
  misc_feature (473)..(514): n is a, c, g, or t
  misc_feature (531)..(552): n is a, c, g, or t
cttcggccgcggcgaggaggagccggagcgggagtgacaccgagccggacccagcgcgacctgcggcggctccgggtgactcgggccagtgtagaggtcctcaggccgccggcaggagcagctgggccaattccctggccgggagcggaaggggatggcgtcgggcctgggctccccgtccccctgctcggcgggcagtgaggaggaggatatggatgcacttttgaacaacagcctgcccccaccccacccagaaaatgaagaggacccagaagaggatttgtcagaaacagagactccaaagctcaagaagaagaaaaagcctaagaaacctcgggaccctaaaatccctaagagcaagcgccaaaaaaaggagctgggggacagctctggggaggggccagagtttgtggaggaggaggaagaggtggctctgcgctcagacagtgagggcagcgactatactcctggcnnnnnnnnnnnnnnnnnnnnnnnnnnnnnnnnnnnnnnnnnnggcaaatccaagcggannnnnnnnnnnnnnnnnnnnnntgatgatgatgattcaaaggagcctaaatcatctgctcagctcctggaagactggggcatggaagacattgaccacgtgttctcagaggaggattatcgaaccctcaccaactacaaggccttcagccagtttgtcagacccctcattgctgccaaaaatcccaagattgctgtctccaagatgatgatggttttgggtgcaaaatggcgggagttcagtaccaataaccccttcaaaggcagttctggggcatcagtggcagctgcggcagcagcagcggtagctgtggtggagagcatggtgacagccactgaggttgcaccaccacctccccctgtggaggtgcctatccgcaaggccaagaccaaggagggcaaaggtcccaatgctcggaggaagcccaagggcagccctcgtgtacctgatgccaagaagcctaaacccaagaaagtagctcccctgaaaatcaagctgggaggttttggttccaagcgtaagagatcctcgagtgaggatgatgacttagatgtggaatctgacttcgatgatgccagtatcaatagctattctgtttctgatggttccaccagccgtagtagccgcagccgcaagaaactccgaaccactaaaa

SEQ ID NO: 76731 - DNA, 301 bp, Homo Sapiens
ctcatggcatattctcaaaggtgttttgttacaaaccagattttcattttttaaaaaatgagacttggtggtatttaaaacctacacctaccatgttgctatttcactttcattgctttagttgcttaatatttaagctttgcttcatgctaccttttgtctgtatttcaatcttcataagcctattttgttttgtagacttgaatgataaaaattgtttctcatcttaagtatgctcagagttttaaatgttaaagaatgttgtgtaacctttatccaataaagtctttgattttttaaa

SEQ ID NO: 76732 - DNA, 1155 bp, Homo Sapiens
  misc_feature (322)..(322): n is a, c, g, or t
cctaatgaagatgcaattaatttaagatggcaccttgaactactgttgatatatataataaatagcagtgtattacaaaatattcaaatacagtcattaatttttttctatttttccccaagctgtggcaaccaacaaaaaacacaatgacgttctagtgacctagatataattatgttcctttcagaagtaaagttttttaaacatagtaaaaacaatatgaccttattaaaataaaactctcttaactatacgtgcctttaacaaatttttatatttatatataaatataagaatatacaaagcttgcacataactaatnaagtataatagcatatcattaagaagcactgttttctaaaaaattcgtgagtctgcccttcttgaaacataaagcttattttccattatctgtatgccattttaaaacctttcaatattcccttgaaattaataaatatgaattaagattaatgcacaaaacttctgtagccttaatgtcatatatgataaaaagagatctagaagatactagtgtaggaaaatctaagatggcatcactatttctgcactcttcacttgaagcacgctgaatagctccactggttacagcatgtctaattaagatcccccgactctgtgtaagctcttcttatttcctggctacgatttatagcactgagccaagtccagcatttccacaaactgcagcagagtcataaaacacttatttgtatgtcatgctgcatcgaagaatgaaatcaatgcattttggtcataactgtccagaatttccaatagaaggggtactttagtttttacattggtgcctttaaacttaaatttatctatgaaaagatcagtgatcatgccatagagtctttcaagatgtgcaggttgctttttgtattcttcctgtaggtgatctgcctcttctagaatacagtgatattctggtatcagaaagttcgtatttccctcatgaatctgtaattcttttaaagcatcaattaactgcactttcttagccaaaagcaactggtactccagctttgggtggattagctttaaagtgtgtttgactgatacttcatttatctcgtatgatatgttgaggttaattttcctttttgtagcttctttagaaagcacacc

SEQ ID NO: 76733 - DNA, 609 bp, Homo Sapiens
tttttttgaaaattaatcgagatatttaatagacagtgcaaaccataatttcatctgaatataaatgtatgcacgtttccaatgagttatctatcagttatcacaaacagcaacaaggaccttatagctatgttagaaaactgtatagttggaacttaattctaacaatctcacttgctctcaagagaacaccatccatttcaaatcaatgtcacaaactccagaagaccaggggagcaagggggtgaggagtgggccagagtggtaaacacagggccaatacacaggtgatggacagaaacacagctctggaggaaatcaaaatcagatgcattattacagctaagggcaaggaaaagcctatggcttttgaaaaatgacttttctgccagtaccgtacaagtacacaaagagatgtgcggcaagtcaactgacttacaaggacagaggctacatttcaggtcatttcaactgcaaccagtcgaccctttccattgaggattcagcagtggagtcagcgtagtccagaagctcaatgttggatttgcaaatacagtttattttacagaaattcaacattataaacagcaggcctcgtgccgaattctt

SEQ ID NO: 76734 - DNA, 691 bp, Homo Sapiens
  misc_feature (95)..(126): n is a, c, g, or t
taagccaccatgcctggccagatgatgtatttaaatatcataccaaactctgtgtatttatataaagagagactgttaaaagacttcataatatnnnnnnnnnnnnnnnnnnnnnnnnnnnnnnnnctttacgcttaccattgctgcatattgttgcagtataaaacacacacttatctgggatcatgagaatacgggacgaatgtcctgcggtaactgtaactttgacagcatttgattggtcctgatggttggcgccttctggctgtgcccctactcttggtcgtccctcttgcccaattcgtgcctcctagggctaattccctatagcggttcggcctaaattcgctaccaggttaaacctgcttccggtgggaattgttactggcctaatttctcaactgagcccgcccggcggctacgcggtaggtgcgggcgcccattggtgcccacccacgtggtttgtcttgagccatgcttgtttctttccggaccgctctgcgtcctgggctatggatccgccacgggcgggtatggctcctcattctgcccctctccacgctcgagctggattattcccattgcatcgccttgcgctggctctctcccctatctttaccctctttctgtaccctgtttgctccgtcctcttgtcgtttgtttaccccttgccgccgggttcttgcgctcc

SEQ ID NO: 76735 - DNA, 689 bp, Homo Sapiens
gcacgaggcattccaccacacacactatagcaggaaaaactaggccaaactcttcttgaccaatatagatatggtagatatggaaaagaactggtgtgggggcaggaatgaagatgggaacacccccacaagaagccagtaacagaatgtccttaggaagaatgagattcttgtccatcaaaaagaagtaggaactaaacaaggtcaagaacatgaggttggaggttacattgtgtggctggaaagaagccacacagagactgagaaactgagaaggcaaggactcttctgacagggcaaggtggaaggtggtggaggaggtgacggtgctattactggctttcacagataaatgatagaataagggatacaattgacaacattgagttgtcaatgagttgcccctcagaggggaaaagaggaatttctctcctagaaacctcagttttgctattgttgtcattattgttgtgttaacttcactccaagaagatcagtgcccatgaacataccttacactggaaaaactgacttgctaaaaagaaactctataaagcagactaactctgagggacttttcctcttgacttttttccttgttgatacgtgaccccatgtcccagcacattgttagggtcctgccattaaaagattgcagaatgtttaataaaaacattttagatctcttt

SEQ ID NO: 76736 - DNA, 537 bp, Homo Sapiens
aaaagaaaaatgcaaacacaacttaaccatactttatttgactgcatcttatttagacagcttgcacatttcaaatcccattaaatctctctccaaaaggatatgggacaatagaagaaaattatgcagcaatatccagtcaaacagcagtccaatattttgagatacacgtgatattttatagatactcaactcatatctgacgtcaatataatttatggttatgtttttacaaacctgaaagccctgtaacattacagcactcattttagtgatgtcatggtgcactgaaaagtaactctgatgtactaccaatttgattttatctatactcctgaaaagtgatgaacttcatgatttttagacaccataataaatatacacatccagtcttagacatgtcagccagtaccataacacagagcaaggtaaagttaaaacatgaaaaaacaaactgctttacatagatttgtcgagcaagtgggaagggtaatttgggaaagaggcagaaaatattaaaatcgattttttattttt

SEQ ID NO: 76737 - DNA, 1441 bp, Homo Sapiens
ggcacgagggcggggacagtgtagggtcattagctgttgagccgccccgggcgggcccaagcctttggatctcaggtgaccggcacaggcggccgcggggtccggaactgcttgttccggcagtggaagagacgcgccggcgttggccgctgctgctagcagcttgaaccccagggtcgggaccgatgtcggcttgggctgctgccagcctaagcagggccgctgcccgatgcttgctggcacgaggccccggggtcagggcggctcctccgcgcgacccccggccctcccaccccgagccccggggctgcggtgccgctccgggcaggacgctgcactttaccgcggctgtccccgccgggcacaacaagtggtccaaagtcaggcacatcaagggtccgaaggacgtcgaaaggagtcgcatcttctccaaactctgtttgaacatccgcctggcagtgaaagaaggaggccccaaccctgagcacaacagcaacctggccaatatcttagaggtgtgtcgcagcaaacatatgcccaagtcaacgattgagacagcactgaaaatggagaaatccaaggacacttatttgctgtatgagggtcgaggccctggtggctcttctctgctcatcgaggcattatctaacagtagccacaagtgccaagcagacattagacatatcctgaataagaatggaggagtgatggctgtaggagctcgtcactcttttgacaaaaagggggtgattgtggttgaagtggaggacagagagaagaaggctgtgaacctagagcgtgccctggagatggcaatcgaagcaggagctgaggatgtcaaggaaactgaagatgaagaagaaaggaacgtttttaaatttatttgtgatgcctcttcactgcaccaagtgaggaagaagctggactccctgggcctgtgttctgtgtcctgtgcactagagttcatccccaactcaaaggtgcagctggctgagcccgacctggaacaggccgcacatctcattcaggctctcagcaaccacgaggatgtgattcacgtctatgataacattgaataaccaggctacatgtgcccccgggttccttcctagaaatgtggcagcccattccagcacacaggcttctgcagcaatctctgagggtaaagccggtgggaggctcagcaggccaggaggcccaaggacaggacttgcgaccttgaagccaaaggaatctcacttgtggggcctccttgtcagctctgctgctgtctcagagccatctggatgagtgtcccgacaccctctcggatgcagggcaggaccacccagctggtcagactctgatgttgggtagctggcctctgtggggattgtaagtgccctgaggcgctctgtactagaaactgctcttaataataacggtgattattggttgctgc

SEQ ID NO: 76738 - DNA, 480 bp, Homo Sapiens
cttataggtggagtaatgtatataacgtaattatattctaattaattgttatgcttatttttacaggtagaattagaagatcatgtgatgttggagtaggagggtttatcttggtgactttgggatgctggtatgtttgctaagtattcaagaacatccatgattatagtaggttatctaattcaaaaagcacatgctcttttcagagcagtctcccattgggagatcctcaccctcaatgaagaatcttgatttttcaggacattttcatggaaatcttaaaatgcttgaacagataaatgcatattagacatcccattaaaaagaaagctgtggtttttacacttcacttaggaaagcctcaaccatttcccttaccctaatacttatttcatccctgcttattcatatctgaaaatgctactttaagaatgtgtgtacaactactgatgagtgaatataaaatatggatgaacctca

SEQ ID NO: 76739 - DNA, 930 bp, Homo Sapiens
  misc_feature (79)..(113): n is a, c, g, or t
aggacttgatcgatcatataggggccccgcgtcataccgaacgacgagcgcagcgagtctttgagcgaggaagcggcgnnnnnnnnnnnnnnnnnnnnnnnnnnnnnnnnnnncagtcgacggtaccggacatatgcccgggaattcggccattacggccgggggggtggagtcgcggagtagtcctcatggccgccccgccggagcccggtgagcccgaggagaggaagtcccttaagctcctaggatttttagatgttgaaaatactccctgcgcccggcattcaatattgtatggttcattaggatctgttgtggctggctttggacattttttgttcactagtagaattagaagatcatgtgatgttggagtaggagggtttatcttggtgactttgggatgctggtttcattgtaggtataattatgcaaagcaaagaatccaggaaagaattgccagagaagaaattaaaaagaagatattatatgaaggtacccacctcgatcctgaaagaaaacacaacggcagcagcagcaattgaacaatcttgagcatagaagtcaatgtaaacgaagttaagatcaaccacataaaacatttcatgtgcaataagctctcaatcaagtaaataaagtttaagttgtagtcatttttttcccacacttgtgtggaatgaaaacttgccagtttattctggccctgtgtctactgccaggatagcattcttacgtgttacatatagtggacttgtcatccttaaaatgtgaacagaatttattggcagtgtggcaaagaattataaaacatagtgtttaatgtacttggagtttccttgtagtagtaagtatagagtttgatgataagtaaacgtcccttaacaaaaacctcaaccttattactatcccattaaaaaacagcaaatactc

SEQ ID NO: 76740 - DNA, 393 bp, Homo Sapiens
gggggtgcagggcgggtggagtcgcggagtagtcctcatggccgccccgccggagcccggtgagcccgaggagaggaaggtagaattagaagatcatgtgatgttggagtaggagggtttatcttggtgactttgggatgctggtttcattgtaggtataattatgcaaagcaaagaatccaggaaagaattgccagagaagaaattaaaaagaagatattatatgaaggtacccacctcgatcctgaaagaaaacacaacggcagcagcagcaattgaacaatcttgagcatagaaaagaagtcaatgtaaacgaagttaagatcaaccacataaaacatttcatgtgcaataagctctcaatcaagtaaataaagtttaagttgtaggcaa

SEQ ID NO: 76741 - DNA, 703 bp, Homo Sapiens
  misc_feature (126)..(126): n is a, c, g, or t
  misc_feature (645)..(645): n is a, c, g, or t
tcagggccccaggcacgtggttgttttctccctggacttcctgtggccccagaggagcccaccgtgtgagtgctgggctccagatggcgccgggtcccaatcgtggctccacacagggttgtctgngaggacgggacggtgtctctggccagcactggcagcttccgggccttgtaccccactctgcctggcatgagcctcatggggggttggtccctgtgcctggaagcggggtggtgtccagggtctgcaggctggggctcgggctttgggagttgtttcactgtgcttgcttccagcatgtctcagggtggggctatgcgtggtctagaggggtctggggcattggatcaggtggcatgtgggtgtctacacatcgagaagcacacagggatgagccactaggtatcccatgctggaggcttgtggaaggctgtgcccatctcccatgtttccccacctctgttcctcctcagagccctccaggagcgtggggtgggggccagcgcagggctcaggagccagcagggcagagttctgcctgtgtgtgctgggttttggcatagcctgtgtttgcagtgagagtgacttgctgtcagtcacggggcacagcctcctgttcacccactggcttcccccttcccnactgaagtgtgagctctatgtttcagggcatctattaaagagtgaccacaggcaaaaa

SEQ ID NO: 76742 - DNA, 703 bp, Homo Sapiens
atcactcggtaccggtcccctgtggaatggcaagatctgtaccgtgaggctggggcaacacgcagtactatggccaacaggccggggtactccaggaggctcgagtccccataatcagcaatgatgtctgcaatggcgctgacttctatggaaaccagatcaagcccaagatgttctgtgctggctaccccgagggtggcattgatgcctgccagggcgacagcggtggtccctttgtgtgtgaggacagcatctctcggacgccacgttggcggctgtgtggcattgtgagttggggcactggctgtgccctggcccagaagccaggcgtctacaccaaagtcagtgacttccgggagtggatcttccaggccataaagactcactccgaagccagcggcatggtgacccagctctgaccggtggcttctcgctgcgcagcctccagggcccgaggtgatcccggtggtgggatccacgctgggccgaggatgggacgtttttcttcttgggcccggtccacaggtccaaggacaccctccctccagggtcctctcttccacagtggcgggcccactcagccccgagaccacccaacctcaccctcctgacccccatgtaaatattgttctgctgtctgggactcctgtctaggtgcccctgatgatgggatgctctttaaataataaagatggttttgatt

SEQ ID NO: 76743 - DNA, 1086 bp, Homo Sapiens
atccagacctccctgccggatgccccgaggcgggaggccggctgtgctgcaggaacccatctccagatgccaaaggacttgaggggcagctgacaatcgctgtgtcccggcagatccgcagctcgaaaaagaacaagccacagaaacgggctcgctcgtgccaggacacagcagtgtctttcaaaaaatcaaaaccagaagttttatcagcagcaggaaggatgtgggactctgtccaagttcaccgtcaccatcaagccactggctgtggaaggagtttgtccaacagggtcagtgtcacagccacaacttcagaaagcagccatcccgcgtgtcgtccaaacagcagtgcctgcgtcccgctccacggagtcttccagaacacctccctctgaactaatcccggagcaccccacccccagcgagtcccacctggacctcttcaaagtcaaaactcttctctcgggacaaacaaatattcgggactttcgaagccctgaacttgagacaccaagtttgtctccatggaaacacgtagccgctgcagttggacagctgcgtgctggagttctgtccccaaaccaactgcagagaagaaagacgagcctcggcccaggacgcgatttctaacgaaatgcaatagttttctctttttggaaaaatgtttataccaatagttttgtgcgctaattgttattagaacgtttcttatgaatgtgtacattgcagtatattcagtcccaaatgttttgttctcattcacacagaaggtactaatgtcagctcacgtggcctttaaaaacctacttccccgcccgcaggagctcagagcatcgctgggcctgcgccagagtgaggggtgcaggaagacaaagacgcgtgctcactttagaaacgaaaagctgggaataatcacactgtttgtctggtcgtatagcccaaaccttagttgaaatcagacagaaagaatgtctttaaaatatacatctcctctccttggagacactgaagctcacagttaacggattgtaatgcccggcttttcctcactcctggtaaccaatacaagctggtttctgccttaaa

SEQ ID NO: 76744 - DNA, 389 bp, Homo Sapiens
caaagcctgaagtgcttatggttttttggctaacagccacagagggcaaagtttaagactttcttgtaaggactaactgttcttttcaagctactgtttgtttttctaaaagcaggatttgcttccgtaggaggcaagttccttgatgtggaatagtgcaacctgtatatgggttattataataggaaagacatttgtacttgcacagtttaaatcattcttaaattttgaacatgtgaattgtcccaaaaaatctttaattttttggtaatttttactctttttgtgcacatgttgatttcttaatggtaaatccttcatttaaagatagtgttctctgttgagaatatttacatggaataaaacaatcttttcatggcctgttaaaa

SEQ ID NO: 76745 - DNA, 786 bp, Homo Sapiens
aaactagtctaggtacgaggctgggtgttgaatcggcacgagggcttggccaagatggcggcctccgtgtgcagcgggttgctggggccacgggtgagtggggcgactcggcaggtccctgcgagtcggaggtggggtccctagtttccgcctcacgcgccctccctccacaggtgctgtcctggagccgagagctgccttgcgcttggcgcgccctgcacacctccccggtctgcgccaagaaccgggcggcccgagtacgcgtaagcaagggggacaagccggtgacctacgaggaggcacacgcgccgcactacatcgcccaccgtaaaggctggctgtcgctgcacacaggtaacctggatggagaggaccatgccgcagagcgaacggtggaggatgttttccttcgcaagttcatgtggggtaccttcccaggctgcctggctgaccagctggttttaaagcgccggggtaaccagttggagatctgtgccgtggtcctgaggcagttgtctccacacaagtactacttcctcgtgggctacagtgaaactttgctgtcctacttttacaaatgtcctgtgcgactccacctccaaactgtgccctcaaaggttgtgtataagtacctctagaacaatccccttttttccatcaagctgtagcctgcagagaatggaaacgtgggaaaggaatggtatgtggggggaaatgcatcccctcagaggactgaggcatagtctctcatctgctattgaataaagaccttctatcttgaaaaaa

SEQ ID NO: 76746 - DNA, 809 bp, Homo Sapiens
  misc_feature (671)..(671): n is a, c, g, or t
  misc_feature (762)..(762): n is a, c, g, or t
  misc_feature (764)..(764): n is a, c, g, or t
ggggcgctccgcttggcccaagatggcggcctccgtgtgcagcgggttgctggggccacgggtgctgtcctggagccgagagctgccttgcgcttggcgcgccctgcacacctccccggtctgcgccaagaaccgggcggcccgagtacgcgtaagcaagggggacaagccggtgacctacgaggaggcacacgcgccgcactacatcgcccaccgtaaaggctggctgtcgctgcacacaggtaacctggatggagaggaccatgccgcagagcgaacggtggaggatgttttccttcgcaagttcatgtggggtaccttcccaggctgcctggctgaccagctggttttaaagcgccggggtaaccagttggagatctgtgccgtggtcctgaggcagttgtctccacacaagtactacttcctcgtgggctacagtgaaactttgctgtcctacttttacaaatgtcctgtgcgactccacctccaaactgtgccctcaaaggttgtgtataagtacctctagaacaatccccttttttccatcaagctgtagcctgcagagaatggaaacgtgggaaaggaatggtatgtgggggaaatgcatcccctcagaggactgaggcatagtctctcatctgctattgaataaagaccttctatcttgtaanggaaaccgaacggtcctgaccaaatccgacgggcgccccggggcccatacggggactaatcccccgggagcccaggccgcctccaataatnanttttttggggccccctttggcccctggaaaaattttcttaaacct

SEQ ID NO: 76747 - DNA, 1009 bp, Homo Sapiens
ttacggtctaggtagcgaggcctgggtggtgaattcggcacgaggcacaggagcccaggtggcctctgggcctggagaagctgcccctgcgccagcctgggcctgagaagggggccctggacctggagaagccgcccctaccccagcctgggcctgagaagggggccctggacctgggcctgctgtcccaggagggctgaggcggccacacagcagtggctggggggccagcggggggtgcgtgtgcctcttctgggcagcagactgccctatcagcccccagccctgtgcagcctgcgagctctgtccggtctcctactccacaagaaggccctggagcacaaggccacctccctggtggtggggggcgaggctgagcggccggccggagcactgcaagcctcactggggctggtgcgggggcagctccaggacaacccggcctacctcctgttgcgggcgcggttcctggcagccttcaccctccctgcgctcctggccaccctggccccccaaggcgtccgcaccaccctctcagtaccttcgagggtgggctctgagagtgaggatgaagacctcctgagtgagctggaacttgcagacagggacgggcagccgggctgcacgacagccacatgccccattcagggagccccagactctggtaaatgctctgcttcctcctgcctggatacttctaatgaccctgacgacctggacgtgctcagaacccggcatgccaggcacacccggaagcggaggcggctggtgtgagcagcaggacaagcactttctcagaagcccgtggccctgctgacgagagacagcccacccccagcctgcaagagaggcagccagaggccaggtatctgctggccgctgactgaccaggtccgcagtgaacagaggcgggcctgccgactgactgtgtggcatggagcatggctgttccccaagtgcacacctgaacacttggaggaataaagttctgtttttaattgtgaaaaaa

SEQ ID NO: 76748 - DNA, 1422 bp, Homo Sapiens
ttgaaagatttggttttattctacaagaaattgataggtgcaatcctgttaaagaaatttcttttcaaaagtaaatgaaaaacccctctgaattatttatatattaattttttgaaaacaatagtcatagggcctgctttgtcctatttaactataaatgttacacatttacaaactgaaacaaaaatgcatagtacagagatttaaatgaaatcttcgaaagaataaatttgcttttcagtccactgtattttcaaaattgattatcaccaagcttggatgaaagctgtgaaccacaaaccatttgtttatttaatagaaaaaagaatgtgtagattattagcaaagtaatgccttaaaatgtatcttcacacagttgaaattttagtataaacttgtatatcaagttgctttccattatttattctactttaaaaatatatacaactatgatgttcaaatatgtattctgagccattatgttcaaacataaatatctgggaaattcaaactgctgcaacaagttaggaaaggattaaggaaaaatgatgagctacaaattatgtagttggaggaagaaaaaaatgttacttagcatttatgtctggataggtatgtattttctaatttacatacacatatccagttgagtatagacaaccatcaaaatgtaaccagttacacagagactagactaagccaacactattttctataacaggtaacagtagtgatttcaaaaattttaatatctcaatagtttcaccaaaaattatttgtggtaatatgctaatattctgaagttttgagaggcacagattaaatgagtgcactatctatgccaaactcagcaagtctataacttactgtttaattatggtgtaagtatctgaacacaatagcatagagaggcaaccagaaaaggacattttacatatgcccatgctgatcaatcacattaacatcagtgcttacaactttcaaatttaaatataaagggacacttgcaaagccgcaagacaacttcagtacaaaaacccaaattgataaatctgcaaaatcttaaacttcttaatccattgataaatattaaggagtagctggtcttcaaacaccgtaaaaagttaaagggttgaaaacatgttcaccctttgctatacggtggcatctgaaattatcaggcatgacaacttgaatttgttttgctcttccatgcaagaagtatatatatgcattttaagatagcttagaattaagagttaacttctagtcagtattggtaagtgactaggatggctatccaatcagtattctatggtatcacataccaaagtctctacaatatgacagtcttgtcttgttcagaactcatcacttttgggtagggaagagaggcacggcagaaaagcagttgcaattaaa

SEQ ID NO: 76749 - DNA, 717 bp, Homo Sapiens
agaacccaagctgtctctggattggcacccttaaagacagatacattggctggggagtgggaacagggaggggcagaaaaccaccaaaaggccagtgcctcaactcttgattctgatgaggtttctgggaagagatcaaaatggagtctccttaccatggacaatacatgcaaagcaatatcttgttcaggttagtacccgcaaaacgggacatagtatgtgacaatctgcatcgatcatggactactaaatgcctttacatagaagggctctgatttgcacaatttgttgaaaaatcacaaacccatagaaaagtaagtaggctaagttggggaggctcaaaccattaagggttaaaaatacatcttaaacattggaaagctcttctagctgaatctgaaatattaccccttgtctagaaaaaggggggcagtcagaacagctgttccccactccgtggttctcaaaatcataaaccatggctactcttgggaaccacccggccatgtggtcgccaagtagagcaagccccctttctcttcccaatcacgtggctgagtgtggatgacttttattttaggagaagggcgattaacacttttgacagtattttgttttgccctgatttgggggattgttttgttttggtggttgttttggaaaaacagtttataaactgatttttgtagttttggtatttaaagcaaaaaaacgaaa

SEQ ID NO: 76750 - DNA, 1419 bp, Homo Sapiens
ggcagtaactctaacggttttaaggtagcgaggcctgggtggcgaattcggcacgagtgataaatgtcagtgtgaacctggaggccttttcccaggccattagtgccatccaggcgctgcgctccagcgtgagcagggtgttcgactgcctgaaggatgggatgcggaacaaggagacgctggagggccgggagaaggcctttattgcgcacttccaggacaacttacattcggtcaaccgggacctcaatgagctggaacgtctgagcaatctggtaggcaagccatctgagaaccatcctcttcataacagtgggctgttaagcctggatcctgtgcaggacaaaactcctctctatagtcaactccttcaagcatataagtggtcaaacaagttgcagtaccatgcaggactagcatctggccttttaaatcagcagtcattgaagcgttccgctaatcagatgggagtatctgccaaacgtagaccaaaggctcagcccacaactcttgtcctaccacctcaatatgttgatgatgtgatcagccgcattgacaggatgtttcctgaaatgtccatccacttatccagacccaatggaacatcagcaatgcttctggtgaccttgggaaaaggtgttgaaagtgatcgtcgtcatgcggagcctgttcattgatcgaacaatagtaaagggatataacgagaatgtctacacagaagatggcaagcttgatatatggtccaaatccaactatcaagtattccagaaggtgacagaccatgccaccactgccctgctccactatcagctgccccagatgccggatgtcgtggtccgatccttcatgacctggttaagaagttacataaagctgttccaggccccgtgccagcgctgcgggaagtttctgcaggacggccttcccccgacatggagggatttccgaaccctcgaagccttccatgacacctgccggcagtagcccccacgctggccccagcctcagaccccacccagcaccttcccagacacgcaggaagcccacagaaggctcagctggttcctcactgcccagatgtgtacagctgctcctccctttcataaagcagcgccatgtgtgcagaggccactcttgaagagcagactccctctgtggctgatgggactaattattcccactagccagcggactgaaggcaaagaagacctttctagaacctggtagaaggaagctgtgcagcatgctcctcgtccatgtgtgtcggcagtgctggtgtctgtcgtctccgcgagctgttactggaatgagcccttgtgttcatgggtatcgtcatgcggggttcttgtgttttgtggggcttgggttttggtaacttatttttataagcaataaaccttttgtatcctgaaaaaaaaa

SEQ ID NO: 76751 - DNA, 942 bp, Homo Sapiens
  misc_feature (131)..(131): n is a, c, g, or t
gctgttcgtgctggtggacgggcgctgcttccagctggcggacgacgcgctgccgcactgcatcaagggctacctgctgcgcagcgagcccaagcgcgacttccactttgtctaccggcccctggacgtgngttggtggcggcggcggcgggagcccgcccagcctgggtggtgcgggagcccaacttcctgtgaggccctcccggggcgcctcccctcacccccaggcgcacgtctggccccgcctcttgctgcgcactcccgaccgcgacgtccacgcagcagagggacatgggccattccatgacgtgcccaggccaacgtcgcaggacagttgtgaaaataacatgacgctcgtccaaggccacttcctgagggcaagtcctaatagccctgagacaccgagacggcatgttcttcattagacggaaagggaaactgaggctcaggagagaggcgctccaggccgctgcagccaacaaaccggcgccctcttcacacgtagctcctcaggccattccccatgagtcccccacacccaccccatcctcggtctttgcaaagaagggcccgagcttagtttccccaggactggcctaggaaggagcaccggccacagctgctccccgtgccactcagggtggacccagcatctcaggagcacctcagggtgtcggttaagagacaggcctccacccctgcaccagagcctgctcttagctcccggtgcccccagaccccgcagctctgtgcccggcaagaagcagctagacactacgccagggcgccaagcacggccagctccgcggacccatggacaagcccagccccgcctcagggaaaacagggcctttccctacaggacacgccccagagctgtggcagattgcaggagccatcgtgtggggagaatttaataaaagcccttttgaaaatgaaaaa

SEQ ID NO: 76752 - DNA, 1377 bp, Homo Sapiens
tggaccggtccggaattcccgggatatcgtcgaccccgcgtccgggcgtccgggctggtaagattgctgcagcagggacatcgctgcctcctggctccagtcgcccccaagctggtccctccggttcggggagtgaagaagggattccgcgccgccttccgcttccagaaggagttagagcggcagcgccttctgcggtgcccgccgccgcccgtgcgccgttcagagaagccgaactgggattaccatgcagaaatacaagcttttggacatcggttacaggaaaacttttccttagatcttctcaaaactgcatttgttaatagctgctatattaaaagtgaggaggccaaacgccaacaacttgggatagagaaagaagctgttcttctgaatcttaaaagtaatcaagaactatccgaacaagggacatctttttcacagacttgccttacacagtttcttgaagacgagtacccagacatgcccactgaaggcataaaaaatcttgttgactttctcactggtgaggaagtcgtgtgtcacgtggctagaaacttggctgtggagcagttaacactgagtgaagaattcccagtgcccccagctgtgttacagcagactttctttgcagttattggagccctgttacagagcagtggacctgagaggactgcacttttcatcagggacttcttaattactcaaatgactggaaaagagctctttgagatgtggaagataataaatcccatggggctattggtagaagaactgaagaaaaggaatgtttcagctcctgaatcaagacttactaggcagtctggtggcaccacagctttgcctttgtattttgttggcttatactgtgataaaaagttgattgcagaaggacctggggaaacagtattggttgcagaagaagaggctgctcgagtggcccttagaaaactttatggattcacagaaaatagacggccgtggaactattccaagcccaaagaaaccttgagagcagaaaagagcatcactgccagctagccgccatggatgcagcagcctgaaacttgagagcgaaagtgagataaatgtcaaaggtgtttcaagccagacattttcacaattgtgaagaaatagatgttttgtttctgttttttactgtgttcccaaaattaaataaatgttaaccaagaagaaagggggtaggaaacaaaaacaaaaacttgtccggccgccctcggccctccgagaaactttctaaacccattccgtttgggcgcggcgggccccggtaggtaaagtgaacatggcgcatagcttgttttcctagggaaatccctgggccatggactaagggcttggaattcctcccccagt

SEQ ID NO: 76753 - DNA, 3421 bp, Homo Sapiens
  misc_feature (3062)..(3062): n is a, c, g, or t
  misc_feature (3074)..(3074): n is a, c, g, or t
  misc_feature (3283)..(3283): n is a, c, g, or t
  misc_feature (3292)..(3300): n is a, c, g, or t
ggcgctgggggtggcgggataggctgggcgcggccggcgctgcagacccgctgctgttgtccgggtctgtgcggtcccgagggccctccgtgccgccggcgccatgggcaattgccacacggtggggcccaacgaggcgctggtggtttcagggggctgttgtggttccgactataaacagtacgtgtttggcggctgggcctgggcctggtggtgtatctccgacactcagaggatttccctagagattatgacgttgcagccccgctgcgaggacgtagagacggccgagggggtagctttaactgtgacgggtgtcgcccaggtgaagatcatgacggagaaggaactcctggccgtggcttgtgagcagtttctgggtaagaatgtgcaggacatcaaaaacgtcgtcctgcagaccctggagggacatctgcgctccatcctcgggaccctgacagtggagcagatttatcaggaccgggaccagtttgccaagctggtgcgggaggtggcagcccctgatgttggccgcatgggcattgagatcctcagcttcaccatcaaggacgtgtatgacaaagtggactatctgagctccctgggcaagacgcagactgccgtggctgcagagagatgctgacattgggcgtggccgaggctgaacgggacgcaggcatccgggaagctgagtgcaagaaggagatgctggatgtgaagttcatggcagacaccaagattgctgactctaagcgagccttcgagctgcaaaagtcagccttcagtgaggaggttaacatcaagacagctgaggcccagttggcctatgagctgcagggggcccgtgaacagcagaagatccggcaggaagagattgagattgaggttgtgcagcgcaagaaacagattgccgtggaggcacaggagatcctgcgtacggacaaggagctcatcgctacagtgcgccggcctgccgaggccgaggcccaccgcatccagcagattgccgagggtgaaaaggtgaagccaggtcctcttggcacaggcagaggctgagaagatccgcaaaatcggggaggcggaagcggcagtcatcgaggcgatgggcaaggcagaggctgagcggatgaagctcaaggcagaagcctaccagaaatacggggatgcagccaagatggccttggtgctagaggccctgccccagattgctgccaaaatcgctgccccacttaccaaggtcgatgagattgtggtcctcagtggagacaacagtaaggtcacatcagaagtgaaccgactgctggccgagctgcctgcctctgtgcatgccctcacaggcgtggacctgtctaagatacccctgatcaagaaggccactggtgtgcaggtgtgaggctcctgcaggcccactctcttcagcagccacccggccctccctccagcacccgttttaatcccacagaacaacgggaacgttactgactctggtgccttatctcgaagggaccagaagtgctgtgtgttcaggccatctctggctgtcttcctgtctctcctgtctgtccacctcctcctcttcctctcctttaccccactttcactgccactttcatcaggtttgtgtctcatctccctgcgtgtcttttcctttgtctgtctttttctttcccccatgcacatcatgtagattaagctgaagatgtttattacaatcactctctgtggggggtggccctgctgctcctcagaatcctggtgccttgaagttctctgtgcatctgtccatcctccctatggccctggccagagctcagcatgggcaggggttctgggtaggacggtcactgtcctctctcctggactggtcttcccagccctaaaccctgccccaggaagcccacagcctcacctgctgctgcccctctaggtctgggcagccatgacctgcagggcccagagacactgtccttcccctcatccacccaaggccccagccagcgctcataccctgtcctttctccctgaccccaagggcacagaggcaaggcctcctgtctacagcagcttcctcagtttcctactgccttaggaggcccctgcttgtgctcagggaaggcctcttcatgggcatgttcctgctggggcggtgcggtttggtcccaactctgctaagttttctgagatgagggtctagccctgttggggacagaaaagtgtgtagaccttcttcctgctagggctgcactgtcctgggtgttgggcccttctggtggacaaggctgtgccaaccctgtacagaatcgagtgctgtagcctggccagaccccagagcccttgtgccatctttcttcctggccagagtgatggggttccagccatggggaagcaacccaatcctctgtctccttgctccaatggaggcagaagagcccaggacccaagcgtcttggcaggggtgctgtgaatgtccagtggtcccagctccccaccctggccctgccccagcctgtgtagctcttcctgcatgtggatgctgcatgtctggtctggggcttggatgttgcactgccccactgcctgtcccttctggtaaaataaagaactcttaatgcccaaaaaaaagattccgaccaccaccccacccttcttggtcgggccgccttcgcgccctccgaaaaagctttcctagcaccatttcgcttttggcggccccgggtccccattaagggtaaaggggaaacttggggtccataagcctggttctcccatagagaaaactccctcgggtaccttggacttaaatgggccttgggaaattccttccacccaaaataaacaaaaacccgctccccggggtggggaacaactctgagaagcgcgtgtccgttggaaaaataacatcccccagaaattcggagaaacatttcctgggaaggggacaccatttttcacctgtggggggtgtctctttatattctaaacaacgagggggtaaggttctctccaaaaggcccggagacgccttcccgcaagatatattccgcaaaatttttaagaggcgnccccccccgagngcccccttgtacgcaaacgttctatattttgagcacaagagatcacacgggggttgggcataacaccgtgtccacgatttaaaacgggcaccttttttcctggcgctccgcacacgatgtggtgaaaaaaccaccgcaatttcccccgcaaaaaatcgggcggacagctttttaaatatatgaaaaaaccccccgggagaatatctcgntgctccatnnnnnnnnntatttatccagagcacgacaatcgttatgtgtccccccgcctctctggtgccgagaataatataaagaaaaatttcgggcgcccacccacagtggtggggggtacacataccaaagagggg

SEQ ID NO: 76754 - DNA, 692 bp, Homo Sapiens
ttgaaacttctctgtcattgatgttgcatttccaaggagataatctccttcttggtgcctaattttctagatgataataggctagttttgatttcttgctcattttcagaataactttccaggaagagatggcatttagaacttcagctttggtgctcaggtataaagccaattaaggtacaattgtaccataaagggaacaatctgtttctgattgcacagtttctaatttttaaaactgatgtggtttgcatttcataaaaggcaaagtttacagaaccataaacattctcaattttctttatgctagacatataaattatttttcaaactgtatagatttggggtaaaaagttgtctcagttcctctcccaattgcaatgagaaaaaaaagcttaatttttacattatacttaattttctaaaaccatgtaactccattgaacacatttttcaacttaaggtctgcatagcagacttttaataaccttgggatttatctggtagaacaatatgtgttctacatttttttcataattatatattgtgtatgttaaaactattttccagttgttttgtctgtaaaactgtctttatcaatatgcttaatggttctttgtacaattttgaaagtttctacctgtatataatggatgttaaccagtatcaataaatcacttcgtataatctta

SEQ ID NO: 76755 - DNA, 523 bp, Homo Sapiens
gtattaagtaaaccaattctaaacttgtcttatcaacaaagaacattaagactcatgatgaaaccacaacttaattcacagaagcaccaacataacacagtttacagtaacctttctcctgtacattgaaacagtataaaatataggtaatttcatgtgcattaaaccatggattgtctaactgtgagttcagcaaaaggtgacacaaataggtagcatttgccccaaaacagggtaaatatttttcttatactaatctacaaaaaatggttctatatatatatcttaatgagaaagtgagccacctaaaatggccttatcaaaaaactttacactgcctgaaaaatgtaaaaactattacagacctctagagacttaaaatcagacagtttttttctcaaactgtttttggaagtagtctgttagaaaccaacattctgtgtccctggacacatattgctattgttaccagtgaccgggaagaatgccaatccctgtataatactttcaagtctgttttagg

SEQ ID NO: 76756 - DNA, 730 bp, Homo Sapiens
  misc_feature (12)..(12): n is a, c, g, or t
  misc_feature (74)..(74): n is a, c, g, or t
gactgttgagtntgataaactgatctgcaaaatataggacgtagcgtttccaagacaccagatgaaagtacaanaactaaagatcagatcctgacttcaagaatcaatgcagtagaaagagacttgttagagccttctcccgcagaccaactcgggaatggccacaggaggacagaaagtgaaatgtcagccaggatcgctaaaatgtccttgagtcccagcagccccaggcacgaggatcagctcgaggtcaccagggaaccggccaggcggctcttcctttttggagaggagccatcaaaactcgatcaggatgttttggccgctcttgaatgtgcagacgtcgacccccatcagttcccggccgtgcacagatggaagagtgctgtcctgtgctactcaccctcggacagacagagttggcccagtcccgcggtgaaaggaaggttcaagtctcagctgccagatctcagtggccctcacagctacagtccggggagaaacagcgtggctggaagcaaccccgcaaagccaggcctgggcagtcctgggcgctacagccccgtgcacgggagccagctccgcaggatggcgcgcctggctgagcttgccgccctgtaggcttggcgctgggctctcggtttgttcttcatttttaaagaaggaagggtcatatgtttattgctaaactgtcaaaaaggaatatattctgattaaattattactcctc

SEQ ID NO: 76757 - DNA, 203 bp, Homo Sapiens
ccctcacccccccaccaccccttcccatttcatcggtggggacgtggagagggtggggcgggctggggttggagggtcccacccaccaccctgctgtgcttgggaacccccactccccactccccacatcccaacatcctggtgtctgtcccccagtggggttggcgtgcatgtgtacatatgtatttgtgacttttctttgg

SEQ ID NO: 76758 - DNA, 742 bp, Homo Sapiens
ttttcttaaatctccaaggaagagaactgactaaaatagtaggaacatgaaagtattaaatgccaattaatttgttgtagtaaagtatcttcattagcgttatactccatcatatctggtgtaaactgctcacagaaaaccctatgaaaccaaagggggaccattcaggtctaaaaagcgacaggtccgagactgggtctgtcacctgggcattttcaaagaggacattttgaagaatttgcatattcagatttttaaaatgcacttaacatacttcattacagatttcttgggtagggaggatgggataggccagggatgggatggaatcagttctgcctgggaaactaatccgaatcatttacctttctgtattaaccttggcctgtcctaaaaagagaacgactgtttcatcatgagttgctctgagttttgttaatgtttgtgttggtggattgacggttaaatgaagcatttagctggaatatgaactttgggagttttcatgttgtcctggatttctctttgtaaacctttaaaccttagcccctggttgattgtgttaaacccattatgagaatgttatttaaagttgtattataattgcaacctccactaattattcagtactgtagcagcaaagtattatttgtaagaatttggttatttttatacttatatccactctaagtctggcgttctagtcagtaaaatgatgcaataaaattaatatcattttcaa

SEQ ID NO: 76759 - DNA, 1649 bp, Homo Sapiens
ggtaccggtccggaattcccgggatatcgtcgaccccgcgtccgagatggagagagcacttccccgtaacgaaagcaaagtggtaagcacagggtgagacccttttacacagaatggtggagagaaaagagaatgctgaaaagtggctcagatgcagagtgttctgtggagaaactgcagccccacttctgtttccctggagtctcccaatggatcattcaggagtgtcctatgtgagaattgagccaaggaaaatactcatgcaaccagcctgagtcgcggtgaggggacgagaggttgtacacacattggtagttattttgcaccagcagtgcctttctcactgggggtacttggaccctcagatcttcttttctaatagccatttgccaccccaagtggtatgtcggccatttctccttaaaacaccttccctacctttcccatgtactcagtttagctctcaaagaaggggtgaatcataaagccagtgaaaatttcaccctctgagggagttccccaatctgaaggggaagagggtgacctcagcggcttttctcccaaaaatcggctgaaggctggttgtggatccttgttcctctcctgaccccatctggctgctgccccgtctcccacccctgtccccggggctcgctggccctgcactccgccttagtcctggggccggcgacacagtgggggctcctcacttgctgcagtgtcatagcaataaaatgtgattcttggggtccccccagggagctgcccatggctttatttatgaacctggttttcgggagtcaggggaggagatgactttgcttctgtgcacagccccgtcttccaggagccacgactcagaagaaaagggtgctcagacttttgttatacacatttgctttgtgtaaataaatgtttacaattttatatgaaagatggaataagcgctagagcttccaactgtatattttttacttttatagattttaaaactatgatcctttatatgtgtgttttgggggagctatgataagttttatggcaaacggttggtattgttaactttttattgtcatcaaaagttcataaaagtcctattaatccccatattcttctactgcccttaactctggtatacaccaaaaagaaatctttactttccttgttttatcattataaaaataaagtattttgctagtatggaaaaactaacggtttaaggaaaaattttaacatgtcgggccgccccgggaccctcgagaaactttctaaacccattcttttggccgcgcgggaccccgaaagggaaggggaacatggcccttaacttgtttccctagggaaatccttggaactggactaaggggctggggattccccccccaataaaaaacggcccgggggggcaacccgacgcgtctcttgaaacaaatcccccaaggggactttctgaagggcactttacctggaattcctattcacacaggggagatcgccagcggaacgctcccaatttcctaaatttaacggccccctgacactggccggattcttttcgaaggacaaccgggatggggaattttcatttaaaaggcattcctgggccccaaaatgggagacaccacactccaccacaaacggtgaattgg

SEQ ID NO: 76760 - DNA, 512 bp, Homo Sapiens
ggcacgaggcctcgtgccgtagaattcctaagggaaccttagcataaaggttttggggaaggaggccgtaggccggcccggaggaagcaattccacttggtttgacaacttctgccactcccatgtcagatgacttgcacttcttaaagagattgctttataacactaagacatcctttctaaagattcaagtggacttgactaagctgagggtccacgaaatagaatatgacatgtgagctgtttttggaaaacgaagatggagagagcacttccccgtaacgaaagcaaagtggtaagcacagggtgagacccttttacacagaatggtggagagaaaagagaatgctgaaaagtggctcagatgcagagtgttctgtggagaaactgcagccccacttctgtttccctggagtctcccaatggatcattcaggagtgtcctatgtgagaattgagccaaggaaaatactcatgcaaccagcctgagtcgcggtgtgtgtacaacctctc

SEQ ID NO: 76761 - DNA, 1475 bp, Homo Sapiens
  misc_feature (97)..(152): n is a, c, g, or t
ttagggctagtacgaggctgggtgtataatcggcacgagggcggcggaaggagcagctgcgggtgcctgcggtcccgcccggtgtgcggatcaaggnnnnnnnnnnnnnnnnnnnnnnnnnnnnnnnnnnnnnnnnnnnnnnnnnnnnnnnncccatggacacttcccccagcggcctccacagcaagctggccaacgggctgcctctcgggctgggctgctgggcacatgacagcttcaactgggcaccctgccccagggctgcgccagcacccctgtggctcgggaactgaaggccttcgtggaggccacctttcagagacagtttgtgctcacgctgagcgaactcaagcgcctcttcaatctgcacttggccagcctgccccccggccacacactcttcagcggcatctcggaccgcatgctacaggacacggtgctggccgccggttgcaagcagatactggtgccttttcccccccagactgctgcttccccggatgagcagaaggtgtttgccctctgggagtctggagacatgagtgatcagcatcgacaggttttgcttgaaattttttccaaaaattaccgggtacgccgaaacatgatccagtctcggttgactcaagagtgtggagaagatctcagtaaacaggaggtggataaagtactaaaggactgctgtgtaagctatggtggcatgtggtaccttaaagggacagtacagtcttgacaatagtagcaaactactaacccagcaaatctaagcccaaggaagaagggcggaaccagaagtagggcctcgacttgcttcagacgacacagagcaagaggaactgaccatctcatgacctgtggcattgcacggtgcagtggacagaagggattatcctcagccagtcacagggtcagcttaagttagttagatcactcccagaagagaccagctgggaccttctttgcagtacaatttgaaattcctgatgtattttgcttattatttggtttcattctcataataaagagagtgtatactgacatgggcaggatgataaaaatcatggtttaatattttcttttgtaaacttaatgccaacaaggtctaagttatgtttacaacatgaagaaaacctcaaagttcttaatttttaaaatgcctagaagacaatatttagtcttggattatctatctgctaagacctccaccaatttcattaaaccaaattgaattattctattcttgggattctgtggccacttcacctttgacaacaacctactttatgtagcagtctcaactgtttacatgaaccatagcaaaaaaatcagaatcaaatccatctccttttaatgtttgcagaaagatgcaaacaaaaccaggtaagtatggaacaatgtgtaagtgaggttatcacactttgatgtaaaaatttctattttgtgtatttttaaaataaatgcaaacactaaactag

SEQ ID NO: 76762 - DNA, 997 bp, Homo Sapiens
  misc_feature (98)..(98): n is a, c, g, or t
  misc_feature (171)..(171): n is a, c, g, or t
  misc_feature (189)..(189): n is a, c, g, or t
  misc_feature (320)..(320): n is a, c, g, or t
  misc_feature (844)..(861): n is a, c, g, or t
gggtctaattcacgtataatagcatgccaagggtggggatgcagctcagaaacccggtccttgttgggagagatttatgtagaaaagttgaggctttntaaaagtgggagaaagaagatcctcagtgaagcctgcacccaacccttggagtggcccagtgcatcccagagntggaagagatcctatatncaggtgaaggtggccaatgagtttctcagggctggggccaccttgtccatagcctccgtccacgctgcctggagcaggttgttagagagctctggttgttgggtcttcctcagctcccttttgcccctctntacctcttccactcatggaagcccctctactgcttatgaagattaagggtagtattttctaaggaagtggaaagaattaaactagaaatccacaacctcggaagaagtgtttcgagtttaacatgcgctgtttctgcttatgtggttccttctctagagctgctttcccatggctttcaaaacatcaggttattgtggggcttcaggtgtaaggtcctggaagttcagcaaagtttcgtggacaagacatgggcacagagagtagaagcagaaataaatggttctatgttttcaacttccagggttggggcaggccagagcaaggcggtctcatcgaggtgggtgctacctgtgtgtgtgtagatgagtgtgctgaaggtggggagggcagcacacagcagctcatggcagagccgcctcctaggtcttggcaaagaggcaagctgacgatagacatctacctatattgttaagaaaggggtcggggggatcagccaaggtccatcattgcttttttgccgcgnnnnnnnnnnnnnnnnnnatagattgtcagctgtaagtgaaactcctagtgaaaaagaggggagccctgtgttaggagtccccataaacatgtactgtaattctttgtatatagaaaaaaaatttactgtaaagtaaagtttaactttactcat

SEQ ID NO: 76763 - DNA, 1429 bp, Homo Sapiens
aatacgtctaggtacgaggcctgggtggcgaattcggcacgagggcccccgcggcggccgcgctcttcgcctggggtgcaaatagctatgggcaacttggcctcggccataaggaagatgtgctgttgccccagcaactgaatgacttctgtaaacccaggagtgtcaggaggatcacaggaggagggggccactctgcagttgtcacagatggaggagacctctttgtttgtggcctgaacaaagatgggcaactggggcttggtcacacagaggatatcccatattttaccccctgcaaatccctctttggctgtcccatccaacaggtggcctgtggctgggattttacgattatgctcacagaaaatggtcaagttctatcatgtggatccaactcctttggccagttaggagttcctcatggacctcgaagatgtgtggttccccaggccattgagctccataaagagaaggttgtttgtattgctgctggactgaggcatgcagtagctgctacagcgagtggcatcgtgttccagtgggggactggtttggcatcatgtggacgacggttgtgccctgggcagactcttccattgtttttcacagcaaaggaaccaagcagagtgacaggtctagagaattctaaagcaatgtgtgttcttgctggctcagaccactcagcttcattaacagatgcaggagaggtgtatgtttggggaagcaacaagcatgggcaactggctaatgaggctgctttccttcctgtgccccagaaaatagaagcacattgtttccagaatgaaaaggtcactgccatctggagtggatggacacacctggttgctcagacagaaactggcaagatgtttacctggggccgagcagactatggtcagctagggaggaagttggagacttatgaaggctggaaactagaaaagcaagattcatttctcccctgttcaagaccaccgaacagcatgccttcatctccgcattgcttaactggagcaactgaggtctcttgtggctcagagcataatttggcaataattggtggagtgtgttactcttggggctggaatgagcatggcatgtgcggagatggcactgaagccaacgtctgggccccaaagccggtgcaggctctgctgtcatcgtcaggactccttgtgggctgtggggctggccactccttggccctctgccagctgccagctcaccctgcattggtccaggaccccaaggtcacctacctttccccagatgccatcgaggacactgaatctcaggaagccatggacaaagagagaaactggaaggaaagacaatcagaaacttcaacccaaagccaatctgactggtccagaaatgggggactgtgatagagaatctttaataaagtggcttttcacaccaaaaa

SEQ ID NO: 76764 - DNA, 976 bp, Homo Sapiens
  misc_feature (709)..(709): n is a, c, g, or t
  misc_feature (866)..(874): n is a, c, g, or t
gggggcgctcgtccctcatcgtgcaccagatcgtgcacaccggggagaagccctacgtgtgcggcgagtgcggcaaggccttcagccagagcgcctacctcatcgagcaccagcggatccacaccggcgagaagccgtacaggtgcggccagtgcgggaagtccttcatcaagaactcctccctcactgtgcaccagcggatccacacgggcgagaagccctaccgatgcgccgagtgcgggaagaccttcagccgcaacacgaacctgacgcgccacctgcggattcacacctgagcgcctctgtgcagggctctcactggcggtgcccaggacggacgccagatggctgcgcgctttgtcagcagtgctgtgagaagttctcccctggggtggggactcggggtcaggggagctcaggaatgtggtgttgtggaggggctggctgatcacacatgccccctccttactgagcctcagaaagcaagcccctcggtgtctgacgtatctggggacacttcaaggttcactgtagctgagccatggccgctggtaacagacatcagggttccagactagccctcttgagtaactgtcctagagctgggacaggtcacgcctgcctccacatctctgtttcttcagcgggaaagtggagctggtgaaggggagggaagaaacatctccctctttgtcagatacatcctggnagtccagatgcagcttgtcaccatctgcattttctccgtgggttgggagcgtgagggccttcctatccctccacccaccgtttccctgcagtgcacgctggcagccaccaagctaggaagtggcaggagtttgccggttgtttgtgaggggaaaaannnnnnnnncagagttagcaaataacagtaactactgctttgaatgccaaagtttcttagagtggtctgttacgttttttaaaaataaaacttttaattaagggaaaaaaa

SEQ ID NO: 76765 - DNA, 1176 bp, Homo Sapiens
  misc_feature (965)..(965): n is a, c, g, or t
  misc_feature (969)..(997): n is a, c, g, or t
  misc_feature (1073)..(1073): n is a, c, g, or t
  misc_feature (1096)..(1097): n is a, c, g, or t
gcaggtcgagctgggtttaaatcggcacgaggcgccgcctcggcggtgcggcatagcccggctcggctgtaaagcagtctcaagcctgccgcagggagaagatggcggtcgccgtaagaactttgcaggaacagctggaaaaggccaaagagagtcttaagaacgtggatgagaacattcgcaagctcaccgggcgggatccgaatgacgtgaggcccatccaagccagattgctggccctttctggtcctggtggaggtagaggacgtggtagtttattactgaggcgtggattctcagatagtggaggaggacccccagccaaacagagagaccttgaaggggcagtcagtaggctgggcggggagcgtcggaccagaagagaatcacgccaggaaagcgacccggaggatgatgatgttaaaaagccagcattgcagtcttcagttgtagctacctccaaagagcgcacacgtagagaccttatccaggatcaaaatatggatgaaaagggaaagcaaaggaaccggcgaatatttggcttgttgatgggtacccttcaaaaatttaaacaagaatccactgttgctactgaaaggcaaaagcggcgccaggaaattgaacaaaaacttgaagttcaggcagaagaagagagaaagcaggttgaaaatgaaaggagagaactgtttgaagagaggcgtgctaaacagacagaactgcggcttttggaacagaaagttgagcttgcgcagctgcaagaagaatggaatgaacataatgccaaaataattaaatatataagaactaagacaaagccccatttgttttatattcctggaagaatgtgtccagctacccaaaaactaatagaagagtcacagagaaaaatgaacgctttatttgaaggtagacgcatcgaatttgcagaacaaataaataaaatggaggctaggccctagaagacnatcnnnnnnnnnnnnnnnnnnnnnnnnnnnnnaaaatggtcggccggcctcggcccctccgagaagcttttcctagaccatttcgttttgcgcgcgccgggccccagntagggtaaagtgaaacatggggnncttaaagctgtttttccttaggaaaaaatccctgggtccaatggaacctaaggtggcctttggagatttcctcccacca

SEQ ID NO: 76766 - DNA, 997 bp, Homo Sapiens
  misc_feature (917)..(917): n is a, c, g, or t
atacggctaggtacgaggctgggtgttgaatcggcacgagggactagagtcgttgggcccggcgcgacccgcaggagcgtagagagcgcgggactagagtgcagagctccgggacgtggatcggagccggcgcgatgggcggagagcaggaggaggagcggttcgacggcatgttgctggccatggctcagcagcacgagggcggcgtgcaggagcttgtgaacaccttcttcagcttccttcgacgcaaaacagactttttcattggaggagaagaagggatggcagagaagcttatcacacagactttcagccaccacaatcagctggcacagaagacccggcgggagaagagagcccggcaggaggccgagcggcgggagaaggcggagcgggcggccagactggccaaggaagccaagtcagagacctcagggccccagatcaaggagctaactgatgaagaggcagagaggctgcagctagagattgaccagaaaaaggatgcagagaatcatgaggcccagctcaagaacggcagccttgactccccagggaagcaggatactgaggaagatgaggaggaagatgagaaggacaaaggaaaactgaagcccaacctaggcaacggggcagacctgcccaattaccgctggacccagaccctgtcggagctggacctggcggtccctttctgtgtgaacttccggctgaaagggaaggacatggtggtggacatccagcggcggcacctccgggtggggctcaaggggcagccagcgatcattgatggggagctctacaatgaagtgaaggtggaggagagctcgtggctcattgaggacggcaaggtggtgactgtgcatctggagaaaagatcataaatggagtgggtggagcccgcttggtgtcccagntgacccctgagatcaacacccaagaaagattacccctggagaaattcccaaagctgtcagaacctgggaccagtgagacc

SEQ ID NO: 76767 - DNA, 715 bp, Homo Sapiens
ggctaggtacgaggctgggtggtgaatcggcacgaggggctccgctgcggaaggcggacgactagagtcgttgggcccggcgcgacccgcaggagcgtagagagcgcgggactagagtgcagagctccgggacgtggatcggagccggcgcgatgggcggagagcaggaggaggagcggttcgacggcatgttgctggccatggctcagcagcacgagggcggcgtgcaggagcttgtgaacaccttcttcagcttccttcgacgcaaaacagactttttcattggaggagaagaagggatggcagagaagcttatcacacagactttcagccaccacaatcagctggcacagaagaccctggcgggagaagatgatgcccggcaggaggccgagcggctgggagaaggctggagcgggcggccagactggccaaggaagccaagtcagagacctcagggccccagatcaaggagctaactgatgaagaggcagagaggctgcagctagagattgaccagaaaacaggatgcagagaatcatgaggcccagctcaagaacggagccttgactccccaggaagcaggatactgaggaagatgaggaggaagatgagaaggaccaaggaaaactgaagccccaactaggcatgggcagactgccaattacgtggacccagacctgtcgagctggactggggccttcgtgtgacttcg

SEQ ID NO: 76768 - DNA, 1784 bp, Homo Sapiens
  misc_feature (1435)..(1486): n is a, c, g, or t
  misc_feature (1499)..(1721): n is a, c, g, or t
tcctaggtagcgaggcctgggtggcgatttcggcacgagggtcgttgggcccggcgcgacccgcaggagcgtagagagcgcgggactagagtgcagagctccgggacgtggatcggagccggcgcgatgggcggagagcaggaggaggagcggttcgacggcatgttgctggccatggctcagcagcacgagggcggcgtgcaggagcttgtgaacaccttcttcagcttccttcgacgcaaaacagactttttcattggaggagaagaagggatggcagagaagcttatcacacagactttcagccaccacaatcagctggcacagaagacccggcgggagaagagagcccggcaggaggccgagcggcgggagaaggcggagcgggcggccagactggccaaggaagccaagtcagagacctcagggccccagatcaaggagctaactgatgaagaggcagagaggctgcagctagagattgaccagaaaaaggatgcagagaatcatgaggcccagctcaagaacggcagccttgactccccagggaagcaggatactgaggaagatgaggaggaagatgagaaggacaaaggaaaactgaagcccaacctaggcaacggggcagacctgcccaattaccgctggacccagaccctgtcggagctggacctggcggtccctttctgtgtgaacttccggctgaaagggaaggacatggtggtggacatccagcggcggcacctccgggtggggctcaaggggcagccagcgatcattgatggggagctctacaatgaagtgaaggtggaggagagctcgtggctcattgaggacggcaaggtggtgactgtgcatctggagaagatcaataagatggagtggtggagccgcttggtgtccagtgaccctgagatcaacaccaagaagattaaccctgagaattccaagctgtcagacctggacagtgagactcgcagcatggtggaaaagatgatgtatgaccagcgacagaagtccatggggctgccaacttcagacgaacagaagaaacaggagattctgaagaagttcatggatcaacatccggagatggatttttccaaggctaaattcaactagcccctgttttttcctccctgaactcttggggctgagctgcaaccacccaactttctttcccactcttctctgggacttgtgggcctcagggcttggggcaggcatgggactggcccaggcacacaggtcccggggcatcaggagaaaggctgggtcttgggaccttgtcctccccagttggcctactgttacacattaaaacgatttgcccagctccttctgtgtcctctcttgcctctggcctttctctggggcacaggcctcttacggctgctgctgggaactgggagtttggcttctagcccagattctnnnnnnnnnnnnnnnnnnnnnnnnnnnnnnnnnnnnnnnnnnnnnnnnnnnntacttaaagattnnnnnnnnnnnnnnnnnnnnnnnnnnnnnnnnnnnnnnnnnnnnnnnnnnnnnnnnnnnnnnnnnnnnnnnnnnnnnnnnnnnnnnnnnnnnnnnnnnnnnnnnnnnnnnnnnnnnnnnnnnnnnnnnnnnnnnnnnnnnnnnnnnnnnnnnnnnnnnnnnnnnnnnnnnnnnnnnnnnnnnnnnnnnnnnnnnnnnnnnnnnnnnnnnnnnnnnnnnnnnnntttgagccggattgctacttcactcagctggtgacaaaactcctctcaaaataatattaccgg

SEQ ID NO: 76769 - DNA, 663 bp, Homo Sapiens
  misc_feature (529)..(547): n is a, c, g, or t
agtgtggtcagggacctcaagggttatcctgatggagtcaagagtatcgtggtcaagggctacaacatctggactgggggtccggatgcctgtctgcggtgctgggaccagaggaccatcatgaaacctctggagtaccaattcaagtctcagataatgagcctgtcccacagcccccaggaggactgggtgctgctgggcatggccaatggccagcagtggctgcaaagcaccagcgggagccagcggcacatggtggggcaaaaagacagcgtcatcctgagcgtcaagttctccccctttggccagtggtgggcaagcgttggaatggacgacttccttggcgtctacagcatgccggcggggacaaaagtgttcgaggtgcctgagatgtctccagtcacgtgctgtgacgtctcttccaacaaccgcctcgttgtcacaggctccggggagcacgcctccgtgtaccagatcacctactgaggggcctcgctgctgtcatcccactccggctcctcttttcatnnnnnnnnnnnnnnnnnnnaacaagggggacatggtggagggaagcgggaaggctcttctgtggcatcgcacgatctagtctgtggtgtagactggtcgccatcacgtgtaataaagcacccgggaaaggcaaaa

SEQ ID NO: 76770 - DNA, 772 bp, Homo Sapiens
  misc_feature (30)..(30): n is a, c, g, or t
  misc_feature (44)..(44): n is a, c, g, or t
gagagaaactggaaaattaaattgtatttntgccagaagactcntacttgcatgtgtctcagggtcttcagtttttctataagtttccatatccaaagttcagaattcatgtgaaatacttctttggggcaaaagtccttcattcctggtatttattggattggaaatctgtagcaagatgctgtttaaaattaccatattgtttttttatcttatacttagctctctggctattgaacttccttttcttgtttgaagttagcttcaaatttgctcctatgctaaattacctgtaaatattctggataggaactacttgaaatagtaatttgttaaaagatatgacaaaatgaaaatgcttaaactacagaaatttaaaaatgccataacaatcttgcaagactaactttaaaatatactttaaatgattattatgattttggtggtaacgatcccccacacacaaccactatgaagaaataatgccgcatttttcccccattgtaccaaaaagataaaaaaatggtaaacactgatcaaggtattttgtattgtcaaggcatgcatattctaaagaattaaatgctaacttaacagcactggctttctggctggtcaactatatgaaaccttgttcattcctccgagtactgtaatgttcacacttgtacaatcttccctgtcatgactttaagttctacttttcattaaccatggcctgatattagttcttagagcttcttgtggcaaaaataaaatgatttaattctga

SEQ ID NO: 76771 - DNA, 1484 bp, Homo Sapiens
  misc_feature (1081)..(1097): n is a, c, g, or t
cagtcgacggtaccggacatatgcccgggaattcggccattacggccgggggccggtgttgcagggagtgagggcagctggagtgcgttctgccgaagcttgtggttgcacgcccatcgtcttaggggctaccttccgtgaccatgtccaagtctctgaagaagttggtggaggagagccgggagaagaaccagcccgaggtggacatgagtgaccggggcatctccaacatgctggatgtcaacggcctctttaccttatcccatatcacacaactggtcctcagccataacaagctaacaatggtgccaccgaacatcgcagaactgaagaatttggaggtgctcaacttttttaataaccaaatcgaggagctgcccacacagatcagtagccttcagaaactcaaacacctgaaccttggcatgaacaggctgaacactttgccacgaggcttcggctccctgccagctcttgaggttctggacttgacttacaacaacttgagcgaaaattctcttcctggaaacttcttctacctgaccaccctgcgtgcactctatctaagtgacaacgattttgaaatcctgccgccagatattgggaagctcacaaagttgcagatactcagccttagggataacgacctgatctcgctgcctaaggaaatcggggagcttacccagcttaaagagctccacattcaggggaaccgcctcaccgttctgcccccagaactaggaaacttggatttaactggccagaagcaggtattcaaagcagagaacaatccctgggtgacccccattgcagaccagttccagcttggcgtgtcccatgtttttgagtatatccgttctgagacatacaaatacctctacggcagacacatgcaggccaacccagaaccaccgaagaagaataatgacaaatcgaaaaagatcagccggaaacccctggcagccaagaacagataaggaagggattggcatcggctggccttccagcaccttctctctccaacacttcattctctcttgccctgtctctcaaataaaccccaatgctgcgtgtgaggccnnnnnnnnnnnnnnnnncactctctttctaatgcttcccaccttaccttttagattcttttgctaggtgggagattgttataaggtctttaaaccatttccatttgtttctttaacattaccaaaagcagggaacaaagctcttattcaactgcgaattccatagtgggctctggcttttcttgaatagatatcacaaggttgcttattatcaaaagaataattaaaatcatgtaaccatttaaatgtcactgttaacacttttcactctttctgttgattcacctaactcattattttgctttattaaaagtcttccttcaccaccgagatatgctaatttaacttacaaatgattttaataaaatcttgagtttgtatcacatgttacttattgactcagaa

SEQ ID NO: 76772 - DNA, 766 bp, Homo Sapiens
  misc_feature (619)..(619): n is a, c, g, or t
  misc_feature (644)..(644): n is a, c, g, or t
  misc_feature (672)..(672): n is a, c, g, or t
  misc_feature (698)..(698): n is a, c, g, or t
ggggagacagggcgtgttcgctgttcagtgccggtgttgcagggagtgagggcagctggagtgcgttctgccgaagcttgtggttgcacgcccatcgtcttaggggctaccttccgtgttaccttatcccatatcacacaactggtcctcagccataacaagctaacaatggtgccaccgaacatcgcagaactgaagaatttggaggtgctcaacttttttaataaccaaatcgaggagctgcccacacagatcagtagccttcagaaactcaaacacctgaaccttggcatgaacaggctgaacactttgccacgaggcttcggctccctgccagctcttgaggttctggacttgacgtacaacaacttgagcgaaaattctcttcctggaaacttcttctacctgaccaccctgcgtgcactctatctaagtgacaacgattttgaaatcctgccgccagatattgggaagctcacaaagttgcagatactcagccttagggataacgacctgatctcgctgcctaaggaaatcggggagcttacccagcttaaagagctccacattcaggggaaccgcctcaccgttctgccccccagaactaggaaaacttggnattttaactggccagaaagcaggtnattcaaagcagaagaacaatcccctggngtgaccccccatttgcagaccagttnccagccttgggcgtggtccccatggttttttggaggtatatccccgtttctggaggacataacaaaac

SEQ ID NO: 76773 - DNA, 975 bp, Homo Sapiens
  misc_feature (645)..(645): n is a, c, g, or t
  misc_feature (650)..(827): n is a, c, g, or t
actattttaaaatctttattcaatcagatccatgcttatttacattacctttcatttagaattaaaatatatcaatctgtagtttaaatcatactttcagccctttacaaaatatgtgattaaagttttcatggtttaaaatggacctagaatatggaaaattggattcactttaatgaaaatgaaaaattttgatacactagaacataaatgtatacgtactaaacatacagtattaaaacaagataaaacatctacagttttcttttttcttctattttctaaatattataaatcatatacttttaataagcattcaaataaaactctcaataaatgccaactgaagagatggagaaaaaaaatttcctgaacattcttttcacttacttcactacaaacttcatgtttcctaggtcagaagttatccacatttagaatatcttaagtcacaacatagatatatttggtacattccacatgctaaacactgtacaactggcaattctcaaaaaataggtaaaagaaatgtaagaaatggtagactcagtttagcctcccaagaattggaaggacatctacagtctgtgcttaattgtctataaatgaccaaacaaccttccctttgtcctcgtgccgaattcntggtnnnnnnnnnnnnnnnnnnnnnnnnnnnnnnnnnnnnnnnnnnnnnnnnnnnnnnnnnnnnnnnnnnnnnnnnnnnnnnnnnnnnnnnnnnnnnnnnnnnnnnnnnnnnnnnnnnnnnnnnnnnnnnnnnnnnnnnnnnnnnnnnnnnnnnnnnnnnnnnnnnnnnnnnnnnnnnnnnngtttcagtcgggaactgtcggcaatggatatgatcggcaccgccgggaaagggttgctatggcgtctccatccgccatgatcgtggctgtcttggtgcggaggtatatcatcaaggtatcgtacaaatcaggaattagaaaattgcaa

SEQ ID NO: 76774 - DNA, 741 bp, Homo Sapiens
gttttcagcacagaaatgactctttagacaaagtttaacccaatgatggtgttgcttctaggatatacactttaaaagaactcactgtcccagtggtggtcattgatggcctttagtaaattggagctgcttaatcatattgatatctaatttcttttaaccacaatgaattgtccttaattaccaacagtgaagcactacaggaggcaactgtggcattgcttccttaaccagctcatggtgtgtgaatgttataaaattgtcactcagatatattttttaaatgtaatgttatataagatgatcatgtgatgtgtacaaactatggtgaaaagtgccagtggtagtaactgtgtaaagtttctaattcacaacattaattcctttaaaatacacagccttctgcctctgtatttggagttgtcagtacaactcatcaaagaaaactgcctaatataaaaatcatatatatggtaataatttccctcttttgtagtctgcacaagatccataaaagattgtatttttattactatttaaacaagtgattaaatttagtctgcacagtgagcaagggttcacatgcattcttttatactgctggattttgttgtgcatcatttaaaacattttgtatgtttcttcttatctgtgtatacagtatgttcttgaatgatgttcatttgtcaggagaactgtgagaaataaactatgtggatactgtctgtttatattaaaaaa

SEQ ID NO: 76775 - DNA, 824 bp, Homo Sapiens
ttaggacccagctgtttttctcccattattctttgccccagtcaacagcatctagtgtctgagcggcacagacgagatctcgatcgaaggcgagatggcggacgtgctagatcttcacgaggctgggggcgaagatttcgccatggatgaggatggggacgagagcattcacaaactgaaagaaaaagcgaagaaacggaagggtcgcggctttggctccgaagaggggtcccgagcgcggatgcgtgaggattatgacagcgtggagcaggatggcgatgaacccggaccacaacgctctgttgaaggctggattctctttgtaactggagtccatgaggaagccaccgaagaagacatacacgacaaattcgcagaatatggggaaattaaaaacattcatctcaacctcgacaggcgaacaggatatctgaaggggtatactctagttgaatatgaaacatacaaggaagcccaggctgctatggagggactcaatggccaggatttgatgggacagcccatcagcgttgactggtgttttgttcggggtccaccaaaaggcaagaggagaggtggccgaagacgcagcagaagtccagaccggagacgtcgctgacaggtcctctgttgtccaggtgttctcttcaagattccatttgaccatgcagccttggacaaataggactggggtggaacttgctgtgtttatatttaatctcttaccgtatatgcgtagtatttgagttgcgaataaatgttccatttttgttttctacatttaatgttactttcctgtcctaaaattgaaagttctaaagcat

SEQ ID NO: 76776 - DNA, 1815 bp, Homo Sapiens
cttgatctcacctctactgaggaatcatggggccaaaaccgacaatttccagaatccccgggctctggtcctcactggggtcaccccgtggcctgtgacaccagatcgttttctgcccacagctcatagatcgagcgtacaagggaatgcccatgaacatccggggcccgatgtggtcagtcctcctgaacactgaggaaatgaagttgaaaaaccccggaagataccagatcatgaaggagaagggcaagaggtcatctgagcacatccagcgcatcgaccgggacgtaagcgggacattaaggaagcatatattcttcagggatcgatacggaaccaagcagcgggaactactccacatcctcctggcatatgaggagtataacccggaggtgggctactgcagggacctgagccacatcgccgccttgttcctcctctatcttcctgaggaggatgcattctgggcactggtgcagctgctggccagtgagaggcactccctgcagggatttcacagcccaaatggcgggaccgtccaggggctccaagaccaacaggagcatgtggtagccacgtcacaacccaagaccatggggcatcaggacaagaaagatctatgtgggcagtgttccccgttaggctgcctcatccggatattgattgacgggatctctctcgggctcaccctgcgcctgtgggacgtgtatctggtagaaggcgaacaggcgttgatgccgataacaagaatcgcctttaaggttcagcagaagcgcctcacgaagacgtccaggtgtggcccgtgggcacgtttttgcaaccggttcgttgatacctgggccagggatgaggacactgtgctcaagcatcttagggcctctatgaagaaactaacaagaaagcagggggacctgcaacccccagccaaacccgagcaagggtcgtcggcatccaggcctgtgccggcttcacgtggcgggaagaccctctgcaagggggacaggcaggcccctccaggcccaccagcccggttcccgcggcccatttggtcagcttccccgccacgggcacctcgttcttccacaccctgtcctggtggggctgtccgggaagacacctaccctgtgggcactcagggtgtgcccagcccggccctggctcagggaggacctcagggttcctggagattcctgcagtggaactccatgccccgcctcccaacggacctggacgtagagggcccttggttccgccattatgatttcagacagagctgctgggtccgtgccatatcccaggaggaccagctggccccctgctggcaggctgaacaccctgcggagcgggtgagatcggctttcgctgcacccagcactgattccgaccagggcacccccttcagagctagggacgaacagcagtgtgctcccacctcagggccttgcctctgcggcctccacttggaaagttctcagttccctccaggcttctagaagcatctgggccagggctcatggctggataatttccctaggcttaacaacccaagcaagcttcgcatcctcgttttatttttggttaaacttatgaaaatgtattaagaaagagtgcagctcgagagagattcagagatggaacacaccagaccccagatcacaaagccaaccatgcccagcccctcccagcacccccagccccacgaccatcgttctgaattctgacgacaccgtgagcctgcctttgtacttcaaactcatggaaggataaccaccttcatgttttgaaataaatgtttcctgttgaaatgaaaaaaaa

SEQ ID NO: 76777 - DNA, 684 bp, Homo Sapiens
atgagctgctccgttgccacaggacgtgcaggctggtcgcagttcctgcctattcgtgcaagcgtcaccttgcagggagggaatctgaatctagggctgggactacccggagctcaaggctagggatgccctggtgacctgaaggaaggaaaaggttcagatcagagtttcgactctgagtgtccatccactctttcagtcctgggaagggagaccctgtcccagcttgatctcacctctactgaggaatcatggggccaaaaccgacaatttccagaatccccgggctctggtcctcactggggtcaccccgtggcctgtgacaccagatcgttttctgcccacagctcatagatcgagcgtacaagggaatgcccatgaacatccggggcccgatgtggtcagtcctcctgaacactgaggaaatgaagttgaaaaaccccggaagataccagatcatgaaggagaagggcaagaggtcatctgagcacatccagcgcatcgaccgggacgtaagcgggacattaaggaagcatatattcttcagggatcgatacggaaccaagcagcgggaactactccacattctcctggcatatgaggagtataacccgaggaagcctctccttcagaggaagcctctccagtcaccttgccctctccaatgacatgagtccttgtggg

SEQ ID NO: 76778 - DNA, 739 bp, Homo Sapiens
  misc_feature (19)..(19): n is a, c, g, or t
tgaccccagagtgtcccanacaacccggtctcatgcccactccccatcccctgcttcccaaaaattgcactgtgtgcagtttgcaacaaagaatcccgctggcatcctgtccttgggaaccctttctcattctccaagcctggtcagctgcctgcacaggcagaggtgccctcagcccaggttagcaacactcatagttttgccaattaccagtagacactagtggaaccatctaactggaacttcctctctccttccacttatttcctcaaacttgttgctttacactagacacatgcaaatgtatgttttaaacacaccaaaacagatcatgccaaatgagttgcctgtcaaaggctggagggcaggaggagggcctgggtttgggttctttcctcccagcctttggatggtgccttgggccccttagccccagcgccagggcctcccagctgaggccacaggacaagcacttttttatgatgtactaaaagccacagtatgtggcaactgcaaaaggatcaggaatttagggtatgatctcggtcacgtgtcccgggcgctgaggggaaaggaagcgggcatgattgtagacaatgagggggttctcttgatgtaatgaaatgcaattttatggtttggtgcaaaaactcctattttccagtaaattaactttatttctaaagcatattttgatttgccatcaagagcaataaagcattaaatcttatttttaaaa

SEQ ID NO: 76779 - DNA, 1046 bp, Homo Sapiens
  misc_feature (140)..(140): n is a, c, g, or t
  misc_feature (223)..(223): n is a, c, g, or t
  misc_feature (273)..(273): n is a, c, g, or t
ttcatataccttgggagagtagactttttgaaatgcaaccggcccccctggaacagtctgagcttgcatgagcagcaccattgagtgtgactgccctgtcacaggatgatgactccatgtcacagacagtggggtcgttntgtgcctggagtcttgcatcgcacatccccaacatttgtttttccataagcatcaccccatccgagttgctagctgtttcacntggggacactgtcgggatttccagtgtgtctggaagtgcatccgtagttntggatgatacacctgtagggcgtcccatcccctcataacctgggtgctgtcagccatcactctcctagtgaatcaactatcctgtacactgagtctcaacactgtcgcctgttgcatgagcaaggttcttttggccaagccgccccagacagccctctgagaacagagcctccttgtagctgcctcagacccaatctgcacattgtacagaacagcccaggtagggaggacagctgccccaggtcccataggactgcatgcctcaagcccacgtcatgcagagccactcagctcaccatgctcagggcacgtggttcacctgcattcccctcatgcaggtcctatcgtgtggaggacgtaccatctgacctctgcaggagagaaactcacggaagacagaaagaagctccgagactacggcatccggaatcgagacgaggtttccttcatcaaaaagctgaggcaaaagtgagcctccagacaggacaaccctcttcatcactggtggctgagctttttcccagcaggaatgggtcctcgaatcatcgtgcctctttcacagaaaggacgttgtggtggcctcaccccaggcatgcccaacaggaactgtcagcataaacctgggggccctcaggactaggacagggtgagccagtgctccctcctttcatgtacttggcctgagactgacctctccctaggtccaaatgccctagtcacatggcagacccacggcctggcccactgtataaaataaacctgtttgcttcttg

SEQ ID NO: 76780 - DNA, 1283 bp, Homo Sapiens
  misc_feature (855)..(968): n is a, c, g, or t
  misc_feature (976)..(995): n is a, c, g, or t
  misc_feature (1078)..(1087): n is a, c, g, or t
tatacggctaggtacgaggcctgggtgtgtgaattcggcacgaggcccggctgagaggggcggccctggaggagacggaggccgcgggtgggcccgaggcgcaagaggaagatgaggacgaagaagaggcgctgccgcactccgaggccatggacgtgttccaggagggtctggctatggtggtgcaggacccgctgctctgcgatctgccgatccaggttactctggaagaagtcaactcccaaatagccctagaatacggccaggcaatgacggtccgagtgtgcaagatggatggagaagtaatgcccgtggttgtagtgcagagtgccacagtcctggacctgaagaaggccatccagagatacgtgcagctcaagcaggagcgtgaagggggcattcagcacatcagctggtcctacgtgtggaggacgtaccatctgacctctgcaggagagaaactcacggaagacagaaagaagctccgagactacggcatccggaatcgagacgaggtttccttcatcaaaaagctgaggcaaaagtgagcctccagacaggacaaccctcttcatcactggtggctgagctttttcccagcaggaatgggtcctcgaatcatcgtgcctctttcacagaaaggacgttgtggtggcctcaccccaggcatgcccaacaggaactgtcagcataaacctgggggccctcaggactaggacagggtgagccagtgctccctcctttcatgtacttggcctgagactgacctctccctaggtccaaatgccctagtcacatggcagacccacggcctggcccactgtataaaataaacctgtttgcttcttagtttgnnnnnnnnnnnnnnnnnnnnnnnnnnnnnnnnnnnnnnnnnnnnnnnnnnnnnnnnnnnnnnnnnnnnnnnnnnnnnnnnnnnnnnnnnnnnnnnnnnnnnnnnnnnnnnnnnncactctgnnnnnnnnnnnnnnnnnnnnaaaaaaacttttcaaaccctcttcttgtgtgcggggcgccccccggcgcaaagaaaattttctaaaactttttctcggggagnnnnnnnnnntagaaaagggcatcgggccccaccccgtataaccacaggaagcgcgaaaacccaaaatgtttggtacaaatcccccaacaaaataaaacggggccgctggccgggaaccctttttttaggaaacacaccccagggcgtctttttgaagtataattcccggggctcctaaacaacgaggcgaccaaaagggggggcg

SEQ ID NO: 76781 - DNA, 853 bp, Homo Sapiens
gggggcctccctagtgcgggctggcagtgcgggcagagcccggctgagaggggcggccctggaggagacggaggccgcgggtgggcccgaggcgcaagaggaagatgaggacgaagaagaggcgctgccgcactccgaggccatggacgtgttccaggagggtctggctatggtggtgcaggacccgctgctctgcgatctgccgatccaggttactctggaagaagtcaactcccaaatagccctagaatacggccaggcaatgacggtccgagtgtgcaagatggatggagaagtaatgcccgtggttgtagtgcagagtgccacagtcctggacctgaagaaggccatccagagatacgtgcagctcaagcaggagcgtgaagggggcattcagcacatcagctggtcctacgtgtggaggacgtaccatctgacctctgcaggagagaaactcacggaagacagaaagaagctcccgagactacggcatccggaatcgagacgaggtttccttcatcaaaaaagctgaggcaaaagtgagcctccagacaggacaacccctcttcatcactgggtggctgagcttttttccccagcaggaatgggtccctccgaatcatcggggcctccttttcccagaaaggacctttttggtgggcttcccccccgggcatgccccaaccgtaacttggccgcataaaccctggggggccctcccgggacttaggaacggttggagaccatggcctcccctccctttcattggactttggccctgaaaactgacccccctccccttagggctcaaaatgccccttcagtcccatggggagaaccccaccgggcttgg

SEQ ID NO: 76782 - DNA, 712 bp, Homo Sapiens
gcacgaggcgagttccgctcccgtcccctcggaggagagcccactcccctgagagacggagggaagagaggagtgtgcccactgcctaccgcgtgagccgcagccctggggccagcaggaagcggacccgctccagaagtccccacgagaagaagaagaagaggcggtcccggtcgcggaccaagtccaaggccaggtctcagtcggtgtcacccagcaagcaggcagcgccccggcccgcggcccccgcggcccactcggcgcactcagccagcgtctcccctgtggagagtcggggctccagccaggagcgctccaggggagtctctcaggaaaaagaagcccagatctcttcagcaatcgtttcttccgtgcagagcaaaatcactcaggatctcatggccaaagtcagagcgatgcttgcagcttccaaaaacctgcaaaccagcgcttcctgagacggggccagcggaggcagagccgggaggctgcgtgggcttctgggcaggctcacgcagacgccggccacaccatccacctggccgcctccatggacccttggtggcttttgtaaattaatttttgatgacattttgagttttaagatttctgaccagcagtctcttacctgtatatttgtaaatatatcatgtttctgtgaaaatgtattatgaaataaaatgggaggaaacaccttttaaagctaaaaaaa

SEQ ID NO: 76783 - DNA, 765 bp, Homo Sapiens
  misc_feature (40)..(40): n is a, c, g, or t
  misc_feature (383)..(401): n is a, c, g, or t
  misc_feature (608)..(616): n is a, c, g, or t
tgatttccaaaacaaagaaatcccatcttacccaaattcntggagttgatgttgactgtggaattctaatgtgcttggctcttagggtatgactggtttccctggtgctgctggacggactgttcccccaggaccctctgtaagtaaatcactgtaaacgtgtcttcatttactctagccaaaaggcctggcttctgataggaaactggtaagaaactcttcatgaaaacacatcactaatattcgctattactctcctggtctgaagtcagcttttctgaaccattaaggtatttcatcacaagttatattttataatatcagtttaagaggcttttattcatgtgaacaccagtcccctttcaggggcatggtctttttgnnnnnnnnnnnnnnnnnnncgaacagttttagccacatatcagatatttctatatctaattatcctttatggctaacattctgccctccattgttaaggtataattgttcctgaatttaaaggtggtttggcctctaatttaattctgattcagactctcctgtcaggactcaagaaaatttaattaattaccaaggattaagtcttctggttaaggtttctgggnnnnnnnnntagcaaagatgttgatttcttggaatccttttacaggttcataacagaaaaatcttcattccctgtaggcatttaattaaacctagttgagaagtgtgtgggattcctcaattatgaacaaaacacgtatattggctttctttaaaaaa

SEQ ID NO: 76784 - DNA, 982 bp, Homo Sapiens
  misc_feature (62)..(62): n is a, c, g, or t
  misc_feature (103)..(103): n is a, c, g, or t
  misc_feature (118)..(118): n is a, c, g, or t
  misc_feature (179)..(187): n is a, c, g, or t
  misc_feature (680)..(720): n is a, c, g, or t
taattgcaattatctcccactgttatcaagcttattgtgctgacatttgagattagatatgnagagtacctttgtcatgtacacatctattatcagctttctntgctccagagtcaanaaataatgcgtattgattcagctgctaatggctcattagcatcatccttgatgagacattnnnnnnnnnctgatagcatctttccaggataactaataaagcagacatgctaagcctataaatacatcagcactgcagcacacgttaaggttgccacggacaaggatcacacaatagagaacactgtagtaacatttcggtctgctcacaagacccagaacattgatcagtttttgttgttggtttattatttttctgttaaaaaattgtgaaaagtttgttttagctagatgatattttaatagctgcgagtgctttggaactataaagatgtcactacttaacacatataccttatgttttgttttgttttgttttacactcagtataaatcaggagaagttagccaaccatctagcatttagaatcctcttttttattgtcttctaaggatatggatgttcccataacagcaacaaaacagcaacaaaaacatttcataaatatcacttgatagactgtaagcacctgcttaactttgtgtcccaaatatttagtgtgnnnnnnnnnnnnnnnnnnnnnnnnnnnnnnnnnnnnnnnnntcaacaaataaagcaaaatataacatgcatttcacattttgtctttccctgttacgattttaatagcagaactgtatgacaagtttaggtgatcctagcatatgttaaattcaaattaatgtaaaacagattaacaacaacaaagaaactgtctatttgagtgaagtcatgctttctattataataacttggcttcggttatccatcaaatgcacacttatactgttatctgattgtttataataaagaatactgtactttt

SEQ ID NO: 76785 - DNA, 599 bp, Homo Sapiens
gcacgaggagaaaggagaatttttgagacttgggttttcttaatgccagtgtgaatttgcagatgttttcagaaaatcaagtcacagtaacaatttgccacttttttctattataaatcttcttacttaaattttgaatatttagtttttctcagttacccatttgtgtgtgtgtgattccacttagaaattcttaaaaccagatttttctttcattccgtttggatgtctacattccttatcaaaggatataaatactgtgtatgcttttgaattttatttttaggaaaattctgaagccagctatcacaggtttgttagctaataatagtattttcttttagttgagttaggtttttccccatctcctgtagagcgaatttacatattgtattgggtaagtgttcactacttttcctgattaagggatctgtgctggggaacaaagcttttgcagtaccttatattgtagttaaaattttatttaacatatccttcagtgagctcatttcacactgtagcctcttccttaaaatttgtggtgctcctgtaacagtaagaactaattttgaaataaaagacatctcctaatgctgtgc

SEQ ID NO: 76786 - DNA, 1066 bp, Homo Sapiens
  misc_feature (25)..(25): n is a, c, g, or t
  misc_feature (29)..(29): n is a, c, g, or t
  misc_feature (74)..(74): n is a, c, g, or t
  misc_feature (79)..(79): n is a, c, g, or t
  misc_feature (106)..(106): n is a, c, g, or t
  misc_feature (128)..(187): n is a, c, g, or t
  misc_feature (210)..(359): n is a, c, g, or t
atcgcagtggaagcccatggggcanggcncaggacacagtgagcatacaatagacattagctgctgtggtgtcntgatntcaagcccagtgcagatgcatctgacntacgaaacttcagtgacacctnnnnnnnnnnnnnnnnnnnnnnnnnnnnnnnnnnnnnnnnnnnnnnnnnnnnnnnnnnnnttgcctgcaggccagaagcaagnnnnnnnnnnnnnnnnnnnnnnnnnnnnnnnnnnnnnnnnnnnnnnnnnnnnnnnnnnnnnnnnnnnnnnnnnnnnnnnnnnnnnnnnnnnnnnnnnnnnnnnnnnnnnnnnnnnnnnnnnnnnnnnnnnnnnnnnnnnnnnnnnnnnnntgagtcattttgattctgtaactggcttcctctcggcgggcaggctcacaccctccacccccagctggagatggaaggaggatgctcaccgcccattcctcatgcaggccatcgatggaaatgtcagacagtgcgagtccacgcctgaacacttctggggtccgctctgggactgacactggcagatccatcggtgagctcccgcctgccacctctgggcctgcattgcggtgatagggccaagggcctgggccttcaattctccagacttgccaaaatgctcagcgcaggcctcgtcggcaactgcagacaagcagaggcagcacctgggctctgcctgtgcctggcacagtgaagcgagggtgggggcaggaatgagggtcctctccatgcaaggggggaagatagaagaacaaaatttcaccctaatgtagtgtctttagaccgtgcaatgttgtgctcctgttagtctgatatcaggggcttgcagcctggcaaaggaaaaaaaacaggctgaggcacatgatagaagacaggcagggatgccacaatcataaccatggcaaagaccaggatcagaaaggcccaccatctctgaccccaaatccctgggcagatggttccagaactcagaattttcccagttgtagaaagatggggccaggtgcagtggctcacgcctgtaatcccagcattttgggagtaca

SEQ ID NO: 76787 - DNA, 728 bp, Homo Sapiens
  misc_feature (146)..(146): n is a, c, g, or t
  misc_feature (635)..(647): n is a, c, g, or t
gcactggcgcgtgaacccctctcggacaccggggggcaggcaccgcgtatcagaggagcagtgccctcacacctggggcccctttccaccctatgcctcaggcacggggtatgtgctgtcagcgtctgctgtgcagctcattctcnaaggtggccagccgggcaccccttctcccattagaggatgtctttgtgggggtaagtgcccgacgaggaggcctcgccccaacacagtgtgtcaagctggctggtgccacccactacccgctagaccggtgctgctatgggaaattcctgctgacgtcccacaggctggacccctggaagatgcaggaagcctggaagctggtgggtggctctgacggggaaaggactgcgcccttttgctcctggttccagggagtcctgggcatcctgcggtgtcgagcaatagcctggcttcagagctgagagtgcctggggccacaggaaaggcaggaacaggaccttctctctcccaggcccaacgcaggggccctcactggctgcagctgatctgtttccttataccagatcctcagtctcactaaagacagcgatatgggagacacccaggggcctggcccgccagcccaaaagatggtcatcgggaagagnnnnnnnnnnnnntgctgcagttgttctctcaagctagggcagaagaggggtgtcaagctcctcaataaacttgtctccacttcttcaaaatac

SEQ ID NO: 76788 - DNA, 813 bp, Homo Sapiens
gaggagtttattaggcgaccttggtctacactctcaggagaggagtgcaccagaaataaagccggtgccctggagtccacctggagccaggcgcggggcgctgcacttaggttggcagcagcccgttagcgcgcagctccagcagcggggacagcgtgtagcgcaggcggcgcagcgtcgtctccgaggtgaggctccagagccacgcggagacggcgccggggtccaacagcaccgtccagagcagcgacagccccaggaagaggagcggcagcgtcagcagcgcctgatggccagcgcgcgaggaccgccgaacagccgcgtctctcggtccgccctggccatctcctccatgatgcgactcggtgctgtactgcactccgcgaagctgcccgtcacacagttcccggccactctgccaggcgtccagctcctccgcagcctccatcaccttcacctgcacctcctgcaggactacggtctgctcctggaatatggcccaggcctccgctgtctgcagcgcgtcctgctgcagcttctcctcctgcaaggcgcatttggtctccgccagctccagttcattctgcagcgtcaccaattgggctgcgagttgctgctccgtgctcttctggctctgcagttcccctccgtagtagaagagctgactcgacagctcctcccactgctcctgcagctgcctgctgtgctgctcctgcggacggggtcctggggcggtgccgacctctccgccggtcctaacttcaaccgaaaacacgggagtcacggaacccacataacggaacgaacaagaaa

SEQ ID NO: 76789 - DNA, 539 bp, Homo Sapiens
gaggcctgggccatattccaggagcagaccgtagtcctgcaggtgcggccccactcagacgccaaggtgcctcccgcctctcctcccccagctttggggcggtgtgacgggcagcttcgcggagtgcagtacagcaccgagtcgctcatggaggagatggccagggcggaccgagagacgcggctgttcggcggccctcgcgcgctggccatcaggcggtgcgtgctgggcgcgctgcaggtgctgctgacgctgccgctcctcttcctggggctgtcgctgctctggacggtgctgttggaccccggcgccgtctccgcgtggctctggagcctcacctcggagacgacgctgcgccgcctgcgctacacgctgtccccgctgctggagctgcgcgctaacgggcttctgccaacctaagtgcagcgccccgcgcctggctccaggtggactccagggcacctggctttatttctggtgcactcctctcctgagagtgtagaccaaggttgcctaataaactcaagggatgaaaaaaa

SEQ ID NO: 76790 - DNA, 456 bp, Homo Sapiens
gaggcctgggccatattccaggagcagaccgtagtcctgcaggtgtgacgggcagcttcgcagagtgcagtacagcaccgagtcgctcatggaggagatggccagggcggaccgagagacgcggctgttcggcggtcctcgcgcgctggccatcaggcgctgctgacgctgccgctcctcttcctggggctgtcgctgctctggacggtgctgttggaccccggcgccgtctccgcgtggctctggagcctcacctcggagacgacgctgcgccgcctgcgctacacgctgtccccgctgctggagctgcgcgctaacgggctgctgccaacctaagtgcagcgccccgcgcctggctccaggtggactccagggcaccggctttatttctggtgcactcctctcctgagagtgtagaccaaggtcgcctaataaactcctcaagggatgaaaaaa

SEQ ID NO: 76791 - DNA, 879 bp, Homo Sapiens
  misc_feature (47)..(58): n is a, c, g, or t
ccacagctccctatctttcttgcctgcctccacccccctgttcaggnnnnnnnnnnnnttgagccttaaagtgacagctgattttttaattgctgaattttgtgaaattttactttttccaagtgtttccaactttaaaaagagaagtgaagacaaataggttggaatggtgaagacaaatggattggaatttcacaggctgtgaataattccttaggatctggcaaaccgtgaagtcttatttgaagaccttatctcctgagagttcttttggagtaggaaaaagaaccctatttgaaatagaccgtttttctcttgtttttaatctgtttaatatttctgatttttaagcagctttcaaaacaagtgtggtggaaaaaaagaaatagtagtaggaagatgtttagggcagcagaactctgggtctaaataagtacatgttcccacttgttgccgatttttgagagtactagggccatctttctcaattttgtattatttgtgtgcatgtttatatcaaagatgcccattttgttaaaatgctatttcctttattaccttggaaactgactcagcctcatgttgctcctaattagtgtttaaggctcccatgagttgcagataaaatgatttattttaacaagtagaaggaggtgattcaccttttggattgtaaatatatgaaaatgtctacaaggtctttatctgctttctgtcagcatttatattaaatgataaattaatgaggaacgtgtgtattttgtaaatgagagtgtgccatcttattctaatcttgagattactttcttacacgtttttaatggagggggcttttttaggtgaaaaataaagaaatggctaatctgcatgagcaaacac

SEQ ID NO: 76792 - DNA, 716 bp, Homo Sapiens
gaaaaggatttaaaagtctttatttcctctgaaaacttactggtaaagtatacaatttatgaataatcatatattcatgctttttgaaatatatctgaataaaagacaaattattcaatatcaatagcagtaaataacttatttgcaagaaaattattacaattcctactgtaaagaatcaccaaccactatttagcaattaaatttcaacacattttttttggaactctttaggactttagacaaaggctaccaaggctgacaatccaggtaactatggcagtgacagaagtcaatcattaatactgccattattttagacaaagggctgacaatctcagaaactagttctagaaattatcatcaatgtggccattttactatggacaaataaatatgggagatagggaacttgttactccattttcctatagaaaaatatataaattgaccttttatatatacacaggtatgtatacacatacagtatatgtttttctgagcaggcacaccaactaggaaaaaatacaatagcaacataggattaggtattgcttctcatactgatcactaaactaaatggtattatcattttcggttaataagaagcatgcataactaaacagtttaaatacttgaatcaaaattctttaatagcattttctgaaattttaaattagctactgaaaattttccactatgtacaatacatttta

SEQ ID NO: 76793 - DNA, 773 bp, Homo Sapiens
atgttgtgtgtcacagagctaaaaactcagttcccaaatccccagtttatgcagcgccatcaggtattttaagctaaacttcttcacccctgagagcatgtcagctggagaaaagcagttcttccttgcccacttgagaagtgcacgcccactcacccaacatcctggtctctaggaaagcctcatgtgaggttcctctttctttcagctcagtgcccatgggcaaggatcatgatttccattccgtgttacaatgacaatatttaatgagcataaccttctcagtctcctgctctcaaatttaggacagagccgctaaggacaaaacaatccctcccgtgctttatgatggcagcaggggctggggagcctctgagggactctttcattctgcagttgtctggaagcctgggtggcgtcatgagctgaaggatcatgctttcctgtcctggctccataggttataggctggctggtgaaaggttcacgtggcccaggctgaacttcattgcctagctttggatgtgctttctgccataaagactgatttttgttcgttctgagccttcaaggaatttgttttttacaactggaatatgctcctgtgtgtgttaacagatcatggatgttttatgttttcactgatcatttaaagagtttgacctcagagctccaggatcatcagtaaatttgtcatgttatatatttatttttttataaatcaagacttctgtgtgctcttaaatatattaaaaacaatttacatttcagaa

SEQ ID NO: 76794 - DNA, 1668 bp, Homo Sapiens
  misc_feature (46)..(46): n is a, c, g, or t
aaaccgaaaattatcggcggcaaggatgctgaagtgccccttgggngtgtttaaaaattcggccacgagggtctgaggagctggttgcctgacaggctggaacctggggccctactcatgaggtgacccccccggaggagctgcgtctgccagcccaccaccaaaggagcccgtccactcctcgggtcgtcgttactgtctggacaagagactcaatctcccgggaaattccaggaacaactgcaaaccagagcccactgctgggaatgtcccatggtgcagccgcccgagaggaccatcagaggccctgcggagttgttcagaaccccaactctctctggctggctaccccctgaactactgggtctctggacccattgtgcccagccacccccaaaagccctcaggcgagagctgcctgaggaggcagccgctgaggaggaaaggagaaagattgaagttccaagtgagattgaggtcccgagggaggccctggagcccagtgttccccttatggtgtctttagagatctccctagaggcagctgaagaggagaagtcccgcatcagcctcatcccaccagaagaacggtgggcctggcctgaggtggaggcgccagaagctcctgcattgcccgtggtgcctgaactccctgaggtgcccatggagatgcctttggtgctgcccccagagctcgagctgctctcactggaagcagtgcacagggcagtggcactggagctgcaggctaacagggagcccgacttcagcagcctggtgtcacctctcagcccccgcaggatggctgcccgggtcttctacctgctcctggtgctctcagcgcaacagattcttcacgtgaaacaagaaaagccatatggtcgcctcctgatccagccggggcccagattccactgaggttagagtccatttacaaagctgccaggaaaccggccacttctagtaaaccacgtcgtgcctcactgggtcctgcttacctcatttctgaatgtgcatttccagccttcttgctctcagagctattgttcaagcagaaaacaagctgcttttattacagtatgatgtcatgactcatttgtaacagatccagcctcagggacagccctgtaaggcagcaagtggggctggctccaaatgggtatgagtctcagaatctttggtaaggcagaactgaactgggctgagaggtggtcttaaggcctgggcaggctctattctctctggactggctgcagcctgcagtctaggagaggcccagtacagcctggagctcctgagccttgtcaacaggcagtgagcccagagctgcttgaaagctgtcggtgtgctgtttggccaggaacgtcaggagcagcaacagtgcggccttggtgtctggtgggatcttgttgtcagccagaatgaggctgcagatacgcagaagctcgggagccacatctataacctggtcagggctgctctggtacaggaagctgaagaggcgcccaatggtgacccactcctccaagtcctccttcagtggcagggcatgcagtacggcagccagcacctggggctctggtttcctggtgggactggccatcaacaggcgggcaagtgccccacagatgttgtcacgacacgatcatgtcgctcccgcgccaggag

SEQ ID NO: 76795 - DNA, 1041 bp, Homo Sapiens
  misc_feature (765)..(903): n is a, c, g, or t
  misc_feature (907)..(907): n is a, c, g, or t
  misc_feature (915)..(985): n is a, c, g, or t
gggctctgccatgggtgtgggcagcccatcactgcccgttgtatcagtgccatggggtacaagttccatcctgagcactttgtgtgtgctttctgcctgacacagttgtcgaagggcattttcagggagcagaatgacaagacctattgtcaaccttgcttcaataagctcttcccactgtaatgccaactgatccatagcctcttcagattccttataaaatttaaaccaagagaggagaggaaagggtaaattttctgttactgaccttctgcttaatagtcttatagaaaaaggaaaggtgatgagcaaataaaggaacttctagactttacatgactaggctgataatcttattttttaggcttctatacagttaattctataaattctctttctccctctcttctccaatcaagcacttggagttagatctaggtccttctatctcgtccctctacagatgtattttccacttgcataattcatgccaacactggttttcttaggtttctccattttcacctctagtgatggccctactcatatcttctctaatttggtcctgatacttgtttcttttcacgttttcccatttccctgtggctcactgtcttacaatcactgctgtggaatcatgataccacttttagctctttgcatcttccttcagtgtatttttgtttttcaagaggaagtagattttaactggacaactttgagtactgacatcattgataaataaactggcttgtggtttcaatnnnnnnnnnnnnnnnnnnnnnnnnnnnnnnnnnnnnnnnnnnnnnnnnnnnnnnnnnnnnnnnnnnnnnnnnnnnnnnnnnnnnnnnnnnnnnnnnnnnnnnnnnnnnnnnnnnnnnnnnnnnnnnnnnnnnnnnnnnncaanttgttggnnnnnnnnnnnnnnnnnnnnnnnnnnnnnnnnnnnnnnnnnnnnnnnnnnnnnnnnnnnnnnnnnnnnnnnggggcaacatgttttttcaaaaaaaccccggccaaaaaaaggggtgttttcccccc

SEQ ID NO: 76796 - DNA, 945 bp, Homo Sapiens
cagtcgacggtaccggacatatgcccgggaattcggccattacggccggggatcctggttttgggacagcggcaatcatggcgccacctgtgagatactgcatccccggcgaacgtctgtgtaacttggaggagggcagcccgggcagcggcacctacacccgccacggctacatcttttcgtcgcttgccggctgtctgatgaagagcagcgagaatggcgcgcttccagtggtgtctgtagtgagagaaacagagtcccagttactgccagatgtgggagctattgtaacctgtaaggtctctagcatcaattcacgctttgccaaagtacacatcctgtatgtggggtccatgcctcttaagaactcttttcgaggaactatccgcaaggaagatgtccgagcaactgaaaaagacaaggttgaaatttataagagtttccgcccaggtgacattgtcttggccaaagtgatctccttaggtgatgcacagtccaactacctgctaaccaccgccgagaacgagctgggagtggtggtagcccacagtgagtcaggtatccagatggttcccatcagctggtgtgagatgcagtgccctaagacccacactaaagaattccggaaagtagcccgagtacaacccgaattcttgcagacctaagaagccactttttaccctatggaagggggtaagctgttcctgagtataacaccaagatgctgctgtctttattcaaacacctggcgtcggccaacagccacttccagaaaaatcttccagtttacgctgtagatggaacatgtttctgtgaacctatcagtggatttcattctcttgagtaataaatcttatcttttcaaggcaccaacaaacaaaactgtgatattggaaatagcctatccctcctgacagtccttataaatacatattttttgctatg

SEQ ID NO: 76797 - DNA, 659 bp, Homo Sapiens
taataatactaataacatgctagtgaggttgtggagaaaagggaacactgttggtgggagtataaattaatttagccattatgaaaagcagtgtgatcatttctaaaagagccaaaaacagactaccatttgacccagcaatcccagtactagctgtatacccaaaagaatataaatcattctaccataaggatgcatgcatgcatatgttcactgcagcactatttacaatagccaagacatttaatcaacctaaatgtccatcagcggtagactgggtaaagaaaatgtggtacatatacaccatggcatactatgcagccataaaaaagaaagagattatgttctttgcaggaatgggactggaggccattaaccttagcaaactaatgcaggaacagaaaaccaaatactacatgttttcacttgtaagtgggagctaaaagatgagaacatatggacacaaaggggaacaacagacattggggtctgcctgtgggtggaaggtggggtgaaggagactgtcagaaaaaataactaattagtactaggcttaatatctggatgatgtaataatctgtacaacaaccccctgtggcacaatttaccttataacaaacctgcagatgtacccgaacctaaaataaaagtttataaag

SEQ ID NO: 76798 - DNA, 1063 bp, Homo Sapiens
  misc_feature (67)..(107): n is a, c, g, or t
  misc_feature (805)..(805): n is a, c, g, or t
  misc_feature (840)..(840): n is a, c, g, or t
  misc_feature (848)..(849): n is a, c, g, or t
  misc_feature (861)..(862): n is a, c, g, or t
  misc_feature (867)..(969): n is a, c, g, or t
  misc_feature (978)..(978): n is a, c, g, or t
  misc_feature (990)..(990): n is a, c, g, or t
  misc_feature (1013)..(1013): n is a, c, g, or t
actaaaatgaggaggtggggaagagctatttgcaaaacttgccggccaggcaaatgagctaaaaacnnnnnnnnnnnnnnnnnnnnnnnnnnnnnnnnnnnnnnnnngttaaaccaaccaccctgaaagtttccacatgtgaaatatagatacaacagtgaacaaaatatgtggcctcccatgtacattggttacctatgtacaagtatcctatacaccagtaaaacagcagggcaattagtcaattaaaaaaaatagtacatgttatgtgtaataaaattaaatttacaaaggcttttccactcgtggatttgattccttttttggaggagggagtaatcctggagcaaccacttgcccgtctcagactctacactagaacatttctggttgctggttggatttgccagtgggccagtgaggtcagcgggaatgagggaacagcgggtgacactgcctcagatgataccattaggggggccacagatgggccctaagtcaacaccgttcttcatgtagtacttctccagcttggccagaatgtgcttgccataggtgtacttacgaagagttgcgatgtggggccggatcttatgcatgacgatcttccgctggcctggctccgccacgtcaatcatcttctggaccacgtagttggcatactggtccttcatcatggtgtataaggcactgtggggaacgtcgttcatggtgcaacctcatcgatgagcacagcgcgctccgtacgtgaggcgtgagtaaacacttctccacaacattgcttgcaatttgtgctgactcaatnacaatacattgctcggattctgctacatcctcgtngcgattcnntggctcgagggnncaatnnnnnnnnnnnnnnnnnnnnnnnnnnnnnnnnnnnnnnnnnnnnnnnnnnnnnnnnnnnnnnnnnnnnnnnnnnnnnnnnnnnnnnnnnnnnnnnnnnnnnnnaaagctggnggtgctaatgantgagctactcaccataatgcgtnggctcactgccgctttcaatcgggaaactgtcgtgcagctgcataatgat

SEQ ID NO: 76799 - DNA, 1048 bp, Homo Sapiens
  misc_feature (937)..(971): n is a, c, g, or t
ccaaggcactttaggtctccatcctaagccatgtattttttctgacttcattgggtatctcatgtcattggtgggtctatcattaacataatcaacccaattttccatttcagactctgaattggtctctttgatcaattgtattagttctttggcaagctggacaactgacatttcaaaattggttccgatgttataaatttcacctggtttcccttttttgaggacagtgagaaatgcttctacgacatcagtagcataaaggaagtttcttgtttgaagccctgacccatgaatgcaacatttcctgttgtgctgtagcaaagatataaattttggaataaccttttctggatattgatgtggtccataaacattactgcttcttgtgatgacaactggaaacttatattgttcccagtaagactgtacaaaacattcagcagctgctttagatgatgcataaggatttgtaggttgtttgggtgaagattcatcaaattccttatcaagactgccaccatatacttcatctgtgctgacataaataaacttctccactctggcttcatgagcagcacttaccaaaacgtgagtgccataaacattaacataggtaaactcaaaggcacgtacgaatgaaagatctgtataaatttgtagttctgtttgttagaaatggtttcaagattcttcaagcttgcacagtaatccagcttgtctagatttatgatcatatagtttggataatcttccactaaagagacaatcatatgtgatgcaatgaaaccagcaccgccggtcaccaggacccgcttcgcaaagccgccgggaagaccccacggttcctcccaacacgccgccgacatctcccagctcagcagtccccggccgtaatggccgaattcccgggcatatgtccggtaccgtcgactgnnnnnnnnnnnnnnnnnnnnnnnnnnnnnnnnnnncggccgcttcctcgctcactgactcgtgcgctcgtcgttcggtatgagcggagccctatagtgatctatcatctttg

SEQ ID NO: 76800 - DNA, 826 bp, Homo Sapiens
agctgcctctggcttgctctgttaacgtgtcccgcgagcgaggcgcgtcgcaaaaggtcgcggcggaacttccctgcgcttttcagaccatactctttacggtactaggcactgctgagctgggagatgtcggcggcgtgttgggaggaaccgtggggtcttcccggcggctttgcgaagcgggtcctggtgaccggcggtgctggtttcattgcatcacatatgattgtctctttagtggaagattatccaaactatatgatcataaatctagacaagctggattactgtgcaagcttgaagaatcttgaaaccatttctaacaaacagaactacaaatttatacagggtgacatatgtgattctcactttgtgaaactgctttttgaaacagagaaaatagatatagtactacattttgccgcacaaacacatgtagatctttcattcgtacgtgcctttgagtttacctatgttaatgtttatggcactcacgttttggtaagtgctgctcatgaagccagagtggagaagtttatttatgtcagcacagatgaagtatatggtggcagtcttgataaggaatttgatgaatcttcacccaaacaacctacaaatccttatgcatcatctaaagcagctgctgaatgttttgtacagtcttactgggaacaatataagtttccagttgtcatcacaagaagcagtaatgtttatggaccacatcaatatccagaaacaggttattccaaaatttatatctttgctacagcacaaccaggacaatgttgcatccatgggtcagggcttccaacaagaaacttcc

SEQ ID NO: 76801 - DNA, 603 bp, Homo Sapiens
gctacaataataattataagacaccagtgattataaaaatacataccttttaggagtgtgaagaaagtgaaaaaatatgtacctcagaataaataatacaggtatttgattaatgctaacaagatatgggaagattgatcagaggttggtttataaaattcaagatgcttaggaaacacaggactgctactagaaatatatgaaatgtggcaatttgaaaagtacgaatgattcaacacaatattccactggtttgtataatgttctggaaataagttatttttcctttaaatttttctgacttgcccccaaaatgattaattcaaaacatacttgttttctttattccttctttccaaggcactttaggtctccatcctaagccatgtattttttctgacttcattgggtatctcatgtcattggtgggtcttggaaaacaaaacagatttaaaataatattgtagatatatatttacaaatttagatattaggagatatgtgtttatgcatttttaccacaacccaacttttctctttacaaaaattcccaataggttttctgcagaaagtctgtaaaatcaagtatatatttaaaaaaaa

SEQ ID NO: 76802 - DNA, 706 bp, Homo Sapiens
  misc_feature (22)..(22): n is a, c, g, or t
  misc_feature (28)..(28): n is a, c, g, or t
gatgaggtaccctgaccagcantgtgcntacaagagatggcaccgcacccccaccccagtccccgggtccccaggcacggggcaggatgaggagtggtcagatgaagagagtccccggaaggctgccaccggggttcgggtgagggcactctatgactacgctggccaggaagctgatgagctgagcttccgagcaggggaggagctgctgaagatgagtgaggaggacgagcagggctggtgccaaggccagttgcagagtggccgcattggcctgtaccctgccaactacgtggagtgtgtgggcgcctgagtgtcctgacagcccttctgcaacgtttacccaccctggttcagagcccagcttctcctggagagccggaccctcagggccctgaaccgtcgctctctggctgctcctctgtcccttgagggaggaagtcctgggacccagggaggggaggggcctttgtctagggaagggactggtagggaagggacgagtctaggctgagggcaagatgggaggtcagaggtgacagaagcgttcaggggtgcctgggcctccccaggagctgtggactcagttcctgacctctgctttggggttcctggggtgggcttggggtgagtgtagttctggcctagcagcaccctcttgtggcttgttctagcgtgtattaaaacttgacacacacccacacac

SEQ ID NO: 76803 - DNA, 1456 bp, Homo Sapiens
  misc_feature (20)..(20): n is a, c, g, or t
  misc_feature (45)..(45): n is a, c, g, or t
  misc_feature (68)..(68): n is a, c, g, or t
  misc_feature (111)..(111): n is a, c, g, or t
  misc_feature (135)..(136): n is a, c, g, or t
  misc_feature (146)..(146): n is a, c, g, or t
  misc_feature (158)..(158): n is a, c, g, or t
  misc_feature (358)..(358): n is a, c, g, or t
  misc_feature (729)..(729): n is a, c, g, or t
  misc_feature (863)..(978): n is a, c, g, or t
  misc_feature (982)..(1046): n is a, c, g, or t
  misc_feature (1133)..(1141): n is a, c, g, or t
cccatgcgggttctcgatcntgtacgtccccatctatctccttgngactcgctgtcccgtgcctctgntgattgtggtcgagccctatccgcgacctacgagcgcatcatntggcagagagcatatgttgtcacnncgcaacgccntgcctgcgagtntgaatacgagtcgcacgtgagtgccagttgcccgtatcgagcgcacaaactgatggacagtaacggaccacacaggcacatggcacttgcaggggcgcgaggtggcggcacgtaatgggagcgcgctgagcatgatggggcatgtgcgggagcgccaggcggggcatgtaaccagagcgtgcggggcatgatggggcacnggacatggggggttaggtggggcacgtaattggagctcgcggggcaggatggggcatctaactggagcgacagagagcacgatggggcacttacaggggccggaggctgggtacgtaatgagagcgagcgggaaatgatggggcacctaacgagcacgcagagcatgatggggcacgggtgcgaggtggggcgcacagtgggagcgcgtggggcatgatgggacacatggcgaggccgtcagggcacaggggaagcacttttggaacacgtgagtgacagggctgccgcccttgaaggagccctcggagtggctgcgtggtggggcacgtggggcaggttcaggaaaaaggatgcagcatgtgattgcagnggcaacctggtgagggacacgagagccacctgccaccagcagggttcagggctcccagctgtgggttacttccaccttctttcactttccctcttccattgtattctagagaatttaggcccagacaagacacnnnnnnnnnnnnnnnnnnnnnnnnnnnnnnnnnnnnnnnnnnnnnnnnnnnnnnnnnnnnnnnnnnnnnnnnnnnnnnnnnnnnnnnnnnnnnnnnnnnnnnnnnnnnnnnnnnnnaatnnnnnnnnnnnnnnnnnnnnnnnnnnnnnnnnnnnnnnnnnnnnnnnnnnnnnnnnnnnnnnnnnaaactctgtctcaataaacaaacaaacaaacaaaacctgtataacagagtgtcattgaatttctaaacgttgaaagacttcacattnnnnnnnnnctcacaatttaatattattgagtgaaagaaaccagacacaaaagggtacattctatatgatgctgtttatgtgacattcaaaaacaggccacatgacaacatggtaataaggacagtggctgtccttgttaggagttatgactggaaggaggcaggagggagctttctggaaacactgtacatcttgctcttgagagtgcacgtatatacatcaagtgtttatcaagctgtgtggttaagatttgcacacttgtatatgttatacctcgatttaaaaaatctaaataagtaaataaagataccttcaaatctttt

SEQ ID NO: 76804 - DNA, 711 bp, Homo Sapiens
ccaaggagatccgcccccaggactgccccatcagcagagtggacacgtttccccagcccctggccgcccctcagtgccacaccctgctggcccctgagatggaagacaatgaaatgagttgttcaccttaacccattacgctggcaaactgatacaactcagaaactgctcaatgtcaggaaaaccggaacttgttgatgaacttgttttcaaaatatcatctcatcaacgaggcctggacaaacaagccctgaggagggatctgcaacaaccctgaagacaacaaggaaagaaaccatgaaagtctgtctgtactgcagtgggaattcttgagtgaggtcttacctcttctttaaacctcttcaggagtgtcctgattatgtccagaattttccctaaaggcagggattcttaacctggatagaagccaggggtaaccatgaacttgatggaagaaaatgttacatctttattttcagcaatgaaactgaaatttagccttactcccaagttataaatgctggcaacaaatcacagtagtaaaagcagtacctgggattttcccaccaatacaaaccagttacagcaactgtaatgtaacataaaaagggcatcttgaagtattgttcatatttgtcacctcttggaatgatagcagatcctgtaagttgatgtattaattaaaaagcccatatattactgcaaaaaaaa

SEQ ID NO: 76805 - DNA, 1642 bp, Homo Sapiens
ggccagtaactctaacggttataaggtagcgaggcctgggtggcgaattcggcacgaggttgtacgttcacatcaggtcccggcccgccggaacctgggcgatccacgatgccgagtttgccacgctgcgacagcccataggcttgcccccccgggcattcgggtggactacgaacacaaactgaagccctaggacttgtcgcccgtttgcgctctcgccgaggcacaggctgctcgcggaccaccctgctccgaaaactaagaggtaggtggtagcccattcatctggttactgatactggccggcatcagtggactgtcggcaggtccttgagcaactggtgtgtgaaatgggacggacgtcaaaggacaagcgggatgtctactaccgcctggccaaggagaatggctggcgtgctcgcagcgccttcaaactgctacaactggataaggaattccaactcttccaaggcgtgacacgggcagttgacctgtgtgcagccccaggcagctggagccaggtgctgagccagaagatcgggggccaagggtccggccacgtggtggctgtggacctgcaggctatggctccactaccaggtgtggtacagatccagggggacatcacccagctgtccactgccaaggagatcatccagcactttaagggctgccctgcggacctagtggtgtgtgacggggctcctgatgtaaccggtctccatgatgttgatgagtatatgcaggcccagctcctcctagctgctctgaacattgctacacatgtcctgaagccagggggctgctttgtggccaagatattccgaggccgggatgtgacgctcctctacagccagctgcaggtcttcttctccagcgtgctgtgtgccaagccccaggagcagccggaactctagcatcgaggccttccgctgtctgtcagggctatgaccctcccgagggctccatcccggacctgagcaaacccctgctggaccattcttacgacccagatttcaaccagctggatggtcccacccgcatcattgtgccttttgtgacctgtggggacctgagctcctatgattcggaccgcagttacccactggacctagagggcggctcagagtacaagtacactccacccacacagccccccatctcgccaccataccaggaggcctgcacgttgaagaggaaggggcagctggccaaggagatccgcccccaggactgccccatcagcagagtggacacgtttccccagcccctggccgcccctaagtgccacaccctgctggcccctgaggtctggaaatgtgactctcagcctgccttgaccccttccccgtgtgcctttttctgacccaaatctcatggtttctggggccaaaattccctttcctgcctcccaatagctataaaaaattggtaaagccaagcataatgaatgcaaaagtttcgccaaatatgtgagtcacttttctttttcttgggtagatggaagacaatgaaatgagttgttcaccttaacccattacgctggcaaactgataacactcagaaactgctcaatgtcaggaaaaccgggacctgtttgatgaactttgttttcaaaatatcctcctcttcagacgagggc

SEQ ID NO: 76806 - DNA, 1498 bp, Homo Sapiens
cgctgtcaacacccattaagtcgggttccccgagaaacccgccaggtatattgtgggccggaggagtttcccggggggaccattttttagcgcgccgcacaggttccgcgcccgccttttggcccccgttattaaatatccggggggccccgggaggggggcgcagcccgcgccggggccaaacatggggaggctgctggccttagtggtcggcgcggcactggtgtcttcagcttgcgggggctgcgtgaggtggactcggagacggaggccgtgtatgggatgaccttcaaaattccttgcatctcctgcaagcgccgcagcgagaccaacgctgagaccttcaccgagtggaccttccgccagaagggcactgaggagtttgtcaagatcctgcgctatgagaatgaggtgttgcagctggaggaggatgagcgcttcgagggccgcgtggtgtggaatggcagccggggcaccaaagacctgcaggatctgtctatcttcatcaccaatgtcacctacaaccactcgggcgactacgagtgccacgtctaccgcctgctcttcttcgaaaactacgagcacaacaccagcgtcgtcaagaagatccacattgaggtagtggacaaagccaacagagacatggcatccatcgtgtctgagatcatgatgtatgtgctcattgtggtgttgaccatatggctcgtggcagagatgatttactgctacaagaagatcgctgccgccacggagactgctgcacaggagaatgcctcggaatacctggccatcacctctgaaagcaaagagaactgcacgggcgtccaggtggccgaatagccctggccctgggccccgcctcaaggaagagccagccgtaatggggactctccaggcaccgcctgcccccagcgtgggggtggccactcctgggccccagaaagcctcagagtcctgccgacggagccactggggtgggagggggcagggggcttggctcgcacccccactttggcctcctccagctcctgccccgccggccgcgcaccgccatgcatgatgggtaaagcaatactgccgctgcccccaccctgcttctgctgcctgtttggggaggggggcggtgaggtgggggcagcggccccgcacccctcctccttgctgatttgcacacattggccgcttcagacacgcacttctggggccagcccctccccgcctcctccctgcctggcggcaggggtcgcgatgatgggctggagcagtttggggcagggggttctgggacccactccgactccccctccccggcatcatttcccctcccgcttcctccggctggacctggggtcccccctccctgtaatgcactcctgccccggcccaacctcgccctctctcaccagccttgaactgtggccacctagaaaggggcccattcagcctcgtctctttaccagaagtagttttgttcatgaaataaagactcttggacttg

SEQ ID NO: 76807 - DNA, 670 bp, Homo Sapiens
aaggtgttacttggctggatcaattccagcatctaatttagttaagagactttaaaaagggattatatattggagaaaaaggcagaaattaaaagtgtattttcagtcttaatatctcacataaatgaccttagaattggctatgttagtagttagtttatgtggtacatgttaaacaccagtagagaaacaactatggttgtgattaaatcacttgactttcctgccagagctagaatcttaactcctttaaaagacgactctgggaaatccagtgtttgtatgtaaaaataaaaggtaagttaattctagattgaggggcagaggctatttcttaatctccaatctccttgggaagggaaagtattaggaggcagtaatggagtagaaaggtggggatggcaaataagagaaagatttaatgtaacaaaactgttttgtccctcttcttaagtaaataattattggaataattagtgtaacatcacatagtaatgtgtattttgtcttgactaagttgtgtaaaggaatgtctttttaattcagcttttcttttctccatgctagtgttatcaggttttggtatttatttacttacagcatatgttatgaagctggtttgaaaattggttttagatatatctgcaagtttactactttgactgtaaaa

SEQ ID NO: 76808 - DNA, 1036 bp, Homo Sapiens
  misc_feature (57)..(57): n is a, c, g, or t
  misc_feature (68)..(68): n is a, c, g, or t
  misc_feature (74)..(74): n is a, c, g, or t
  misc_feature (126)..(126): n is a, c, g, or t
  misc_feature (135)..(135): n is a, c, g, or t
  misc_feature (141)..(141): n is a, c, g, or t
  misc_feature (160)..(160): n is a, c, g, or t
  misc_feature (201)..(201): n is a, c, g, or t
  misc_feature (285)..(286): n is a, c, g, or t
  misc_feature (329)..(329): n is a, c, g, or t
  misc_feature (423)..(423): n is a, c, g, or t
ttgcctcttgaagagggtcgttgcccagccatgttgtcagatgtcccccgagcgctntggcagcatcntgttcntgagagctctgcaggatgatacgtgcagtcctgcagcgagtctggaacaccntggtgagcntggggntgccgaaatggagcatccnttccaaatctggacagcgatcgttttagtgttctgtctcangactggaaaacaatagcattgtcttgagtgaggaagtgagcccgctgtgtcatagcaggagaggctcccagacacagcccgtcnntcggaagagccttgagagtgcagctcggacccaccggcgcccnccgtagcaggtggtgtgggtgctcgggagtggaggtgacgtcagcagcgctctctgaccgcgggtgtcacgggcatttctcaaaggaagcaggngattcagtgagtgtgaaggtgaacaggatggcctggcagcagggatgtttccgtgagccacaaataccagaaactgaggcgaggctcccagcagccggtagggaaaggtgtttccaggggtccgagggccgtggcctgcgtggccatcccctggagagaggagccgctcagggtgcgcgtcatggagtgtgctcaggggtgcgtggacacctctgctgtggtttgctgctgggggcgatgggagcgcctctccgtcctgtgccctggtccaggatgctgacagcagtgagaggcctgccgtgaggtttggtcttgtcagacctgtagcctggacctcgccgggggaccagggagtgcacgtctgtagatctgtacatatctgggcctttggaggccacgtgtggcatgggaggggctacctggtccctttcacagccaggacacgcctggatgagaaagcctgaggtgcctggcatgcccaccggtgccactctgcagcctccacccctggcctgagtccccctccatccgtcttggtggacacctgtgtggctctcacctgcgttttgagtctgttcttccaggagtaataaattctggacatcatcactgg

SEQ ID NO: 76809 - DNA, 1240 bp, Homo Sapiens
  misc_feature (70)..(70): n is a, c, g, or t
  misc_feature (143)..(143): n is a, c, g, or t
catttctcggttatgtgttgatgtgacgatacattcaccagaacagttactgatagatttatcgatcctntaggattgcctcgagccagaatcgcacgagtgaaatctgtgagacttgaaaacatgaagttgagttaacctcntaaaaaccttgtgaaataaagatgcatgacttttacaacaaagaaagctagtgctgagatccctgtattgtccgaattgtaagaacatcagcaagccacaaagaaattggattattgtccctgcctccagtacttgtagtacatctcaagcgattttcttacagtcgatacatgagagacaagttggataccttagttgattttcctatcaatgacttggatatgtcggaattcttaattaatccaaatgcaggtccttgccgctataatctgattgctgtttccaaccactatggagggatgggaggaggacactatactgcttttgcaaaaaataaagatgatggaaaatggtactattttgatgacagtagtgtctccactgcatctgaagaccaaattgtgtccaaagcagcatatgtactcttctaccagagacaagacactttcagtggaactggcttttttcctcttgaccgagaaactaaaggtgcttcagctgccactggcatcccattagaaagtgatgaagatagcaatgataatgacaatgatatagaaaatgaaaactgtatgcacactaactaatgaaagtcctagaagccataaaagagacactttcctgctggtggtatctatggaaatgatgaagttacccaccacattaaaacaaaagtctgagatggggagtttcagataaccgaatgtaaatcctttatcagattttaacttgtgcagtacttgaagtgaaacacaatgaaaactttaacagaaattgtctcttaatacatttacagtcttgtatttacaagctaaatatatataggaaatcacaaataaatcccttttaagtttgctgctgttttgattaattatgtttcctttaattttttggatgtgagttgatgacaaatgttaaatttgtggatgttggtcatttattttgctctaataatactgcaagaaaaactatgggctgaaactttagttttttgggataaatctaagttccatggttgcaattaaaggttggccgggaattaatacctacctaatggataatttttaagccttgccaggtaattcaaaatgggggg

SEQ ID NO: 76810 - DNA, 1120 bp, Homo Sapiens
  misc_feature (178)..(203): n is a, c, g, or t
gggtatttttacatatttattaaaacaagtttcctgagaagtttgactaggctatgttgttgttaacctagtttgcttaaaatgtacgaaaatgcaatcaaacttacatatcttttaaatattcgaaagtcagattttgttctgattgccctatccaattagggcaaattagtgaggnnnnnnnnnnnnnnnnnnnnnnnnnnctaacaatagtctgaaacataaaattaagtttgggtttaaaaacaattcttgaaactgtcataaacatatgatatctattgattaaacagtaataaaaagacacaaggtacaagaattgaggcttggctgttctggctgtatactaacttcatataccctgacagaataaactatctttttaaaaagtgctttgtacactgcacaattatagctttaccaaataaaaactcaatgacatgtcgctgaaatttgcttcttctagaatttgaaattatttaaaatactgcatgagaatatttttatcatattatataatatgacttcatcaacatgaagttccaggaccccagatgcctctctgagaagttcattatttgatagggttggatcaaatgtaaaggtccaggtgttcaaagatcttagatacctaaagagagaaaggggcaaatggaggctcttctgagagtcaaaatgttgatgagaaacaaactgaaaagtagcacacataggcagaaaaatagacaagttatgattcagaaaacaattgtatgcaattttggcataaatctctgagagtcactgtgggcccatgatttaaaagggacatgccagagagccaaggaaacacaaagcctcattccgatgtgcctgttggaaatatgacccaaaatctgttgaagtttgtgtaaccttgaaggcttgcctttttggcaaaagttctatgccagccccacgaataaccgggataacaagtgggttaaaaacaaaccagggttaggtattagctttttccttgggatgggaaaaaaccctctccgggtcctgggaactcctgccttttgaaaattatcccaccgtaaatttccgaaaaggccaaatacttgtttaaaggggaaccccaaaagggaaggagaac

SEQ ID NO: 76811 - DNA, 1780 bp, Homo Sapiens
  misc_feature (1064)..(1091): n is a, c, g, or t
  misc_feature (1109)..(1563): n is a, c, g, or t
  misc_feature (1566)..(1566): n is a, c, g, or t
ttttttgccgcacatgaaacattattttaattggtttaaagtccctttataaagagtgctacatggtttagataaaggaaacatataactattgagttacaggggattttattaattataaaatgcaatcaatttaaattacgtaggtttaagactagtcccttggataagccccaagcgaatttgtcttcagattattaaaattagtgctgtaaatcagggtgggcaattcacagcctttctgaactgactgaactagagcttgcagtgaagtgttctgctgagactgagcaccttacagatatttttctccagaagatggtgctgggtaataaaatcatcacaattagggaatggttagtggtctctactgtggcaaatgccaactgttggaattcactttattgtagaaaaacccaaactgagactcttaagttttgtttagcaatgtgtttctggtatgaaacaaactactgtgtcactgtccaggtaggaaacaattctttcaactgggttttcagcataaatgggaactgatgtagaaggcaggatttagcccttctaggcaaaagaaaagctcagttgggtttcacgagtgttcctgtgcttatattcagtctgtgcctacatgttctcatgcatgtctaacctgatttacctcttacctgtaacctaccttatcatgtggcttttaattggcagtcactcgccatttctaagcagatatagtactacctttcagaactcacattggcaagtgtaaaaagatgacttaaggtgaagtgaggacaaaatcacattctgcatactaacctatttttttctccctttaaggtgctaaacttgcacctcatgtccactcagtaacaagtattgggacgtagagcacagcctcactcagctctgaaaggtaatacagcctgtgaggaagtgagccagcagtggcctttgcaattgtggatcttaagctctgctctcagcagatttcaggtgtaaccatttgttaactgtactgaaggtgtgtcctcaagaagaaagtgttcaaattaaaaaagctgctgccnnnnnnnnnnnnnnnnnnnnnnnnnnnncctcgtgccgaattcttnnnnnnnnnnnnnnnnnnnnnnnnnnnnnnnnnnnnnnnnnnnnnnnnnnnnnnnnnnnnnnnnnnnnnnnnnnnnnnnnnnnnnnnnnnnnnnnnnnnnnnnnnnnnnnnnnnnnnnnnnnnnnnnnnnnnnnnnnnnnnnnnnnnnnnnnnnnnnnnnnnnnnnnnnnnnnnnnnnnnnnnnnnnnnnnnnnnnnnnnnnnnnnnnnnnnnnnnnnnnnnnnnnnnnnnnnnnnnnnnnnnnnnnnnnnnnnnnnnnnnnnnnnnnnnnnnnnnnnnnnnnnnnnnnnnnnnnnnnnnnnnnnnnnnnnnnnnnnnnnnnnnnnnnnnnnnnnnnnnnnnnnnnnnnnnnnnnnnnnnnnnnnnnnnnnnnnnnnnnnnnnnnnnnnnnnnnnnnnnnnnnnnnnnnnnnnnnnnnnnnnnnnnnnnnnnnnnnnnnnnnnnnnnnnnnnnnncanagggtcccgcccctgacgagatcacaaaatcgacgccaagtcagaggggggaacccgacaggacataagatacacgggttcccctgggagctcctcgtggctctctgttcgacctgcgcttaccggtactgtcgccttctccttgggagcgtgggcttccatgtcacctgacgtaccatttgtgtgggtctcgcccactgggtgtgtcacaccc

SEQ ID NO: 76812 - DNA, 2115 bp, Homo Sapiens
  misc_feature (1233)..(1247): n is a, c, g, or t
  misc_feature (1905)..(1913): n is a, c, g, or t
gattctcgggatatcgtcgacccacgcgtccgcccacgcgtccggcccgcggagcatcgcagccggcccgggcccccgccagcctccctcctcgcgtccctcggtgtcctccgcgggccggcgcgatgcggctgggcccgaggaccgcggcgttggggctgctgctgctgtgcgccgccgcggccggcgccggcaaggccgaggagctgcactacccgctgggcgagcgccgcagcgactacgaccgcgaggcgctgctgggcgtccaggaagatgtggatgaatatgttaaactcggccacgaagagcagcaaaaaagactgcaggcgatcataaagaaaatcgacttggactcagatggctttctcactgaaagtgaactcaggtcatggattcagatgtcttttaagcattatgctatgcaagaagcaaaacaacagtttgttgaatatgataaaaacagtgatgatactgtgacttgggatgaatataacattcagatgtatgatcgtgtgattgactttgatgagaacactgctctggatgatgcagaagaggagtcctttaggaagcttcacttaaaggacaagaagcgatttgaaaaagctaaccaggattcaggtcccggtttgagtcttgaagaatttattgcttttgagcatcctgaagaagttgattatatgacggaatttgtcattcaagaagctttagaagaacatgacaaaaatggtgatggatttgttagtttggaagaatttcttggtgattacaggtgggatccaactgcaaatgaagatccagaatggatacttgttgagaaagacagattcgtgaatgattatgacaaagataacgatggcaggcttgatccccaagagctgttaccttgggtagtacctaataatcagggcattgcacaagaggaggcgcttcatctaattgatgaaatggatttgaatggtgacaaaaagctctctgaagaagagattctggaaaacccggacttgtttctcaccagtgaagccacagattatggcagacagctccatgatgactatttctatcatgatgagctttaatctccgagcctgtctcagtagagtactggctccttttataatttgttaccagctttacttttgtgataaaatattgatgttgtattttacactcttaagtcttaaccacagtcagaattatcttaatgtagattataattttggtcttttaggnnnnnnnnnnnnnnntctgatatttatttcaaaacgtattgaagcaacaaaatattaatattgtgccatatgacaacaaagtctttcctaaatactccatctgtttagtactgtattgtggaatatttgagttctatttccatacttgaaaacatggaggattttagagatgcctgaacaatattatttaagtagtatgtgaccgagctataaatttttgtttttgttctaagtagatttaatttgggaactgacaggacaatgtttttaggtttagcattttgtttaaaaacctttaaagaaacctttagaaggacttagacctcacatattaatgttgagaagttctgcttaattttaaaatggtttctataaagggttttattgtatgaaatagaactttatatttttgcatatgtatagatagtaattatatttaatgtataactatagcattatggtgagtggaatttgacattgtccaaacctttttcatttttgagtgattaaaaatgaaatgtcctttgtatatgtttgtttgcttttctttaactttcagataaatattgaatttagcataggttttgtggtattgtacattatcttgcctcatccattcctttatgtggatagttcccaaaactgtcaaattattcttgctgcattttcttannnnnnnnnaaataagagaatcatgttataatataattgaatgtgcacctgacacattttaataattggtgttgtagcaaatgtggttttgctctttggggctataaataatcttgagtaacgcaggttggaattaccaatagagctggtcagttatcaacagtagagctcagtatcaattttactgaaattaaaatcatacttgataagc

SEQ ID NO: 76813 - DNA, 1949 bp, Homo Sapiens
gcacttatgaccttcttgatagctccctgcactttggaacacggagcagatgagagagggtcaggggcttgccctccaccttggacttggaagaagcccacattggagaggtgaggaccccatggtggctctagtggaagatacgttagtctccagctaaggaggatgaggcgcagccccagagggagacctcagtgataggggatcaggctacgaaagtgggggaagggagatgctttgtacatattttggggttataatttctctaaattttaggagaacgggtattgattgataaaagggacaggccagtagtgttcaacagtgcatgtgaaggaaagttctgttttccatggttttgacattctttggactgtattgtgactgctgtctggtccacatggtacccctttggtaagtaggcttcagtgcataccagggtatcactggagatgggagttagtgaaggggtgactccctggcctagtatagtgtgaccctgggacaacttaatgtcctaaagcattttggtgacttctagggaatagcaaagacctatttcattgtccccaggtaagtatgtgatgagcaatgaggaggagtggaaaacaaaacccagaaagtgcggcaggaccagcctgacgcacacgctcctgttgtcatggcagacagccgccttgggtgggcaccaccctggcagttccagcctgtaggggagtgaagggacatggctgagctgggcatgtgctgaggttgacttagggaacaagccctgggattggacaaaagggcccatgctgcagccactgactgggggcagagctctgggtggaagagggaagagatcctaatggaggcgcctccatctgcaaccacagttgtaaggctcatggcacctctgcttggaaagcactggtttagggacttagagaggtaggcacaaggtgggtctcctgggtaagggaagcaagagcagactgttgggccaacaggagaagctccccagagtaggggagaaggttggggtgtagggccttccacgtggaacagacagcccctgtgtctctgtctcttggggacctgagtttgggtggggtggcagttggcacagcgcagatgcggtagagatgggaggaaacccagctcctcacttccgtgtgcctcatgcctttgcatacacaagcaccaaacctactaggtcttctcattacccatgtaaaccacatgttagataaatttttgcaagtagaggaaagaaggaaataaaacatcacattttggtgtctctcaggctttccccccccaactatggtttctttgctttttgttttaacatagttttgttgctgtcttctgtaatgatacagttttgtgcagctgttttcacttagcatatcgtgggcatctccccttatgattactaaatattttattttggagtggctgtgtactctcccattgactagatggaccattgtgccagttgccaatcactaatgctgttactaacttttcagttataaattgatgaatatctttgtgcacaggctgtttcccaatgtcaagttattagggtagactccaggaggtgggattcttcaactaaagaatatgaaaacctttgaggcttttactacatattgacaaaatggtttccggaaatatttgtatccccttacactgccaccagcaaggataaacatgtccatcttgcccgtattgggaattatcatctggctaaatatttgctaatttgataatgaaaaaatagcatcgtgtttcagttggcatttcactgacttctagcacggttgaacatctttcatgtggagcgattgtatttcctcctttgtggattgtcagtgtcctttgctctatcttctggggtcagataaatttgtatgagctcggtatatattaaagatattaacctggtgtgtgtcataaaa

SEQ ID NO: 76814 - DNA, 988 bp, Homo Sapiens
  misc_feature (837)..(849): n is a, c, g, or t
taacatttgtgtgtaatatagctgacagtccagtgtcgcaattttggaaggcaagatgtgagagagacgagaaccattttaggcatagaactacagacatttctgaaaaggttggtgatgaagaacttcagtcttctgagtatacttcagtatactagtgcaacaagggacacaaagaaattctgtcttaataaagaaagctacttctcaagggtattatgtggactcagtccaagctctcctgtcccattgtgcattgtctgtgacatgcaacttacaaaactagcaattgtaacaataaatcacagccacttgacaagaaaggatattcattattttcaaatggcttttggactatcaaaaacagtaaggcttttgttcagaaatcacctttagtcaaaaggtttaagaagcaaattatttagtagcagaacttatctcaggaaaggaaaatatgcatggttggtgagaatctaataacattaaaatgctggggcaagatgcagtacaaagttgaagagactttattctcaataagttgatttactgatgatatgtcatatgatgcaaaaaaggttttgtgtcattaactgaaaagtagcagcttctctatccaggatgatgagtcaacaggtttcactaatatttgtcatgctgtagcatttgtaagatttgtaaatgatgaaattcaaagaaaactttttctattgctaggagcctgccagaacaaaggccaatatataatgttgtgacatcatatctgataaccagaggtctggtatctacactcctggtgccccatcagtggttgtctccataagtcattttgcgttattnnnnnnnnnnnnngaaatcctgatgttgacattatagcacactgctttctccacagagatgctgatatcaaaaacttgaagatacagtgaagttctgaataatgttacaaaactggttacctgtatcaaagacccatttatgcaaaaatgtt

SEQ ID NO: 76815 - DNA, 229 bp, Homo Sapiens
accaaacgttttttgcatcatatgacatatcatcagtaaatcaacttatagagaataaagtctcttcaactttgtactgcttctctatccaggatgatgagtcaacaggtttcactaataaatgtcatgctgtagcatgtgtaagatttgtaaatgatgaaattcaaagaaaactttttctatggctaggagcctgccagaacaaaggccaatatataatgttgtgaca

SEQ ID NO: 76816 - DNA, 1277 bp, Homo Sapiens
  misc_feature (1277)..(1277): n is a, c, g, or t
ggtcagagcgccggggcaaggcggggctgcgccatcagaccgctgtcccgggccctccgtgtggccgccttatgccagcggccgccaaggaaatgagcaggcctggccggcccgggccccgagggaggccagccgcgagcggagaggtcggcggtccgcagagcagggtcccgtggaccggagagcgggatgccgaggtgctcaggaacagcccatggaagaatcatatgaagaggtggtgactgaggtcgtaagcaggagtggacatgtttggatttccaacagctaccctgctggactgtcatggaagatatgcccagaatgtagcgttcttcaatgtgatgactgaagcccaccacaaatatgaccactctgaggctacaggatcctcaagctgggatatccaaaattctttcagaagagagaagctggaacaaaaatccccagattcgaagacactacaggaagattcacctggagtgagacaaagggtctatgagtgccaggagtgtggaaaatccttccggcaaaaaggtagtctaacgttacatgagagaatccacactggtcaaaagccttttgagtgcacccactgtggaaaaagcttcagggccaaaggcaatcttgttacacatcaacggatacacacgggagagaagccttatcagtgcaaggagtgtgggaaaagcttcagtcaacgaggtagtctcgctgtccacgagagactccacactggacagaaaccctacgagtgtgctatttgtcagagaagcttcaggaatcagagtaaccttgctgttcacaggagagttcacagtggtgagaagccctatagatgtgatcagtgtggaaaagccttcagtcagaaaggaagcttaattgttcacatcagagtccacacaggcctgaagccctatgcctgtacccagtgcaggaagagtttccacaccagggggaattgtattctgcatggcaaaatccacacaggagagacaccctatctgtgcggccagtgtggaaaaagcttcacccagagagggagtctggctgtgcaccagcgaagctgctcacagaggctcaccctttgaccactttcctgaagagaagttctctttatgaattaagagtacaaaatcctctgagatgaagcaacctatccagttctatggaatgaatggagaatctttcagaaagaccatcattgggtagggcaaactgatttttttcctttcccccaaaagagtatgaaaaataaatgtcttgtttattatcattan

SEQ ID NO: 76817 - DNA, 1094 bp, Homo Sapiens
  misc_feature (822)..(831): n is a, c, g, or t
catttccattttcatttaaaaatggatacttgattattggaaaacttacaattgtgtttggaacaacttgggtatttgaatctaattttccaattgcaaattttatgatacctaaatacagataaagtatttccaatgaaaatttagtgtccaaatgagtggggctataaatgtaaaatacactggattttaaagacatggtagaaaaagaacagaaaatattttttgtattgattacatgttgaaacaatattttggctataatgggttaaatatactattaaagttgattttatctgtttctgtttacttttatttacgtggcttacattgcatttctgttggacagtcctgtatttaagtatctagatggcaacattttacatacacaagcatcaaactctgtggtcagatactgttttttctgatctaggaaagagatctgggaaatacttcactcaaaaagaacgagtagtgccttccacaggttaggagagtgtaaatgagtctggtagtttgtctatttttattgtctttattactatagtaaatattctataaatatttgttaaaggaggtatgtgtattttgtttttgttattggcacagtggccactgaatggtgagaaattatctaagattaagacttgaatgagtaaaaagggggaaaacaaatctagttgatattaaaacagtcaaagtgaaacttaagggtcagtaaaatacacataaaggatttgagttttccagtgtatattttgcttacatatttgtggcttttataactcctttagtattaataaactactgaagtcacatgcnnnnnnnnnncagactcatttgcaaattccctgtgggctctatccattgaccaagtcatgtttacttctgtgcttaaagccagtaatgttcaagatgtgctttcatcatgtatgcctctcccatatcagactacgaaattatgtgactattcatagtctctttcgcatcttcagttaagcatataaaaggcacttttggtggaatagtcttttgaagagtattaatgaaattgaatttaagtattatcactaaatttaatatttctattaaaa

SEQ ID NO: 76818 - DNA, 1422 bp, Homo Sapiens
  misc_feature (268)..(268): n is a, c, g, or t
  misc_feature (1196)..(1210): n is a, c, g, or t
ataggctccatcttgggccacctgagctatagggcaggctaatggaatcaaccatttctgagcactaaatgtatcatgaaaagttgaatggcctgctcataagtttagctcattcactggaaatgtagattgatgttcaatgttaaactggaaggagcttggtttgtgtgtcagtggttatattagtgggtagtgtaacattttatccaggttggggtgaggggagatggccacagtagcaagtggtgacactaaaataccattttgnaaggctgatgtgtatatacatcattactgtccgtagcaatgaaggatacagtactgtgttgtgggtgagtgttgctattgcccagcattaatatttgggtgtgtatgtttgaggctatgaaacacgcaggagtgtttttgtgctattaattttaagagaaagcagctttttcttaaaattcactgttgagaaacttgcatgtctggaggcggtgtcctctccgccctgtcgggtcctggatgagtacgagttatggtcacggtcacagcctgatctcttatgtgttcatagccattcgctctcccatcagaactgtttgtcctgaatgtgttcctctagttctagaaaatgaccactaatttaaaaaactcggttgtgaggtttgcccagaggcacttgttccagaatttcccctcctgcttcagccatgtccttgtcacttggcattctaagctaaagctttagcttcccaattcgtgatgtgctaggccaagattcgggagctgttgccagcctcgtcaaatatggaagagaaacaacctgcggtcaaaagggagtgatttgttaagtggtgcgcgtctatctcataactagatgtaccaaccagggaagggccaaggatggaaaggggtaacttttgtgcttccaaagtagctaagcagaagtgggggagcagtttagccagatgatctttgattaggcaaacattgagttttaaagaggctgtcaagttgaggccacttggtccattagctggggcagcaagatcactactcaacgttttcacactgtggcaagattgctcttctagtggaataatgccctagtttctctgagatgatgtaagtggcatgatgttacctaaggcttaggcttagcttgatttctgggcccactgtctgtgttcttaagatgccaacctgttgcnnnnnnnnnnnnnnncccccatttaaaaggatagtacctactccctctaaccacctcaccccattcttgaatgacattttatccttcggaaagaacaaggctgtgatgtagtgactattgtctgtgtctcctgtgtgtgtctgttcttgtcacaaatgtatttggggacgttggatgcattcattttctgtaataaagtttcttaatcactcttcccaaaaagtaaa

SEQ ID NO: 76819 - DNA, 1040 bp, Homo Sapiens
  misc_feature (74)..(74): n is a, c, g, or t
  misc_feature (83)..(84): n is a, c, g, or t
  misc_feature (100)..(100): n is a, c, g, or t
  misc_feature (138)..(138): n is a, c, g, or t
  misc_feature (198)..(198): n is a, c, g, or t
  misc_feature (224)..(224): n is a, c, g, or t
  misc_feature (749)..(787): n is a, c, g, or t
cttgagtacagcttaccctccaaatcgcagagatgcttggcactgcattcttgtcccagcagagtgtgactctntgactcctnntgaccgcatcctcacntcttattcctgtgacagagttgcattacaccactctcntgctatgctgtccatcctctgtcctgtcagatctcctggagaccgcagtctggagaagcntgagagacagatgagcaggcagcacntccatagaagcttccctctgccaaggtgggcggtgttagattgtgaggcacgtacatggggcctgccggaatgacttaaatattgtctccagtctccactgttgctctccagcaaccaaagtacaacactccaagatgggttcatcttttcttcctttcccattcacctggctcaatcctcctccaccaccaggggcctcaaaaggcacatcatccgggtctccttatcttgtttgataaggctgctgcctgtctccctctgtggcaaggactgtttgttcttttgccccatttctcaacatagcacacttgtgcactgagaggagggagcattatgggaaagtccctgccttccacacctctctctagtccctgtgggacagccctagcccctgctgtcatgaaggggccaggcattggtcacctgtgggaccttctccctcactcccctccctcctagttggctttgtctgtcaggtgcagtctggcgggagtccaggaggcagcagctcaggacatggtgcnnnnnnnnnnnnnnnnnnnnnnnnnnnnnnnnnnnnnnncagaggttccagaaagttccagatttggaatcaaacagtcctgaattcaaatccttgtttttgcacttattgtctggagagctttggataaggtattgaatctctctgagcctcagtttttcatttgttcaaatggcactgatgatgtctcccttacaagatggttgtgaggagtaaatgtgatcagcatgtaaagtgtctggcgtgtagtaggctcttaataaacactggctgaatatgaattggaatgata

SEQ ID NO: 76820 - DNA, 371 bp, Homo Sapiens
  misc_feature (79)..(79): n is a, c, g, or t
  misc_feature (81)..(119): n is a, c, g, or t
ctcccctccctcctagttggctttgtctgtcaggtgcagtctggcgggagtccaggaggcagcagctcaggacatggtncnnnnnnnnnnnnnnnnnnnnnnnnnnnnnnnnnnnnnnncagaggttccagaaagttccagatttggaatcaaacagtcctgaattcaaatccttgtttttgcacttattgtctggagagctttggataaggtattgaatctctctgagcctcagtttttcatttgttcaaatggcactgatgatgtctcccttacaagatggttgtgaggagtaaatgtgatcagcatgtaaagtgtctggcgtgtagtaggctcttaataaaccctggctgaatatgaattggaatgat

SEQ ID NO: 76821 - DNA, 905 bp, Homo Sapiens
agagggctcaggcagggtggcccctcctgccgcatgcgcatcccaccccgagggccttgccaagcagtccatatccagcaaagagtagctgcccccactctctggggggaaacatgggctccaacgcatcccctcccctgcctccacaagatccactaaccaggcaccctttagaacaggggtctgggggtaccccaggggtgttaaggctcaggagtgggcagcagtcagggagagacagaactgggggaaagggatggttgtgggtctttctgttcccaagatcctgaacatggaagcgatggcagggcatagactcaggcagagaggattgtgggaggaatccgtttttgctccacctctttttgagtgaacagaggacaaaccttgggtcacagggcaagtagatcatggaccacagaacagcagatgagaaaagacttgggttggagtgaaattctggtctcagacaccaggagaccagagtctctgaggatgaagtttcctacccctatttgtagggaaaaggacttgagtgcagggaaaactcaaatcccaggccctgggaaatagtaaaataatcaaagggttttccatttcactccacttgttagtttatcttggcactgaagaggcactttcgagtatctaacttttgccattgggtggggtggggacagctgctcgcggaacagcccctagtcggctgcttccagagtaagcagtctttatgggctttctctgaggcccagtcactgctcctgggacccagtcccctggaggggaggtggaaaatcagtgctacggggccagtctttcccgtggctgccaccagcgaatgaaacttttgtatgatacataaagtgcttgagtctatttttaataaaaagggaaaaagcaacttg

SEQ ID NO: 76822 - DNA, 764 bp, Homo Sapiens
  misc_feature (597)..(597): n is a, c, g, or t
  misc_feature (665)..(665): n is a, c, g, or t
cgcatggaatataaaccaagttgtaacaaaaaagcaggctggtacggtccggaattcccgggatatcgtcgacccacgcgtcgcgctgctccgcccctctctgtcttctctgcagtgggagcagctctcctgccacagctcctcaccccctgaaaatgttcgcctgctccaagtttgtctccactccctccttggtcaagagcacctcacagctgctgagccgtccgctatctgcagtggtgctgaaacgaccggagatactgacagatgagagcctcagcagcttggcagtctcatgtccccttacctcacttgtctctagccgcagcttccaaaccagcgccatttcaagggacatcgacacagcagccaagttcattggagctggggctgccacagttggggtggctggctctggggctgggattggaactgtgtttgggagcctcatcattggttatgccaggaacccttctctgaagcaacagctcttctcctacgccattctgggctttgccctctcggaggccatgggggctcttttggcctgatggtagcctttctcatcctctttgccatgtgaaggagccgtctccnactcccatagttctcccgcgtctggttggcccgtgtgttccttttcctatacctccccaggcagctgnggaacgtgggttggctccaaagggggctttgacagagaaacagaccaaataaatactgtattactaaagaacaaaacacaaaaaaagggcgggcgctca

SEQ ID NO: 76823 - DNA, 1173 bp, Homo Sapiens
agctggtacggtccggaattcccgggatatcgtcgaccacgcgtcgaaaattaattaacactcattcatctgaacctccccgaaccccatccaacatctccgctatgatgaaacttcggctcactccttggcgcctgcctgatcctccaaatcaccacaggactattcctagccatacactactcaccagacgcctcaaccgccttttcatcaatcgcccacatcactcgagacgtaaattatggctgaatcatccgctaccttcacgccaatggcgcctcaatattctttatctgcctcttcctacacatcgggcgaggcctatattacggatcatttctctactcagaaacctgaaacatcggcattatcctcctgcttgcaactatagcaacagccttcataggctatgtcctcccgtgaggccaaatatcattctgaggggccacagtaattacaaacttactatccgccatcccatacattgggacagacctagttcaatgaatctgaggaggctactcagtagacagtcccaccctcacacgattctttacctttcacttcatcttgcccttcattattgcagccctagcagcactccacctcctattcttgcacgaaacgggatcaaacaaccccctaggaatcacctcccattccgataaaatcaccttccacccttactacacaatcaaagacgccctcggcttacttctcttcattctctccttaatgacattaacactattctcaccagacctcctaggcgacccagacaattataccctagccaaccccttaaacacccctccccacatcaagcccgaatgatatttcctattcgcctacacaattctccgatccgtccctaacaaactaggaggcgtccttgccctattactatccatcctcatcctagcaataatccccatcctccatatatccaaacaacaaagcataatatttcgcccactaagccaatcactttattgactcctagccgcagacctcctcattctaacctgaatcggaggacaaccagtaagctacccttttaccatcattggacaagtagcatccgtactatacttcacaacaatcctaatcctaataccaactatctccctaattgaaaacaaaatactcaaatggcacacattatggaggtac

SEQ ID NO: 76824 - DNA, 987 bp, Homo Sapiens
  misc_feature (25)..(25): n is a, c, g, or t
  misc_feature (49)..(49): n is a, c, g, or t
  misc_feature (68)..(119): n is a, c, g, or t
  misc_feature (123)..(157): n is a, c, g, or t
  misc_feature (852)..(881): n is a, c, g, or t
  misc_feature (888)..(903): n is a, c, g, or t
  misc_feature (908)..(914): n is a, c, g, or t
gccccccccgcgcccagccgccgtngtgcaaccggcccctcaccacccnactcactatagggcgctannnnnnnnnnnnnnnnnnnnnnnnnnnnnnnnnnnnnnnnnnnnnnnnnnnnccgnnnnnnnnnnnnnnnnnnnnnnnnnnnnnnnnnnncagtcgacggtaccggacatatgcccgggaattcggccattacggccgggggcccctctctgtcttctctgcagtgggagcagctctcctgccacagctcctcaccccctgaaaatgttcgcctgctccaagtttgtctccactccctccttggtcaagagcacctcacagctgctgagccgtccgctatctgcagtggtgctgaaacgaccggagatactgacagatgagagcctcagcagcttggcagtctcatgtccccttacctcacttgtctctagccgcagcttccaaaccagcgccatttcaagggacatcgacacagcagccaagttcattggagctggggctgccacagttggggtggctggttctggggctgggattggaactgtgtttgggagcctcatcattggttatgccaggaacccttctctgaagcaacagctcttctcctacgccattctgggctttgccctctcggaggccatggggctcttttgtctgatggtagcctttctcatcctctttgccatgtgaaggagccgtctccacctcccatagttctcccgcgtctggttggccccgtgtgttccttttcctatacctccccaggcagcctggggaacgtggttggctcagggtttgacagagaaaagacaaataaatactgtattaataagatgttaaaaaannnnnnnnnnnnnnnnnnnnnnnnnnnnnnggaaaannnnnnnnnnnnnnnnaaaannnnnnncctgtgtcggccggcccctcggcccctccgaagaagctttttttaagaaccattttcgttttggcgggcgcgg

SEQ ID NO: 76825 - DNA, 1556 bp, Homo Sapiens
  misc_feature (87)..(320): n is a, c, g, or t
  misc_feature (1513)..(1513): n is a, c, g, or t
ccccttgatgagtttacagtcccgcaccgacgaccggcccaggagtcttgagcgagagcggaagaggcccataccgcaaccgcgttnnnnnnnnnnnnnnnnnnnnnnnnnnnnnnnnnnnnnnnnnnnnnnnnnnnnnnnnnnnnnnnnnnnnnnnnnnnnnnnnnnnnnnnnnnnnnnnnnnnnnnnnnnnnnnnnnnnnnnnnnnnnnnnnnnnnnnnnnnnnnnnnnnnnnnnnnnnnnnnnnnnnnnnnnnnnnnnnnnnnnnnnnnnnnnnnnnnnnnnnnnnnnnnnnnnnnnnnnnnnnnnnnnnnnnnnnncccaagaattcggcacgaggcgcatacgcggtcagtgagaaggaagtggactctggaaacgacatttatgggcaaccctatcaagaggatccagtatgagatcaagcagataaagatgttcaaagggcctgagaaggatatagagtttatctacacggccccctcctcggcagtgtgtggggtctcactggacgttggaggaaagaaggaatatctcattgcaggaaaggccgagggggacggcaagatgcacatcaccctctgtgacttcatcgtgccctgggacaccctgagcaccacccagaagaagagcctgaaccacaggtaccagatgggctgcgagtgcaagatcacgcgctgccccatgatcccgtgctacatctcctccccggacgagtgcctctggatggactgggtcacagagaagaacatcaacgggcaccaggccaagttcttcgcctgcatcaagagaagtgacggctcctgtgcgtggtaccgcggcgcggcgccccccaagcaggagtttctcgacatcgaggacccataagcaggcctccaacgcccctgtggccaactgcaaaaaaagcctccaagggtttcgactggtccagctctgacatcccttcctggaaacagcatgaataaaacactcatcccatgggtccaaattaatatgattctgctccccccttctccttttagacatggttgtgggtctggagggagacgtgggtccaaggtcctcatcccatcctccctctgccaggcactatgtgtctggggcttcgatccttgggtgcaggcagggctgggacacgcggcttccctcccagtccctgccttggcaccgtcacagatgccaagcaggcagcacttagggatctcccagctgggttagggcagggcctggaaatgtgcattttgcagaaacttttgagggtcgttgcaagactgtgtagcaggcctaccaggtccctttcatcttgagagggacatggcccttgttttctgcagcttccacgcctctgcactccctgccactggcaagtgctcccatcgccccggtgcccaccatgagctcccagcacctgactccccccacatccaagggcagcctggaaccagtggctagttcttgaaggagcccatcaatcctattaatcctcagaattccagtgggagcctcctctgangcttgtagaaatgggagcgagaaacccagctgagctgcgttcc

SEQ ID NO: 76826 - DNA, 554 bp, Homo Sapiens
ccagacgcgggagaactatggcaggtggagacggctccttcacatggcaaagagcatgagaaaggctaccatcagacaaaagagccccatggcctccgagagggcaaagcccagaatggcgtaggagaagagctgttgcttcagagaagggttcctggcataaccaatgatgaggctcccaaacacagttccaatcccagccccagaaccagccaccccaactgtggcagccccagctccaatgaacttggctgctgtgtcgatgtcccttgaaatggcgctggtttggaagctgcggctagagacaagtgaggtaaggggacatgagactgccaagctgctgaggctctcatctgtcagtatctccggtcgtttcagcaccactgcagatagcggacggctcagcagctgtgaggtgctcttgaccaaggagggagtggagacaaacttggagcaggcgaacattttcagggggtgaggagctgtggcaggagagctgctcccactgcagagaagacagagaaaagacaaataaatactgtattaataagaaa

SEQ ID NO: 76827 - DNA, 197 bp, Homo Sapiens
cgttaaaactcagtcccatgggtcaaattatacgattctgctccccccttctccttttagacatggttgtgggtctggagggagacgtgggtccaaggtcctcatcccatcctccctctgccaggcactatgtgtctggggcttcgatccttgggtgcaggcagggctgggacacgcggtttccctcccagtccctg

SEQ ID NO: 76828 - DNA, 1024 bp, Homo Sapiens
  misc_feature (484)..(497): n is a, c, g, or t
tgactctgagttagagagtagtgttttttgtttagtcttgctctagatcataattgtaaaaaatattaagtcataatctgttacactaaaaatttgtcagccaaatgtaagatgaaatgtctgcactgtagtctcagatcactgtcacgtatataaattgcttcttcattttaatttgtacaagtacttaacagtaggaaacgccagtaaacaacttttatactgttaaaaggcttttttccccttcctaaatgttttaattgtaccatagtgttttgctcactgaagaagcttcttatggaccttgcaactttgttgccagcttgaggttgactatttgtggttgtattgttcactgtgtgtagaaatagtatgagtacgatttcaatagactgttcactttttaatattagccatagcactgggtagtatatctcagtagtttcatgaaacgtttcctgtattctaatctattttgaaacannnnnnnnnnnnnnaattgtgtcttacagtcaagtttgtagattttcataagccacaattttaaaagatgcagtaatcttccaacttccaatatttatccattcgttgtggacccacagattgcatctttaaattcataataagtttccttaactatcttatgtttctagtctttcaagcttagtgataaggtggaagcacaagaaaaatttcagtagaatacagtttttattttgtaaacactaatgtattaaacttgctatacattaaagcaaataatatatatttttatttgaattgtatatgtgaattggaagttataattagttgattttttcattttgttagaggtattttcactgaacaaggtcaattggttacctcagtattacagccaatatagtccaagggaccatttctccccgagtctcttacactttattgtgcgatgtccacgtttttgtgactcttcaagctgttggtgaggtgggacgaatgcacttgcttcctgtggcaataaagattttctgtgcctcacaca

SEQ ID NO: 76829 - DNA, 1672 bp, Homo Sapiens
  misc_feature (1448)..(1460): n is a, c, g, or t
aagattcaagatagctgtgatttctctcaccgttctctggaaatggcatcagatttaaggataatactccatcatagaaataagccttaataaccagtgttgcctcattcagctcaaacagatttcatagccaaagcaaaaggactggtacggtagtctgtggaaaccaggaagataaaacaacagccacaaaagagaaaatcaagagtgttgcaatctataacagtaatattgattcattcacattcctgtgttaagtcattttatatggaaaggcttacaaatcaatattgtaagcattcattatttaagaatgtacaatgtatttgtgtaatttatagaagtaaaatttagatgttgagacctgtttggtctaatagatgtggatacagtttattttacttgaaattttgttgtctactttgtgtgtttaacgtaaatatatgtcagagtttagaatctgcctgcagttgtgaaaaagaaagcttaagtgatgcagttattggcaagattgcaatgattatggaaaaatagaaagcgaatactcagtttaagccaaggaaaatattgtggatttaatatttgataaaactgattttgtttaacaggaaatttttagcattcagtcatataacatctggttatcaatgcacgtttacacaataaatacttgagtggaggaaagttaaaaagatgagcaatagagtagaaaatatatcttaaactagttgacctagattgtattaatagctacttaagatgtttcaaagataggaagctattgcttggacagagaacttgaaataagtggacccatgtataaaagctttgacttaaacattgatatttcagaatgtgttaaatagattaagacacagtaagttaaccctacatgttataaagatggcgactgttaacaaaggctgtaacagattaagtactattttatatccagaaagtcttctctatgtagagaagtcagagagactagatgctttcactagggaatgtcttcccacccagccatcacaaatgtggacaatcactgcatccacatctgtaggcatatttctatggaagtttaattgacagctatattcattatttattttacaatttcatttttctacacctttgagatttatgaatgcagttttttcttaaaatttattttaacttgacagtatgtttttagttcccccaatttaattaatggaccatgtgcatatatatgggagtgtgcttacatgttaataatttacttgcatacttatgagaatttcacattggaattcataatggtaaaacaacatacatctgccaatatacgttttttctgttggtttaagagaagataactgacagctttacctacttcctacagatgcatctaaacccagatattactgagaagagtgtattgactctgagtgtaagagagtatgtgnnnnnnnnnnnnnagttctgctctagatcataattgtaaaaaatattaagtcataatctgttacactaaaatttgtcagccaaatgttagatgaaatgtctgcactgtagtctcagatcactgtcacgtatataaattgcttcttcattttaatttgtagaagtactttacagtaggaaacgccagaaacaacttttatactgttaaaggcttttttccccttct

SEQ ID NO: 76830 - DNA, 1356 bp, Homo Sapiens
  misc_feature (50)..(50): n is a, c, g, or t
  misc_feature (174)..(576): n is a, c, g, or t
  misc_feature (622)..(678): n is a, c, g, or t
cgaaggaaagcgaagtctcgtagcgcagtcgaacagaggccagaggagtnccagggaaacctggttcttttgtccttcgggttcccacctttaattagcgtcatttttgatgctctcagagggcgacctatgaaaaccccacaacccggcctttaccggtcctgcctttgtggnnnnnnnnnnnnnnnnnnnnnnnnnnnnnnnnnnnnnnnnnnnnnnnnnnnnnnnnnnnnnnnnnnnnnnnnnnnnnnnnnnnnnnnnnnnnnnnnnnnnnnnnnnnnnnnnnnnnnnnnnnnnnnnnnnnnnnnnnnnnnnnnnnnnnnnnnnnnnnnnnnnnnnnnnnnnnnnnnnnnnnnnnnnnnnnnnnnnnnnnnnnnnnnnnnnnnnnnnnnnnnnnnnnnnnnnnnnnnnnnnnnnnnnnnnnnnnnnnnnnnnnnnnnnnnnnnnnnnnnnnnnnnnnnnnnnnnnnnnnnnnnnnnnnnnnnnnnnnnnnnnnnnnnnnnnnnnnnnnnnnnnnnnnnnnnnnnnnnnnnnnnnnnnnnnnnnnnnnnnnnnnnnnnnnnnnnnnnnnnnnnnaagaattcggcacgagggattttggagcggccgcggctttaggccnnnnnnnnnnnnnnnnnnnnnnnnnnnnnnnnnnnnnnnnnnnnnnnnnnnnnnnnngaatgtaatatttatttggtgaatttacatgtgaggtcatttacaaaagaaagatacagacagatgcagctttcagtgcagtttcaaacattttcacaacaggcaatagtccatgagaatttggaatgacagtatagaatggcacatgcttcagtttcctttgtgtttctctacccaaccccaagatgaaagaagggagaagagtagaagaaaatgtcagtgttaatgtaaatacagccatgcaaataaaaacttttttaaagtcagaggtcattcagagatgtagaacatttctgtatttgggggttatcagaaggtgcataatttaaaaacaaaatgcagcggtctcaaacttcccatcatccaaatcatcttgaattatattaactgcaccaactaattagtgacctcctcaatattttccaaagattgactttgaaagggagtcatttctaatagtttctaaaaaagatagcatttgtagacaaatctttttggtttcaacagaattaagcacccttaaggggtgtaaaaatgctcctttactcccaacagtgtaaaccataattataattcgttcttaaataaacctctcccaatcaagagtatttcaaaacaaaagacccctgaagaacacaacccttccctcaccagaaaaatctagcatataagcaaaag

SEQ ID NO: 76831 - DNA, 784 bp, Homo Sapiens
  misc_feature (576)..(627): n is a, c, g, or t
cccggtagcacactgcaacagcttaggccgtcagcacgagcagatgcccattagggggcctgagaactgagaacggggactgtaatctgctatttctgtccatttgttgttgacccaggtaaccaggaaatatgggaagcaggcagattctggttgtttccacaggagttgagacttaaccagacaactaactctcctgagtgttccctcttgggtgggcacaccacagttcaccccgtagtctgtggtagactcagcattagacacagtgctggtgcttaagaaaagtttccatgaacaggcagtgtgcttattgagtgccagctgtgtgcaaggtatcgtcccaggtaccgaagaggattccaggacaaagtttcctgtcttcagggaactgtcagtcaagtggatcaaaagacacatgcctgtgtgatctacaacccagtggatcataaggcacatgcctgtgttttctttgaccctcagaggaacaaaagtgtttttatttgaccctcagggttttaaaactttataccaacatttaaaaattggctaccatctatatggaaaaaaaggcannnnnnnnnnnnnnnnnnnnnnnnnnnnnnnnnnnnnnnnnnnnnnnnnnnnaggcagcactgcagaagaacccggccacagtgatggcctcttcaaatagggaatcggggagcaggaatgggtgagagacttgttgcaatgttttataatttttttaaatgtaaaatgtaataactttacaaataaaaaaggattggggaattcacat

SEQ ID NO: 76832 - DNA, 1062 bp, Homo Sapiens
cttactcttattcaacaggaagtggatgctttggaagaattaagcaggcagctttttctggaaacagctgatctatatgctaccaaggagagaatagaatactccaaaaccttcaaggggaaatattttaattttcttggttactttttctctatttactgtgtttggaaaattttcatggctaccatcaatattgtttttgatcgagttgggaaaacggatcctgtcacaagaggcattgagatcactgtgaattatctgggaatccaatttgatgtgaagttttggtcccaacacatttccttcattcttgttggaataatcatcgtcacatccatcagaggattgctgatcactcttaccaagttcttttatgccatctctagcagtaagtcctccaatgtcattgtcctgctattagcacagataatgggcatgtactttgtctcctctgtgctgctgatccgaatgagtatgcctttagaataccgcaccataatcactgaagtccttggagaactgcagttcaacttctatcaccgttggtttgatgtgatcttcctggtcagcgctctctctagcatactcttcctctatttggctcacaaacaggcaccagagaagcaaatggcaccttgaacttaagcctactacagactgttagaggccagtggtttcaaaatttagatataagaggggggaaaaatggaaccagggcctgacattttataaacaaacaaaatgctatggtagcatttttcaccttcatagcatactccttccccctcaggtgatactatgaccatgagtagcatcagccagaacatgagagggagaactaactcaagacaatactcagcagagagcatcccgtgtggatatgaggctggtgtagaggcggagaggagccaagaaactaaaggtgaaaaatacactggaactctggggcaagacatgtctatggtagctgagccaaacacgtaggatttccgttttaaggttcacatggaaaaggttatagctttgccttgagattgactcattaaaatcagagactgtaaa

SEQ ID NO: 76833 - DNA, 878 bp, Homo Sapiens
  misc_feature (68)..(117): n is a, c, g, or t
ggaccggtccggaattcccgggatatcgtcgacccacgcgtccgaagagagaaggaggcccagacagnnnnnnnnnnnnnnnnnnnnnnnnnnnnnnnnnnnnnnnnnnnnnnnnnnaagggttctggattggaggggagagcaagggagggaggaaggcggtgagagaggcgggggcctcgggagggtgaaaggagggaaggagacagggcggggcacggaggcccgagcgagggacaagactccgactccagctctgacttttttcgcggctctcggcttccactgcagccatgtcactcctcttgctggtggtctcagcccttcacatcctcattcttatactgcttttcgtggccactttggacaagtcctggtggactctccctgggaaagagtccctgaatctctggtacgactgcacgtggaacaacgacaccaaaacatgggcctgcagtaatgtcagcgagaatggctggctgaaggcggtgcaggtcctcatggtgctctccctcattctctgctgtctctccttcatcctgttcatgttccagctctacaccatgcgacgaggaggtctcttctatgccaccggcctctgccagctttgcaccagcgtggcggtgtttactggcgccttgatctatgccattcacgccgaggagatcctggagaagcacccgcgagggggcagcttcggatactgcttcgccctggcctgggtggccttccccctcgccctggtcagcggcatcatctacatccacctacggaagcgggagtgagcgccccgcctcgctcggctgcccccgccccttcccggcccccctcgccgcgcgtcctccaaaaaataaaactttaacggcgggcaaaaaaaa

SEQ ID NO: 76834 - DNA, 796 bp, Homo Sapiens
cactgtgatgctgagcttgttcatgtgccaataaatattgtcagaccagcccatgtgaaaggaaggggaggtcatatggatcatataacactaatgaagatatggaacctgattggttaacttggcctgctgatatgctgcactgtactgaatgtgttgtttgcctagagaattctgaaaatggatgtttgctaatggggttgccttgtggtcatgtgtttcatcagaattgcattgtgatgtggttggctgggggccgacattgttgccctgtttgccggtggccttcttataaaaaaaagcagccatatgcacaacaccagcccttgtcaaatgatgtcccatcttaaccatgtgcaatttgtcctttataagctttgagtatcttacagcttgcctttttaatgttagtcacaatgtttttgtggtttgaagtttagtttaatgttagtgcagtgacgggaaatacacattatgctaatgttgatgacagaatttatttggttgccttgtgtgttaattgaatgcatacctaattgtaaaatttttttatttacaacattggaaattcagaagttaatgtttttttgtaagcacaaaagaagtattatagaaatttatcctagcaagactttacaagataggatcaaattctaatggaattgagccggtttcttatcctaaatgtttcctccctttttacaatctctgtccagcacctcttggttaaataatgtatgctgtgagacatgaaattaaaacagacctatgaaataaattattttaaaaccagaaa

SEQ ID NO: 76835 - DNA, 1461 bp, Homo Sapiens
  misc_feature (924)..(924): n is a, c, g, or t
ccaggtaggaaaacacagccgggactgcactggctgggctcttattgctctctactctggggggcactgataggacctactcctggtctctcattgttgacccctcccctttctgctcaggtgtctctaccacagggagcagggagtatgtgaggtgagtctgcctgagccctaaatgaggtaatctcatcttcccatcacctacttaaactatttaagcctttcggcttcctgaaccccccgaggaaaccccagagcttagccagagccaacactaaagcccggagggaggggcccaagcccagggaagcccactcaagagccaaatgggcagccaagcaaaccagacacagctgatcaacaggaagctctaacacagggagtcagccactactccaagtctccttcattgtgctgatggactaccagctggcagggccagggggtgggtgggcgtgaaagccctcccctccactggacagcactgccccccagctgagggaccagctctacttccacctggagttgcacagtctcaggctgggggcctcaggagaggtcacagcccctcagtctcttctccttcccctgcctgcaacaggctgcctgccccgccttccccaacacctcgctccatatgatagagcgtggcagctgggagcaggcccctgcccgtggtgggcccctaaagcaatagcaccgtaggccccctgccctcttagcacaagaggcccaggccctggcctggccttcgtgccctttattcattgtcaataaatccgctcagaccattacagctgcttcgcatcctggctccagctcctgattcccaaggcctgttcctctccccagcccaaccccagtgaccctggcatccagagtggggtgggtcatggagccagggtggggaaagaggtgggccanaaccactagagaccttgatggatggtttccagccccagagatttcaggcatttcaccaccctagatagggtcatgacagaagagaaggtagtagttccggtcctagagatgatagaacaatgggaaaaaaaggagtgggttccagctctagaaatgggaaggggcaagtttccacccttggaggtgagggtggaaataagggcgattccagcttttggctgtgttgctctggatcattgatggtgtggtctgacagcttgaagatagggacagcagcatcactgggggtcaaggcttccctggccttcaggtgaggggatctgggtggccaggatccggggctttagccggcgggggaggtggtggacgcatcggcctgagtcgaggtgccatcatgtccaggaacccagggaagtccagggctttgtctatcaggtacaatgttcactatttgagttacaggtacactagaagcccaatctccaccagtatgcaatatatccatatgacaaacaagcacatgtacctcatgaatct

SEQ ID NO: 76836 - DNA, 510 bp, Homo Sapiens
cacaataaatgactaagtgctaagtcatgcaaagtgaacttggggtggtggagatggtggtaactccagggagggagactcctcgtgcacaaggtggaagtaccagaaagttttagaaaaggcaggcattccacagccataaaaaagaatgaaatcatgtcctctgcagcaacatgaatggagttggatgccattatcctaagtgaactaactcagaaacagaaaaccaaatattgcatgttctcacttataagtgggagctaaacaacgggtacacatggacatagagatggaaataacagactcccaggactccaaagggggcaaaggtaggagtagaggcaggggcgagggttgaaaaattacctatcaggtacaatgttcactatttgagttacaggtacactagaagcccaatctccaccagtatgcaatatatccatatgacaaacaagcacatgtacctcctgaatctaaaataaataataaaataaaactgctatagacaaa

SEQ ID NO: 76837 - DNA, 1303 bp, Homo Sapiens
aaatggtctctggatttggacccatctataattacaaagacactattgtgtttaagtgccaaaaaggttttgttctcagaggcagcagtgtaattcattgtgatgctgatagcaaatggaatccttctcctcctgcttgtgagcccaatagttgtattaatttaccagacattccacatgcttcctgggaaacatatcctaggccgacaaaagaggatgtgtatgttgttgggactgtgttaaggtaccgctgtcatcctggctacaaacccactacagatgagcctacgactgtgatttgtcagaaaaatttgagatggaccccataccaaggatgtgaggcgttatgttgccctgaaccaaagctaaataatggtgaaatcactcaacacaggaaaagtcgtcctgccaatcactgtgtttatttctatggagatgagatttcattttcatgtcatgagaccagtaggttttcagctatatgccaaggagatggcacgtggagtccccgaacaccatcatgtggagacatttgcaattttcctcctaaaattgcccatgggcattataaacaatctagttcatacagctttttcaaagaagagattatatatgaatgtgataaaggctacattctggtcggacaggcgaaactctcctgcagttattcacactggtcagctccagcccctcaatgtaaagctctgtgtcggaaaccagaattagtgaatggaaggttgtctgtggataaggatcagtatgttgagcctgaaaatgtcaccatccaatgtgattctggctatggtgtggttggtccccaaagtatcacttgctctgggaacagaacctggtacccagaggtgcccaagtgtgagtgggagacccccgaaggctgtgaacaagtgctcacaggcaaaagactcatgcagtgtctcccaaacccagaggatgtgaaaatggccctggaggtatataagctgtctctggaaattgaacaactggaactacagagagacagcgcaagacaatccactttggataaagaactataatttttctcaaaagaaggaggaaaaggtgtcttgctggcttgcctcttgcaattcaatacagatcagtttagcaaatctactgtcaatttggcagtgatattcatcataataaatatctagaaatgataatttgctaaagtttagtgctttgagattgtgaaattattaatcatcctctgtgtggctcatgtttttgcttttcaacacacaaagcacaaattttttttcgattaaaaatgtatgtataaaaa

SEQ ID NO: 76838 - DNA, 821 bp, Homo Sapiens
gctccctgaaccagaacagtgtgcctgacattcatggtgtagaggcccctgccagggagggcgcaatgtctgctcagcttggctaccctgtggtgggttggcacatcgccaataagaagccccctcttcccaaacgcgtccggaggcagatccatgctacacccacacctgtcactgccattgggcccccaaccacggctatccaggagcccccatccaggatcgtgccaacccccacatctccagccattgctcctccaacagagaccatggctcctccagtcagggatcctgttcctgggaaacccacggtcaccatccggactcgaggcgccattattcaaaccccaaccctaggccccatccagcctactcgggtgtcagaagctggcaccacagttcctggccagattcgcccaacgatgaccattcctggctatgtggagcctactgcagttgctacccctcccacaaccaccaccaagaagccacgagtatccacaccaaaaccagcaacgccttcaactgactccaccaccaccacgactcgcaggccacccaagaaaccacggacaccccggccagtgccccgggtcaccaccattgaccactcctgcatccggtggaactcgctgtgcttggggaggcgaggggcctgcgcctactatgacaacgatgctctccgagacaggtacctgggcctgcagatgggctacaaggcgctgggcatgctgctgctttgcttcatcagctggagggtgaagaagaacaaggagtacatcgtgcagaaggcggcaggcctcctctgtccgggtccggag

SEQ ID NO: 76839 - DNA, 1211 bp, Homo Sapiens
  misc_feature (475)..(528): n is a, c, g, or t
ttcccatcgcacacacctccgagtttatctcagcatgctatctcaacattcagctaatatgcggacggcacccttcacttcatacagttcatatgcgctctgtccatctccaccagggccagctgtgagcacaatctacatgcggccttctatatgtataatctggatgatcatgtcaagatcacctagtactagatgctacagataattgaggctatatacaaaatcgtaggcgctatgctcatgatgtaaacgcataagcatggcctgacgcctgagcagcaagtacacactattttcagacagatggataagaacccaaatgaccagattacctcggatgaattcatagaggccgcgaagagccaccatcccatggcataatctcgccagtgcgacattccactaatgagcttgatgtccatgctatggaccgctcacaagtctcactgttccatacagtccgcagctattnnnnnnnnnnnnnnnnnnnnnnnnnnnnnnnnnnnnnnnnnnnnnnnnnnnnnnaatattgcttggactacctataaatggacttgcttcttgtgtttgaaacactcgtgtgcatgagaatgtcatttgctaatgaattttaaaagcatatataaaacaaaacaaacaacctgccacaatgtgatatgtgtaatatcatttcataaaaatccctcttcctccaaagcctgggcagaaatgtgctgcaaagagttatatgacttcttgttcatgttttgctaatgctcgtatctccttgattacataatgttagtagcactgagacccccatggtaatgtaacttaattataagctatgtcactaccctcctgtaaaatactattggacagacacagagggacccttggctcctgtgtctggtccacacaccacagaagcttgtattatcagtgaatataaatgtactacatttgcatgccttttgggtttgccttaattcttacctcatttgcatcctatcgatctggaaagagctgttttggatgaatgcagtataaaatgtaaaaaccctgctaaatgacttattgattaagtatatctatctatatatacatatacacaaagatattatttatcgaaagtaaaaaagatggaagtgtattggtttctgtttgaattttcaaaggcttccaaatgtggtggcaataaatgtccccaaataaatttataacaattg

SEQ ID NO: 76840 - DNA, 1438 bp, Homo Sapiens
cctaggacgaggcggagtaaatggcacgaggattctccaggtgcttgcgaggtgatcagaaggcaaagatgtcggagcgaaaagtattaaacaaatactacccgccggactttgacccatcaaagatccccaaactcaagctccccaaagaccggcagtacgtggtgcggctgatggcccccttcaacatgaggtgtaagacgtgcggagaatacatctacaaggggaagaaattcaatgctcggaaggagacggtgcagaacgaggtctacctgggcctgcccatcttccgcttttacatcaagtgcacgcgctgcctggcagagatcaccttcaagacagaccctgaaaacacagactacaccatggagcatggagccacgcggaatttccaggctgagaagctcctggaggaggaggagaagagggtgcagaaggagcgggaggacgaggagctgaacaaccccatgaaggtgctggagaaccggaccaaggactccaagctggagatggaggtgctggagaacctccaggagctgaaagacctgaaccagcggcaggcgcacgtggacttcgaggctatgctgaggcagcaccgcctgtcggaggaggagcggcggaggcagcagcaggaggaggacgagcaggagaccgcggccctgttggaggaagccagaaagcgaagactgctggaggactccgactcagaggatgaggctgctccctcgcccctgcagccagcccttcggccaaccccaccgccatcctggatgaggccccaaagcccaagaggaaggtggaggtctgggagcagaggcgttggcagcctgggcagccggcccccgctgtcgaggctggtcgtggtgaagaaggcaaaggccgacccggactgcagcaacgggcagcctcaggcggccccccccccaggagccccgcagaacaggaaggaggccaaccctacacccctgacgcctggcgcgtcctccctgagccaactgggtgcatacctggacagtgacgacagcaacggcagcaactgagccctcccaggaccccctcacggggtcaaagtcacacgtccagcttcagccacattgaggccagcattgctggtggtcagggcaggaggccttggcgtgactggaggccggacagacaagcgccagcgtgctccaacacatagggccaccaggggcctcagccccaggaggtcccttctctgtgccctcaccagcctctcaacacctcggggacccctgctgctcctgcccccacctgtcactgtgcttagggctgcaacatccctggagcagcttccaacactacttcagggtggcagtgtttggggcactgggcgagcctgccggcctctagatggcctcatctcttccttccacaaactgtctagaaccaataaaaggaaacctgccaaaaaaaa

SEQ ID NO: 76841 - DNA, 703 bp, Homo Sapiens
tagaagggaatccattgctagcttttctgtgttggtgtctaatatttgggtagggtgggggatccccaacaatcaggtcccctgagatagctggtcattgggctgatcattgccagaatcttcttctcctggggtctggccccccaaaatgcctaacccaggaccttggaaattctactcatcccaaatgataattccaaatgctgttacccaaggttagggtgttgaaggaaggtagagggtggggcttcaggtctcaacggcttccctaaccacccctcttctcttggcccagcctggttccccccacttccactcccctctactctctctaggactgggctgatgaaggcactgcccaaaatttcccctacccccaactttcccctacccccaactttccccaccagctccacaaccctgtttggagctactgcaggaccagaagcacaaagtgcggtttcccaagcctttgtccatctcagcccccagagtatatctgtgcttggggaatctcacacagaaactcaggagcaccccctgcctgagctaagggaggtcttatctctcagggggggtttaagtgccgtttgcaataatgtcgtcttatttatttagcggggtgaatattttatactgtaagtgagcaatcagagtataatgtttatggtgacaaaattaaaggctttcttatatgttaaaa

SEQ ID NO: 76842 - DNA, 676 bp, Homo Sapiens
ggaaagcctccagttccaacattggctttccaagcaaactggctttgccctctctctgccatccttgtcctccagagactgcaccacctgtagcatagaaaaccaccaccacggacctgccagccatcggcgcagcaaaccagccagctgtttgctgccaaattccttcctctcccaggtccagaccaaatacaagatcagcaccacaccgtggtgttgtcaggagccaaagcaacaggaaacaattcaatgctgttgggttcgattctgagagtagatttttccagacatgtctttcaggtgaccctcaactacctcaggtttgaaggccctaaatgaaactgattaccactcatagggacaaaccgagggggttcggttacatcttggtgataatgcagttgtctcaaacttataacagactctttcacatttcagtttgcagggatagggttgggtttgtttttcttctgtttttaacctttcccctgggtttccattagggtagttccttgaaatgaatttcatttttcactgagtgcctaccttcccagggcaggtggccactggcttctgtttccctccaacaatacttttattatggtattaagacctttctttgtataatacattgcatctgtgttttcaatttttcaaataaatatttccgcctggc

SEQ ID NO: 76843 - DNA, 729 bp, Homo Sapiens
  misc_feature (81)..(81): n is a, c, g, or t
  misc_feature (485)..(503): n is a, c, g, or t
  misc_feature (713)..(722): n is a, c, g, or t
aattagaaaaagtgggtgatctttccaggaaaaacatgtgtaacatctgcgtatcactccagctccctcctcctcctcctntccacgttcccttgagtaaatgtctgggaaagcatgaagcttgatgcaagaaccctgttgtactggcgttttcctcccctgtgaaaacgtaactactgttgggagtgaattgaggatgtagaaaggtggtggaaccaaattgtggtcaatggaaataggagaatatggttctcactcttgagaaaaaaacctaagattagcccaggtagttgcctgtaacttcagtttttctgcctgggtttgatatagtttagggttggggttagattaagatctaaattacatcaggacaaagagacagactattaactccacagttaattaaggacgtatgttccatgtttatttgttaaagcagtgtgaatagccttcaagcatgtgaataatcttccatcttccccgcnnnnnnnnnnnnnnnnnnntttttgtttctttcaggtagacaccttttaaaatgcagaactaactgaggcatttcagtaactttgctttcaaatcaataaagtcaaatgtatggaaacattttgtgccctactctccataccccgtgtactcaaattctctactgtatgaattatgctttaagtagaattcagtgccaaggagaacttggtgaaataaattattttaannnnnnnnnnatccttt

SEQ ID NO: 76844 - DNA, 540 bp, Homo Sapiens
gcacgaggggcccaggcaagagggcgcgtggcagcccaaggccatggcgggacacccaaaagagaaggtgattccagatgaggtccatcagaaccagatcttgcgggaactgtacctcaaggagctacgaacccagaaactctacacgcagtatcacgtgaatcccctccgcaagagtgaggttcatacagtcaccaggaagcccatgtcttggcatgataacctggaggaacctgcagatgccaggtttctgaatctcattcaccatgctgcccagggaccaaggaagaagtacccagagacacagactgaaaaccaggaagttggatgggacttagagcccttgatcaacccagaacgccatgaccgcaggctgaatcacttcagggtctgcagtgacatcactctgtacaaggctaaaacgtggggcttaggagatgatcaccacaagtagcatcccagcggatgagcccatctgtggatctaatgccttaagtgtgcacagcccagagaaataaaatactactttaaaacgaaaaa

SEQ ID NO: 76845 - DNA, 973 bp, Homo Sapiens
gggtccggaattcccgggatgtgcatgtgtctccagatcagtgagcactctggagttgcagagggtctgcaaatattccatgctgttcatcatataaacctggggacaatgccatcacaagagcactgctagcatagtaagaaagtataccccaaaaaccatgagatgcaggtgttgtgtaaccagaagaggtaattaagttggagcttcagaatgaagtagctgggccagaagaggcttgatcagctgcaacttgaagctccctgccccctggcagagcctcaccttggatagacaagatacctccagtctcagtactgggacactggcaaagccagactcaatgaccatcattcagcctctcatctcctggtaacattttctggaaatacattttttaaattatttgcacggtgtaacttctataagatcgatgtgtcagagtgccgacttttacttagattctatgtgactctttcaacaaattcattctttcagcaaatatgcattgaatacctagcatgcgctgggtcttgctctaggtgctgaggatactgtggcctcccagtcaggcagtgtgacagggagaaccacgactgtgcgtaggttattctcctctgacctcacaacctttttgatgtacatgtggtcatctccattccgcaatgcagccacaggctgggagggtggagcctgatataagccaggcccattgactccaaacccaggtcctcctgcatcctcacaggcttctttctgattctgcatcctcctttctagatcaacccagaacgccatgaccgcaggctgaatcacttcagggtctgcagtgacatcactctgtacaaggctaaaacgtggggcttaggagatgatcaccacaagtagcatcccagcggatgagcccatctgtggatctaatgccttaagtgtgcacagcccagagaaataaaatactactttaaaacgaaat

SEQ ID NO: 76846 - DNA, 1005 bp, Homo Sapiens
  misc_feature (101)..(101): n is a, c, g, or t
  misc_feature (130)..(130): n is a, c, g, or t
  misc_feature (176)..(176): n is a, c, g, or t
  misc_feature (208)..(208): n is a, c, g, or t
  misc_feature (312)..(312): n is a, c, g, or t
  misc_feature (316)..(316): n is a, c, g, or t
  misc_feature (670)..(682): n is a, c, g, or t
ttgatctgctctgccctgctcactccatgtgtggatacagctgacacgcaccacctttttttatacccagcatgtgtgcatctgtgtccagtactcagagntggatggagatgctgacccagagtcgagntgcatgaccatatcatgcatgcatccagcttgatgacagcggactntaaaataaagagtgtgacagagagtgtcactntgaaagaaaaaataacacgtctcacgctgctgtgactgacgataagcaggagagtgggaagatacctcccgccagtggaaagacaacagcagaattagaagcgntatntgccaaacaccgtaataaacacaggcaacattagcaaaaaatgctagaccttgaggagtcccagggtatttggaaggcctcccccaagagacatctgataaagggcaaaacagtcacttcacagtgaaaacccctggcagaccccgtctcagccgaacggccagcaatgggactgacgggatgcacgtcacctcggctgccactctgagaaaagcacagccttatggtcaccgcgtggagacaccagacaaacctgagctgaggacggtctgccgaatgacaggccagtgctcttgggacagtagatgtcacaaaacacagaagctgactggggaacactctagattaaaggcnnnnnnnnnnnnncaaatgccacgcagcagggggcgtgctgtttacaggacaccactgggacagtccatgagggctgagcctgctacagacgaggatcggcagcccagcacctgctggtttcaggaaatgctcgctgtcgcattcaggggagagggcagtacctgccacgcacggactgaaacacggctccagcaggaaagcctgtgtgagtgcgtttgcatggaaacaggaaaaagcagggacaacattcacatcggggcaactgggaaaacccttcgcaccattcttactgcttttctgtaaattcggctaaaataaagacgagggataaaagg

SEQ ID NO: 76847 - DNA, 1514 bp, Homo Sapiens
  misc_feature (48)..(48): n is a, c, g, or t
  misc_feature (53)..(53): n is a, c, g, or t
  misc_feature (1347)..(1375): n is a, c, g, or t
ctcacgcccagagatgatcctcagcatgatggaccggtgatggcggcntcgtngcgtcgccaggacttctctgggctgtgtttaaacggcccgcatcttaatttttctcccttctttctttttttggctttgggaaaagcatcattttaccaaacataccgagaacgaaaacttcaaggatgatgttagaaaaaaatgtgatttaactagaacttgctgtctgatgttagcaaatcatggaatgttctgagtccctgagggtttactgtgaagtgctgaggacagtgttgacaactaactcgttttcctagatggaaacggagacattgacccctccctccatgtggtaaaccactccagaatggccaccaggcttcccagagttctatggtcttcttcccaagagagtttttaattgtaaatgcatacttgggaaggacttagagttttaaactgctttttgcttttgcttttccctgactccctttgcttggagtcagctgcacaccagtagtatggcatgctacgatcaggttctgtcctgaaagctttgcctcttccttggcaaagtttctggtatggtcaagcttgtaaataactttttttacattttaatcctttccattaattaagaggttgaaaagaagtgcagtgtaagaaaacccagcattttaattacttgcaaattaagttaccacagactctgtagtgtgtaaatgttgacaaggaattggatcacaatcatgtagcagaatggcacccagaccactgcccaccagtgacggacatgcacgtggcagatcatgatttccagcccacggagccagcatttgaaccttgtataattaactttcagttatgatttcccatcgacattttctttgccctgtttgtagctgattgttgtgttttataaatcttctgttaaggcagaagggtgattatgagtggttcacagcagcccttataagctgggccagaaaatttcactaggtcagtaatttaaaccttggatcttcaaaaaataaaataatgtgaagcaaaaccaactaaaaagtgattcttgcacatgaactgtcacatgtttaaaaatgtgttttttagagagcctcagtcttactgatttcaaacacttttttcttctgtgtattgcttttaagagagccatcagttagctatcagactctaggttgatgcattttgtacttagctgtactgtgtgatatttttcattattttaggacgccaacatgagacctgtaataaaatatgtaatggggttgaaagctggggaggaggatctactgctgtacagctaataaatcataacggattaacaagtgctcnnnnnnnnnnnnnnnnnnnnnnnnnnnnnccttgtcggccgcctcgggccctcgagaagctttcaaaacatttcgtttggcgcgcggggcccagtagggtaaggaacatggtcatagcctgtttcccaaggaaatcctgggccaggactagggcttgggattcccccc

SEQ ID NO: 76848 - DNA, 783 bp, Homo Sapiens
  misc_feature (14)..(14): n is a, c, g, or t
gaaataaatgtgtntgtgttgtctgattagatgatcattggtgtcttgccacaatgtttaaaaattactgtacaggaaagtcacagcaaagatagcagttgtgactgacatgtaggactttcacagttgtgccacatttttgcctaaaatttgggttatgacatttttcttggttcttatctgaaaatttcatctgtaacctttcatgtgtgttaagaaacactgatctgatcatttgggatttgctgaggcatttgtgagtcttccttataaacctgatgagcagatctcaactatctagcttgtgtgtcatcagaaaggtttatccctttgagagtatcaagtcctcagttaatgattcttgctttcatccctccagtatttgctgtgggagctcgttttattctttaatttggaattcagtaatttttcttctttattgacgaattcctcccctcacaaaactgttctttcccacctctctccatatctaattcctgattcttgttatttttaagtcataaatgtagccagtcataaatacataaatgttaaccttcgggttgcaaccttgtctcttgcagtttaaggtaatggatattgtagcccatttgaattttcttcactcttattctcgtaattctggagtttcttcagattgtggtgtattttattgtgctcctatgtaagatgaagaattaactattaaaattacattttcaacatacaaaagcttttgatgactggtaactggtatccttccaaataaatgcattgcttggt

SEQ ID NO: 76849 - DNA, 1579 bp, Homo Sapiens
  misc_feature (638)..(638): n is a, c, g, or t
ggggcgctgtactgcggcttgtgccgcttccgcaagaaggtttcctggcctgttgcagccatggtgcattgcagttgcgtgttgttcagaaagtacggaaatttcatcgataagctaagactcttcaccaggggaggatccggtggaatgggttatcctcgtttaggtggagaaggtggaaaaggtggtaatgtctgggttgtagcccaaaacaaaatgactttaaaacaacttaaagacaggtatcctcggaaacggtttgtggctggagtaggagcaaacagcaaaattagtgcactgaaaggctccaaaggaaaagactgggaaatccctgtgcctgtgggtatttcagtaactgatgaaaatggtaaaattataggagaactcaataaagaaaatgacagaattttggtagctcaaggaggtcttggtggtaaattacttacaaatttcttaccattgaaaggccagaaacgaataattcaccttgatctaaaacttatagctgatgtaggcctaataggattcccaaatgctggaaaatcctctttgctaagttgtgtttctcatgcaaaacctgcaattgcagattacgcatttacaacattaaagcctgaacttggaaagataatgtacangtgatttcaaacagatatcagtagcctgatctttccggggtttaatagaaaggagcacatatgaacaaaggaatgggccacaaattcctcaagcatatagaaagaactagacaactactttttgttgttgatatttctggatttcagctttcttctcacactcaatacaggacagcttttgaaaccataatactgcttacaaaagagttggaattgtacaaagaggaacttcagacaaaacctgcactcttggcagttaataaaatggacttgccagatgcccaagataagttccatgaattgatgagccagctccagaatcctaaagattttctgcatttatgtgaaaaaaacatgattccagagaggactgtagagttccaacatatcatccccatatctgcagttactggagaaggaatcgaagaattaaagaattgtataagaaagtcactggatgaacaggccaaccaggaaaatgatgcacttcataagaaacagttgcttaatttgtggatttctgatacaatgtcttatactgagccaccatcaaagcatgctgttaatacttccaaaatggatataatttaaatatattaaaaatggtattgatggaacagtatttaatgcttaaaaacaaggaaatcctttcatctgtgacaacctggaggacatgttaagtaaaataagccaggcttagaaagacaaatgctgcataatctcactgtggaatcttaagttgaactcatagaaggagagaatagaatggtggttatcaagggctggtggggcagtggaggattgaggagatattggtcaaaatttacaaaatttcagttagacaaggcaactgagttcaagagatctgttgtacagcttggtgactgtaattaacaacaatgtattttgaaagtcactgagtaaattttaagtgtttttcc

SEQ ID NO: 76850 - DNA, 631 bp, Homo Sapiens
gcagccgcggattcggaggcggccggcggggggtggcgaggggcgccgggcccccgcggacctgtcgtcctcggcccgtcctccggccccggccccgcgcggctgaggaggcgcggccaggaccatgtcggcgggcggccgtgacgaggagcggcggaagctggccgacatcatccaccactggaacgccaaccggctggacctgttcgagatcagccagccgaccgaggatttggagttccatggagtgatgagattttattttcaagataaagctgctggaaactttgcaacaaaatgtattcgggtctctagtactgccaccactcaagatgtaatcgaaacgctcgcggagaaatttcgacctgatatgcgaatgctgtcctctcccaagtattcactctatgaagtgcatgtcagcggagaaagaagattggatatagatgagaaacctctagttgtacaactgaattggaacaaagatgatcgggaaggcagatttgttcttaagaatgagaatgacgccattcctcctaagaaggctcaaagtaatggacctgaaaagcaggaaaaagaaggggttatccagaacttcaagagaactctctcaaagaaagacagtaacaataga

SEQ ID NO: 76851 - DNA, 517 bp, Homo Sapiens
  misc_feature (220)..(237): n is a, c, g, or t
cccaaccccaggcctcctgaacaggcccaaccccttgctggcgttgccccccgcccgcccccacggcccacaggacaaggaccaggcagtggagagcgcccaagcggaggattactcgcagctgcccggagaagatcacatcctggagcacctgcccgcccggctcaatgagggtgcgcacctgagggacgggaggcgaggaggcgaggcaggatggaannnnnnnnnnnnnnnnnncagatattattttcaagataaagctgctggaaactttgcaacaaaatgtattcgggtctctagtactgccaccactcaagatgtaatcgaaacgctcgcggagaaatttcgacctgatatgcgaatgctgtcctctcccaagtattcactctatgaagtgcatgtcagcggagaaagaagattggatatagatgagaaacctctagttgtacaactgaattggaacaaagatgatcgggaaggcatatttgttcttaagaatgagaatgacgccattcct

SEQ ID NO: 76852 - DNA, 2066 bp, Homo Sapiens
tccccccaccgggccccataggtcctaagtagcgaggcctgggtggcgaattcggcacgagggcggggaccccgagctagagccgcagcgggacctgcccggcccccggctccagcgagcgagcggcgagcaggcggctcacagaggcctggccgcccacggaacccggggcccggcggccgccgccgcgatgtttccccgcgagaagacgtggaacatctcgttcgcgggctgcggcttcctcggcgtctactacgtcggcgtggcctcctgcctccgcgagcacgcgcccttcctggtggccaacgccacgcacatctacggcgcctcggccggggcgctcacggccacggcgctggtcaccggggtctgcctgggtgaggctggtgccaagttcattgaggtatctaaagaggcccggaagcggttcctgggccccctgcacccctccttcaacctggtaaagatcatccgcagtttcctgctgaaggtcctgcctgctgatagccatgagcatgccagtgggcgcctgggcatctccctgacccgcgtgtcagacggcgagaatgtcattatatcccacttcaactccaaggacgagctcatccaggccaatgtctgcagcggtttcatccccgtgtactgtgggctcatccctccctccctccagggggtgcgctacgtggatggtggcatttcagacaacctgccactctatgagcttaagaacaccatcacagtgtcccccttctcgggcgagagtgacatctgtccgcaggacagctccaccaacatccacgagctgcgggtcaccaacaccagcatccagttcaacctgcgcaacctctaccgcctctccaaggccctcttcccgccggagcccctggtgctgcgagagatgtgcaagcagggataccgggatggcctgcgctttctgcagcggaacggcctcctgaaccggcccaaccccttgctggcgttgccccccgcccgcccccacggcccagaggacaaggaccaggcagtggagagcgcccaagcggaggattactcgcagctgccgggagaagatcacatcctggagcacctgcccgcccggctcaatgaggccctgctggaggcctgcgtggagcccacggacctgctgaccaccctctccaacatgctgcctgtgcgtctggccacggccatgatggtgccctacacgctgccgctggagagcgctctgtccttcaccatccgcttgctggagtggctgcccgacgttcccgaggacatccggtggatgaaggagcagacgggcagcatctgccagtacctggtgatgcgcgccaagaggaagctgggcaggcacctgccctccaggctgccggagcaggtggagctgcgccgcgtccagtcgctgccgtccgtgccgctgtcctgcgccgcctacagagaggcactgcccggctggatgcgcaacaacctctcgctgggggacgcgctggccaagtgggaggagtgccagcgccagctgctgctcggcctcttctgcaccaacgtggccttcccgcccgaagctctgcgcatgcgcgcacccgccgacccggctcccgcccccgcggacccagcatccccgcagcaccagccggccgggcctgcccccttgctgagcacccctgctcccgaggcccggcccgtgatcggggccctggggctgtgagaccccgaccctctcgaggaaccctgcctgagacgcctccattaccactgcgcagtgagatgaggggactcacagttgccaagaggggtctttgccgtgggccccctcgccagccactcaccagctgcactgagaggggaggtttccacacccctcccctgggccgctgaggccccgcgcacctgtgccttaatcttccctcccctgtgctgcccgagcacctcccccgcccctttactcctgggaactttgcagctgcccttccctccccgtttttcatggcctgctgaaatatgtgtgtgaagaattatttattttcgccaaagcacatgtaataaatgctgcagcccagcctctgccc

SEQ ID NO: 76853 - DNA, 994 bp, Homo Sapiens
gaggcctgggtggcgaattccgcacgaggggcggccccagtcagacgcaggcagccccaaagcctgaacaggcagggccagacccagcttcttcgcctccgccagcggggaccccgagctagagccgcagcgggacctgcccggcccccggctccagcgagcgagcggcgagcaggcggctcacagaggcctggccgcccacggaacccggggcccggcggccgccgccgcgatgtttccccgcgagaagacgtggaacatctcgttcgcgggctgcggcttcctcggcgtctactacgtcggcgtggcctcctgcctccgcgagcacgcgcccttcctggtggccaacgccacgcacatctacggcgcctcggccggggcgctcacggccacggcgctggtcaccggggtctgcctgggtgaggctggtgccaagttcattgaggtatctaaagaggcccggaagcggttcctgggccccctgcacccctccttcaacctggtaaagatcatccgcagtttcctgctgaaggtcctgcctgctgatagccatgagcatgccagtgggcgcctgggcatctccctgacccgcgtgtcagacggcgagaatgtcattatatcccacttcaactccaaggacgagctcatccaggccaatgtctgcagcggtttcatccccgtgtactgtgggctcatccctccctccctccagggggtgcgccaaggggatgggggcatttcagacaacccggcccctctatgagcttaagaacaccatccacggggtccccccttccccgggcggagagtgcacatcctggcccgcagggacaagtttccccccaaaaatcccacggaagcctggcgggggttcaccccaacaacccaggccatctcaaggtttcaaaacctgtgggggaaaacctttctttaaccgggcccttcttcgcaaagaggcccccctctctttcccccgggggccgggaaagaccca

SEQ ID NO: 76854 - DNA, 771 bp, Homo Sapiens
cagcaggaaggcgaagtggtagtacagcaagaggcactggcggggcagcaggcctgcaggagctgtttttccattgctaggcctgacccctctctacctgtgagcgttcagggggtccctgagatagtttagatgcccccccatcttagacctcagctcccacagtgccttttaaggggacctcacctcctgtgcacagcccacccactttcctctgcttccctggcacagcccaggcatagacgagctggcgttggacccagttcttcccccttttcagccccacagctgctgccacaggggccaactagggccaggtggaaggggagctgagaagccaacccctagcccaggggtgctgtgggaactgggatccaatttgtagcttcctgcctggcttcagagagcccagcaaccttctaggcctgctttccagacttctgagatagcctgggatgagcaatcctgttacagtacatctggaccttccctacctgggctctggggaggctgtgggcctggagagggaaaaggagggagggggtgtctgcaccacctgggaagatagcacaaggcctaatgaggtcaccctgactccccaccccagcatttcattcataccagataatagctgcattactgccaactgaccttataaccctctgcaccttcaaaaagattcatggtttttaattgctgcttttaataacatttgttaaagttataattaatgtgtctgatttatgatttaaaacctccctttggcccatc

SEQ ID NO: 76855 - DNA, 501 bp, Homo Sapiens
tcacactagataaaattacctggttcaaaagtggtttttgtttattaaatttggtaataaatatatataatacacagacaggatagtttttatgctgaagtttttggccagctttagtttgaggactccttgataagcttgctaaactttcagagtgccctgagacacttccagccatccctcctcctgccttcattggggcagacttgcattgcagtctgacagtaattttttttctgattgagaattatgtaaattcaatacaatgtcagtttttaaaagtcaaagttagatcaagagaatatttcagagttttggtttacacatcaagaaacagacacacatacctaggaaagatttacacaatagataatcatcttaatgtgaaagatatttgaagtattaattttaatatattaaatatgatttctgttatagtcttctgtatggaattttgtcacttaagatgagcctgcaaataaataataccttcaatggaaa

SEQ ID NO: 76856 - DNA, 998 bp, Homo Sapiens
  misc_feature (37)..(37): n is a, c, g, or t
  misc_feature (115)..(115): n is a, c, g, or t
  misc_feature (120)..(120): n is a, c, g, or t
  misc_feature (182)..(182): n is a, c, g, or t
  misc_feature (189)..(189): n is a, c, g, or t
  misc_feature (232)..(232): n is a, c, g, or t
  misc_feature (265)..(265): n is a, c, g, or t
  misc_feature (310)..(339): n is a, c, g, or t
gcacgcagctacactttgctccgctgttgtgttgganttggcgatacattcacacagaacagcttgactgatacgatttatacgactccttagggaattgccctcgagccagaantcgcnacgaggataccagtctcaaaagaaacaaggtgagacctatgcttcaatatcaagaaatgctntgtgttnttgaggtaggagcatgatcaagtagcttggggatttctgtatntaggagatcctggatcttaattgttgctaagtnccagtcaagtaggaatcagtgcagcctgtaagttctccacattgnnnnnnnnnnnnnnnnnnnnnnnnnnnnnngacatgctcctttctgtggcacatgcctgtattactgaaagctaaatcctcaaaacctagtaaggggaccaatgattcattaaagtaaattgatggttttgctactaattcctatcccatacatttgacacaaaagaagtgttggtaatggataaataacatatcccgggcagatgagctcaacctagtaggtaagagtttggtttggtcacagttgcctatgagtgtgggtttcaaaagaaacataaagccttaacttagaatttcattatgttttagaatcatcactgccttaatattcaagcatctatttaagtcctaataaaggagaaatgcatgtttatggcttttttgtaaatataaatgcagtgatctatggcttaaaaaatttgtttctgtgacaatgtttgtaaatctagccaatagagtcatttacagaagaaaaatgagcatgtaataatacaagaactgtttccccctcaaaacctgaacctgaattatttgtaaaaactgaaatttaatgattaaagagaagccagaattgtacccttttttgtgaattcttgaacgtactcataaatatgacttattgtattgccttaagttttcactcattgtcttttgaaagccatatgataaaatgattttatttaataata

SEQ ID NO: 76857 - DNA, 704 bp, Homo Sapiens
gggcaacagagggagactccatcgccccccctcaacaacaaaaaaagtttcccatacactggcctgccccaaaacccactaacaattttagcaaaacagtccaggccaaagaggaagcatttcatgttcaataagaaacccagccattccgcatggctggttcctgagtggctctggtgatactctccagccacctgctgacattgagaatctcagacctcgggactgctgttgcggtaccgtgtgtctgacacctgccagcagccctttgctatctgcgcgcaggatgggggtgactgcccagacattcccgctagataggctctgatttccggggcagcctttcagatgcggcagacatacaacacctgtactttagagttttaagggaaaaaaaatcagaagtgctggttagatagtaaaaacttaggataacttagaaaggctagttttagcttcctttgtggctccctggtgcaaaacaattagcagttatgcaatggacctgattctagtttattctaattaagaagtgaggccgagtttgacttcgttcctgaatacaatcttgagtaactgggaaagtctgagtgaaaggatggcctcattctctttctaatcttgctggtttcaagattagaaaatggcattatttgatctgaaatgtttgagaagacacgaataaagttacttgggcagaaaaa

SEQ ID NO: 76858 - DNA, 803 bp, Homo Sapiens
ttaaagttggcatggctacttggcaatattccctggtctggttgggtgatgttgggaaaggcaggaggcaagttaaacccatttttggagtttttgcacctagggactctcgggcccggccaccttatactgttgcggctgacaaatcaacacgtaatgagttccgaaggttcatggagaagaatccagatgcctacgattacaacaaggctcaggtgccaggaccattgacaccagaaatggaggcacggcaggctacacggaaaagggagcagaaggcagcccggcggcaacgggaggaacagcagcagaggcagcaggagcaggaggagcgtgaacgagaagagcagcggcgatttgccgccctcagtgaccgagagaagagagctctggctgcagagcgccgactcgctgcccagttgggagcccctacctctccaatccctgactctgcaatcgtcaatactcgacgctgctggagttgtggggcatccctccaaggcctgactccctttcactacctcgacttctctttctgctccacacgttgcctccaggatcatcgccgtcaggcagggaggccctcttcctgatctcttacagctctacctggggccaactcagggacctgagagggcacattcacagcagccctaggttttttcttccccgtgaaaccagagatgatttggaagatgggggtgaaggacactcgggaactagggcaaagacagggctagaggtatgtggagctggtactgtctctggaattttaatcacaataaagtttggcaaggaaaaaa

SEQ ID NO: 76859 - DNA, 744 bp, Homo Sapiens
  misc_feature (75)..(75): n is a, c, g, or t
  misc_feature (114)..(114): n is a, c, g, or t
gtacgcatgcgcgcactgcgcccgccgcttcgcgcagagctccaactacgcacagcacctgcgcgtgcacacggncgagaagccgtacgcgtgcccggactgcggacgcgcctntggcggcagctcgtgcctggcgcgccaccgacgcacgcacacgggcgagcggccctacgcttgcgccgactgcggcacgcgcttcgctcagagctcggcgctggccaagcaccggcgcgtgcacacgggcgagaagccgcaccgctgcgctgtgtgtggccgtcgcgtcggccaccgctccaacctggcggagcacgcgcgcacgcacacaggcgagcggccctacccctgcgccgagtgcggccgccgcttccgcctaagctcgcacttcattcgccaccgacgcgcgcacatgcggcgccgcctgtatatttgcgccggctgcggcagggacttcaagctgccccctggcgccacggccgccactgccaccgagcgttgcccggagtgtgagggcagctgagtcccgcagggctgcggaggggcgcgctggggcttcgacctggctgcactaacccaggctcctcctcgccccggcctccgggtctgggaaattgaggggacggcaggcccggctgccctggaactgggagacagggagaatcccctgccggggtccctggaaacagtgcccaccccacatcactacattccctcggcccgtgttagtgaataaagtattatatcctc

SEQ ID NO: 76860 - DNA, 958 bp, Homo Sapiens
gctggtaccggtccggaattcccgggatatcgtcgacccacgcgtccgcccacgcgtccgggcaaatagtttctaaagattctgtgaatagtggacaactgcccatgagcatttgacttcccttactctttgatgatcgtagagaaagacttggtaatttatctaagtatctttaataaatctgtcagcagagagattaaacctaggttcagagcatgggtgctctgagggacaaagttggattagtataagggagctggagcagctgatagtggaaaacagaataatgattcaaagagtcttctgtcaccatgtcatattgtggttctttcagttccatgatatgtttggctctgcatgccaaagtccagtgattaagcatatataagttgtcaaggaaacaaagcccaaatgtttttaaaacaagtatacagtttttgtcattgtttaagaaagccagttgtttggcatgtgagttaaaggcagttccaatgcctgatggttcccagatctatgaaatgagtggaccattaaccttacatgtaaagattatgttagtaattaagaaacctaacaaaggtgttaccaaggaacctttgggagtgccttttttgtttttcaagatggacccaaaaaagtggaggaagatattgttcttttgtgccctcctacctgtgagagatatttgtagtcctatgtgaatgagcttatccctccacaaccaggtgcatatgaaagtgtacatattatgactgccaagtattggaaatgaaaagacctggagtctatgctaggaagctgagatattttggtattgcattggtttttatggtaactaggttttgcatgcaattaaaaatccttatttcttgttctagggcttcccttagttaatggttattataaacctattaattcatctgttttaaccattaaaacctgttttgtttttaaaaaa

SEQ ID NO: 76861 - DNA, 1488 bp, Homo Sapiens
ggaccggtccggaattcccgggatatcgtcgaccacgcgtccgggtgaaacgaacttgctggcccactgacctagaagaggccaaagctgggggatttgtggtgggttatacatccagtggaaatccaatcttccgtaacccctgcacagagcagattctgaaacttcttgacaatttgcttgcgcttataagaacccacaatacattatatgcaccagaaatgctagccaaaatggcagagcctttcaccaaggctctggatatgcttgacgcggaaaaatctgctatattaggattacctcaacctctcttggaactcaatgactctcctgtcttcaaaaccgtcttggaaagaatgcagcgtttcttctctaccctctatgaaaactgttttcatatcctagggaaggcaggcccttccatgcagcaagacttctatactgtggaggaccttgctacccagcttctcagctcagcctttgtcaacttgaacaatattcctgactaccgactcagacccatgcttcgtgtctttgtaaagcctctggtgctcttctgtcccccagagcactatgaagccctggtatcccccatcctcggacctcttttcacctacctccatatgaggctttctcagaaatggcaagttatcaaccaaaggagcctgctgtgtggagaagatgaggctgcagatgaaaacccagagtctcaagagatgctggaggagcaactggtgaggatgttaacccgagaagtcatggacctaatcacggtttgctgtgtttcaaagaagggtgctgaccacagtagtgctcccccagcagatggagacgatgaagaaatgatggccacagaggtcaccccctcagctatggcagagcttacagacctgggcaaatgtctgatgaagcatgaggatgtttgtacagcgctattaattacagccttcaattccctggcctggaaagatactctgtcctgccagaggacaacctcacagctctgctggcctctcctcaaacaagtgctgtcagggacactgctcgcagatgcagttacgtggcttttcaccagtgtgctgaaaggcttacagatgcacgggcagcacgacgggtgcatggcttccctgggccatctggccttccagatatacgaggcactgcgccccaggtacctggagataagagctggaatggagcaaatccctgaaatacagaaggactcactggaccagtttgactgcaagccttttaaaaccctccctgcagaaagtggctgacaagcgccgaaaggaccaattcaaacgcctcattgctggttgcattgggaaacccttgggagagcagttccgaaaagaagttcacattaagaatcttccctcacttttcaaaaaaacaaagccaatgctggagacggaggtgctggacaatgatgggggtggcctggccaccatctttgaaccctgaatcaagcttttgggcatcctt

SEQ ID NO: 76862 - DNA, 989 bp, Homo Sapiens
  misc_feature (50)..(50): n is a, c, g, or t
  misc_feature (87)..(87): n is a, c, g, or t
  misc_feature (108)..(108): n is a, c, g, or t
  misc_feature (155)..(155): n is a, c, g, or t
  misc_feature (163)..(163): n is a, c, g, or t
  misc_feature (168)..(168): n is a, c, g, or t
  misc_feature (194)..(194): n is a, c, g, or t
  misc_feature (224)..(224): n is a, c, g, or t
  misc_feature (284)..(284): n is a, c, g, or t
tggcagatcgcagggttgagtaggatagacacttactggatgggagactncagagaggctcagccaagcctggcaaacagtgctgtncagacaggaagacatcatgcntatatcaagtgtgtccaagacaagcaagggaccagtccctggtgtcntagtgctngctcntgacaccagaggcacagtctcttctntccagctggcagaagtgatgtcattacgtntagagctgggtttgtcttcagatctcaaagctgttcatgggttggagcatgttagccctnggattgtaagggcagagaattccaattcttaagcctagtaagaaatgagcaaaaacttcaatatatatgactcaggcaagaaatcagcatctgtggcaaatactagaatgaaatgcaagaaagctcactgcaaggagtctccctccctgcagattccaaggctggaatctttttcttctggctccaggcagcacagacagggcctagcctggagagggtggacaagatgtcctctcagggtcttcaatggccaagtccaagcccactgcagaatctttctgtctacccgtaagtatcctttcctgagttccaggcaaagctggggatgttagcctatgactgtcatctgacttggaaggtacacctaggggccggggggaggtcagcaggggagtttgggagccacttctccccccacgtggcactggagtgtgaactggctcattctggacaccagcatggagccagcacgggaacaggggggcagcctagagcacaagctctatctgtgtccttcagagctcctgggaaacatgatgcgccctcatgggaatggcattttgcatatcacacaggctgtcctgggagtcaggcagactggattgtcacgtgcggtgtgcatgcagcagcttgtgcactgcagtggacctgtggaccatttctaaaggtgcacaacaaataataaatgtgtccttctttgttttt

SEQ ID NO: 76863 - DNA, 754 bp, Homo Sapiens
tcagcctcacgcagatcggcccctgtgctgactgcatgggggctggcgctggagatgccttgggtagagccagcctgggctgcccactgtctccctgctgccgggggcgcctggaggcaatgccagctccaggacagaggctcaggtgcccaacgggcaaggcagcccagggggctgtgtctgttcaagtcaggcttccccggcccctcgcgcagcagcgcctccacgggcagcccggggccccaccccacgcactgaagaggccgcctgggctgccatggccctgaccttcctgctggtgctgctcaccctggccacgctctgcacacggctgcacagaaacttccgacgcggggagagcatctactgggggcccacagcggacagccaggacacagtggctgctgtgctgaagcggaggctgctgcagccctcgcgccgggtcaagcgctcgcgccggagacccctcctcccgcccacgccggacagcggcccggaaggcgagagctcggagtgacggcctgggacctgccactgtggcgtgcggctcctccccgcgccgcgaggccgcgacctctgccacgtggaccgcgcgcggggcgctccctggtggcgatggcgcggcactggccgagcactgcgggggctttcctccttgttggttgctgagtgggcggccaaggggagaaaaggagccgcttctgcctcccttgccaaaactccgtttctaattaaattatttttagtagaaaaa

SEQ ID NO: 76864 - DNA, 1166 bp, Homo Sapiens
cgccgcgggccggcgggccctgggcccccagtaagctcgcccgcgtcggaagtttcgggcaaccggggcagagcggtgccagggtgagcagcaccagcagaaggtcaggccatgccagcccagcgccctcttcagtgcgtgggtgggccccggctggcccgtggaggcgctgctgcgcgagggccggggaagcctgacttgaacgagacacagccgcactgggctgccttgccccgttgggcacctgagccttctgtcccggagctgggcattgcccccaggcgcccccgggcagcagggagacagtgggcacagatggggcattactctccctacccagggattcccgccatggactgcttggccttcaagctccctggggaagcagagggaaacctcagggctgagcgagtgggctggggaccaagggcagcccgcagcctccgcctcttggcaccactagaagagggctgcctgggcccttgagatgtcacctctgtgccagggggccgccagctccgcagagcaaaggccagagccagggcctgcacacaccctcttcggcacagcctccctctaccgggagttggctcggagggagcaggccctgaaaggctttcacagtagatccatgccttcttcttcctctgcttcctcctccgcctcctcatcagccagtgggcagcccaggctggctctacccaggccatctccagcgccagcccccatgcagtcagcaccaggggccgatcctgcgtgaggctgaagtcaggggtgagggaagggttagccatacaagcataggccaggagggcaagctggagcttcagccagggatgggcacaggggtggtagaggaaggtgacatcctcagcctgccctgggctcactcgtgtgtaggtcactcttggtgacacctgcggaggcagaggccacaggctctcgggacaatgggctcccgcctcctccgccggtccagccatcacctcgctgggacccaggagcctcgcgagggctgccaggagaagcagttggggcgaaggcggaggaggcgccattccaagcggccccgggcccggcccgccgcccagccgctccgatcccgggaattccggaccggtccacccggtattagacagaaggctcgggggggtgaggacgcataa

SEQ ID NO: 76865 - DNA, 1351 bp, Homo Sapiens
  misc_feature (107)..(107): n is a, c, g, or t
  misc_feature (638)..(655): n is a, c, g, or t
  misc_feature (685)..(1252): n is a, c, g, or t
ccctagaaaaaatatttaaagcattgtctgacaggtagaaactcatgtatctgtagtccatgagttatatcctggctcagtggagtgatatttatgtattattttancttttctctcagtgtcttatattaagattaacatgttgttaatagttgctctgttgattaatctctcttgttggtgttttaataaatgaaataggcttgcctttagatcgggtgctgatattgcctgtttcctagtaatgggctgatcaaatgatcagtggaattcttggtttgatgataaccttattaattgaaattttttactgatgtggctttaaaagaggtttattttgtatatgtttagaactctctgattttgatgaattatatgggaatgagaaacagaagaagtggtatttgctggcgagttaaataggcaaggtacccagtgataacaccaaccaaaccactcctatctgcatgattctgaacatctggatgcctgttgttttactgtgtatattttatttttaatatattaactttgtggattcatttaaggtctactcaaaagtaacactgtcaaaaccactaatatgtatgtaaaaattgtgctgtatactacaataaagttgttacttggatttgttnnnnnnnnnnnnnnnnnngcctacaccgcgcctcgtgccgaattcttnnnnnnnnnnnnnnnnnnnnnnnnnnnnnnnnnnnnnnnnnnnnnnnnnnnnnnnnnnnnnnnnnnnnnnnnnnnnnnnnnnnnnnnnnnnnnnnnnnnnnnnnnnnnnnnnnnnnnnnnnnnnnnnnnnnnnnnnnnnnnnnnnnnnnnnnnnnnnnnnnnnnnnnnnnnnnnnnnnnnnnnnnnnnnnnnnnnnnnnnnnnnnnnnnnnnnnnnnnnnnnnnnnnnnnnnnnnnnnnnnnnnnnnnnnnnnnnnnnnnnnnnnnnnnnnnnnnnnnnnnnnnnnnnnnnnnnnnnnnnnnnnnnnnnnnnnnnnnnnnnnnnnnnnnnnnnnnnnnnnnnnnnnnnnnnnnnnnnnnnnnnnnnnnnnnnnnnnnnnnnnnnnnnnnnnnnnnnnnnnnnnnnnnnnnnnnnnnnnnnnnnnnnnnnnnnnnnnnnnnnnnnnnnnnnnnnnnnnnnnnnnnnnnnnnnnnnnnnnnnnnnnnnnnnnnnnnnnnnnnnnnnnnnnnnnnnnnnnnnnnnnnnnnnnnnnnnnnnnnnnnnnnnnnnnnnnnnnnnnnnnnnnnnntggtccgacccctgcgctaccggatactgtccgctttctccctcgggaagcgtgggcttcccaaagctcacgcgtaggtaccaatccgggtaggtcgtc

SEQ ID NO: 76866 - DNA, 1026 bp, Homo Sapiens
ccttaaacttgtaaagcccattgaaccatgttgtattaaatacccccagggggttttaaaattaaaataaggtggccatggcagataccaatgggataggtgtaaacatcccccaaactttggtcatttttaaaggagttttcttaaggagcccttcatttgcctgcctgtattaaatttagttttgaagtcagggatttgtaatggaagtgggaaaatgtgttctctgggaggaggggcacatttatctaggggcattttcaggttttccaaagaaaaggaatgtatgcctggggaaagacagcaggagattggtgacccggccctaatggtgcatgaaaagcgagtgataggctgttagaatgtattaggtcatgggctaacattatttccaaaattgattggctggttgccaagaaatatatatttgtcactagggcataaccgaagaatcaagtgatttcttgccatccttgcgtagtcctcaagtcttctaatcatctatgtgtgtatgatggatgtgaccatttatatgtcatgtgttgaaattaaagggtgtctggatgccatgttaattttattgagcatgagaaagtatttgaagaaactgttgcacaacatatgatgaaattttgatttctctgaatctcagagtaatttaagatgggcaaatccaatgagttgatgtaacccatctacattttgtggctatttcatgtataaaatgaaaggctttagttatttctagaggagtcccatccaacactatttggcgactgttaatatgttataattattagacagtggaaaagcctttattgactaattgatttaacctcagtccaaagaacagtctctatacttgccctcatttactgataggctgctactagttaccatttgattgtcttgactttcgtcttcagttgaattggtgaaaacatcaacaaaaacaaaacccactgtgtcttaaaataaaatgttctgcattgtagtcaataaagggcttaagatgtaaaacaatgc

SEQ ID NO: 76867 - DNA, 750 bp, Homo Sapiens
  misc_feature (667)..(678): n is a, c, g, or t
tatgaacagctcgtacaaaaagcaggctggtaccggtccggaatcccgggatatcgtcgacccacgcgtccgtgcaaacttaagttgtgtaaatgtaatttctacttgtgaatctgagctgtagcagcccagagggagctaggcaaactattccagaccaccaactgataagtgatcagattctttgtaatgtaggattttttaacctgttgattatgggtttgttgatataaatgtaataatgttcacctcgattttcctggagtaacaaccagcgttggtagtagcccacctgcatgaggacggccagtgttaacaatatttttgttctgatcttcttccccatttttgtttcctcaaacaggtttttaggagagtggagatttaaagtcaggatgtggcctttttattttaattatatacttaattcttagaacaagtagaatgggaaaggagtgactgataaatctaagattcaaaatagtcccgtcgaaacttaaaggccagattattgctttggagctttctataggtactagccatcccgtcgttaaatgttttcatggatatttgaaaagaagaccatgtacctttaataactgttcttttctcgagtttctgcctcgtgctttgacctggattgcattattattgtttatgcgaagtnnnnnnnnnnnnggaaagcacaagcttttcctgtatattatatttccatttccattttaaaataaaaacaattttcccaacaaa

SEQ ID NO: 76868 - DNA, 464 bp, Homo Sapiens
ctgctgtaatttatttgatttgccagatatttaaaatgaagcacagtcattaggtttttaaaatattggacttattgaaagctatcagacaaaaacctgtcacttgaaaaaaagtgttttcaaactaaatttatcttgctaaatgtatcagtgtatgtctacacttaaccttgtagacgtatagattcgcataaaaacataaatagaacttgctgatttgttaattatgtggaccttaaaaatgtgcaattggagccaccgtgcccaggccctcagtaggttttaaggagtccccagccctcctcccttctgggcccgaccagcttatactgctccatcttccccggccacatgccccgccaattactgcacagggaccccccacccaggggccctgctccgtgagataatgtgaaatacgactgtggaccaaacgcaataaaacctctgtttgtacgaaaaaa

SEQ ID NO: 76869 - DNA, 862 bp, Homo Sapiens
cagtcgacggtaccggacatatgcccgggaattcggccattacggccggggaagatggagcagtataagctggtcgggcccagaagggaggagggctggggagctccttaaaagcctactgagggcctgggcaccgtggctcacacctgtaatctgcagtcgactcggagagtcggaccgcgagatcgtgggtaattgctgcatggtcgctgcagactgtcaagcaattggtctggacggtggccgggaagcgcaggcccggtcgggtgaggggtccgcgaggtgtgaataaaacaactgagtgtgaatgaaaagtagagattctgtgaaggctgatgtctccagtgacgcttcgagagaatgaagtagcaacacatcacttatgaagcctttctttgacctgacagatttctatcacttctggagagttcctgtgaagaactcggatcctgaaaagccatctgatgtcactttctgcgaagcctggacttcagtgtaaggtcggtccttgatgatatccttgctgggaaggacataaaacgaagaaagaaatgcaacagggcctgaattttaaacttcactggaggttttactatgatcctgcctgatgtgccagacattattgagttggagatgagtagaaactcaggttaccacatggggtatttcagggattctcctgatgaaatttcctgtatatgttggtataaatgaagcatagaaaaaggcgtatattgttcctaatgggataatgtattgtgcagggcagattattttgacgaaaaagttatagaaataggataaaaggaaatcagctcttgaagaaacattgattgaaaatcaaggagcggcagagaattgg

SEQ ID NO: 76870 - DNA, 2260 bp, Homo Sapiens
  misc_feature (78)..(112): n is a, c, g, or t
  misc_feature (1196)..(1208): n is a, c, g, or t
  misc_feature (1816)..(1824): n is a, c, g, or t
  misc_feature (1835)..(2055): n is a, c, g, or t
ggatgtatcgatcctataggggctacgtcgtatagccgaacgacgagcgcagcgagttagtgagcgaggaagcggcgnnnnnnnnnnnnnnnnnnnnnnnnnnnnnnnnnnncagtcgacggtaccggacatatgcccgggaattcggccattacggccgggggtgcggccccgtcccgccgcccgcccgccagccatgagctccacgcagttcaacaagggcccctcgtacgggctgtcggccgaggtcaagaaccggctcctgtccaaatatgacccccagaaggaggcagagctccgcacctggatcgagggactcaccggcctctccatcggccccgacttccagaagggcctgaaggatggaactatcttatgcacactcatgaacaagctacagccgggctccgtccccaagatcaaccgctccatgcagaactggcaccagctagaaaacctgtccaacttcatcaaggccatggtcagctacggcatgaaccctgtggacctgttcgaggccaacgacctgtttgagagtgggaacatgacgcaggtgcaggtgtctcttctcgccctggcggggaaggccaagactaaggggctgcagagcggggtggacattggcgtcaagtactcggagaagcaggagcggaatttcgacgatgccaccatgaaggctggccagtgcgtcatcgggctgcagatgggcaccaacaaatgcgccagccagtcgggcatgactgcctacggcacgagaaggcatctctatgaccccaagaaccatatcctgccccccatggaccactcgaccatcagcctccagatgggcacgaacaagtgcgccagccaggtgggcatgacggctcccgggacccggcggcacatctatgataccaagctgggaaccgacaagtgtgacaactcctccatgtccctgcagatgggctacacgcagggcgccaaccagagcggccaggtcttcggcctgggccggcagatatatgaccccaagtactgcccgcaaggcacagtggccgatggggctccctcgggcaccggcgactgcccggacccgggggaggtccctgaatatcccccttactaccaggaggaggccggctactgaggctcccagcacgctctctccccacatcgtctccccatctgggcttttgggtttttctgtgttttcatcnnnnnnnnnnnnncttaacccgttcagtgctgccagtcaaccaagggtctgtgagtgtcagcgtgggatcaggcagcagagcttttttcccctttgccttgatccttcgcaaggctgagccactgggctgtgggggaaggggtcaaggccatatcccaatacgtgtagggcgagggtccctgctggcacattcaggctgtgctgggaagaagagacctgggcttggaaggaaccggtccccgacggtttctggttgcctcgcctcttcccccttttgtcagctgagcagtttgtggtttctatgcccgcaagtttcaggaagtattcacaaaagaaaaatacattttttcccccaggggtggggcaaggacagtggagagagtgctaggaaatgagtcccctgggaaaggggaccgggccgtgatgttaaatatctccggctcccaagtgactggatttgcctaggaccttcagatcaacagacttcagaccctcagacctgccccggggccaggtggagaaagtgagggccgtacaaggaagtgaaattctgagttgttggggctaagcctgaccccctctccatgctccccgccccaactcactctggcctcagtagannnnnnnnncagttgtggtnnnnnnnnnnnnnnnnnnnnnnnnnnnnnnnnnnnnnnnnnnnnnnnnnnnnnnnnnnnnnnnnnnnnnnnnnnnnnnnnnnnnnnnnnnnnnnnnnnnnnnnnnnnnnnnnnnnnnnnnnnnnnnnnnnnnnnnnnnnnnnnnnnnnnnnnnnnnnnnnnnnnnnnnnnnnnnnnnnnnnnnnnnnnnnnnnnnnnnnnnnnnnnnnnnnnnnnnnnnnnccccaagcgctgagattacaggtgtgagccaccgtgcccaggccctcagtaggttttaaggagtccccagccctcctcccttctgggcccgaccagcttatactgctccatcttccccggccacatgccccgccaagtactgcacagggaccccccacccaggggccctgctccgtgagataatgtgaaatacgactgtggacca

SEQ ID NO: 76871 - DNA, 1138 bp, Homo Sapiens
  misc_feature (77)..(111): n is a, c, g, or t
  misc_feature (587)..(595): n is a, c, g, or t
  misc_feature (606)..(826): n is a, c, g, or t
  misc_feature (947)..(947): n is a, c, g, or t
  misc_feature (1062)..(1074): n is a, c, g, or t
  misc_feature (1076)..(1092): n is a, c, g, or t
cgactgatgatcactataggcgctactcgtcagagcgaacgacgagcgcaggagtagtgagcgaggaaggcgtgcgnnnnnnnnnnnnnnnnnnnnnnnnnnnnnnnnnnncagtcgacggtaccggacatatgcccgggaattcggccattacggtccggggctgggctgggaagaagagacctgggcttggaaggaaccggtccccgacggtttctgcttgcctcgcctcttccccctttgtcagctgagcagtgtgtggtttctatgcccgcaagtttcaggaagtattcacaaaagaaaaatacattttttcccccagggtggggcaaggacagtggagagagtgctaggaaatgagtcccctgggaaaggggaccgggccgtgatgttaaatatctccggctcccaagtgactggatttgcctaggaccttcaggaccaacagacttcagaccctcagacctgccccggggccaggtggagaaagtgagggccgtacaaggaagtgaaattctgagttgttggggctaagcctgaccccctctccatgctccccgccccaactcactctggcctcagtagannnnnnnnncagttgtggtnnnnnnnnnnnnnnnnnnnnnnnnnnnnnnnnnnnnnnnnnnnnnnnnnnnnnnnnnnnnnnnnnnnnnnnnnnnnnnnnnnnnnnnnnnnnnnnnnnnnnnnnnnnnnnnnnnnnnnnnnnnnnnnnnnnnnnnnnnnnnnnnnnnnnnnnnnnnnnnnnnnnnnnnnnnnnnnnnnnnnnnnnnnnnnnnnnnnnnnnnnnnnnnnnnnnnnnnnnnnnccccaagcgctgagattacaggtgtgagccaccgtgcccaggccctcagtaggttttaaggagtccccagccctcctcccttctgggcccgaccagcttatactgctccatcttccccggncacatgccccgccaagtactgcacagggacccccccacccagggccctggctccgtgagataatgtgaaatacgactgtggaccaaaacgcaataaaacctcctggtttgtacgnnnnnnnnnnnnngnnnnnnnnnnnnnnnnncccattgtcgggccggccttcgggcccctcgaagaaagctttttta

SEQ ID NO: 76872 - DNA, 960 bp, Homo Sapiens
  misc_feature (294)..(322): n is a, c, g, or t
  misc_feature (424)..(434): n is a, c, g, or t
  misc_feature (471)..(484): n is a, c, g, or t
  misc_feature (497)..(519): n is a, c, g, or t
  misc_feature (813)..(813): n is a, c, g, or t
  misc_feature (863)..(863): n is a, c, g, or t
  misc_feature (924)..(924): n is a, c, g, or t
agtggccaggctggtctcgaactcctggcctcaggtgtgatccgcccgcctccgcctccccaagcgctgagattacaggtgtgagccaccgtgcccaggccctcagtaggttttaaggagtccccagccctcctcccttctgggcccgaccagcttatactgctccatcttccccggccacatgccccgccaagtactgcacagggaccccccacccaggggccctgctccgtgagataatgtgaaatacgactgtggaccaaacgcaataaaacctctgtttgtacgaaaacnnnnnnnnnnnnnnnnnnnnnnnnnnnnnccacaaacctatcatacctacaccgctacctaccctaaatcacccacaaaactaaaatcaccaacttcctcccacattccaccgttccatagagaacaaaannnnnnnnnnnttaaactcactaatccaaccaatataaaaatttgcgnnnnnnnnnnnnnngccctataaaaannnnnnnnnnnnnnnnnnnnnnngtgggcggcgggggcgcccccaaacgtgaaaaaacgcacctgggtctccattgtttttccctcccaaaacaaaacaccgcgccgaaaaagaacaaaggtggttctgtctctcccccacccacaatataaaacacacgccccgcggggggggtatacaccagtggcgttttttctaacaaaacaactcccccagaggagtggggttcttgccggagcccattattattcgtgggggtctcacaaacacaccccgcggcgctgtccatctggccgtccctcccctttattaataanaaataactcgcaatccgcggcgcccgcgtcgcggattcttttcgtctgtngagagagcggggtgtggggtatatacctccttctcaaagccgcttcccgcccgccaccccnattctggtgtacacactcctctcaccctagaggggg

SEQ ID NO: 76873 - DNA, 1408 bp, Homo Sapiens
  misc_feature (666)..(666): n is a, c, g, or t
  misc_feature (726)..(736): n is a, c, g, or t
  misc_feature (765)..(787): n is a, c, g, or t
gtagctcctcctgaacatgtttgccatacttttaaaaagggtagttgaataaatagcatcaccattctttgctgtggcacaggttataaacttaagtggagtttaccggcagcatcaaatgtttcagctttaaaaaataaaagtagggtacaagtttaatgtttagttctagaaattttgtgcaatatgttcataacgatggctgtggttgccacaaagtgcctcgtttacctttaaatactgttaatgtgtcatgcatgcagatggaaggggtggaactgtgcactaaagtgggggctttaactgtagtatttggcagagttgccttctacctgccagttcaaaagttcaacctgttttcatatagaatatatatactaaaaaatttcagtctgttaaacagccttactctgattcagcctcttcagatactcttgtgctgtgcagcagtggctctgtgtgtaaatgctatgcactgaggatacacaaaaataccaatatgatgtgtacaggataatgcctcatcccaatcagatgtccatttgttattgtgtttgttaacaaccctttatctcttagtgttataaactccacttaaaactgattaaagtctcattcttgtcattgtgtgggtgttttattaaatgagagtttataattcaaatngcttaagtccattgaagttttaattaatgggcagccaaatgtgaatacaaagttttcagnnnnnnnnnnncctgcgtgtccttcaaagcctacggtttnnnnnnnnnnnnnnnnnnnnnnntgtgggggggagaaagtaaaagtttggggcaccccgggttaattcaagcggagaacccctttttttagagggcggttgtatggccatcccttccataaatttgtgtttacggctctttaaatataagaggcgtcatagtgcccgtagaaagtgtgtccaagagttctctaagacacttggggcgcattatttcttaattaatgtcggccagagctttgtctggagaagatatattttcctccccagaggtgtggtgtacggggaacccttgaaggattttcccacaatttgtgggggcgcgttagggaggcacaaatataattcgctgggggaccttctggcgccaatctagcgagatattttgtgagacagctcgctctctaatttaacactctcattaaagaggactgttgggtgcggccatattataatacagttggggagtatttgtggagagaagtaagggtcaaaaggggaggacttttgggggacgcttgggacgttatacccacagtgggggtggtgtgccaaaaatattttttctttataaaggtttttgaaaaacaatataagggatatttcttttttataaaaagggctatgtagagcggatatatagag

SEQ ID NO: 76874 - DNA, 302 bp, Homo Sapiens
cagcccgggtgagcgtcgtgcagaggccgcggggtgaccgggtccagtcctgcaggggggtctggaacatgttcggatcggacctcagcgcggatccctcccgtcggggtggagggagctgggccttttctgcctcagcggctttaggactgttccaggaagaggtgagcagcggcggccctcgacccagagaagcaggggccacaaggaactgggtgcaggaaggtggtgaagggcccaaaggacgcgtgcgtggcctcaggaagtgccggaagaaagcctgagtctgaatctgagaattt

SEQ ID NO: 76875 - DNA, 1036 bp, Homo Sapiens
  misc_feature (974)..(984): n is a, c, g, or t
gatatatctgcccagctcatttgtcactctttttgattgcgtacattcccagaaacttactgtcgatatagatcttgggattgcctggacagatcgcaggggcaacaatccgacacggggaggactgcctttgggatggttctttcctttcttcggaataaataaaatgttcatggtaaacaaacaatgggggaaaaaatctccggtaaagcatttctgtattctatattattttcctaaacttcacctttcttaacatgtaaaagacacccggagtgctctcagtaagcacatcacataacacttggccagatgggtggggtgccatgttctgaagtggagtggggatggggttggggaccaagggaaaaaaaagctccaacctgtagcctctgtcccaagggaatgtgcctctccaatcctgcgggggactccctcaatgactgagggctatatgagaaacgtgctgggaacagaggacgggtttagtccaattcagtctctctcctctgacccagaagggtctctagtgaccctatgtctcacatgccaagtctcatctcacatgccacgtctcatgttaggtgtcagatgccctgtagatgcatgcagaagtagcatcaccccatgggtaccgcaggacctcgctgctgcctcctccttcagcagcaaccacattacaatttggatgttatggaaaagcaattccatttgcctgtagagaaaatggcccccagaatgctggtccttagaactctgagctgagttcattcaagtcgggctctgtttcttctggctcctcatctgaggcaggaagtatctccaggcagagtgagaggagctattaagtcaacagtcaaaaggtgaaaagacaccaaatttgtgactttacctgcctactagtgccaggttatcccacaataagtaaaagtatgtacctgggggatgtaagcccatgcttacatcaaacctgnnnnnnnnnnngcctacagccgcggccgcaagcttattccctttagtgagggtaattttagcc

SEQ ID NO: 76876 - DNA, 819 bp, Homo Sapiens
  misc_feature (56)..(56): n is a, c, g, or t
  misc_feature (125)..(125): n is a, c, g, or t
  misc_feature (129)..(129): n is a, c, g, or t
cagttgtgtagcatgctaactcccccagtaatatttactatttggatacctgcatngtagcagtaagtccaattgtgtcttcacctttgatgtgattatagctctctcacttgccggagtactcntgcntagatgagagccagagaaacagagcccgacttgaatgaactcagctcagagttctaaggaccagcattctgggggccattttctctacaggcaaatggaattgcttttccataacatccaaattgtaatgtggttgctgctgaaggaggaggcagcagcgaggtcatgcggtacccatggggtgatgctacttctgcatgcatctacagggcatctgacacctaacatgagacgtggcatgtgagatgagacttggcatgtgagacatagggtcactagagacccttctgggtcagaggagagagactgaattggactaaacccgtcctctgttcccagcacgtttctcatatagccctcagtcactgagggagtcccccgcaggattggagaggcacattcccttgggacagaggctacaggttggagctttttttcccctgtcccccaaccccatccccacctccacttcagaacatggcaccccacccaactggccaagtgttaagtgatgtgcttattgagagcaactccgggtgtcttttaaaatgtagagaaaaggtgacagtttaaggaaaaatatatatagaataccagaaatgccgtttacccggagaatttttttctccccatttgttttgtttttactcaatgacaccatttttagttttatttcctgatagcaaaagg

SEQ ID NO: 76877 - DNA, 904 bp, Homo Sapiens
attttgtgaacaccattaaattttatcaaagtcactttcataatctctgaggtgattatacaaagaatgttttatgaaaagaaaattatgtctatggtgagcaacaggcaaacagacaaacaacaaaaaaaagagaatttgcacaagatgattctaagccaggagcaataacattttagataaatgaatttaatacacagcagagaaaatagatttgctttcaaaatctctgaagtttctggtttgctggtaagtgatcaacacttgtaaaattatctgttcattctaatatttttcttttcttctcaaagtaggtacacaaccataaacaaatatgattactttctctataaatctgttacacctgaagtttattttacagtgatatatctatatatttaaatccatgtaaaccaaaactaaaggtctgtatgtgtttagcagaccagagaagtcatatgttcaacagaaaaaagtaggataaaattttataaatagttgttcagaattcagaaacatatagctccaattatactcataatcttcattacaaccatcataataatctgtagttacaagaaaacaaaaatgttaatttgtaggaatcatattctccaaattatggtaagttaaagaccactgacaaagaaatcactagagatgttattccacagtcacacaatagtatattgttaccatctgttgacctacaaccttgggtaagatgggataagttaacatcagtggcaagatacacattcagtgtaaaatagccttaactcaataacaataattttggtttattaaaataaattaagttcatacattgtcattaaaaaggcattttgaaactcactgtattttaattaccttagtttgcaaatggtaaagcaatttccttcta

SEQ ID NO: 76878 - DNA, 2487 bp, Homo Sapiens
  misc_feature (2240)..(2240): n is a, c, g, or t
  misc_feature (2417)..(2417): n is a, c, g, or t
gacaggacttgtgtggggaccacacatgtgatactcttgggatggctgatgttggaactgtgtgtgatccgagcagaagctgctccgtcatagaagatgatggtttacaagctgccttcaccacagcccatgaattaggccacgtgtttaacatgccacatgatgatgcaaagcagtgtgccagccttaatggtgtgaaccaggattcccacatgatggcgtcaatgctttccaacctggaccacagccagccttggtctccttgcagtgcctacatgattacatcatttctggataatggtcatggggaatgtttgatggacaagcctcagaatcccatacagctcccaggcgatctccctggcacctcgtacgatgccaaccggcagtgccagtttacatttggggaggactccaaacactgccctgatgcagccagcacatgtagcaccttgtggtgtaccggcacctctggtggggtgctggtgtgtcaaaccaaacacttcccgtgggcggatggcaccagctgtggagaagggaaatggtgtatcaacggcaagtgtgtgaacaaaaccgacagaaagcattgtgatacgccttttcatggaagctggggaatgtgggggccttggggagactgttcgagaacgtgcggtggaggagtccagtacacgatgagggaatgtgacaacccagtcccaaagaatggagggaagtactgtgaaggcaaacgagtgcgctacagatcctgtaaccttgaggactgtccagacaataatggaaaaacctttagagaggaacaatgtgaagcacacaacgagttttcaaaagcttcctttgggagtgggcctgcggtggaatggattcccaagtacgctggcgtctcaccaaaggacaggtgcaagctcatctgccaagccaaaggcattggctacttcttcgttttgcagcccaaggttgtagatggtactccatgtagcccagattccacctctgtctgtgtgcaaggacagtgtgtaaaagctggttgtgatcgcatcatagactccacaaagaagtactgataaatgtggtgtttgcgggggaaatggatctacttgtaaaaaaatatcaggatcagttactagtgcaaaacctggatatcatgatatcatcacaattccaactggagccaccaacatcgaagtgaaacagcggaaccagaggggatccaggaacaatggcagctttcttgccatcaaagctgctgatggcacatatattcttaatggtgactacactgggtccaccttagagcaagacattatgtacaaaggtgttgtcttgaggtacagcggctcctctgcggcattggaaagaattcgcagctttagccctctcaaagagcccttgaccatccaagttcttactgtgggcaatgcccttcgacctaaaattaaatacacctacttcgtaaagaagaagaaggaatctttcaatgctatccccactttttcagcatgggtcattgaagagtggggcgaatgttctaagtcatgtgaattgggttggcagagaagactggtagaatgccgagacattaatggacagcctgcttccgagtgtgcaaaggaagtgaagccagccagcaccagaccttgtgcagaccatccctgcccccagtggcagctgggggagtggtcatcatgttctaagacctgtgggaagggttacaaaaaaagaagcttgaagtgtctgtcccatgatggaggggtgttatctcatgagagctgtgatcctttaaagaaacctaaacatttcatagacttttgcacaatggcagaatgcagttaagtggtttaagtggtgttagctttgagggcaaggcaaagtgaggaagggctggtgcagggaaagcaagaaggctggagggatccagcgtatcttgccagtaaccagtgaggtgtatcagtaaggtgggattatgggggtagatagaaaaggagttgaatcatcagagtaaactgccagttgcaaatttgataggatagttagtgaggattattaacctctgagcagtgatatagcataataaagccccgggcattattattattatttcttttgttacatctattacaagtttagaaaaaacaaagcaattgtcaaaaaaagttagaactattacaacccctgtttcctggtacttatcaaatacttagtatcatgggggttgggaaatgaaaagtaggagaaaagtngagattttactaagacctgttttacctttacctcactaacaatgggggggagaaaggagtacaaataggatctttgaccagcactgtttatggctgctatggtttcagagaatgtttatacattatttctaccgagaattaaaacttcagattgttcaacatggagagaaaggctcnagcaacgtggaaataaacgcaaatgggcttccctcctttccctttttttgggaccatcttcaattctttt

SEQ ID NO: 76879 - DNA, 1349 bp, Homo Sapiens
  misc_feature (79)..(113): n is a, c, g, or t
ggatagatcactatagggcgctagctcgtcgcagccgaacgacgagcgcagcgaaggtagtgagcgaggaagcggccgnnnnnnnnnnnnnnnnnnnnnnnnnnnnnnnnnnncagtcgacggtaccggacatatgcccgggaattcggccattacggccggggtatcaggaaggtgggattatgggggtagatagaaaaggagttgaatcatcagagtaaactgccagttgcaaatttgataggatagttagtgaggattattaacctctgagcagtgatatagcataataaagccccgggcattattattattatttcttttgttacatctattacaagtttagaaaaaacaaagcaattgtcaaaaaaagttagaactattacaacccctgtttcctggtacttatcaaatacttagtatcatgggggttgggaaatgaaaagtaggagaaaagtgagattttactaagacctgttttactttacctcactaacaatggggggagaaaggagtacaaataggatctttgaccagcactgtttatggctgctatggtttcagagaatgtttatacattatttctaccgagaattaaaacttcagattgttcaacatgagagaaaggctcagcaacgtgaaataacgcaaatggcttcctctttccttttttggaccatctcagtctttatttgtgtaattcattttgaggaaaaaacaactccatgtatttattcaagtgcattaaagtctacaatggaaaaaaagcagtgaagcattagatgctggtaaaagctagaggagacacaatgagcttagtacctccaacttcctttctttcctaccatgtaaccctgctttgggaatatggatgtaaagaagtaacttgtgtctcatgaaaatcagtacaatcacacaaggaggatgaaacgccggaacaaaaatgaggtgtgtagaacagggtcccacaggtttggggacattgagatcacttgtcttgtggtggggaggctgctgaggggtagcaggtccatctccagcagctggtccaacagtcgtatcctggtgaatgtctgttcagctcttctgtgagaatatgattttttccatatgtatatagtaaaatatgttactataaattacatgtactttataagtattggtttgggtgttccttccaagaaggactatagttagtaataaatgcctataataacatatttatttttatacatttatttctaatgaaaaaaacttttaaattatatcgcttttgtggaagtgcatataaaatagagtatttatacaatatatgttactagaaataaaagaacacttttggaaaaaaa

SEQ ID NO: 76880 - DNA, 1784 bp, Homo Sapiens
  misc_feature (83)..(117): n is a, c, g, or t
  misc_feature (1205)..(1205): n is a, c, g, or t
  misc_feature (1208)..(1313): n is a, c, g, or t
  misc_feature (1634)..(1642): n is a, c, g, or t
aagtgtatacatcactatagggcgctagcgtcgttatagccgaacgacgagcgcagcgaagtcagtgagcgaggaagcggcgnnnnnnnnnnnnnnnnnnnnnnnnnnnnnnnnnnncagtcgacggtaccggacatatgcccgggaattcggccattacggccgggggcacggagagcggtgcccgcgtcagtgaccgaaggaagagaccaagatgaatacagagcccgagaggaagtttggcgtggtggtggttggtgttggccgagccggctccgtgcggatgagggacttgcggaatccacacccttcctcagcgttcctgaacctgattggcttcgtgtcgagaagggagctcgggagcattgatggagtccagcagatttctttggaggatgctctttccagccaagaggtggaggtcgcctatatctgcagtgagagctccagccatgaggactacatcaggcagttccttaatgctggcaagcacgtccttgtggaataccccatgacactgtcattggcggccgctcaggaactgtgggagctggctgagcagaaaggaaaagtcttgcacgaggagcatgttgaactcttgatggaggaattcgctttcctgaaaaaagaagtggtggggaaagacctgctgaaagggtcgctcctcttcacagctggcccgttggaagaagagcggtttggcttccctgcattcagcggcatctctcgcctgacctggctggtctccctctttggggagctttctcttgtgtctgccactttggaagagcgaaaggaagatcagtatatgaaaatgacagtgtgtctggagacagagaagaaaagtccactgtcatggattgaagaaaaaggacctggtctaaaacgaaacagatatttaagcttccatttcaagtctgggtccttggagaatgtgccaaatgtaggagtgaataagaacatatttctgaaagatcaaaatatatttgtccagaaactcttgggccagttctctgagaaggaactggctgctgaaaagaaacgcatcctgcactgcctggggcttgcagaagaaatccagaaatattgctgttcaaggaagtaagaggaggaggtgatgtagcacttccaagatggcaccagcatttggttcttctcaagagttgaccattatctctattcttaaaattaaacatgttgggganacnnnnnnnnnnnnnnnnnnnnnnnnnnnnnnnnnnnnnnnnnnnnnnnnnnnnnnnnnnnnnnnnnnnnnnnnnnnnnnnnnnnnnnnnnnnnnnnnnnnnnnnnnncccttgtgggcccccctcggcccctcaaaaacctttttaaaaacattcctgttgggcgccggggccccagaagggaagggaacctgggcccatacctggttcccaaggaaaaccccgggcctagacatagggcttgggattctccccccaaataaaaaaacgcccggggggaaaaccagaggggtttttaaacaaattcccaaatgggagtttctggagggtccttttcggggattttttccaacggggagtccccaagcggaacccccaattattaaaattatacccccccgccccgggcccattttattggaaagaaannnnnnnnnaaattccctttaaaaaatttttttgcgccaacattgtggaaacccccttccacaaaacgcgggtagtgtgataaaacctctgagaatcccgccgacggggggaaatctcaaaaacccttgtgtcccccctcttggcggtaaa

SEQ ID NO: 76881 - DNA, 1141 bp, Homo Sapiens
  misc_feature (86)..(120): n is a, c, g, or t
aaaatctatagactcactatagggcgctagcgtcgttatagccgaacgacgagcgcagcgaagtcagtgagcgaggaagcggccgnnnnnnnnnnnnnnnnnnnnnnnnnnnnnnnnnnncagtcgacggtaccggacatatgcccgggaattcggccattacggccggggggtccgcagggaagcctttggcttccccaccggcaatggagcggttgacgttgcctctcggcggcgcggcggcggtggacgagtacctggagtaccggaggtataaacaacataaaactgacttggaagcgattcctcagcagtgccccattgatctgccctgccaagtgactggctgccagtgcagggcttacctttatgtccccttgaatggtagccagcccattcgctgcaggtgcaaacactttgctgatcagcacagtgctgcgcctggctttacatgcaatacatgttccaagtgttcaggattccatagctgcttcacttgtgcttgtggtcagcctgcatatgcccatgacacagtagtggaaactaagcaagaaagattggctcaggaaaaaccagtgggacaggacattccttatgcagccatgggaggattaactggtttcagctcgctggcggaaggctacatgcggttagatgacagtgggattgtaggtacaagtagtcaagtttcttcattaaggagacctgaagaggatgatatggctttctttgaaagacgataccaggaaaggatgaaaatggaaaaggctgctaagtggaaaggaaaagctccattgccatcagctacaaaaccttcatgaagactattggagaaaattaaaaccatcatccaagtatcttttttcatgttttatttaaacggtaataatacagttcatttttcctgaaattatttacttttgaactaacttgtataactgtctccgggatgttccttaatttattaaatactaaaaatgtctattactttggtcaacactcatacttactacttggtatgtacctttcttctcctgaccaatgaggtaatctcatactgagtccggctgagagtacagcacctgcttccagtacctactacttcaactgtctcggatatttccacacttcggacattatc

SEQ ID NO: 76882 - DNA, 1464 bp, Homo Sapiens
  misc_feature (1400)..(1423): n is a, c, g, or t
aattacggctaggtagcgaggcctgggttggaatcggcacgaggcgaggagctagagagagcggagagcgcggagccgggccgcacccgccgagccgtcttcagcatgagcgcctgtctcgcagtgaccccagcgcaaagtaccatggcatcctccaggcctctaggcagattctgcaggaggagggtccgacagctttctggaaaggacacgtcccagctcagattctctccataggctatggagctgtccaattcttgtcatttgaaatgctgacggagctggtccacagaggcagcgtgtacgacgcccgggaattctcagtgcactttgtatgtggtggcctggctgcctgtatggccaccctcactgtgcaccccgtggatgttctgcgcacccgctttgcagctcagggtgagcccaaggtctataatacgctgcgccacgccgtggggaccatgtataggagcgaaggcccccaggttttctacaaaggcttggctcccaccttgatcgccatcttcccctacgccgggctgcagttctcttgctacagctccttgaagcacctgtacaagtgggccataccagccgaaggaaagaaaaatgagaacctccaaaacctgctttgtggcagtggagctggtgtcatcagcaagaccctgacatatccgctggacctcttcaagaagcggctacaggttggagggtttgagcatgccagagctgcctttggccaggtacggagatacaagggcctcatggactgtgccaagcaggtgctacaaaaggaaggcgccctgggcttcttcaagggcctgtcccccagcttgctgaaggctgccctctccacaggcttcatgttcttctcgtatgaattcttctgtaatgtcttccactgcatgaacaggacagccagccagcgctgagcgcaggaaggaccccaggtcttccctggaggcagcctcctgaaggaaggaagattcagtctccactgagaggtgccgtctggcccttccctgcaggccagctgccccaagcggggtagcagccttgaacccacccagctgggacaccaccagaaggtccagggctctccccatgagagaatcagagggaatgcaggacgtggtctatggtgagccaacgacacagtgagaaggagcaggaagttgctgtttctcctctgaccagcccacactgcaaaggaaacagacgccatcctacacctatcagccctgcctgccaggagaacagaacacactcctggtctggatggggctgctgcttgagtgcagagggctgcggtaggccctttgcaggagtcaggtccctacacttggcctgtttttccaacctatttaatagacattaaagctaaacacacattccttatcttnnnnnnnnnnnnnnnnnnnnnnnncctgagcaggcggcccaagcattattccctttcagtgaggg

SEQ ID NO: 76883 - DNA, 1025 bp, Homo Sapiens
aatataaggctaaaggtagccgaggctgggtgggaattcggcacgaggagagcgcggagcgggcccaccgccgagccgtcccttctccctgtgatcagttaccaactacctgttgatgtgtgtggttacagacttctttctatgcttgtacaactctacagaccgtatcttgatactgatggacatgtgtgggccagaggcagggatggttggctatgaccccaaaccagatggcaggaataacaccaagttccaggtggcagtggctgggtctgtgtctggacttgttactcgggcgctgatcagtcccttcgacgtcatcaagatccgtttccagcttcagcatgagcgcctgtctcgcagtgaccccagcgcaaagtaccatggcatcctccaggcctctaggcagattctgcaggaggagggtccgacagctttctggaaaggacacgtcccagctcagattctctccataggctatggagctgtccaattcttgtcatttgaaatgctgacggagctggtccacagaggcagcgtgtacgacgcccgggaattctcagtgcactttgtatgtggtggcctggctgcctgtatggcaacctcactgtgcaccccgtggatgttctgcgcacccgctttgcagctcagggtgagcccaaggtctataatacgctgcgccacgccgtggggaccatgtataggagcgaaggccccaggttttctacaaaggttggctcccaccttgatcgccatcttcccctaacgccgggctgcagttctctgtgctaccagactccttgaagcaccctgtaccaagtgggcataccagccgaggaagaaaaatgagaacctccaaaacctggttgtggagtggagctggggtctcagcagaccctgaacatttcggtgcactcttcaagaagcggtaagggtgagggttggcattgcaagtgccttggcaggtaggaaataagggcctcggatggccagggggcaaaggaagcccggttttaaggcggcca

SEQ ID NO: 76884 - DNA, 1097 bp, Homo Sapiens
ggctagtacgaggctgggtgttgaatccggcacgaggcgaggagctagagagagcggagagcgcggagccgggccgcacccgccgagccgtgaaaaaagtacatctcctggaagggatgctttttagctgagctctggtggatgagaggagctagccttgaaaaacttgatactgatggacattgtgtgggccagaggcagggatggttggctatgaccccaaaccagatggcaggaataacaccaagttccaggtggcagtggctgggtctgtgtctggacttgttactcgggcgctgatcagtcccttcgacgtcatcaagatccgtttccagcttcagcatgagcgcctgtctcgcagtgaccccagcgcaaagtaccatggcatcctccaggcctctaggcagattctgcaggaggagggtccgacagctttctggaaaggacacgtcccagctcagattctctccataggctatggagctgtccaattcttgtcatttgaaatgctgacggagctggtccacagaggcagcgtgtacgacgcccgggaattctcagtgcactttgtatgtggtggcctggctgcctgtatggccaccctcactgtgcaccccgtggatgttctgcgcacccgctttgcagctcagggtgagcccaaggtctataatacgctgcgccacgccgtggggaccatgtataggagcgaaggcccccaggttttctacaaaggcttggctcccaccttgatcgccatcttcccctacgccgggctgcagttctcttgctacagctccttgaagcacctgtacaagtgggccataccagccgaaggaaagaaaaaatgagaacctccaaaacctgctttgtggcagtggagctggtgtcatcagcaagacctgacatattccgctgggactcttcaagaagcgctacaggttgagggttgaggcttgccagagctggcttggcaggtacggagatacagggctccatggagttggccacgcgggctacaaagggaggcccgggttttcaggccggcccactgggggggccctcccaggcggttccagaaatcggggtcccgctagggc

SEQ ID NO: 76885 - DNA, 1712 bp, Homo Sapiens
  misc_feature (81)..(115): n is a, c, g, or t
  misc_feature (1089)..(1092): n is a, c, g, or t
  misc_feature (1094)..(1166): n is a, c, g, or t
  misc_feature (1171)..(1181): n is a, c, g, or t
tgtatacgactcactatagggcgctagctcgttgttagcgaacgacgagcgcagcgaagtagtgagcgaggaagcggccgnnnnnnnnnnnnnnnnnnnnnnnnnnnnnnnnnnncagtcgacggtaccggacatatgcccgggaattcggccattacggccggggggagcaccaagggaacggaaaatggcgcctcacggcccgggtagtcttacgaccctggtgccctgggctgccgccctgctcctcgctctgggcgtggaaagggctctggcgctacccgagatatgcacccaatgtccagggagcgtgcaaaatttgtcaaaagtggccttttattgtaaaacgacacgagagctaatgctgcatgcccgttgctgcctgaatcagaagggcaccatcttggggctggatctccagaactgttctctggaggaccctggtccaaactttcatcaggcacataccactgtcatcatagacctgcaagcaaaccccctcaaaggtgacttggccaacaccttccgtggctttactcagctccagactctgatactgccacaacatgtcaactgtcctggaggaattaatgcctggaatactatcacctcttatatagacaaccaaatctgtcaagggcaaaagaacctttgcaataacactggggacccagaaatgtgtcctgagaatggatcttgtgtacctgatggtccaggtcttttgcagtgtgtttgtgctgatggtttccatggatacaagtgtatgcgccagggctcgttctcactgcttatgttcttcgggattctgggagccaccactctatccgtctccattctgctttgggcgacccagcgccgaaaagccaagacttcatgaactacataggtcttaccattgacctaagatcaatctgaactatcttagcccagtcagggagctctgcttcctagaaaggcatctttcgccagtggattcgcctcaaggttgaggccgccattggaagatgaaaaattgcactcccttggtgtagacaaataccagttcccattggtgttgttgcctataataaacactttttctttttaaannnnannnnnnnnnnnnnnnnnnnnnnnnnnnnnnnnnnnnnnnnnnnnnnnnnnnnnnnnnnnnnnnnnnnnnnnnnaaacnnnnnnnnnnnttttggtggggcccccctcgggcccttcgaaaaaagttttttccaaaaccatttcctttttggggcgcgcggggcccccatttggggaaaagtggagacctcgtggcccctaaaggctgggtttccctaagggaaaaccccccggggcccaaggacacataggggggttgtgggatttccccacccccaaataaaaaacaagcgcccggggggggaacaaccgcaagggctttttggaaaccaaatccccaaaggggagtttccttgagggtccttttagcggggatctttctcccccgggggggttccaagcgggggcctccaatatatcaaattatacgcccccgcccccggggccacttttttccaaaaaaccgggtggaaaattcctttaaacatttctcgcccgcacggggaagaccccttccccaacgcgggttggtgaaaccctgaaatcccccccgggggatcttacacacctgtggtcccctcttggatataaaattttctcccccatgggggaaaaagcgg

SEQ ID NO: 76886 - DNA, 1055 bp, Homo Sapiens
  misc_feature (85)..(119): n is a, c, g, or t
gaaaggacttatagactctatagggcgctacgctgttgcagccgaacgacgagcgcagcgagtcatgtgagcgaggaagcggcgnnnnnnnnnnnnnnnnnnnnnnnnnnnnnnnnnnncagtcgacggtaccggacatatgcccgggaattcggccattacggccggggagcaccaagggaacggaaaatggcgcctcacggcccgggtagtcttacgaccctggtgccctgggctgccgccctgctcctcgctctgggcgtggaaagggctctggcgctacccgaggtacagaagcaagtttgaggtcgggctgaagcagggtcactggccagccgtgcgtcgcgctcgccagcggctcccccttctcctcggcgggcctgcggttctgatttcgtccctgacgcttcccgaccctgcccagccagatatgcacccaatgtccagggagcgtgcaaaattggtcaaaagtggacttttattgtaaaacgacacagagagctaatgctgcatgcccgttgctgcctgacacatcagaagggcaccatcttggggctggatctacagaacatgttctctggcaggaccctggtccaaaatttcatcaggcacaatacacactgtcatcatagacctgcaaggcaaacacccctcaaaggtgaccttggccaacaccttccgtggctttactcagatccagactctgatactgccacaacatgtcaacatgtcctggaggaattaatgcctggaatactatcacctctaatatagacaagcaaatctgtcaagggcaaaagaacctttgcaataacactggggaccagaaatgtgtcctgagaatggatcttgtgtacctgatggtccaggtcttttgccgtgtgtttgtgctgatggtttccctgggatccagttgttttgcgccacggtcgttctcactggatatgtcttcgggaatctgggagccaccatctatccgctccttctgctttggcgaaccacgcgaaaaccagacttctgaactcttggctttccttgccagatccttggatatt

SEQ ID NO: 76887 - DNA, 887 bp, Homo Sapiens
  misc_feature (859)..(859): n is a, c, g, or t
ttcaggattgatcttaggtcaaatggtaagaccctatgtagttccatgaagtctgggcttttcgggcgctgggtcgccccaaagcagaatggagacggatagagtggtggctcccagaatcccgaagaacataagcagtgagaacgagccctggcgcatacacttgtatccatggaaaccatcagcacaaacacactgcaaaagacctggaccatcaggtacacaagatccattctcaggacacatttctgggtccccagtgttattgcaaaggttcttttgcccttgacagatttggttgtctatataagaggtgatagtattccaggcattaattcctccaggacagttgacatgttgtggcagtatcagagtctggagctgagtaaagccacggaaggtgttggccaagtcacctttgagggggtttgcttgcaggtctatgatgacagtggtatgtgcctgatgaaagtttggaccagggtcctccagagaacagttctggagatccagccccaagatggtgcccttctgattcaggcagcaacgggcatgcagcattagctctcgtgtcgttttacaataaaaggccacttttgacaaattttgcacgctccctggacattgggtgcatatctggctgggcagggtcgggaagcgtcagggacgaaatcagaaccgcaggcccgccgaggagaagggggagccgctggcgagcgcgacgcacggctggccagtgaccctgcttcagcccgacctcaaacttgcttctgtacctcgggtagcgccagagccctttccacgcccagagcgaggagcagggcggcagcccagggcaccagggtcgtaagactacccngggccgtgaggcgccattttccgttccc

SEQ ID NO: 76888 - DNA, 855 bp, Homo Sapiens
  misc_feature (129)..(196): n is a, c, g, or t
caatattcagtaagtatttattgatcacctattatgtacaaggtattgttccaggttctgggtatagagcactgaatgtattagaaaaaaatttctcccctgagaagcatacattttattgcagactgnnnnnnnnnnnnnnnnnnnnnnnnnnnnnnnnnnnnnnnnnnnnnnnnnnnnnnnnnnnnnnnnnnnnaagtaagtgttatatgcaaaatcaaagctggcaaatgatattttggatgatagattgttgctattttaggtaacttgatcagtgaatgcctccctaagcagtgtcatttgaacccagatctcgatgactttagtaaacctattctcaggagcctataaaacactattatttctctcatgaggaaaaaatgtgatgatcaacaaaagtagtcaggatgttaattcacaagacaagttccatctgtacttgtagagagcaggaaacttgcctgctgtgtaaagctgatgtattgctggtgtttttcctgtcctttgtgtggtgctctcactctcttcccccttttccacctcattactctataccacttctcaaaccattctcctgccatctttaggctgaatttcagtatttaactacatttcctcttttaatctcgtattctttattttaaggaactaattgcatgtggtatctgtcactgagtacctcaataccccaaacaggagtaggcgacaatttcaaccttctttagctgtcctagactttgaggagtcttccccattgagcttttttggcaggaaatcagtcaatattgattgagtaccaactatatatcaggctcagtttaggagctgtggttgaaataatgaacaaaggca

SEQ ID NO: 76889 - DNA, 2344 bp, Homo Sapiens
  misc_feature (2271)..(2297): n is a, c, g, or t
tgaaaagagactctaggggctcacaggggctctcactgctggttggccctgccctcccttccccctcagcagggtgcccggaagctggaaccttgttatctgggtaattagtttcagaccctgcactgaggccggccaggtctcggggctgcctcccataggttgtgcaccctgaccccgagagggaggcgaggcgctgcttgtcgacagctagaggctggcctggggagcaggtttggggtgccctcccacactgccctccctgccccggcccatgccccccagggctgcctgggcctggttattgtgtggggcctcctgacccagccaagggcacgaagctctgggaaggggatgcccccgagggtgccagtccagctagctgccccacccctcaggcccagcctggcccccaagctccccactctggtgccccgagcagccctgtgggcaagcagccgccgccatggccgagcacctggagctgctggcagagatgcccatggtgggcaggatgagcacacaggagcggctgaagcatgcccagaagcggcgcgcccagcaggtgaagatgtgggcccaggctgacaaggaggcccagggcaagaagggtcctggggagcgtccccggaaggaggcagccagccaagggctcctgaagcaggtcctcttccctcccagtgttgtccttctggaggccgctgcccgaaatgacctggaagaagtccgccagttccttgggagtggggtcagccctgacttggccaacgaggacggcctgacggccctgcaccagtgctgcattgatgatttccgagagatggtgcagcagctcctggaggctggggccaacatcaatgcctgtgacagtgagtgctggacgcctctgcatgctgcggccacctgcggccacctgcacctggtggagctgctcatcgccagtggcgccaatctcctggcggtcaacaccgacgggaacatgccctatgacctgtgtgatgatgagcagacgctggactgcctggagactgccatggccgaccgtggcatcacccaggacagcatcgaggccgcccgggccgtgccagaactgcgcatgctggacgacatccggagccggctgcaggccggggcagacctccatgcccccctggaccacggggccacgctgctgcacgtcgcagccgccaacgggttcagcgaggcggctgccctgctgctggaacaccgagccagcctgagcgctaaggaccaagacggctgggagccgctgcacgccgcggcctactggggccaggtgcccctggtggagctgctcgtggcgcacggggccgacctgaacgcaaagtccctgatggacgagacgccccttgatgtgtgcggggacgaagaggtgcgggccaacctgctggagctgaaccacaagcacgacgccctcctgcgcgcccagagccgccagcgctccttgctgcgccgccgcacctccagcgccggcaaccgcgggaaggtggtgaagcgggtgagcctaacccagcgcaccgacctgtaccgcaagcagcacgcccaggaggccatcgtgtggcaacagccgccgcccaccagcccggagccgcccgaggacaacgatgaccgccagacaggcgcagagctcaggccgccgcccccggaggaggacaaccccgaagtggtcaggccgcacaatggccgagtagggggctccccagtgcggcatctatactccaagcgactagaccggagtgtctcctaccagctgagccccctggacagcaccaccccccacaccctggtccacgacaaggcccaccacaccctggctgacctgaagcgccagcgagctgctgccaagctgcagcgacccccacctgaggggcccgagagccctgagacagctgagcctggcctgcctggtgacacggtgaccccccagcctgactgtggcttcagggcaggcggggacccacccctgctcaagctcacagccccggcggtggaggctcccgtggagaggaggccgtgctgcctgctcatgtgaggctgttgctcagcatgcaggggccctgtcgcgggcacagcccaaggctgcctccccacggtgcgtgccctggtgctgcgggtgcagcacggaaaccccggcttctactgtacaggacactggcccctctcaggtcagaagacatgcctggagggatgtctggctgcaaagactatttttatcctgcaactcttgataaagggctgttttgccatggnnnnnnnnnnnnnnnnnnnnnnnnnnncctgagcaggcggccgcaagcttattccctcttagtgagggttaatt

SEQ ID NO: 76890 - DNA, 1439 bp, Homo Sapiens
ggcagtaactctaacggtcttaaggtagcgaggcctgggtggcgaattcggcacgaggcttaccgtggcgagttccgcgctcaatggagacgtttgaccccaccgagctgcccgagctgcttaaactttattaccggaggctctttccctactctcagtactatcgctggctcaactacggtggagtgataaagaattactttcaacaccgtgaattttcattcacattgaaagatgatatttacattcgctaccaatccttcaacaaccagagtgatctggaaaaggagatgcagaaaatgaatccatacaagattgatataggcgcagtatattctcacagacccaatcaacacaatacagtgaagctgggagctttccaggctcaggaaaaagaactggtatttgacattgacatgacagactatgacgatgtgaggagatgttgtagttctgcagacatatgtcctaagtgctggaccctcatgacaatggccatacgcatcattgacagagcattgaaggaggactttggatttaagcatcgtctctgggtatattctggaaggagaggtgttcattgttgggtctgtgatgaatcagttagaaaactgtcttctgcagtacgttctgggatagttgagtatttgagccttgtaaagggtggtcaagacgttaaaaagaaagttcacctaagtgaaaaaattcacccttttatcagaaaatctataaacataataaaaaaatactttgaagaatatgccttggttaatcaagatattctcgaaaataaagaaagctgggataagattttagcccttgttcctgaaacaattcatgatgaacttcaacaaagcttccaaaagtctcacaattcacttcagcgttgggagcacttgaagaaagtagccagcagatatcagaataacatcaaaaatgacaaatatggaccctggctggagtgggagattatgctccagtactgttttccacggctggatatcaatgtcagcaaaggaatcaatcatctactgaagagcccttttagtgttcatcctaaaacaggtcgcatctctgtgcctattgatttgcagaaagtggaccagtttgatccatttactgttccgaccataagcttcatctgccgtgaattggatgccatttccactaatgaagaggaaaaagaggagaatgaagctgaatctgatgtcaaacatagaaccagagattataagaagaccagtctagcaccttatgtgaaagtttttgaacattttcttgaaaatctggataaatcccgaaaaggagaacttcttaagaagagtgatttacaaaaagatttctgaagacagagctcctcaaaccattgtggatatcttctgccttcaaccacagatcaaatacttcaagagccatttaataaatatggcagaactata

SEQ ID NO: 76891 - DNA, 236 bp, Homo Sapiens
cttggcacctggccagatttcttaaatatgacacaaaaagtgtaaatgatagaagaaatcaataaattgaacttcatcaaaataaaacgcttttgtttctcaaaatgcacgaaactattaaaaatgaaaagataagccatagactaggacgaatatttgtaaaaattctatctgatgtaggacttgtataaagaacttttacaattgaataaaaatccaataaaaatggacaaaac

SEQ ID NO: 76892 - DNA, 407 bp, Homo Sapiens
ctctgtagattctcactacattttcaaatatgtacttggaaaaagctgcaaagtgctacctataagcaaattagtaactttggccttatctatgcatagtgttcgctcagtttggttttgataaattgattgacttgcagttcctttgtagtattttaacttattgtgatgtaatgaattttttgaaatgtttatttgattagctgttaaaatataggaaagaatgtagctttgcatgaaataaattacatttctacaagttaataagaattttgctgattgtttatatattttacttcatttgagattaaggttcttttaagtagattcaggcgttctttgttccttatcaatttattagcaaatatgacaaatgttttaaaataaatatgtgtactttagttttc

SEQ ID NO: 76893 - DNA, 760 bp, Homo Sapiens
  misc_feature (68)..(68): n is a, c, g, or t
caaggcactgggcagctgccaatttcccgtcccttctgtagtcccagatgaatggatacagacctctntggggaaggctgcaaggaaggttcacaacatgcatctaagtgttaaaataagttttccttcaaaaatacatttgacttcctctccatttaaggtctggaaatcaagtgggagatcttgactttaccttggcacttgagacagaactgttggcccagaagtctttagttaaggtcattactaggccatatcttaggggcgtctggcctttttcattcctgggacccacagctcgaggtctggtttccatgccctatcccttacgatgagcgccctattttgttccttctgtctatctctgttgctgagatcagggagcccacgttcacagcagctctttcaagcagcctcccaggcctagagaggaaaatcagcagagcctcgtgaatgtatttctcgtggcaagaagggagctcatcttctgggtcctgccagagggcagtgagggggttgatgggctgggtgcatgccagggacccaatcaagcatttttatcttctgaaatctttgaattcctgcctttcttggatgtttggtcttttgatataatttagcatgggccaacatttggtccagatttgtattagccaagccctcctaaaatagtaataacagtatctggcgatttgagcttttacgtagaatgtagaatctctggtgagtgaacatatcaataaagacaacctgaaccaaa

SEQ ID NO: 76894 - DNA, 550 bp, Homo Sapiens
aacttcaagcaaatgtgggacagtaagaaaattggtctaagacagcaccactgccgcaagtgtgggaaggccgtctgtggcaagtgcagctccaagcgctcctccatccccctgatgggcttcgagtttgaagtgagggtctgtgacagctgccacgaggccatcacagatgaagaacgtgcacccacagccaccttccatgacagtaaacataacattgtgcatgtgcatttcgatgcaaccagaggatggttactgacttctggaactgacaaggttattaagttgtgggatatgaccccagtcgtgtcttgatgactctcccaggaatcagaaagatagtatttactaaagaaacggttgttttaacccaaatcattaccagagtggtaaagcagacatgtgagaagtaagaaagaaactaaagaccctgaatgaatttgcagattacccatgtgcacagtggggacctggccagtgagcactcgcaaggggactcttccaacttgttcatacaatataaaagaagctatttttttaacaaatggtt

SEQ ID NO: 76895 - DNA, 861 bp, Homo Sapiens
atggacaggaaaaaagaaaatgaggaggagttggttttactcttagagataagacttcagcaggggctcagaaaccccaaactctagttaaattgcttctcggaggaaaatcttaatctagacagattcagattcccaggctctcctggaagccctgcacttcagggcacaggggccctgggacgtggttggcagccaggctgcgagagagctaaaaaggaacaagaacatcagctcggatgtttgtctctcagccctgacacctgccactctccttcccggggcacttggccctatcagagggacatgaaatgctgtccgaatggtggcagaaatgcagcgacattgcatgcagcagagtctttgcttcgaaagatggggcgccatgtttcagagaacatttatcttagtcccacgttcaggtgagaagacctcaaaggtaccctctgtccagaataaacattggaacaatctctcaattggcttttgtcactacacataatgtaatctcccttctttcagctcccccaacagtgagcatgcttcccaaaaaattacaacatcaaaaccaggaatgtccccacatctactattaccaggcttgcaattggttcaattttcccataaaaacatgtttgtccaaaagaagggaaactgtgaatttattccatgcatgtaataaactctgcaagaagtttaacccacataggtttgcggcactgcaaaattgttcatgggtctatgtagcaaatgattctctgccttgacaatcatgtatacatatcaagatttctatcataatgataatgagattgatgacttcttgttttcctccaataaagacaattaatcaccttcaaa

SEQ ID NO: 76896 - DNA, 608 bp, Homo Sapiens
  misc_feature (177)..(186): n is a, c, g, or t
gctgggtggcacagtgaaatttatttgtctttatgatttacacataataattaaacacacaaaagaaaaaacactgtcaagatggccatatgtagcttaggaaatgactggtcccaatgcaatcatataaatgttcattcagcgtaaaaatgagtttctttttaatggttttaatcnnnnnnnnnncagtccccaaggcttgtaccactcagtacaaatgtttttgctactgggttatcatcaggaacatgatgtttaccaattcccaggaaatgaataaaatcaacagaaacatcctgtgacaacagagcacattttcatagaaatgaaattgatgagcttattacagtttgaatcagttcagctattagatctacacataaaacatgaaacaatattaacaaattacatttgtattaagtttttatttaaaaatatttatcacacttttttgtgcaagggttccattgatttctttggttttaaacacgatagatctattttacctaaatatatatagttctatttgtaccaaacatcaaaaatcaaaaaaacattatttcaaagggtaaaaatggaattattgcttcaatataaaacctcgtgcc

SEQ ID NO: 76897 - DNA, 1057 bp, Homo Sapiens
  misc_feature (704)..(713): n is a, c, g, or t
aaatttttattattattttttaaaataaattcagtgttcacatttctataaagaattaacccagtttcaggaaaccctgccccagcagggcaggtaagcaacactctccctgcccacatctagtttgatttcacgccctgatgcttcaaggtgcccagaaaagcggcagcttgtggaagaggaaatctatgcccggcccgtgcttggggcccagggctcagtaagctttcgagaaagcagaggggaagactagcttactgcaaaaacctttttaaaaaatattcatacacttcagtgagcgcctgttgagacgttaggggaacaagagcttggaaacatcccgtccaggccattgggaggcagcgtcttcctcacaccccgtccctggatgtcgggggtgcagggggaaggtcccggctcttccactggagaaaggagactcacctggcttcctagttcatgtttgactatttcctctaaaacctgtgctgagtctttgactgcatgcacgggaagcacaaacgttcggcttgtatgcaaaaaaagtacaaaaacaactagaatataaaagttttggtaatataaggccatctgttcaagtccaccttggaaacctgtaacagatatttaaatactacagtgaaaaggcatcttaatatactttttaaaaacatctgaagtaatccgctaagattaagtgtgtnnnnnnnnnnttcaattccctttgagggcactttgtcctttgaagaagggaaagtggggcggggagggcacggggcccaccggttaatgcttcagccacgggtgggcttcaatggaagccttgctgcggtccccatagtcatacaggagctcctccccagccgcgatgtctcgggaggcgatgaggatgaggtgaggtacgccgtcgatgtcgtgcagtttggtttggcagttcccacatttgctgtgattgatcagtcttcctaggcgatttgtctctctagttgcatccacgcagtaggttttgctcagatactgaaaatagtacatgtagcagcccgatcccgagaattcc

SEQ ID NO: 76898 - DNA, 750 bp, Homo Sapiens
  misc_feature (624)..(624): n is a, c, g, or t
  misc_feature (652)..(652): n is a, c, g, or t
caaatgttgccaaagtcatgggaactctagttaggaagatttcccctacttagagcatgtcactctggcgtggaccttcattcatctctttccccggcctggggttgatccattctcccttcttcccccttctcctgccctgcccccaccttctcagtcacaatctttgtcttcccagtttggcaggacatcccaggggcccctgggctttccttcctgaggttagaagatggtgctttgaaagaacaattgctcctacaaacatcaaatcaaacttttagaagctgataaagaccttaaaaatcattcaatctcctcttctttctccttctgtagatgaggaatctgagggtctaagaggagacatgagctgctgagattgactgagctaggcagggccagacatagactccacgggcaggcccgcagtctttccaccaggtcaggccactccctcgcccagggctcaagattccttttagagttcaacagagcagctcccgagaacagaccagccctcaagactcaaatttcagtggtttccagttctttctccctgcactcagctacctattttattttgagactggctgaatcacccgaagaatagaacgggtttctctngaagctgctcccggcagcatgtcagcanatgaacaggacagcgagctggcctctggagccttggaagattctcacctccaagcagctgcagtttttgactcgtcctgggaaactggcactgagact

SEQ ID NO: 76899 - DNA, 1004 bp, Homo Sapiens
ggcacgaggcccaagagtcccaggggaacacgggcctcccagacgtggagctccttagccatgagctcaagggagtgtgcccagagccccctggcctagatgaccccctggcccaggatggagcaggagtgtcctgatgattcatggagtttgccccttcctaagggaaggagatctttatctttctggttggcttgaccagtcacgttgggagaagagagagagtgccaggagaccctgagggcagccggttcctactttggactgagagaagggagccccaggctggagcagcatgaggcccagcaagaagggcttgggttctgaggaagcagatgtttcatgctgtgaggccttgcaccaggtgggggccacagcaccagcagcatctttgctgggcagggcccagccctccactgcagaagcatctggaagcaccaccttgtctccacagagcagcttgggcacagcagactggcctggccctgagactggggagtggctccaacagcctcctgccacccacacaccactctccctagactctcctagggttcaggagctgctgggcccagaggtgacatttgacttttttccaggaaaaatgtaagtgtgaggaaaccctttttattttattacctttcactctctggctgctgggtctgccgtcggtcctgctgctaacctggcaccagagcctctgcccggggagcctcaggcagtcctctcctgctgtcacagctgccatccacttctcagtcccagggccatctcttggagtgacaaagctgggatcaaggacagggagttgtaacagagcagtgccagagcatgggcccaggtcccaggggagaggttggggctggcaggccactggcatgtgctgagtagcgcagagctacccagtgagaggccttgtctaactgcctttccttctaaagggaatgtttttttctgagataaaataaaaacgagccacatcgtgttttaagcttgtccaaatg

SEQ ID NO: 76900 - DNA, 1208 bp, Homo Sapiens
  misc_feature (477)..(477): n is a, c, g, or t
ggatgtcttggcctcccagacagtctttggaccactattttactggcctttgaaagaacaaagtttacttcaactaaaatgtttcttcctgtgaagacatatggtatcattttaatttaaggggcagatttccattcttttttggcatgtccttaaaaagaggatttgaaatcaactatatgctaccaagaactttaggatccaatttcccaagccaccgtgaagcctcttatggctactattatagttcatgagatgttggacagcatttggtttgtttggtaagagaagaacaaatatggctaattgttaataaggtcccctggctatggtttttgtccttataacagagtttagaatatcagagcatttcttgaatcatacatcattattgtccagtgaattcaagaccaaatacaatatcgggagaaaatacaaactccctgtgtttaagaataggggattataatggctcanattggttcatttgatttctaaaaataccatgacctttaaaaattcttttaatagatcatgttattggcagtatttatataaaaaccatggatttagaaaggtatatttagctttattataatagatacgttactattttggaaatatatatattttcacacctgtagtactcttccccatttcctctgacactcatgcagaatgagatcaggcatatttgtggttgacatactctagatagcttttccaacaaatctttgaaaagcaatcttggaaaggaattcattaactaaatggggtaaaaggtttctttttctttgagagttaagtccttcctcaaaaaattttcttatgctccataaaattgaggtagaatattttcattattcttgcagctaagcaagacagccatatgatgcaggttatgcagtgccttcatatctaaaacttttatactgcactttttaaagcttttatgttgaggaaaggaaaagggcatttgtctaaacatggattctgagttgtatatatttcctatcattctaaaaaagtgaatttgtgaagcaaagttttgccagatgttaaactttgaatttaatataccagattattaaaatattgtccattaactagttcatagattttaaaagtaaaatacttctgactgttaaaactatataaagaaaatctcatttgtctaattgcaattaaaagaaaaatgttaaaatatt

SEQ ID NO: 76901 - DNA, 858 bp, Homo Sapiens
ccttgagaactgacatctttaattcgggactttgccgccctccccaacttgtaacacagagcctggcagaggactggcactcaatgccaagaggggtgtgtagggggtacaacgggggcacttccaggaggctaaaggatctgggagatgcctttcttcgctaaacgtcccccatccatctcctccttcagctggcatggacccatcttctccagtgccaaacccagaggaggcgggcggccctcttgcccaggtaccctctgcagcgcttgcccaggtcgcaccagaccggtcccatctcttctctccttgagggacccactcgcatcgttgcccttttaagaaagaggaaattcttctcataaacaagcgtccggacctgagcgcggagccaggccgcctgccctgctgggtccccaggaaatcgggggttcttccagatgcaacacccggcccaggttcaactctagggaaaggcctgttggcctctcctcgctgcggccctccgcaggtcctgggctggggtctgagggacccgacgaggctggaggagggacttgggggagcctagaaacagcctagggaacgtctataaagtgcagcccctgaatggggcgaatgggtgcccagccgctccctaaggcagagggggctccccgcccacacagcttcctcccacccactctccccgaaggattctggggcccctgggcgcgagccccgagcgcccgcctccccgcgtcgttccgcctggcggggaggggtgaggccggggcgggatggcgggcgtcgggaccgtctctgcccctagggggagcagtcagcagagagggagcggtaacagcgcggcgtgggagt

SEQ ID NO: 76902 - DNA, 803 bp, Homo Sapiens
cagtcgacggtaccggacatatgcccgggaattcggccattacggccgggggtcgtggttccggaggttcctcgggatgtcggtggccttcgtaccggactggctgaggggcaaggcggaagtcaatcaagagactatccagcggctccttgaggagaatgaccagctgatccgctgtattgtggagtatcagaacaagggccgcgggaacgagtgcgtgcagtaccagcatgtgttacatagaaatctcatttatttggctaccattgcagatgccagtccaaccagcacttcaaaagcaatggaataatctttcaaaagcaatagaataatcttccatttggctgtcgtgaggagtaattgaatgtaatccatctcttacaaaatggagacagggtctttaccaactcaactggttaaaacatgaatgaaacctctgtggctctttcgaaacgtgaaaatgtgaagaaagctactaacttagctgtattctcatgtaaatattttttaaataattaagcaaatccctcaataagttgagcccaggtgtcctctttcctgaacttggagcatgtttggataacaaagacatcactgggatgttcaagtctactttttagtttcaacctgaagaggaaactcagtaggtgttgggcaggaattggtgagattcctgacttgataccttgctaaatggacatgtaactgtgtgctccttcctatcagtttgtaaatgtggtccccctgactgctgttttcagattgctttgaaataaagcttatttttctataaaataaaaaaa

SEQ ID NO: 76903 - DNA, 991 bp, Homo Sapiens
  misc_feature (52)..(52): n is a, c, g, or t
  misc_feature (72)..(72): n is a, c, g, or t
  misc_feature (155)..(155): n is a, c, g, or t
  misc_feature (162)..(162): n is a, c, g, or t
  misc_feature (268)..(268): n is a, c, g, or t
  misc_feature (833)..(833): n is a, c, g, or t
taaaatacccctctgtgtgagtcatcgcctagatgacagaccgataacatcntctttaatgacaacttgatnttaaaatcctccacactgcacaccatgaccattgtgcaatctgatatatattgtgtgaatttgcatcatatagtgcaatgcanactgatntatcaggatctgcacgtagagaaaagaacaagaaccatctgaagtgatgacgctgaagataagtggagaacatgatcacaattgaaaatgcatcccctctgatccnctggacatgaagggagggcatattaatgatgccttcatgacagaggatgagaggctcacccctctctgaagggctgttgttctgcttcctcaagaaattaaacatttgtttctgtgtgactgctgagcatcctgaaataccaagagcagatcatatattttgtttcaccattcttcttttgtaataaattttgaatgtgcttgaaagtgaaaagcaatcaattatacccaccaacaccactgaaatcataagctattcacgactcaaaatattctaaaatatttttctgacagtatagtgtataaatgtggtcatgtggtatttgtagttattgatttaagcatttttagaaataagatcaggcatatgtatatattttcacacttcaaagacctaaggaaaaataaattttccagtggagaatacatataatatggtgtagaaatcattgaaaatggatcctttttgacgatcacttatatcactctgtatatgactaagtaaacaaaagtgagaagtaattattgtaaatggatggataaaaatggaattactcatatacagnggtggaattttatcctgttatcacaccaacagttgattatatattttctgaatatcagcccctaataggacaattctatttgttgaccatttctacaatttgtaaaagtccaatctgtgctaacttaataaagtaataatcatctctttttgattgtg

SEQ ID NO: 76904 - DNA, 871 bp, Homo Sapiens
caccccatatatagacgaaccctgacgtggtgtaaaaaacaaggctgggacgagtccggaatttccgggatatcgtcgacccacgcgtccgtccacacgtccgaagaccagccttctggccaactgccaggcgccgcgccggccctggctggcctcacacatgagcactgtcttcctcacgctgctctgcttccccgccttcctgggcgccgctgtcttcctctgctacgccgtctggcaggtgaagccctcgagcacctgcggccccttccggaccctggacaccatgtacgaggccggcagggtgtgggtgcgccacctggaggcggcaggccccagggtctcctggctgccctgggtgcaccggtacctgatggaaaacaccttctttgtcttcctggtgtcagccctgctgctggccgtgatctacctcaacatccaggtggtgcggggccagcgcaaggtcatctgcctgctcaaggagcagatcagcaatgagggtgaggacaaaatcttcttaatcaacaagcttcactccatctacgagaggaaggagagggaggagaggagcagggttgggacaaccgaggaggctgcggcaccccctgccctgctcacagatgaacaggatgcctagggggacggcgatgggcctcacgggcccgcccagcaccctgagaccacactgttgcctcccagtgaccctgctgggacaccaggacaaggaagacagtttcgcctctcgaaagccgcagctgcgcctaggctggagctggaagggtgggtgaatccggcttgggcatccccaatgaactctgccctgcctgggactctatttattctgattaaaggggttttgcaaatgaaaaaa

SEQ ID NO: 76905 - DNA, 1622 bp, Homo Sapiens
ttttggtttcatgttagtatttactaaagttttaaatataatcacgtagaaaacaaacatttcaaaaatgcaaaatattagaaatctaatcagtgctattaatctttccatgcaaacaatctcttttgctgagataagtgatactagttctgcagctgggaatatgtacaaaatgatgctgtaccagagtttaaaaatagggttggtctagagattgcacatgatacaaatgaagcagcgcaaataatatatgactaaatacaggatttcaatcaagcttatcatcctgggaatatacagctataataccatgaatagacaagatataaagctctttcacagttacccacccctcaccactaggaaagaaacatttcttaatacaaagagtggtttatctggctatccagggctatgctgtccatctttggttatagggactccctctgcttatcctttggtttactcttaaatagcacctattctgccaataggaagagtaaacataaatttgaagaccacaacttggcaaaagcttccccttaatatacagtgaatacttaattctcaataactcagagtttatatacctttaaaaaaataaagtattccatatatctgaaacttagtggcatacttagcactagactataagcagatgacaaagaaaggccaggcctgacctataccccaaccttacctctacaatctccatggtgacagtaattacccttcattttccttttctttccagaaagggataaagaccactgctgtctaaggaatggcttcagtaaatattaaatgtcagtggctttgaataccataacatttataaaaaaatttataaacaataaaccacagctcgcctgcctttgccactctataaacagaggcctgtggaatctgagagcaagtataaaggattatcataaagagaactacaaagacaatgacaaactgaccaatgaagaagaaaaatctacagcaaagtagtgaaaagatgccttgaccaaattagtgtgcagtcacttgtgttcttagaagtaaacctcacttcatatgttccagactcagctgacactgactctggaatagctgtttcttggaccctacagacataatttttctttcagaacaagttaaacatttccccctagccaaacctacctgctcaaccaatgctgcccgtgccaagagccttttaaatatgctttgtggattatggatacctaagaaggaaagaggatacacaatactaccttagctcaagtagaaatggcaggtgacaaattctgtttcaccataaaggcaccactaaaaggttttatttagaacctcagcagcctgtagaggctacacaatttcaggttcatcagcttttacaactattttcaacgtaagaatagaagctattagcaaataacttctatcaaatataaaagggaggcctaggatatacaacatctttgctttataaagatgcacctaacatgaactaacttgtcaactttagactcttacagcagctcaaacagttgcaaaaacaatgaacatcagtgatttctggcaataagtctgtcagttctaagagagtaaacaacacttttttaaagctaaaa

SEQ ID NO: 76906 - DNA, 587 bp, Homo Sapiens
agaattcggcacgagggtcactgatgtgcctcgaaagatccggtgtttgtggctcctgcaccctgctcagcagctctgtcccgggacagtcagggtggactcaatctttctggttctccacagaagacgtctctgcaagaagcctggagtctgtttcaggccaggaggaggggatttgctgagggccaagggggttctgggacagagtctggaaagctggtcttcaggctctcagtcccaggctgggcaggcacggtcacttcacttcagcctttcagtccctctctctctgcctgtgggaatctggacacattttgggaggcctcccaaggctgtgggacgtgcttgctctggcagctgcagggttcctgtctggcctccctggtgagcagaggggcggccacggcgggcggtggcctagagacccaggacctgggcgcctgggaaaatggaatgcaacccacattgtaaagccactggcatctgattatctccatttgaacacacagcacagaacaatcatttaaatgttattttggaaaggggttttggggacacagaagaataagtaaacacatctcggaggc

SEQ ID NO: 76907 - DNA, 751 bp, Homo Sapiens
cggaagtggttctccgcccctgccactgggccatggagactgtggcacagtagactgtagtgtgaggctcgcgggggcagtggccatggaggccgtgctgaacgagctggtgtctgtggaggacctgctgaagtttgaaaagaaatttcagtctgagaaggcagcaggctcggtgtccaagagcacgcagtttgagtacgcctggtgcctggtgcggagcaagtacaatgatgacatccgtaaaggcatcgtgctgctcgaggagctgctgcccaaagggagcaaggaggaacagcgggattacgtcttctacctggccgtggggaactaccggctcaaggaatacgagaaggccttaaagtacgtccgcgggttgctgcagacagagccccagaacaaccaggccaaggaactggagcggctcattgacaaggccatgaagaaagatggactcgtgggcatggccatcgtgggaggcatggccctgggtgtggcgggactggccggactcatcggacttgctgtgtccaagtccaaatcctgaaggagacgcgggagcccacggagaacgctccaggagggcctgtccatcctcgctgtcctttccctgttctccccctgccccccgtctctatcctctgtggccttcagctaatttctgctcccctgagattcgtccttcagccccatcatgtgctttgggatgagtgtaaataaaacggggctgtggcttgggacaacaaccaccata

SEQ ID NO: 76908 - DNA, 1037 bp, Homo Sapiens
gaggaaaataacggagaaaaagcacaaactgtccgtccgcggtccccgccccgccgggctcccggcccgttgaaccccgcccttagtaccgccccgcccgttccgcatgcagctgggacgggatcacagccgatcagcgagacgccaggttaaacgccggcagctgcgagcgataggggacctcaaaagcatcctaactccgggcacgatcactgagcgagtatccattctggcgaacattcaacgcaacagacctgcaaaggacacacagtggcacctcagcccagtggaaggcggccagccccatgtcagtacgtcctcgtggacacgactccaatccggctgcacctggagcacctggggaagaacaagtgcagcgtcaccttgtcccggtgtccaaggtgagcgggcaggcagaggtggacgacatcctcgcggcagtccgcccgaccacacgcctcgtgaccatcatgcctggccaacaatgagactggcattgtcatgcctgtccctgaaatcagtcagcgcatgtaaagccctgaaccaggaacgggtggcagctgggctacctcccatcctcgtgcacacggatgctgcacaggccttggggaagcagcgcgtggatgtggaggacctgggcgtggacttccttaccaatcgtggggcacaagttttatggtcccaggattggcgcactttatatacgaggacttggtgaatttacccctctctaccctatgctatttggaggtggacaagaacggaatttcaggccagggacagagaacaccccatatgattgccggccttgggaaggtgagccctggtgagcttgaggagatgagttgattgcttcgtcatcagtgtccccagcggctctagtaggaatctggggctttagggagatcatattcgtgatctcataagcggactgacaagaaaaagcctggaatctgatttatcaacctggagagctgtactttttcagatctgtggattagtggcacttgtgtagcatttaaaagggaaaaactcct

SEQ ID NO: 76909 - DNA, 1397 bp, Homo Sapiens
  misc_feature (137)..(137): n is a, c, g, or t
ccacttgggcccttggtggtgtggcggcccacgctgagccggagcgcgttcctggccacgtcgaaggggaccacgtaagctcagcagcactggggacggcggtcccccgtgtcccgagtggcacgcggcccccacantggccatcagcactgggcactgcgcaagcaccacgtggcctgaagccgggggtccccggatggaaaagttacaggtattgggaagccgctgggtgcctggaaactggctattcagatggattctcttctgaccgaattcagcttccagcctctcttccaggtagtcgcggacgtccctcatgtgggcctcataagcctcgcagttctgggtcaccagctccgcggccttcccaaggccagcaatcattggggtgttctctgtccctggcctgaaattccgttcttgtccacctccaaatagcatagggtagagaggggtaaattcaccaagtcctcgtatataaagtgcgccaatcctgggaccataaaacttgtgccccacgattgtaaggaagtccacgcccaggtcctccaaatccacgcgctgctttccccaagccctgtgcagcatccgtgtgcaacgaggatgggaggtagccacagctgccacccgttccctggttcagggcttttaatgcgctgactgattttcagggacaggcatgacaaatgccagtccatcaattgttggccacgcatgatggtcacgaggcgtgtggtcgggcggactgccgcgaggatgtcgtccacctctgcctgcccgctcaccttggacaccgggacaaaggtgaccgctgccacttgttcttccaccaggtgctccaggggcagccggatggagtcgtgttccaccgaggaagtaatgaaatggggcttggcccccttcactgggctgtggtgcccacctgtgtgtccctttgaggtctggtttgcgtggaaatgtttcaccacagaatggattactaaattatttgactcagtgcccccggaagtgaagattatatcttgaggtttcccccctatcatcttcgcgaggctttcccgagctgcatttataatatccttggcctttcttcctgctgaatacgggctgctgggatttccccaggcttcccacatggcccttggtcatggcctggataacttctggctccaggggagtcgttgcattatagtccatataaactttcctctccggcgagttgtgtttcccgcagccgctgggctgactcgccgcgggtgccggcgcatccctccccggcgccacgccgcctccatccccgccccactgctgccgggcatccagcctccttcccgcggacgcgtggtcgacgatatcccgggattccgaccgtaccagcctgctttttgtacaacttt

SEQ ID NO: 76910 - DNA, 2595 bp, Homo Sapiens
  misc_feature (76)..(110): n is a, c, g, or t
  misc_feature (2165)..(2184): n is a, c, g, or t
  misc_feature (2504)..(2504): n is a, c, g, or t
  misc_feature (2513)..(2513): n is a, c, g, or t
  misc_feature (2531)..(2531): n is a, c, g, or t
  misc_feature (2537)..(2537): n is a, c, g, or t
  misc_feature (2547)..(2547): n is a, c, g, or t
  misc_feature (2559)..(2559): n is a, c, g, or t
  misc_feature (2565)..(2565): n is a, c, g, or t
  misc_feature (2577)..(2577): n is a, c, g, or t
aatgaaagatcactataggggctagctcgttgcagcgaacgacgagcgcaggagtagtgagcgaggaagcggccgnnnnnnnnnnnnnnnnnnnnnnnnnnnnnnnnnnncagtcgacggtaccggacatatgcccgggaattcggccattacggccgggggagttcggagtagagatggccgcgcttgcaccgctgcccccgctccccgcacagttcaagagcatacagcatcatctgaggacggctcaggagcatgacaagcgagaccctgtggtggcttattactgtcgtttatacgcaatgcagactggaatgaagatcgatagtaaaactcctgaatgtcgcaaatttttatcaaagttaatggatcagttagaagctctaaagaagcagttgggtgataatgaagctattactcaagaaatagtgggctgtgcccatttggagaattatgctttgaaaatgtttttgtatgcagacaatgaagatcgtgctggacgatttcacaaaaacatgatcaagtccttctatactgcaagtcttttgatagatgtcataacagtatttggagaactcactgatgaaaatgtgaaacacaggaagtatgccagatggaaggcaacatacatccataattgtttaaagaatggggagactcctcaagcaggccctgttggaattgaagaagataatgatattgaagaaaatgaagatgctggagcagcctctctgcccactcagccaactcagccatcatcatcttcaacttatgacccaagcaacatgccatcaggcaactatactggaatacagattcctccgggtgcacacgctccagctaatacaccagcagaagtgcctcacagcacaggtggtagcaagtaatactatccaaacctactccacagactatacctgccattgatcccgcacttttcaatacaatttcccagggggatgttcgtctaaccccagaagactttgctagagctcagaagtactgcaaatatgctggcagtgctttgcagtatgaagatgtaagcactgctgtccagaatctacaaaaggctctcaagttactgacgacaggcagagaatgaagcctttgtatgacagacccatgtatttttggcatgaggaactaacagtccattactctatcttcagcctatcaggatcacagttttaaggaagacttggttttgttgaatatgacaatgaaatctgtgtgtatcagatttttattgaagcattcatcagcagcctcaaccagttttcattgtccatttactagattcaatcgtctctgagtatatagggctgatgttagcaagaccctaaaaatgtccattgaaccctgcttcaaaaaatgaaaacacacctctataaaatgtgtactgggaataagctttgtatttacatacattaggggaattttttaaaatctgtaatgtttggacaaacagatgatattactttgctataaaattataaatgtaacttttaataaagatagccagaatattctaaattagaaattacgtttttgtttccctcaagacataaaacaaatataaacattctaaactgctggatgaatctgaaaagacattaagttcaaattttaatttattctcatattaaatataactccattaaaagtttaaaatttcatgggagaaaatataataaggtaaagaggtagaatcactttcagacttaagaataatgttgatttcccaagtgctttaccttatctgttaaagcgtaagatgaattggtatttgcttcataggcagtttgactgcatgtattagagaatgaaaagaagatatttgtagtaatgcctggaaacttggtgctttaaattaaggtactcctctgctgctgtagaatggattccacacagtggatagctatgggtgattcagaatattatgtttagattcccatttgttaagtttataagttttgtggggaattatgaacttactgtgtactacctgcatttgtgctgtgtgaaaaataaatacaaggattcgtttagctaattcaacttactacaaagacaaatgtctgtttttatttgcctgctaggattgtcttttttaaaagtcatttttatttataggaatatgggtgtttctataggaagaaacaggnnnnnnnnnnnnnnnnnnnnaagataaatttgacaaagttaactgaaatttatctggtccattttattcatgctactaagatgggaatctttaaacacaagggtcagcaagctttggcccatggattggccacctgttacgtaaataaagtttctttgaaacaagcctacactcattcatttatgttttgtctgtggttgctttccacaactgcagagttgtatgacttgcaagtctaaaaacatttactatttggccctctaagaaaaagttaagacacctagtctaatggccttttgggaaaaaaccaatcactaactccataatcatttatatcccntaatttccnggcataaatggtaatgcnaattgngacaaggggntttggtagaatnaaatanttccggactggncttaaactggttcctaaa

SEQ ID NO: 76911 - DNA, 1118 bp, Homo Sapiens
  misc_feature (819)..(917): n is a, c, g, or t
  misc_feature (940)..(948): n is a, c, g, or t
  misc_feature (968)..(992): n is a, c, g, or t
  misc_feature (996)..(1008): n is a, c, g, or t
  misc_feature (1033)..(1045): n is a, c, g, or t
taaccatgaatctatgtggtccaccccaaattatgatagtaggccattttctggacaaagaattcagccgcctcatgggacccccccattactgcaaagcttacggcggggcgcgcaagctaaggaaacctttccctcagacttcagaatggttgcccagggtgtgggcatccctgaggactccatcttcaccatggctgaccgaggtgaatgtgtccctggggagcaggaaccagagcccatcttaatcccgagagtccggagggctgtgctaccccaagaagaggaaggatcagggggtgggcaactggtaactgaagtcaccaagaaagaagattcctgccagctgggctactcggccggtccctgcatgggaatgaccagcaggtatttctataatggtacatccatggcctgtgagactttccagtacggcggctgcatgggcaacggtaacaacttcgtcacagaaaaggagtgtctgcagacctgccgaactgtggcggcctgcaatctccccatagtccggggcccctgccgagccttcatccagctctgggcatttgatgctgtcaaggggaagtgcgtcctcttcccctacgggggctgccagggcaacgggaacaagttctactcagagaaggagtgcagagagtactgcggtgtccctggtgatggtgatgaggagctgctgcgcttctccaactgacaactggccggtctgcaagtcagaggatggccagtgtctgtcccggggtcctgtggcaggcagcgccaagcaacctgggtccaaataaaaactaaattgtaaactcctgnnnnnnnnnnnnnnnnnnnnnnnnnnnnnnnnnnnnnnnnnnnnnnnnnnnnnnnnnnnnnnnnnnnnnnnnnnnnnnnnnnnnnnnnnnnnnnnnnnnccatgccggccaacctagacccnnnnnnnnncttccaccacaatcatattnnnnnnnnnnnnnnnnnnnnnnnnncggnnnnnnnnnnnnngaaattcttttaaaaccctggtttnnnnnnnnnnnnncattaagaaaaaaaaaagcgcccaggggttccccaaggggactgcggactcaaaagggggttgggaccccccc

SEQ ID NO: 76912 - DNA, 919 bp, Homo Sapiens
  misc_feature (842)..(842): n is a, c, g, or t
gcgcgcgaggtgaggagttgtgcagggtttggggaaaggaaggctggcttggcgagagggcaggtttgcgggctttcgcccccttttccaaagaccaacaaagagtccttccccaactcccaactcaaccccttttggaactatgtgtggtggttgggaccctgtggcgcatccttgtcgctcgtgtccttctcatgcccggcgacgcgtctttgtggtaacgccctgctgccatctcttttcttctctatgcgaggatttggactggcagtgagaataagagacaacgattcacgtctactttctaggatgacttccatgtgctccatctcgcgcgtccctgagcatgttgaatttccaaatcctaaataagccgcgcggtgtagtttgtattatgttgcgtttctctttctgctttcctcgccctttctccatcatcctttaggctctacagagtgaaggtttaaatccaaggtcatggcaaaacatctgaagttcatcgccaggactgtgatggtacaggaagggaacgtggaaagcgcatacaggaccctaaacagaatcctcactatggatgggctcattgaggacattaagcatcggcggtattatgagaagccatgccgccggcgacagagggaaagctatgaaaggtgccggcggatctacaacatggaaatggctcgcaagatcaacttcttgatgcgaaagaatcgggcagatccgtggcagggctgctgaaggcctggttgggtgggacacccagtgcggaacccttcatcccagtttttctctccatctctttttcctttgtaccatccccattttcctaatacccattncctctgcaattaaaactccaaatcacctggtcctggccagaaaaggccctcccaaataataaccaaacaaatccccc

SEQ ID NO: 76913 - DNA, 764 bp, Homo Sapiens
  misc_feature (594)..(717): n is a, c, g, or t
cagtcgacggtaccggacatatgcccgggaattcggccattacggccggggcttccggtgggctaggtactgagcgcgcgaggctctacagagtgaaggtttaaatccaaggtcatggcaaaacatctgaagttcatcgccaggactgtgatggtacaggaagggaacgtggaaagcgcatacaggaccctaaacagaatcctcactatggatgggctcattgaggacattaagcatcggcggtattatgagaagccatgccgccggcgacagagggaaagctatgaaaggtgccggcggatctacaacatggaaatggctcgcaagatcaacttcttgatgcgaaagaatcgggcagatccgtggcagggctgctgaggcctgtgggtgggacacccagtgcgaaaccctcatccagttttctctccatctcttttctttgtacaatcccatttcctattaccattctctgcaataaactcaaatcacatgtctgcaagaaggcctccaaatatacaaacaatcccattagtcagcagtggaccctgtcttttattaagtgaaagaagaaactgagtctgaaagtactctagnnnnnnnnnnnnnnnnnnnnnnnnnnnnnnnnnnnnnnnnnnnnnnnnnnnnnnnnnnnnnnnnnnnnnnnnnnnnnnnnnnnnnnnnnnnnnnnnnnnnnnnnnnnnnnnnnnnnnnnnnnnntcacgcctgttatcccaaagtgctgggattatggggcatgaagcaca

SEQ ID NO: 76914 - DNA, 855 bp, Homo Sapiens
aaggctaggtacgaggcgggtgtgaatcggcacgaggggggaaaggaaggctggcttggcgagagggcaggtttgcgggctttcgcccccttttccaaagaccaacaaagagtcctgccccaactcccaactcaaccccttttggaactatgtgtggcgcatccttgtcgctcgtgtccttctcatgcccggcgacgcgtctttgtggtaacgccctgctgccatctcttttcttctctatgcgaggatttggactggcagtgagaataagagacaacgattcacgtctactttctaggatgacttccatgtgctccatctcgcgcgtccctgagcatgttgaatttccaaatcctaaataagccgcgcggtgtagtttgtattatgttgcgtttctctttctgctttcctcgccctttctccatcatcctttaggctctacagagtgaaggtttaaatccaaggtcatggcaaaacatctgaagttcatcgccaggactgtgatggtacaggaagggaacgtggaaagcgcatacaggaccctaaacagaatcctcactatggatgggctcattgaggacattaagcatcggcggtattatgagaagccatgccgccggcgacagagggaaagctatgaaaggtgccggcggatctacaacatggaaatggctcgcaagatcaacttcttgatgcgaaagaatcgggcagatccgtggcagggctgctgaggcctgtgggtgggacacccagtgcgaaaccctcatccagttttctctccatctcttttctttgtacaatcccatttcctattaccattctctgcaataaactcaaatcacatgtctgcaaaaa

SEQ ID NO: 76915 - DNA, 904 bp, Homo Sapiens
  misc_feature (383)..(395): n is a, c, g, or t
attaggaaagtattttattgacatatatatcaatcattacctacaaatttaggagcatcagcaccattcatcatcctcaaagttaatattatgaaacaattacacaggttacagaataaggaaattatagattaaagctgatcttgatgtagttccaactatacatggagtggaaattctaggacaccacatatgaatctacatcttctttattgattgacagctgaagtctcattaacgtttctatctcaatcaagttaaaagagatttataggtttgcaatgcaatagggatccaaaagtagatgggggatacaaattaatacaagtatctctacatcacttcagttatctctagatgaaatattttaataaaatacaggnnnnnnnnnnnnntactaaagttcactggatgctattattgagcaacacagctgtggaaagtaactgaaatactatgaatttagctttatgaaaaaagttccagactcgggagagtaacagctcaatgagaactaagtgtaaacacagcattttgtaaatttactaagatagggtagaacattaatcacacaacagtaagactttaataaaatgggtctgtaattttagaaaataggttaatattacaaaatggtaagttgaactttgaaaaagtacttttaaatgacaattttaaggtaccttaatgaaaaattaaaatgataaagtatttcttgaattagtataataatgtaaatgaaccaaaattagcatctacctctataaataagggtaataaacatctgacgttacagataaaatatccaattatccaattggtaattacttaaatttctattttaatttaaactgactatacattttatcattactctctaatctatttaagataatttaaaatt

SEQ ID NO: 76916 - DNA, 632 bp, Homo Sapiens
agaaaacagtgaagggctggtggccctgtgtagcagaaagagggtgagaagaaaatactggcgggcaagctggaaatgaccttggagattgtagcagagagtgagcatgaggaacggcctgctggccagggccgggatgagcccaacatgaaccctaagcttgaggacccaaggcgccccgacacctccttcctgtggtttacctccccatacaagaccatgaagttcatcctgtggcggcgtttccggtgggccatcatcctcttcatcatcctcttcatcctgctgctgttcctggccatcttcatctacgccttcccgaactatgctgccatgaagctggtgaagcccttcagctgaggactctcctgccctgtagaaggggccgtggggtcccctccagcatgggactggcctgcctcctccgcccagctcggcgagctcctccagacctcctaggcctgattgtcctgccagggtgggcagacagacagatggaccggcccacactcccagagttgctaacatggagctctgagatcaccccacttccatcatttccttctcccccaaacccaacgcttttttggatcagctcagacatatttcagtataaaacagttggaaccaca

SEQ ID NO: 76917 - DNA, 831 bp, Homo Sapiens
  misc_feature (512)..(540): n is a, c, g, or t
aaaggtcttgcaactgcaattttattttcttttgtgaaaataaacaactgggagtttaaattgctccaaaaaccataaaaacaaaaagaaatacacacacgaagaagcatgtgcaggtgactggggaagggaacagggtctctagaactttggcagattgtgctggcacggacccaggtgacaggagccagaccatggggctggtcccgcctgccactctgggattgtgaagggatgatcgccactggcaaggacggggaggaacacagacttcttcgctgaggaagtggcaggcaccttgagtccctttaaatgcgggggttgggaggaaaccatttcagaggaccgctttctccactgaaagctggggctggcggcaggggcgagaagagacaggagacagaaagtgcaagagaggtaagagagagaagtgccctctgcccaggtccatccaccacagcacctacaggacgaatagcacgctacttttcagttctctttcttataaagannnnnnnnnnnnnnnnnnnnnnnnnnnnnaaaaaagccttaagatcagctactggttacatctacaaactgtaaagtgctgttgttaccaaccactttacagaacagtccagagtggtcaaatattgaccaataaagtctcctttttctttttcttctgaatcattactactcaatgagtcatgtgacagcctgcaggggtcggggggagcttagtgggcagacttggtgaccagggaaagaggctgggcctgtagcaccgggagggcctggtgggcatggagcgtggcggggaaggacgggggagaggccagcagagct

SEQ ID NO: 76918 - DNA, 721 bp, Homo Sapiens
  misc_feature (1)..(1): n is a, c, g, or t
ntctttataagaaagagaactgaaaagtagcgtgctattcgtcctgtaggtgctgtggtggatggacctgggcagagggcacttctctctcttacctctcttgcactttctgtctcctgtctcttctcgcccctgccgcctgccccagcttccccgactccatctgcagctctgccattgtgacatttcctgttacccagcccaagttttcatcgtctgctcaataccgtgggttcttcttcgtcctctgtcctctgcccagtgtgaggccatcaccatgtgagaagacatcttggcctgatttgctgccaccagcgtcccctccctcagtgggcccgaactcgccagccccagctttcagtggagaaagcggtcctctgaaatggtttcctcccaacccccgcatttaaagggactcaaggtgcctgccacttcctcagcgaagaagtctgtgttcctccccgtccttgccagtggcgatcatcccttcacaatcccagagtggcaggcgggaccagccccatggtctggctcctgtcacctgggtccgtgccagcacaatctgccaaagttctagagaccctgttcccttccccatcacctcacatgcttcttctgtgtgtatttctttttgtttttatggtttttggagcaatttaaactcccagttgtttattttcacaaaagaaaataaaattgcagttgcaagacctttaaaaaa

SEQ ID NO: 76919 - DNA, 1194 bp, Homo Sapiens
  misc_feature (908)..(908): n is a, c, g, or t
  misc_feature (929)..(929): n is a, c, g, or t
  misc_feature (941)..(975): n is a, c, g, or t
ccactcggatggccacatcaggatcgataccgaggcgcttagatgctcagtgatccagatagtgctgcacgcattttgtgtgagacgacagtccagtacccaatctgtgtgcacatctatggtgatttctgagcattcattcccgcagttgctgtgtcctagattccggttggccaccctgaagatatgccacaaacaagttctagtcactctgatcttggccagcttgcttctcaaaggaggtttaggaatgtatgaaacacccctgttcctagctcatgaagaagagtcaggtggccgaagtgttcccactactccactacaagtagcagccccagtgactgtatttactgagagcaccacctctgatgcttcggaacatgcctctcaatctgttccaatggtgactacatccactggcactttatctacaacaaatgaaacagcaacaggtgatgatggagatgaagtatttgtggaggcagaatctgaaggtattagttcagaagcaggcctagaaattgatagccagcaggaagaagagccggttcaagcatctgatgagtcagatctcccctccaccagccaggatcctccttctagctcatctgtagatactagtagtagtcaaccaaagcctttcagacgagtaagacttcagacaacattgagacaaggtgtccgtggtcgtcagtttaacagacagagaggtgtgagccatgcaatgggagggagaggaggaataaacagaggaaatattaattaaatggtctgtaaacaataacaactgtgaataagattatcaaatctgttttagtgtaatgattgtcaagtttaaaaacatttttatatataaactggtatactcatgtcaatattctttattaataaaatgtttttcagtgtcnttctcccaaaaaagcacctgntactaaggcctnnnnnnnnnnnnnnnnnnnnnnnnnnnnnnnnnnnaaagttcccgcaaaaaagatcccgccgcgagtaaaaaagctccacccccgaacgttcctgccccgaaagcctttggccagaaaacagggcctggttcctaaggttgggggggcctcccccctcaagaaattaagaacctgttctagggggggccgggccccaaagattaaggggcaatggttccaagttttttccgcgaaaatccgcgctgtgggaaaa

SEQ ID NO: 76920 - DNA, 1423 bp, Homo Sapiens
tctggagaggcaggaggacaccgagttccccgtgttggcctccaggtcctgtgcttgcggagccgtccggcggctgggatcgagccccgacaatgggcaacgcgcaggagcggccgtcagagactatcgaccgcgagcggaaacgcctggtcgagacgctgcaggcggactcgggactgctgttggacgcgctgctggcgcggggcgtgctcaccgggccagagtacgaggcattggatgcactgcctgatgccgagcgcagggctaccgggaccgcagctatgaccctccatgcccaggccactggacgccggaggcacccggctcggggaccacatgccccgggttgcccagagcttcagaccctgacgaggccgggggccctgagggctccgaggcggtgcaatccgggaccccggaggagccagagccagagctggaagctgaggcctctaaagaggctgaaccggagccggagccagagccagagctggaacccgaggctgaagcagaaccagagccggaactggagccagaaccggacccagagcccgagcccgacttcgaggaaagggacgagtccgaagattcctgaaggccagagctctgacaggcggtgccccgcccatgctggataggacctgggatgctgctggagctgaatcggatgccaccaaggctcggtccagcccagtaccgctggaagtgaataaactccggagggtcggacgggacctgggctctctccacgattctggctgtttgcccaggaacttagggtgggtacctctgagtcccagggacctgggcaggcccaagcccaccacgagcatcatccagtcctcagccctaatctgcacttaggagtccaggctgcaccctggagatcccagacctagccccctagtgggacaaggacctgaccctcctgcccgcatacacaacccatttcccctggtgagccacttggcagcatatgtaggtaccagctcaaccccacgcaagttcctgagctgaacatggagcaaggggagggtgacttctctctacatagggagggcttagagctcacagccttgggaagtgagactagaagaggggagcagaaagggaccttgagtagacaaaggccacacacatcattgtcattactgttttaattgtctggcttctctctggactgggagctcagtgaggattctgaccagtgacttacacaaaaggcgctctatacatattataatatattcgcttactaaatgaataaggactttccaactgcgtttctgagttttacagatgggaaaactaaggccaaaggataggagtggggttcacacagctaagtctgaagggaaactggaagcagcaaccacctctgcacctcacctggtctaagaggggttcaggacttgggccacca

SEQ ID NO: 76921 - DNA, 891 bp, Homo Sapiens
gatgatacatgctaatttgcttattctatatcatggacaacacctttggggaaaagggtgggggtcagcctccccaaaatcacatggattccccaagtggaaactaggagcagggagttgcttgggtggccgctaacaccaggctactcttattttagcttgctaagttgagatcagctagacctgctttcttttctcctcagtcttgcatttccctcaatacaagctgtagcctctttcctcgtttctagtctcagaaggaaggagagggaagccattctcctctagggactcttcagtctcatttagatgatagtccctttttttctacctccatattagagatggagctccttccttttcctgtttcttaatttttgtcttctcattcctgcttccctctcaccctattgccagttccaccaactagagtgaaagacttcctagccatttcattaaatctattctgtatccaccaggtggcagcatcttgtcatacgtgtcaggacttaggactgcggggtttaggttagatgtcacggaaaaagctagttctgtggtcaggcggcaccaatgagaaaggaatgcagaccctccagatgtatccttgggaaaagcagtaaaccaactaatatttattgaagacctactttgtcctctacatagggtagcttctgtcagggaatcttggttcttcccaagaaacactgattttctttcagggagacttcatgtgttcatttatttccaccacagcagattttaagaaattataatatgtaatatttgatatctataaagagtatatctaacgtgaataaattatgaagcatactaatgagtacctatgacccataacacatatacattaaaacattttaaataccaaaa

SEQ ID NO: 76922 - DNA, 912 bp, Homo Sapiens
cgcgcttcgcgtgtagaagcgtcgggtggcggaggccgcaggccgcaggagtgctggtggaggggcttccagaaagaccctgcggcagcgccccccctcggctctccccgcaggagagcgggcacctgcgcggcgccgggtgaaggcgagagcctcggcgagccctctgcagcggagccccctgcccatttggttttggccagtcagcctggaaatctgcctgtagtcagctgatgcagagtcaccctgcagttcctactttgaggggttgcagaagcacatatttcactatggagggccgcctgcaggcctcgcgctgacaggatcttttgtgacgctgcaaatgtcctgaaccaccgggaggaactgggccattctaacacccgttgctaccatgctggccacccgcctctccagacccctgtcacggctcccaggaaaaaccctaagtgcctgtgatagacgaaaatggagcaagacgcccactattgcttggttctacttcctttatcccgattggccgtcggacttatgccagtgcggcggagccggttggcagcaaagctgtcctggtcacaggctgtgactctggatttgggttctcattggccaagcatctgcattcaaaaggcttccttgtgtttgctggctgcttgatgaaggacaaaggccatgatggggtcaaggagctggacagcctaaacagtgaccgattgagaaccgtccagctcaatgtctgcagcagcgaagaggtggagaaagtggtggagattgtccgctcgagcctgaaggaccctgagaaaggcatgtggggcctcgttaacaatgccggcatctctccggagataatttcatacagagattttaagaaaacatctttatattaaaaacagatgtcatttgatccttaaa

SEQ ID NO: 76923 - DNA, 1581 bp, Homo Sapiens
ggcacgagggggtggcggaggccgcaggccgcaggagtgctggtggaggggcttccagaaagaccctgcggcagcgccccccctcggctctccccgcaggagagcgggcacctgcgcggcgccgggtgaaggcgagagcctcggcgagccctctgcagcggagccccctgcccatttggttttggaaccaccgggaggaactgggccattctaacacccgttgctaccatgctggccacccgcctctccagacccctgtcacggctcccaggaaaaaccctaagtgcctgtgatagagaaaatggagcaagacgcccactattgcttggttctacttcctttatcccgattggccgtcggacttatgccagtgcggcggagccggttggcagcaaagctgtcctggtcacaggctgtgactctggatttgggttctcattggccaagcatctgcattcaaaaggcttccttgtgtttgctggctgcttgatgaaggacaaaggccatgatggggtcaaggagctggacagcctaaacagtgaccgattgagaaccgtccagctcaatgtctgcagcagcgaagaggtggagaaagtggtggagattgtccgctcgagcctgaaggaccctgagaaaggcatgtggggcctcgttaacaatgccggcatctcaacgttcggggaggtggagttcaccagcctggagacctacaagcaggtggcagaagtgaacctttggggcacagtgcggatgacgaaatcctttctccccctcatccgaagggccaaaggccgcgtcgtcaatatcagcagcatgctgggccgcatgcccaacccggcccgctccccgtactgcatcaccaagttcggggtagagctttctcggactgcctgcgctatgagatgtaccccctgggcgtgaaggtcagcgtggtggagcccggcaacttcatcgctgccaccagcctttacagccctgagagcattcaggccatcgccaagaagatgtgggaggagctgcctgaggtcgtgcgcaaggactacggcaagaagtactttgatgaaaagatcgccaagatggagacctactgcagcagtggctccacagacacgtcccctgtcatcgatgctgtcacacacgccctgaccgccaccaccccctacacccgctaccaccccatggactactactggtggctgcgaatgcagatcatgacccacttgcctggagccatctccgacatgatctacatccgctgaagagtctcgctgtggcctctgtcagggatccctggtggaaggggaggggagggaggaacccatatagtcaactcttgattatccacgtgtggattatccaccatgccaggaagacccataactggttttaacactaactagagggaatgacttctttgcatagtgagtgacttgggccttcacaaacagggtgtggagtggcaggcagaggcctctaaatctcagggcaaacatggtgaatctatctctccggagataatttcatacagagattttaagaaaacatctttatattaaaaacagatctcatttgatccttaaa

SEQ ID NO: 76924 - DNA, 693 bp, Homo Sapiens
  misc_feature (445)..(463): n is a, c, g, or t
attttaaaataactatggtgaattcatgtttatttttttactttgaaaattgtagtactcaggtggtatttaatgggaaaggatcctttgggtataaatcataatgtattttaaggaatgcatctataacattgataactttagccttaaaaaaaaggtctattattccttcctctgcatcccatggtatattagcaaagtagtttacagccctgtacagccttacaaagttgttttacaatttttaatggaaagcccttaacaacaacaacaaaaaattgtatcattttaccaatatccacgaattactgatcacagtttgtaaataatttgtttaatatcagaaggccaaagaaagtcttaaaattttagctattgactctatggtgacttcacaataagatttctgtgcaaaaaggtaaggtgataattgatctaatagacnnnnnnnnnnnnnnnnnnngctgtccatgagaattagacttcatattagcttcaattaaaaagctcattccattttattaaaatgtttgtaattgcaattttgtgtttaatgtttactttgtctttcctttctttagcatttaggtgactgttcggcagtttgatatatggccattgtcggccttaaactgcactagtaacaagcatggtatttatcttgtattgaaaataaaacaaacttttgataag

SEQ ID NO: 76925 - DNA, 1030 bp, Homo Sapiens
  misc_feature (143)..(143): n is a, c, g, or t
cacttcagtcactggtagcatctggtgagcgttcagttctgtagacatatataccatacctcagcaggtttccctgtcatgtgtggtacagtgagtgatctggcgcatcagctcttttgacatgtgccatgcagagaagagangcttctttctaactgcagtgtggcacagtcagtgacagtgtacctctgtgatgacagcacagtactggagatacggggaagagtccacagtgttgagagggaacccccatcaagtgtgccagcccatccggctgacacatgtcaacactggccgaaacctccatagtcaccacttcacttcacctctttctggaaaccaggaagtgagtgcttttggtgaggaaggtgaaggtgattatctggatgactggacagtgctctgtaatggaccctactgggtgagagatggtgaggtgcggttcaaacactcttccactgaggtactgctgtctgtcacaggagaacaatatggtcgacctatcagtgggcaaaaagaggtgcatggcatggcccagccaagtcagaacaactactggaaagccatggaaggcatcttcatgaagcccagtgagttgttgaaggcagaagcccaccatgcagagctgtgaatctagaggctctgagccactgttaacgcacaatgttcacagacatctgttgctgcctcaccttgggatccctgccacaagttccttgggcagtggccatgtcaccattgagatgaagatatacaacagaaaatagtggctgtgtttggaagcttcagccctgcacatttgaactagtcactctcccagacttgcgtgggtcagttctttctgagtagaggacttgctggtaaaggggcagatgctttttattagtactgataaaacaaactgagggaaacatccctcttagctgggaaacttttactcttcaggagcttggcatcatggactgttaatgtatgtgattttccccctattttctctctccaaaatgataaaaacaataattaaattatg

SEQ ID NO: 76926 - DNA, 1230 bp, Homo Sapiens
  misc_feature (1199)..(1199): n is a, c, g, or t
aaattattcgatcatatagggcgctacgcgttaagcgaacgacgagcgcagcgggagtattgagcgaggaagcggccgattacttcgtatagcatacattatacgaagtatcagtcgacggtaccggacatatgcccgggaattcggccattacggccggggcttcgaagatttggggctccgcgatacagttaggatggctgtagtacctctgctgttgttggggggtttgtggagcgctgtgggagcgtccagcctgggtgtcgttacttgcggctccgtggtgaagctactcaatacgcgccacaacgtccgactgcactcacacgacgtgcgctatgggtcaggtagtgggcagcagtcagtgacaggtgtaacctctgtggatgacagcaacagttactggaggatacgggggaagagtgccacagtgtgtgagaggggaacccccatcaagtgtggccagcccatccggctgacacatgtcaacactggccgaaacctccatagtcaccacttcacttcacctctttctggaaaccaggaagtgagtgcttttggtgaggaaggtgaaggtgattatctggatgactggacagtgctctgtaatggaccctactgggtgagagatggtgaggtgcggttcaaacactcttccactgaggtactgctgtctgtcacaggagaacaatatggtcgacctatcagtgggcaaaaagaggtgcatggcatggcccagccaagtcagaacaactactggaaagccatggaaggcatcttcatgaagcccagtgagttgttgaaggcagaagcccaccatgcagagctgtgaatctagaggctctgagccactgttaacgcacaatgttcacagacatctgttgctgcctcaccttgggatccctgccacaagttccttgggcagtggccatgtcaccattgagatgaagatatacaacagaaaatagtggctgtgtttggaagcttcagccctgcacatttgaactagtcactctcccagacttgcgtgggtcagttctttctgagtagaggacttgctggtaaaggggcagatggctttttattagtactggataaaacaaactgaagggaaacatcccctctttagctggggaaaactttttacctctttcagggaggcttgggccatccatgggacctggtttaaatggtatggntggattttttccccccccttaattttgtctc

SEQ ID NO: 76927 - DNA, 773 bp, Homo Sapiens
  misc_feature (722)..(722): n is a, c, g, or t
  misc_feature (758)..(758): n is a, c, g, or t
ggggtcaccgggagtgggcgggccatttcttgttctctctcccgctctcggaagctttcgtctcgtgggtgcgaaaggtaaccgaagcggctcaggaaggcagctgtcactgagcccctggaacagagcgagagtatcgtagtgggcagcagtcagtgacaggtgtaacctctgtggatgacagcaacagttactggaggatacgggggaagagtgccacagtgtgtgagaggggaacccccatcaagtgtggccagcccatccggctgacacatgtcaacactggccgaaacctccatagtcaccacttcacttcacctctttctggaaaccaggaagtgagtgcttttggtgaggaaggtgaaggtgattatctggatgactggacagtgctctgtaatggaccctactgggtgagagatggtgaggtgcggttcaaacactcttccactgaggtactgctgtctgtcacaggagaacaatatggtcgacctatcagtgggcaaaaagaggtgcatggcatggcccagccaagtcagaacaactactggaaagccatggaaggcatcttcatgaagcccagtgagttgttgaaggcagaagcccaccatgcagagctgtgaatctagaggctctgagccactgttaacgcacaatgttcacagacatctgttgctgccctcaccttgggatccctgccacaagttcccttgggcagtggncatgtcaccccattgagatgaagatatacaacagancatagtggctgtgtt

SEQ ID NO: 76928 - DNA, 1623 bp, Homo Sapiens
  misc_feature (979)..(979): n is a, c, g, or t
  misc_feature (1319)..(1350): n is a, c, g, or t
ttacgaaggtaccatagaagaaaatggccaaggcatgctacaggtggattttgcaaatcgttttgttggaggtggtgtaaccagtgcaggacttgtgcaagaagaaatccgctttttaatcaatcctgagttgattatttcacggctcttcactgaggtgctggatcacaatgaatgtctaattatcacaggtactgagcagtacagtgaatacacaggctatgctgagacatatcgttggtcccggagccacgaagatgggagtgaaagggacgactggcagcggcgctgcactgagatcgttgccatcgatgctcttcacttcagacgctacctcgatcagtttgtgcctgagaaaatgagacgcgagctgaacaaggcttactgtggatttctccgtcctggagtttcttcagagaatctttctgcagtggccacaggaaactggggctgtggtgcctttgggggtgatgccaggttaaaagccttaatacagatattggcagctgctgcagctgagcgagatgtggtttatctcacctttggggactcagaattgatgagagacatttacagcatgcacattttccttactgaaaggaaactcactgttggagatgtgtataagctgttgctacgatactacaatgaagaatgcagaaactgttccacccctggaccagacatcaagctttatccattcatataccatgctgtcgagtcctgtgcagagaccgctgacccattcagggcaaaggacagggacctgaggagccgagcgaatagcatctcctcccactcccacagagacgtcctgtttgagctgtcagatctcttgtgaaatcccatggaaggttgtgctcagcctgtcgggtcctctttcttcctgcccatatattataccagttgcttctgcagcccgcagatgccagcgatgccaggaaacaagttgaaatccaggaatctctttaactgattntgctaaaaatctccctgtgagccttccactcaactcttaatatgcttgcattgtttaagtttttaaattctgaaaattaataattagggtttttttcatatgtgttgcataatgcaaacctcctaggttaaaatagtttctttatttaagatagaataatttccagaaattgtacttttgaggtatcatttttatctgtaatggtttgtctgtcttttttcctctgatcagtatttttttataccagttttggagactgcctgagatgaaaggaaatgtggaataaaaggaggttttcctgatgtggtgtaaagaaaacagattcaagagaattgaagannnnnnnnnnnnnnnnnnnnnnnnnnnnnnnnaaattaggactaatgtttcttttgtggtgcttgaggcatattcatataaccaaagtttgagaactgggaacttcatgctgatttgtacatattgaagtttctctggtattcaaaggttatatagtgaatgaattttcattaataaatcactttgtcagaaactcccatatcatctatattttatatatgtatatataaacgtatgctctttaagtgtgtctatatgtgagcacataaaatctaaataaaattggactggtgggaaacaattag

SEQ ID NO: 76929 - DNA, 1304 bp, Homo Sapiens
ttgttaacaatattatctggtaataataccatgcaatatagcgttgtataccaacttagtgcattttatactgtattaaatatggagatacttctaatgcctctctaaaattaaattttacataaaagttagttttattcacctttaggcctttccaagtgaattgtgactaattttttcaatcttacatagatctttcacccattagcattacttacgtagataattctttatgcctagttattatacatattaatttttaaggtatacatttaaattacacaattgttcattgtggtttgtatcccagaatgtgttgtgttttttaaaagatgcataatagctgaaatgtatgcatgactttgaaagaagttaaaatgggtgattttttttcacctcttggtacattttaaaaccaggccaaatctatttgccaagcagtgtatcactaataagaaaagcagtttttccttttattgcagtttttgtttatctgccatagaatttccttatactgtggcttggtattattcaagattagctatttcgctggtattacatctttttaaaagcctattataacatggttagcctataaggcagtgttggtccccttctaatattggcctcataaaggggttccactgtactttccgcatattactgtgttgttgttttcctttgtggatatataagcaaattgagcttgggtgatttttatggagacaataattagacaatactgtataattagttttacttaatagattatcatcttgtgagaagagatgtttaaacgtggtaaatcacttcatattacaaaacagttttacacttaatatgttaacattgggtgcaataatttagtagcattagctttagttacaaatataactggatctttctgctgacaacttaggttgtatgagttatgcttaaaagctttaaatctgatgtttcctgtacctgccacactatgttagaatgtgtccttcaaacatatcctcctgcaacttctcaaactgtactaaattgatatttcttgaagtctaactctgtgctaacagatctccattttaaatagaatacggttttaatttttgataagctgctgaattttaaagagagttttttggggccaccaaatattttggatcatgcagagaatatatattgtactgtagtaattttgtatttacatttgtatgatgtgacataatagatgtgaatgttaatcactgcttgactatgttaataaagttgtttaactaacctgaagcaacaaagaaatcaacaaaatatgt

SEQ ID NO: 76930 - DNA, 1826 bp, Homo Sapiens
  misc_feature (1068)..(1068): n is a, c, g, or t
tgagcattctcttggactattagatgtatatacttttgaatacatcactgttggatagatgttttaacagttttttctggtttaaaaaccaaattgtaaatggagtgtgtacttgtagagagtgacaaggtattgtttccctatgtgctgtttgagcagtattttaaccaacttgtattacagatgttacagttccatgttaggaagtcagaaaagacttgtgtttgtctttgttctgctgatgtggagtcatgttttgtggggtcttccatggcacatttacctgttgctccgtccagatgttgagggccagtctaggctgacacatcctacccgaggacaagcctgttctccatttcttcactctcccctccccatatagcaactctcccaggtttagattaccgttttcgacgacagattaaccaaaaatgccccacacaggttttattactgttatatactatacttttaacagtacagaccctaaattttattatttgttgctcccccaatctgataccaaatgtttaaagttgtttgaaatccaaacatggtagtgttcatgggtaaatattttctaggctatgtaagagttagcagcccatagcatagaagtaatcaagtagcatctgagactgttggaggcactagggcctctctgggccctacagcctcacttccccagcctcaccttgctgtcctctgacactgccatcagggctgttagtggcacctgtatgaggccaagtgtgcgtccaggggaacagcacaggttaatgcgtctccctagaactcatgaagtcagtttaattcatgcatgaacatgagttcattttatgttttatatagctttcttagacataccaaaccatcattcataaatcagataaattattcagtttttgtgtctagaaagctaagtatgtgtagctggaaacaaaaatgagcgtgttttctctcctgttaatctagagtgtgcagttacacatgtgtggataatttcatgttccaggggcgcttggcatctcccatggactgattcccaggaagaaaagcccaaagganaacccacgattcctttcgagtagatgtgggaaagagcccattggaggatatgaggtcctgtgaaattcagttgtgtgtgtggctccttgttagcagtcatgttgacatggtgttaggaggctccccatccaccctttacatgatgtagggaccagtgtcttgtgagattaaccttgggacacagtgggttagcctggagaaaatgagaggccctgcctggacccagggagaggagccagtgacacaggcagagcggtgcagccctccttcccttccatttggaggaggtggtgccaggagcctgcccgcttacctctgctgaagcataagtggactttgcttttggggcttatctctgatacatgctggagccctgcctctccactgctagatggaacctggaatctctcatctacctcttagtctgtcagtttctacgtgtgagaagcaagcttgtgggccagtgtccttgtacatgctgtagcacttaaaaaataattccagggttccctggaaaaccagtcccagggttcctatgatctgtagtttctacctggattataactggttttgggtacctgaattttgattggttagccttaattatagtctggcgtgatcatgtagaatcttttctggtgaacagatcataaagttctatcaaggagttctatcaaggcatccatgtcagtggtgctatgctggttacaacttgagatttttgaaataaaaaatttgtcatattcatgcctctaaaa

SEQ ID NO: 76931 - DNA, 1402 bp, Homo Sapiens
  misc_feature (72)..(102): n is a, c, g, or t
  misc_feature (1203)..(1215): n is a, c, g, or t
gttgatagtcatatagggcctcttagcgaaacgacgagcgcagcgagtagtgtgcgaggaagcggccgcatnnnnnnnnnnnnnnnnnnnnnnnnnnnnnnncagtcgacggtacgcgggacatatgcccgggaattcggccattacggccggggggggagccgggacgggagagcagcgcagccgggtgcaccgcgtgcgcgccccgggagggctgttcgggccagcgcccgccggctgctccgcgctgacagcgccgggctggggcggggcggggggctttgcaggccgccagtgtcgacatgctgctggaggaggttcgcgccggcgaccggctgagtggggcggcggcccggggcgacgtgcaggaggtgcgccgccttctgcaccgcgagctggtgcatcccgacgccctcaaccgcttcggcaagacggcgctgcaggtcatgatgtttggcagcaccgccatcgccctggagctgctgaagcaaggtgccagccccaatgtccaggacacctccggtaccagtccagtccatgacgcagcccgcactggattcctggacaccctgaaggtcctagtggagcacggggctgatgtcaacgtgcctgatggcaccggggcacttccaatccatctggcagttcaagagggtcacactgctgtggtcagctttctggcagctgaatctgatctccatcgcagggacgccaggggtctcacacccttggagctggcactgcagagaggggctcaggacctcgtggacatcctgcagggccacatggtggccccgctgtgatctggggtcaccctctccagcaagagaaccccgtggggttatgtatcagaagagaggggaagaaacactttctcttcttgtttctcctgcccactgctgcagtaggggaggagcacagtttgtggcttataggtgtaggtaaggggggtgtgagtgttggggggacgtttctcatttgtttttctcactccttttggtgtgttggacagagaagggctcctgcaggccacagccacctaaacggttcagtttcttctgcgcctcaggctgctggggcctcagacgagacccaagggcagagcatttaagagtgaagtcatgacctccagggagcctagaagctggtggccttggccggctgtgctcagagacctgaagtgtgcacgttgcttcaggcatnnnnnnnnnnnnnagcgtcccaaatcaataagaaggtagaatgagttatgagttattcatattctgttggaagcttgttttccagtctcttgtacagcgttttaaaagaaatggattctatttattatgctttattggaaaaaatgttgtaataatttaatgtttttacccattaaattaagacttgtgcatgaaaaaaa

SEQ ID NO: 76932 - DNA, 1698 bp, Homo Sapiens
ctgacccgtcatcctgaggatcacgtggtctcctgagtccttggcaacctcaggtagtgagctcggctcccgtaaactggttggtctggatgagtatgtgccgatgcgcacgtctttgcacacagcgcgcagcgcggcctccatggtttcaccggcgcgcagaatgggacacaccggtgatctgctttccccgcatagcacttgcccgcatagtcctgcccctgcggggtctgtacgacggcagtcctgaaagggcaggaaggagagcgcgtgctcgatgagcagccgcatcagtctcttggagtagaagatgaactcgtcgcgactggtctccttgtccctgatgatggtgtgcatgccccgtacctgcggcgtgctcttcaggacgctcagcgtccggggcagcgggtggcactggtgtgccgaggccagcgcagacctgacgctgagttcacgctcctccagctggctgtgcacgtgctgcacaatcaggtcgatggccaccgtgttgccgctccctctggggaccacgatgtctgccaggcgcatggtgggctggatgtactggtcgaaggagggcttgacaaacttgttgtactgcttgatgacaccctcgatgtcccggccgcgctcactgatgtcccggcgcagccgccgtaccaggcggatgtcggagtctgtgtccacaaagatcttcatgtccaggagctccaacagtgtcttgtcagcaaaggccatgatgccctcaaagatgatgacgtttgcaccatacagtgttttccagtccttcttccggctgtgcgtggtgaagtcataaatgggcaccttgacactcttcccctgcttcagcttcttgagggtggaaatgatgaggtcgaagtcaaaggcatctgggtggtcgaagttgaagttgttgtgtgcggcctgttcctgctgctgctcagtcagcaccttgtagaaggagtccatggacagcaagaccacccagggcacatccagggcctcgatgatcattctggccacagtggtcttcccagaggcactaccgcctcccaagccaatggcaaaggcctctttggattgcgtgccgtgttcattgtaccagggcggccgcccggcggtgtagatggtacgcttgcttgtacgcagcaggggaggctctgacttgcactggctggtggtccgcttccggggagagcgcccagtgcccacaggtggcaggagcctgtccagggactctgcattgctgcggtcctcgcacgcggtctcgcttttctcagcctgccggcctggtgtgtctcgggccgtaggtggcgacgtgggcgaaggatcagcgtccgcgcgggccgggggcgcagccatggcgctcggaggcctctttgcgggcctggccgggcggcgcgcatgggccgccgggagctggcgggtccctctcttgcccaccgcggactacaagccccacaaggccgcgcgtcgcggactacaagccccacaaggccgcgcgtcgcggactacaagccccacaaggccgcgcgtcgcggactacaagccccacaaggccgcgcggcgggcatgggggacccgtagttcggcagcctccgccacgtgcctggagggccccgccccctgtttttcaccacaaactgagccgcacaaaaaccctggaaaaaaatcaataaacatttatttgatacagtc

SEQ ID NO: 76933 - DNA, 1460 bp, Homo Sapiens
gcggccgccctggtacaatgaacacggtacgcaatccaaagaggccttggccatcggcttgggaggcggcagtgcctctgggaagaccactgtggccagaatgatcatcgaggccctggatgtgccctgggtggtcttgctgtccatggactccttctacaagatgcctttgacttcgacctcatcatttccaccctcaagaagctgaagcaggggaagagtgtcaaggtgcccatttatgacttcaccacgcacagccggaagaaggactggaaaacactgtatggtgcaaacgtcatcatctttgagggcatcatggcctttgctgacaagacactgttggagctcctggacatgaagatctttgtggacacagactccgacatccgcctggtacggcggctgcgccgggacatcagtgagcgcggccgggacatcgagggtgtcatcaagcagtacaacaagtttgtcaagccctccttcgaccagtacatccagcccaccatgcgcctggcagacatcgtggtccccagagggagcggcaacacggtggccatcgacctgattgtgcagcacgtgcacagccagctggaggagcgtgaactcagcgtcagggctgcgctggcctcggcacaccagtgccacccgctgccccggacgctgagcgtcctgaagagcacgccgcagggacaaggagaccagtcgcgacgagttcatcttctactccaagagactgatgcggctgctcatcgagcacgcgctctccttcctgccctttcaggactgcgtcgtacagaccccgcaggggcaggactatgcgggcaagtgctatgcggggaagcagatcaccggtgtgtccattctgcgcgccggtgaaaccatggagcccgcgctgcgcgctgtgtgcaaagacgtgcgcatcggcaccatcctcatccagaccaaccagcttaccggggagcccgagctccactacctgaggctgcccaaggacatcagcgatgaccacgtgatcctcatggactgcaccgtgtccacgggcgcggcggccatgatggcagtgcgcgtgctcctggaccacgacgtgcctgaggacaagatctttttgctgtcgctgctcatggcagagatgggcgtgcactcagtggcctatgcatttccgcgagtgagaatcatcaccacggcggtggacaagcgggtcaatgaccttttccgcatcatcccaggcattgggaactttggcgaccgctactttgggacagacgcggtccccgatggcagtgacgaggaggaagtggcctacacgggttagctgcccagtgagccatcccgtccccaccaccctcctcctgcctcctgacccaggactgctgaatacaaagatgttaatttttaaaatgttactagtataatttattctatgcattttataaaataaataaagctttagaaaaatgaaa

SEQ ID NO: 76934 - DNA, 467 bp, Homo Sapiens
tgaacacggcacgcaatccaaagaggccttcgccatcggtgagagcagcgggggggtgggacctgctgccggacgcctgcctccggctcccctccagtgcctgtggagcaggagaaggaagccgggcaaccgcaggcagcggcagcgggatgggcacctctgggacctatctgtgccggcagcctgcctgttcctcacagagggtctccactcccgccggcaggcttgggagggcggcagtgcctctgggaagaccactgtggccagaatgatcatcgaggccctggatgtgccctgggtggtcttgctgtccatggactccttctacaaggtgggcccccgcccagctcccccgaggacccctttgtcctctccctgaccctggaccccctgcaaaagtaggtccctggtctcagccccagcgtggctgctcctgggaggcctagagcccctgtccgctggcattg

SEQ ID NO: 76935 - DNA, 347 bp, Homo Sapiens
gcggccgccctggtacaatgaacacggcacgcaatccaaagaggccttcgccatcggcttgggaggcggcagtgcctctgggaagaccactgtggccagaatgatcatcaaagccctggatgtgccctgagtggtcttgctatccatggactccttctacaaagtgggcccccgcccagctcccccgaggacccctttgtcctctccctgaccctggaccccctgcaaaagtaggtccctggtctcagccccagcgtggctgctcctgggaggcctagagcccctgtccgctggcattgggtgagggccctactgtgcccacagctgctccacagcctcccccacca

SEQ ID NO: 76936 - DNA, 359 bp, Homo Sapiens
tgtacgcagcaggggaggctctgacttgcactggctggtggtccgcttccggggagagcgcccagtgcccacaggtggcaggagcctgtccagggactctgcattgctgctgccttctgctccaagggcccggcaccctgagatcctgatgccagggtaagctggggggctgctcatggtcgaggacacgggtgggtgctcctgaacagcagagtggccccaggggtggatgcgtgggggctcaggcgcaggcagccgtgggggacatcaccacctcagacccacagcagtcccctagggcagctcaggagctccggccacctgaactggcccttccatgggcaggaccactcctgtgg

SEQ ID NO: 76937 - DNA, 483 bp, Homo Sapiens
atccttgggaggcaggacactgtgggagctcgtggacatgaagatcttggtggacacaggactcctgacatccgccgtggtacggcggctgcgccgggacatcagtgagcgcggccgggacatcgagggtgtcatcaagcagtacaacaagttggtcaagccctccttcgaccagtacatccagcccaccatgcgcctggcagacatcgtggtccccagagggagcggcaacacggtggccatcgacctgatggtgcagcacgtgcacagccagctggaggagcgtgaactcagcgtcagaggaagctacgttgggatatgtgagcagtgtgctccgtggtgctgctgtgtgacccgccttcccgtagccccttgccccgctgctcccgctaggccctctttcctgctccggccccccccctttccctgccgctgtcacgcctcttttctggcctgccaaaccccatttcgggcccgcccctt

SEQ ID NO: 76938 - DNA, 744 bp, Homo Sapiens
aaaaatatagcaaaaataaaaactaaaggtagaaaagcattttagatatgccttaatttagaaactgtgccaggtgccctcggaatagatgccaggcagagaccagtgcctgggtggtgcctcctcttgtctgccctcatgaagaagcttccctcacgtgatgtagtgccctcgtaggtgtcatgtggagtagtgggaacaggcagtactgttgagaggagagcagtgtgagagtttttctgtagaagcagaactgtcagcttgtgccttgaggcttccagaacgtgtcagatggagaagtccaagtttccatgcttcaggcaacttagctgtgtacagaagcaatccagtgtggtaataaaaagcaaggattgcctgtataatttattataaaataaaagggattttaacaaccaacaattcccaacacctcaaaagcttgttgcattttttggtatttgaggtttttatctgaaggttaaagggcaagtgtttggtatagaagagcagtatgtgttaagaaaagaaaaatattggttcgcgtagagtgcaaattagaactagaaagttttatacgattatcattttgagatgtgttaaagtaggttttcactgtaaaatgtattagtgtttctgcattgccatagggcctggttaaaactttctcttaggtttcaggaagactgtcacatacagtaagcttttttccttctgacttataatagaaaatgttttgaaagtaaa

SEQ ID NO: 76939 - DNA, 817 bp, Homo Sapiens
  misc_feature (50)..(50): n is a, c, g, or t
  misc_feature (71)..(71): n is a, c, g, or t
  misc_feature (76)..(76): n is a, c, g, or t
  misc_feature (331)..(379): n is a, c, g, or t
  misc_feature (718)..(753): n is a, c, g, or t
cactcagtgacacatgctgttctaacacaggtcagcaggcatacagttcnccatgttcagaatcaaagacntagcntcagagaagtgaagaaacatcatgccaaggtcattgactgccaagcggtagaggtggggttgcatccagagagcttcccggtatgcctctgcacaatgccattccttggccagctccctccaccccaagggacccagactgcacacttaacaaacaggacacaggtgtctttgaacaaacttttttgtattattatttttacatctagaataaattatttaaattatttcacagcaagggagagggataggtaannnnnnnnnnnnnnnnnnnnnnnnnnnnnnnnnnnnnnnnnnnnnnnnngtttatgttcttgagctgatgtagtggaacttgcctagcacattcaggtcccagccagttggcagagcatgctctcatctccttattccataccctgggcgtcccctttctgttgactcaggaactttctgagaatgaggacagcactaggagatgagctttggcaggtatccaccttaacgctacaataattgtgcttcctgaaacaaaacttgagattgtatcatagaaggaaacaggaagtcagaaatcaaatctatgcttttaattgaaaccgtgcctgaaacagtttgaatgattgttttaatgttgtttctgaaattccttgtacctttgtgnnnnnnnnnnnnnnnnnnnnnnnnnnnnnnnnnnnngatgtggaatatgcaatggaaataatgtaacaaaataataaacatctggccattttactacaaa

SEQ ID NO: 76940 - DNA, 705 bp, Homo Sapiens
agtgtaggaaataaagtgatgatattaaatagttctcagttgaagcagagaaatgccactgtgctagttgccccaaatgttgtatctattttaaatagtttaagctgatgtgtatgggagcctaaacaagtgtagtatcctgaacttctcccattaattgctattcacaattgggaaaagtgtggagattggttcctagtgagttttgtggcctactccacatttgttcttccttcctcagggttagtgatgaaaaaaagtaaatatctttttcatatgtccattagaatgtatgaaaaaaatcattttaactaaaagcaaaagaattttatcttatatctaaaaaatatataacttactatatgtttcagttgctctctgaacaaaaattatcttcaatttaatatgtggaatgtgttttctagctttctttgaattatgtatggcaacctggtttagcactggcatcctgaacagttaagagtcactgggaaattattgtatttctttataaatttactgtcatatcaattgctggaaaatgctatgatttttctattattaccttctaagttgtattctctcttacactgtagcctcaactaaggcaattctgctatgtttgttcttcactatgatttactgtgtgccaaaggagttcccacagggtacagagtattttactaaaagtatttttaaatgtta

SEQ ID NO: 76941 - DNA, 1455 bp, Homo Sapiens
gaggcctgggtggcgaattcggcacgagggccgcatggaggccggctgaggagcgccgctgcctcgcctcggtacgccgcgcggcgcggacggcgcgctccccacaggtgcaggaagccgccgcccagccatggacggggaggagcagcagccaccgcacgaggccaacgtggaacctgttgtgccgtcagaggcttcagagccggtgcccagggtgctttctggagacccccagaacctgtccgacgtggacgccttcaacctgctcctggagatgaagctgaagcggcggcgtcagcggcccaacctgccgcgcactgtgacccagttggtggctgaggacgggagcagggtgtacgtggtggggacagcccacttcagcgacgacagcaagagggacgttgtgaagaccatccgggaggtgcagcctgacgtggtggtcgtggagctctgccaatatcgtgtgtccatgctgaagatggacgagagcacgctgctgcgggaggcccaggagctcagcctggagaagctgcagcaggccgtgaggcagaacgggctcatgtcggggctgatgcagatgctgctgctgaaggtgtctgcacacatcaccgagcagctgggcatggccccaggtggcgagttcagggagggccttcaaggaggccagcaaggtgcctttctgcaagttccacctgggtgaccgacccatccccgtcaccttcaagagggccatcgcagcgctctccttctggcagaaggtcaggctggcttggggcctgtgcttcctgtcagaccccatcagcaaggatgacgtggaacgctgcaagcagaaggacctactggagcagatgatggccgagatgattggcgagttcccagacctgcaccgcaccatcgtctcggagcgcgacgtctacctaacctacatgctgcgccaggccgcgcggcgcctcgagctgcctcgggcctctgacgccgagcccaggaagtgcgtcccctccgtggtcgtgggcgtcgtgggcatgggccacgtgcctggcatcgagaagaactggagcaccgacctcaacatccaggagatcatgaccgtgcccccgccgtccgtctccggcagagtgtctcggttggccgtgaaggccgccttcttcggcctgctgggctacagcctgtactggatgggccgccgcaccgcgagcctggtcctgtcgctgcccgccgcgcagtactgcctgcagagggtgaccgaggcccggcacaagtaggagactgctccccgcccgctcgggcccctgaggagccagtgcccccgcggcacttctgggtgccaggtgcatcctagcccgcccgaggcccctgccaccccccatgggggtctgggcccggcctcgcctgccctcctgggccagtcacccctcccccagcccacccaaataaaggattatttaactgtctgaa

SEQ ID NO: 76942 - DNA, 1380 bp, Homo Sapiens
aaggtagcgaggcctgggtggcgaattcggcacgagggccgcatggaggccggctgaggagcgccgctgcctcgcctcggctccccacaggtgcaggaagccgccgcccagccatggacggggaggagcagcagccaccgcacgaggccaacgtggaacctgttgtgccgtcagaggcttcagagccggtgcccagggtgctttctggagacccccagaacctgtccgacgtggacgccttcaacctgctcctggagatgaagctgaagcggcggcgtcagcggcccaacctgccgcgcactgtgacccagttggtggctgaggacgggagcagggtgtacgtggtggggacagcccacttcagcgacgacagcaagagggacgttgtgaagaccatccgggaggtgcagcctgacgtggtggtcgtggagctctgccaatatcgtgtgtccatgctgaacgatggacgagagcacgctgctgcgggaggcccaggagctcagcctggagaagctgcagcaggccgtgaggcagaacgggctcatgtcggggctgatgcagatgctgctgctgaaggtgtctgcacacatcaccgagcagctgggcatggccccaggtggcgagttcagggaggcccttcaaggaggccagcaaggtgccttttctgcaaagttccacctggggtgaccgacccatccccggtcaccttcaagagggccatcgcagcgctctccttctggcagaaggtcaggctggcttggggcctgtgcttcctgtcagaccccatcaggtagggctgcccccgggaccctggccggcctgcagggtggtctgtgggaggctccaggccctcctgtgcaggtccaagcgcagccaatcctcactcaaggccttccctgccctttccttccgccacaaatcccaaacaaacgtgctgtggtccctgcccggtgtccacagtgccagccccacccccccagcccgttgcccatccctgcggggctgcagccatccctctccacagcaaggatgacgtggaacgctgcaagcagaaggacctactggagcagatgatggccgagatgattggcgagttcccagacctgcaccgaaccatcgtctcggagcgcgacgtctacctaacctacatgctgcgccaggccgcgcgcgcgcctcgagctgcctcgggcctctgacggtgacggacgccgcagagcgtgggaccccctgtgaggctgaggcccgagcaggtactgaacccttgtctttccccacagcgatcccaggaagtgcgtcccctccgtcgtcgtgggcgtcgtgggcatgggcaagtgcctggcatcgagaagatatgaagcacgaactcaaatccaggagatc

SEQ ID NO: 76943 - DNA, 1049 bp, Homo Sapiens
  misc_feature (980)..(1000): n is a, c, g, or t
ttacttgagattcatgtgaggagttgagcgtggagatagcaccataagccaaacatttatgctaattttatgtaaattatgtgctatggtccacgccccgcccccacatgcgattaaaaagttgatttttagtgtgctaaagcacatgctaaaacagatgctacattttcaaaaggcaagggtcttttagaatgcttgatgtctgtgaggttgacaggagcaatattaaataaatatacatacactgtttaaggattctgtgttttctttctcataggaaccactcgttttgactattattttatcactctttgtgaaacttcacaatgttcgggaggacattgtgaatgatattacagctgaacacatttctatttggccatcttccattcccaacctccagtctgtggactttgaagctgtggcaatcacagtgaaagagctagttcgatatacactcagtataaatccaaataaccattcttggttaattatccaggcagatatttactttgcaacgaatcagtattcagcagctcttcactattacctccaggcaggagctgtgtgttctgacttctttaacaaggctgtgccccctgatgtttatacagaccaggtaataaaacgaatgataaaatgttgttctttgctgaattgccacacacaggtggccattttatgtcagttcctcagagaaattgactacaaaacagcgtttaaatctctgcaagaacaaaacagtcatgatgctatggactcctactacgactacatatgggatgttaccattttggaatacttgacttatcttcatcataaaagaggagaaacagataaaagacaaattgcaatcaaagccatcggccagacagagttgaatgcaagcaatccagaagaagtgttacagctggcagcgcagagaaggaaaaaaaagtttctccaagcaatggcaaaactttacttttaagcagttaaannnnnnnnnnnnnnnnnnnnnaaacaatgggctaaaaataaacagtattaaaaggttaagtttatataat

SEQ ID NO: 76944 - DNA, 951 bp, Homo Sapiens
  misc_feature (573)..(623): n is a, c, g, or t
tttggagtctataatttttaataattttaaactagctacaaaatgtcaatcacttcacaaactgacagaggagacaggaggaatttaatattacatgctataatgatatttatctcacagtttatatttcattcatttatattatttttttaaaaggtttctttatcagctactaaacatctcagcaatttggtgtgcatagctctagattaagcaacaaagaattgtactgataacaaaccacaggggaaatggtggttagtaagagtcagccttataaaatttacatccacactgtttcacagcaagattgctctctccaaaacgtagccatcaaaagcagcaaacaaaccctatattacatccatttgacataatttcagccaaacatatattttgctggaaatgattaaatggtgagtgtgtcaaatccatcttttttaaaattcttttatttaacacaagaatgattatcatttacaagtctctatatattgacagcaaaaaagtgacactactgcacttttgttggtataccttaatcttgtcagtgtctcaaaactgagcatgctnnnnnnnnnnnnnnnnnnnnnnnnnnnnnnnnnnnnnnnnnnnnnnnnnnnctcaacagtatgctactgtcatggaaagtttttgtttaagtaggaatctaaaaatctatttagttctcatgcataaatgcataaatcacatcacttttagtgcaatgcctgttatgtaattccacattgtctaatcatgcaatcataaagacagataacagccatgaggaaccaaagacggcacattttgagagattcagagcctgacactcaaaggaccgtggcagtaactctgtggaatgtcacagttttacaagaacaatactgtggattgaaagaatcaacagcacattgagcattcctaaattgttgttattcagcaaatgcg

SEQ ID NO: 76945 - DNA, 696 bp, Homo Sapiens
  misc_feature (48)..(48): n is a, c, g, or t
gaagtgttcattagcacccccaaaatataccttttctatgtactgtanaaagaaattggcttctgatgcatgaacatttacatgtacattgaaagtagtccataatagaagttagtttaagccaagtgtagacagtacattactcccttgaaaaagaattaagttgaaagagttgactttgccttaaaaggcagatctaacccaagctccatccagtaccaaatgtgaaacttcattgttgtttggtgagaatcgccaaattctcactaatacattggtatggtgtagggcatgctactttttaaacagcagcacttatttttacagattgctactccaaggaagaaaactggccacttttcatgtaaatattttgttcaaagatttgtatatctctctaggagttttccctcagttcccaggatggggtccaggagtagattaacagctaaaaatctcccaaggatatcttgttttgatttatttactccagggaactatcagctccttcacaggagccaaaggggagctatgaatagagggtcacatgagccagattctttactgttcataaaacccagagagtagttgtgaaagatcctaatacaattgtgaaaagctctgtaaacatgaaatctaaaacaaatgtagattttcacaatatgcttattaataaatgaagtctatggaataaaa

SEQ ID NO: 76946 - DNA, 1081 bp, Homo Sapiens
  misc_feature (21)..(21): n is a, c, g, or t
  misc_feature (55)..(55): n is a, c, g, or t
  misc_feature (62)..(63): n is a, c, g, or t
  misc_feature (123)..(123): n is a, c, g, or t
  misc_feature (749)..(939): n is a, c, g, or t
  misc_feature (943)..(944): n is a, c, g, or t
  misc_feature (953)..(954): n is a, c, g, or t
  misc_feature (962)..(978): n is a, c, g, or t
aaaagagaaaatatcttagtngctaccagcatccagcatgaagttgtaaagtggngatagcnnacgtgacagtatagcacccatttgaatttaaataaaagtgaaccatattatcttggtaantataaaactaaaaatgggggtgtttatataaaactaaaaactaagaatgatgtaaccttttgtctgtgttatctgaacactctacttcctttgcagccttagtcacacaactgagtcatctcaagtactctttaaggacacacagcccaggctgttctgagtcagaataggcccctacaggtatattttaaaactcttcgtaattctaatgtgtactgctggtatagctgaactactgacctggatcttagtcctagcctttttgcttttgcaatttcagtatcttcatctctaaactagggaaacactgggattctttcttagctgtgggggaaggtatttggttagatgactttgaatgaatagactgctgtgctgaaagagctttatcacactgtctcaaagtatgtaaagatacataggtggatgctcttactgcagcagtcatgaatacatttttagccatttacctaaggaaaaagacagtttttctaggtaccatgaaggaagattgaccctgttggtatgcctgtgggggtgggatgtgagtgggactgataaactgatacttttggttcgtatgtacatactggaagaatcttcataataaatgagactacacaacnnnnnnnnnnnnnnnnnnnnnnnnnnnnnnnnnnnnnnnnnnnnnnnnnnnnnnnnnnnnnnnnnnnnnnnnnnnnnnnnnnnnnnnnnnnnnnnnnnnnnnnnnnnnnnnnnnnnnnnnnnnnnnnnnnnnnnnnnnnnnnnnnnnnnnnnnnnnnnnnnnnnnnnnnnnnnnnnnnnnnnnnnnnnnnngggnnggaggccanncccccccnnnnnnnnnnnnnnnnnccacccggggggggccgggcggccccgaaaaaaacagaaaaaggggcctcttttgttttccaaaggaaccacccgacacgaaaacccgcggtttctccccccc

SEQ ID NO: 76947 - DNA, 959 bp, Homo Sapiens
  misc_feature (229)..(241): n is a, c, g, or t
  misc_feature (557)..(569): n is a, c, g, or t
cccgggtgcaggtacagtttattcttcacaacagagaaatacaaagagcagagggtttgtaattcctttgtttcttgccccctttagtgttttccccccacatttgattttcatttgctccccactcccttttttaaatagaatgcaaactaccttcctgaagtgtctgaggggcacctgccctcacctccctgcctccaagatgcagactgagaagccaacagactgnnnnnnnnnnnnnaataaggtaactagttctaaatatggtggcctggaggtcccatagaaaaagcaaaggggtgttaacagtatgtataacagcgtatttacagggagtaacatgcggacaaaaagctacaatactgagtatcagacgacgcaagtcaaacaaagggccgggggtgggggcagagaaccccatgggcaaagaaaccccaggaaacgttaaactggtaaatcaatggcgagttaaggcttaaaaagtgtataaaaataacacagttaatattcaaaacggaactccagatacagaatatatagatgagtttctgtctagnnnnnnnnnnnnncccggggggatgtagggggcttctctgggctctgtacatggttcctatatacaccgacacgcatggctttcagattggggtgtgtctgtgggggctgggggcagggtctgctcctgggacctgcctccccggggatcccttccctgctgaggggcctagggcctcggctggggattcccactccatggcagggaagacaaataacccctccctgggcactgcccccatctggaggaaattctggagggaggtcccagatccaggcccactccctccccatccccctgcccacagtctgggatggtgggagaggtagccgaaaggtttcctggccagcaccgaggtagactggggtggtcttcagggcagcaggggagggccaggtcttac

SEQ ID NO: 76948 - DNA, 1070 bp, Homo Sapiens
gcattcccggtgtcgacttactagctgcaagcctctgcctgccttcctgcgcgccgttccccgctagtcgctgctgctggcgcgcactcgccgggtttttcctcccacggcctcgagatggtggtgaatgtggcacggaggagccgggccttccaacccggtgggcccgagctccgaaaggccccctcggcagtgagaggggcgggagcccgcgggggccgcgcccttctctcgcttcggactgcgcaacgctgcgctctgggctgacaggcggataaaacggtcccatcaagactgagaaaaagcacaccagctattggcacagcgtgggcagtggggcctacaggatgactgacttagtctacagagatcccggcgtacttaagcagatgaagactcttaagatgacagaaggtgatttttctggtgatcgaggacttccggggtaatgacagtgatgaaatgcaggggacctggttgcccccaagtttcctggcagtgtgtgatactgaggaggtgagcttgtttctggagctgtgctttaaggtaaagttgatcagcttaatcctcctgatccctttcccatcggatctgaacactgggtcttggtggtcgtaaaaggaggaaaagtaatagtgaagctggcctaaatgttgtaatctggtatatggcatgtgggctagtttcagacaggtttcaaaagatggttggatctctgaaattgtaaaatgaagtataatcttacgctaagggaacgatgcctgtgaaagctctggaagttgggatagtaatagctgacctattactgcatttgggagggatctgtcatagcttccttgcctcttaattaagggtggtgtttttttcttttagattcatgttacatgtaaagctgtcctcatttgtgactatggacctatggagttgggacaatctctatgggaagcagaaggcaaggaccccggtcattttaggtagaaacaacagcatgctaatgcaaaaaattatgcagtgtgctactgaacttcagaggtgatcaataaaagaagaataaaaagactaataaaagt

SEQ ID NO: 76949 - DNA, 1030 bp, Homo Sapiens
gaggccccagtcgggcggatcataccggggtctataaagttctgataacccatttgtgcccaaacatgggtgtaaacacgatctttgacctaaaatgtgcggggagaattagactttgggtgttatatggtggtgcaacaccgttaatcttccacgctaatctcgggggaggatttagctaatgaaattcgcggtgaacccccggagggcagagggttgccatgtagtcctgagatcaaatccccctgcagttctcagcaagcctgggtgacaggagccaagactccgtttccaaattatagaaacccatctacattgaagttgacaacatggaaggcttccagccctggtcctgaaacattataggaaagctgagtggcagcttgcaggtaattgtactgacctgcgctgtcaaagtcttttccaggttgctcttgcaatgcagttggagatcccatggctatgaccagccacagcccttggaaacatgctggttctgtcccaccaggcagcccccagttagtctccaaaaagaaacctaccaggtcccctgcatttcatcactgtcattaccccggaagtcctcgatcaccagaaaaatcaccttctgtcatcttaagagtcttcatctgtccatcattactacctgcttaagtacgccgggatctctgtagactaagtcagtcatcctgtaggccccactgcccacgctgtgccaatagctggtgtgctttttctcagtcttgatgggaccgttttatccgcctgtcagcccagagcgcagcgttgcgcagtccgaagcgagagaagggcgcggcccccgcgggctcccgcccctctcactgccgagggggcctttcggagctcgggcccaccgggttggaaggcccggctcctccgtgccacattcaccaccatctcgaggccgtgggaggaaaaacccggcgagtgcgcgccagcagcagcgactagccgggcaacggcgcgcaggaaggcaggcagaggcttgcagctagtaagtcgacaccgg

SEQ ID NO: 76950 - DNA, 780 bp, Homo Sapiens
aattaggctagtacgaggctggttgtgaatcggcacgaggccggtgtcgacttactagctgcaagcctctgcctgccttcctgcgcgccgttccccgctagtcgctgctgctggcgcgcactcgccgggtttttcctcccacggcctcgagatggtggtgaatgtggcacggaggagccgggccttccaacccggtgggcccgagctccgaaaggccccctcggcagtgagaggggcgggagcccgcgggggccgcgcccttctctcgcttcggactgcgcaacgctgcgctctgggctgacaggcggataaaacggtcccatcaagactgagaaaaagcacaccagctattggcacagcgtgggcagtggggcctacaggatgactgacttagtctacagagatcccggcgtacttaagcagatgaagactcttaagatgacagaaggtgatttttctggtgatcgaggacttccggggtaatgacagtgatgaaatgcaggggacctggttgcccccaagtttcctggcagtgtgtgatactgaggaggtgagcttgtttctggagctgtgctttaagattcatgttacatgtaaagctgtcctcatttgtgactatggacctatggagttgggacaatctctatgggaagcagaaggcaaggaccccggtcattttaggtagaaacaacagcatgctaatgcaaaaaattatgcagtgtgctactgaacttcagaggtgatcaataaaagaagaataaaaagactaataaaagtaaa

SEQ ID NO: 76951 - DNA, 1660 bp, Homo Sapiens
aaggctaggtagcgaggcctgggtgtgtaatcggcacgaggagcgaggctgtgttacgtggccagcgtcggcgtgacggttggacgcgggcgcggcactgcgggtcccgattgctgcagccgcttgtcagtgtgatgaagattggcacccagacaccattcgcttttcacccaagatgatttgatgtcttataaaactctgatgaaccatgatggctacacagacattaagtatagacagctatcaagatgggcaacagatgcaagtagtaacagagttaaagacagaacaagatccaaactgctctgaacccgatgcagaaggagtgagccctccccctgtggagtctcagaccccgatggatgtggacaagcaggccatttataggcatccactatttccattattagctttgttgtttgaaaaatgtgaacaatctacacagggctctgaaggcacaacttctgccagttttgatgtagacatcgaaaattttgtaagaaagcaagagaaggaagggaaacctttcttttgtgaagatccagaaaccgataatttaatggtaaaagcaatccaggttttgcgcattcatcttcttgagctggaaaaggttaacgaactctgcaaagatttctgcagtcgatacattgcttgtctgaaaacaaaaatgaacagtgaaactctgttgagtggagagcctggaagcccgtactcaccagtgcagtcccagcagattcaaagtgccatcacaggcaccatcagccctcagggaattgtggtgccggcgtccgcgctgcagcagggaaacgtagccatggcgacggtggcaggtggcacagtgtatcagcctgtcacggtcgtcactccccaaggccaagtggtcacacagacattgtcgcctgggacaattaggatccagaactcccagcttcagttacagttaaaccaagatctcagcatcttgcatcaagatgatggttcatctaagaacaagaggggcgtcctgccaaagcatgccacgaacgtgatgcggtcctggctcttccagcacatcgggcatccctacccaacagaggatgagaaaaaacagattgctgctcagacaaatttgacactactccaagtcaacaactggttcatcaatgccagaagacgaattcttcagccaatgttggattcaagttgttcagagacccccaaaacaaagaaaaaaactgctcagaaccggccagttcagaggttttggcctgattctattgcatcaggagtcgcacagccaccgccgagcgagctcaccatgtcggaaggagctgttgtcaccatcaccacgcccgtgaacatgaacgtggacagccttcagtctctgtcctcggacggggccaccctggcggtgcagcaggtcatgatggcagggcagagcgaggacgagtctgtggacagcacagaggaggatgcgggtgccctggcccctgcccacatcagcgggctggtcttggagaacagtgactccctgcagtaggggcaggagcagacgcacctgactttttggagtttgcacagcaaacattttacacagttttatttctaatatggtttatatgtagatatagaagagtgcacttttgtatttcatagtaagcttaaagcgcgtctttgccgg

SEQ ID NO: 76952 - DNA, 699 bp, Homo Sapiens
  misc_feature (353)..(353): n is a, c, g, or t
cttcccagaccagtgacagcatttgggtgccatcgtgtgccttcacggcacagcaaacagtgggcactaaccctgttgtcctgtggaaatctgggtctctgaatcctgccatttccttcctggaattggccaggaacttgattttctgggctattgcttgctagtgtcccctgatgcatgaaggatccccccatgtcataggtcccacctgcctgctgtgcatcccgggtggccagactcggcttctccaggtgcacttgtcccagttggcccggtccgtaggctggaagggcagctgcaggtgcactgcctcgcggacaggttaggatatggccacgcagccatccatcttntacagcatgcacaccccactctctcccccagtcaatatgtctctctccgatgggaaagttaataaattttgctctagattaaaagtattgatcatttcatttgtaaacgataaataaaaagggggaacttttcattgcgccaggggtggcacctggcgtgtgttgcgggggtgattgcgctggctgccggggggtgggcttctcatatgcattctggccggccagctgcattgatttcctattagtctcccagcaccacccagtaacacatcatttcagtacctgctattaatggtcttttgataaataatcacttgtaagtcaataaatttttattaaacaaaaa

SEQ ID NO: 76953 - DNA, 961 bp, Homo Sapiens
gagtttatgtcagctttgcttagtgttagaaggccatggagcttaaacctccagcagtccctaggatgatgtagattcttctccatctctccgtgtgtgcagtagtgccagtcctgcagtagttgataagctgaatagaaagataaggttttcgagaggagaagtgcgccaatgttgtcttttctttccacgttatactgtgtaaggtgatgttcccggtcgctgttgcacctgatagtaagggacagatttttaatgaacattggctggcatgttggtgaatcacattttagttttctgatgccacatagtcttgcataaaaaagggttcttgccttaaaagtgaaaccttcatggatagtctttaatctctgatctttttggaacaaactgttttacattcctttcattttattatgcattagacgttgagacagcgtgatacttacaactcactagtatagttgtaacttattacaggatcatactaaaatttctgtcatatgtatactgaagacattttaaaaaccagaatatgtagtctacggatattttttatcataaaaatgatctttggctaaacaccccattttactaaagtcctcctgccaggtagttcccactgatggaaatgtttatggcaaataattttgccttctaggctgttgctctaacaaaataaaccttagacatatcacacctaaaatatgctgcagattttataattgattggttacttatttaagaagcaaaacacagcacctttacccttagtctcctcacataaatttcttactatacttttcataatgttgcatgcatatttcacctaccaaagctgtgctgttaatgccgtgaaagtttaacgtttgcgataaactgccgtaattttgatacatctgtgatttaggtcattaatttagataaactagctcattatttccatctttggaaaaggaaa

SEQ ID NO: 76954 - DNA, 896 bp, Homo Sapiens
gagggcactccgatttctttggggtagagtccagtgtgagatgctcgcagttctgtgacctagccctgagctggggaggtggggaagattcgggcatgtgagtgcccccagaactgtcctggctccttccgtattaaacgcatttgcattttgagaagtgtccttcccacttcagccctccggagagactaccctagtctttctggggtgtttatgtcctcagctgaagcctggcctagttgctgagaggggctggggagatggggcgggagggccagactcagtgctgctgtggagctaggtgcttcccccttcccctgagactggttgactgaactccagtcaagttgagttcaagtgaaagattcttccagggttttattttttcccctcctaacaaagtctcatagtgttaacactggttctgcaatatctctgaggtgcaaagaatgcacttttccctatggggcccagagtttgccttttctgccaggcagtcaccacgcttccctaccccagcctgtttcttttggcttggtttggaccacagtcctctgctacccagggttttagagcccctgctctaggaaacagtttaagaaatcattggccccttcccagcacattgaatgggtaagcagacaggccatgatttagttggccagcactaactccacctctgttctccttgaacagcttcccctccagcccactgctttaggatgacacaatgaataacacctagtcatagaaatcagtctctctggtttgttttgtattatgttgtacatcattaaagatctaaatacaaaggatatacagtcttgaatctaaaataatttgctaactattttgattcttcagagagaactactaataaaaatctaaaaggtaaa

SEQ ID NO: 76955 - DNA, 878 bp, Homo Sapiens
  misc_feature (67)..(67): n is a, c, g, or t
ggcgcaatgccggtatttttccactggacgaccattgtgctagttgtggctgctggtgtgcacgggnccttccccccagctcgaaatgagacaacggttttgaaggggctgcaggtgaggccggccccttctctcagctgagcttcaggctgcgctggccatggagccgacccccggtggggtcaaatacatcattgtcactcaggtggggccagggcctcaaatcctggatgacccctgcgcccacctcctgggtcctgacggcctgccgaagccagctgcctgactgcctcagcagggaccgcatgccgcttggagaaggggtggcctcgccggagctagggagcggatgtggtgggctggccggactcctgggacatgtgggtggtggcttgaccccgggcccatgggcagcttgctgtggggcagtgcagggagtcctgcggccgcccaggtgtcaggagaggtccccgccgagtgcttcagctgccctaagctgcaccagcgctttgccaagatgggatggggagggggtatgagaactggcagagcctcggtgcagcagggctgaagggctttctcaccccagctctggctatgcccagttctctgagaaaggagctcagtggggaggtggtccctccagcggaccagggaaggggtcactgtgctgggagcagcctccttgggcctcaggaaaccaccaagtgcctcggatggtggctgcccacggcgcttctgctgagaccctgcccccggcccaggtgtctcggagggtggctgcccacggcctgggtgtggctggaatggtggcaggagtgggcaccagtgcggccccggtggccatggggaataaaccagcattactgcctcctgaa

SEQ ID NO: 76956 - DNA, 1645 bp, Homo Sapiens
  misc_feature (121)..(350): n is a, c, g, or t
  misc_feature (414)..(414): n is a, c, g, or t
ctgggatcctgattcttgataccgatacgcttgagtgggtgtacgtcccgcacgaaacgaccgagccagcgatcatgaggagaagcgagagcgccaataccaaacccctctcccgcgcgtnnnnnnnnnnnnnnnnnnnnnnnnnnnnnnnnnnnnnnnnnnnnnnnnnnnnnnnnnnnnnnnnnnnnnnnnnnnnnnnnnnnnnnnnnnnnnnnnnnnnnnnnnnnnnnnnnnnnnnnnnnnnnnnnnnnnnnnnnnnnnnnnnnnnnnnnnnnnnnnnnnnnnnnnnnnnnnnnnnnnnnnnnnnnnnnnnnnnnnnnnnnnnnnnnnnnnnnnnnnnnnnnnnnnnnaagaattcggcaagaggatttttgatacagtgatttcatattggaatcattatttgtgcaaagngacagacagatcacttagattgctatactagtggacataggctaaatgtttgcacattcacattcttatcacgtgtagaatacttcacaaaatagtcaacatctaaggccctaatttatgttttgaaagatcatgtgttcccaaagtattccctattgttggctccacagccttaaagtgctatagatttaaattcattgattagttttaatttttaattttagactgtgtatttccataaataccctacgtactggcatatttgaaactctttttccaggttaggtccttttctttctcattgaatcatcttaaatagttcttggccctgaatttagctgatttaaaattcttaatattcaagaatttatacttattttttccttaaaagccacaggggacagttaaatatcttaaaatatctaaaacattttttaaagcacttagattgtcttacgtatgtgcatactatacctttacagcgtttattgtcttgtctcttgtcagtagaccttcagtacacagtatgtgggatatgtcagtcaagttggtcagcaccagcatctgtccagctgttcagtatattgtgattcattaaaaaatctcttctatcccagacatgggccaaggtgctgtatctgagggatgtgctgtaatttgatttacatgcattagagcacacagtagaaaaacgttagcttcattagtaatatgacacatgtatatagtgagatgtctttattgtgtgctttgcatattttgtaaatattttgcacgtcattatttttcttttttgtttaagcagtgtttggcctggaagagtgatatgcttgctgcttaatcaaaggattaaagatttaaagatgtctatggtcttctatttttatataatttcatgttctatgaggaatttagtacctcttcactgtgaaattcgaaataatgatttttataaaagcaaaactagaaatcttttaatgacaattttcattaatttcagggttatcatttttgagaaatctacaccaaagtggttttttaaaattacataactaaaaataaaccacactgtggatacatcttataaaactaatggaaacaatgtttttctatatgatttaattctagtgtaatatggatgaggtaagagtaagttatgatcaaactttttatgttcttaataagcttgcaattgagtaaaatagaatataaaataaaggtgaaataatat

SEQ ID NO: 76957 - DNA, 678 bp, Homo Sapiens
aaaactgctatgagatagaaatgatgtaaaattatgtggaaagttttccctcatatactcacatacagcctttgaagggctctggctctgaccggttgatggccttgagcgagatgaaatcatgaaattgagtcaaatcaatttgacattgaaatgacaagaggaaactcttaaatacataaaaacaagctctcatttgcctaggatagatactgtcttaaaaataaagactgaacctagatgttctgagcactagcaacaaggtattttaacaagtttaaaggaattctctgaaaaagttataaaattattctaggaaacataaccataatagtgttttaagggactttcacctggggattttatattcatgaacagagtgtattctgtatttaaaatgtctcatttgtgggaattggatgacatgttttttgataaatttattcacaatataaattgactttttattctaggaccatgtgaataatgggttccattgcacaaatacaaatattttaatagcttcttaggcagtggtgtagacatcttggatataaataattgtagatcttgtatatttgatttttaaaaaactagaataaacagagaggcataaacatatcttagagtccaaagtggtagtgtttagcattggatataataaatggatgttttaca

SEQ ID NO: 76958 - DNA, 910 bp, Homo Sapiens
ggggcaccaggtcatcctgaacgcaatccgcgattccacagcaaatcgtcttccatgataactggtccctacaagggctggggacacaaggtttgaatgcagggccacatgtcgcaatacctaaaattctagtttgtacatttcttctagcatacaatgcacatgtaaccttcggaatcactttctgtccatgcttcctccataaagactgataagtccttggatgcaatctgtaaagaaaatacattatttcatcaacgttattttgtctgtttttcacatacacctaataagtatggtacacaatgccaatgccaaatacaaatcgataacaaagcacagcattcccaacagagctgtaatctagaaaactgagaaggtctgattgataaatcatcaacaacaataattgctctaaaacctccttaactgacttccttgattgtccaatgctctccattacctctgtaaaacagtcagttatcccatgtctagtgggcacccctgcatgcttcttctaaccactgagtgtcactaatgcctaccaagaatgcgtttgcaggttccgtaaacctgtttataccagattgctatgtaaaattgttcccaagggaagttgaatgctctgtaaaggcataataaaagcaaattactgaacaaaacatgttacagtaattatgagtgagaggaaactaagatggaaggataaaaatctaacactgttactattcagatggctccactaaaagatttaagatcttgatccatttttaaaaatccaataatggaagttgtagacattatctgtagtttatgcacaacaataaattagaaagccaatgtagacacgcataaccaaagaaaatgccttgggtctacataacagttgaataaatgtaaagttgctttt

SEQ ID NO: 76959 - DNA, 1057 bp, Homo Sapiens
  misc_feature (56)..(56): n is a, c, g, or t
  misc_feature (177)..(177): n is a, c, g, or t
  misc_feature (220)..(220): n is a, c, g, or t
  misc_feature (222)..(223): n is a, c, g, or t
  misc_feature (312)..(312): n is a, c, g, or t
  misc_feature (329)..(329): n is a, c, g, or t
tgctggattaagacgtattcctgaacatcttaccagtacttttcagcacacaactnatgtacccagcagaccattaaactgatcatccagtacaaatgggcagtgtaaagattgaacttcaactacaaccatcagtacccaaatctgaagttgatgaaacatatgcactgcctgcancgaagatcagccgtgtagagacacatgctacagcaacgccgtntnntaaagagactcctcaaaatccagtgccaccagtgaaagcgggagaacgacaatggtgtgatgtgggaatttttaaaaataatacagctntggtgagccagtttatntgctgccaaaagggaagcaaagcatctcaaaggtaggaaatgcagatgtacctgactacagcttgcttaagaaacaagatcttgttccaggcacaggatacagattcagggttgctgcaatcaatggttgtgggataggtcctttcagcaaaatcagtgaatttaaaacttgtattcctggttttcctggagctccttctgcagtcagaatttcaaagaatgttgaaggtatccacctttcctgggaacctccaacctcaccttctggaaatattttggaatattcagcctacttggctatccgcacagcacagatacaagataatccaagtcaacttgtgttcatgaggatttattgtggtcttaagacatcatgtatagtaactgctgggcaacttgcaaatgcacatattgattatacatccaggcctgccattgtgttcaggatatcagcaaagaatgaaaagggatatggaccagctacacaagttcggtggcttcaaggtaacaataagaaagcacctttaaattgaattggtttttttactgaagctattgtgatgatgattatttattagtaactggttatgaagatttgtcatttaaaagagtattctctggctgtatttccagcagttatgaacttgagtttgtaaattgttcttaaaatgtatttgctgaattatagatccaaataaaagaaaagaagcaaagactctctgaaaaaa

SEQ ID NO: 76960 - DNA, 701 bp, Homo Sapiens
  misc_feature (17)..(17): n is a, c, g, or t
agggggatagtagcccncagggatcatgtgaaagtgagaaagcccttttcacactgtggagcggtgcagatgtgggaaacctcaaagatggttgcccattttaaatcctttcatctctcatctctctttcttctctcccttctgccctgacgtagccatggttgggtgggtgaggccagaagaaactgcctccggcaagaggtagcagccgctcaggtggctctgctggcatcggagcccacagaagtgaggagtggccgatggacctgccctccaaatgtgcctgactctgggtcttgctgtcactggatttcctggcatggcagacagaaagaaagatagtttgaccaagtcgtagaagctgatccagcgggtaaaaagggggcagggaactcgtcccttttattcttgcctcagagctgcctgaagacatgggccaggccggaggctggacaactttggataacgctgacctgtacttccaagtaaatgcctcctgaagagcccgggacccttcctgggagaattctgcagccagaatgaaggtgccatcagcaggaggcactgtgaagcaccatcctgtcgctgtccttgtccattcctagcaagttaatcgtgtcttgttaaccagcagttcctgttcaacgtgtaaagagacctgatgttttccctaataaagctgataacaaaaaaaacaggaa

SEQ ID NO: 76961 - DNA, 1285 bp, Homo Sapiens
gggcacgtggatttggtagagaaaccccggactgggatcatggcagccgagactcggaacgtggccggagcagaggccccaccgccccagaagcgctactaccggcaacgtgctcactccaaccccatggcggaccacacgctgcgctaccctgtgaagccagaggagatggactggtctgagctatacccagagttcttcgctccactcactcaaaatcagagccacgatgacccaaaggataagaaagaaaagagagctcaggcccaagtggagtttgcagacataggctgtggctatggtggcctgttagtggaactgtcaccgctgttcccagacacacttattctgggtctggagatccgggtgaaggtctcagactatgtacaagaccggattcgggccctacgcgcagctcctgcaggtggcttccagaacatcgcctgtctccgtagcaatgccatgaagcaccttcctaacttcttctacaagggccagctgacaaagatgttcttcctcttccccgacccacatttcaagcggacaaagcacaagtggcgaatcatcagtcccaccctgctagcagaatatgcctacgtgctaagagttggggggctggtgtataccataaccgatgtgctggagctacacgactggatgtgcactcatttcgaagagcacccactgtttgagcgtgtgcctctggaggacctgagtgaagaccccgttgtgggacatctaggcacctcaactgaggaggggaagaaagttctacgtaatggagggaagaatttcccagccatcttccgaagaatacaagatcccgtcctccaggcagtgacctcccaaaccagcctgcctggtcactgactgcttactctaccttagctggacctcgtctcccagggattagagaaaagagcaggagtcctgggtcttcccagttgagactgctggagctgagacacagtactctcttaaagaaggtggggagctgcccagggcagaacccactggtgttcatgactacccctggctcctctcaccttgtccctccactgccaacagaaaacaaagcagctgactgagatggtcaaaggactttggaccataggggatctttggaaggctgtggggtcttgctcttccttagcactcctttctccttgtgagatctctcctcagctggaatgaggaatgtagtccatctaaactgcttgctaggctcaattaccacttctgtttgctttgtggatcctgggataacatgtatatgtgtacacga

SEQ ID NO: 76962 - DNA, 678 bp, Homo Sapiens
gacagagaagacccaagggacggagggagatctgaatctagaacaagggtctagggaaggaagtgaatcccaggcagaggagatgaatgaggcagggcctccccttgaggctaacacggagacaaggccagagaaggaaggaccccagccccaggagaagccagtaggagccctggaggaggaaggagtgaagccccaaaccgctgctgagggccaaggccccttgggggatgccacacctcttctggcagagaccccagccccagagcagcccgccgaatgccagccactgcttcagggggaggggcccagcgccaaccccagtgcccaccctgtgcccacctacgcgcctgcccggcagcctgagccatctgcccccaccgagggtgaagaggcaagtggccctaagcaaaagacgtgccagtgttgtgcggtcatgtgaacccatgcccctccaccccatgtccagctcctctcacagctacctcggcctcttggcacccagaagagggtcccaggcacagacagggaccacaggactggccatggcacctgggagccagctagcctgcacgtccacctaaacctgggcttccagaccccttgcccactgcctgtaaccctggcctccttctgcgatgaagcctttatacttgaaaataaaatgtgaaagcactc

SEQ ID NO: 76963 - DNA, 645 bp, Homo Sapiens
  misc_feature (89)..(111): n is a, c, g, or t
gagtctcttggtttctgagctggctcctgaatatatgttcaagtgggtgtgcccatagggcctgggcacgtgtctctagcaaaaccagnnnnnnnnnnnnnnnnnnnnnnntgcccctttccaagagatatgctcagcataatgagagatcaaccgtggtggggagtgggtccaagtaagggttctcattgttgccttttaagaggcctaagtcctgcattaactcagtccaaccattaagtgatgcaggctgctcttccctcatgtgagaaaaacctgtttccctctggttcttcctggctttgcacctggtggctattacaaagcagtactgcagtatgtcttggacctggaaagttggacatgtgtgtggctcaacagttttctcgggggagttcagtgaccttttggtggccaccctctgttctcacctgtgagttcttgcaggtggcgacttcatctgcaaggtcacttacatagccccactcagctgcttcggaaagcgtgacgaagcagtagtcctcagtgtgtgtgtaagtgaagaggaccttgtggtagcagggaccatgcttcattcgtggctgtgtccccatctgagggcctggtatgcagtaagatcaataaatacttgtggaatgcaaaaaa

SEQ ID NO: 76964 - DNA, 1870 bp, Homo Sapiens
  misc_feature (1412)..(1478): n is a, c, g, or t
  misc_feature (1702)..(1712): n is a, c, g, or t
ttggtcaggaagtgaatgtccagattgtggtatgcatgttcataagcagtggcccaagatggtcccaaatgactgtaagccagacttgaagcatgtcaaaaaggtgtacagctgtgaccttacgacgctcgtgaaagcacataccactaagcggccaatggtggtagacatgtgcatcagggagattgagtctagaggtcttaattctgaaggactataccgagtatcaggatttagtgacctaattgaagatgtcaagatggctttcgacagagatggtgagaaggcagatatttctgtgaacatgtatgaagatatcaacattatcactggtgcacttaaactgtacttcagggatttgccaattccactcattacatatgatgcctaccctaagtttatagaatctgccaaaattatggatccggatgagcaattggaaacccttcatgaagcactgaaactactgccacctgctcactgcgaaaccctccggtacctcatggcacatctaaagagagtgaccctccacgaaaaggagaatcttatgaatgcagagaaccttggaatcgtctttggacccacccttatgagatctccagaactagacgccatggctgcattgaatgatatacggtatcagagactggtggtggagctgcttatcaaaaacgaagacattttattttaaatttttaatttgaggggaaaagaaatgttttacagatgaaggaatgttttatagtaatttaatttgctcctgtagctgcattatttcttgattagaggtttgggcatataaccagattaaagtgaaggaactttctgttgtttttgtagcaccgctcagctgtcttgtaaaacagtgaacacacgctttctggttctagtaatcctgggtgtttatcacgttcagagaaactcaagctattgcatgattagccccctatctggcaaggaaaccccatacagaagaaacaacaaacctgcgcctgcaccgcctctgcgtcctgggtagtctgtgcttgtaatccagcatgtttcacagagtaagcctgttgtgactttgcttttggggtctatgtcattggtttctgatgcttgtacaaacacgcacacacaaatggataaaacagcacctctggctgttacattaccataaaccatatcacatgcctacattttacaaatgatttctggtttctcttagttcttctctaacatagtactttctttccagcaaaagcaaaatgtgttttcagatttgttactttaataaaggttatccataccaataaaaagtgtacaacacagcattttctgttaaattattattggttttcagttgtaatttggtattttttctggcatgcgtttattaatttattaaattggcttttagaaataaaacnnnnnnnnnnnnnnnnnnnnnnnnnnnnnnnnnnnnnnnnnnnnnnnnnnnnnnnnnnnnnnnnnnncgccaacaaatgaatccccgaggggggacccacacatattgagcgggcgacacacaagtatttgttgagcaccaagggggggcaccacaataggaggggacgctatataaacacacgagagcagcagagcgcaggtgtattacaaaaagcgctgcacgacggcgcaacaaaacgcgtcaccaccgggcacacccccgtggagaagacggcccacccaacacctnnnnnnnnnnnagcggaacacaatagtggggggaacagaactactactcacacaacaggaatatataagaagccctcagtggaggagaacatttcaaagacaattcagagcggctgctaaaagtgatgctgaaaaaaagcaagaaacataattatgacgtgcgagtagt

SEQ ID NO: 76965 - DNA, 908 bp, Homo Sapiens
ggggaggccagtgccctgggccacctcagcttcctggagcagcagcagagcgaggccagcctagaggtggcttctggcagccacagcggcagtgaggagcagctggaggccacagcccgggaggacggggacggggacgaggacggcccggcccagcagctctcaggattcaacaccaaccagtccaacaacgtgctgcaggccccactgccccccatgaggctccgtggcgggcggatgacgctgggctcctgcagggaaaggcagccggaattcgtgtgagctggggtggggctgggaccacaggtggcttctctctcgcctgctcctgtccctccagcacgtcccctgcaccacggcatagcttaggtgcgccgtcctggggtcgctgccgagagcgcctggacttcgacgtcccaccagcgggcgcctcctcccagaggcttccaggagcacgagggccttgcggcacaggactgtgccctgtactgtcccctgcaccccggctcagctgagctggggaacactgctgtcgtgtgaagtcacagtggccttgttggtgcccacagggctgtgtggatggaggaagctgtccctgcccagtgcatcccccaggtcatcacggggaagcaggaggcaggccctgccctgccctctcctcacaggtctgttgcagggactccagaaaccattctgggagccgtggatgggggcggagctggggtttggtgcagtttccagggtgcagtacagcagggcctgaatactggccctggactcccttttccagaacaccaggtgtggccacctggggctcaggtacacagtggggtctctcggaagccaccgtgtggttctttcacaggcacgtttattttgctgaaataaaaagtttttaatcgggaaaa

SEQ ID NO: 76966 - DNA, 1333 bp, Homo Sapiens
  misc_feature (57)..(448): n is a, c, g, or t
  misc_feature (461)..(596): n is a, c, g, or t
cagtcgacggtaccggacatatgcccgggaattcggccattacggccggggatttannnnnnnnnnnnnnnnnnnnnnnnnnnnnnnnnnnnnnnnnnnnnnnnnnnnnnnnnnnnnnnnnnnnnnnnnnnnnnnnnnnnnnnnnnnnnnnnnnnnnnnnnnnnnnnnnnnnnnnnnnnnnnnnnnnnnnnnnnnnnnnnnnnnnnnnnnnnnnnnnnnnnnnnnnnnnnnnnnnnnnnnnnnnnnnnnnnnnnnnnnnnnnnnnnnnnnnnnnnnnnnnnnnnnnnnnnnnnnnnnnnnnnnnnnnnnnnnnnnnnnnnnnnnnnnnnnnnnnnnnnnnnnnnnnnnnnnnnnnnnnnnnnnnnnnnnnnnnnnnnnnnnnnnnnnnnnnnnnnnnnnnnnnnnnnnnnnnnnnnnnnnnnnnnnnnnnnnnnnnnnnnnnnnnnnntgtgccaccatannnnnnnnnnnnnnnnnnnnnnnnnnnnnnnnnnnnnnnnnnnnnnnnnnnnnnnnnnnnnnnnnnnnnnnnnnnnnnnnnnnnnnnnnnnnnnnnnnnnnnnnnnnnnnnnnnnnnnnnnnnnnnnnnnnnnnnntcagccgcaaaattctttatgaattttacacttggcaaatgttaatgacggaagccatagtctgctcctaatacatgtccaaagcattgactgttgtgtcattagctgcctggttacattagctccctggcttcttgtttagaccactgctaatcccttaaaaacaagaggtctggcactagtagcacaacctaaggtggcattacagatctttgagcgagccacagcaacttttctgccaagtcagcttagtttagacttcagtgaatcaggctattgctatcctaatgtatgtctctatgagtgtatttagccacacatctgcccttggttgactttctgactcattgcttgcttgcttgtttccttgctttggaaaactattgaagattgctaaaaaataccactgcaaagtgatggaaaagggtggagaacaggggagtagccaggctggatggctcaaatataaatgaatgaggaattctttatgaagtatcagtcagattttatgattaagtgatgtaatataggaattatgtaaaagggaagaatgtctgatactgatctattagagaggtactttagaggcttcttgattggcataaagttcctaaggttatagattttccccccttttggctgtatagcaaagtgttttaatccacggttgtgccttattgttccattaaaattgtatcttcgatccatcaataaatacttgtggttgaaacaaaaaa

SEQ ID NO: 76967 - DNA, 2881 bp, Homo Sapiens
cggtccggaattcccgggatggagcgcgtggcgggcgtcagcgcggtggccagcgcgcagaggcgggcgcggaggcggctagaaggtgaccgcggatcccagcttcctgcagccagccctgaaggatggctgccatattgggagacaccatcatggtggctaaaggccttgtcaagctgacccaggcggccgtggaaacccacctgcagcacttgggcatcggaggggagctgatcatggcggccagggccctgcagtccacggctgtggagcagattggcatgttcttggggaaggtgcagggtcaggataaacatgaagaatattttgctgagaacttcggcggcccagaaggggagttccacttctcagtcccgcatgcagccggagcctccacagacttctcttcagcctccgctcccgaccagtcagcgcccccatccctgggtcatgcccacagcgagggcccagctcctgcctacgtggccagtggaccctttagagaagccgggttccccggccaggcctcctcccctctgggcagggccaacgggaggctctttgcaaaccccagagactcattctctgccatgggctttcagcgaaggttcttccaccaggaccaatcccctgttgggggcctcacagccgaggacattgagaaggcccggcaggctaaggctcgccccgagaacaagcagcacaaacagacgctcagcgagcatgcccgggagcggaaggtgcctgtgacgaggattggccggctggccaacttcggaggtctggccgtgggcctgggcttcggggcactggcagaggtcgccaagaagagcctgcgctccgaggacccctcagggaagaaggccgtgctgggttccagtcctttcctgtccgaggccaatgcagagcggatcgtgcgcacgctctgcaaggtgcgtggtgcggcactcaagctgggccagatgctgagcatccaggatgatgcctttatcaacccccacctggctaagatcttcgagcgggtgcggcagagcgcggacttcatgccactgaagcagatgatgaaaactctcaacaacgacctgggccccaactggcgggacaagttggaatacttcgaggagcggcccttcgccgccgcatccattgggcaggtgcacttggcccgaatgaagggcggccgcgaggtggccatgaagatccagtaccctggcgtggcccagagcatcaacagtgatgtcaacaacctcatggccgtgttgaacatgagcaacatgcttccagaaggcctgttccccgagcacctgatcgacgtgctgaggcgggagctggccctggagtgtgactaccagcgagaggccgcctgtgcccgcaagttcagggacctgctgaagggccaccccttcttctatgtgcctgagattgtggatgagctctgcagcccacatgtgctgaccacagagctggtgtctggcttccccctggaccaggccgaagggctcagccaggagattcggaacgagatctgctacaacatcctggttctgtgcctgagggagctgttcgagttccacttcatgcaaacagaccccaactggtccaacttcttctatgacccccagcagcacaaggtggctcttttggattttggggcaacgcgggaatatgacagatccttcaccgacctctacattcagatcatcagggctgctgccgacagggacagggagactgtgcgggcgaaatccatagagatgaagttcctcaccggctacgaggtcaaggtcatggaagacgcccacttggatgccatcctcatcctgggggaggccttcgcctccgatgagccttttgattttggcactcagagcaccaccgagaagatccacaacctgattcccgtcatgctgaggcaccgtctcgtccccccacccgaggaaacctactccctgcacaggaagatggggggctccttcctcatctgctccaagctgaaggcccgcttcccctgcaaggccatgttcgaggaggcctacagcaactactgcaagaggcaggcccagcagtagggctgcgggccacgcccaggccggctccgcgggaactctctccctcagacaggccaaaaaccagtagcgaggtcgtggtgatgctctttttaactcctttgcccaataaggggggtggctgcctggagccccgtagccagcgctttccacggtttctgttgctaaatggttgtagggtgagaagtgcaagaatgaagatgaagccccactgctcggtcagtctgcctccgtgtgtcctctgaaataagcagatgaagatgaaagggcaactttgttttcttctttttcctgatgtgaatgttaagcagaagggagagagtccttactcccttccaatctctgttcagtgcaaaacccagaaacatgaacagatacgattgtgggattttatcatctgtgtagtaggtgtgtgtatgtgtttctagagtgagatttgtgttttctgcccttttcctctccagccgatgggctggagctgggagaggtgctgagctaacagtgccaacaagtgctccttaagcctgcgaggcccaggcctgtggggctggttctcacctttgacagctgaatgttcctaaagaactgctgccccacagtgagggtgggagcagcggaacagggaatgccagacacaggctcgctgctgctggaaggcggggtgggacttccttcctctgtccggagaggcacaggtgtcaccagttccagccaaaggctcctcacaggcgctgtgaatttttgtacaagtcttgtaattatcgaatcaacaacttgtttcaatttaataaaaatgctcatgggaagtgcaaaaa

SEQ ID NO: 76968 - DNA, 666 bp, Homo Sapiens
  misc_feature (22)..(22): n is a, c, g, or t
caagatcaaggtgctgccaatntgttcctggtgaatgagcaaacagcacagaaaaagaaacagcagtatatgtggaagaaagcaagaaaaatcaactggcctggaacctaagacttgtccaaagatgtcacagagagtaaaatgagaaaaatccagtagcccgtgcccagagcagttcctcgtacccagcagaaggctaacaagccctgagatgaacgatgctcttcccaaggaaggcagaggaggcgacagtccatttgcgttctctcctctgcaagtacaggatctcgtttgattctcaaaaccaccctagaggagacaggaggcacctgaggcccagagacgtgaagccacctgtccaaggccatacagcagatgacttattctggaggaagacacctgccatgccgtgaggacagtcaagcagttctgtggagagatccatgtggtgagaaacaggggcctcctgtcaacaggaagaacaacctggcaggcctgtcttggattcagagcctccagccccagtcgagccttcagataactgcacccttggctgtcatctcaactgcaatctcacgacagaccctgagctggaactactctgtttaccaatgcctggcccacagaaagactatgagataaaacaagtatattgtttttagaaaa

SEQ ID NO: 76969 - DNA, 753 bp, Homo Sapiens
  misc_feature (65)..(65): n is a, c, g, or t
  misc_feature (443)..(452): n is a, c, g, or t
  misc_feature (632)..(641): n is a, c, g, or t
tgacagccctcgctgcagtaaacacaaccgcctctgcattctccgagttgtgaggaaggatgggnaaaacaagggcaggcagttttatgcctgtcctctacctagagaagcacaatgtggattttttgaatgggcagatttgtccttcccattctgcaaccatggcaagcgttccaccatgaaaacagtattgaagattggacctaacaatggaaagaatttttttgtgtgtcctcttgggaaggaaaaacaatgcaattttttccagtgggcagaaaatgggccaggaataaaaattattcctggatgctaatatctgtagattctctggcatttagtctcttcaaactgtgtataatgtttggtcctcctctgtttcatagaaaagtcatagaatatctatgatacattgaaaagttactgcaatatttgagaactgttcnnnnnnnnnncttgtgtgtgccatctttccattgttggctacgtcttttcttttgccttgatgaacgttctatgtatttcatcggatatacagcatattccatttaggatgtgtatttaatgcatttagtaatgacgataaagtgtttttagtatgcttttagtctcttgtaactggggagaagcagtgnnnnnnnnnnaggaaaggattatgcgacacaataaaataagatattctgtctgtagtgaatacatttctcatgtactaacactatttataatatatgattaaagatatttcttgttttatta

SEQ ID NO: 76970 - DNA, 876 bp, Homo Sapiens
gcagaggcagcaagagccgcagaagcagcgaaagctgcagaagcaactaaggctgctgaggctgctgccaaggctgcaaaagcttcaaacacttctacacctaccaaggggaacacggaaactagtgccagtgcatcacaaacaaaccatgtgaaggatgtgaagaaaattaaaattgaacatgcaccttctccctcaagtggtggaactttaaaaaatgacaaagcaaaaacaaagccacctcttcaggtaacgaaggtggaaaataatttgattgtagataaagccaccaagaaagcagtcatagttggaaaggagagtaaatctgctgctacaaaggaggaatcagtatctcttaaagagaaaaccaaaccacttacaccaagcataggagccaaggagaaggagcaacatgtagctttagtcacctctacattaccaccgttacctttgcctcccatgctgcctgaagataaagaagctgatagcttacgaggaaatatttcagtaaaagcagttaaaaaagaagtagaaaagaaactccgatgtcttcttgctgatttaccgctgccccctgagctaccaggaggagatgatctttcaaagagtccagaggaaaagaaaacagcaacacagttacatagtaaaaggaggcctaagtatgtgcttgctttctacctgctcttaaattgaccagcagtgattctgggtcatcagaagttcataaaacactaaattaaggtttaaaataaaaaatgtacttattctttcaacttaaatatatgaattctattagagttttgaaaaaaatcataattgcttgcattcctattcacaatgactaataaaaccaaatttaattttctctcgtaaaaa

SEQ ID NO: 76971 - DNA, 753 bp, Homo Sapiens
tgggatatgaaaatattcagatattgacaatatttttggtacctactccgcaaactacaaagtttaaggactcaacaataagttaatgagacacagtgttgctttcatggagcttacagtctggaggggacaaaggcttaaacaatactcatataattatatatgtgatcagtacaatgaaggagctcagtggggtaaataagcaggaacctgaacttgatctgttccggagggccacagaaggcttccgtgaggccttgagaaagtgatttgcatctgagttctgaaggattgtaagaggtaactagggaaaaagttgacaggaagaggaaggggatccagacaagaaacatttgcaaagatcttgaggcataaatgagcttgagacatctggagaaactgaggaaaagtgagagagtaggcagggcctggagccgcagagccattgctaaccatcctgtgtgagatatcccccattctgtagctttattctcataaccctgctcaattttctttataacacttctcacagatttatatacgtgtttgtttttgttatctgtctctcccaccagaccacagctccatgagagcaaggtctttgcttaccaatatatcactagcacttaaaactatgcctggtacacagtaggttcttaatatgtgttgaatatagccatcaaattgatattggatataattcaatctgataagatattttgagatattaaagagtttttaacttgataccat

SEQ ID NO: 76972 - DNA, 746 bp, Homo Sapiens
  misc_feature (579)..(589): n is a, c, g, or t
taaaaatcagaactacttaatgctttttgccacagcatatttccttgcctgttggagccgttaggaagattacctatgtcctaatcttcaacctgagaagatttttgactcttgtgtctactgttgattgtttgcttgagttctcaaagacctgtggccaggtattttaaaaagtcgtctatttctttctagttgcatcaacttgcacactggtgtctaactatatgtggtattcggaacttgtaattcttattgagcagccattgcctatattttctcagctcctcactgatttctttatatgagctcagctgacaagcaaatgcagctattttgtttaccctctcttcataccggaccatcaacaacagtgttctaactcatccctgatggtctgtgagatgtagactattacacaagattcaagttactcgtaagcaacttttagatagagttggtcctgttaggaggagactcttgatgtcaccttcagtatcttgaaagcgggtcccctccccgaggctcttaattctttgaaaacttgatgctgtttcagctgaaaaattagcaagactgttnnnnnnnnnnngttgaggggagctgtttaagaaactgaaaagtaattgcaaactacattggataattgtgactttcagttgttgttctgtatcagttgaatttttgtgctcttttccctgtgtacgtggtggttctatttttctccaataaaacttttatttaaaaaa

SEQ ID NO: 76973 - DNA, 820 bp, Homo Sapiens
  misc_feature (30)..(30): n is a, c, g, or t
  misc_feature (50)..(50): n is a, c, g, or t
gcaggggtgaagcataaggtcttgctgcgnaggctcctggccaccttctntgacaggaacacactggccaacagctgcgggactggcatccgctcgtccaccagcgaccccagccgaaagccgctggacagccgggtcctgaacgctgtgaaattgtactgtcagaacttcgcccccagcttcaaggagagcgagatgaacgtgatcgccgcgaacatgtgcaccaacgcccgccgcgttcgcaagcgctggctgcccaagatcaagtccatgctgccggagggcgtggagatgtaccgcacggtcatgggctccgccgccgccagcgtgcccctcgaccccgagttcccgcccgccgcggcacaggtgttcgagcaacgcatctacgccgagcggcggggcgacgccgccaccatcgtggctctgagaactgacgccgtgaatgttgacctgagtgccgccgccaaccccgccttcgacgccggcgaggaggtggacggggctggctcggtcatccaggaggtggccgcccccgagccgctgcccgccgatggccagagccccccacagccctttgagcagggcgggggcggccccagcaggccccagacgccggcggccgcggcccggaggccggagggcacctatgcagggaccttgtaagcggagctgggtggctgcgcgagggaccgagtactagagctgcttgcatgcgttactaatacaaacaaatgtgatcaagccacttacctactgaactgctactgttgcctgagaaaaatgtgatttttattctgcttttatttaaaattgatgaagg

SEQ ID NO: 76974 - DNA, 739 bp, Homo Sapiens
  misc_feature (33)..(33): n is a, c, g, or t
ccatcagagaactcacactggagaaaaaccatntaaatgtgatgagtgtggcaaagctttgttcagggctcacaccttattcagcatcagcgaatccacactggagagaaaccctatgtgtgtaatgactgtggaaaagccttcagtcagagttccagccttatttaccatcagagaatccataaaggagagaagccctacgaatgcctccaatgcggaaaagccttcagtatgagcacacagcttacaatacatcaaagggttcacactggagagaggccctataaatgtaatgaatgtgggaaagccttcagtcaaaactcaacccttttccaacaccagataattcatgcaggggtgaagccctatgagtgcagtgagtgtggaaaagccttcagccggagctcatatcttattgaacaccagagaatacacactagggcccagtggttttacgaatatgggaatgccctggaagggtccacctttgtgagccgtaaaaaggttaatactataaagaaactgcatcagtgtgaagactgtgagaagatatttaggtggcgttcacacctaattatacaccagagaattcacaccggggagaagccttataaatgcaatgactgtggcaaagcttttaatcgtagctcaaggcttacccagcatcaaaaaattcacatgggatagaccacttacatataaatgtgtatatatgtgaataaacctacagccttaactt

SEQ ID NO: 76975 - DNA, 957 bp, Homo Sapiens
ggcgctgttgtgcttctggctcacggggataggaggcctggagcgtcccgctcctgtgcctaaggggcttctgggcgcccctgggctcagccgctgtctggtctggattgttagagactgtaggtctagtgcgtgagctagtacggagcaccaggctcttgggcatctaaggccagtctgtgtgttgccgggtctatcagcactgacaccctgtgctgtctgcattcggtttctgcattatccccgtggtgattttctaagtatcattagcggttgatgaacttcatgctttgggaagaaataggcctctcccccagtcccatttagaatcgtggtccttctgttgcagctttatttaatgagcatggttcatgatacttattttattttcgaaagacagtcctatgtgtctcacccaccggccactgcagccctggtgagggcgggtgggcgccggccggcctggaagagcgccgtggctgggccaccacctgtggctgcgttgttgctcactgaatctgttggggagaggtcaccatagtcaccgcctgacctggctgctgctcttgcttcagagccacaagcaaagtttgcactgggcccactgccgagtccagaggccggagaacggccactggtgtgggaggggagcgcacgagtgggactttgcacagcaaattgtgtccccagctcctcctctcccgcctgcctggagccgggccctgaaggtttctatgaagaaaaaaatcccccaatattttttactacgtgtgtgattttcctggttttatatttgaaaaaaactttttttgaacactcccaaggagccatttcaggggaaattttataaaaaaatggcagatactgttcttgaagcagattcgaaatgcccgatgaagtggatgccaatttccttttggtgcaagccgtggaccggggcccccccctcggggtgtc

SEQ ID NO: 76976 - DNA, 907 bp, Homo Sapiens
  misc_feature (126)..(166): n is a, c, g, or t
aaagaaggatgttaatttttgactatatattttaaaaaaaatctaagcagggggacatgcaaaaacaatcatcatccacttggatgtcattttatagattaacactgtgtgcttttgtatggaaannnnnnnnnnnnnnnnnnnnnnnnnnnnnnnnnnnnnnnnntcatttgcacttacgtgaaacacaaactttgctctacaaaatttcgtgtttcttagtgattttaaaatgcatgtattgcatgtaaaggaaaaccattacaattaatgtttatcacacctttatcttggtctttgttgatttgggttttgttggggtttttgttactgtttttaaattacagtaggcttctatatatcctggatttctgaactggtcttgttgacaaggattcccaagaaatggatcttttcactggctgactctcccatatctgcaagagattctgcaggaactgggtgtgcacacggtgttgtagccagttcaggtactgaatatttaggatttggtgaagttcactgtattgctatatttttgtagataaataaaactcaataaattgttaatcattctctttttgctgtatagaattgcttatatcactctttctttcatgacattggttaacatttaaatgttcctcctgtacttgtgttgtctgtgaccgcttatagagttttattgttattggtgtttacctgaatacctatgcgtacacacacacatatttccttaatacttctgaactcattatcttttagaataataatactactacactttaccagcaattaacttctccctacccaaaatgtttttcttcctgtctgaaaatggaactaatttgtcttattcgtgcttatatctgtattaaatgcaataaagttagtttttgaaatgtaa

SEQ ID NO: 76977 - DNA, 921 bp, Homo Sapiens
  misc_feature (596)..(659): n is a, c, g, or t
  misc_feature (756)..(818): n is a, c, g, or t
tgctcggtaccagttcgacggagactctcccctgagctcgcccgtcacaaagagcttcaacaggtgagagtgttagaggggggaagaggggaacatggacatgaagaggaggatccacctggagctgaggaaccggaccccggcagctgttcgagaacttgtcttggacaattgcaaatcaaatgatggaaaaattgagggcttaacagctgaatttgtgaacttagagttcctcagtttaataaatgtaggcttgatctcagtttcaaatctccccaagctgcctaaattgaaaaagcttgaactcagtgaaaatagaatctttggaggtctggacatgttagctgaaaaacttccaaatctcacacatctaaacttaagtggaaataaactgaaagatatcagcaccttggaacctttgaaaaagttagaatgtctgaaaagcctggacctctttaactgtgaggttaccaacctgaatgactaccgagagagtgtcttcaagctcctgccccagcttacctacttggatggctatgaccgagaggaccaggaagcacctgactcagatgccgaggtggatggtgtggatgaannnnnnnnnnnnnnnnnnnnnnnnnnnnnnnnnnnnnnnnnnnnnnnnnnnnnnnnnnnnnnnnagtttgatgaagaagatgatgaagatgaagatgtagaaggggatgaggacgacgatgaagtcagtgaggaggaagaagaatttggacttgatgaagnnnnnnnnnnnnnnnnnnnnnnnnnnnnnnnnnnnnnnnnnnnnnnnnnnnnnnnnnnnnnnngagaaacagatgatgaaggagaagatgattaagaccccagatgacctgcagaaacagaactgttcagtattggttggactgctcatggattttgtagctgttt

SEQ ID NO: 76978 - DNA, 1109 bp, Homo Sapiens
aaggtagcgaggcctgggtggcgaattcggcacgagggtgagcccagcgctgcgctccagcccccttttccctccatggtttctctccgctcccgtgagtaacttggctccgggggctccgctcgcctgcccgcacgccgcccgccacccaggaccgcgccgccggcctccgccgctagcaaacccttccgacggccctcgctgcgcaagccgggacgcctctcccccctccgcccccgccgcggaaagttaagtttgaagaggggggaagaggggaacatggacatgaagaggaggatccacctggagctgaggaaccggaccccggcagctgttcgagaacttgtcttggacaattgcaaatcaaatgatggaaaaattgagggcttaacagctgaatttgtgaacttagagttcctcagtttaataaatgtaggcttgatctcagtttcaaatctccccaagctgcctaaattgaaaaagcttgaactcagtgaaaatagaatctttggaggtctggacatgttagctgaaaaacttccaaatctcacacatctaaacttaagtggaaataaactgaaagatatcagcaccttggaacctttgaaaaagttagaatgtctgaaaagcctggacctctttaactgtgaggttaccaacctgaatgactaccgagagagtgtcttcaagctcctgccccagcttacctacttggatggctatgaccgagaggaccaggaagcacctgactcagatgccgaggtggatggtgtggatgaagaggaggaggacgaagaaggagaagatgaggaagacgaggacgatgaggatggtgaagaagaggagtttgatgaagaagatgatgaagatgaagatgtagaaggggatgaggacgacgatgaagtcagtgaggaggaagaagaatttggacttgatgaagaagatgaagatgaggatgaggatgaagaggaggaagaaggtggggaaaagtgaaaaagaggcaaagagagaaacgaatggatgaaagggagaaagatgatttaagaaccccagaatgaacctggcaaaaaacagaaactggttccagaaattggggttgggacctgccc

SEQ ID NO: 76979 - DNA, 976 bp, Homo Sapiens
  misc_feature (644)..(657): n is a, c, g, or t
cgcatgtactatagacagtctaaaaaagcaggcttggtaccggtccggatttcccgggatatcgtcgaccacgcgtcgccacgcgtcggtggaaataaactgaaagatatcagcaccttggaaacctttgaaaaagttagaatgtctgaaaagcctggacctctttaactgtgaggttaccaacctgaatgactaccgagagagtgtcttcaagctcctgccccagcttacctacttggatggctatgaccgagaggaccaggaagcacctgactcagaatgccgaggtggatggtgtggatgaagaggaggaggaccgaagaacggagaagatgaggaagaccgaggacgactgaggaatggtgaagaacgaggagtttgactgaacgaagactgactgaacgatgaacgatgtagaaggggatgaggacgacgatgaagtcagtgaggaggaagaagaatttggacttgatgaagaagatgaagatgaggatgaggatgaagaggaggaagaaggtgggaaaggtgaaaagaggaagagagaaacagatgatgaaggagaagatgattaagaccccagatgacctgcagaaacagaactgttcagtattggttggactgctcatggattttgtagctgtttnnnnnnnnnnnnnnggtagctgtgatacaaaccccaggacacccacccacccaaagagccaaagaatagttcctgtgacattccgccttccttccatgtagtccctcttggtaatctaccaccaagcttgtggacttcaccccaacaaaattgtaagcgttgttaggtttttgtgtaagattcttgctgtagcgtggatagctgtgattggtgagtcaaccgtctgtggctaccagttacactgagattgtaacagcatttttactttctgtacaacaaaaaagctttgtaaataaaatcttaacattttgggtctgttttttcatgctttgc

SEQ ID NO: 76980 - DNA, 1138 bp, Homo Sapiens
  misc_feature (60)..(79): n is a, c, g, or t
  misc_feature (1032)..(1032): n is a, c, g, or t
  misc_feature (1117)..(1117): n is a, c, g, or t
gtgccaagctaaaattaaccctcaactaaagggaataagcttgcggccgcctgctcaggnnnnnnnnnnnnnnnnnnnngtcatcggaaaatagtttaattctgtacagacaaccacgggactgattacaaagtgcggtgcaaacaccagggcccatgagcgccagcagcgtggcccaccacgtgccggggctccagaggccacgcccgaaacaccaaataaatcacagacgtgacaattgcgggaggagcatgaatcagctgttccttcgggaggagaaaaaggaaacaacaatcagaggctttggaatgctttctcttcatgtgcctggaacgctgggcgggcggtgacccggggctcggagccccaccctggccacacctgctgtcgcccacggggtcctcacggtggggacccaggtcccacgacggctcccaacctgtggagctgtgtgcgcagccaccaccactgcggcctcagaagaggggccgggagccctggttctcaaactccgaccaggcgtcattcagctccatgaagatcatcttggcgtgctgctcgtacggctgccccgcagccttgtcggggtgcacggccagcaccgcgcggcgatagtgcttcttcacttgctccggagccaccaggtcggccatgcccacgggcgtccagcggctctccccgtcccacagcactgtgtgcagcgtggacagcagggcccggatgttccgctccttgccctcaatccagtccaggagcttcagcttgagtgggtccgtgtctttagccaggtcctgcttcctcatctctgcaatggtctttggccctttcttgtcagacctggaggagaagccttgattggacaacagatcttcaaagtcgttctcagagacttttggcttttgagcaaagctgggtgcgcggaccccccgctcctcccgcgccccgatcacactgaagttcgaggcatagttaggccttggctgtgtgcaggctttggggggcggcttggcctgagggggccatgaggcgccntgggctggcggccgacttgtctgccaggagctgctgcctttgggcgtggtggccgttttcctcgtgccgaattcaacacccagcnctcgtacctacgctatggttt

SEQ ID NO: 76981 - DNA, 1347 bp, Homo Sapiens
  misc_feature (1124)..(1187): n is a, c, g, or t
gatggagccaatcacctctagcctgggaacaccgctagtcaggaggcctcaatcaacctgagaagtcagcccaaggccctgtctccagaagccagcagcagatccctgggtcatgtcacaggaagaaagaaaaggagccacagacgtgtccaggtctggaaggggctgaccagctctaagcacatccaccttgaactctgacacaggtaacgccaaaatgaggccaggacctgaccaagccaaaaaagcagcaaaggatcagatggggtccaatgtgtagatccagtagagaagaatgtcggaaattctaaatacacagttggacatccttcaggcttgttttagattcttgatcctcctgatctcttttactattgtcaacaattgtcttaaaaagaacttctttaaaagtcaacactgtttctaccctttgctccttagcaaggcacaaagcctcttacatggggagtagaagtagggggcactttaaagggatgcccaaagggtggcagaagcaactccattgtggtgacgtggaaacgagcttgccagtgacagtctgagcagatgcctgacacgcacgatggaagctggggttttatgacataacgttcgttttggtttcaacacctccgacgcaagagggcttccaggtccagtccttcacaccccaggtggcagctgaccaactttccacaggatgccaccaggctgggaaacaggttttacctgtatttgatgtcgaatactgtggagtcctccatcttcatcatcctcttcatttagtggcgccatttccactcgctctgctggagtggtgatgatatcatacttgcgtgtcttctttaacctctttcccgacctgaagacgcgcagcagcaggcaggcgatgaggagggtggtaaaggcgaacgccacgatcacggctgccttgagggtgggtaggtcgcggaggaggatggaaatgcgggtcaccaaggcgtcgccgctgctgttggagctgccgctgccgcccgccgccccagacccaaaccgggtggtgttcccgggccccgggccgggcggtggccgcgactcgcgctcgggttcgggccgcggcgcggagacggactcggctctgctgnnnnnnnnnnnnnnnnnnnnnnnnnnnnnnnnnnnnnnnnnnnnnnnnnnnnnnnnnnnnnnnngcacggcgcgcatagtgcggtgggtcggcacaggatcgggcagggcgcgcgcggctgagctccaggatccgcaccagcacggaggcctgcaccgggggatcctgcggcggaggcggctgcgcggtgcttggcagatcccgggaattccggaccggtccag

SEQ ID NO: 76982 - DNA, 1281 bp, Homo Sapiens
  misc_feature (59)..(110): n is a, c, g, or t
  misc_feature (648)..(683): n is a, c, g, or t
  misc_feature (732)..(742): n is a, c, g, or t
ggttcagcagaaatcagcgtggctagttcacaaagaatttccagtatcagggaaaaacnnnnnnnnnnnnnnnnnnnnnnnnnnnnnnnnnnnnnnnnnnnnnnnnnnnnatacctataaaacagtttccccttctctgaagggaaaggaaagtgctaggcagcctgtgattagcaacattctttgggcttttttgttgttcctctgccctgtcacagttctacgttgtttgccttaaaaatgtaatttttaaaaaccattttaaaaatgaacggtgatttggctggctggaaaaaatcacactgtcaggggactatatttgaagtcagtcgaaacggggctggactaggaacccacctggacccaggagaccccacaggacccaggaggtccctgccggaaggcagaggttcaggtgagagtggctcacctctgagctggtgaagtgaggacttgcctgtgacatgacccagggatctgctgctggcttctggagacagggccttgggctgacttctcaggttgattgaggcctcctgactagcggtgttcccaggctagaggtgattggctgcaacaaagatgcttctattagtctattagcagtgccttcgggaccctgggattttgctctctctagaaaggtgnnnnnnnnnnnnnnnnnnnnnnnnnnnnnnnnnnnncctggctttgctccaggtttgtgtatttgcctgtttattgtcctgctcnnnnnnnnnnngggatgaaaactccagcctttcctgactcacctccatcttcggttcttcagttttctgagaagagttgggatatgtgggaaggggcatgggagctcggcagcctccgcctgccaggaaggcagtttcgcctctgcaggaaagagcagagcccgtgggaagccctgggtgagggtggcgcagctggcccagcacgcatggtattgccagccacggggggcctgcgtgtagtctctgctccctgcatttcaccttcttgtgttgactttccttctctgtttcccccatctgttttgccagaggggtggggactggcaacagaacaagccgtggctgctttaatctctcctctccaccgggtgtacctccaggcctgaggtgggtgactccacgggaagcctgggcccaccctcgcaagcttgttcgccccccctcaaaacctttgaacctgaaaactgcgtgggctcaccacagggttttcggaacaacttgcagctgaatctcatggaaaaagctggattcctcttgcctttacgcaaaa

SEQ ID NO: 76983 - DNA, 728 bp, Homo Sapiens
  misc_feature (650)..(660): n is a, c, g, or t
agaagagttgggatatgtgtaaagggtttttattggagagcctgtggcgctgaagtgccaccaaggatttggaaggtcactttcagcagccgccatttctgccaggaccagtggcaagcacctggcagatggagcccgggtgtttctgcgtaaggcagaggaatccagcttttccatgagattcagctgcagttgtcgaaaaccctgtgtgagccagcagttccagttcaaaggttgagggggcgaacagctgcgaggtggccaggctcccgtgagtcaccactcaggcctgagtacaccgtggagaggagagataaagcagccacggctgttctgttgccagtcccacccctctggcaaacagatgggggaaaacagagaaggaaagtcaacaaagaaggtgaaatgcagggagcagagactacacgcaggccccccgtggctggcaataccatgcgtgctgggccggctgcgccaccctcacccagggcttcccacgggctctgctctttcctgcagaggcgaaactgccttcctggcaggcggaggctgccgagctcccatgccccttcccacatatcccaactcttctcagaaaactgaagaaccgaagatggaggtgagtcaggaaaggctggagttttcatccnnnnnnnnnnngagcaggacaataaacaggcaaatacacaaaccctggagcaaagccaggaaaaaagggggagataaaa

SEQ ID NO: 76984 - DNA, 644 bp, Homo Sapiens
gcacgaggcaatggaatcctctggtaagcgggcccctcagtgctaccccagttccgtcaactctgccaggactgtgatgctgttcaaccttggcagcgcttactgcctgaggagcgaatatgacaaagcccgaaagtgtctccaccaggcggctcaaatgagccatcctaaagagatgccccctgaggccatcttgctggcagtctaccttgaactgcagaatggtaatactcagctggccttacagatcatcaaaaggaatcagctgctccctgcagtgaaaacacactctgaagtgagaaagaagccagtgtttcagcctgtccacccgatccagcccatccaaatgccggctttcaccactgtgcagagaaagtgatacttcacttttggaaaactgttacctgagacccaggggagaatttactggccattttagttgtatcacagcagaatgaataaaagatggtgaaggctgttaattttgagtcaattctacccctgacttttggccaaaagcttacttaaaattaaggatttactaagtcatcatcagctgtttttcttaatttcagccagactattaattttgagccattatgtaatatatgccataggcaattaaaacataattttatcagaaa

SEQ ID NO: 76985 - DNA, 591 bp, Homo Sapiens
gagccgcaggcatgaagagctactggttgcctacagggcacctgggaacccccaagctatttttgacatagccagcttggacctggaaccattgcccgtgcccctggtcactgacttcagccatcgggaggaccagcacggcgggcctggggcactgctctcatccccaaaaaagagacccggtggagcctcccaggggggaacatcagagccacagggcctggacgctgcatcctgggcccagatccaccagaagctccgggacttctcccgcagcacccaggcagagctggaacgggagcgggcacagctgctggtccgggccacgatggctgaagagcaactttctgagctacaggagtacgtggaccagcacctgggcaggtacaagcacgaaatcctgaggctgaggaagctggcaggtgcaggggacccctggaaagtgggggctgtgcctccagccaagccccagcatccaaggaccggcagccactaggccgtctcccaaggagcagagcagagcagagctcctcagccagcacagaaccctcccacccagccccccataaaacatgagtcaggatagaaccc

SEQ ID NO: 76986 - DNA, 797 bp, Homo Sapiens
tcacatctaaagtttaacactgcccatttgccgaatctcaatgttgggcaagaacgatatagtcacaattatggggctgctttcaaagccggggctccatttctactgtcagatcaatgtggtgctgtaaccatctttttatcccgaccttcaagaacctccttatatgaagcctgtctttatccatcagaaggtgtgtgaaatcatcacttccttctggttttatgtatttgtagactatgcagcttttcattaaactgcaagtatatacaagacagatctgaaattaggcctgagtgttccgatccaccactgtactagtaaataaaaatccacctaccttttatgtggaaaattatgtgctattgagtaacttttagctctttttttaaaaaatgggtgaaatttaagtgtcttttttatgagaatgacacatgaagagatctgagagcaatctcatgtagtcttccatgaacctgcaattgtttggtatgcgtcagcattttccaatttccaggttggatctagagctgctgttgatcactcaggcatactaatggattcatttagatgggtccaagctgcagtccatgagcaataacagactaccccagatactgcagtttacgcagtgcttagtaaatgagatttgtggaactaagttattagttacctgaggcttcttaagaaagtcttcttttttgaccagttgatgtgaaagagggagcatgtgacacagccagtatggtggagtgctagggttatcctgtttacaataaatcgcctgaatttcaaaa

SEQ ID NO: 76987 - DNA, 813 bp, Homo Sapiens
  misc_feature (97)..(97): n is a, c, g, or t
  misc_feature (104)..(104): n is a, c, g, or t
tgctgttggacactccgtcacctttggaacacaagtatatcaagatagtggctactgatgttcaagtgggattgaagtgtgataaatggatatattntgttgtntgctggggtgttcatggagatgttaagagattgaggccctgggctgagggtatataatgtatgtcaggtaaagtttgaagactgccaaggagcagattttctccctggaaatgtgaaaactgaacctataactctgataaggacttgagatgtgtagaaacgttgggttatggaagactagtttcttccataaccctgaattggagaccttaatgctaagtgtagattattgaggtttgttagtgaggaaaagaataagagttcagaagcctttgttatcagatagcgaaatcagggcctagtgaggagcacaggtcgactacataatggagtccattggcgaaccctattgcaatttggtccaactatatcttctggtgaaggaaattaatgatgtaagaaaatgcaagaggctcaacttctcttccaaaaatcttctggcttctgaactcttcctctgcctctctttaaataaataacacagaatttcaagtggtaggagacttattaagccagtcaccaagcttggtctgtcagcctgtcttctaacacctcaaagatcttgtgccctgtgctgtccctcccttgtaattatgaaaagttctttggtttctggggtgaattctacccatgtataatgaggaattctctcataaccttttttgtcttgtctgtcatctctgttcatcccttcctataacctctaggt

SEQ ID NO: 76988 - DNA, 577 bp, Homo Sapiens
  misc_feature (26)..(26): n is a, c, g, or t
aaaaattgatccaggaaagctgatgngacccaaaggagtttctgtggaccgcaatgggcacattattgttgtggacaacaaggcgtgctgcgtgttatcttccagccaaacgggaaaatagtcaccaggtttggtagccgaggaaatggggacaggcagtttgcaggtccccattttgcagctgtaaatagcaataatgagattattattacagatttccataatcattctgtcaaggtactacaagcacatgagttgttgttaacttttaactgcttttatggagaaattggtctgcgagaaaataatgcaatacttacatatggcaccaaagggagttaaccagcagagtagactttgttctgctcaaagatgccggttttaacttggacttacagaccttggaaagtcaggaaattgaataaaatgtggtggcaataagttgcttaatttgaaactggtgcaaatgaagaggacttgaaaattaaattttaaaaagcaattcgttgaacttagaggcagaactttctgaagcttaatgttttgtggctagtcaataaattaaaatcactttttc

SEQ ID NO: 76989 - DNA, 2009 bp, Homo Sapiens
  misc_feature (77)..(111): n is a, c, g, or t
  misc_feature (1800)..(1849): n is a, c, g, or t
ttatcgatcactataggggctagctcggttgcagccgaacgacgagcgcagcgagtagtgagcgaggaagcggccgnnnnnnnnnnnnnnnnnnnnnnnnnnnnnnnnnnncagtcgacggtaccggacatatgcccgggaattcggccattacggccgggggactgtgggctcagcacccacacaactgcacaagcccacctttcctgttccttctcaggtggctcacccagaaaggcgcccggcagaagaaaatcaacgagtggctggggattaaaaatgagactgaggaccagtacgcactcatggaggaacagtgctttttagagatgctttctatttcaatgttggcatactgcctgagggtattgcagttgtgggtgcattccctaatttgtatgatcaagatgaactggcccttttctacttccaagcttttaacagataccaccatatttgacagaattcccagagtgaattgcttgtgttattagtagattcagtgcccccagctgggataggcaagccatgacagcttccctgtttcacctacagaagtcttatctgagggatctattcacagtaagcaccaaggtctccatgtcttgaggtcagtttcattgtcttttgaaaagtgcatgcttcatttgaacaattcattcagcagcagatggactttcagtgatttaaaataaaattttgatccaaagctcaggacacaaaccacagtggtaaaattgagtagcatataatatcagactaaattatctgtaattttccacaacccagattgtatgtgttttatgtgtgtttaaataaatatgttagatacacgtgtatacatacacccatatacaacagatccaagactggctgacttcatttgaaatggttgaatctgctgtgtaataaagtggttcaaccatgattaggaactgaaatttagtagaagagggaaaaggagttaatgtaacaaattattttagctacaaaccccggtaatagagcacttgggggatgggatggggtgggttggtgagacaatcagaatggtaaattgattaaatgctcctaaccctgtaattttgtgcatagagcaccctatgctgtggaaataactgttcttagatttcattgtaactggactgttcaggttgcccagagggaaagaacattcctaattctaataaaataaacttttattttgttattccattagttacttatgtttatttttatagttaaaaaatgactaaaggtggctaatagccacccgtattatgtgcccttattcactgttcccacttaatataaaatgtcaaaaattggtgtttctttgcagggaactgtgaatgagcccattcccccaacatttaacttggttaatgaagctttcagagcattttctgaaagatttccaatttctgcatctcagatattgaatttaaattgtttgtgttgtaacagtgatacaaaaatgttcaatagctctttgaatgccactttttttaaagaaaatactttaaaagtcattcttagctaacctcaaaactcctttacattactttcattttagctcactcttaaagctgatactgttatatagggatgaagggagagttttcttaaagaaggtcccaaagttgaagatcgtttgtcattgatactctggccaagtccaggttttaggacaatttaatttactcttatttggatctgtaattatgggagtttatcacttttcctcttcaaagcacttcaacttactgtctaaaacaagtggagaagaaattgccattnnnnnnnnnnnnnnnnnnnnnnnnnnnnnnnnnnnnnnnnnnnnnnnnnntttttcatttccttctacctgaaacttaacatcatgctacctctttgtatcatattttgttattctggtcacagaatgacctagtattctgtaccagggaaggtagttcttaactatattgttgtacttttaaaccacattaaagactattataaatgcc

SEQ ID NO: 76990 - DNA, 1478 bp, Homo Sapiens
  misc_feature (1340)..(1340): n is a, c, g, or t
  misc_feature (1385)..(1385): n is a, c, g, or t
tgcggcgcgatggcggcggggctggcgcggctcctgttgctcctcgggctctcggccggcgggcccgcgccggcaggtgcagcgaagatgaaggtggtggaggagcccaacgcgtttggggtgaacaacccgttcttgcctcaggccagtcgcctccaggccaagagggatccttcacccgtgtctggacccgtgcatctcttccgactctcgggcaagtgcttcagcctggtggagtccacgtacaagtatgagttctgcccgttccacaacgtgacccagcacgagcagaccttccgctggaacgcctacagtgggatcctcggcatctggcacgagtgggagatcgccaacaacaccttcacgggcatgtggatgagggacggtgacgcctgccgttcccggagccggcagagcaaggtggagctggcgtgtggaaaaagcaaccggctggcccatgtgtccgagccgagcacctgcgtctacgcgctgacgttcgagacccccctcgtctgccacccccacgccttgctagtgtacccaaccctgccagaggccctgcagcggcagtgggaccaggtagagcaggacctggccgatgagctgatcaccccccagggccatgagaagttgctgaggacactttttgaggatgctggctacttaaagaccccagaagaaaatgaacccacccagctggagggaggtcctgacagcttggggtttgagaccctggaaaactgcaggaaggctcataaagaactctcaaaggagatcaaaaggctgaaaggtttgctcacccagcacggcatcccctacacgaggcccacagaaacttccaacttggagcacttgggccacgagacgcccagagccaagtctccagagcagctgcggggtgacccaggactgcgtgggagtttgtgaccttgtggtgggagagcagaggtggacgcggccgagagccctacagagaagctggctggtaggacccgcagggaccagctgaccaggcttgtgctcagagaagcagacaaaacaaagattcaaggttttaattaattcccatactgataaaaataactccatgaattctgtaaaccattgcataaatgctatagtgtaaaaaaatttaaacaagtgttaactttaaacagttcgctacaagtaaatgattataaatactaccttctgggttaagaaaattccattcaaataacattctcatgtaaatactcaaacatacagattgaggcttccagaaattaatccacttgaggcgtccacgcggaacaaggtctgctgaccacagttacacacgtcgtgacaccactgtagcnaccggcgaatgtcgaacactaagagttacagacgacagggcaacnaagaacatgcagagccggccgcccaggcaagcttccttaaggcccggttgccccgccatgggccacaggggggggagctgctgttgtggggcc

SEQ ID NO: 76991 - DNA, 3356 bp, Homo Sapiens
  misc_feature (77)..(155): n is a, c, g, or t
  misc_feature (428)..(436): n is a, c, g, or t
cgaacgcggcggtcggcagcgttcgcgcgggggcctgcgaagcgctgctcggggccggcactgcccgcggggaggannnnnnnnnnnnnnnnnnnnnnnnnnnnnnnnnnnnnnnnnnnnnnnnnnnnnnnnnnnnnnnnnnnnnnnnnnnnnnngagcgcaggagtaaacaccgccggagtcttggagccgctgcagaagggaataaagagagatgcagggatttgtgaggttacggcgccccagctgcaagatgcactagccggctgaacccgggatcggctgacttgttggaaccggagtgctctgcacggagagtggtggatgagttgaagttgccttcccggggctcattttccacgctgccgagaggaatccgagaggcaaggcaatcacttcgtcttgccattgattgggtatcgggagcnnnnnnnnnctcccctctctctttcttttcctccgtcttgttgcatgcaagaaaattacagtccgctgctcgcccgccctgggtgcgagatattcagccccgctctctcccgtgcattgtgcaacccaaagatgaaagaccgaaggggagaaagttaaagaaatcgcccacatgcgctggatcagtccacggcttggggaaaggcatccagagaaggtgggagcggagagtttgaagtctttacaggcgggaagatggcggactggagctgaaagtgttgattgggaaacttgggtgattcttgtgtttatttacaatcctcttgacccaggcaggacacatgcaggccaaaaaacgctatttcatcctgctctcagctggctcttgtctcgcccttttgttttatttcggaggcttgcagtttagggcatcgaggagccacagccggagagaagaacacagcggtaggaatggcttgcaccaccccagtccggatcatttctggccccgcttcccggacgctctgcgccccttcgttccttgggatcaattggaaaacgaggattccagcgtgcacatttccccccggcagaagcgagatgccaactccagcatctacaaaggcaagaagtgccgcatggagtcctgcttcgatttcaccctttgcaagaaaaacggcttcaaagtctacgtatacccacagcaaaaaggggagaaaatcgccgaaagttaccaaaacattctagcggccatcgagggctccaggttctacacctcggaccccagccaggcgtgcctctttgtcctgagtctggatactttagacagagaccagttgtcacctcagtatgtgcacaatttgagatccaaagtgcagagtctccacttgtggaacaatggtaggaatcatttaatttttaatttatattccggcacttggcctgactacaccgaggacgtggggtttgacatcggccaggcgatgctggccaaagccagcatcagtactgaaaacttccgacccaactttgatgtttctattcccctcttttctaaggatcatcccaggacaggaggggagagggggtttttgaagttcaacaccatccctcctctcaggaagtacatgctggtattcaaggggaagaggtacctgacagggataggatcagacaccaggaatgccttatatcacgtccataacggggaggacgttgtgctcctcaccacctgcaagcatggcaaagactggcaaaagcacaaggattctcgctgtgacagagacaacaccgagtatgagaagtatgattatcgggaaatgctgcacaatgccactttctgtctggttcctcgtggtcgcaggcttgggtccttcagattcctggaggctttgcaggctgcctgcgtccctgtgatgctcagcaatggatgggagttgccattctctgaagtgattaattggaaccaagctgccgtcataggcgatgagagattgttattacagattccttctacaatcaggtctattcatcaggataaaatcctagcacttagacagcagacacaattcttgtgggaggcttatttttcttcagttgagaagatgtattaactacactagagattattcaggacagaatattcaagcacatatcacgtaacagtttaatatggaacaaacatcctggaggattgttcgtactaccacagtattcatcttatctgggagattttccttactactatgctaatttaggtttaaagcccccctccaaattcactgcagtcatccatgcggtgacccccctggtctctcagtcccagccagtgttgaagcttctcgtggctgcagccaagtcccagtactgtgcccagatcatagttctatggaattgtgacaagcccctaccagccaaacaccgctggcctgccactgctgtgcctgtcgtcgtcattgaaggagagagcaaggttatgagcagccgttttctgccctacgacaacatcatcacagacgccgtgctcagccttgacgaggacacggtgctttcaacaacagaggtggatttcgccttcacagtgtggcagagcttccctgagaggattgtggggtaccccgcgcgcagccacttctgggataactctaaggagcggtggggatacacatcaaagtggacgaacgactactccatggtgttgacaggagctgctatttaccacaaatattatcactacctatactcccattacctgccagccagcctgaagaacatggtggaccaattggccaattgtgaggacattctcatgaacttcctggtgtctgctgtgacaaaattgcctccaatcaaagtgacccagaagaagcagtataaggagacaatgatgggacagacttctcgggcttcccgttgggctgaccctgaccactttgcccagcgacagagctgcatgaatacgtttgccagctggtttggctacatgccgctgatccactctcagatgaggctcgaccccgtcctctttaaagaccaggtctctattttgaggaagaaataccgagacattgagcgactttgaggaatccggctgagtgggggaggggaagcaagaagggatgggggtcaagctgctctctcttcccagtgcagatccactcatcagcagagccagattgtgccaactatccaaaaacttagatgagcagaatgacaaaaacaaaaaggccaatgagaactcaactcctggctcctgggactgcaccagactgctccaaactcacctcactggcttctgtgtcccaagactaggttgtgtacagtttaattatggaacattaaataattatttttgaaatgattgctatgcaggtttaaacttttttaatgatcaaaactattaaaaaccagagttctttgtttaaaaaaaa

SEQ ID NO: 76992 - DNA, 1232 bp, Homo Sapiens
  misc_feature (733)..(871): n is a, c, g, or t
  misc_feature (876)..(893): n is a, c, g, or t
gcaaatcccagaacaagagcccagccctgagccccgctgaggagtgctggagcttccttaggaaagcccgaagcttgtgcacggtcaagccgcgatgtgcaaagcagggagggctgggtgctcaggccattcttgttgccctggggtaggtccttccctgggccccagatggacagcagtgcatcagggttttcaaaaaggggctgctgcctcgcagtcctcaggcttggccatcctctccttgcagaggcgacgaggtgatcgccgtggccagcatgaactacgatcccattgtgtccaaggtcgctgaggtgctggcctcaggccgtgccatccggaagcgggaggtggagactggcgacatgtcctggcttacggggaaaggatcctgagctcacatgcagtagacttgggcaggcaaagggggcaccaagggcacaggccaagccttgggggcaggtgccaatctccagtcccaggatcccccagggcagaacctgagccctcccagtgcttgccttcagccacctggctcccctcctgggaggcctctgctggatccagaagatgctcaaccctcaaggcctctgctgccactgacagctggcactggaggcaggacaagccctgcctcttctccctctattgggactggtcccctgaagaacccctgccaacatggtttagacaatttaccggtaagaaatttaaaaaacgaccacaagaattttgnnnnnnnnnnnnnnnnnnnnnnnnnnnnnnnnnnnnnnnnnnnnnnnnnnnnnnnnnnnnnnnnnnnnnnnnnnnnnnnnnnnnnnnnnnnnnnnnnnnnnnnnnnnnnnnnnnnnnnnnnnnnnnnnnnnnnnnnnnngagannnnnnnnnnnnnnnnnnaatatgagaatagacaaacgcgcgggagaggggcgaaaacaaaagattgacagacgaccaccggaatgtatcggaggcagggcggcaccgcccgcgcccgaaggagtggggcgacaaaaagacaaggagcggggggcggagcggggcggcagtcaaagaacggcggagggagggagggcgaacaaaacaggcggaagaggacatagaaggagagggaggaagcgaccagcagccgcggtgggggggtggagagacaaggtagggaggcgacacgacgcagcgaggggaacgagcaaacgcgcgacgcgggagggcaaaaaagacacaggcggagagagg

SEQ ID NO: 76993 - DNA, 521 bp, Homo Sapiens
gagaaacagtgttgatagagactcagctgaaagcatgtgcctcttttatacgaaccaggcttctgcttcagtttacccaacctcagcaaacatcgtttgctttggagaggaacttaaggactcagcaggaaattgaagataaaatgaaagggttcagcttcaaagaagacactttgctgttgatagctgaggttatgggagaagatatcccagaaaaaataaaagatgaagttcacccagaggtgaagtgtgttggctccgtagccctgactgccttggtgactgtatcctcagaagaatttgaagacaagtggttcagaaagatcaaagaccatttctgtccatttgaaaatcagttccatacagagatacaaatcttggcttagtgggttataaaaaacaaaaccacaaatatcttgtactgtattaattgtccttgtttacttcagacaggatccattgctaatcatggagtataaatgattatttatgttttataaaactggcttctgtctcattga

SEQ ID NO: 76994 - DNA, 1595 bp, Homo Sapiens
ctttcttacaaatcacatatatttacattgtggatctgggatacacttatcacagtaggagctgctcaaatcaatctgaatgctacgcaatctgggaacctccccataactgtttgagccagcatttcagattatagataagctgtttccagctggactgggtttggaaagttcactctaaagaatgaagtcacctgttgtcactgtcctcctctccaggattccttttggggccaggtaccatcctgtggctccttaaggaggcttctctctttaattctccatgaggcatccagggtggtctgggctatgggaagaacccttcaacttgggagtagacaggtgctccaattcatagtgcccattctcagaggccttgtgtgtgagtttctccttcatgccttccttctggctcttcttgtgctccataatctgctggagctggtgcccagcatagtctggcttggtggtcagcgggccagccggcacagctacaccaaggacatctgacaccatgtaggggcgcagccagcccaccaagggagtgcttccggggctgtagtgggtctgtttgtggtagaagagaagtccatctacctcaaaagggaaatccatagatagcacatcacacaggctttcgggagtgcaagggaagttctttagccccacaaatttaaaaggattaagcttggttttctctcccagtccttcttcttctggtaactttgaatgcatccagtagaatcggaaatcagtctggcaatcataaaaagggtgtccccgccagcacatcacatccagaacgtagtaggtctggtttacctcattgtaaatgcaatctagaatggtgtagtcttttgctgttgagtttcgcctgttgcctcctggcagaagtgaagaaaacctgttgacacagtagccactcttggtgtaggcactggtagaacccctggaggccacgataagggctctttttccaacagggcacacgaccacaatccattcctgccccaaatctgaaggaacgtcaattaaccactcagaaagcatcaattgattagcatagtgttttggtaacttcttgacagtgtcaatgtccatttcttcatcatctttcttattttcttcctcactctccatccctgtccagtcatcttcagccagtcttctggcatggttcacataatccagccgcttggatttctgcagttccagtaacctccggcggcgctcactctgctccaaggaactgtacttggacttgtactgggataggcgggggtgtggggcagctgtgctgttcagatcttgagacacagaaaagctactagccagggcctgactcaactcttccatcttccctcgattactgcctgtttgctgcttttgcgagcttctttcccactcggctgcgggctgagcaatggtagggacctggcttgattcctatttaagtagccagagtccagcacaagggatggcgctcagtagaccctgcgtgaaggaatgattaaattggtgcaaaagactagggtaagcggcagagatttaggagattaagtcctgccagggtgtagcctctgcagggcgggccc

SEQ ID NO: 76995 - DNA, 773 bp, Homo Sapiens
gataaagacattttatttccactttacttctactggaagttttttaaaaagagagaaaataataagagcccctccaggaactgagggtggaaactctgtatccaggtttgctttctgtcatctacaccttgataagccacagagaagaaagcgagccaacaggccacatccaaggcaccacacttgcaattaatttattaggaactcatcattagtcaccccagagctttcagaaaagtagtgtcctctgagtggatgtggttacatccctcaaagcggaaaaacatttaactcggtaacagttacatttcgttctttgactaggaagtagttatagtgacaaggtacaaaaaataataagcatgcagccctttatttagttttgcaaagtctctgcttatagttctgtatattacatgactgtgttatacaaatacatttatttacaaaaacactctagctgtgcaaacttgttgctttttaaaaatgtatggatacttccatttctgccggtcccgatatatacttttaaagcatgcataaaaattaactttggtgtgggaaaactactctatgtgctgtcacatacagtatttttatgtctatgtatatttatatatttacaaaagtttttcggtttacagaaccgtacagagtatacattttaaaatccacaatgcaagagcgtgggttaccaggtctcagaaaacaaaagaaggggttagatacgccaaagaaaacaactagagaatctcaacatgttaaaaaagaaa

SEQ ID NO: 76996 - DNA, 1007 bp, Homo Sapiens
  misc_feature (684)..(736): n is a, c, g, or t
tccagtgggatgatctgggcaaaatgacttatctgaccatgtgcatcaaggagagcttccgcctctacccacctgtgccccaggtgtaccgccagctcagcaagcctgtcacctttgtggatggccggtctctacctgcaggaagcctgatctctatgcatatctatgccctccataggaacagtgctgtatggcccgaccctgaggtctttgactctctgcgcttttccactgagaatgcatccaaacgccatccctttgcctttatgcccttctctgctgggcccaggaactgcattgggcagcagtttgccatgagtgagatgaaggtggtcacagccatgtgcttgctccgctttgagttctctctggacccctcacggctgcccatcaagatgccccagcttgtcctgcgctccaagaatggctttcacctccacctgaagccactgggccctgggtctgggaagtagctctgatgagaatggggtcccagatggctcaggctgtgacctccctgggcaccaccctccccaggctgggtgtggaggagttggggccccctgccttcaggaggcttgtagtttagaagggaagtaggcattaccatagacgactcctagaggacagtgctatgtaaaaatgtgtgtctataaatgtttatcatgcatgtattctagagcnnnnnnnnnnnnnnnnnnnnnnnnnnnnnnnnnnnnnnnnnnnnnnnnnnnnntcatttatctcctataattggcaaacttaaaaatgcagcagaaacttacattccaaccttagagactcatagtgagcacaaggaaagttttgccctgagattcatggttatggctgggtaccaccaaatagaagaatggcttaggggagtgccccttcactgagatgtgtttctttgttgaactttgtgtgtgtgtgtttagaatataacagacataagaaaaaattacctaaatgaagactgtacaaaataataaataattctgaagcag

SEQ ID NO: 76997 - DNA, 1345 bp, Homo Sapiens
  misc_feature (676)..(711): n is a, c, g, or t
  misc_feature (756)..(1293): n is a, c, g, or t
  misc_feature (1304)..(1304): n is a, c, g, or t
aggtggtcacagccatgtgcttgctccgctttgagttctctctggacccctcacggctgcccatcaagatgccccagcttgcctgcgctccaagaatggctttcactccagctgaagccactgggccgtgggtgtgggaagtagctgtgatgagaatggggtcccagatggctcaggctgtgacctcctgggcacaccctcccaggctgggtgtggaggagttggggcccctgccttcaggaggcttgtagtttagaagggaagtaggcattaccatagacgactcctagaggacagtgctatgtaaaaatgtgtgtctataaatgtttatcatgcatgtattctagagctcattcatttattcaacaaacagtttggtgagcacctatttcgttcgagaaacttcatttatctcctataattggcaaacttaaaaatgcagcagaaacttacattccaaccttagagactcatagtgagcacaaggaaagttttgccctgagattcatggttatggctgggtaccaccaaatagaagaatggcttaggggagtgccccttcactgagatgtgtttctttgttgaactttgtgtgtgtgtgtttagaatataacagacataagaaaaaattacctaaatgaagactgtacaaaataataaataattctgaagcagnnnnnnnnnnnnnnnnnnnnnnnnnnnnnnnnnnnngcctacagccgcggccgctccaacatccctcgtgccgaattcttnnnnnnnnnnnnnnnnnnnnnnnnnnnnnnnnnnnnnnnnnnnnnnnnnnnnnnnnnnnnnnnnnnnnnnnnnnnnnnnnnnnnnnnnnnnnnnnnnnnnnnnnnnnnnnnnnnnnnnnnnnnnnnnnnnnnnnnnnnnnnnnnnnnnnnnnnnnnnnnnnnnnnnnnnnnnnnnnnnnnnnnnnnnnnnnnnnnnnnnnnnnnnnnnnnnnnnnnnnnnnnnnnnnnnnnnnnnnnnnnnnnnnnnnnnnnnnnnnnnnnnnnnnnnnnnnnnnnnnnnnnnnnnnnnnnnnnnnnnnnnnnnnnnnnnnnnnnnnnnnnnnnnnnnnnnnnnnnnnnnnnnnnnnnnnnnnnnnnnnnnnnnnnnnnnnnnnnnnnnnnnnnnnnnnnnnnnnnnnnnnnnnnnnnnnnnnnnnnnnnnnnnnnnnnnnnnnnnnnnnnnnnnnnnnnnnnnnnnnnnnnnnnnnnnnnnnnnnnnnnnnnnnnnnnnnnnnnnnnnnnnnnnnnnnnnnnnnnnnnnnnnnnnnnnnnnnnnnnngttccccgggnagctctcctgcgtcccctgtccgacctgcggctaccgaaaa

SEQ ID NO: 76998 - DNA, 250 bp, Homo Sapiens
gcacgagggtgctcactatgagtctctaaggttggaatgtaagtttctgctgcatttttaagtttgccaattataggagataaatggttatggctgggtaccaccaaatagaagaatggcttaggggagtgccccttcacgtgagatgtgtttctttgttgaactttgtgtgtgtgtgtttagaatataacagacataagaaaaaattacctaaatgaagactgtacaaaataataaataattctgaagc

SEQ ID NO: 76999 - DNA, 543 bp, Homo Sapiens
tatagtcctaacaagtccagtaattttttataaatcttcagattataaacagcccctaaaaactttacaacgtttacacagttttttaaaaagagactgtatacacttgatttgctttcaaaataaataaggtcagctagtctaggaggttaacgtcgggtaggaatgctgatcatgataggtttggttttctacagattctgttccggtgcctttcctatccaggcaccacctgagaaagttgtcatttgaggtcgcacttggaagttacatctgtgaagtttctgtcattcgtccagatctgtgtgtgtagcatgtgctgaggaagcacgtgctgggctgtgcctcagacagtgcatcaccgggcacccagaggcttgcctggctattcctgttctggtgtgtgtggagtgttggggaggaacagatgcagatcaacctgtggctgttttcccgtctaggttctcacaggtatctcctgacagaggtacttaacaatggctctgctggaaatttctataaataaaatgtccaaaatggtga

SEQ ID NO: 77000 - DNA, 978 bp, Homo Sapiens
  misc_feature (508)..(525): n is a, c, g, or t
taaaattatgggacctagtagatttaatggagtgagccctggattgggagccaggggacctggctttgaatggtcccaacccaggcacttatttaccttagtttcttcacttataaaattaaacacaccatctactgatgaatggataaacaaaatgtgatatatccacagaagggaatcttgttcagctgtgagaaggaatgaagtatggacatgtgctataatgtggatgtgcgttaaagacattatgctaagtgaaagaagccagacacaaagaccatacatttcacgattccacttacatgaaatgtacagaatagctaaatctaaggacataaagtaggttagctaatgggtacaggtttcattctgggttgatgaaatgttccaaaattgattgtgctgatggttgtatttaaaactctgcatatactgaaaaccatttaattgtacattttaaatgagtgaattgtatgctatgtgaattatatctcaataaagttgttcnnnnnnnnnnnnnnnnnntgaaacagtgatttccacccagcccagatatgttgtgaagctcaaatgaattgtttttacaaataagaaaaccacttaaaactatacaatgaaaattatttttaaacttaattatttcttaaattcgaggctgatatactaaaggaatttttccagtgacagttggcatttctataaaccagaattgtacctctgcttacagctctgtggatgaagatcagggaggaggaacagtttcaagttggtgagagtgttgaggggagggaaaaaatggctggtttgtaagatccttgaggtcagggattatttttatcttgttctcttttgtaatcccagtgcctagtacaatgcctgactcaatcaatgtgaatgagtgaataatgaatcaatggtcaaactaatgaactgggggtctgaatgaaaatgatgaggcactttcactcagccaataaa

SEQ ID NO: 77001 - DNA, 870 bp, Homo Sapiens
  misc_feature (84)..(84): n is a, c, g, or t
  misc_feature (127)..(127): n is a, c, g, or t
  misc_feature (133)..(133): n is a, c, g, or t
atacgattatagactccttaggattgcctcgagccagattcgcacgagttacccagaatatggaatgcaggaatgtgctggatnggaaataatgatcgatcagtagaagtcaagcagtggcgtattntgggtncaaagcagagtgaacaccgtccctcattacctcgatttattagcacctattcctgggcagatgctgaagaagaaaaatgtgaactaaaaactaaagatgactcagagccatctggagaagaaacagtagaaaggacaaggaagccaagtctttctgaaaagaaaaataatccatcaaagtgggatgtctcttcagtttatgacacaatagcttcctgggcaacaaatctcaagtcctccatcagaaaggctaataaggccctctggctctctattgcattcattgtactgtttgcagctttgatgagcttcctcacaggccaattattccagaagtctgtggatgccgctcccacacagcaagaggactcatggacgtctctagaacatatcttgtggccatttaccagactccgacacaatgggccaccaccagtgtgacagcaggacatcctaatatatggatcttgatttttaagtttcagtatctgaacttcgtaaattagtaacttttagctgggaaagtatagcatgaaaccagaggttctcagaatgactgtaagatagcttacatttcctctttttgcctttatctccccaactaaaatacaatggggaagaagtctgcctatgatctttgaatgagctttttaaggaagaaatattatatattgtttgttaaagtttattgaaataaagaatcatttaaatcttagaacccgcaaacccataaaaacc

SEQ ID NO: 77002 - DNA, 813 bp, Homo Sapiens
  misc_feature (437)..(454): n is a, c, g, or t
  misc_feature (622)..(630): n is a, c, g, or t
gggatataggagtggggaaatctgggctgattcccatacgaaatgtaacagaagcaaaacttcaaaaacaaagaagagaagaagccttggactgggccccggagaaagagtggaagtccaagtactcaacattgacatcccccgatctaggattactctggacctcattcgggtgttatgagtatcccacgaaggccagacgctgattttattttctcatttccacagattgacaaggataagtcagttgtttgtaaactctaggtagcagatgagaaataattcacttaatatcagaaatattttccaaacactttcctttattttttcttctgaataaatagaaaaccaacagtttgatttccttttcccttaaaggaaacaactaatacacattcttatatggctttatgtagtaatagttttctgactaaaannnnnnnnnnnnnnnnnngtaatttatctttaactccttttgcattttgtataacagattgcttaacttctacttgccaacatctgccttgctggacttgtatgggattgtcttcttgatttgaattgtaccgtctttgttgacacagtagggctgggcagtgtttaatccttccattttatagannnnnnnnnaatcaggccttttggacttcattcataattttgcaataatctcttttcccttgtcatgcaagccaaaaatataccagtaaaacagattctgacgtgtttgtagttatcaaatgaatggctcgaaacacttctcaaaaggatatacgtattgaccccaacaataaatgtttgtggctagtgaaa

SEQ ID NO: 77003 - DNA, 1177 bp, Homo Sapiens
  misc_feature (278)..(302): n is a, c, g, or t
  misc_feature (1019)..(1060): n is a, c, g, or t
gggaccggtccggaattcccgggatatcgtcgacccacgcgtccgtgaagaagctagaaaacaggcaaattcctgactgctagtttatatagaaatgtattcttttagtttttaaagtaaaggcaaacttaacaatgacttgtactctgaaagttttggaaacgtattcaaacaatttgaatataaatttatcatttagttataaaaatatatagcgacatcctcgaggccctagcatttctccttggataggggaccagagagagcttggaatgttnnnnnnnnnnnnnnnnnnnnnnnnncaaggagaagttgtccaagggatgtcaattttttatccctctgtatgggttagattttccaaaatcataatttgaagaaggccagcatttatggtagaatatataattatatataaggtggccacgctggggcaagttccctccccactcacagctttggcccctttcacagagtagaacctgggttagaggattgcagaagacgagcggcagcggggagggcagggaagatgcctgtcgggtttttagcacagttcatttcactggggattttgaagcatttctgtctgaatgtaaagcctgttctagtcctggtgggacacactggggttgggggtgggggaagatgcggtaatgaaaccggttagtcagtgttgtcttaatatccttgataatgctgtaaagtttatttttacaaatatttctgtttaagctatttcacctttgtttggaaatccttcccttttaaagagaaaatgtgacacttgtgaaaaggcttgtaggaaagctcctccctttttttctttaaacctttaaatgacaaacctaggtaattaatggttgtgaatttctatttttgctttgtttttaatgaacatttgtctttcagaataggattctgtgataatatttaaatggcaaaaacaaaacataattttgtgcaattaacaaagctactgcaagaaaaataaaacatttcttggtaaaaacgtatgnnnnnnnnnnnnnnnnnnnnnnnnnnnnnnnnnnnnnnnnnnttagcattgctgagctttttagatgcctattgtgtatcttttaaaggttttgaccattttgttatgagtaattacatatatattacattcactatattaaaattgtacttttttact

SEQ ID NO: 77004 - DNA, 709 bp, Homo Sapiens
  misc_feature (320)..(336): n is a, c, g, or t
ggagttacccaagggatgtcagttttttatccctctgcatgggttggattttccaaaatcataatttgcagaaggaaggccagcatttacgatgcaatatgtaattatatatagggtggccacactagggcggggtccttcccccctcacagctttggcccctttcagagattagaaactgggttagaggattgcagaagacgagtggggggagggcagggaagatgcctgtcgggtttttagcacagttcatttcactgggattttgaagcatttctgtctgaacacaaagcctgttctagtcctggcggaacacactnnnnnnnnnnnnnnnnnaagatgcggtaatgaaaccggttagtcaattttgtcttaatattgttgacaattctgtaaagttcctttttatgaatatttctgtttaagctatttcacctttcttttgaaatccttcccttttaaggagaaaatgtgacacttgtgaaaaagcttgtaagaaagcccctcccttttttctttaaacctttaaatgacaaatctaggtaattaaggttgtgaatttttatttttgctttgtttttaatgaacatttgtctttcagaataggattgtgtgataatgtttaaatggcaaaaacaaaacatgattttgtgcaattaacaaagctactgcaagaaaaataaaacacttcttggtaacacaaaaaaaa

SEQ ID NO: 77005 - DNA, 969 bp, Homo Sapiens
  misc_feature (325)..(410): n is a, c, g, or t
  misc_feature (423)..(475): n is a, c, g, or t
  misc_feature (588)..(642): n is a, c, g, or t
gggtctccacaagcttttgggggacccgcccccaaggtgttttccaggtgtccacggggggggaactacccggtgggggttagggagtgaccgggagggccaggtggatgtccccccgggtaaatttttcagaggggtccaggatgccttgccctgcagaagattccccaagggcccaaaacccaagggtctggggaaagttctgttgtggggttgggcaccccgggttcccccctattatttggacaacttggagggccaagacaggagggatcccttgaggccaggagtttgagacaagcctaggcaaaaaacaaagactcgnnnnnnnnnnnnnnnnnnnnnnnnnnnnnnnnnnnnnnnnnnnnnnnnnnnnnnnnnnnnnnnnnnnnnnnnnnnnnnnnnnnnnngcttgagaccaannnnnnnnnnnnnnnnnnnnnnnnnnnnnnnnnnnnnnnnnnnnnnnnnnnnnatgtagcaagatcctgtctttacaagaaattttttaaaaatgagccaagtgtggtggtgcatgcctgtagttccagctactcaggacactgacgtaggagggttgcttgagannnnnnnnnnnnnnnnnnnnnnnnnnnnnnnnnnnnnnnnnnnnnnnnnnnnnnnggacagaacgagaccccatctcaaaaaaaataagttctggttgtcattgaattgggataaacagagagcttgatgctttctgccttctgtctcaggtgatgcattgcacatttgggatatttggaaaggaaatgaggaaagaaattagggcctcctctgatctctcgctatctgcgggtcctgtccttttctcaagaccttcaccattactggtgttttcctgtcttctctttagtatgatccctcaaaacctcactaactggaaggatgattttgtctcagtttgtactcctaaataaaaagtaaacatgacacctctaaaagaaa

SEQ ID NO: 77006 - DNA, 969 bp, Homo Sapiens
cggtccggaattcccgggatatcgtcgacccacgcgtccgccgccttttacttcggcccgcttcttctggtcactccgccaccgtagaatcgcctaccatttggtgcaagcaaaaagcaatcagcaattggacaggaaaagaatggcattgaagcagatttccagcaacaagtgctttgggggattgcagaaagtttttgaacatgacagtgttgaactaaactgcaaaatgaaatttgctgtctacttaccaccaaaggcagaaacaggaaagtgccctgcactgtattggctctcaggtttaacttgcacagagcaaaattttatatcaaaatctggttatcatcagtctgcttcagaacatggtcttgttgtcattgctccagataccagccctcgtggctgcaatattaaaggtgaagatgagagctgggactttggcactggtgctggattttatgttgatgccactgaagatccttggaaaaccaactacagaatgtactcttatgtcacagaggagcttccccaactcataaatgccaattttccagtggatccccaaaggatgtctatttttggccactccatgggaggtcatggagctctgatctgggctttgaaaaatcctggaaaaatacaaatctgggtcagcatttgctccaatttgcaaccctgtactctgtccctggggcaaaaaagcctttaggggatatttggggaacagatcaaaagtaaatggaaaggcttatgatggctaccccaccttgtggaaaatccctatccagggatcttccagctggaacatactaaattgaaccaaggggaaaagatggaccaaattttcttttttaagatgggaccagggtaccttcccctggaaaaaactttcccttaaccttggccctgtgtaccccgaaaaaacagaaaaatccccccccggttgggttattttttccaaaattggcc

SEQ ID NO: 77007 - DNA, 1011 bp, Homo Sapiens
cggcagaaatctaaacagacttctggaccactactagcatgctcattcagtgttgattcaatacacgaatctcacgaaatccgcttcaagctatgtagtccactcttaacccgaccaggctcttgcaatcgaaaaacaacggggattttcttttctgtacaggcagctatgaagttatcagggagtaactgtccatctaaaagaaactggtcatctttcccttgatcaattagtatgtccagctgagatcctggataggatttcacaaggtgggtagcatcataagccttccatttactttgatctgttcccaaatatccactaaaggcttttttgccccagggacagagtacagggttgcaaattggagcaaatgctgacacagatttgtattttccaggatttttcaaagcacagatcagagctccatgacctcccatggagtggccaaaaatagacatcctttggggatccactggaaaattggcatttatgagttggggaagctcctctgtgacataagagtacattctgtagttggttttccaaggatcttcagtggcatcaacataaaatccagcaccagtgccaaagtcccagctctcatcttcacctttaatattgcagccacgagggctggtatctggagcaatgacaacaagaccatgttctgaagcagactgatgataaccagattttgatataaaattttgctctgtgcaagttaaacctgagagccaatacagtgcagggcactttcctgtttctgcctttggtggtaagtagacagcaaatttcattttgcagtttagttcaacactgtcatgttcaaaaactttctgcaatcccccaaagcacttgttgctggaaatctgcttcaatgccattcttttcctgtccaattgctgattgctttttgcttgcaccaaatggtaggcgattctacggtggcggagtgaccagaagaagcgggcctcgtgccgaattcgccacccaggcctcgctaccttg

SEQ ID NO: 77008 - DNA, 1113 bp, Homo Sapiens
  misc_feature (1014)..(1027): n is a, c, g, or t
aaggtagcgaggcctgggtggcgaattcggcacgagggtagaatcgcctactcatttggtgcaagcaaaaagcaatcagcaattggacaggaaaagaatggcattgaagcagatttccagcaacaagtgctttgggggattgcagaaagtttttgaacatgacagtgttgaactaaactgcaaaatgaaatttgctgtctacttaccaccaaaggcagaaacaggaaagtgccctgcactgtattggctctcaggtttaacttgcacagagcaaaattttatatcaaaatctggttatcatcagtctgcttcagaacatggtcttgttgtcattgctccagataccagccctcgtggctgcaatattaaaggtgaagatgagagctgggactttggcactggtgctggattttatgttgatgccactgaagatccttggaaaaccaactacagaatgtactcttatgtcacagaggagcttccccaactcataaatgccaattttccagtggatccccaaaggatgtctatttttggccactccatgggaggtcatggagctctgatctgtgctttgaaaaatcctggaaaatacaaatctgtgtcagcatttgctccaatttgcaaccctgtactctgtccctggggcaaaaaagcctttagtggatatttgggaacagatcaaagtaaatggaaggcttatgatgctacccaccttgtgaaatcctatccaggatctcagctggacatactaattgatcaagggaaagatgaccagtttcttttagatggacagttactccctgataacttcatagctgcctgtacagaaaagaaaatccccgttgtttttcgattgcaagagggttatgatcatagctactacttcattgcaacctttattactgaccacatcagacatcatgctaaatacctgaatgcatgaaaaaactccaaataagagaatctcttcaggattataaaagttgtaaaatgcaactgtattgctgagcnnnnnnnnnnnnnnttcaaaacattggattttatagtgctaaaagggctttattctatagttgaatcacctctgaataaagatataaaacctaaaaaaaa

SEQ ID NO: 77009 - DNA, 840 bp, Homo Sapiens
  misc_feature (557)..(586): n is a, c, g, or t
attaatttggggaaaggggtgttagcattagtgccatgatatctactggattttaagtagggagactttatttttaaaggtaggttgaaatttgggagatttctcggcaggaagggctgaaatccaggcccctgtctcaacttggagagaggtgacagacggcagatcttccaaatcaaattcctttccagttcttcccctggctgcctttttgggggtccctgccttagccccacacaaggctttctgaactgccaagaggggatctggcttctcaactgctcggcctcttgggccaggctgtgcccagccagccctgggagaactgggtagcaggtggctgacttctttaagcacctttctaaataccagcagaagaggctcccgcctctgttagcatgatcagtactattgtgacattaaaacaacaacaataagatcttcctatctggagggtacagaggtgaatggctttggttttcatttctcttcttcactgccttttctcggtgtggtatttgacaagattttagctcaaagcctcaccatgaattgannnnnnnnnnnnnnnnnnnnnnnnnnnnnnggacaattttagatacctgagtgcactttttcagttagtcctaacttttaaaagaaggaaaaccaagagacatatctggtgtacgtgttgcagtatgaactctggttgcaatccctccccctcccacactgccccccatttgagtacgccgcacaagtcaaacgctaggaagtttgaataaaaccaatttttctaacttgttgctcatttgttgtaactcaataaagcaaagactaaacatttttataaaaaaa

SEQ ID NO: 77010 - DNA, 693 bp, Homo Sapiens
  misc_feature (232)..(256): n is a, c, g, or t
  misc_feature (549)..(549): n is a, c, g, or t
cccagcattgactatatttgaaagagctacacttggagaaggtaccatatcttcacatccacactgcatcagagaaccccagaatggggtactaaaaataaacacccctccccaaaaaacgcactcaggcatgcacacacatccacacgcatcctctcagttcatcagggcactataactgagcttcaggggtgagagccagagctcaaatgctggaagtaaacctttgacnnnnnnnnnnnnnnnnnnnnnnnnnccagagaccttccaactcctcttcccttccagagagaaggtgatgaagacaggagcagaggtgaggagacacagggccaccacactgcccaatcccagggaccccactcccactgaatagatgtgaatgatggcccttcaagttgtgcaatcacagctgcccacctgtaagctgcagccctgagaggggttcccaggagtagctcctaacagaaaaggaaattcgacttccatgctccaccagttgccctgactattgagggtgttgtggcacattacaagggggtctggcanaggagctggctttaagacgcaagcctatgtgtttgcccgtgccctgaggtggatcacaggtagtgaatgagctgcctgggcttgacccatttcatctattcagccaggaagctcagcaggaataaaggatatggcctgggcagg

SEQ ID NO: 77011 - DNA, 676 bp, Homo Sapiens
gatgcaataacagtggtttcccacttatggttctttgcgatggatctgtcccatgtcagtctggggttttattcagcttgtgttgctaccagcagttcacaggtaaagcagaaattctctttagccagcaagtttctgctttttaaggttacttttagaataaatcatcagggaaacagagaggatgctttgctttgggttgtagtcaaaaactgattaaataatttaatgtctctggcacacactaaaaaccatacacttcagttgtgatctcagtggcatatttatttggttaggtttcgttacatttattattacagatgttcagttgaccaagtagttcagtgttttctttcctttttttggaaattttagtttgagtttgtgactgcagtgttcaagaactcagcatccttgttttctacaaatactgattaaaataaaatgctgtaaaatgtgatgtaaaacattatcatgatcttcccatgcctttgttgtacttgtgccgaagtgttttgatattcctttgtctggaagaaaatgtttgctttcattttgatcattttgttcaccttggaatcaacaggttttgatattttctcttggaagattttatatctttttgggaatatgtaatataagatctctaataaaagataatcttatcatgtaaaaa

SEQ ID NO: 77012 - DNA, 797 bp, Homo Sapiens
  misc_feature (42)..(42): n is a, c, g, or t
  misc_feature (223)..(223): n is a, c, g, or t
atatatgatccagcatagccagctggtggtattggaggatcntgcatgaggatgcccaataaggggcaggtacacatacctggcaaagtgatgatgatgtgaatgtttccagtgaggggattgagtcaaaacttgaatctcaggtacctcaatttttcccccaatttctggctactactaaaagccagaaagaacagaacagtggcctcaggagatctgagtntgaatccttgctctctaggatgcaggtggcttgaagcagaatgccacacctgcaagttgattagaactgcctttcttcccaggcttgacataggtattaagtcaaaattacatgaaacccagtggtaaaaaagcctctgaaagctgtaacaccctcagtaataacaaaagggatttttatttcacagctaaagggaaaataggtggagaagttaaaaaataatgtctgatcctgttcctaagttccaaactatagccaacactctgatgctgctctttttcttgtaggaccaaccgtcccagtttgcctgggactttctcatttttacagagtcccaaatcctaggaaactggagcaactggtacaactggtcacctactcttgcccctctgtaaatcaagccaactgtgaccatccaatgtgccatcttacagggaaaagttataaccactattcccctataacataatgctaatgattgtacttagtacatttttatacttttatgatattttactgattggaaatgtcatcctttattaaaaataaacatggttttccatagttgcctgcc

SEQ ID NO: 77013 - DNA, 384 bp, Homo Sapiens
cactttaggtatctcttaggcaaatagagatataaattgtaataggaaacagtctctaaatgtgaggctgaatacagcttcagtctggctctctaataggacaaaagccagtccatgtgttgtctctaactgatttagctttttcttttctttgaacaattcggcatgaattgaaaccaggttttcctgtggaaagttatagcttgattgggagatagaagttgaattgagttctttcttgcaactcttagtgtttatttttatatctcagtaagacgaggataccttcagtttgaatctgcataatgttcactgccaaactccttctcatttaatgcttatggccttcacatttctgtataataaagatcaattatcagctct

SEQ ID NO: 77014 - DNA, 1021 bp, Homo Sapiens
  misc_feature (66)..(66): n is a, c, g, or t
  misc_feature (540)..(548): n is a, c, g, or t
ggttattatttgtatttgatgaaagaaaatccaaataaagcccacctagaaatagatattttatantatatgtgctatagatatacctatatagtacaaatagacatgtgtgatgcatatatacaatgttatatatgtgtatatgtctgtatacacactgagtctgtaatatgtatacactaaatttgtgttatgctaacatcttcagggtctgcactgtgaactcccctggagataagtaagtccactttagaataaagaagttcttttgagacttcagttactaacgtgctttaagaggtatctactttataactgaattctatgtcgttcatacgtagagttacagtaagggtctagtatgtccaaatcttaataataaagaagaaaagtaaaggcttcaagctagcaatgtattcgaattacagttttcagattgtggctccaggccttgtgtttctcatttaagtagcaccttttaataaaaaccgtttctttgtgtaggcaaaagcacaagtgtttcaaatgtaaatagcaggnnnnnnnnngagtttacagagatagcattgctgcagagaataattgctactgagtatttcttatagaatttgtggaactgaaagatgaggtttattctgtcaagttcaagttcattctgttcaacactgttttcttattgtttgtgtatagcaaccgggtattattgttttatcatttgtaaaattgtaaaataaattaatccctttttttcactgtttctcttatctcatatatccaagcccttggttatactttgtatgtcaatgttaggtgatcatttttaacaagctttggcttgtgctttgcttttccactccccttagccctagtggttggcaattaggcaaaccatttatttttaagtgtatacatgggaatatgaacaatgtcaaaaaccccatgaatattaggaaatccttaacgatattttgtgtagcacattctgtttgcggttgagggaataaagtatttcacaagtgaa

SEQ ID NO: 77015 - DNA, 577 bp, Homo Sapiens
gagatggttggttaaggcggggtttttctggggcgtgaggcctgtgagatcctgacccaagctcaggcacacccaaggcacctgcctctctgagtcttgggtctcagttcctaatatcccgctccttgctgagaccatctcctggggcagggtccttttcttcccaggtcctcagcgctgcctctgctggtgccttctcccccactactactggagcgtgcccttgctggggacgtggctgtgccctcagttgcccccagggctgggtgcccaccatgccccttcctctttctcctcctacctctgccctgtgagcccatccataaggctctcagatgggacattgtgggaaaggctttggccatggtctgggggcagagaacaaggggggagacacaagtagacctcaggtagaacgacactgggcggagccaccccagggcctgctcccagggagtgctcgaggcgcatcaggcccgttttttaccagtttatatcacggtcttcatttttaaaagtaacgctaactttgtacggacgatgtctcatggattaaataatattctttatggcagta

SEQ ID NO: 77016 - DNA, 1350 bp, Homo Sapiens
  misc_feature (184)..(197): n is a, c, g, or t
  misc_feature (891)..(976): n is a, c, g, or t
  misc_feature (1006)..(1024): n is a, c, g, or t
  misc_feature (1081)..(1169): n is a, c, g, or t
aagttttaatttgttgaaatgtgttgtttccaaaaagactgaaaagccccaaagtttagatttaaagacctagacttcggcacgcgaaatcccagctatgctacctcttatttacctgaaaggaggacacgcaggatgggcagtcatgctggtgactcttgtactcccttgagggacattggtnnnnnnnnnnnnnncgtggccccaggcaggatgcccagtctttgagctgaaattgaaaggcagtgaggctgagggtgccaaaatttccccagggttcacccaaaggggaaggggctacatgcccccagctgtgtgcagggaggacacatcagcccactaccgctgccaacaccaatgcctaaaacttgtttcatacattggggttttctatatatttcagttgggaaaagcttacatttaaccttttgaaaaaataaatacgtgattagcctcaactaaacattgctgactataaagacagtatattcaccatgtcgctggcaatatgtcattgcgtaacaccaaataaccccccagaagtagccagaggccagtttgaacatcacaattctaagtgttttagtaactatttctggcgtgagtcaacagatcatgtagatagagtcaattattgtttgtggagtttttcagctataggggaggggaactattaaaatccatttgtttctattcaataggtaataaaaattagttgtccctgggtttgggaaacttaaatgcccattacagccctggggaagggttttctgtcttatggagtgagtcttagcatttaagttatacagttgctgccttaaaatagtagcctgctacaatgacttctttgggtagccattttcataagaaataaaatacaagatatgagtnnnnnnnnnnnnnnnnnnnnnnnnnnnnnnnnnnnnnnnnnnnnnnnnnnnnnnnnnnnnnnnnnnnnnnnnnnnnnnnnnnnnnnccttggcggcccccccggcccccaaaaaannnnnnnnnnnnnnnnnnnggggcgggggccccaaaggaaaaggaaaagggccaaaactgtttccaaagaaaaccnnnnnnnnnnnnnnnnnnnnnnnnnnnnnnnnnnnnnnnnnnnnnnnnnnnnnnnnnnnnnnnnnnnnnnnnnnnnnnnnnnnnnnnnnctttacgggatttttccacgggggtcccaccgagctcaatttcaatttaacccccgccctggccttttttgaaaaaagggtggaattccttaaacattctccccaaaggggaacccctccccaacgggttttattaaaccggaaatcccccggggggattaaaaaccctttggcccccttt

SEQ ID NO: 77017 - DNA, 1085 bp, Homo Sapiens
  misc_feature (66)..(67): n is a, c, g, or t
  misc_feature (134)..(134): n is a, c, g, or t
  misc_feature (231)..(232): n is a, c, g, or t
  misc_feature (241)..(241): n is a, c, g, or t
  misc_feature (249)..(249): n is a, c, g, or t
ccggaattactcgtggatccgaaattgatgacgagttctttcatgcttatcagttgacagtagctnncgtgatatgccctgatttgtgagcctactgagtatcatccagaggaatggattccctctttctagtntgtgagatgatttgtattagtgacacatcaaactactctatcacccgagaagtaacaagatgtgaggattctagaagcataaaaatgcatctatatnnggagatgtntggaaacntacaagcctcacaatgcacgtgggagatgaagtcaactggtatctgatgggattgggcaatgaaatagacgtacacactgtacattttcacggccatagcttccaatacaagcacaggggagtttatagttctgatgtctttgacattttccctggaacataccaaaccctagaaatgtttccaagaacacctggaatttgttactccactgccatgtgaccgaccacattcatgctggaatggaaaccacttacaccgttctacaaaatgaagcatcttctgagactcacaggagaatatggaatgtgatctacccaatcacagtcagtgtgattattttattccaaatatctaccaaggaatgaccaggagaataagatcctccgatgttcgcaatggtgtggtgtcaggaggctgcctcttagacaatctccagatgtactgtgatgtgagtttgaaaaagagttcctgaagtaccacatctgggagacatgccactagctgagcttcccaaaagtctaccaagagctgaggaattgtatcttcatccttagcacaaagcaccttaaaaacagtaaaaggagcctctatattccagataaatatagcactgataaagcgacagctgggctgaatatcacagcatcacatgggccacgcaatcaataatttaccattagcattagcgccatggcaaaagcaaatttagacatttttaaaaggaaacagattctaggatgtacaaataaagtttctacagatatagtcttttaattagtacttttatcttataaactgattatgtatgtctgttttttcaataaacaaacaaatg

SEQ ID NO: 77018 - DNA, 1331 bp, Homo Sapiens
  misc_feature (120)..(120): n is a, c, g, or t
ggaaagagtctcataccagcagatgtcaatcattagataggagagttactggctcagtacagaagtgtatcgcagttatgatacactccgtgtccagtggggagaagctgagagacatcntggatctagtccacactcatgcagtgtgggagacaagtcaaatatctttaaaacatgccacaagccctactcatacatgccaatgggtacaaacagagagtctacagtactccaacataccagtgagaactctcacttacgtatggaaaatcccagaaaaatctggagctggaacagaggatctgcttgtattccatgggcttattattcaactgtggatcaagttaaggacctctacagtggattaattggccccctgattgtttgtcgaagaccttacttgaaagtattcaatcccagaaggaaactggaatttgcccttctgtttctagtttttgatgagaatgaatcttggtacttagatgacaacatcaaaacatactctgatcaccccgagaaagtaaacaaagatgatgaggaattcatagaaagcaataaaatgcatgctattaatggaagaatgtttggaaacctacaaggcctcacaatgcacgtgggagatgaagtcaactggtatctgatgggaatgggcaatgaaatagacttacacactgtacattttcacggccatagcttccaatacaagcacaggggagtttatagttctgatgtctttgacattttccctggaacataccaaaccctagaaatgtttccaagaacacctggaatttggttactccactgccatgtgaccgaccacattcatgctggaatggaaaccacttacaccgttctacaaaatgaagacaccaaatctggctgaatgaaataaattggtgataagtggaaaaaagagaaaaaccaatgattcataacaatgtatgtgaaagtgtaaaatagaatgttactttggaatgactataaacattaaaagaagactggaagcatacaactttgtacatttgtgggggaaaactattaattttttgcaaatggaaagatcaacagactatataatgatacatgactgacacttgtacactaggtaataaaactgattcatacagtctaatgatatcaccgctgttagggttttatgaaactgcatttaaaaaaagatctatgaccagatattctcctgggtgctcctcaaaggaacactattaaggttcattgaaatgttttcaatcattgccttcccattgatccttctaacatgctgttgacatcacacctaatattcagagggaatgggcaggtatgaggga

SEQ ID NO: 77019 - DNA, 739 bp, Homo Sapiens
  misc_feature (679)..(689): n is a, c, g, or t
ttctgctgctccgagtcagggcccaggtgcagctctccggtggacacagaatgcagccatgctgagggcagccggagccaaggccctgagaaagccttcagcccggcttctccatgtgcctggaacgtgtgtgtcaccaggaaggcccccctgctggcctctgacagtagctcctctggggctcccacagcgaggatggcgaccagaaggcagcgagtgccatggatgcggtgagcaggggtcccggccgggaggcccccccgctgcccacagtggccaggacagaggaggctgtcggcagggtcgggtgtgctgacagccggctgttaagccctgcctgccccgcgccaaaggaagtgactgctgccccagccgtggctgtgccccccgaggctactgtggccatcaccacagcactgagcaaggctggccccgccatacccaccccagcagtctcttctgcactggccgtggcggtccccctagggcccatcatggcagtcacagcagccccagccatggtggccaccctggggacagtgacaaaggacgggaagacagatgccccgccagaaggagctgccttaaatggcccagtgtgatgctgctgccgcccggccacggcccaccctggtcaggctgcctccttaatcgagaaaactacctggtgatgcaatcnnnnnnnnnnnaatttaatttaattttaaaataaatgctgcattggtaaagctggcagttg

SEQ ID NO: 77020 - DNA, 591 bp, Homo Sapiens
  misc_feature (526)..(536): n is a, c, g, or t
gccaccccacaaagggcaggagtgagaggggccaaagatggtgctcccaggccgcctggacctttttgtccagctggtccttgggcatgaggcggggtggcactgagggtgggggtgcccgtaaccggagtccatgtttgccacacagggtcgggtgtgctgacagccggctgttaagccctgcctgccccgcgccaaaggaagtgactgctgccccagccgtggctgtgccccccgaggctactgtggccatcaccacagcactgagcaaggctggccccgccatacccaccccagcagtctcttctgcactggccgtggcggtccccctagggcccatcatggcagtcacagcagccccagccatggtggccaccctggggacagtgacaaaggacgggaagacagatgccccgccagaaggagctgccttaaatggcccagtgtgatgctgctgccgcccggccacggcccaccctggtcaggctgcctccttaatcgagaaaactacctggtgatgcaatcnnnnnnnnnnnaatttaatttaattttaaaataaatgctgcattggtaaagctggcagttgaaacc

SEQ ID NO: 77021 - DNA, 1308 bp, Homo Sapiens
  misc_feature (38)..(38): n is a, c, g, or t
  misc_feature (94)..(94): n is a, c, g, or t
  misc_feature (140)..(140): n is a, c, g, or t
tcgtagtctggccagacgctgcacttgtagcgggttcntaccacagccccattgcagccatcgcagatcacattgggtgcatctctgtgtgctnccaagctcgccttcccatcttgccctccacgctctgggccattctntgagcaactctctgaagcatggggggctccaaacctgggtctggccatcacccgggcagcacagcgagtgtcactgtcctcccagatgtcctcgtcctcatcatcatcaaagggctggatgcggtcactgcagcaggcctcaaacagagctgcgctgggactgtcctcgtcagcgtcgatgttgaagttgatctctgcgatcctgtcaaacggggcattgatgttgtcgtcctggtcggcaaactcctcatcattgaagccaaactgatccacgaagttggctgtcatctgctggatctggtagtcagagaaggcctgctgaagggacagctcgttagggaaagcaccctcaatgtcctcgtcctcacttgaggagtgaaggtggtgagtgctcaccaggtccacagtgttcctgcggttcgtctccgtcagcgtctcctccacgaagctctcccagcggccacggcagtccgcagggagccctcggatgacctcgctgatgtgcgtctgcacagggccccgctccaggttctgcaccaccgcgttggcgatccgtgtgaggtggcccatgttcccacgtctcatgccacccgctgcctgcgtgtggtcgttggcttcccaggcctccaggatcctctgcaccaggcagcacttctggaacaggtgggtcaccattgtgttgtcagggaggctggcggccggctggggagtctccaggctccggttcccgttctcatgcggaggctccaccctgctctcggatccgctggcttctgtcctctcctcacgggcagcgtgggagagaatagcggctatgcatagttccacttggaagtgcaaaaagttattccaggtgtacttaaagaacaagtccagcagtaagtccatcgtgttgagccggcacgagctcctggttgatgcctgggtgtgtttgtgtgcagcagtgctgccatgaggcgggcgccatgcagacgggcattccccaggggctcctccagcacaccaatggtggtcaggatcgctttcttcttgggcgggttgagcaggagctggtggaagtccttcagccgaggctcgatgccgtgtagtacgctgctgcgacgcgtggtcgacgatatcccgggaatccgaccgtaccagcctgctttttgaccactgttctatattc

SEQ ID NO: 77022 - DNA, 734 bp, Homo Sapiens
  misc_feature (36)..(36): n is a, c, g, or t
ttttcttaatagtacagcagactttagcttcaagtntcataggcttagtacttatatctagacatttgtgtctaaataagcttttcattaactttttattttaaggacagtatcttttcatgaaagagtatttggctgaatgtttgctatatatatgttacttgaaatgttaaatttaatatgcagcataccataggtgtatatataggtatataattttaaggttaaaatattcagtctacaagtttggttcttatttaagcttttgggctaatactgcatatggcacaatgtttaatattggcaagttcatctcagagaaaggggattcagatataattttaaagtagagataatttactgaagcgtctctgacaatctaacttattagacagcaagcaatatataatactgaaaaagtattcagaaatggaaaatttacatcatataggttatttaacttgtgttcagcctttttgtaacttttttgaaagtgcaaacaattctttggattattaaataaggtatacagtatgcatggtttctcaaatttagttttaaaatctaaaagtctataaagaatcagatgcataggcaatatgttaagttcacttggaggctaaaaatctccagtgaaaacaaaacgaaaacctttaagagaatgtagagtttatataaacacaaagtatgcattgaagatctgtttctaccaataaacattaaaacaaagactg

SEQ ID NO: 77023 - DNA, 1713 bp, Homo Sapiens
  misc_feature (933)..(954): n is a, c, g, or t
  misc_feature (1137)..(1164): n is a, c, g, or t
  misc_feature (1610)..(1660): n is a, c, g, or t
tgtcattgacagaaccccagtttgtatgtacattattcatattcctctctgttgtgtttcggggggaaaagacattttagccttttttaaaagttactgatttaatttcatgttatttggttgcatgaagttgcccttaaccactaaggattatcaagatttttgcgcagacttatacatgtctaggatccttttatcaaggcagttatgatcatcgttttcctgccttgaccccaccatcatcaaacactcagttaaatataaattaacattttttagatgaccactcaacataatgcttaagaatggaatttcctctctgtgacagaacccaggaattaattcctaaatacataacgttggtatattgaagacgaaattaaaattgtccttcagttttgaggccatgtgtaaagtttaaccatattgtaaaatatctattccgtattagaaatagctagttgacagcttatacttctcaaaattcatattgttatgtacacaaactaagtttctatatgtgaagttagtgagtctttttgtgttactccaaaataaaggcaatgatttatttttttcccagtgccaatacaattttgagctaagcactcaaggtggatactttacattttaaagctggaatcagcaacagccctatgggaaaccagacaaagcattgacttttaaatgtagacttttaaaataaactgttttcttttggaactacaattagaatagttaatattcatccttaaaccattattatgtgtacattattgttgctattgtgataatagagaattttatttatttttatgccagcttatattgtgagaacacatttagtcagtttgggttttatcaatcctgttaatgcttgtccttggaacatctttcgcgtattcacggtttgtagttgaaaagtttactgtnnnnnnnnnnnnnnnnnnnnnntgtattgtttttacagaataaatttattggaatgtgtactgggagtaagatttgaggttgtaagcaaactaagttagtgtaatttggcttcatatatgtaacgtgaggtattaatgtaattcatatattaaagcaaaaattgttcacagcaagctgacaatagaatcaagtacaggtgagggnnnnnnnnnnnnnnnnnnnnnnnnnnnnaaacactctctgggttttagattatttgaaaacactgtaggggatgatggggagatgactacatgatttgcttacacttacatatttaccagcccagtggaccctagattttgtaatttgatattatccatgcattgatttgtatcccattttcttttggtttttttgatgagagctaataaaaacatgagaaaatgtgagcagacctaaaagcctagggccgttaataatgatgatggtgatgatggcagctaagggtatgaaagcaccagtccatttatcattccagggcacagtgaggaggtggctgtttggatttttggtgtgtttctttcatttagtgaatactgattttctctagtatactcaacatacaatcccaaacatgaaaagttcataaaaagatagtagggatgtcgatctaatacttcttccttaaaaggtcnnnnnnnnnnnnnnnnnnnnnnnnnnnnnnnnnnnnnnnnnnnnnnnnnnncatcaaaagacctcttcattgctcacactgaaacataaggggaatgtagatgg

SEQ ID NO: 77024 - DNA, 1134 bp, Homo Sapiens
  misc_feature (595)..(603): n is a, c, g, or t
  misc_feature (1107)..(1107): n is a, c, g, or t
ttgggtctctcacgtcttgatctgctcttcttgcggcggttgtcacgttccacctcctccttggtatcttccgttccctgtcccttatccagaccggcccccttgggacatgttttgtgtctctgtgtgttcatcgtcacactggtcagttgcgccatagcttcttactgtaataagttcatgtcccaccaccgggggatttttgggacgcagatcatggcaaaagggccaataggctaacgggtaaccaatggaaacctattactattacctttctctcttaacccattgtcaaatccataaaggtgaagttcttcttaagcccaatattagcttcacatcccccctgttgcagagtacatagtgttctaactctaggtattgcttttaaaagaattcactagtaactacaacatattataagaatagaaggttagtaacttatgccacgaaattccaatgctggcatttcctgaattccctgaagctcctgctaccctttgctaatccttttagactctgtaaaacttaccaatgacattaacgtgctttgcatctgatttcttatggtacattctgattcttcttatggtannnnnnnnnagaaggtagaggagaaaaatacccaaatacagcatcaggtccacttcatctcggatgttaaacagttgttgctacatactctttatacagagaccagctatgaaagacggcactttcctctcggatttgcaagtgcctgtagcctcagaggccacataacttttcatattcttcccaacaggtttctatgttcacccgttatttgactaaaccagaaaaaaaggcgagggagagagatttttcccactgaactcttaataccttcagatgcccagaacacctcatggtgggtatctatctgaaatgcctctgtctcaaaggagacattttgcaaagagttattaattaatgcaacaaggagaccaactaggtcaccttagtagtatttataaacacaaagggacatgtcaattatctgtgctgtgggaagtcaacaggagcaaactcaagaaagaaggcagaagacgtaaaataaaagaaaagataattttaatacttctgtcntctatttttaaggacaagtttttaatg

SEQ ID NO: 77025 - DNA, 684 bp, Homo Sapiens
tttggggctgaccataaactggaaatttgtgaaatggcagtgattgggcaatcttcagtttattttttcagttgaagtggaactcatttctggaatggatttaataggctgtgtctaatgtacaaactgggtgagtcctgccttagtgtgtcctgccccaccggtacgcttccaggatactcttttcccctctgtaaagtcactttcttctgatggccagtgtcactatgatgtcagtgaggtctggggatgaggacagtgtgtcctgaaattcacaggactgactcctcaccccagtgcacgaggattcctgtggcatcaggtgctgctgtacctggtgtaggagcctaatcattgaaccattgtgttactcacattccatgtcacagaacatatcagcctcaagaaggatttggtggaggtggatttaccactggttttacaaaggaccgtgtaaagtcattgaagttgtgaaagtctattttttttcctgtaaatctattttttacagaatataagaaacatcaatgacctgatctgtccttcctcctccttcccgcttcccccaaaatcacattccagtttttattgtctttgtgtccaaagtaaactaggtgacttatttgtataaaatgttattttgccacatgagacagtaataaaagaaagattttcacagtaaaa

SEQ ID NO: 77026 - DNA, 459 bp, Homo Sapiens
gggggtccaggcacaggaacagccaaacgcccgaaccagcggggttacctttgccacttcatccaatccgagcatcggctgacaagtttatttaatccctgaacctggatccaaggcatctccctgtagaaaacatcagaccggggcagagattgacaaagcaacccaaagcagcagctgccaacggccgctgtgcccacctcatcagcagctaaagagtataattttaaaaaaagtcacagaagaatgtggagacacttagcaaaacggactctcataaggttccctattttgtcagtaaggaagtaaacaaccgctaaaacaaccctctaacaacagaagaccctcatgagaacaccaggcagcagaagcttctttagcagtaaaagatatctggatattcatattttgttccatgatcttcaacattaaataaataaacttaatattcaaaaaaaa

SEQ ID NO: 77027 - DNA, 419 bp, Homo Sapiens
tcatcttcagctgccaagtgtatttagtccctgaacctggatccaaggcatctccctgtaggaaacatcagaccggggcagagattgacaaagcaacccacaacagcagctgccaacggccgctgtgcccacctcatcagcagctctgcaggggcctcactccaccctcaccaaacacgaggagccagcactcctggcccccattccactggacaggaaggcgtgagaactgagggacctgcctgaggcccccacagctgaggcgcagcggagccctgcctcccagcacagactaaaatcccagcaacacaggcccaccggcacctccagcctgccttgcgggatgatcttcaggcgaatatacaaaatacaaaagaaactactactgtattttgttgccctgtcccttcaacttggct

SEQ ID NO: 77028 - DNA, 959 bp, Homo Sapiens
  misc_feature (103)..(103): n is a, c, g, or t
  misc_feature (122)..(122): n is a, c, g, or t
  misc_feature (235)..(235): n is a, c, g, or t
gtttggattgggcggtacaatccccaggacccctttgctggttcgattttacgactcctgtgggaattggcctcagccaagagtcgcacggggttttcttctnttttttgtcctgacacttntcggaatgctatggccccattatgctgctgaatattttaacctctgcccaagcaggtgtgtagttaagccccactactggtaaggaaaccaagtgtcctctgtgcctgtttcnttgtgtgaggtattttaggatgtcccaaaaaaaattagactttaaaaagttatcttggtacaacaaccgtgtgtatatacacttggaagcttaaaaaggtgttttgtctggaacttagaagcagctctaaatctagtagagcagactttctaacatacctagttttgtgtattggctttgctggagtatgatagcaaaatgaagactcttttactcagctctggtattgctcataacttaccaagaggctaatactaaacttggaaaattgtttaagtatgttttatcaagcagtctgggttttgttttttaatatactttttaatggatatgtgaaaactgaaggaaatgttaaaggttttttaatggtgcaagtgaaggtgccagttgctatttgatatcacactctacaaaagcttcattactttatttgatggtggttgctaagcagccattgcacagagcataagtctactgggtgcctttacatgccagaggctgatgctgcactgttgatgtcatgtgaggaaataatgcacatgctctaactgctcaacaggaaatgaacctagaaacagaaaatgaaaaggttgattgaaataaaacttgatcaacgcgactgtattttgaaacattccaggaaggttacttcttgtcaaacttgcctggcagtgtttgttcaaaacttgtatttaataaatgaacatctgacttacaaaaaaaa

SEQ ID NO: 77029 - DNA, 553 bp, Homo Sapiens
cacaggcccctggatcctcctggaatccctgatccctgttgctcccttgcggagttttctagtccctcttatttgaagcatgtctttcagagcctcgcaccacccagcttgggtatctggtgaattctgtggtctgcatgtccatgtttttgacattctgggaagggtggcccaggctgtgatttgccatctactgctgcaggctatggatggtattcagaagggaggggagatgctgtgtgcgtgttctgaagggtttcccactaaatggagagactgactctctccataagtatttgatttttactttatctcctcgttgacttcacagtgtaagtgcagtttgtctctactgggtgatgcatgcagataaatgtttatgtgaacataagaagtctgcatgtgtgggtgaactctccacatcatgtcatttattgtccatcattacgtatctgtggtgtctagcacattcctctaccttattttctgtcattgtacctacttctacctgaacacgtattaaatatcttattaaaaatacacaaatattaaa

SEQ ID NO: 77030 - DNA, 1088 bp, Homo Sapiens
  misc_feature (143)..(206): n is a, c, g, or t
  misc_feature (615)..(991): n is a, c, g, or t
aatgtgtcaaatcttgaaatattaaatgtatacattttgtgctatgttttgggaacaaatctgtttgatttatatagttttatattgaattttttttgccctgattgtttagggtgataggtcttaagcagcatatatctatnnnnnnnnnnnnnnnnnnnnnnnnnnnnnnnnnnnnnnnnnnnnnnnnnnnnnnnnnnnnnnnnatgagtgtataattctaaatttctaaaaactcattatgaatgttcatcaatttgactattataggccagctttccatttagtcaataaaagcgtacatttttagttacttaccttgaacatattcgtgtgaaaaagaatacatcatttctcacagtcttaagttgatatttatagaaatgaatacctttgtgaacctagacttagaacaaatcctgcttttgaaaaaaatgttttgcttcttacaaaatcatttgtgttaataacaaaaactttattttcggagtgttctttgtataacttttccaagcttttacattaacgagcaggcctctgtcttaaaagggactcagtatattaatttctgcattttttaaatcaaatgaaaaacgtcctcgtgccgaattcttnnnnnnnnnnnnnnnnnnnnnnnnnnnnnnnnnnnnnnnnnnnnnnnnnnnnnnnnnnnnnnnnnnnnnnnnnnnnnnnnnnnnnnnnnnnnnnnnnnnnnnnnnnnnnnnnnnnnnnnnnnnnnnnnnnnnnnnnnnnnnnnnnnnnnnnnnnnnnnnnnnnnnnnnnnnnnnnnnnnnnnnnnnnnnnnnnnnnnnnnnnnnnnnnnnnnnnnnnnnnnnnnnnnnnnnnnnnnnnnnnnnnnnnnnnnnnnnnnnnnnnnnnnnnnnnnnnnnnnnnnnnnnnnnnnnnnnnnnnnnnnnnnnnnnnnnnnnnnnnnnnnnnnnnnnnnnnnnnnnnnnnnnnnnnnnnnnnnnnnnnnnnnnnnnnnnnnnnncgcaggaaagacatgtgagcatatgccagcaaatgtcaggaacgttaaaggcccgttgctgggtttttcatatgctcggccccctgagagcatcaag

SEQ ID NO: 77031 - DNA, 1308 bp, Homo Sapiens
aaggagcgaggcctgggtggcgaattcggcacgaggccggggccacgtgagattccaggatgccttttgtggtgcctatttcacctttgccatctcccatgagggccacgtgtacggcttcggcctctccaactaccatcagcttggaactccgggcacagaatcttgcttcataccccagaacctaacatccttcaagaattccaccaagtcctgggtgggcttctctggtggccagcaccatacagtctgcatggattcggaaggaaaagcatacagcctgggccgggctgagtatgggcggctgggccttggagagggtgctgaggagaagagcatacccaccctcatctccaggctgcctgctgtctcctcggtggcttgtggggcctctgtggggtatgctgtgaccaaggatggtcgtgttttcgcctggggcatgggcaccaactaccagctgggcacagggcaggatgaggacgcctggagccctgtggagatgatgggcaaacagctggagaaccgtgtggtcttatctgtgtccagcgggggccagcatacagtcttattagtcataagagccatctgtcacggacccacgcccagaggaacgtgcagaaaaaagcagagctacatggctgtgggcaactataagccaaatatttggctcagaacaggtgtccatgggacaaaaaagaacgatcctccacttgaccaagaaaaaagtgattctcccagaagcacaaagcatactcttgcccctcaggtgttgcttgtgtacatcgtacccatccattcggcttcacctgcagccaacggcctggaatcgcaaagagacaccactctgggcagagcagagcagggtatggggtggggagagagggtggagggttttataaacaaacttaacagcaatattgaaaggaggtgggggattgagggagggacagagtgttggagggccagagactagtcctgagatggaaacagcaacttgtacagtggctgagaaaataggatatagttttgatttttttaattgtaaaatattttggagggagaacaaaatcttttaacattttgaataaatttagagttttataaaataggccacttgttttctacacattccctgctttttaagggagcacatattatgtgccaggcactgctgggaaagacagaataaactataaacctggtgttgagggtacaacttaagtgatgtcaagatgtcctgaggttccaaccagctgtcagtgtgactgtaacaaaggcttcaaatctgtcaagaagtaaggaaaagtt

SEQ ID NO: 77032 - DNA, 738 bp, Homo Sapiens
cctgactgaccaggggctcttgggctctcaatgcaatagaaactgacatggggccaaaagacttcccagacaaagcacgcgaagggtagaggatataggttagcatcatctggttgtgatgatcatctcgagtaatgggccacctggtggtctggccagcggcaacaaggctgtaaatcaattaattattcagcattccctcccaagatgggacactctgcaatcttggttccctatttggatctcctaaggccagttcctggaattgtttaagtaaaagacatggttaagcattatgagagcacagaagaacaatacagaaaggccattttctttgtatgactaaagcctcgaggttagcaggtatggtgtcaatgaggtagtagtatgggttttgtgatcagtgggaatgcatgaaaaaatgctctagtgggggtgagccaaagccaagcccccttcctactgtctcagaagaagccagacacaaaagaccacatatattgtgtaattccacttatatgaaatatccagaatagaaaaagccacagaaataaaaaggagatcagtggttgccagcggacaggtggaggggaagatagggagtgactgctagtgtgtacaggcatttattttggagtgatgaaaatgttttggaaatagttaaaggtggtggttgctcaacatcagtgaatgcaaccaaattgttcacttcaaaatggttaattctatgtacgtgaa

SEQ ID NO: 77033 - DNA, 674 bp, Homo Sapiens
  misc_feature (22)..(22): n is a, c, g, or t
acgatgagccactcatgtggcntaggtagggaggatgtgcctggagcagaggacccacaagtcctcccgagcctagatcctggctcggaccactgcaagggcctggccggcaggcgtcttcttaactcctctgtcctctatattcagcatgttccttgtcagctgctgggccggccctgccttgcgctagcagagcctctcctggcagcttctcaggtctccctaatggagacaccaggctactaggacactggctggggccaccccctcctgcctaatgcctcaccttacagctggggaaactgaggcctggaatggcccagagtcaccaaggcaaagttggggctggtcccagcctgaggctccagctgatgccctcagctcccagagagggggtgccccatctagctgggtgcaggggtcactgcttgtcagctcagggccctgtgcccgcttgcctgttcccctacatctgtgcctgcacatccagaactgcctccttgccgctgcctccaggaagcccaccttgagccagagtcaagggctgcagcactgcccgatagaacacgcccgccctcactgctgttcttgccttacagccaccatgggaaagctgcaacctttctgttttatttaaagaaagcccaacattaaagggttttcattgcaaaaaa

SEQ ID NO: 77034 - DNA, 954 bp, Homo Sapiens
aagccccggaagccagggtgccaagctcccaggcaagccaaggccgcccttcaaattgccccagccccaaacagggccaagggtggccccccgatggccaaaggagctgaatcccccccaggaagtccccttcgagtgggtgggatttggattttgtttgccattcctttcccctgccccctggtgtgaacgagtccccgatgatgacctggggggagggtgagaacacacccttgagagttgaagggtcggaaacgccctacgtggacaggacacccggcccagcttttaagatcctggagccaggccgcagggagcggctgggtctgaagatggccaacgaggccgctgccaagaaccgggccaagaagcaggaagccttgcggagagtgacggagaatctggccagcctcacccccaaaggcctgagcccagccatgtcgccagccctacagcgccttgtgagcaggacggccagcaagtacacagaccgggccctgcgggccagctacacaccatccccagcacgctccacccacctcaagaccccggccagtgggctgcagacccccacaagcacaccggcgcctggctctgccacacgcacccctctcacacaggacccggcctccatcacggacaacctgctgcagctccctgcccggcgcaaagcttcggacttcttttagagccaggcctgggctgggctcatagacgcttcacagagcctgcagggcagctgtacacccagcagaggactccagccttctcggggcccaggcctgggccagaagctgttgaccataccaggagtcactggagaaaggggctgtgctggggccagactggcacaaggcactcgtgcccacaccacaccccagggccttgccaagctgtttgctgtttaattggccccttgaactgtcattaaagaacacctaggtacagtcaaaa

SEQ ID NO: 77035 - DNA, 326 bp, Homo Sapiens
  misc_feature (308)..(308): n is a, c, g, or t
gaagatgaggaaacctaggatatgtcacaatcccatgccacaaactacttacacttccaatataaaaactatatcaacaatagtttacatcacgttcattgcttgctaaagtaaggtcatgaatgtatcaaaatattttataaaagttaaaatttaggagatccatcatttctcttttcaatccatcactgattcattcaatatatatttatgtgtatgccaggctcttcatcaggtaaagtgtttaggagagatataaagataaaactgatgagaattctgcacttgagctacagcatactttccangaattacagcatgagata

SEQ ID NO: 77036 - DNA, 706 bp, Homo Sapiens
ctgcagattgaccactacgcggcgctgctgggcagcaacagcgagtcgtggggctgggacatcgggcgggggaagctgtaccatcagagcaaggggcccggagccccccagtatccagcgggaactcagggtgagcagctggaggtgccagagagactgctggtggttctggacatggaggagggaactctgggctacgctattgggggcacctacctggggccagcattccgcggactgaagggcaggaccctctatccggcagtaagcgctgtctggggccagtgccaggtccgcatccgctacctgggcgaaaggagagcggagccacactcccttctgcacctgagccgcctgtgtgtgcgccacaacctgggggatacccggctcggccaggtgtctgccctgcccttgccccctgccatgaagcgctacctgctctaccagtgagccctgtgataccacagactgtgctgaggtcttgccaccacccctccccttggggaggtggggaggcactgctggcctagaccagctgctgaaagctggtgaggctgagcccctaccccaacccaagctctgcggaaatcaacagccccagagccacttggagggaggaagaaagggagccggcgttcaaggctatgacagtctgctacgcaaaacattttttcaagtaaaaatagtaagagatgttgttataaaa

SEQ ID NO: 77037 - DNA, 652 bp, Homo Sapiens
acatgtctgtgggtatcacactgagtgtgagttgtgtccacacgtgctcaagcagaaggacttttgtgtccatgcttgtgtctagaaaacagactggggaaccttatgtgagcagcacatcccaccagtgaaacagggtattgctcttcttcttttcttgatcttcctgtctgggcagacttcagagactttgtggcctggaggcctattaagcacgacacagtatcagtggaattgatccataaacctccctgtccacatcttgcccaatggggaatggatctttcaccaaagagctcaccagcattttccacagagatgcaaattctgagcccttggagttcccagtggattcaaggaaggaagtgggaacaaggttggatgcctacttatgagcttgaccatcacagctatcggtaatcagaaatatgaaacaaaatctctgcacaaaagagcaagctcttaagttcacagggtgcctgggctgcatttgaatatcacttcccctctgcattttcccatcacatagaagactttgacctgtgaagctgccatctgttaatactaaaattcccaaataaggttctgtttagaatgtccctttttatgcttcttaattattagcagtaaatgttcatttttatgggatcct

SEQ ID NO: 77038 - DNA, 1202 bp, Homo Sapiens
cagtcgacggtaccggacatatgcccgggaattcggccattacggccgggggttcttccttgctctactcaaccgtgacctcttctctctgactctcgacttgtgttccccgctcctccctgaccttcctcccctcccctttcactcaattctcaccaactctttctctctctggtgttttctccttttctcgtaaactttgccgcctatgagcagccacattgccttactgaaatccagagcctaaccttcaatcccaccgcggctgcgcgtcgtcgccaaagaaatgttcgccatgaaaactaaggctgccttagctatctggtgcccaggctattcggaaactcagataaatgctactcaggcaatgaagaagaggcgaacccaccggaaagtcacaaccaataaatgtctggaacaagtgtcacaattacaaggattgtggcgtcgcttcaatcgacctttactgaaacaacagtaaaccatctttattatggtcatatttcacagcatcaaaataaatcatctttattaagtagatgaaacattaactctaactgtgacaaagaagaccacaaatagttatcttttaattacagaagagtttcttaacttactttgtgtaagtctttatggtgtaagtttataatgcaggggaagtactactcctcaaaatgttgagggaagcttccataacattgatgactggcttcatggcagtaattctcggctgtagttgcataagcattgctcaagaggaaaatccaaaagtgcagcaggagaactcttttccctgaaaaaggaaaaatattgaactcaatgatagcacctaaacttacatttaaaagacagacattccttctacatgtaatgacacttcttgtgttaaactaaaaatttacaagagaagaaagtgaaagcaaatggggtttcacaaatagttgtaaatatagtgaagcaatttgaaataattttcaagcaaagtattgtgaaagtattctaagccaagttttaaatattatctaacagacaagagtggtatatacaagtagatcctgagaagtacctttgttacagctactataaatatacatataaattatagaatctactttaatttattttgtgaacacttttgaaaatgtacatgttcctttgtaattgacactatatatttcttaataaaataattctcaaatttg

SEQ ID NO: 77039 - DNA, 557 bp, Homo Sapiens
tatagatgtgcttgggggaaaatgaaggggagaaagtagccatacaggagttcaaagaattccatgcccttcagattagcccaattaccagaaacatcatgaaagatattttaaaaactaattatttactacagtgtatttcacttgtcttgtgtgtctgaacacacagaagctaattagcaagtttttaagaagtatttaaaaatcttactaggattgacattttttctgaattctgtataaatagcttatagtgagaagtactgtgctcaaattttacatttttttcctttgcaaattctgtaatttcactcaacgattaagtctaccaaagaacacactgcatgtaaaagatgtattacaatctcaaagccagtaaaagaaatcttgcttcactgttcacctgctacaagtaagagtttggtgctggtagaaacatttgactctgatgtctattttattctacataagagccatatgtaatgtactgtaacaaaggagcttcttgtccccttggtcttttaattaaaagaaattccaactgacttttaaacttt

SEQ ID NO: 77040 - DNA, 1293 bp, Homo Sapiens
  misc_feature (63)..(87): n is a, c, g, or t
  misc_feature (254)..(254): n is a, c, g, or t
aagagattagtttacagagaaaaggcttggtggtgggatttttttaaatgtgtgttatgtacnnnnnnnnnnnnnnnnnnnnnnnnntaaaaatgaaacaattaatctagattttaacattttcagaaacttagtgataacattatgaacaattctaaaagccctgtgatttgaaaaatatagaatcattaatggcccaagataggccttcacaccttcacaggtgcgaaaggaaaggccttcacaccctcacnagaggcatcatgcaaaggacagcggctttggcttttccaattttccatctttaggccctggtgagaggcacacttatgcactaaaatgcacatatatgcacatgcattcaaaaataggcatttggtacaatggtgatcttgtacctgatgggctgaaaccagcttaagaacaaatttgttcttcctgatatgataactaggtctccaagagaaaatagaaaggctgctttagtgccttacgcttactaaatttaaatctttatttacctgggtttgagcctacagtctatttatgattacatatcaaaattgattaaaacacttccatttctaaaagttcaaatatacttgttaataaaaggattatcggcattaatactttaatttaaaaaaaagttgtgttctgttttcctttctgtgtcttactccccccacactctccctcccccatcaccatcttcaattctaataaataatgctgatgttcaacagttgcagaaattgtgctattatgtaactgtgggccttgcccctgtctggccctctagatgatttgtagcagtgttattctacactttttaaaagaagcgtcctccttttgtccatgaatcatgtttaccccatacccagtggcagaggtgttctttaaagacttgaatatatgaatgtgtgtgtgtagttacttaaaggttattcctctttgtaataggaaactatatgggatgaacacttttaaactttccgacacaacttccattactaactttctaacagaacttccataactagaaggtggaaaccaaaaccctcatggtagtatttcctctggcagctggtgctgtgggcaactgtttgttcaatcgggtttcttttctttttgcctctaatgcagaaatcaacagaatcactcacacattacaagtacactcacatacataaactaattatttctctggatatctttctgtgttccatgtaaactttatttaccaacatctattgtcaacattgtacttctaccttagtattgggtctgcac

SEQ ID NO: 77041 - DNA, 789 bp, Homo Sapiens
catatttaaatggagagattcctatataaaggcccatgcttcaaacataattatatctttctatatccagccatctggaaatacataggggtaagaagtatttcttgaaatgtccttgtttagtaagttagtaaaaactgggatgactagttgccaagatgtcttgtaactgcatagcagatgacacctggcatggcaagtctcattcacttcagcacaacactctgtacatttcagtctgatattctactttgccatttaaggacaccattaaaatcatagagattttcagtgacattggagtattgtaattattactttcaaaaaattatttttaataggatgattaaaccaatgagaagaaacacacataaatgatattttgcagtttatctgtattaagaaatgcttcttgccaatttctagttttagtttttggattgctacataagactttctttccatttactttatgtgtttttaaaagctgcaggtaatttttaaggtttgatggaattataatggaagccttgtataagttaaatgaaattggtaaaggagagcttactttgtctataatgcattcaggattaaaaattagatttcaaaatgaaatgtctgatttgtaaaatatttaatgttatatcagacttacataaaattttctgtgagaactcaaatgcatttgatttttaatgaatgttctgaatgaaatatgaatttttgtctttcagtctctgtagtttatctcaatatattaataaaaaggtctgttctcactgtaaaaaa

SEQ ID NO: 77042 - DNA, 1136 bp, Homo Sapiens
cttcttcgtttatgctgtcgatatcactactctcacctttgatgtcctcgccgagactgccctctaccacccctctcattgtgcgtattattcgtcggttcgtacatgtatctgctgctgtcttcgacaatttactcttagcttttcacttgctctctcttacctttgcttctctcaaatccgctcgcaaaacgtaatcgattttcttgataacatgtgtgtccttctccaggttatgaattgctacgagtgttctcacaccgctatgaaacactgtcaggacgatgcctgtccaatttcccctatgttctgaacctcaccagctgcttgacttggtacttagaccatccaggctcaatgtgggcccttgaagacatttgacaggtatatcacacctcttgggcgcgggcagcaatacaccattttccacccccacgtacattccgttcgtgtatcacctaatgtttcaaaactttctccacagttcccccatatgtcagttatacctctttttcatgaaagctttgttgctcctgatagaaagtcctgccagttccatcagtaaggggtagcattctgcgagcaaggtcagcgctgcagttgtccctgtgtttgactacgttccccccagagctcattaccctgctgtaatctccaacattggtgggaatgcaccttcctacatctaccgcctgatgagtgaactctaccatcctgatgatcatgttttatgaccgaccacacgtgtcctaagcagattgcttaggcagatacagaatgaagaggagacttgagtgttgctgctgaagcacatccttgcaatgtgggagtgcacaggagtccacctactaacagcatccttgatactgttgcctgcctttttagtcaccccgtaacaagggcacacatccaggactgtgtcttgcctttcagatcttaacagagcagcagggcttaacttgttgattttggagcctcttagtgacctggttgcgtctgtgtcaggaacttaaactttctggttcagtagtgtgttaaacataacactgaataccttactgggatacagatttttgctcagaaatggctatgacactttttctaggctctaccaataaaagccacttgaaggttcc

SEQ ID NO: 77043 - DNA, 836 bp, Homo Sapiens
gtataaaatgcttattttttaatttccaatggtaatttattcttcgagatgcgcgcaagcgctcagggtcaagtactgcagggtcatgccccagctcctgacatcctgggtcccgtcagaatgctccttcgaatgggcaaaggaccctgagagttgtcaggccccttcagtgtgtccctggagaggctccagcccttcatgtctctttcccccgacgacctgcacccgtccttctggactcccccgacaatagtagccatccgtggcctctagggcctgctcttaccaggcgtggtactcattcttatgaccaccgcctcccaaccagctgcccccagctctccctgcccccctcccctctctggcagctagcagggcaattggcggggaggagtgcggactgaggactgaggaccaagggggcccaggccctgccctcctacccggaggggctccgtttgcattccttggtgctctctgagtgcagctggtgtcccgccctgttctgggcggacgcctgtgtgcgtgtgtgtgtgcctgtccagtgtatattgtgtcttagcttccattttaaaaattgttctgtacagagagagatgcagcaggggcgggagggcagagtgggcggaggggagcagccgcacccccagcaccgggtgtctgcggtaggaacaagagggctgagagggtctggtcctggcccaggctcccccttgggctcagcacgaaagggctttcaatgaattaagtgaaaactttttccttttttacaaaaatgcaaaaatcaacaaagctccaaacctattggaaataaaatatgaacttgcagtggtaaa

SEQ ID NO: 77044 - DNA, 765 bp, Homo Sapiens
  misc_feature (25)..(25): n is a, c, g, or t
  misc_feature (45)..(45): n is a, c, g, or t
  misc_feature (56)..(56): n is a, c, g, or t
  misc_feature (111)..(111): n is a, c, g, or t
  misc_feature (134)..(134): n is a, c, g, or t
  misc_feature (142)..(142): n is a, c, g, or t
  misc_feature (163)..(163): n is a, c, g, or t
  misc_feature (172)..(172): n is a, c, g, or t
  misc_feature (405)..(413): n is a, c, g, or t
gccgggttgccttaatgccccttgncctaaattccgggcccagangattgggaagnttgccccattgtaggatccaagggatttatgggatatccatggcccaattttttnaacccaaacccattaggtaaacntgaattcnggcaataccatccagggccantccataccnggatgatggaaaattccataggtcttgggaatggagggctgctttccatggttaaaaaccattaggaaaatccatgatatgtggattgaaatttgaaaacaatgtaattatcttaaactcagaataaagtaccatatttgataaaaatttaacctcatatattcagaagaaatgtctggcaaaatttagcatccatcatgccataaaattcttaacaaagtataaataaaagnnnnnnnnncctaatttgacacagggtattacacaaaaatcacaaagggagactttgtaagctttgcctctgagccaggggacagcatgaggaagccagtggtcaacacttccatccagcattggatggcacagttaggaggaaagtaaaacgaaaggtgtaaaagttagaaaaaagtgaattgacagaagatacggtttacctagaagataaattattagagagttgagaaagatcaacccttgcaagatctgtgtgaagaaacttccgtacatgtagactagcagcaagcagttggaaaatgaaaacgtaaaagattgacagacgcctcaaaggcatcatgtttatgatcccagtctaa

SEQ ID NO: 77045 - DNA, 1068 bp, Homo Sapiens
  misc_feature (265)..(302): n is a, c, g, or t
  misc_feature (953)..(953): n is a, c, g, or t
accagagctgactcctgatgtttacttctttttgctttcatgatacaggtgtataacagagatgatgagaattttgagccttgtttgtggcaattctaccaaaaggggattgcatggcaccaccacaaaatttcataaattaccctgaacatactcagttatttactatttgttcggagcaaagcatgaaacagtcttcaaatacatgagttatagattttgaaagagtgacattttttaaaacataaagtgcaacagtgctgannnnnnnnnnnnnnnnnnnnnnnnnnnnnnnnnnnnnngtaaaatgccatttcctgcgagcagcattatggcacagtgaacataagggaaagcagttttccaacacatatcccagatctttttgctttcttatttatttgttgatgttgttaagggtttaacaaagccttcttcataaactttcaaaatagcttcacatacaaatctgtattgactaggtgtttggatcatcatggctcgctgatctctcattgttcttacaatatctagtggataaactggctgattgcattcaatgagacacatggctgtttccatagtaataagaaccccagttcttccgattccagcactgcaatggacaacaacgggttcttccttgccagccctcttgtttcgtacatgacaaacaaaatctagaaagtcactcgaatcatcagggactccatgctcaggccaggctatgtactggatctgagtgagtggacgactttcatttttctcttggttaaatagggtcatcttcctgaagatataggcagtgtttccttcttcagagtggcaggtaacttggtagcatcgcataagatgaactgcctgtgggttctggcccatattggtgacatttaactctgccacgttccacttgtgtggtcaacattacaaccatagaggagccttgttcccangtcatctgcccaaaatctgtaccagtgtgtggtaatggcccttgaccagccatgtactgatttataatgctggaagaaggaatttccatctaaaaagaaaagggtacagaccgtc

SEQ ID NO: 77046 - DNA, 672 bp, Homo Sapiens
  misc_feature (508)..(518): n is a, c, g, or t
  misc_feature (533)..(591): n is a, c, g, or t
ggattctttactgtgccagcacggggattggatccgaagaaactggctactggggtttggcccccgagtggccgtccctgtgggagatgcaccccattcttgggccccccctcattccctttccgaaaaaggaaaacttgcgtttgagccgttgagctaattctgcaattttctaccaaacagagcgctggtggccccggagcagggctgtgacattggctggtggagcccccttcctgtgttctccctttgttccagcgccgcgatggtgagatcactgttccaagcagggggacggctcgcgataggacaaagagagcaggacctccagactctggggagccctgcagaccttgacaatttgcctgactcattcctgacctcttgtcattttggcctgaaggctacaaattcagggtcagctgtatgcactaagtcaaataatgaatttcttcctccctctcgcaaccgaccaaaattttgacaacgatgatgttcaccagaaggnnnnnnnnnnntcagttttatgcacnnnnnnnnnnnnnnnnnnnnnnnnnnnnnnnnnnnnnnnnnnnnnnnnnnnnnnnnnnncttctctgtatatatgtgcataaagtgtggtgtaaatatactaaacaaacttatatttcaataaaagggagtttaaaattt

SEQ ID NO: 77047 - DNA, 998 bp, Homo Sapiens
  misc_feature (549)..(560): n is a, c, g, or t
cctgacttggcccgggttttcagccactcccctgggtttttcttcccaccacccatcagtttcttttcttggtaacatgtagacaatcatgctgtatatgttccaccatgatgattgggtaatattaggagatgcctcatgggaatttgaccttgactagaaatagagactgagagtgagcaaccagctggaaggtactatgccagtcctagcagaaaaatgtgttaggggcctggcccaaagcagtgttggttgctaacagtgttgattgattttgttctttttcttaccacctcttttctttccctctcatggtacctgctcatggttatgaagctttcaaagtaaagaacacgaaatacctcccaagtattaccagtgggtaccaaaaaaatgtccccttgagtcttttccttgtttttagatgttaattctctcccttggcatccggttagccccccagggggggcagcattgtggagaacttgatatttagttactgatgctcttccaggacacgaaaagaacccatctttgaatatcaatgannnnnnnnnnnnaagtactgttccggggagaaaaacagtctcaaaacttgaacttcttgggaagagaagtgttgggctgagaagtaacattcccaggaaatagtgagaagctcgccctgtgtttgaaaccgtgttggtctctgtgttcctggaagaaaacagggaagcagcatcttttaaagcctgttctttaaggtgtctcgttagagcccaaagtggaatccggaaggcagccagagctgaggctgccccaagactcagacttgctaagaattacgccgccgacttcaaacccagagagcatctttcttttaggcgaaaacgcatatatttattttttgtaagttataccattctttcacattagataaactaagttttgggggatccttttgtaatgacttacactggaaatgcgaacatttgcagtaaaaaaatatatatatatct

SEQ ID NO: 77048 - DNA, 1154 bp, Homo Sapiens
  misc_feature (862)..(912): n is a, c, g, or t
gaaatagggtgttttcttcccgagagaggactgctaaggagggggttaaagggggacgatgtgaaggagagaacctgtggtccttcagaaggcgaagaagaaagaaaggggaagcagtgaagaaagggacggagatactgggacagggagaaaaaagttgtggagagtagcttttaaggagtcatttggtggccatggagtctaacgtgctcttctgagtgcatttataacctcatacccagtgacttgaaggagcctccccagcctcctagaaaaaaactttgatcggaacgtgcccaaaaagcctgctgtgccattgaagactgatcatcctgtcatgggaatacagagtggaaaaaattttataaatacaaatgcagctgatatcatcatgggagtggctaaaaagcctaaaccaatttatgttgataaaagaactggagacaagcatgatcttgagccttcaggactagttccaaagtacatcaataaaaaggattatggtgtcacacctgaatacatatgtaagcgaaacgaggaaactaaaagaaagcccaagaagactatgatcgttatatccaggaaaaccttaagaaagcagctatgaaaaggctctccgatgaagaaagggaggcagtttttgcaggggctgaaaaagaactgggaagaggtgcataaagaattccagtcccttctcggtctttatagattctataccaaaagaagatccgcaaggcagaggctggaagaagaaatgaaacaactagaacacgacattggcataattgaaaagcacaagattatttatattgccaataagtaagaatggatctttaaagtataacaatttcaatgtaggggnnnnnnnnnnnnnnnnnnnnnnnnnnnnnnnnnnnnnnnnnnnnnnnnnnnctatgaagagaataaaaatagtcttaatcagaatgcttaggcaatatgcaaagaataattgagttattcacttacacaagaagaaattttgtttttactagtgtcacgttttccacatataaactattaaatttgagaatatgtgttccagttccacaatgtaattcattattattatgtacttgtttcacataaacattaatttctaggtcctgaaaaataaagtcagcactcagaacttc

SEQ ID NO: 77049 - DNA, 643 bp, Homo Sapiens
aacactgacaacatttagcttaaaggttttccatggagaagagtggtaagagctgtagttagcaaaattggcatcctctttagggtgtcaattctgtgctgctttgcaaattgttgaaacttttgattttctgtttggcaatgctagtcagtgttcacttcttacagattagccaagaatttttatctaaatgcagaaacttattaatgaaatccatttaaactatacttacacaacattttgggaggccctgctggtaaaattatatatggatgcagaagtattgcaagagtccattttccatttttaaatctgcaatatctgattacattgatgaattccgttgtattgtatgtgtgaatataaatatctgaattctcccgggggacttggttttcgtccaaggatgttggcagtggacacttagtttacctcaggaattgcaatcatgtaagactatattcggaaaaaatgctggagtatataattttggatactgatataaaatcatcaagatggaagttaagcagaattgtcacgtgtagtccatagcgcttttatatgcattattctgtaatttgtttgtactgcggcaactttttatactttcaatgtatcatttaataaaaaaaataagcaagtc

SEQ ID NO: 77050 - DNA, 1123 bp, Homo Sapiens
  misc_feature (166)..(615): n is a, c, g, or t
  misc_feature (634)..(661): n is a, c, g, or t
  misc_feature (857)..(960): n is a, c, g, or t
  misc_feature (967)..(1001): n is a, c, g, or t
ttggaagccccacttccgaaggagaagccgacagttcccgtaccgcaggtcgaccggggaccccgaggagctcaggggaaccctggttcctatagtctgtcgggctcccacctctgactgggctcgatttttgatgctcacagggggccgagcctttggaaaaacnnnnnnnnnnnnnnnnnnnnnnnnnnnnnnnnnnnnnnnnnnnnnnnnnnnnnnnnnnnnnnnnnnnnnnnnnnnnnnnnnnnnnnnnnnnnnnnnnnnnnnnnnnnnnnnnnnnnnnnnnnnnnnnnnnnnnnnnnnnnnnnnnnnnnnnnnnnnnnnnnnnnnnnnnnnnnnnnnnnnnnnnnnnnnnnnnnnnnnnnnnnnnnnnnnnnnnnnnnnnnnnnnnnnnnnnnnnnnnnnnnnnnnnnnnnnnnnnnnnnnnnnnnnnnnnnnnnnnnnnnnnnnnnnnnnnnnnnnnnnnnnnnnnnnnnnnnnnnnnnnnnnnnnnnnnnnnnnnnnnnnnnnnnnnnnnnnnnnnnnnnnnnnnnnnnnnnnnnnnnnnnnnnnnnnnnnnnnnnnnnnnnnnnnnnnnnnnnnnnnnnnnnnnnnnnnnnnnnnnnnnnnnnnnnnaagaattcggcacgagggnnnnnnnnnnnnnnnnnnnnnnnnnnnnttaacagtgaacaaaactagtttatttgagggcttgcagtattctcaatgaaagcaaaaagacagtatgccaaacatttggactgaaatatttacacattttggttggaaaaaaagagaattgagagtgtcttccatttagcagactttgtgttggactcaccagctcactttgctcttgtaaattgagtattttnnnnnnnnnnnnnnnnnnnnnnnnnnnnnnnnnnnnnnnnnnnnnnnnnnnnnnnnnnnnnnnnnnnnnnnnnnnnnnnnnnnnnnnnnnnnnnnnnnnnnnnncgatctnnnnnnnnnnnnnnnnnnnnnnnnnnnnnnnnnnngatcacttggtgtgagccaccacgcccgggctggtaatcccttattttttttaatccggagtggggttaaggattgcaagaagccagaatcccaccagctggaagaaaaacaggtgcttgcc

SEQ ID NO: 77051 - DNA, 943 bp, Homo Sapiens
gagaaggctttaagacagatattaaagttctccgacagaaactgaaagacttggagcaaatgttgtataaggcaacagttaatgcccgggcaaaccaggatcttgcccttctgtgtgaggtccgtgacagcaatagacgggcacataagatacaaggagaactgaagaatcttaagtcgaaagtgtttggtctggagaatgaacttagactctgttaatgtctacttttggaaatggcccccatttagaagaggtgtgcttcttgaaacctgaggacaaggtcatctgctgccagaaaatgtaaacctgagttgactagagtggtggtattcattattgtaaagacagcttgaagaatcggggaccactaggaaagcttttcttgcatactcagcttgctttatcatttttgctgtccttttaacatttgcgaggagtaggggcctggtcctgaatgacttggaggctttcattatttatcctgtctgtattgaccggtttttgttttttcagaaggcagtgatgatgaaaacttaggaagaaggtattttgcaataagcttggctgagtgtccatgggaagaatactttccctaaagagagagaagcactcacagaggctgcctttctcctgagctcggggagaaggcagcacatcacaacctgtcacattgaaataggcgctcattctgctatttcaccttccgtcctgagcagagcctgaattacgtttttgggcaatttcatggtgtttcaccagagggcgctagagactcaaacgaaatgtccatctggaaagattcgggagacactttgccgaggggatgaagctgagatgatgcttgtatggaaagtttgatatttttatcagtcacatggcttttgaaaaatgatgtatatattttaaattaactattttcaataaaatatttcactcaaaagat

SEQ ID NO: 77052 - DNA, 1299 bp, Homo Sapiens
  misc_feature (73)..(108): n is a, c, g, or t
  misc_feature (329)..(352): n is a, c, g, or t
tggatgatcactataggggctaggctctcgagccgaacgacgagcgcaggaagtagtgagcgaggaaggcggnnnnnnnnnnnnnnnnnnnnnnnnnnnnnnnnnnnncagtcgacggtaccggacatatgcccgggaattcggccattacggccgggggttgcagtagagcagctaccacatgttgcatgagttcatactttctacgtggcatttgtctccctttctaaaatgaaagctgatgaatcttaaaaggaagaagaaaagaaaagctgtgcaaattcatagtaaagttcgttttttatatgtttccagtgtagcagatctcnnnnnnnnnnnnnnnnnnnnnnnnactggcttattttcttttaatgtgcaatgatggctggatcatttaaagttctttttagaaaataacataagccaaagactcaagtgtaaatatgtctatatggagaaagcacattatatttattggttacttacattccttttttgatggctaaaatactaccaccacacaatcatcttttttttcctgaagaaagctttttctttagctaaaatcaattgtaaacgatttttgtagattattttttgtatgttttagtgtaagtagaagataaactttttattcataaaccaggaagcaatgttctttatagtgattctcttgtgtacatgcttgtgaattaaatttgtgtaaaatcccttggcaattgggtcttttaatataggaccaaattaaaacattttgctgaatatgtatagtttttcacaatttcattaggtaaataatggtttggtgatcatacatgagaaatgtacacattaaaaggccttgctgacaacttgcacaatgttgaacatagcctttaagcatcatttaaattttaaaggaatggagtttttcagcctgtggcccagcactggtcaagaaaacaagatggcaacatatatgctttcagggtcaaatttgagcaaactgtaaactgtcagggtgataaaatgtttctcttgatgtttacatgcacaagctttgcgttctgactataaaaagtgtgaacaaatcaatgccagattcctgttttgcgcattgtcatgggattcttaagtgaacctttctaaatgtggtcttgttcacatgctccacgtagctgtaacttcacatcatcagcttgcagtttgtaattgactaaagcattccagtgtcctctttctagattgccagctcatgacatggtgcttataaagatttaattaaagtaagaatgaaataaagtttttataattgtaaaa

SEQ ID NO: 77053 - DNA, 915 bp, Homo Sapiens
  misc_feature (92)..(228): n is a, c, g, or t
  misc_feature (736)..(737): n is a, c, g, or t
aggcaggagtacagtggtgcaatcatagctcactgcagcctcaaactcctcggctcaagtgattcttccattcttccacctcagccaccatnnnnnnnnnnnnnnnnnnnnnnnnnnnnnnnnnnnnnnnnnnnnnnnnnnnnnnnnnnnnnnnnnnnnnnnnnnnnnnnnnnnnnnnnnnnnnnnnnnnnnnnnnnnnnnnnnnnnnnnnnnnnnnnnnnnnnnnnnaccatgcctggccagcaacaatttgtgttttgagaattaacctgagccatttcctgaagctacctacactgccattccacagttgggaatatcttcacgtatctaccggctagggaagaatctgggggcagaaatcaccttattccagagcagcaatttagacgacgtagtaggagtttgtagggagatgttaaccataaggaattttcctattaaaatgagatgaaaaaggggaatccctctgacttccacgattataggcatcagtgaccaaattttaacctggaaaaggcattcatggatcagttcatgctcctgggcagaattcaatattgaacatgattcctagctattgatttggtatctgttctgcagaaatgtttgaatttctcaaactcaatccaaagccacttgcctgaagcaagcttcctatgtcagagactaagcacagatggtttccatcaacacacgtgatcattagtgctctccacagaacacaaaagaaggnnaggactttagtggtgttgggtggggggtgggaatgaaaatctaggttagtgcatagttagtgctctcagtattccctggctcagtgctcctgtgccacctccagcggggccttcacgtcctggcgcacttgtccggggtgggtttctttgagtaatcccgctctccaaaaatcgtgct

SEQ ID NO: 77054 - DNA, 192 bp, Homo Sapiens
  misc_feature (51)..(64): n is a, c, g, or t
catctatgaagaacttcccaagagatcaaagccttcatggactatagggannnnnnnnnnnnnnaaaggcaggagtacagtggtgcaatcatagctcactgcagcctcaaactccggggctcaagtgattcttccattcttccacctcagccaccatgcccagttaattttaaaattttttttggtagagac

SEQ ID NO: 77055 - DNA, 1643 bp, Homo Sapiens
  misc_feature (75)..(109): n is a, c, g, or t
  misc_feature (1465)..(1497): n is a, c, g, or t
atgcgatcactataggggctagctcttgtagccgaacgacgagcgcagcgaagtagtgagcgaggaagcggccgnnnnnnnnnnnnnnnnnnnnnnnnnnnnnnnnnnncagtcgacggtaccggacatatgcccgggaattcggccattacggccgggggaggcaggcacagaccttcctcctcctggaacatccaagggcactggatcctctgtgtccctctgagatggggtgccacctccagcaagagcaccacggtggcagctgagtcccagaagcttgaagaagagcgcgagggaagagagccaggtctggagaccggcacccaggcagcagactgcaaggatgccccgctgaaggatggaacccctgagccaaagagctgaaatgcctctctccagagtcggaccctcactccttcctggaactgcctttggccccagaaccatgagacaatccccaccctgagaagctccgatcactgggaggagagagaaagcctccagctttgggattcaggcttcagaagtttttagcagcctttgctcattgggagaggtggggaggataagtctataaggaatcctatttccccagctctcccacagagaggacaaaagaagtcttcacacgttgtggaactttcctgcaacttctggatgcagacaagcctcagagcagactgttctggctccagtgaatatcggctgccaagctgtgagcatccagggatccccgtctgcctggctttcctgaagtcagaaggcgccttggtcatactgtgtggggtgtgtggatctcagtttgctctctttctttctccttttttcaacagctggcggagtagccaacacccctgacagcaatgtgttgcacttggctcactccacaccctacgaataattttaatatttaacttgaaatgttgttaagaaactatggaaaatatcaggatcccactgggatcccgtaaattgaaggcaacaaggtcttggtcctccagtaaggggggcatggagccctggtgggaaggaaagaagagaaatttgtgttcctgattccttaatccccaagaaaggtccctctgctaacattcacatatctcttcctagccaaagtctgtccatttcaaccctctagcatctgagctatctgcatccagctttcaaaaatatttcgctgtttactaacatgtctgtcagcctctcttttctccccccgcatgtgttttgtttttaaatccactcaaaagcgttttcatttgaaatcaaatagacatgtttgcaaataaatgttgacacaacacatttgaaagacagaattggggatctgagattaagagtatcagcagagaagagtgggtgtaattctgtggaacaggagtgagaacagaggcgagggagccgttgctttgtgccaggcgccatgctgaggactttccatagacggtttaatgccacccannnnnnnnnnnnnnnnnnnnnnnnnnnnnnnnnaaataaagtcacttgcctgagtttgggcagccaggaaggagcagaacccacagttgagccccagcagtttggcttgggaaacgcatgtagagtgcttcttaaagcagagacctttctcatgattaaactgaaatactagtcccttt

SEQ ID NO: 77056 - DNA, 1154 bp, Homo Sapiens
  misc_feature (160)..(168): n is a, c, g, or t
  misc_feature (377)..(377): n is a, c, g, or t
  misc_feature (417)..(417): n is a, c, g, or t
  misc_feature (428)..(428): n is a, c, g, or t
  misc_feature (569)..(569): n is a, c, g, or t
ttcaggaaaccaaggggcctgtttggtgggaaatttcccctcccgggcccttggccccattctgttttagagcgcagtttgatttttggccaccaggagtctttaaagtttccattccctcccttcccaaaaagagtttttgtgtaatcccttttggggnnnnnnnnngggaagttttttggatatgcaaagcactttttcccagtttgacaaagttggtaaaaatcgatgacaccttaaaataaaaaactgaagtgacctgatgctccagaaagatgtgaaatggccacagtgcatgtggtgatgtctccatgctgagtttcaggcagcacagcactaagtatcaggtgacctgtggtcccaccagagcatagtcntcatgaaataggcctaaccagataccttttaactcatctntattttggtgncaaagatgtggtttacttagctacttactatttgttcccatttgaagtctcagagcttgccaagttaaacaccgccttcagtaccgagctgctatacaagaacattataaaatacaaagtataaactaagataatcctctntacagaattcagattagtgcattaaaacaacattgatttaaaaagggaagtgagataactggcaaacctccaattgcttttttaatgaaggatgacacaaaatggcacgcaaggtaaacactaaattttgtcaggtgctcaaaaacagttaattgtgggaaagttactttccaaaagtaattttgacctaaaaatattaaccattattctataagacataagggaaggtaaataatggcccacaaaaccagatgatatggttaagataactagtttagtggaataacaaactggggtcttaagaatccaaacgcaataggtattggtattggttgttcatactcttcttccaaattatgttaaacatttttagtaactacactttcccccgtaaacatcagacttaaatagaccatatgtaaaaacaacctatccttagtaattttactaggcaatctacagcaaaagcttaatatatacacagaaagagtatcaaataaactagaaaagtattcaccgacttcagggtaaaaaagatcttaaaagagaaccaacagaaaaatgaaagacactttgtgctgttgt

SEQ ID NO: 77057 - DNA, 534 bp, Homo Sapiens
catcacacagatttgcaaagctgtgcatgtctgataaactgtgggaacagatagtccagtcgacctgcgacaccatcactcctgacgtgagggccctggcggaggacacaggctggagacagctgttcttcaccaacaagctccagctccagcggcagctccgcaagaggaaacaaaaatatggaaacctgagagaaaagcaaccttaggcacacattttcctaccagcagggagctcaggcatggctgtgtttctcttcagtgtccaaatctcttctgtctccttttcttaagaactaagaggttttgttgatgcgtggagccatttgaaactcgtaggggatttgcacacaaatgcagcagagtctggctccccagtgccttgctagagtcaccgtcattctgaggtcaaatcatggcccgaggacaagggctgtaagacagggagccccataggccatcatcatccttatcccacacccattataaaagaggtttctattgtatataaacaaacaataaatgattattagc

SEQ ID NO: 77058 - DNA, 450 bp, Homo Sapiens
aaagcgggtaaaagagaaaacactgaaaattgaattcttatcttccagaggctacaattattataatggacaatacttttacctttgtctctaaagatcagattagttttatttgttcacttacgtgctttgattatcccctctgaattatagaccgagtcttgttgtttagcctaagagaagatttatgtagtaatttcttctcaggtatggaaccacggtcataactaacatgttggccagaatagaaccactggttaaacatattttattcaccattaagtgatctttatcaatattctggattagacaacaaattacctttctgggtgtttcttgtaaactatactcctgtttgaatgttaaactttgttgctaaagtttaattttaagatgtttgaatgttcagtttatgtatttgaactacaataaaccaaccctttttataaa

SEQ ID NO: 77059 - DNA, 991 bp, Homo Sapiens
cagtcgacggtaccggacatatgcccgggaattcggccattacggccgggggtcccgggactgggaagaaacggcggccgggagggggctccggggaccatggggctcctgaccattctgaagaagatgaagcagaaagagcgggagctgcgactgctcatgcttggcctggacaatgctggaaagacaaccatcctgaagaagttcaatggggaggacatcgacaccatctccccaacgctgggcttcaacatcaagaccctggagcaccgaggattcaagctgaacatctgggatgtgggtggccagaagtccctgcggtcctactggcggaactactttgagagcaccgatggcctcatctgggtagtggacagcgcagaccgccagcgcatgcaggactgccagcgggagctccagagcctgctggtggaggagcgcctggccggagcaaccctcctcatctttgctaataagcaggacctgcctggagcactgtcctctaacgccatccgcgaggccctggagctggactccatccgcagccaccactggtgcatccagggctgcagcgccgtcaccggggagaacctgctgccgggcatcgactggctcctggatgacatttccagccgcattttcacagctgactgaaccactccagatgccccccacctagcagtccaggtccctcaaccttcaccaaacactacccatggggggttgggagtcagccggccaaactaacactccccctcctccaccccagcctgctgctgctactgctgcccgctgctgctctgtggccacccggctcccatggcgggagggctgtgccctggctgtctctctggctcctgacctggcctttggctaccataccaagaagagagggctgggcggggaggagctgctactgctgctaccgaggctgtgggcctcatccttcactcagttgtgaaataaaccgctccttgccccgaaaaaaaaa

SEQ ID NO: 77060 - DNA, 932 bp, Homo Sapiens
accgtctccccccagtccactgagggggctgcctgcactggagccagagaggttggggcgggcaggccgggccaggggccgtggtgtggaagacgcaggccccagcgctggagcgggactctcagcacagtcatcgcccccataaccctgacagcacctccactccatgtcggtcactgtcttgtaggccacacggtagcgagggcggaggaagcggcggtacatgatgctttggggacactggggctggccccaggcacaaggctggtacttgacatatgtctccactccatcctcaaggacacagctcactgtccgggtcaccacgtaggcacaccagttcctgtggcggctggctggccggggggcaatctgggcctggggccccccggggctgagggccccactggaacctgtgtagaggctgaaacctcgaggagggtagctggcggcccctgcagctgccgtcagcaggcagcagaggtagcagctccagagggtgcggggggccatggcggggcgctccacagtggccctcagagactcatcccgcccagccactggcgcctctgccggccccggagatgctgctgctccacaggacagcccgagcccggcccgtccgtcccagtttccttctgatagcccccggccacacgtcttctccttggctgcctggcctgacccctctcccctcctctttcctcctcagctcctgtccgtcccctctcggttccttccgctctcctcttcacttctgagggggtttgttctctgtgccccctctggcctcccgcgcctggtccctgcccctctcaggagctgcgtctcagaagttgcctcctgggcgtccgccccctcgtcccagctggccctcttctggtctccctgtcctctcctcgtgccgaattcggcgcgccgtgacttcatac

SEQ ID NO: 77061 - DNA, 754 bp, Homo Sapiens
  misc_feature (75)..(75): n is a, c, g, or t
  misc_feature (160)..(160): n is a, c, g, or t
cacagatgccaccatggaaaatgtgtgcaaactgggacctcatacatgtgcaagtgtcccgagggctatggaggngacttgtgtgacaacaagaatgactctgccaatgcctgctcagccttcaagtgtcaccatgggcagtgccacatctcagaccaanggggagccctactgcctgtgccagcccggctttagcggcgagcactgccaacaagagaatccgtgcctgggacaagtagtccgagaggtgatccgccgccagaaaggttatgcatcatgtgccacagcctccaaggtgcccatcatggaatgtcgtgggggctgtgggccccagtgctgccagcccacccgcagcaagcggcggaaatacgtcttccagtgcacggacggctcctcgtttgtagaagaggtggagagacacttagagtgcggctgcctcgcgtgttcctaagcccctgcccgcctgcctgccacctctcggactccagcttgatggagttgggacagccatgtgggaccccctggtgattcagcatgaaggaaatgaagctggagaggaaggtaaagaagaagagaatattaagtatattgtaaaataaacaaaaaatagaacttatttttattatggaaagtgactattttcatcttttattatataaatatattacaccatctgcgtatatgtaccatatagtgagttatttttaccaagttttgtgttgtgtatttgttgtgtttttaaaaatagctgttt

SEQ ID NO: 77062 - DNA, 1001 bp, Homo Sapiens
  misc_feature (514)..(531): n is a, c, g, or t
  misc_feature (556)..(867): n is a, c, g, or t
ccatttacaaatatgtttaatagcagcatttctttaaagaaaaacaaagttcaaatgcccaataataattatgtttaacacttggtacacatataaatagacaaaaggctgcggagaacactggatttaaataaaggtgttatgggtataattaactataatttattttatgaataaataagaaaaaagtccctggctataaaggatagtggaggtttacttcccaatattcttccatttggactgaacccctgccaactaagcagacatcccactattacaccaaaaagactgctctccccgcgagcaattacaatacatgacaccactaggcccaatggctcagagggaagagtggcctgtggctcttcaatctttatccaaacctggttctagcttcaggagcctttggtcacctgagactttttatttattaatttttatgagacggagtattgctatgttgcccaggctgattctgaactcctgggctcaagcagttctccgtctcatnnnnnnnnnnnnnnnnnngcctacacctcgtgccgaattcttnnnnnnnnnnnnnnnnnnnnnnnnnnnnnnnnnnnnnnnnnnnnnnnnnnnnnnnnnnnnnnnnnnnnnnnnnnnnnnnnnnnnnnnnnnnnnnnnnnnnnnnnnnnnnnnnnnnnnnnnnnnnnnnnnnnnnnnnnnnnnnnnnnnnnnnnnnnnnnnnnnnnnnnnnnnnnnnnnnnnnnnnnnnnnnnnnnnnnnnnnnnnnnnnnnnnnnnnnnnnnnnnnnnnnnnnnnnnnnnnnnnnnnnnnnnnnnnnnnnnnnnnnnnnnnnnnnnnnnnnnnnnnnnnnnnnnnnnnnnnnnnnnnnnnnnngttgcggtgatcgtaccacctcactcataggcgtgatacggtgatccacagatcaggggatatccaggtaaaaacatggaccaaaaggcatcaattggcatgatctgtaactgcctgttgctgtgttttcatag

SEQ ID NO: 77063 - DNA, 1061 bp, Homo Sapiens
  misc_feature (520)..(615): n is a, c, g, or t
aggctgtgccctggaaagtactacagccatcctccaacagaagtacggactgctcccctcacatgcgtcctacctgtgaaactctgggaagcaggaaggcccaagacctggtgctggatactatgtgtctgtccactgacgactgtcaaggcctcatttgcagaggccaccggagctagggcactagcctgacttttaaggcagtgtgtctttctgagcactgtagaccaagcccttggagctgctggtttagccttgcacctggggaaaggatgtatttatttgtattttcatatatcagccaaaagctgaatggaaaagttaagaacattcctaggtggccttattctaataagtttcttctgtctgttttgtttttcaattgaaaagtaattaaataacagatttagaatctagtgagagcctcctctctggtgggtggtggcatttaaggttcaaaccagccagaagtgctggtgctgtttaaaaagtctcaggtggctgcgtgtggtggctcatnnnnnnnnnnnnnnnnnnnnnnnnnnnnnnnnnnnnnnnnnnnnnnnnnnnnnnnnnnnnnnnnnnnnnnnnnnnnnnnnnnnnnnnnnnnnnnnnataaaaattaataaataaaaagtctcaggtgaccaaaggctcctgaagctagaaccaggtttggataaagattgaagagccacaggccactcttccctctgagccattgggcctagtggtgtcatgtattgtaattgctcgcggggagagcagtctttttggtgtaatagtgggatgtctgcttagttggcaggggttcagtccaaatggaagaatattgggaaataaacctccactatcctttatagccagggacttttttcttatttattcataaaataaattatagttaattatacccataacacctttatttaaatccagtgttctccgcagccttttgtctatttatatgtgtaccaagtgttaaacataattattattgggcatttgaactttgtttttctttaaagaaatgctgctattaaacatatttgtaaatggtt

SEQ ID NO: 77064 - DNA, 1643 bp, Homo Sapiens
ggggggcgtctccattttggtctcaggtgtggactcggcaagaaccagcgcaagagggaagcggagttatagctaccccggccgcggagccggctcactgcactacccccgcccccttctttcctccagacgccgaagtcgcgggcgctcatggcgggcctggaggtactgttcgcatcggcagcgccggccatcacctgcaggcaggacgcgctcgtctgcttcttgcattgggaagtggtgacacacggttactgcggcttgggtgtcggtgaccagccgggtcccaatgataagaagtcagaactgctgccagctgggtggaacaacaataaagacctgtatgtcctccggtatgagtataaggatgggtccagaaagctccttgtgaaagccatcaccgtggagagcagcatgatcctcaatgtgctggaatatggctcacagcaagtggcagacttgaccctgaacttggatgattatatcgatgcagaacacctgggtgacttccacaggacctacaagaacagtgaggagcttcggtctcgtattgtgtctggaatcatcacacctatccatgagcagtgggaaaaggctaatgtaagcagtccccaccgggagttcccccctgctaccgccagagaggtggacccactccggattcctccacaccacccacacaccagtcggcagcctccctggtgtgatcccctgggcccgtttgttgtcgggggagaagacttagacccttttgggcctcggagaggtggcatgattgtggatcccctgagatctggcttcccaagagcacttattgacccttcctcaggcctcccgaaccgacttcctccaggcgctgtgcccccaggagctcgctttgacccctttggacccattgggaccagcccacccggacctaacccagaccatctccccccgccgggctacgatgacatgtacctgtgaaggcctcaagaatgtaacatcccaggcttccctccattctcctggagctgccaccgctgtccccatcagcaaccatgttcttgcaggctgggggcaagggattctgctcatgtgtttgcagaccggctgggatagcctccccaccccttatcagagccaagacacctgctgcagctctccacctagctgcagatagctcccaaagagaaatcagtgtgtctctttcaccatcagctcctcccctttcaccaccagctcctctccacttcccaagggagactccggcaaccttcagcaacatatatcctcgaccagatgcagtgctataagaacagaacgcattttggatgttattattaagaaccaaatgtcaatacagaattcatgttgccggtttcccacttttcttttcacattaatgcatagctgcctccatttatgagactttagagtttgagtttctgtagggctgaatgactcttttttcctggcccagggcccattcttgcttctcaggcacctttccgtttattaattgccattgctcctgacatccctaagatggggcccccttctggtggcatgaattggaatgagtggactgggaaatcccttagggccacaaaaatggacttcccaaagggcagggaacattggtgggaagaactgccttcatt

SEQ ID NO: 77065 - DNA, 826 bp, Homo Sapiens
aagtgggtgatctagcaggagcttttttgcggtgcctttccccttagcactagactggctcctgcatcccctcgcctcatgttcctcccaccttcaaagaatgaagagccccatgggcccagcccctggcctgggaaccaggcagccttccagacctcaggggctgaggcagactattagggcagggctgactttggtgacactgcccattccctctcaggccagctcaggtcacccgggcctctgacccaggcctgtcactttgagaggggcaaaactgagaggggcttttcctagagaaagagaacaaggagcttgccaggcttcatgtagccgacacacgtctcaggattttaagtccacattggcctcacactaccagggccaatgcccaaaataaggagttccaatttggggccaaatgaggaaggacacagactctgccctgggatctcctgtgctagcggccaatgacaaatccagtcattggccaccagccacctctgcagtggggaccacactagcagccctgactccacactcctcctggggacccaagaggcagtgttgctgtctgcgtgtccaccttggaatctggctgaactggctgggaggaccaagactgcggctggggtgggcagggaagggaagccgggggctgctgtgagggatcttggagcttccctgtagcccaccttccccttgcttcatgtttgtagaggaaccttgtgccggccaggcccagtttccttgtgtgatacactaatgtatttgctttttttggaaatagagaaaatcaataaattgctagtgtttctttgaaaaa

SEQ ID NO: 77066 - DNA, 1673 bp, Homo Sapiens
gggtccggaattcccgggatggaacgcgccggaatctgaggtggcttgagtcagtgtgaaaatcgggggatgggtgagatatctccctccagcagcagcacttaggccacattaccctctgaggaatccacatttgtcttagatagactgggagttttcatcctcttgaataagaactcgacaacagagtgggaactttctgtcttgtgatccattgcctggtgagtcacagctcacaccatggatttaacctgagagcttcaacttctgctttggccctggagttcccatgccctggtgtcttctaccagttcttaggtagggttttatattcagagagggttcagctttctcccgtgggctgggggaagaggtcaaagtagaactcaggtaccaaatttgaaaggaaacactcagaaaaaacttctgagcgcagagcggaaaacaccctctcagtccccaccaaagagaaaggctttgggttctaaatttccagtttccattaagggactctgggactggacatttctgaaaattaatgacctgtactgagtaatcctcctaacacactgatcatcaaaaaataacctgtaatgagtttaggctttctgtatttgtctgggctttctgtatttgtctgaatgctttcacgggagtgtgtcgcactggagcacagaggacactcgatcgtgcggcgcgcagggcggggggccgccgctgcctccccgcgggatggctggcactgtgctcggagtcggtgcgggcgtgttcatcttagccctgctctgggtggcagtgctgctgctgtgtgtgctgctgtccagagcctccggggcggcgaggttctctgtcatttttttattcttcggtgctgtgatcatcacatcagttctgttgcttttcccgcgagctggtgaattcccagccccagaagtggaagttaagattgtggatgactttttcattggccgctatgtcctgctggctttccttagtgccatcttccttggaggcctcttcttggttttaatccattatgttctggagccgatctatgccaaaccactgcactcctactgaccactcttcaggaatacgaaaacctgttctctccttcattgtgatgacattgatgagcaggaaggcactattcagagccttgttttgacagccctcatgccttaaggttagaggagtatctgtccatcactaagacaaatctctggagtcctggcttccagaaacaggattgccaaattgtccctgtggggctagattcttaccagcttaagaaggatattgctatcttcttagtacccgtaccttaggatttccaactgttttgaaagggaaatagtaacagtgatctgcttagagtggattttcactcaagtccttagtaagtggattttggggaaaaaagcacctgggcttctggttctttttgataatatataaaattattcattatgaggttgcagttgtttgcaaaggagaggcactcaaatttgaaaggttattttaatgtgataatttggaagacttactcagatgttggtcattgaccactctgtgcatatatttctgcagagctctgtgaaggcaatgagtgtcacttccctctgctctaataaagcaataaataatagctaaagggctgactatcacttcga

SEQ ID NO: 77067 - DNA, 1295 bp, Homo Sapiens
  misc_feature (746)..(839): n is a, c, g, or t
gcgtgtggaaaggaacgacctacgagggcggtgtccgagagcctgccttggccttctggccaggtcatatcgctcccggcgtgacccacgagctggccagctccctggacctgctgcctaccctggcagccctggctggggccccactgcccaatgtcaccttggatggctttgacctcagccccctgctgctgggcacaggcaagagccctcggcagtctctcttcttctacccgtcctacccagacgaggtccgtggggtttttgctgtgcggactggaaagtacaaggctcacttcttcacccagggctctgcccacagtgataccactgcagaccctgcctgccacgcctccagctctctgactgctcatgagcccccgctgctctatgacctgtccaaggaccctggtgagaactacaacctgctggggggtgtggccggggccaccccagaggtgctgcaagccctgaaacagcttcagctgctcaaggcccagttagacgcagctgtgaccttcggccccagccaggtggcccggggcgaggaccccgccctgcagatctgctgtcatcctggctgcaccccccgcccagcttgctgccattgcccagatccccatgcctgagggcccctcggctggcctgggcatgtgatggctcctcactgggagcctgtgggggaggctcaggtgtctggagggggtttgtgcctgataacgtaataacaccagtggagacttgcnnnnnnnnnnnnnnnnnnnnnnnnnnnnnnnnnnnnnnnnnnnnnnnnnnnnnnnnnnnnnnnnnnnnnnnnnnnnnnnnnnnnnnnnnnnnnncccaaaaatactatccctgagggggggccccaataagatagccaactaacgcccactattatgtaaaaaaaggagggccccccaaaaggaggagcgtctattaaaaaaagaagaacgagaatgcggccgctaatataaaaaacactgctgagtggagaggagaaaaaactatcgcgactgggattctttggaaagaacacaccctacttgagccggcggggagcacaaaaatgggggaacactcatcctctccagcgaataaattataaccccactgtgcgggagcataaaaattattatacttttgtgtaagttgtattctgcagggttaaacaagcgacggcgcctcatagtgtttcggtcgacaaaaacatttgcttctcggcgcatatttttttcttcgcagaaatatttttaacgcggcacaatgaatatataccccccatactctcatcc

SEQ ID NO: 77068 - DNA, 1065 bp, Homo Sapiens
  misc_feature (30)..(30): n is a, c, g, or t
  misc_feature (90)..(313): n is a, c, g, or t
  misc_feature (692)..(692): n is a, c, g, or t
  misc_feature (999)..(1017): n is a, c, g, or t
tactgtaccgtcccgcaccgacgacgagcnagcgatcatgagcgagagcgggagagcgccattacgcaaacgcctctccccccgcgtgcnnnnnnnnnnnnnnnnnnnnnnnnnnnnnnnnnnnnnnnnnnnnnnnnnnnnnnnnnnnnnnnnnnnnnnnnnnnnnnnnnnnnnnnnnnnnnnnnnnnnnnnnnnnnnnnnnnnnnnnnnnnnnnnnnnnnnnnnnnnnnnnnnnnnnnnnnnnnnnnnnnnnnnnnnnnnnnnnnnnnnnnnnnnnnnnnnnnnnnnnnnnnnnnnnnnnnnnnnnnnnnnncccaagaattcggaacgaggtttaactaaaaaagttggcggcaggggtggggggtggcaatcatttttcttcctatacatacaaaggatattgtcaaaaatggcgttcttctcttgtggcctgttattctgattgctgctgtatacagttttgtcactctttagtttttagttaagcatactgatagactttcctctaaaagccattcactccagattttacctggggaatattctacatactgcttactttctctataaaactcatcaataaatcatgaaaggcactgagttttgtaaatcaggaccctaaatgtttaattgtaaataagtttcagataattattatagctttgcgttgaagtttgttgttttttttnctcaactagttaagtcaactgcttctgaaataactctgtattgtagattatgcagatctttacaggcataaatatttaaactgtaatatgctaacttgaagagattgcaataaagctgcttcagctaaccctgtttatgtttaaatactagggtttgttctatattttatacatgcattttggatgattaaagaatgcctggttttcgtttgcaatttgcttgtgtaaatcaggttgtaaaaaggcagataaattgaaatgtttgtggtatgaggaaataaaagaatggaattagctttcattcagnnnnnnnnnnnnnnnnnnncctgagcaggcggccgctccaacatcagaatggtaacggagcggccgc

SEQ ID NO: 77069 - DNA, 1769 bp, Homo Sapiens
  misc_feature (1413)..(1422): n is a, c, g, or t
cagtcgacggtaccggacatatgcccgggaattcggccattacggccgggggtgcaattaacagactttgagaactctgcctatgtggtgtttgtggtactgctcaccagagtgatcctttcctacaaattggattttctcattccactgtcaaaggttgatgagaacatgaaggtagtcacagaaaagagatgctgtcttgcagggaatgtgttatttcaggaaagatatttgcaaaggtggcaatgcagtggtggatggttgtggcaaggcccagaacagcacggagctcgctgcagaggagtacaccctcatgagcatagacaccatcatcaatgggaaggaaggtgtgtttcctggactgatcccaattctgaactcttaccttgaaaacatggaagtggatgtggacaccagatgtagtattctgaactacctaaagctaattaagaagagagcatctggagaactaatgacagttgccagatggatgagggagtttatcgcaaaccatcctgactacaagcaagacagtgtcataactgatgaaatgaattatagccttattttgaagtgtaaccaaattgcaaatgaattatgtgaatgcccagagttacttggatcagcatttaggaaagtaaaatatagtggaagtaaaactgactcatccaactagacattctacagaaagaaaaatgcattattgacgaactggctacagtaccatgcctctcagcccgtgtgtataatatgaagaccaaatgatagaactgtactgttttctgggccagtgagccagaaattgattaaggctttctttggtaggtaaatctagagtttatacagtgtacatgtacatagtaaagtatttttgattaacaatgtattttaataacatatctaaagtcatcatgaactggcttgtacatttttaaattcttactctggagcaacctactgtctaagcagttttgtaaatgtactggtaattgtacaatacttgcattccagagttaaaatgtttactgtaaatttttgttcttttaaagactacctgggacctgatttattgaaatttttctctttaaaaacattttctctcgttaattttcctttgtcatttcctttgttgtctacattaaatcacttgaatccattgaaagtgcttcaagggtaatcttgggtttctagcaccttatctatgatgtttcttttgcaattggaataatcacttggtcaccttgccccaagctttcccctctgaataaatacccattgaactctgatggctgttatcaaaggaacttttctttgtttaaatttgctgatgcaggaattaagtttaaacacaactctatagaaagaaaggagattattacccagaattcacatgtagtgattattaaggacaannnnnnnnnnaactaaaaaagttggcggcaggggtggggggtggcaatcatttttcttcctatacatacaaaggattttgtcaaaaatggcgttcttctcttgtggcctgttattctgattgctgctgtatacagttttgtcactctttagtttttagttaagcatactgatagactttcctctaaaagccattcactccagattttacctggggaatattctacatactgcttactttctctataaaactcatcaataaatcatgaaaggcactgagttttgtaaatcaggaccctaaatgtttaattgtaaataagtttcagataattattatagctttgcgttgaagtttgttg

SEQ ID NO: 77070 - DNA, 537 bp, Homo Sapiens
  misc_feature (306)..(336): n is a, c, g, or t
tttgcaacatacaaaataagttaaatgattcagaaggttttgagccatgaagttccccaataactatgttctggctgttcatgagcatgacgtgcaagctgctggtctatgaccagaactcaataaatacagatcaaacaaaaccgcaaaacacttaaattagatttctttagaaactgatgaaagtcaagaaaatatatacttaggattaacaattccattcttaacttacatcatccagtggcaaaaagcacgaggcaagtattcagtccttagcacactttctaacttgtaccggtttggccnnnnnnnnnnnnnnnnnnnnnnnnnnnnnnntgtttttttctcattcaaaatatccaagaaattttataaatttctactcatctattgttatgccctcttatataacttatgtataggatagtcatattttaaagttattaaaataaacatcttcactaactgaaaccattatgatgtgccagaattgggtttactgaattttccaaagtggtataaatatgaaaggaaaaa

SEQ ID NO: 77071 - DNA, 723 bp, Homo Sapiens
  misc_feature (45)..(45): n is a, c, g, or t
gccagctaccagtgtttccgaaaatgagggtgggatgggcccatntgcagagcaggacagcagtcatccccatagccctctgaggaggggagggatgcttagagcaggcagttctgtcagttctgacgtggcaggtgccattgcaacttgtgcggaggagtcttaggaagtgctgtcataattcataaggtcaagagcaacatctggatgaatgagccacctgaaatgtgtgtgggctgagccacaggaagggtgagtcctcttgcttgtggtgctttatggtgtgcaggttgcttgctttcccacattctctcatttgcttgaaggcagcctaacaaaagggagtccccaaagagctccatgagagcttaagaaaattcatctcctgaggacaaagagaacaaagatctgtcctgtggtcacactgttgaggctctgtcttcacagctgatgttctcctagtggaggtacagctgaagaacattcagccccagcacgagaagatacagagcaacttggaaaccccaaagggagacacacccttaacactgccgtgctgtgctgtgccgtgtcctgaaggaggagagagccctatctcctcctggttttgttgctgacattgcagctgatcatgccttgactccttcatctctaacagaggaagaactgtattatcaaaccttatggtctacccatgaataaataaaatatttgttcaagcac

SEQ ID NO: 77072 - DNA, 709 bp, Homo Sapiens
ctggttctgagccgcttgccttgtgatggtaagacaccaacctttacattcttccctgaggttgtggctgacagagcctgcttggccccactgttagtccagcgagctcctatatcaaaatgccgtaggccgggtggcttacaaacaacagaaacgtattgctcacagtcctggggggctgggacgtccaagatcaagaggccagcagattcggactccgctgagggctgtttcccgatccatagatggtgccttctcgctgtatcctcaatggtagaagcacaaacaagcaagctccttcctgcctcttttataaggactccaaccctgttcatgagggctccgcccccatgacccaatcagctccaaaggccccacctcctaatactgtcaccttgggggtgagaattccaatgtgaatttgcagggggagtgggggacacacacaaatttcggggccataccacccttcaccacaccctcctgcgctcagggtggcttgcagtccctggcccttctggtgggcatttggtatgtcctttctcttggggtgatttctgatgtttttactctatatagtgaaaagctagggagagcgggtcttctcccccctccctctccagtcccctcacaatcccagatgggttctaatgcagctgctggggcctgatgccctgagttgtttgtgattcaataaagaatccataag

SEQ ID NO: 77073 - DNA, 1373 bp, Homo Sapiens
  misc_feature (1016)..(1051): n is a, c, g, or t
tgattgcattggtgcgttggggggcacattcttgcagtctcagaggaggtagatcaacttcgccctttggaatgagcaacagtggggtgatggggcacaggcccagtgcgagccacatcctgttagttgaaggactgatgggtacgtggtctaccttgcagaggcatgggaccctgctgcggcaagcacgcaccgacaagtgatggcctccgtgggagagcccgcgtcctccactccgtgcctctcctttgcacacgctgcgtctccttccacgcctgcgtctcctccacaccgccccagagagaggcccccacctctgtgcaccccttggcatctccctacacagcctgcgcgtcctcccctacacatgcccccagtgcccagagcctaactaaggcccctgacagcccctgcctttctgcgcatttcttgccctagcatagtggcaggaatttgttccctacatgggtggcctgctcccctgcctgggccctgacttcagctccctgtagtgaagtccaggagggtgggacaggcctgtcaggcctctgggaatctcccaaatcccagaactcaccactcaccatgggcctttaaatgcagtaaactccacctaaccagattcaggggcactatgcccactgcctcctcttcagactctttgcatttcagtgaagagcctggaagaaacccaggggcctcctatgcacagatcttgcagcccagaaccaagtcagcctccctgcgactgcccaggcacactgcccaccaccccacccccgaaacaatgccagcccgctgctttttctatcctcccagtcacctttgcagacaaagaccaggggcagctcccgagggcactgtgaaggctcccatgccacacagtgagaactgtagcctctgcgtccaaggcacacagggtactttctggacccactgctggacagacttgaaggtgtcatgcccggtgtgtgcaggaggaaactaacagttcagtaaactctgccttgaccagnnnnnnnnnnnnnnnnnnnnnnnnnnnnnnnnnnnngtggacacctatgactataaagagatcttatcaagacaagggcgccaacactattaaagacgtaccccatgcataactataccaacacaaggagcgccccaatataatggacgaggatggccgctacaatcacagctgaccggcgcactcggagcgcaccattcctagacaaacagcgtcatcgaaccagtcgcgcacaccagccgatgtccaatacgtcgtgactttcaatcaacgcaaacaacgaaccaactaaacgaatcatccgagacgcgctaccacaagaagtgatcgaccacctgccccccacgtacgccacacc

SEQ ID NO: 77074 - DNA, 776 bp, Homo Sapiens
ccatggcaacacttcagactttaatacatattgctaggggtgatggaacctgagtagggcatctggtcacttggatgggagagagcagggccttctgagccccaaatctagcgcccgtctccccagagtctggaggcagctgccctactctcggccagaatgaggtgttactcactcaggctttctcctctgagttcagcaggcctgcttgggctcacagggtcagctggggaaagatggggttgcctgggccccaggatcctccccaagcccttgcactttcttcaccccccgtcagggagcagcgtctccctgcgcttagtcccaaaggaagtccaacggctctgctctcaggggacccaagggagagtcggcggggtgagaggcccagtggccggggccgacgaggagagtgccctggtgaggcagtcggagaaggcagaggtgtctcatcgatgaaggtggtgatctcctcccggaagaagccaggaccccgtgggggtcccccacctgaccccagaaccccactctccaagaattggcgaaggctggccagccccccaccttcagcctcttcctcgtcctcctcgtcctccaacctgtgtctttgtcccaggtactcaggaggacccccgagggcccggcgtctgggctgggaggacccggatgtcatcaagaggatgaccactttgtgcaggaaggagcctggtccccggagggtaagaagatgtttgtctcctctgggacaacgcccgaaaaagggacttgtaacaatc

SEQ ID NO: 77075 - DNA, 624 bp, Homo Sapiens
tacaggtccccctatcccggcgtctgtcccatgatgagacaaacatcttctctacccctcgggaaccaggctccttcctgcacaagtggtcatcctctgatgacatccgggtcctcccagcccagagccgggccctcgggggtcctcctgagtacctgggacaaagacacaggttggaggacgaggaggacgaggaagaggctgaagggcactctcctcgtcggccccggccaatgggcctctcaccccgccgactctcccttgggtcccctgagagcagagccgttggacttcctttgggactaagcgcagggagacgctgctccctgacggggggtgaagaaagtgcaagggcttggggaggatcctggggcccaggcaaccccatctttccccagctgaccctgtgagcccaagcaggcctgctgaactcagaggagaaagcctgagtgagtaacacctcattctggccgagagtagggcagctgcctccagactctggggagacgggcgctagatttggggctcagaaggccctgctctctcccatccaagtgaccagatgccctactcagcttccatcacccctagcaatatgtattaaagtctgaagtgttgccatgg

SEQ ID NO: 77076 - DNA, 1126 bp, Homo Sapiens
taatggactttcttccccaggaggatctgtgtgctgattgactctagtaggatctgtttgtcactgacagactgtagtagtgtctgtgtgctgactgatagatagactatagtaaaatttgggtgttgcctgactaacggtctagggtctgtaagctgacagtctgcctgctttctgattgtatccattgaagtgtatgtacattatggtaattctctgtctattaaatgtgtctaacaaaggaaggaattaagcactccacatgttttctttataggggagttctgtacactatgattttaaatagatatttcttatatagtagtggccaaattctcattattttgtacaagataaaggttatgcatcacttttatggtattttgtgaactcagctaagggaatgcctgttcagagcctggagttgttacctttacttgaagtcacctcatccagtcccctgctttagggcaggacttcagttccactgttcatttctgaagcttctgtgtccccagcttaccctgttctgaaatgttgtattccattggacagggctgctatttttagtcagccatgcatttggattttacacttaatctagtaagtaaaaatgagaagaaaatttggcatttaaaaattgattttaagggttggcaaaagtattttttccagtaagcctttcactggatatctgtgaccaatgtttacctacgcaatgtttttgtatctgaattgcttatgtacgttttttattatattgacctaacaagaagatcaacttatgctggtatggtgatggttttgctatggcaaaatcaaagggctgatcatacatggtgccctttgggaagggggatggtgtggggctgagcacctctgggttgaatgggaatgggtcagattgggaagcctaggaagagagttctactgtagatttcctaggcactgctctgttgaaataggaacataagtctttagcaacattctgatttaatcgggtgacactgataacaaagtatgccactcagatccatttaaagtgtgcataactgtatttgaaatgtgtttttgtgtgcgtgtgtgtagaatgggtaaataaaattgttgagtaacttgaaccttt

SEQ ID NO: 77077 - DNA, 623 bp, Homo Sapiens
gcggcagcagaggacaggcaagcaataggatgacagcccagtgtcggcctggcccggtgggcagcctcaggtcttgagaggataagactctgtctgaggactccatctgctccgggaagccagcccagggcagccagctcaaccacttctaccagaagaggctccttaaggatgatcaaaaccaatgtctcaggccaggaaggcagaagagaagccctggtgggacactgcaggagaccctgggctggctgggttacagcagcagggaggcccagcagcccactggcagaggcgagagctctgggatggcaaggcggctgtgaatggacagatgcagtccctcgggcaggtgttcatcgccctcatcctaggtactagccctggatgtccccatggcttcacacacagaagagcccttggttaccctaagtgggcatatcccccatgccactcagccctgccctatcccctcacccccatcccggctccatctgtagccgtccacaccctacacagacttggggcactatgctctcaaccagtttgtcagcccactcctcaggacacttcctcaggtgcagacccttggacttgtaataataataagtattttcataatcaaa

SEQ ID NO: 77078 - DNA, 1799 bp, Homo Sapiens
ggcgcggagcaactgaggcccgagccttctcgggacccgggggacgcctaaccccgcgagatgaggaaactgaggccgcgaggagcgcgcacacagcagagaagcagcagaatcgggaatcaaacccagctctgtctgaccccagagcctgtgcctttaaccactggctaggctgaactgcctttgttcttcactgtccccatcacctctttcaaacctcagcctctccttcctcatcgttacatctctaggctgcacctgctctctaaacattcacacaaaccctgcaaattttcttcctcataattgggagaagactcactggccgaatggcagcagtagatgacttgcaatttgaagaatttggcaatgcagccacttctctgacagcaaacccagatgccaccacagtaaacattgaggatcctggtgaaaccccaaaacatcagccaggatccccaagaggctcaggaagagaagaagatgatgagttactgggaaatgatgactctgacaaaactgagttacttgctggacagaagaaaagctcccccttctggacatttgaatactaccaaacattctttgatgtggacacctaccaggtctttgacagaattaaaggatctcttttgccaatacccgggaaaaactttgtgaggttatatatccgcagcaatccagatctctatggcccctttggatatgtgccacgttggtctttgccatagcaattagtgggaatctttccaacttcttgatccatctgggagagaagacgtaccattatgtgcccgaattccgaaaagtgtccatagcagctaccatcatctatgcctatgcctggctggttcctcttgcactctggggtttcctcatgtggagaaacagcaaagttatgaacatcgtctcctattcatttctggagatgtgtgtgtctatggatattccctcttcatttatatccccaccgcaatactgtggattatcccccagaaagctgttcgttggattctagtcatgattgccctgggcatctcaggatctctcttggcaatgacattttggccagctgttcgtgaggataaccgacgcgttgcattggccacaattgtgacaattgtgttgctccatatgctgctttctgtgggctgcttggcatacttttttgatgcaccagagatggaccatctcccaacaactacagctactccaaaccaaacagttgctgcagccaagtccagctaatgaggaaattctctttgttttttggagcatggttctttgggaagtggcatccactgcaggaaagcagaatgagcagagccagcagaactgatggagtggcacaaattcccagtgtctggatggtgccacactggcgcctaatcacccgtttaacaagcagaaattaaatgttgctcagcacatgtgtctttcagctcttccttttcacccatggatgatcattgcgagcatgcgctgattggactgaaatgccggggaataggttaggcatgctcagtgccgtccctttgccaccacagtcaaatgacatgcttcactgtggtaccttaatacctgaaatagaaccatggaaaattctgatgtcctctctctgaattatgtacagactacctgggggatcctcttctctccaaatgttagccatcctgaagtagccgaacagtagaaactttggtggggattaaccgggagcttgaaaatttgtctttggtaacctgatactggacagctgaactgaatggctgcaaaataaatacctcacataaaaaaaa

SEQ ID NO: 77079 - DNA, 407 bp, Homo Sapiens
tttgatgcaccagagatggaccatctcccaacaactacagctactccaaaccaaacagttgctgcagccaagtccagctaatgaggaaagactcacttgagataccctctccttgctgaagtttttcttgacttctccagttctcttttgttttttggagcatggttctttgggaagtggcatccactgcaggaaagcagaatgagcagagccagcagaactgatggagcggcacaaattcccagtgtctggatggtgccacactggcgcctaatcacccgtttaacaagcagaaattaaatgttgctcagcacatgtgtctttcagctcttccttttcacccatggatgatcattgcgagcatgcgctgattggactgaaatgccggggaataggttaggcatgct

SEQ ID NO: 77080 - DNA, 1560 bp, Homo Sapiens
agacgagtcccagagccgaccgcgctgcctcggccgctcggcgcctgcgcagtgaagaccgcggcgagccgcgcgcatgcgtgcaggcccggagccccaggcgctggtggggcagaaacgcggcgccctgcgtcttctggttccgaggctggtcctcaccgtttccgctccggcggaagtgaggaggagggtccttcgacccgtgctgagctggatggaccgcgagacgcgcgccctcgccgacagccacttccgaggcctgggggtcgatgtccccggcgtcggccaggctccgggccgggtagccttcgtctcggagccgggcgccttctcctacgccgactttgtgcggggcttcttgctgcccaacctgccctgcgtgttttccagcgccttcacgcagggctggggcagccggcggcgctgggtgacgcccgcggggaggcccgacttcgaccacctgctacggacctacggagacgtggttgtaccagttgcaaactgtggggtccaggaatacaactcgaaccccaaagagcacatgactctcagagactacatcacctactggaaagagtacatacaggcgggctactcctctcccaggggctgtctctacctcaaagactggcacttgtgcagggactttccggtggaggacgttttcaccctgcctgtgtacttctcgtccgactggctgaatgagttctgggatgcactggatgtggatgactaccgctttgtctacgcggggcctgcgggcagctggtccccgttccatgctgacatcttccgctccttcagctggtctgtcaatgtctgtgggaggaagaagtggctcctcttccccccagggcaggaagaggccctgcgggaccgccacggcaacctgccctacgacgtgacctccccagcactctgcgacacacacctgcacccacggaaccagcttgctggcccacccttggagatcacgcaggaagcgggcgagatggtgtttgtgcccagtggctggcaccaccaggtgcacaacctggatgacaccatctccatcaaccacaactgggtcaatggcttcaacctggccaacatgtggcgcttcttgcagcaggagctatgcgccgtgcaggaggaggtcagcgagtggagggactccatgcccgactggcaccaccactgccaggtcatcatgaggtcctgctcgggcatcaactttgaagagttttaccacttcctcaaggtcatcgctgaaaagaggctcctggtcctgagggaggcagccgctgaggacggtgctgggttgggttttcgaacaggccagcctttgaatgttggggcgcatcacagaagtgctggcctccttggttgcgcaccccgacttccagagagtggacaccagcgcgttctcaccacagcccaaagagctgctgcagcagctgagagaggctgttgatgctgctgcggccccatagcacctgtcgtgaggatagaaggacgggtggaagagaggcagcctcctgctccggggcccttccagaaataaagaccgccctccctgtg

SEQ ID NO: 77081 - DNA, 513 bp, Homo Sapiens
gcggccgcagaccccgggcggggaggaaaggccggcgggacccaggcccgggaggcccccgcctagagaggggcaccagggagggtgagggaggccaggcgcgtggcccctggagagttcctctgcagacggtttggagtgaggacggggcccagggagatggcatggaccgtgcctttcatttcaggagacgtggttgtaccagttgcaaactgtggggtccaggaatacaactcgaaccccaaagagcacatgactctcagagactacatcacctactggaaagagtacatacaggcgggctactcctctcccaggggctgtctctacctcaaagactggcacttgtgcaggtaatggggcttgggacgcaccgaggcgctgccttccctagcgctgcgtgaaccccagaggcctttctgatgaaagtggcccctgggtgcacaacggagctatttttccccgtgaggcactttaatcagtttaaaagaaactggattgtcttccgcatgg

SEQ ID NO: 77082 - DNA, 515 bp, Homo Sapiens
aagccctgcatccatgatgaggccggggcaggtctccctcctgggtcctgatgctgtttctgtgctcggctctggcttgggcctcagccctggcaccagctctggccgcaaccctgaccctggctctgggccgggcactctgccggatcccagctccaaacccctccccggctccagatccacccccagccctactcctgtggaatcttctgacccaaaggctgggcacgacgctggtcccgaccttgtgcccagcccagaccttgatcctgtgcccagcccagaccctgatcctgtgcccagccctgatcccaaccctgtgtcctgccctgacccctgttctcccactcgtggcactgtcagcccagccctccctaccggcgagagtccagagtgggtacaggagcaaggggcactgctggggcctgatggctgaaggagacgccggcatcctcgggggcctggggaagttgtgtgttgtgcagtcagtaaaatcctcccactgccaaaaaaaa

SEQ ID NO: 77083 - DNA, 255 bp, Homo Sapiens
aattccctgctaaagacgttttcattagtcttagagggtatatgctttctagaacttgtttttgttaacatgtgctttgatgtaaagaacatattttgtatgcaaaacataacttgcattatggttgtacaatacactatattgtttagggattccggaaagcagtttaatgcagaaataactatatctagtatgcagttcatattgtgaatgaagctttgcttttgtaataaataaataagactttctaatgac

SEQ ID NO: 77084 - DNA, 692 bp, Homo Sapiens
  misc_feature (375)..(384): n is a, c, g, or t
aaaattcgaaaactttggtgatcgaatgcaacagggagtaaggactctcacccgagagctggcttctgccacttgccctgccggtttcttggtactgggaggctgcaggcttccttctgtgcaccgagacttccttgagcaagtggagctgtgggaattgcactcttggaagatcccgcatgggttcgaggtgaggccgcttcagaacctcaaatgaaagactgtctcctcgtgggagagcacctggggccatcagaaatgtcttttcatctttttctggaggagacgaatgatagggcctggtttacattcatttaactctttatgaccttcactcagctgtggatttgggggcactttgtgggagacttggcnnnnnnnnnncttctggttggaagaacctaaattagcgaatgtttttcacaaaatgtattgttcaggatgtgagcgtggcaaatttgtccgtgttctgtttaatgacctctttaaaggtactgtgtactctttaatagggatatcatgtaccaggtgtcccagtagagcactgacatgtgtgtgcctgagtgccagccaccgtgtgaactctttggaggttttgcattttaggtaaataactgtctgtactcttggagtaacaagaatttggaaacaggagaagtaaataaataaggttgcctttttcaaattcaggg

SEQ ID NO: 77085 - DNA, 743 bp, Homo Sapiens
acagttgctcaagggccaccagaagcatttcttattattatttattttttaacctggacatgcattaaagggtctattagctttctttccgtctgtctcaacagctgagatggggccgccaaggagtgccttccttttgctccctcctagctgggagtgacgggtgggagtgtgtgtgcccaggtgggggtgtctcctggctgggaaggagggaaagggagggagagttttgcgggggttggcagtggagagcaggctggagaggagatggctaatagctgtttaatggaaacctgctgggctggagggagttaggctgaatttcccgacttcctctgccagttattgacacagctctctttgtaagagaggaaagaaactaaacccacccaagggatgatttcagggggagaggtggagggcagatgtcctgggcaaaccgggcccctctgcccacacacctcacttgatccttttgccaaacttgtcaaactcaggggaactggcttcccagttgcccctttgccatattccaagtccccctcagacttcatgtctctgctcatcagcactgtcccaggatcctggagagggagaacccctggccccaggggaaagaggggggggtctcccgtttcctgtgcctgcaccagccctgcccccattgcgtctgcacacccctgcgtgtaactgcattccaaccactaataaagtgcctattgtcctcgtggcgaattcttggg

SEQ ID NO: 77086 - DNA, 764 bp, Homo Sapiens
  misc_feature (21)..(21): n is a, c, g, or t
  misc_feature (44)..(64): n is a, c, g, or t
ccctcactacaagggaataangcttgcggccgcatacccggtcnnnnnnnnnnnnnnnnnnnnngcggaaaaaagatgtccctttaataaaacgttatcaacatatatcgtacacaaactacaatgtatcataattacttttttttcctctcttaattcagaaccagactacaaggtaagaaaaaacacagaaacagctacaatgttcccaataatccgcacaaagtcttttttcaggcagatgatatctcacataatatgatatacatggatcagaaagggagggagtaaaacaaagaccagctacaggggagggaggaaggagaagggcatgtcaatgtacaaagaattcgggtgtcttccagggcaagacacaaaggtttccgtggggtgatgaggtgagtggggccatgagcaccctcccgggaggggacaggctccactgtcgggcttgttggtttttgaaagtaaaaacaggactggagccagcacgtctgtttggttgtcggtgtccccccaccccccacagctgctccaaagtctttccatccagtcccaagcatatacagagcaattctgatcagtatcccatctttgagaaaggacgaataaagagaaaaaacaaagaaaaccggaactccagccccccaagccggtgcacacgatgacgctgatgcgaggatctcgggaccagaacgcggaggtcactgtttccatgtcccaggtcatagccatcctgtcagtggcagcctctcccactctgc

SEQ ID NO: 77087 - DNA, 1107 bp, Homo Sapiens
  misc_feature (141)..(353): n is a, c, g, or t
  misc_feature (366)..(366): n is a, c, g, or t
  misc_feature (432)..(432): n is a, c, g, or t
tatttctccggcgttcccggatcttgatacggttaccccttgagtgagtatacgtccccgcacgaacgaccggcgagcgatcagtgacgaggagccgagacgcccatacgcaaccgcctctccccgcgcgtgcccgatcannnnnnnnnnnnnnnnnnnnnnnnnnnnnnnnnnnnnnnnnnnnnnnnnnnnnnnnnnnnnnnnnnnnnnnnnnnnnnnnnnnnnnnnnnnnnnnnnnnnnnnnnnnnnnnnnnnnnnnnnnnnnnnnnnnnnnnnnnnnnnnnnnnnnnnnnnnnnnnnnnnnnnnnnnnnnnnnnnnnnnnnnnnnnnnnnnnnnnnnnnnnnnnnnnnnnccaagaattcgcnacgaggcatcagtgtcctgcattagggtgaagaggaacaacgaggagtgtgtcaccgccagcaccngatgggacttgtatcatttgagaccttgtgcgtctcaggaggaatcagatgatactagccaacaccttattccagtgtgtgtgctatcaccctgaggagttccagatcatcaccagcggaacagacagaaagattgcttactgggaagtatttgatgggacagtaatcagagaattggaaggttccctgtctgggtcgataaatggcatggatatcacacaggaaggggtgcactttgtcacaggtggaaatgaccatctggtcaaagtttgggattataatgagggtgaagtgactcacgttggggtgggacacagtggcaacatcacacgcatccgcataagtccaggaaatcaatatattgttagtgtaagtgccgatggagccattttgcgatggaagtacccatatacctcctgaagctgatgagatgtctctgagccttggcgttgcacgcagtcctgttgaagactgagtttagataactccaacactagtcttcatttctcacagctctgtttttgttcttgagtcaatttttctctttttctttatagaatgcattttatattcttaaattgcatattaaaattgaagtatgttcaagaataatttgtgcagactctaattagaacttttaacattttgaataaattcttagttgttggtaaaaaa

SEQ ID NO: 77088 - DNA, 1014 bp, Homo Sapiens
  misc_feature (369)..(369): n is a, c, g, or t
ggagatgaggagctgaaaaatactatgtaaaatatcttccaaaatgctttttatactttttttatttgtaatttggtctatctaaaatgttcgttagcttaacttaatgggcgttattggattcatatgactaacgtttcctcagtattgtaatgcttgaaatatttgaaagaaaaaatgttgttttttagttgaaactggtatatataattcagtgcttggcaggttagtatatttttatgcatttttcagagtcagcagtttcaaatcttattgttatcatgttataaaattttagcccacatttcaggctccgtaaatcatttgagccattattttttcccaacaaatggtgaattttttctttanatgtggatatatatgttgtaatttatgattcctggttatgtatttttgtgggatcctgcagtaaaattgacttttttgtgtctttgggagatttaaattgcgctaacagtgttgcgcaaaaatgagttcatgccatttaacatattgtattttaattattaactgtattaatttactatgaaatggacatccttttaactaaaatggaattgaacattgcagttttcaaatatttttccttgttgggtctggaaaaggaattctactttgatctgcatagaaaattttgatacaattttttgaaagttcttaggtgaaacatttacccattaaaaaggaagcagaaatactgagacatgaaaggcattatcaactaactctagactctagaacccattctagcatatctcacgtgcaatttttaaaaataagttaataattcatctcatatcaacaaaagcctttgaaacatgggttttcactagatatcacctagtgctaagataaaaaccaaaacaatatcagaattacatttatgctctaaatttgtagttgtccattgttgtgcttagtaaatgtgtgtcattaatgctgtattctcctagctattatggaaacttgtttaaataaagatatggatataaa

SEQ ID NO: 77089 - DNA, 723 bp, Homo Sapiens
aaacaatatgtatttatagaaagagcctcacaaaggtggtttatgtacagaagtgacaatctcaaaggttgctcagtagggcattgcagtagcaccttttcgagaagaagagagcttacatggtttaaaattctgagtagttgagtggggtacaggttgtcgctgtaggagccatcgtcgaagttcacttcgtagcaggtctgcgaggcggcaccgatgacgcgacagcggtagtacagcccgttgcggttcttggtgatgaccacctggcctagggacacggccctcaggagttggacagcgtgaccccccgacttgtgcttgaggcaggtgatggagaccacatagggccagtcgtccggctccatgagcacgcctgcggcgtgggcgcaggtcacgtggaaggacgtggagcagggcgcgtaggagcactggatacaggcacctgacaccttcttcatccgcttccggcagtacacgcatttcagcttccaccgctgctcggggatggcgctgatgtccacagggtggcgctcaatcacgttcaggaagcgcgcctcggggactgcgatggcacagatcacgtggatccacctcctatcggtggtcatctgcagcgcacctcctcgcaggttgcacaggcagcactccgcagtccaagcgtgggccgcgcaccgggaacacgttcagccttcattgaccaatgtgggacggatgccataa

SEQ ID NO: 77090 - DNA, 557 bp, Homo Sapiens
aatatgatgcatttcttttatgatgtaaattgaaagcagctggaagttagctatgtaatgaactcccaggaacaaatacatgagcaaattgagtcacaaacgaatgtcacactttacagagtccacaataaagttttctcttacatgtcatctagctggatcaaatacaaacatgatgctgcgtgcctactgaagatagtacccactggctttggtgtgagacagcagtctcactcttagaatttcaacagtgaatgtagtgaacagaagagctgatggaattttgcataatgtgccttataaagcaactcagtgaaaatagcgtcctgaaggcctgacctcacctaacctgaccagaatgtccagttatgttccctctacaaaaccagatggactgtgaagaagttgggaccaagtgttaaatagggaatcctcatctcagtgtgaactatgttaatggtgggagacatggttgcagataaccaaaagctgtggataaaactcaaaaaccctaataaacataacggtgtcttctcaggcagtgaggaacagtgcct

SEQ ID NO: 77091 - DNA, 1027 bp, Homo Sapiens
  misc_feature (205)..(263): n is a, c, g, or t
  misc_feature (266)..(496): n is a, c, g, or t
  misc_feature (535)..(565): n is a, c, g, or t
cgtcgacggagccagagactccagggaccctgttttttgtcttcggttccccttgatgactgatttttgtgtgtcggggcgaactatgaaaacccacacgcgcctttacgtctgccttgctgctttgctacatgtttctgcgtatccctgatcttgatacgtataccgctttgatgactgtacgctcccgcaccgacgaccgagnnnnnnnnnnnnnnnnnnnnnnnnnnnnnnnnnnnnnnnnnnnnnnnnnnnnnnnnnnngcnnnnnnnnnnnnnnnnnnnnnnnnnnnnnnnnnnnnnnnnnnnnnnnnnnnnnnnnnnnnnnnnnnnnnnnnnnnnnnnnnnnnnnnnnnnnnnnnnnnnnnnnnnnnnnnnnnnnnnnnnnnnnnnnnnnnnnnnnnnnnnnnnnnnnnnnnnnnnnnnnnnnnnnnnnnnnnnnnnnnnnnnnnnnnnnnnnnnnnnnnnnnnnnnnnnnnnnnnnnnnnnnnnnnnnnaagaattcggcacgaggggagcggccgcggctgtaggcnnnnnnnnnnnnnnnnnnnnnnnnnnnnnnncagttagtacattggtcacttagaaaaagctatcaagtattttattatttttattctacattatatacaggtcataaaaggccacagcagtttttcaacatataaaccctttaaaagtagagggcactatgaaggatagacaagtatcaaaatgaagtccagtaatgagggcatatactcagtgcagtatttctgaggaataacaaagcagataccgagtcatccatactttgcttccaagtattctatacgtttttataaacctctttgagatttgttaacagcctaggtgtgccaagttgccatttattttaaaagtgaaaccagaatgaaagaataatgaatctaggagggtacctttcctaatgcttgtcatttacagctctccaagaaggaaagcctcaattctttaccactttctacttcctccttccatcaaagataggaaagagaaaaatcagg

SEQ ID NO: 77092 - DNA, 793 bp, Homo Sapiens
  misc_feature (372)..(551): n is a, c, g, or t
gggaaaatcaaagactgcgcgaggccccacgggtacggacacttaagtggagagaaaagagaaatttttttcggggacacctgttaaaggacatatacttccaagtgcctccacttcatggcaccaaagatgtgggcgtcccctcgagaatttggcgccaattcgatcccaaaccacgttattcccaccgttcaaatgtgtccccttcaacatcttcttcgttcccaaagcttgaccccacgtggcccccagttcttcaccaaagccccacactcaaggtctcctgacggcaccccggggcaccccccaaacacctttgaagaatgtacggcgcccttttttctatttgtttattgttttctatttcttgannnnnnnnnnnnnnnnnnnnnnnnnnnnnnnnnnnnnnnnnnnnnnnnnnnnnnnnnnnnnnnnnnnnnnnnnnnnnnnnnnnnnnnnnnnnnnnnnnnnnnnnnnnnnnnnnnnnnnnnnnnnnnnnnnnnnnnnnnnnnnnnnnnnnnnnnnnnnnnnnnnnnnnnnnnnnnnnnnnngaacatgcctttaatgcagccttgaacaggaattggccaagccttgccaacttgataaggagcaaaaaaggctctaaaggtgtatggctccccagatttctggagggcatccaaatgaatgagaacagggctgcaggtagtcacctgcagcatcctcctgggcacgatgacagagggaagtgtctctaccaagatccatcatgggggacaggttcccatagccccggacacacaacctaccc

SEQ ID NO: 77093 - DNA, 1368 bp, Homo Sapiens
  misc_feature (1101)..(1101): n is a, c, g, or t
  misc_feature (1123)..(1123): n is a, c, g, or t
  misc_feature (1162)..(1162): n is a, c, g, or t
  misc_feature (1307)..(1307): n is a, c, g, or t
  misc_feature (1328)..(1328): n is a, c, g, or t
  misc_feature (1340)..(1340): n is a, c, g, or t
aagtggaaaggaaaaccagtactttaatcccacactttgggtggtggtggagggcaggtcatttccctccaatccccccaggtcagaccccaccagcaggccgtggggcctcctcccaggcctgggttatcctgtgatgtctgtccagctctgggccctggaatctgccctggaattagcggaaaacaaggcccagtggtggcgaatctatcaccaagagccggccacccagccggggtaatatttgaggaagatcttcttggccaggtccacagtgtctcctcgcggctggctggggtacctctgcttgctgagaacgaaggcctgctccagttggaagacatttttgtcaaactggtgctgttggaaagggatgccctgggccacactgtcaaccagcgcctccaggaaaagccgccagcgaggggtgtagtagttggccaccaaccccgccagctgcttgttggcatagtccaggatgttgccttctggcccccacaaggtcagctggtagcggctgttctgctcgtagaaatcggcctcggcctcactgactgccgctgctcgggcctgctctagccagctgcccagcaagaagcggctgtcactagccagcacctcgtccagtgccggcagcagctcataggccaggacgcctccagccctcaacagggaggccagctccttgctcaggtaggcgcttcttgcctcctcatagtacaagctgaccagctcctgcactgcctgccgagtgaggtccagcaggtcgtagcggaaggcggggctggtggccagggagggagcagatgtgagcagcagccgccaggcctcaaacacatcagatcggttgtaccagatgctggtattcatctgtagggacggccgcctgaccagcgggctacgattgtggcccctgcaggcctccccggagcagttgtacacactccggagcagtagcctccacgctgcccctgcgtccgggtgggagaccccatacccgccgggcgcaaaagctggtcacccaggctgccaaatctggcactgggtcctttcgccagcccaagctcagccatgagggaatagaccacttcgttctggctnatgccctcgggggccaatgccngtgcctaccatggtggagttggggaagaggccgggcaanttctgggcctccgttcacagcctctaagggctccaaaaagaccatggtttcccccaaagttgtgcagcatgaccagatgaagggctggcctggaaggaggcagtgcgggtatacacaggctggctctcagaaacaggttcagaancaggaggcggcacgggggaanagcttccagaanagccttattttgggggggccccaaaaat

SEQ ID NO: 77094 - DNA, 880 bp, Homo Sapiens
  misc_feature (42)..(83): n is a, c, g, or t
  misc_feature (86)..(120): n is a, c, g, or t
caaggatcgatagatcactatagggcgtagctgccgttattnnnnnnnnnnnnnnnnnnnnnnnnnnnnnnnnnnnnnnnnnncgnnnnnnnnnnnnnnnnnnnnnnnnnnnnnnnnnnncagtcgacggtaccggacatatgcccgggaattcggccattacggccgggcaacaagaagctttgtcctccttgggaatagacacccgaaacattctcttcacgggcaataagaagcagcctgttatagtgcccatgtatgcagcaggattgggtatgttagagcccaccaaggaaccactgaaaccactttctgctgcagaaaaaatagcttccatcggtcagacagccaccatgtcaccagatatgaacacatgtacatctgatcagttccaggagtctctaccacccgtccagtttgactggagtagcagtggccttactaaccctttagatggtgtggatccggagttgtatgagttaacaacttctaagctggaaatctccacctcaagcctcaaagtgactgatgcatttgcaagactcatgtctacagtagagaagacaagcacatctaccaggaaaccgaaaagagaagagcacctaagtgaagaagctatcaaggtgatcgctggccttcctgacttaacattcatgcatgccaaggtgttgatgttcccagccacgttaacaccttccacaagctctcaagaaaaagcagacggataactgatgtgaattggacagtttctattgcttttccttttttccatcccttccctaccatcaaaagcatacctgctctaagttaaaaaaagccaccgccaaagatccaggttcagcgagataggcgggaaaggccggactagaaagggtttcca

SEQ ID NO: 77095 - DNA, 679 bp, Homo Sapiens
  misc_feature (45)..(45): n is a, c, g, or t
ccctcctgggaccattctacctgtgtctttgaccctcggagcagngacaggcaagacaactggcaagcttgcagctgccctgatggtgcaggtgcagggaggtgaccatgtaactctgaccaatctgggaagtggagggtgggctcatgggccgtgctctgcccctgtctgctgctcccagtctctcgctctgcctgcctgctcagaagaggtggctttggcccagaggctcaggccgggactgagatggacagacccagggtggggtggggtccaggtcgggtgtggactgtcctcactgtcagtggagccccagaagctagatgggtaccaggtggggttaggttcccagaggactgagggaatcctgtacaggatgtcccagggtagatggggagcaggattgggacctgctctgacagctggacacatgagccctggatgagtatggtagggggtttgaagaatcccctgtccacctcccaaatccaggcccggccccctctggcttggagagcattccaagcccccaccccacccctagaactgccattcccaagacctctgtctcccagccaaccacccttggaacttgcctcttgtcctgctggaaagatagcagtgttctcctgacttcgccctactgcatgcagccaaataaaaggtgtgcccagtctaa

SEQ ID NO: 77096 - DNA, 1298 bp, Homo Sapiens
  misc_feature (650)..(683): n is a, c, g, or t
  misc_feature (725)..(1129): n is a, c, g, or t
  misc_feature (1138)..(1138): n is a, c, g, or t
  misc_feature (1236)..(1236): n is a, c, g, or t
cagcatgatgctcagctgcatgtggaggcactgaggctggacgaacccttgggacgggcagcccagcgggtgggtgaggccatcttccccatctacccgaggccagaccaaccccgcatgaacccaaaggctcaggatcacgaggacctgtaccgctactgtggcaacctggctctgctccgggctagcacggaccccacagcccgacactgtgggagcctggcctacagtgtggccttccacgtccaccggggccctcagcctccagtctcagacagccctcccagggctggccagccagaactgatgtcaccatgcccagagccccagctccccatactgcagaactgatgatggtcatggggggcagtggagcaggggcaggagagcaggatgagcaggaatgcaataatcaagatgatccagaatgagaaggaagcggaagacaaggctcagtgtgagaccagggtcagagctcagcaaacttccacgactggctttgaatcagaatcattttgcttctcagccacggcccctgggttacacagccttaaatggccctgccaatgctggtcacagcattccctagtcctggagactcgggaactaaaacaatcaattcccctgagcaataaaattatggacagtgnnnnnnnnnnnnnnnnnnnnnnnnnnnnnnnnnngcctacagccgcggccgctccaaccctcgtgccgaattcttnnnnnnnnnnnnnnnnnnnnnnnnnnnnnnnnnnnnnnnnnnnnnnnnnnnnnnnnnnnnnnnnnnnnnnnnnnnnnnnnnnnnnnnnnnnnnnnnnnnnnnnnnnnnnnnnnnnnnnnnnnnnnnnnnnnnnnnnnnnnnnnnnnnnnnnnnnnnnnnnnnnnnnnnnnnnnnnnnnnnnnnnnnnnnnnnnnnnnnnnnnnnnnnnnnnnnnnnnnnnnnnnnnnnnnnnnnnnnnnnnnnnnnnnnnnnnnnnnnnnnnnnnnnnnnnnnnnnnnnnnnnnnnnnnnnnnnnnnnnnnnnnnnnnnnnnnnnnnnnnnnnnnnnnnnnnnnnnnnnnnnnnnnnnnnnnnnnnnnnnnnnnnnnnnnnnnnnnnnnnnnnnnnnnnnnnnnnnnnnnnnnnntgccatcanaggcgcagatcgtaaaaggcggcgtgctggctttttcataggccggccccctgacagcacaaaaatcacgtcagtcagggtgggaaccgacaggacanaagaacagcgttccctggagctcccggggcctctgttcgactgcgctacggtacgtcggctc

SEQ ID NO: 77097 - DNA, 923 bp, Homo Sapiens
cagttcttatcaagcattccagctagcctatgccagagatgttacacagctctttaataatagtggccatagctgtaataacaatgacaacagtaggtaacggtagtcataccaacagtagggcagtgcattttatattacaactggtttcttgctctagtaggcttggggatgggtgaagacggacagggctggcgcagaccctttccttctcctctccagcccacagtgatctgggcttttacaagacagcctgcttccattcagtagtgtgggaaagttccttcttggcttagcaatacccctgagaccttgttcagtgggctgtgtctctccctgggatgctgggagcaccaagtgtggccgagctagggctgctgacttcctctgggcgcctctgggctgcgagggtctcttacaggaattgaggccctttgctgctccaagaaatgctgaggctgtgggcagaggggtgtacccaaggggactcttgctctgtgtctgactttgggggatccccaggtgggcagggcaggaaggaagcggctcccagcactgcaaaggggcagcagcattacagctcagccttccagacattgtagatccagttgagataggctgagaccttggtgtatactcctggggtgctcgggcccccgcagccatagccccagctaacgatgcccaccacatgccactggtcagattggtacatcaggggcccaccactgtcaccctggcaggtgtccacacccccttccgggatgcctgcacacatcatcttctcggtgacttccccctggtacgcatcgtctgcattgcaccgtgtgctgtcaatgacctggactgacgcctgcagcagtatgtcagacatcttccctccattctgcttcgtaaagccccatccaatgatccagagtgcc

SEQ ID NO: 77098 - DNA, 653 bp, Homo Sapiens
gacaatgacatcgccctcatgaagctgcagttcccactcactttctcaggcacagtcaggcccatctgtctgcccttctttgatgaggagctcactcaagccaccccactctggatcattggatggggctttacgaagcagaatggagggaagatgtctgacatactgctgcaggcgtcagtccaggtcattgacagcacacggtgcaatgcagacgatgcgtaccagggggaagtcaccgagaagatgatgtgtgcaggcatcccggaagggggtgtggacacctgccagggtgacagtggtgggcccctgatgtaccaatctgaccagtggcatgtggtgggcatcgttagctggggctatggctgcgggggcccgagcaccccaggagtatacaccaaggtctcagcctatctcaactggatctacaatgtctggaaggatagaactattcagagaagctgtaactccccagggacaggtcttgtgattcagcaaccagctgtaccgctgatggagctacggtcagctcggcacacacatcgcctgaccacctgtgtttgctttctctcattccctgccttacagcccctgtcccccttatgcccatttccctgggattgaacccccaaataaagtgttaagatatgaaa

SEQ ID NO: 77099 - DNA, 654 bp, Homo Sapiens
aggtacgagaccaagaaaaatgtacatcttgcaaactagcaaaaatggtaaatattacccattggtgtggagtatgtggaataatcatatcacagtgaagtctttgaatttacaatgtgattgatgatcaggtttcactgtatgtaatgtaagtatcctcatgtctgaaagaagaacttggtaatgagagcagaggtgtctgctttggtgaccagctgccctggtttgccaaggactctctcaagccctcagtcctgggcaagctggggccattggtcccactagtgactgcccagaattgattactccttatgggatgaggagaagtcaaacctctaggagttgagcttatggatgctatatgtcagacttggtgttaggccctggcacacaaacatgaggctttattctgtataaaaagaacaacacataggagactgattagcatcctttttcttctgaaaaccacttacccatagaaaaagatttcaactgaggaccaacatttagacggaaggttgggactgtttttattaccttagatttccaagttgtcctaaatataagatgcagttcataaatacttattggaatgtgagctttcagttgaaaataaatacactttctggttttgtttttgaaaaagccaaatct

SEQ ID NO: 77100 - DNA, 854 bp, Homo Sapiens
ctgaagattgcattagccctcgccagcagattgggagatcccgtctatgattataccatcactgagagcatggatgacatgctcagcaaggtggaggccgcctacctccggggccatatcaatgactcccaggcagcccctgccccactcctgcctgtctatgaactagacggagctcccacggctgcccaggtgctgatcatgggacctgatgacttcattgtggccatggttagctccctgaaccagccctttggcagcggccttatcaccccctcggggatcctgctcaacagccagatgctggacttctcctggcccaaccggacagctaaccactctgcacccagcctggagaattcagtgcagccagggaagcggccactctctttcctgctgcccacagtggtccgacccgcggaggggctctgtggaacctacctcgctctgggggccaatggagctgcgcggggcctcagcggcctgacacaggttctgctgaatgtcctgaccttgaaccggaacctgagtgacagcctggcccgcggccgcctacacccggacctgcagtccaacctcctgcaggtggacagtgagtgcagagcagagacctcgtggggcgggcacagggacaggtagagaaaggactcctcccaagggtgcccatgcctcaaccagcaccaactgccagtgaagtatggttttatttggcaaatttctattggagcagtgaacgatctggggattggaaccagtcttgccatttcctggttgtgtggccttgggaaatccatgtctcaactctgagcctcagttttctcatttgtaaaataagacacagttgttcattcttc

SEQ ID NO: 77101 - DNA, 486 bp, Homo Sapiens
ccttcagctagaaagagcagggaggcagtttggttccagagcctacgcacactcctaaccactaagttaaaagcacccacattgtgccctagaccactcctagctattaaccttgccctatccagagagaaaagaagggagccccgggctagattaaagagacttggttctagtggtgtatcttccctggcttcctctaaactctggagtaagtcattttccttgctggacttcactttccctctctgtgaaatggaaacagtcatcacaggcctgcctgtcttccagggctgttaggaggctcagatgacacccggtgtaagaattctcaagactaaggagcctggaccaagggtgagagctgaggaatcctggaccatcacccctgggacagccctgatttttctgtaccttggctaccacaggttctgctgaatgtcctgaccttgaaccggaacctgagtgacagcctggcccgcggccgca

SEQ ID NO: 77102 - DNA, 748 bp, Homo Sapiens
tcataaaaggaaaagatgtattgaattagactagatgatcacactttctcttctagttctaaatttttttaattctaatacctatattttcaagttatgtcaattaaatcattatcaggttatttcctaatgtaagaatagctaaaatgttgcagagaaataagtgacccaacaaaatttattcatctattatgggtaagatctgccataaattcttcctaaataatttgtttactaactctttaggccactgtgctttgcggtccattagtaaacttgtgttgctaagtgctaaacagaatactgctattttgagagagtcaagactctttcttaagggccaagaaagcaacttgagccttgggctaatctggctgagtagtcagttataaaagcataattgctttatattttggatcattttttactgggggcggacttggggggggttgcatacaaagataacatatatatccaactttctgaaatgaaatgtttttagattactttttcaactgtaaataatgtacatttaatgtcacaagaaaaaaatgtcttctgcaaattttctagtataacagaaatttttgtagatgaaaaaaatcattatgtttagaggtctaatgctatgttttcatattacagagtgaatttgtatttaaacaaaaatttaaattttggaatcctctaaacatttttgtatctttaattggtttattattaaataaatcatataaaaattctcaaa

SEQ ID NO: 77103 - DNA, 1057 bp, Homo Sapiens
  misc_feature (47)..(47): n is a, c, g, or t
  misc_feature (105)..(105): n is a, c, g, or t
  misc_feature (186)..(186): n is a, c, g, or t
  misc_feature (248)..(248): n is a, c, g, or t
  misc_feature (273)..(273): n is a, c, g, or t
  misc_feature (336)..(336): n is a, c, g, or t
ctacacaccactgggggggtggtgccctcctcacgcactcgtggtcntcacacagtgtaagtgcagtgatgtgtttaaacagagctcttcgtgggagtgatattncatggcagtgtacaggctcctctgtcttgtgagattttaaccagctggcgccgtgtcatttgccacatgtggaccatcatnaaactagttgtattctgtgagtcccgtctgaactgcttccccattcccgggacccatagccnggccagccaggtcccgaccacagcncccaaagttattaacccccgatcatacctccagcagcatttcattaatacgtgagctagtccntgctgggtaagcattccgaggtaaccagggccctctggcaccccccctcaaaagccagctcttccgagggtgagtactccttgtttctactgtgagtcgcgtcttgattttccctttctttgatgtctcagtgtgtgtcccaaacacctgcatctcatggactgtttgtgcccatgcccagttcctggcatgccaggccctgggctcaggtgcacaactgactctctttttcactccctaggggaaccccctcggaaggggaagggttgggtgctgacgggcaggagcacaaagaagacaccttcgatgtgttccgacagaggatgatgcagatgtacagacacaagcgggccaacaaatagatcaaaaccactgatgtgaaagataagccttgaagcagcaattgcccttaaaacatcatccctgccctggatcggcctggagccagtgcccaagtacggtttgttccagggtcacccccgagaggacaacaggcatctggaagtgctctctcgccactctgggtgctttactgtctctggcttgtttccatcactggaaatcacttagagaattgtagtgtttttggtccttgataaagcctagaagacatttgtgatgttacaaaatggaagttttcttttgtttctgttttttaagatctaagaagttgtgaatgttgttaatcatttagccgttgcaataaatgtagaggaaatgc

SEQ ID NO: 77104 - DNA, 447 bp, Homo Sapiens
  misc_feature (380)..(380): n is a, c, g, or t
tttgtgctcacatttctcaatgtgacaagtttcccaacaccccccttagctgtgagcaggccctgagtctccccctttcctaggagggaaccttcctggtcaacgatgtttagagctcgacctctggcctggacttgactgctgcccctaagcacagagtcagcctccccaggatggtccacgtcataatcccgactctccttctccaaacactctttctcaatcagcctggaagatccaaagtcccccaaaactgcagagggaccaaaactatactcctgtgaccaagaggactcttgagaaactggatggccaaagtcttgttcccaagaaccacggagcgcaaatttccagtcctgagaacggaaatgccccaattnccggtggccaatgacctggtcccgagaattagagtgagaaaattccagatcccggccacattctttg

SEQ ID NO: 77105 - DNA, 1125 bp, Homo Sapiens
  misc_feature (90)..(90): n is a, c, g, or t
  misc_feature (191)..(191): n is a, c, g, or t
ctcaggtgggaccagagatcgaacaattcagcatagaaaacagcaccgataaccctgacctgtggtttctacatgaccaaaatagttctnctttcaaattctatcgaaagaaagtgtttgaactatgtccatcaattggtttcacgtcatctccgcacaaccttcacactggtgtgtggtgacaccacggngttctcaggagagccccgtggacctcatggaaggggaagcagagtttgaagacgagccccctccgcgggaggctgagctggagagcccagaggtgatgcctgaggaggaggacgaggacgatgaggatgggggagaggaggcccccgctcctggaggggcgggcaagtctgagggcagcacccctgccgactggccttcccggcgaggctgccgaggacgacctggctggagcacctgccttgtcacaggcctcctcaggtacctgcttccctcggaagaggatcagcagcaagtcattgaaggttggcatgattccagctcccaagagagtgtgtctcatccaggagccaaaagtccatgaaccagttcgaattgcctatgacaggcctcggggtcgtcccatgtccaaaaagaagaaacccaaggacttggacttcgcccagcagaagctgaccgataagaacctgggcttccagatgctgcagaagatgggctggaaggagggccatggcctgggctccctcggaaagggcatcagggagccggtcagcgtgggaaccccctcggaaggggaagggttgggtgctgacgggcaggagcacaaagaagacacattcgatgtgttccgacagaggatgatgcagatgtacagacacaaagcgggccaacaaatagttccaggggtcacccccgagaggacaacaggcatctggaagtgctctctcgccactctgggtgctttactgtctctggcttgtttccatcactggaaatcacttagagaattgtagtttttttggtccttgataaagcctagaaaacatttgtgatgttacaaaatggaagttttcttttgtttctgttttttaagatctaagaagttgtgaatgttgttaatcatttagccgttgcaataaatgtagaggaaatgca

SEQ ID NO: 77106 - DNA, 1157 bp, Homo Sapiens
  misc_feature (74)..(74): n is a, c, g, or t
agccacagacttcctaggctgtggtcacagctccttgtctgcctggtccctgtcaccttgcagtgccaccaccnccaggggctctgcttgcttccagtggcttctgtagctttggcaactggcagatctttatggcagtagaggtgccagcatggaggatggagtttgggtttataacccaaccctcgaacgaaccagcctgtgggggcctggagtggagctggttttggggagtcacaggtgcggggggttcatcatctcctttctccttctcctttcctgacccctccgacagcttccatgttggccatgggtcaggtgaatggatggagctccaagcggggctcagcccattgacccgagcgaggcgcacacacctgcagcgtggatcaagcgcactctctccagcatcgccctgaccattccatgtgctttgtcctagcatgttcattcttgactttctccacttcattttattaaaaagttaaatgctttaggaatctgtggcgtgtggccactgaccgccccccacctcctgccgctcctccaagtttgagctgagatggttctgtgagtccttggcaggggtcaaagggcacatctccttgaacctagaaagccccctacactctcagaggacacctctcctgtggattcagcgctggggcagtgaaggtgtcgggagccagcagagcatggtgcgtgctgccagctgccggccagccgggatagaggagatgccactggccctccgtgcccccagcccctccctcttaaccgaggctgtccttgctctctgcagaggccgctctgcaggatcctcgtgtcgcgcgtgatgtgtggtggcacagccgtgtcaaagtcacagtgtcttttctgtcgttctagttccagggtcacccccgagaggacaacaggcatctggaagtgctctctcgccactctgggtgctttactgtctctggcttgtttccatcactggaaatcacttagagaattgtagtgtttttggtccttgataaagcctagaagacatttgtgatgttacaaaatggaagttttcttttgtttctgttttttaagatctaagaagttgtgaatgttgttaatcatttagccgttgcaataaatgtagaggaaatacaatgtgaaaaaaa

SEQ ID NO: 77107 - DNA, 994 bp, Homo Sapiens
  misc_feature (146)..(154): n is a, c, g, or t
caagttgtgaaaggtacatatattcgtttatgtctaaaataacaaccagaatcttctttatatatagtatttttaaaagacacatatacacaaacacaaacatgtgcagtaaactcaaacacacaaacagtaatacctacaagaannnnnnnnncctgtttcacaaataaggaaacttggatcctagaagctaaattagtttactcaaggtctaaaatagactaaaataatcagcatattaaacagttctcttgcttttcttccgttccctatctttaggaaacgtaccatgacttaattgtctccaaagtagactcattcttcctcctgccaacccacactcccactcccacccccaaccatacccctaaaatgggatcgaaccctcactgtccaaagtacccaggatccacgcagagtgatggaggactgagctagggagccacagagcaggcctcaggagtgaaagacgaccaagcccagcagggccctacagcccccagctggccagggaggaccataaaatggcttgcagattgactcttaatctagtcaagattgaccaagaagccagcctcttgcagggcacgggtaggttaaggggtccataaatcatgctccttaaagcccagtcagcaaatgttatcctcagtttttcttcggccgaccaagagcttgggagtcactcctgacaagaagagaaagtcttccaaggaagcatgaccattcctcctcactccagcctgctttccatggcctctttctcctggatctcccctcttggtctcaggacatccatgagaaatggggcagcatttcatccttgacgattcattaatttagatccattggttgggcctagtgatgcattctcagctgccctcgatttccccttcagtgaagacatcctcatcctcaaagcatctcttatcttgtgatccataatggttccaaacagcaggatgaaaaaacccagagtaacttcaagagtccc

SEQ ID NO: 77108 - DNA, 1037 bp, Homo Sapiens
tgacttatatcttataggatttatcacaaaatgttactgcccagtgcatttttgcaaacaataacaattcactgagagtaataacattcacatatgtaattagagtttaaaaatgtaaaaaacttagggtaacaaacactttaaacttattttttagacattcaataagcccattctcccacaaactgtttgattacaaagaagcacaatgggttaactgtggcaaaacataagaaataaggcaggggaggcagatacagacttgagaacataaggatatccaaacaattttgtcaatatcaaaagacaaaatcaaaacatcttttataatataaaacaaatccatataattaaatactaattaggtgaaagattatagggtatataacatttattttctctacataaatttgcatatcttaaatttaatgcaaaacatcatgtttcaacttcaacttaacatcataacatgtagttcttggtgagtctagatgtaatggaatgaatatttaaatagacttcaaagatcctatcaagtttttatttggttattgttgctttaagtccttaatgcttttctttatttattggactaagccaattttagaaacaaaatccacaaccaacacacatataatgcagatgtttctgaaaaaactaaatagtgttatctttagtatatcattaaaatagtggttgtggttaaacaaacaagcaaacaaattactgcaactcatttatgataagcttacaaaaagtaacattttaaagtttcatctggtgtgtttgcactgtaggaaaataaatctggatgtgagtaagatgtgcttgactgaataaatgaaacccccagttagcactgggttatgttccagagcagtgcattcgtcctcacttattacttcgggaatgtgtgttcacaatccaccagctgcaggttttaatttactaagaaatgaaaggaattaatcctggtccatccactgcttcctcccttgttttactatcttcattttgacatcaggcactttgtgccc

SEQ ID NO: 77109 - DNA, 1589 bp, Homo Sapiens
gcggccgcctgcgagtgctccaggagctcgccgacctcgtggacgacaaggagtagccgcctaggggctgccggcccctctgcctcccccgcacctcgctcccttcccttccccgcacccggacttcgcagtcagcggttctcaacctctgccccgccccgccacgcgcgtccgccgccggtggcccgggcccgggctgcacccccgcatccccaagccagcggcaggaagtctcaggaactgccccagggccgaaagggcgccgctgcgagcgcctggctgacagccacagcggtggtgacggtgctgggagaccccgcgtgcgctttccccttgagatgtaaaccgggaacggggaaggggctgaggggagaaaggacatggccttccccgcgagtccatggccagtgactgtggcccgactcgaaaacaaccctcttctcaaaagggaccatcaccgccccgagcgtgcgcacacagaccggtcggaggcgagaactggtctctacagggcacagttcagctcctctgtggatgcgtccccagatcgcaggatttccaagaaatcgagcctgtcccttgtgcacttgggaataattccccaagacagcacttcgggattccgggttatcctgaggctgcccgggacttttccagctctccagccccaggtctcctgacattgtgttccaggctgcgggctaagccagacagtgtttgcctccggttctttccaccgtgggaagcgaacgccacccccacccgccttttgcctgcgagtctccctcgctggcagaaaggaagccggcccggtcccgagaggaagatggcgctgcgaattcggtgaggacagccggccccgcccccgacaaggagctcgctcgttcacctggtgtctgggaacttgaatgtgtgaagggcgcttattgttctgaacccttgattgctccctcctcgggctgcatttcaaaaatagtcatatttttaaaggagttggaggagagggagggggaggacatggcaccattccagaaaccagcattgttacaacaccatagccagtatatttagtttggcttttcctaacatagaaatcttcaaagctggggaagtggaaataaagttttaaaaatgagagagcagttttccaactatgtcaacaaagcctatcgtgttgatgtttttattgaccattttagcaacaggctaataaaatttcaaattgaaatttttattttcatggctttaatccatgatagtttaaatactgggggccattaagagtggatgtagctaagagcttagctaacattgccttttcactctatttttctcagatattgtaagcattctgtttttcaatattgtagttaattttttggctttcaacagcagccctagtaatggtggagttgttaattaatgtgtatattgtactgaatttctgtcagttaaggggttcactgctttggtggaaattggtggaaattgctagcaggttccacgatgtttatttttttctccatgttgtatatcattaccatttcacatacgcgtttctatttttcttcctctccacctgatctcct

SEQ ID NO: 77110 - DNA, 522 bp, Homo Sapiens
gatgagaaagatcaggtctttactgcaaaatcattcaaaactcacacggcagcaattccttcaatacattgcaaagactcctcagggccagagccctgctcactaggaacagtgtattgcataaaataacattttaaaaatagtgtgggcactacctttctgagggaggggaggcgggaagagtcaatgcatctgaaagcactggcagcttctggggaacgggccccccagggcctcaaacctgctgcctccgagggcaccttcggggagaatcctcacaggcccaagccctccccaggccaggctcctgcccactcagggatggggcaatgagggctctgactaggctgggcttgtggtggagcgttaatgtgggccatggcggtgcataacccagctcctggcttaggaggcattggcgtctgggcacaggtgtgtgccatgaccgggagaagctgtgcgcagcctccacctgcctgccaccgttgcctctgttccgcggcacaggcatccagctccaag

SEQ ID NO: 77111 - DNA, 421 bp, Homo Sapiens
taatttttgtgttctagtgactgtggctgctgggtagaggagaatttgtatatgtggaaaatacaagcattgtgactactagttacagtcaccatcttactggtaactgtgacaaatttcaggaaagaggatcatgatagatatgggggtgatgatagtgataatcttggagatttaatagaagaaatttcaaagtttagcagtgaatgctgataactctccggtttacttttgggaggaaagacagggattagaggaagtgaggaaaaggaaaaagtaacccctgcaggaaggatcatcctggaaaaaactgtggcgtggattcagtgtgtactcattaacttcttacctttccttgtttgtattgttcgtcaggttcagaaatcaacaccctatcaccactaccaaaatctttaggcac

SEQ ID NO: 77112 - DNA, 370 bp, Homo Sapiens
aagtgggtggatcgcttgagcccaggactttgagaccagcatggcgaaaacccgtctctgcagaaaaaaaattagctgggtgttgtggcttgcgcctgtagtcccagatacgtgggaggctaaggtgggaggattgattgggagttcaagactagtgtgctgtgatcatactatctagcctggacaacagagagagaccttgtcacaaaaaatacgtatatatttcttttaaaattgtttcttctaacagctattaagaatttgaaacttggttctcttcaaattttctattattttggaaaacattttagtctgcctggaatttctgtgtataatctgacgctttccaataaaaaagtaatgactggaa

SEQ ID NO: 77113 - DNA, 1018 bp, Homo Sapiens
  misc_feature (894)..(908): n is a, c, g, or t
aggtgttcagcaagatggagcaggtgtctggcgtgctgggcatcgaggactactcggtcagccagaccacactggacaatgtgttcgtgaactttgccaagaagcagagtgacaacctggagcagcaggagacggagccgccatccgcactgcagtcccctctcggctgcttgctcagcctgctccggccccggtctgcccccacggagctccgggcacttgtggcagacgagcccgaggacctggacacggaggacgagggcctcatcagcttcgaggaggagcgggcccagctgtccttcaacacggacacgctctgctgaccacccagagctgggccagggaggacacgctccactgaccacccagagctgggccagggactcaacaatggggacagaagtcccccagtgcctgccagggcctggagtggaggttcaggaccaaggggcttctggtcctccagcccctgtactcggccatgccctgcggtcactgcggttgccgcccctaattgtgccaaaggctgacccggcccgggctgcgtacacccttgccctgctttgccttaaagcctcggggtctgcccggcccctcgcccctgcctggcactgctcaccgcccaaggcgacgccggctggaccaggcactgctggcctttctcctgcccggcctcggaaccagcttttctctcttacgatgaaggctgatgccgagagcgggctgtgggcggagctgggtcagtcccgtatttattttgctttgagaagaggctcctctggccctgctctcctgcagggaggtggctgtcccgcgggaagccatcagcttgggccagctggcaggtggcaggaatggagaagctgaccctgctggccaggcaaggggccagannnnnnnnnnnnnnnagctgccatcgctctcccacccagcttggccccctgcccgcccacctccctgggagccgggcctgtacatagcgcacagatgtttgttttaaataaataaacaaaatgtc

SEQ ID NO: 77114 - DNA, 572 bp, Homo Sapiens
cccagattccattcacgttccaaatcgtggacagtaaaactgaagtcagataaacacagtcacaggtacaactgggagcgagttttaacatagtggtaattttgcaaatgccaacatgaatactagtgagtactcaatttacgacagacaatttcacaaaaaccaaccacagagtgatttgatattcttgcttcttagagagttttctaatccatataatgcaatgggtcaggttgctaatatgattaaaaaaattaatcctgtagaaatgatgtattagacatctataacccaagaaaaagatgtcttttgtataacttttaaattcccatttgtctatcttaggacaaatgatgacttcttagtgtagtaatgaaaacgtataaatcctgctctgtggagaaaagctagaaccatgggacattaagcaagaatactcctctgatttaggctcccagactacaactaacagtctttatgtatttatcatcttggttattgttttatctcaagcatatacagtgtgcagaaagtagaataatgaataaaatatgaccatggagaaaaccctt

SEQ ID NO: 77115 - DNA, 1045 bp, Homo Sapiens
  misc_feature (55)..(55): n is a, c, g, or t
  misc_feature (57)..(57): n is a, c, g, or t
  misc_feature (132)..(132): n is a, c, g, or t
  misc_feature (196)..(197): n is a, c, g, or t
  misc_feature (215)..(215): n is a, c, g, or t
  misc_feature (263)..(264): n is a, c, g, or t
  misc_feature (273)..(274): n is a, c, g, or t
  misc_feature (293)..(293): n is a, c, g, or t
  misc_feature (331)..(331): n is a, c, g, or t
cgctcatgttggattgcgatacatcaccagacgttgactgtacgattatcgctcntntggattgcctcgagcaagatcgcacgagtgacacagagtgtaagcattacatgccttgatgagtattgtctgtgnactaaagagtgtagtgagaaatccacaatatgaggagagatgtatccacatgagttcttcgccnnatatgagttgagcagctntgatgatacctttgcttggctatgacaagctcagcacgtgattatgcnntagaccgtnnggattgatccaagtccatntactgtgcgtaaaccagatgaaactggaaaatcagtantgggaaacaaaagcaatagagaagaagctgtattacagcggaaaacggcagccagcgccccgccgccccccagcgaggaggctgtgtccagcagctctgaggatgactctgggactgatcgggaagaagagggctctgtgtctcagcgctccactcccgtgaagatgactgatgcaggagacagtgccaaagtgaccgagaatgtggtccaacccatgaaggagctatatggaattaacctctcagatggcctctcagaagaagatttctccatttattcaagatttgttcagctggggcagagtcaacataaacaagacaagaatagccagcagccctgttctaggtgctcagatggagttataaaactaacacccatctcggctttctcgcaagataacatctatgaagttcagcccccaagagtagacagaaaatctacagagatcttccaagcccacatccaggccagccaaggtatcatgcagcccctaggaaaagaggactcctccatgtaccgagagtacatcaggaaccgctacctgtgaaaagagcgcaggtccacctggtggacacgtctgattagcttagaacctgtcttgtctcatcttcaaaaggtaacttattaaaagtcctttgcgtctgaagcctttctccttttctgtcacttgcaaattccaaattatagctaataaagatgactagataatttgc

SEQ ID NO: 77116 - DNA, 527 bp, Homo Sapiens
ggccccaaccgccctcgggcactggggagctgggctggggctgctgctctggggtctccgggggccacagcttggggtgagttgaagacctcaggggatgtggaggggtctgcggggccctggccgcacaggatggccttcagggaaggtggtcttggggcatggtgcagagcaggtgaccggagggaatcggtgacggagcggggccaagggaggggtccggagggagtcagggatggagggcagagggagtggatgtgggggtttgaggacgtgtgacaagctccagcaggggtgggggccgggctgagggtgggggtgcgaggtggtcactcccatcgtgcccctggccgtccctccactcacccacacctggcccagtccacgttgaggtccaggactgggaaggaccgggtgagtgcaccggggacccaggccaggtgccccccggagcctgctggggtggccagagcaggagggggtgtgtttcctttttgtgggtgttgcatgcaaatcaagtggacaag

SEQ ID NO: 77117 - DNA, 766 bp, Homo Sapiens
  misc_feature (69)..(85): n is a, c, g, or t
  misc_feature (349)..(361): n is a, c, g, or t
acgaccatagggctaggtacgaggcctgggtggctgaattcggcacgagggagagaactagtctcgagnnnnnnnnnnnnnnnnngggaaaaaaaggaaggggttaattctcaagcgtctaagggttagcaaacgagggctatttggttttaaaaaggggcagggcgacactggcggcctgaggaggggtccatgggtctggggggctggcccgagccaccctcaggccccgtgcccacccggtccgccctcggccgggtccagagggatggctggtgacgaggggggaggtctgggaagaggctgggaggcaggagagactcccccaggctccccacttaacactgannnnnnnnnnnnnttgggcggacacacactcataaaacagaaaataaagttaaattaaaaataaaaccaggcagcccggcctcgggcctgtgctgggcccgtgggaccagccatgcaaccttccggcaatcgcagaggcccccagggcttggatgcaggggaggaaagggccaggcctgttggcacccccacccggcaaaccccctggccccggaaaaagggggccaaggtggcaagaagaaggtggcttccctccctgggggcagagagaagatgacatctatgactttttaaacatgcggcgttttgtgaatatcatgataataacaagagtcaacaggctaagtgagaggagagggatgctacgcctacgctgcccccaccacggccagccggcttctgcgcctttggtgttgga

SEQ ID NO: 77118 - DNA, 462 bp, Homo Sapiens
  misc_feature (138)..(171): n is a, c, g, or t
ccaggggtctgccgggtgggggtgcaacaggcctggccctttcctcccatgcatccagccatgggggcctctgcgattgccggaaggttgcatggctggtcccagggccagcacaggcccgaggccgggctgcctggnnnnnnnnnnnnnnnnnnnnnnnnnnnnnnnnnngagtgtgtgtccgcccacccccacccccttcagtgttaagtggggagccctgggggagtctctcctgcctcccagcctctcccaagacctcccccctcgtcaccagccatccctctggaccaggcagagggcggaccgggtgggcaggggcctgagggtggctcgggccagcccaccagccaatggacccctcctcaggccgccagtgtcgccctgcccctttttaaaacaaaatgccctcgtttgtaaacccttagacgcttgagaataaaccccttcctaatattccaa

SEQ ID NO: 77119 - DNA, 371 bp, Homo Sapiens
caggagccaagcacatatactgatttggaaaaaggcacaggtagctcagtttatttgctttctaccctgcctggccacttgctgtttcttcagtttctaatttgagctgtaactacacaaggaaagctaaatagtctggaaaatttttggaaagaatccacaaagccaaaggagactggcctatactcattttatctggggatgtaccttacccttagagactttgaaaaatatgaagctcttattttgtaacctgggtaaatgttagtttctagattttcggcttaacatctaataataacatttaaaaagtgcttttgtaactattagttatttgcaataaaatgctttccttctacagtcccaagttc

SEQ ID NO: 77120 - DNA, 1088 bp, Homo Sapiens
  misc_feature (61)..(95): n is a, c, g, or t
ttggcgctcgcgtacagccgaacgacgagcgcagcgaagtagtgagcgaggaagcggccgnnnnnnnnnnnnnnnnnnnnnnnnnnnnnnnnnnncagtcgacggtaccggacatatgcccgggaattcggccattacggccgggagttctaaaaacatttcagagttattaattatccttatttcatttaataatgattatctttaatcagtttttataagcaaattccattgttcctcctattggaacgtaacactgtttacacagcataattgaagttgcaggggagacaggctaaatctgacttcatctgtactcactttcactaagcattgaatggccttaccactcttctgcaagatggaggaagaccgcaaaacttagtgcccatcacactgaaggaagggatgtggttttttttcctgcttctgtactgctacctaactttgtgatttgctttggattttaatatttgtttctgttttagattcaagcccgtaagttttgaggtgacttcagctccattgtgaaatagatagttctcttcatatttcataactacatttcaataattctaaactttctacattgatttttagatacttatttttcaagcttggtttctcagctgatcagatgaatttattcaacttcaatacaaagaaagacaaacctattatagtttcaagtgagtagatattatactgtacaggacagctatttgaacacacacatcactgctttagaaataaaaccgccaatttataaatgtatatgacctacattttataggaaaaaatgtttttaaatgctagtcatttatataatgtgctttgaaggatttgctagtccacttctgtcactttttagtacactggtatcttttatatgtaatgtatgctttttattattgtagcaaagcatttcagtagaaagaattttgcaacaatatgggggaaatttttcattgttggatttgaattatactggattttatctgtgtagtcttacttgtctttattttaatgctgtctgaagggaacttggtatccaaataaagcaggtaacctcattttacttcaagggc

SEQ ID NO: 77121 - DNA, 1128 bp, Homo Sapiens
  misc_feature (1019)..(1081): n is a, c, g, or t
ccggcagtaactactaacggtcctaaggtagcgaggcctgggtggcgaattcggcacgagggcagcagcctgctaccaccacggccaccagcactgctgcagccgccccaagcactgcccccagcgcggggtccacagccggtgactcgggggcggaggacgggccagcttcccgtgtctcccagctgcccacgctgcccccgcccatgccctggaatctgccagctggtgtggactgcaccaccagcggcgtcctggccttgactgcacttctcttcaagatggaagaatgccaacctggcgagccgagcgaaggcccaggagctgatccaggccaccaaccagatcctcagccacagaaagccaccctcaagtctggggatgaccccagctcctgtgcccacctctttgggtctgccccctggcccctccagctacctgcttcctggcagcctccctctggggggctgcggttcgaccccccccaaccccaccgggctggctgccacgtctgacaagagagagggcagcagcagctctgagggccgtggggacacagataagtatctgaagaagctgcacacgcaggagcgggcggtggaggaggtgaagctggccatcaagccatactatcagaagaaggacatcaccaaggaggagtacaaggacatcctgaggaaggccgtccacaagatctgccacagcaaaagtggggaaatcaacccagtgaaggtgagcaacctggtgcgggcctacgtccagcgctaccgctacttccgcaagcacggtcgcaagccaggggaccccccagggcccccacggccgcccaaggagccagggcccccagacaagggtggcccgggcctgcccctgccccctctctgagagccctggccagctcttcgcccctcacctctttgaaactctggacgtatttatggctccaacctccccacctccctcccccgtcagtgggatgactgggggagggttgctgcagggaagaggagagccccctnnnnnnnnnnnnnnnnnnnnnnnnnnnnnnnnnnnnnnnnnnnnnnnnnnnnnnnnnnnnnnntgtttgtgcccctctccccaatttcattaaagatttcatgaaacatt

SEQ ID NO: 77122 - DNA, 2056 bp, Homo Sapiens
  misc_feature (265)..(265): n is a, c, g, or t
  misc_feature (340)..(340): n is a, c, g, or t
  misc_feature (673)..(712): n is a, c, g, or t
  misc_feature (734)..(736): n is a, c, g, or t
  misc_feature (1003)..(1015): n is a, c, g, or t
  misc_feature (1268)..(1276): n is a, c, g, or t
  misc_feature (1765)..(1815): n is a, c, g, or t
  misc_feature (1974)..(1998): n is a, c, g, or t
ctaattgtgaaacgatgcagttatccagtacatagttatattgtatggacatacgtcccaggacgtggacatgtgtgagaactgaagactctagaagaaattgaaggcatatatccgaaaggcatacaaggatcgggttaaatgttacactaggagggaagtggacccaggattgaaaagcatccaaagagagtggtaggacatgatgatattcgtgcaatctcccacagaatcttggtattacatcgacccaattgaggattcntaccaaagtagtgaaaagagacccagtgaaggtgcttaacgtggatgatgataatgaaaatggatgtgagttggntaaggagatcaaaaacagctttaacccagaggcccaggtttttatgcccataagtgacccagcctcatcagtgtccagctctccatcgcctccttgtggtcactctgctgctgtaagccctaccttcatgccccggtccactcagcctttaacctttaccactgccacttttgctgccaccaagttcggctctaccaaaatgaagaatagtggccgtagcaacaaggttgcacgtacttctcccatcaacctcggcttgaatgtgaatgacctcttgaagcagaaagccatctcttcctcaatgcactctctgtatgggcttggcttgggtannnnnnnnnnnnnnnnnnnnnnnnnnnnnnnnnnnnnnnngcaccggcacaccacaccacannngcagcaacaacagcagaaaacctctgctctttctcctaatgccaaggaatttatttttcctaatatgcagggtcaaggtagtagtaccaatggaatgttcccaggtgacagcccccttaacctcagtcctctccagtacagtaatgcctttgatgtgtttgcagcctatggaggcctcaatgagaaatcttttgtagatggcttgaattttagcttaaataacatgcagtattctaaccagcaattccagcctgttatggctaactnnnnnnnnnnnnntgtatcgtacaagttaaaatgcacgggcccaagggggattttttcttttcacctccttgagaattttctttttataagcttatagtaaggatacattcaagctgggttaaaaacaataataactaaaacatgcatcatttttcattggccaaccaagcacaaagtcatttaatactggacggtgatatttcaaaggtatactctcagatatggcctcttacagtatttaagatatagcaaggacatggctgannnnnnnnnataaaaattggcactaataagtgggtttattggtcttttctaattgtataatttaatttagtacaaagtttgtaaaatatcagaggatatatatatattgtttctacgacatggtattgcatttatatctttttactacagtgatctgtgacagcagcagcttcatgttgtattttttttactgaaattgtaaaatatccatcttaaagacatcaactattctaaaaattgtgtacaggatattcctttagtggtggaattaaaatgtacgaatacttgctttttcaaaaaaatgtattttctgttaaaagtttaaagatttttgctatatattatggaagaaaaatgtaatcgtaaatattaattttgtacctatattgtgcaatacttgaaaaaaacggtataaaagtattttgagtcagtgtcttacatgttaagagggactgaaatagtttatattaagtttgtattaaaattctttaaaattannnnnnnnnnnnnnnnnnnnnnnnnnnnnnnnnnnnnnnnnnnnnnnnnnnacccctttgcgggcccgcttcggcccctcaaaaaaactttttcaaaaccatttccctttgggcccccggccccccagaaaggtaaagggaacccggggccaaaacctggttccccaaaggaaaaccccggggtcctgaaacaaggggcttgggaatctnnnnnnnnnnnnnnnnnnnnnnnnnggggcggaaaaccgcgaccggttcctggaaacaaattccacgaaagggaagcttccgg

SEQ ID NO: 77123 - DNA, 827 bp, Homo Sapiens
  misc_feature (62)..(62): n is a, c, g, or t
  misc_feature (305)..(317): n is a, c, g, or t
  misc_feature (356)..(389): n is a, c, g, or t
  misc_feature (571)..(579): n is a, c, g, or t
cctcccgccccctagtctccagatttcggcttgacccaccacctcccccaccactccactcntgctctttctcctaatgcccaggcatctatttttcctaatatgcagggccaaggtagtagtcccaatggaatgttcccaggtgacagcccccttaacctcagtcctctccagtacagtaatgcctttgatgtgtttgcagcctatggaggcctcaatgagaagtcttttgtagatggcttgaattttagcttaaataacatgcagtattctaaccagcaattccagcctgttatggctaactnnnnnnnnnnnnntgtatcgtacaagttaaaatgcacgggcccaagggggannnnnnnnnnnnnnnnnnnnnnnnnnnnnnnnnnaaagcttatagtaaggatacattcaagcttggttaaaaaaataataataaaacatgcatcattttccatttgccaaccaagcacaaagttattttatactggactggtatatttctaacagtatactctcagattatggcctcttacagtatttacagattatagcaaggcacttggctgannnnnnnnnataaacatttgggccctaataagggggttaatcgggcctttcctaatggtataatttcaatttagtcacaaagtttggtaaaatatcagaggatatatatatatggttctacgacatggtatggcattaatatctttactacagtgatctgtgacagcagcagcttcatgtcgaatttataactgaaactttggtaaatatccatctttaagaccttacctattctacaatttgtgtcccggaatttc

SEQ ID NO: 77124 - DNA, 1408 bp, Homo Sapiens
  misc_feature (121)..(121): n is a, c, g, or t
  misc_feature (182)..(251): n is a, c, g, or t
  misc_feature (1001)..(1023): n is a, c, g, or t
ggagggcctcccataggctgcaaaacacatcaaaagggcattactgtactggagaggactgaggttaaggggggctgtcaccctgggaacattccattggtactactaccttgacctgcantattaggaaaaataaattccttggcattaggagaaagagcagaggttttctgctgttgttnnnnnnnnnnnnnnnnnnnnnnnnnnnnnnnnnnnnnnnnnnnnnnnnnnnnnnnnnnnnnnnnnnnnnnacccaagccaagcccatacagagagtgcattgaggaagagatggctttctgcttcaagaggtcattcacattcaagccgaggttgatgggagaagtacgtgcaaccttgttgctacggccactattcttcattttggtagagccgaacttggtggcagcaaaagtggcagtggtaaaggttaaaggctgagtggaccggggcatgaaggtagggcttacagcagcagagtgaccaaaaggaggcgatggagagctggacactgatgaggctgggtcacttatgggcataaaaacctgggcctctgggttaaagctgtttttgatctccttatccaactcacatccattttcattattatcatccacgtaaagcaccttcactggtcccttttcaccaatttggtaagaaacctcaaatgggtcgatccaaacactaagatcctgtggcagattgccacgaacatcatcaatgtccaaaccactctctttggatgcttgttcaatcactgggtccactttctcccctatgtgtatacatctaaaccccgatcctttgtatggcttttcaggataccagtgcccttcatatttcttcttaagaagtctttcaagttcttcaccaaaaatgttgacacgtctcctgggaagcttattgtacaaatacgaaataataaaatttagtgctacttggatttcaagctgcatagctgctacgccacaaaattaggtttcaactccccccccgagagnnnnnnnnnnnnnnnnnnnnnnngatgttcagtttgtggcagagaaacaaattttcattcaaagtgctggtattagtagattatccttcaccttgagtgatcttgttcgggctgcttcggggcggcttggaccacagacccgcggctgggcggggagcagcgcggcagggcgggggcgcgggagggtcgggagcggcgagctcgccgagtgcaagacgttgccgctgcggggctgaggacagaggacagaggcctcgggcaggccttgggagatcgccgttagtggctcggggtggcgggcacgggggtcagacgagcgcgctcacttctccacacagcccggtgcccggcccagcgtccccgtagtgcgcccgctacacgccgggccagagctttgctccttctccc

SEQ ID NO: 77125 - DNA, 774 bp, Homo Sapiens
  misc_feature (154)..(224): n is a, c, g, or t
  misc_feature (440)..(450): n is a, c, g, or t
ggcaagttcggctctaccaaaatgaagaatagtggccgtagcaacaaggttgcacgtacttctcccatcaacctcggcttgaatgtgaatgacctcttgaagcagaaagccatctcttcctcaatgcactctctgtatgggcttggcttgggtnnnnnnnnnnnnnnnnnnnnnnnnnnnnnnnnnnnnnnnnnnnnnnnnnnnnnnnnnnnnnnnnnnnnnnnacaacagcagaaaacctctgctctttctcctaatgccaaggaatttatttttcctaatatgcagggtcaaggtagtagtaccaatggaatgttcccaggtgacagcccctctgtgaatagcacgattaaaatccagttgtatataatggacagctaacggaacaatataatcacccacaatgcagctaggatagtgttgcggctataattttgtgnnnnnnnnnnnaattgtctagtcttaaatttgtacatcttgtataaaatatgaatgtttcccaaataaactatgaatgtttcctgtataatatatgaatgtttctgagaagaaactctaaatagttgaaaggctaacctgctcaaaggataccaaataatggtttaactggacaacctgaaaattagcatagaaaacaatcctttgttatattttagtgatccacaagattgagaaaatattatatagttagataataacattcttgtctactttatcctgtctggttacaaaattttttaaaacttaaataaaaacatgcatcttaaatggaaa

SEQ ID NO: 77126 - DNA, 2150 bp, Homo Sapiens
gggaagggcgagcggcgcggcagagtgcggcgcagcgcagctcctgaggttttggttatgaacaggattcggattcacgtcttgccaaccaatcgggggaggatcactccagtgcccaggtctcaggaacctctgtcttgtgcattcactcatcgtccatgctctcaccctcgtctggaggggcaggagttttgcattaagcatatccttgaagacaagaatgcacccttcaagcagtgtagttatatatcgacgaagaatggaaaaagatgtcccaatgctgccccaaagccagagaagaaagatggggtgtccttctgtgctgaacatgtccgtaggaatgccctggcacttcatgctcaaatgaagaagaccaacccagggcctgtgggtgaaacactcctgtgccagctgagctcatatgctaagacagagctggggtctcagactccagaaagtagtcgcagtgaagccagccgaatactagatgaagacagctggagtgatggggagcaggaacccattactgtggatcagacatggagaggtgaccctgacagtgaagctgatagcatagacagtgatcaagaagatcccctaaaacatgctggtgtctacacagcagaagaagtggccctgattatgcgtgaaaagctaattcgtttgcagtcgttgtatattgatcagtttaaacgacttcagcatctgctcaaggagaagaagcgccgatacttacataatcgcaaagtggaacatgaagctctaggcagtagtctcctgactggcccagagggacttttggccaaagaacgagagaacttaaagcgattaaaatgtctgcgacgataccgccagcgctatggagtggaagccttactgcataggcagttgaaggaacggagaatgctggccacagatggtgctgcccaacaggcccataccactcgttccagtcagaggtgcttggcctttgtggatgatgttcgttgttccaatcagtctcttccaatgaccagacactgccttacccatatttgtcaggatacgaatcaggttctcttcaagtgctgccagggatctgaagaggtaccctgcaacaaacctgttcctgtaagcctctctgaggatccctgctgcccactgcatttccagttgcctcctcagatgtataagcccgagcaggtactgtctgtgccagacgatctggaagccggccccatggatctgtacttgagtgctgctgagcttcagcccactgagagtttacctctggagttcagtgatgacttggatgttgtgggtgatggtatgcagtgtcctccttcacctttgctttttgatccttcactaacccttgaagatcatttagtcaaagaaattgctgaagacacagtggatattttgggccagatgcagatggctggagatgggtgcagatcccagggatctcgaaattctgagaaagcctctgcaccattgtctcagagtggattggctactgcaaatgggaagccagaacccacttctattagttgatagtttggggaaccattttactttggtggatttaaatttctcgttcttcaaagaagtatttctgatcatctctcacaaaacacaggcaacccagactaccttgtttttcttctggattgagtattatagtcaaacgtaaagccaaattttgaggacgtggaccgtgggtttcttcccactcagggcaaggaagagaaagagagataatccctatcaaagcttctgggattatttgggactatacctaaaaggaaagtgacatctttgtaatgggatttcccaagtcatggatagaaatccacttaagtagctaggtgggagctgtctttgtgagtggtctttgagatactgatggccctaatatcggttatctctatctgaagacctgcagtttagcttttcttcacctctacttaattgggcagtctttaacccctttccctggtgaactctggctttttatcctctgagaaaacagcccacaggactgggtcctccttatccgtcttgcttttaacctatgtaaatttctgtggttgctatcttatgtaaaatatagtaaaaatttattgtatatagtttctattaaatgttaaagaaaatgttatgcaaat

SEQ ID NO: 77127 - DNA, 552 bp, Homo Sapiens
tgaatcagacctttacttaaagctatgataaattaggtgttcaaccaagatttgatcctttgggcattaaatctggcaggaaagaccagtgatgtgtctaaccgctaattaccagaaaagaatatattaaactctgtgttactgctttgggaccctgaggttgctagcgtacactggcttggcatgtaaccgtaacaggtgttttttccttcttgtctgttcctgctctgtcagctcaggatgttttagcctgctcatttttgatcctgaaataagttgtgagtgcccttcttcacaacccttctgggtgtttcttttgagtcttcaagtgtctgtgggaattttggggtagtatccctgtagggtaaccaaacagtgaaaaactgcaggtgttgggaggtaattagatcaatagccagtgaatacgagggctaaaatgagggtgggatggttacctggtaaaactggtcattttgccctctatttcagttttctgctctttgtgtttatgtacattacatatgttctttttcattaaaaagtattaaatcc

SEQ ID NO: 77128 - DNA, 513 bp, Homo Sapiens
aattgtcaaagatttttggaagtctttcaaaatatacttaataccattttgagaacataccttctaatttatttccataaggctgaaagaacttttatttacaaaatgtaagactagataatgtatgaatcagtgttactaggacttatcagtacttaaaatagcaacttggcattctttattttgtttcctggttgttttatttggagggataataaatgtctaagttatttccattaaaattttgaaatgtttgtatactttatgtgtgccattttaaagtatatgcaagttctaagcaataatctgcatgttatacaaggttgacatattttgtcctgaaatttttagttaacatttcaagaatgataaaatgaacaccctgtaaattacccttctccccctcccctccatgaaaaccttgggattttcttgtgctagaacactaccacaatgtggtgcaaagctttgtattttgtggaaaaaaacaataaaatcacaattatttagtgc

SEQ ID NO: 77129 - DNA, 479 bp, Homo Sapiens
gtgcaggtctgtctgcactgggagcctcaggagggctctgctccacccacttggctatgggagagccagcaggggttctggagaaaaaaactggtgggttagggccttggtccaggagccagttgagccagggcagccacatccaggcgtctccctaccctggctctgccatcagccttgaagggcctcgatgaagccttctctggaaccactccagcccagctccacctcagccttggccttcacgctgtggaagcagccaaggcacttcctcaccccctcagcgccacggacctctctggggagtggccggaaagctcccgggcctctggcctgcagggcagcccaagtcatgactcagaccaggtcccacactgagctgcccacactcgagagccagatatttttgtagtttttatgcctttggctattatgaaagaggttagtgtgttccctgcaataaacttgttcctgagaaa

SEQ ID NO: 77130 - DNA, 1120 bp, Homo Sapiens
  misc_feature (27)..(27): n is a, c, g, or t
  misc_feature (40)..(40): n is a, c, g, or t
actgtatgtggagaaatgctggagttntagcttcctcctntgaagttctcgccacctggaatctacctcctctggactcacaaactgctcatgttgcacggacagaagctgaagtccagagccgggacgctgctgcctgtcattcagttcctccagaagagcatccagcggcacctggacgacctgtcgaaactctgtagctggaaccactataacatgcagtacgcactagcagtttccaagcagcggggcacaaaacgctccctagacccgctgggaagtgaggaggaggcagaagcatctgaagatgacagcctgcatctgcttggaggaggaggcagagactcagaagaagagatgctggcctagagccagccggttgcagcgttggattgtgccggctaagacctgccagggagatgggacccttgtgccacctgggccagcaaagaggaggggtccagagaacagctgaaatactgtcactagtggtagtgacttgcttttcctgtgcacacatgtagcccatcaggacagcgagccgacgggtcacgccaggggccggcacgcactggcacctggccccaggagcggggccgtgtgaacggtgatgaatgttgaaaatgcgtctcagagaggtattcacatgaactttgtatgagacttatttatatttttaacataaaggtttgataaagaacttagggattaaaaaaaagatggagttttctaacgtgaggatgaagtctacacttcagattaaaaagggttatgttgtatcctgctgtcttgtgggggctcaagacctgcctgccttaccaccagggcctccgtcctggggaagcaggctgacagagcagggtgctcctgctgtctagcgggggctctgccctatgacctgtgcatatccttggggtcaggggcacagagcctctccctgacctcttggggacgctttggagtctggggctgggattggcctgtcttggtgagctcactcagacctgcaccagctctgcgtgggccacacggaggaggagacagctcctcccctctgcagtgcccttgggaatagtcatcatgagagaggcttgggtctccatcatggtagggcatcctg

SEQ ID NO: 77131 - DNA, 2421 bp, Homo Sapiens
ggacggcagtactctacggttctaaggtagcgaggcctgggtggcgaattcggcacgaggcttaaagttccgggtgaggcgtgggtcccacaaaccgcttggaatttgcctcccggctccgctctggaagctaagaaggggcacgagagccggagacgggaacctgagagcagggaagccagtagccggccggaggagcgcgcggccgctccagtcggaaggagccgttgcagccctgcccggcgtgtggcggggtcagcgaggcccctgcggtgcttcgcccgcgccttccgctccgcactcacccgccctctgggcctcccacaggaatcaaagatcaactcccactgaggacaaatggacctgtaattccgggtgtgacgagagaacgagatttaccttcctgaattaaaaaacaggtcattaagcttgggccctgactcttctttgtgagaaggtacagagatggaaaccttacaatccgagactaaaacgagggtccttccctcatggctgacagcccaggtggctacaaagaatgtggcaccaatgaaggcccccaagaggatgagaatggcagcagtgccagtggcagcagcaaggtgcgacagctctggtcagaagactcctgcgaatctgactccctgcgacaaggactgtgtactgcatgaatgaggctgagatagttgatgttgctctgggaatcctgattgagagccgcaaacaggaaaaggcctgcgagcagccggccctggcgggggctgataacccagagcactcccctccctgctccgtgtcgcctcacacaagttctgggagcagcagtgaggaagaggacagtgggaaacaggcactggctccaggcctcagcccttcccagaggccggggggttccagctctgcctgtagcaggagccctgaggaggaggaggaagaggatgtgctgaaatacgtccgggagatctttttcagctagggcataaactgtgcactgaactgtctgccgagagcagctggaggacagctgagcttccactggtgctgctgggccgcccgcctgtgggaatggggctctctgtgctcctacctttgtgccttcttgggcctggcagattcacctcaggccagaagcccctggacactccgggccttggggctgccgttctgagtgtgcggaaggcaggactcaaaatgagatcccatttgactccctctgtatgtactgtgccctctcctggctcttgaggctctggagtcccaattgtctgtgttagtcagtgaccaggttccagggaaaatgatgtcatgtggtggtccaacttactggaaccaaagagacagtactttgcaaagaaaaggatcactgccaggtgcactggaattgctacagtttagtccgcatgatctctcctgaaggaggaagcctgtttcaaaaatagtttccatcatgagtctatcaatgagctcccacctctccagccagcctagaaagcaaacgagctgcccacagttctctgccctgtctgggaggttgaggccacagtgtatagactggtaagccagacaggcctcctcccgcaagctgctaccttgctttcacctgtaccttggtccccgggcagctagctataaagcaagagggacaggagcccagaagagacactgaggacaagagatcacaccagagtacatgtctctgcctctgttttcagtgtggctttggacaggaatatatgaataaatcactgccatacaggttttccaatacacaagtgctagaaaatacacacaattccccaatgcgtaagttgtgctaatgtctttccaagttctgggttgggaagtggagggtggcagcgtttgtttgtgcgcaaccgtccagtcctgttcacagcgaggatttggagtcctccagggtctcatcatgggagtgatttgtcagcggacgcctctgccctgtctggcttcaggtccagggaagctttgaagcagtcaagctttgtctttgtaccccatgtgtcctgtctttgttgagtcactcagagatcactcctggacctctggggttggagttccagtgatggcttatggcggcccactcactatggtgggctgagtggaagctccttaaccatgtccccagagacactgaggtgctcgctcttttaatgtcctcgtttgttgccgtaagttctttgctaggtttcattttggcatttggcaaatcagcctggaagtctggccccatgacagcaatcactccctccccaccctcctgaagctagaggaagatttgctcagatccattaattaaagcaggaattggtgtgacaatgagctgcatggtttagggagtctttgggagccttggaatcctgaaggacagacaatcttgtactaagaagtcacaggtgccctggc

SEQ ID NO: 77132 - DNA, 1170 bp, Homo Sapiens
ccagtcggaaggagccgttgcagccctgcccggcgtgtggcggggtcagcgaggcccctgcggtgcttcgcccgcgccttccgctccgcactcacccgccctctgggcctcccacaggtcggcgccgccagcggcgggtaccggcccgcagagggagggcgggctgtgaactggcagcacatcgcgttcccgcggggcccccattctgcccaggcagggagcggctgggatgggactgaggtcggtccgcgagcgcggtgccccagagacccggcttctggaagttgccgcggcctgctcttggggcccagaagtagggcggggaggcgcggggtctggagtctgcaggacctggctgcgaatccaaccagctgatttcaaacttttctgtgatcttctgcaagttaactaagtctcagttcctcgtttgcgaaatgtacttaataggcaccccagggtgaactaaatttgtccgcacagactgcagcattgcgcttgggaggcgccttagggggtaggagtcactaatatcactgagttttgacagaaatgaaggtgcattggcaaaggtgtgccccatggccgggcaggttaggaggagggcctggtaatattttttcttaaattgtaaacagccatctggatgagcaatacattatcaaattatgattcagagaggactatcgctgactactcttttttttgggcaaacctccgcttcaggagcttctggcttgattcctaagtggaaggtagagacctaggccctctgagtcacaactccatctctctgggtgaggactgagctccaggactgctgagtggaggcagaacaattggggatagggaaaagagaggccaacctagatcagaggctggcgtgggccttcagaatctacagactggcaccggtaatgcctccgggccccctattgctgcttcaagtttgacccaatcggaagtatctttagctttagggcggcctgtttggcccatgaaaactttatttggggaaataaaattgccctcagtttccattttacctggagccccccttggaaagagtaaaggaaatcgaggttggcccaaatggagggagaaggccctaaggaaggttttttataggatttgtaatgggccttggcacccccaaaggaacgaggggatttt

SEQ ID NO: 77133 - DNA, 1294 bp, Homo Sapiens
gaagaggacctatttgacagcgcccatccggaagagggtgatttagatttggccagcgagtcaacagcacacgctcagtcgagcaaggcagacagcctgttagcggtagtgaaaagggagcccgcggagcagccaggcgatggcgagaggacggactgtgagcctgtagggctagagccggcagttgagcagagtagtgcggcctccgagctcgcggaggcctctagcgaggagctcgcagaagcacccacggaagccccaagcccagaagccagagatagcaaagaagacgggaggaagtttgattttgacgcttgtaatgaagtccctccggctcctaaagagtcctcaaccagtgagggcgctgatcagaaaatgagctcttttaaggaagaaaaagatataaagccaatcattaaagatgaaaaaggtcgggtcggcagcggttctggtcggaacctgtgggtcagcgggctgtcctccacaacacgcgctacggatctcaagaaccttttcagcaagtatgggaaggttgtcggggccaaagtggtaacgaacgcccgcagcccgggggctcgatgctatggattcgtcaccatgtcgacatctgacgaggcgaccaagtgcatcagccatctccacagaactgagctgcatggacgaatgatctccgtagagaaggccaaaaatgagcctgctgggaaaaagctttccgacagaaaagagtgcgaagtgaagaaggaaaaattatcgagtgtcgacagacatcattctgtggagatcaaaattgaaaaaactgtaattaagaaggaagagaagattgagaagaaggaggaaaaaaagcctgaagacattaagaaggaagaaaaagaccaggatgagctgaaacccggacctacaaatcggtctagagtcaccaaatcaggaagcagaggaatggagcggacggtcgtgatggataaatcgaaaggagagcccgtcattagcgtgaaaaccacaagcaggtccaaagagagaagctccaagagtcaggatcgcaagtcagaaagcaaagaaaagagagacatcttgtcgtttgataaaatcaaagaacaaagggagagagagcgccagaggcagcgggaacgggagatccgcgaaacggagaggcggcgggagcgcgagcagcgggagcgggagcaacgcctcgaggccttccatgagcggaaggagaaggcccggctacagcgggaacgcctgcagctcgagtgccagcgccagcggctggagcgggagcgcatggagcgggagcggc

SEQ ID NO: 77134 - DNA, 899 bp, Homo Sapiens
  misc_feature (211)..(211): n is a, c, g, or t
cccttttccggatgggcccctttccaaataggtcctctttccctcccgcaactttctgtccgggccccaccggctacttggtgtcctgtgcaaatgcctcctccagctcggaactttcttcttttactggctcagatttacaagtttccccaaaatgtcgagtattttctcatttgtctgactccagggatggctcttcaatttcctgtanatatagtgaagtcagatgatgaagtatctaaattgttcatagtttctttgtcctctatagcatgttcctgaagctgctccggaagctctttcatttccccctcgactagctctctactatccgacagggactcctggaggttatcagcatcatcgtcttcgacacaatctgcaacgcttccattatcaatttctgcttcatccaacacactgatatccatgatgtcgatgtcctgcaagttctccagactggtctcaacatcctcctgtccatccccagagttttcctccagcccgttatcttccacaccctcttcttctggtttgcgccctttgctagacctctttgatgttttcttgtttccctcggaggtaatttcaatttcgtcaggattaccaccttcatcttcaattgccttcttcagccgctccatcaaaacgctcttgttgccgctcgagtccacattccgtttcctcagctccgcccgcagatcgatcactcgcaggtcgctgaggcgccgcgtcccggtctctgacgaggcggagctcagagccgccgcgcccgccgctccagaatcacctaggcctgacagagtctccgccattccagggaccctggctccgccgcccactttccacagaaccgggccggttttatcaggctcctagcacaaaatggcgccgcctgc

SEQ ID NO: 77135 - DNA, 2064 bp, Homo Sapiens
tgtccgcgtccgcgtcggtattcccgggatgtggaaagtgggcggcggagccagggtccctggaatggcggagactctgtcaggcctaggtgattctggagcggtgggcgcggcggctctgagctccgcctcatcagagaccgggacgcggcgcctcagcgacctgcgagtgatcgatctgcgggcggagctgaggaaacggaatgtggactcgagcggcaacaagagcgttttgatggagcggttgaagaaggcaattgaagatgaaggtggtaatcctagacgaaattgaaattacctccgagggaaacaagaaaacatcaaagaggtctagcaaagatagaggacaaagaaactataaacaatttagatacttcatcatctgacttcactatattacaggaaattgaagagccatccctggagccagaaaatgagaaaatactcgacattgtgggggaaacttgtaaatctgagccagtaaaagaagaaagttccgagctggagcagccatttgcacaggacacaagtagcgtggggccagacagaaagcttgcggaggaagaggacctatttgacagcgcccatccggaagagggtgatttagatttggccagcgagtcaacagcacacgctcagtcgagcaaggcagacagcctgttagcggtagtgaaaagggagcccgcggagcagccaggcgatggcgagaggacggactgtgagcctgtagggctagagccggcagttgagcagagtagtgcggcctccgagctcgcggaggcctctagcgaggagctcgcagaagcacccacggaagccccaagcccagaagccagagatagcaaagaagacgggaggaagtttgattttgacgcttgtaatgaagtccctccggctcctaaagagtcctcaaccagtgagggcgctgatcagaaaatgagttctcccgaagatgactcggatacaaaaaggctttccaaagaggaaaagggtcgcagcagttgtggtagaaatttctgggttagtggactctcttctacaaccagagctacagatttgaagaatcttttcagcaaatatgggaaggtggtgggcgccaaggttgtgacaaatgcccggagtcctggagctcgctgttacgggtttgtcacgatgtccacagcagaagaggccacaaaatgcattaaccaccctgcacaagacggagctccacggaaagatgatctccgtggagaaagccaaaaatgaacctgtgggaaagaaaacctctgacaaaaggagacagtgacgggaaaaaggagaagtcgagcaacagtgacagatctacaaaccttaagagggatgataaatgtgacagaaaagatgatgctaagaagggtgacgacggaagtggagaaacagagtaaggaccaagatgatcagaaacctggcccctcagagcgatctgagccacaaagtcaggaagtcgagggaccgaacggactgtagtaatggataaatccaaaggggtgcctgtgattagtgtaaaaacgtccgggtccaaagagagagcttccaaaagccaggatcgcaaatcagccagcagagagaagcggtccgtcgtgtcctttgataaggtcaaggagcctcggaagtcaagagactcagagtcccatagcagggtgcgtgaacgcagtgaacgcgaacaacgcatgcaggcgcagtgggagcgcgaggagcgtgagcggctggagattgcccgagagaggctggccttccagcgccagcggctggagcgggagcgcatggagcgggaacggctggagcgcgaacgcatgcacgtggagcacgagcgcaggcgcgagcaggagcgcatccaccgtgagcgcgaggagctgaggcgccagcaggaactgcgctatgagcaggagcggcggcccgcggtgcggcggccctacgacctggaccggcgagatgatgcctattggccggaagccaagcgggccgccctggatgagcgctaccattctgactttaaccgccaggaccgcttccacgactttgaccacagggaccgcggccgca

SEQ ID NO: 77136 - DNA, 650 bp, Homo Sapiens
cactttaaaccattaagttggtgttagtctttattaaaaacaaaaaataactaaaatttcagacagcgatgtacataatatatataagaatatacccaaaaaagtaaatttctaccaccctcgcaaagaaaaaatttcaatgggttattctataccaaatccaagtgtttacatccaagatgtcacagaggtaacttccttttgtaccttattgagctctggaaacagttcctgtatcacaatgtccaataaaacataagtcagctgcttgttgagtactggttgctgtaagccatcaaacagaagtctgatgctttcatacttggtttcttcaccaatacacttgactaacagatctaaacaaaaaggccaaatgtgaaataattttatattataaagtgactcaccattaactggatcataaagcaaaatcaccaccctgtttcccagatactaggcaaaaactgcaaatcaatactccccaaaccagtgtttctataagaggctcctggataagaggtttctatggtcaagttgacaaatgcagtatcatgtatcccatttttggagattcacaatgcacaaggcataatgcaaactctgagaaatgctggaatgtaattcatcatttcttcaaaagtctgttttgc

SEQ ID NO: 77137 - DNA, 1435 bp, Homo Sapiens
ggataggaaatatagaacacgtggtaaaaaaagcaggctggtacggtccggaattcccgggatatcgtcgaccacgcgtccggtgagcacacctaatactccccgaaaccttgctgcatggaaaattagcattccatatgtagacttttttgaggatccctcctctgaaaggaaggagaaaaaagaaagaattcctgtgttttgtattgatgttgaaagaaatgatagaagagcagttggacacgagcctgaacattggtctgtctatagaagatatcttgaattctatgtacttgaatcaaaactaacagaatttcatggtgcatttcctgatgcccagcttccttctaagaggatcattggccccaaaaattatgaattcttaaagtcaaagagggaagagttccaagaatatctacagaaacttctgcagcatccagaactgagtaatagtcaacttctggcagactttctttcccctaatggtggggaaacacaatttcttgataagatactaccagatgtaaatcttgggaaaattataaaatctgttcctggaaaactaatgaaagagaaaggtcagcatttggaaccttttatcatgaatttcattaattcttgtgagtctccaaagcctaaaccaagtagaccagaactgaccattctcagccctacttcagaaaacaacaagaagcttttcaatgatctgtttaaaaataatgcaaaccgtgctgaaaatacagagagaaagcaaaatcagaattattttatggaggtgatgactgtagaaggagtctatgattacctgatgtatgtaggacgggtagttttccaggttcctgactggcttcatcatctcttaatgggaactcgaatcctctttaaaaacaccctggaaatgtatactgattactatcttcagtgtaaactagaacagctatttcaggagcaccgtttggtctcactcataacacttctcagagatgctatattctgtgaaaacactgaacctcgctctctccaagataagcaaaaaggagcaaaacagacttttgaagaaatgatgaattacattccagatctgttagtcaagtgtattggtgaagaaaccaagtatgaaagcatcagacttctgtttgatggcttacagcaaccagtactcaacaagcagctgacttatgttttattggacattgtgatacaggaactgtttccagagctcaataaggtacaaaaggaagttacctctgtgacatcttggatgtaaacacttggatttggtatagaataacccattgaaatttctgctgtgcgagggtggtagaaatttacttttttgggtatattcttatatatattatgtacatcgctgtctgaaattttagttattttttgtttttaataaagactaacacaaacttaatgattaaaagtg

SEQ ID NO: 77138 - DNA, 1156 bp, Homo Sapiens
ggaagttcacgactgcgagtgacgtgtgggcctttggtgtgaccctgtgggaggtgctgatgctctgtagggcccagccctttgggcagctcaccgacgagcaggtcatcgagaacgcgggggagttcttccgggaccagggccggcaggtgtacctgtcccggccgcctgcctgcccgcagggcctatatgagctgatgcttcggtgctggagccgggagtctgagcagcgaccacccttttcccagctgcatcggttcctggcagaggatgcactcaacacggtgtgaatcacacatccagctgcccctccctcagggagcgatccaggggaagccagtgacactaaaacaagaggacacaatggcacctctgcccttcccctcccgacagcccatcacctctaatagaggcagtgagactgcaggtgggctgggcccacccagggagctgatgccccttctccccttcctggacacactctcatgtccccttcctgttcttccttcctagaagcccctgtcgcccacccagctggtcctgtggatgggatcctctccaccctcctctagccatcccttggggaagggtggggagaaatataggatagacactggacatggcccattggagcacctgggccccactggacaacactgattcctggagaggtggctgcgcccccagcttctctctccctgtcacacactggaccccactggctgagaatctgggggtgaggaggacaagaaggagaggaaaatgtttccttgtgcctgctcctgtacttgtcctcagcttgggcttcttcctcctccatcacctgaaacactggacctgggggtagccccgccccagccctcagtcacccccacttcccacttgcagtcttgtagctagaacttctctaagcctatacgtttctgtggagtaaatattgggattggggggaaagagggagcaacggcccatagccttggggttggacatctctagtgtagctgccacattgatttttctataatcacttggggtttgtacatttttggggggagagacacagatttttacactaatatatggacctagcttgaggcaattttaatcccctgcactaggcaggtaataataaaggttgagttttccacaaaaaaaa

SEQ ID NO: 77139 - DNA, 1375 bp, Homo Sapiens
cccagaacagcgtcccccattatgccgaggctgacattgttaccctgcagggcgtcaccgggggcacacctatgctgtgcctgcactgcccccaggggcagtcggggatgggccccccagagtggatttccctcgatctcgactccgcttcaaggagaagcttggcgagggccagtttggggaggtgcacctgtgtgaggtcgacagccctcaagatctggtcagtcttgatttcccccttaatgtgcgtaagggacaccctttgctggtagctgtcaagatcttacggccagatgccaccaagaatgccaggaatgatttcctgaaagaggtgaagatcatgtcgaggctcaagggacccaaacatcattcggctgctgggcgtgtgtgtgcaggacgaccccctctgcatgattactgactacatggagaacggcgacctcaaccagttcctcagtgcccaccagctggaggacaaggcagccgagggggcccctggggacgggcaggctgcgcaggggcccaccatcagctacccaatgctgctgcatgtggcagcccagatcgcctccggcatgcgctatctggccacactcaactttgtacatcgggacctggccacgcggaactgcctagttggggaaaatttcaccatcaaaatcgcagactttggcatgagccggaacctctatgctggggactattaccgtgtgcagggccgggcagtgctgcccatccgctggatggcctgggagtgcatcctcatggggaagttcacgactgcgagtgacgtgtgggcctttggtgtgaccctgtgggaggtgctgatgctctgtagggcccagccctttgggcagctcaccgacgagcaggtcatcgagaacgcgggggagttcttccgggaccagggccggcaggtgtacctgtcccggccgcctgcctgcccgcagggcctatatgagctgatgcttcggtgctggagccgggagtctgagcagcgaccacccttttcccagctgcatcggttcctggcagaggatgcactcaacacggtgtgaatcacacatccagctgcccctccctcagggagcgatccaggggaagccagtgacactaaaacaagaggacacaatggcacctctgcccttcccctcccgacagcccatcacctctaatagaggcagtgagaactgccagggggggctgggcccaccccagggagctgatgcccctttctccccttcctggacacactctcatgtccccctttctggttctttccttcctagaaagccccctgtcgcccaccccacctgggtccctggtgggagggggaatccttctcccaccccttccttcttagcccatccccctt

SEQ ID NO: 77140 - DNA, 849 bp, Homo Sapiens
attctcaccagcctggacagccaaaggggtctgtgtgtggccggggaggatggcgggggatgtgagccccatggaacagccaggaactgcagccagccccgtgtccggcagtatgttcagctgggtcagcaaggatgcccgccgcaagaaggagccggagctcttccagacggtggccgaggggctgcggcagctgtacgcgcagaagctgctacccctggaggagcactaccgcttccacgagttccactcgcccgcgctggaggacgctgacttcgacaacaagcctatggtgctcctcgtggggcagtacagcacgggcaagaccaccttcatccgacacctgatcgagcaggacttcccggggatgcgcatcgggcccgagcccaccaccgactccttcatcgccgtcatgcacggccccactgagggcgtggtgccgggcaacgcgctcgttggtggacccgcggcgccccttccgcaagctcaacgcgtatggcaacgctttcctcaacaggttcatgtgtgcccagctgcccaaccccgtcctggacagcatcagcatcatcgacacccccgggatcctgtctggagagaagcagcggatcagcagaggctatgactttgcagccgtcctggagtggttcgcggagcgtgtggaccgcatcatcctgctcttcgacgcccaacaagctggacatctccgatgagttctcggaagtgatcaaggctctgaagaaccatgaggacaagatccgcgtggtgctgaacaaggcagaccaggatcgagacgcaagcagctgatgcgggtgtaccggggcctccatgtggttccctggggcaagatca

SEQ ID NO: 77141 - DNA, 2672 bp, Homo Sapiens
gctggaccggtccggaattcccgggatgcgcttcgacgggctgggctgtgcgcctgcgcagtgtgggtcgctcccgattccctgccccggccggccccgcctcggctccgcaccctcgccccgctctcagccgccgctctgccccgcagcagccagccccgtgtccggcagtatgttcagctgggtcagcaaggatgcccgccgcaagaaggagccggagctcttccagacggtggccgaggggctgcggcagctgtacgcgcagaagctgctacccctggaggagcactaccgcttccacgagttccactcgcccgcgctggaggacgctgacttcgacaacaagcctatggtgctcctcgtggggcagtacagcacgggcaagaccaccttcatccgacacctgatcgagcaggacttcccggggatgcgcatcgggcccgagcccaccaccgactccttcatcgccgtcatgcacggccccactgagggcgtggtgccgggcaacgcgctcgtggtggacccgcggcgccccttccgcaagctcaacgcgtttggcaacgctttcctcaacaggttcatgtgtgcccagctgcccaaccccgtcctggacagcatcagcatcatcgacacccccgggatcctgtctggagagaagcagcggatcagcagaggctatgactttgcagccgtcctggagtggttcgcggagcgtgtggaccgcatcatcctgctcttcgacgcccacaagctggacatctccgatgagttctcggaagtgatcaaggctctgaagaaccatgaggacaagatccgcgtggtgctgaacaaggcagaccagatcgagacgcagcagctgatgcgggtgtacggggccctcatgtggtccctgggcaagatcatcaacacccccgaggtggtcagggtctacatcggctccttctggtcccacccgctcctcatccccgacaaccgcaagctctttgaggccgaggagcaggacctcttcaaggacatccagtcactgccccgaaacgccgccctcaggaagctcaatgacctgatcaagcgggcacggctggccaaggttcacgcctacatcatcagctccctcaagaaagagatgcccaatgtctttggtaaagagagcaaaaagaaagagctggtgaacaacctgggagagatctaccagaagattgagcgcgagcaccagatctcccctggggacttcccgagcctccgcaagatgcaggaactcctgcagacccaggacttcagcaagttccaggcgctgaagcccaagctgctggacacggtggatgacatgctggccaacgacatcgcgcggctgatggtgatggtgcggcaggaggagtccctgatgccttcccaggtggtcaagggcggcgcctttgacggcaccatgaacgggccgttcgggcacggctacggcgagggggccggcgagggcatcgacgacgtggagtgggtggtgggcaaggacaagcccacctacgacgagatcttctacacgctgtcccctgtcaacggcaagatcacgggcgccaacgccaagaaggagatggtgaagtccaagctccccaacaccgtgctagggaagatctggaagctggccgacgtggacaaggacgggctgctggacgacgaggagttcgcgctggccaaccacctcatcaaggtcaagctggagggccacgagctgcccgccgacctgcccccgcacctggtgccgccctccaagcgcagacatgagtgatggcgcccggccccgcacctgccatttgcacgcccggccgggaggcagagacggggggaggggaagcctcaccatttctcaaggtccataaagactgagcggatgtttcctcgcctctcgaaaaggaaaaccaccatctttcttttaaggctgttcctgggcctggcgggggaggcaggggtgagaggatggaattgtgtgcacaagaactgtggctattttaatatataacgttagaggctgcgttctttgtcgccgcctcccctgtgtgccagccctgtgtgcacggcctctgccccccggcctttgctgtggctggagctggacagtgcagtgactgcgaccgtgggggagccaggtcgcccttttggcagctgctaggctgaggctgcatggacaggaacaccaggcaccctccgtgtgcttctgagctgaggttgcttcacgggaccgtggcttccttcctcacctggctctgcctcccccgtgctctcgggcgaagtgggttcttgtgccttcccctcccgggcccaggctccccgtgcgcgggccctgccctttcctcccgcgccccaccggctccgacgcgcaaccccgctcagcagtcacagaagcagggcccagccaccttggtctttttttgggagttcaggggagtaggagaatgtcttccagaaaaatacataagctagtttctgttctgtacaaaaaatacaaaaacaataacataagacagacaagacaagacgaaatagaaacaacagagacgcaacacacgcagcagcagaataaaacacgcgaggcggcgcgtctcgaaaggaatcgacttcagcaaggggggcgcccgcgagtaaccccctccgcgcggtcaggtggcgtccaaagcgggccacca

SEQ ID NO: 77142 - DNA, 648 bp, Homo Sapiens
tcgtgaaacactggaatgtccagatgaaccggctgatgcattccaattgagcctggagataagcgtccggacaccagcagctccttctcacgagttccagccccctctgcttgcccaccgtgactcctccctaaagcgcctgaaccgctgggaatcccagggcaacaggaccccctcgcccaacagcaatgagcagcagaagtccctcaatggtggggatgaggctcctgccccggcttccacccctcaggaagataaactggatccagcaccagaaaattagcctctcttagccccttgttcttcccaatgtcatatccaccaggacctggccacagctggcctgtgggtgatcccagctcttactaggagagggagctgaggtcctggtgccaggggcccaggccctccaaccataaacagtccaggatggaacctggttcacccttcataccagctccaagccccagaccatgggagctgtctgggatgttgatccttgagaacttggccctgtgctttagacccaaggacccgattcctgggctaggaaagagagaacaagcaagccggggctacctgcccccaggtggccaccaagttgtggaagcacatttctaaataaaaactgctcttagaatgaaaaaa

SEQ ID NO: 77143 - DNA, 1820 bp, Homo Sapiens
ggcacgaggcccgtctgtagaagactctcaagaagtgtgtaccacctctttttccacctccccaccatcccaggactcattaccagagaagctggctgtgcatgagaagaatgtccgcgagtttgatgcctttgtggaaaccctgcagtaaaagtatccttgagtccctagcagcaccccctttttgtggccccagagacataagcagcctcccatgcatcagctgctcccacccctcatcctgctctgagccaggtggaagggaggctggcttctcccatggggacccagaagtccctactcttggacctcctggatactccgtggcggcagtcaagcccagtgcccagttggagaagactcacgtgctggccttggagatgggaagaaccttcgtacgaaaaagccctcagcagggccatctgtgtgccctgcccatcaccaactgcttcccaagggtgtcatcctgttcctcctgctgccggcctcctgcctgggcctgccttgcagctggccccttccctgcctgctgtcaccatccactgtttgacattccagctggtggccaagagattggtgtggaggcagaaagaggaaggagacagtgccaggaggaagaaggaaggagtcccttagctctcttcattgtcccctttacttcctgctatctttttctcctcttcttctttttcttgcctctatgcctgtatttctggcaatatgacaggcctgcctacccaagatcagaactccaaaaccactcccacccctgaaggtcgggagggtctgagcagccctggtggctgcctgtgctcaggtcctcagctccatgggaaataaaaatggcaccctgaatctctaggattttgtcacttggagtcacagcaaagttctcttcctcttgtccccccgttgctgctccttggttatagaacatggtaaatatttattactttcagagaaaccagatattttatagaggaaatatgtttgaggtgagttgtttttcacttggagaaggcggagggctcttcctgggacggagacctcctcctccggaggttattgagaatccgggctgctgctttgaggatcttcccaccatacagacagcgagatccaagaagagggctggccgggggcaaagtcacctcccagtgtggctgcactggaactgactaaaggctttaccttggatagttgcgtattcctggtgagagccttacatctcccacagtttctgcagagtgactgactccattctggcagcccaggaagtcctgggtgctaaatgtgatggccacatgtagtggttaggggatgttgtgtgtgtcccccaactgcctgggtacttgttcctgatccctggggctgtcctgtggagcttttcctcctgcttgggcctagctaccatctccctctaatcccaggttctctacactgacctgggggtttaccagctggataggcttctggttgagaaatcaagctgggcgtatgattgacttaacccttcaggtatggtacttgaataagtcaagtgcctagcctcacccacctatgatctgtcctttcccagcctcgctggtagtcctggtcaaggagatctaggtctactccattcctcctggcccacctggggcatacactggcagcaagctgtgcttcagtggagcaagtggttctcagctgcctgtcagtatactggctgtgacactgttcccacatacaaggctgacttctgatgatggaagcaagctctggaggggacaaaatgctcttggtgttgctgttgtcacaagaagtgtaaggcgaaagcc

SEQ ID NO: 77144 - DNA, 1298 bp, Homo Sapiens
  misc_feature (1166)..(1190): n is a, c, g, or t
ggaccggtccggaattcccgggatatcgtcgacccacgcgtccggcccccggcagaggcggaagcggagtcggcctgagaggtctctcgtcgctgcaggcgcctcagcccagccgcgtgccttggcccatggccgcctactcttaccgccccggccctggggccggccctgggcctgctgcaggcgcggcgctgccggaccagagcttcctgtggaacgttttccagagggtcgataaagacaggagtggagtgatatcagacaccgagcttcagcaagctctctccaacggcacgtggactccctttaatccagtgactgtcaggtcgatcatatccatgtttgaccgtgagaacaaggccggcgtgaacttcagcgagttcacgggtgtgtggaagtacatcacggactggcagaacgtcttccgcacgtacgaccgggacaactccgggatgatcgataagaacgagctgaagcaggccctctcaggtttcggctaccggctctctgaccagttccacgacatcctcattcgaaagtttgacaggcagggacgggggcagattgccttcgacgacttcatccagggctgcatcgtcctgcagaggttgacggatatattcagacgttacgacacggatcaggacggctggattcaggtgtcgtacgaacagtacctgtccatggtcttcagtatcgtatgaccctggcctctcgtgaagagcagcacaacatggaaagagccaaaatgtcacagttcctatctgtgagggaatggagcacaggtgcagttagatgctgttcttcctttagattttgtcacgtggggacccagctgtacatatgtggataagctgattaatggttttgcaactgtaatagtagctgtatcgttctaatgcagacattggatttggtgactgtctcattgtgccatgaggtaaatgtaatgtttcaggcattctgcttgcaaaaaaatctatcatgtgcttttctagatgtctctggttctatagtgcaaatgcttttattagccaataggaattttaaaataacatggaacttacacaaaaggcttttcatgtgccttacttttttaaaaaggagtttattgtattcattggaatatgtgacgtaagcaataaagggaatgttagacgcaaaannnnnnnnnnnnnnnnnnnnnnnnncctgtcggccggcctcgggccctccaagaggcttttctagaaccaattctttgggcgcgcggggcccccagtaaggtaagtggaacatgggcccttagcttggtttcc

SEQ ID NO: 77145 - DNA, 787 bp, Homo Sapiens
  misc_feature (487)..(656): n is a, c, g, or t
cggtgtcgctctgaggggtcgccagtcgccgcaggcgcttcagcccagcggcgggccttggcccttggctgcctactcctaccgccccagccccgggcggccctgggcctgctgcgggcgcggcgctgcccgaccagagcttcctgtggaacgtcttccagagggtcgataaagacaggagtggagtgatatcagacaccgagcttcagcaagctctctccaacggtgagtgggccagtgggaactgggtctccggaccaagaagccgtgagcctgccctgttcacagtggataactttctgaagttgtttttccaaggacaaaggaatcattaggacaaattgttaatactgcttcatggtggagatgcttctggtttattttgtggctaccgctgttactgcttggagtgcctcaccgagccaggatgaagccccacccgcccttcaggatgccagccttggcaacatcgtgagaccctgtttcnnnnnnnnnnnnnnnnnnnnnnnnnnnnnnnnnnnnnnnnnnnnnnnnnnnnnnnnnnnnnnnnnnnnnnnnnnnnnnnnnnnnnnnnnnnnnnnnnnnnnnnnnnnnnnnnnnnnnnnnnnnnnnnnnnnnnnnnnnnnnnnnnnnnnnnnnnnnnnnnnnnnnnnnnnaagtgggatgcgtgctgctcctgccattggatcatcgcagcattttcttttctctgatatgcgccttttcctcatcgtgggggctcatgttttcgtaattcctctcgctactagattgtgagctgtgtgaa

SEQ ID NO: 77146 - DNA, 1518 bp, Homo Sapiens
ctatgggtacggccgaatagaaattctgtctggatttattaatggactttttctaatagtaatagcgttttttgtgtttatggagtcagtggctagattgattgatcctccagaattagacactcacatgttaacaccagtctcagttggagggctgatagtaaaccttattggtatctgtgcctttagccatgcccatagccatgcccatggagcttctcaaggaagctgtcactcatctgatcacagccattcacatcatatgcatggacacagtgaccatgggcatggtcacagccacggatctgcgggtggaggcatgaatgctaacatgaggggtgtatttctacatgttttggcagatactcttggcagcattggtgtgatcgtatccacagttcttatagagcagtttggatggttcatcgctgacccactctgttctctttttattgctatattaatatttctcagtgttgttccactgattaaagatgcctgccaggttctactcctgagattgccaccagaatatgaaaaagaactacatattgctttagaaaagatacagaaaattgaaggattaatatcataccgagaccctcatttttggcgtcattctgctagtattgtggcaggaacaattcatatacaggtgacatctgatgtgctagaacaaagaatagtacagcaggttacaggaatacttaaagatgctggagtaaacaatttaacaattcaagtggaaaaggaggcatactttcaacatatgtctggcctaagtactggatttcatgatgttctggctatgacaaaacaaatggaatccatgaaatactgcaaagatggtacttacatcatgtgagataactcaagaattacccctggagaataaacaatgaagattaaatgactcagtatttgtaatattgccagaaggataaaaattacacattaactgtacagaaacagagttccctactactggatcaaggaatctttcttgaaggaaatttaaatacagaatgaaacattaatggtaaaagtggagtaattatttaaattatgtgtataaaaggaatcaaattttgagtaaacatgatgtattacatcatcttcaaaaatagatatgatggattctagtgaagaccaaaattacttctgtttactttctatcaggaagcatctccattgtaaatatgtatttacatgtttattacaaagacccaaatgaaaaatttttagtccattttttgcatagcctaaagataaaataggaataaaagttctatatttatggattttctgtatataaaactggtttctaattataacttaagtccattaagtaaaatctgtattgccactttaaatgtaaactaaattatttgggagaaacttcaaccactgatatgagataagcaatgagaatagggaagtgtataacatcacagtttttgatgtattacaaaaatcaaccactctataaaataaattttttttacattatggtaaaaa

SEQ ID NO: 77147 - DNA, 336 bp, Homo Sapiens
  misc_feature (114)..(134): n is a, c, g, or t
  misc_feature (157)..(208): n is a, c, g, or t
tcagaaagaaaggataataaagacgtttattggcatttgtcaaccaacttaacatacagatgagaaagaaagactaaaaaccctctaataaagattgttaactgacagaagcannnnnnnnnnnnnnnnnnnnngagacagggtctcgttctgccannnnnnnnnnnnnnnnnnnnnnnnnnnnnnnnnnnnnnnnnnnnnnnnnnnntggactcaagcaatcctcctgcctcagcctctcaagtagctggaactagatacacacagcactgcacccagctaacgacagaagcattcttatgatacgatctcctctcggctcacttcatcttagtc

SEQ ID NO: 77148 - DNA, 498 bp, Homo Sapiens
  misc_feature (73)..(93): n is a, c, g, or t
  misc_feature (116)..(167): n is a, c, g, or t
aaccaacttaacatacagctgagaaagaaagactaaaaaccctctaataaagattgttaactgacagaagcannnnnnnnnnnnnnnnnnnnngagacagggtctcgctctgccannnnnnnnnnnnnnnnnnnnnnnnnnnnnnnnnnnnnnnnnnnnnnnnnnnntggactcaagcaatcctcctgcctcagcctctcaagtagctggaactagatacacacagcactgcacccggctaacgacagaagcattcttatgatacgatctcctctcggctcacttcatcttagtcctggaggtctgactgtctagtttcttcttcttcagaattaatgtttccctcatccatgtcatagcggaactcctcctggtcatactcccggctctcttcccggaggacgtctgcatcttcatctccaggcctcatgtccatctcaccctcgaagccctccagcagagcctgggcctcctccccgggttctcctgcacctttct

SEQ ID NO: 77149 - DNA, 770 bp, Homo Sapiens
  misc_feature (700)..(700): n is a, c, g, or t
cagaatattttccatccacagttggttgaacagagtgccatctgtacctagaatgctgtctcagcccaaggtaccttcttcacatcattcatgaagtgctttaaaccactccccctcaagaagccctttagaacactcagaaaaagatcctcatctcataattcttggtccaaatacaaaactccagactcctcaattactgcatcactaaaattcccaccatttcagtgcatataattagctttttaagttatatatttattattagcttggtgtttgtgtgtttccatcagtggtaacaccataaacatgattcttccaattttactacttctgtaacacagttgcatgtggaaaacggacattcgataaatttatcctgacttcacatgccaaatagtacctgtacacagccctcagttaaagccaccagtttataagtaacttagtggaatagcctagaggtgacaaaggaagagttgggcagcagcattccaacaaacatccgtgaatgaaactttgctcctccattccgatatctgggctgcactgatctaccactctcctggtttctgcctctgtcttcccctgctttgcattagaatcagtctcagtgattaacagtggtgcctgaaagacaatttctccaagagaactgtataggctctaagggcaaaacaacctgccttcttggcagaantgccaggctccctgacaaataatttggagagttttagtgtctaatggacatactgctggagtgggtgttc

SEQ ID NO: 77150 - DNA, 2164 bp, Homo Sapiens
cttgccaacagcagcctgggcttcattcttgctgatgctggttttgacgtgtggatgggcaacagcagaggaaatacctggtctcggaaacataagacactctcagtttctcaggatgaattctgggctttcagttatgatgagatggcaaaatatgacctaccagcttccattaacttcattctgaataaaactggccaagaacaagtgtattatgtgggtcattctcaaggcaccactataggttttatagcattttcacagatccctgagctggctaaaaggattaaaatgttttttgccctgggtcctgtggcttccgtcgccttctgtactagccctatggccaaattaggacgattaccagatcatctcattaaggacttatttggagacaaagaatttcttccccagagtgcgtttttgaagtggctgggtacccacgtttgcactcatgtcatactgaaggagctctgtggaaatctctgttttcttctgtgtggatttaatgagagaaatttaaatatgtctagagtggatgtatatacaacacattctcctgctggaacttctgtgcaaaacatgttacactggagccaggctgttaaattccaaaagtttcaagcctttgactggggaagcagtgccaagaattattttcattacaaccagagttatcctcccacatacaatgtgaaggacatgcttgtgccgactgcagtctggagcgggggtcacgactggcttgcagatgtctacgacgtcaatatcttactgactcagatcaccaacttggtgttccatgagagcattccggaatgggagcatcttgacttcatttggggcctggatgccccttggaggctttataataaaattattaatctaatgaggaaatatcagtgaaagctggacttgagctgtgtaccaccaagtcaatgattatgtcatgtgaaaatgtgtttgcttcatttctgtaaaacacttgtttttctttcccaggtcttttgtttttttatatccaagaaaatgataactttgaagatgcccagttcactctagtttcaattagaaacatactagctattttttctttaattagggctggaataggaagccagtgtctcaaccatagtattgtctctttaagtcttttaaatatcactgatgtgtaaaaaggtcattatatccattctgtttttaaaatttaaaatatattgactttttgcccttcataggacaaagtaatatatgtggtggaattttaaaattgtgttgtcattggtaaatctgtcactgacttaagcgaggtataaaagtacgcagttttcatgtccttgccttaaagagctctctagtctaacggtcttgtagttagagatctaaatgacattttatcatgttttcctgcagcaggtgcatagtcaaatccagaaatatcacagctgtgccagtaataaggatgctaacaattaattttatcaaacctaactgtgacagctgtgatttgacacgttttaattgctcaggttaaatgaaatagttttccggcgtcttcaaaaacaaattgcactgataaaacaaaaacaaaagtatgttttaaatgctttgaagactgatacactcaaccatctatattcatgagctctcaatttcatggcaggccatagttctacttatctgagaagcaaatccctgtggagactataccactattttttctgagattaatgtactcttggagcccgctactgtcgttattgatcacatctgtgtgaagccaaagccccgtggttgcccatgagaagtgtccttgttcattttcacccaaatgaagtgtgaacgtgatgttttcggatgcaaactcagctcagggattcattttgtgtcttagttttatatgcatccttatttttaatacacctgcttcacgtccctatgttgggaagtccatatttgtctgcttttcttgcagcatcatttccttacaatactgtccggtggacaaaatgacaattgatatgtttttctgatataattactttagctgcactaacagtacaatgcttgttaatggttaatataggcagggcgaatactactttgtaacttttaaagtcttaaacttttcaataaaattgagtgagacttataggcccaaaaa

SEQ ID NO: 77151 - DNA, 1422 bp, Homo Sapiens
  misc_feature (440)..(456): n is a, c, g, or t
  misc_feature (713)..(745): n is a, c, g, or t
  misc_feature (763)..(1259): n is a, c, g, or t
tggtataacagcttctggcatgtgacctagttaatgttgaaaattaactgatgaaaacccttgtagatctgctaaacttctctataaattgctagaaatatacagagcaatgagatatagaaaacaccttagcttgttggttattaatagagctctaattttaactgtgaaatcatggagtttctttaaatgttttcctagagtgtttgttatcatgaacattagaaatagcattattccttttcttctaccacatgtcttgaacattcacatgggttaaagaagatggaaactgatactactgacaatcaagctgctttctgactttcataattttctttatattgtggatagcattttgaaggtgaccgtgattctgtaggaagagctgtaatcaatatttttcaaactctaagagtacagaggttagtaagatttcnnnnnnnnnnnnnnnnngttacgtcaagtagcttattaagaaaaagattcatgacttaaattcttaattctcagttgatacaaaggcttataatcatgtgttttaaaattttgatttcattttcgttccttgaaggttaaagaatggaaactggggataaaaattaatacactgcagctttgccaaggtctgtgatatggttgtaaccttttaaagactactaaagtcataatttgaaatttttactaaaataaaacatatgtgtctatggttnnnnnnnnnnnnnnnnnnnnnnnnnnnnnnnnncctcgtgccgaattcttnnnnnnnnnnnnnnnnnnnnnnnnnnnnnnnnnnnnnnnnnnnnnnnnnnnnnnnnnnnnnnnnnnnnnnnnnnnnnnnnnnnnnnnnnnnnnnnnnnnnnnnnnnnnnnnnnnnnnnnnnnnnnnnnnnnnnnnnnnnnnnnnnnnnnnnnnnnnnnnnnnnnnnnnnnnnnnnnnnnnnnnnnnnnnnnnnnnnnnnnnnnnnnnnnnnnnnnnnnnnnnnnnnnnnnnnnnnnnnnnnnnnnnnnnnnnnnnnnnnnnnnnnnnnnnnnnnnnnnnnnnnnnnnnnnnnnnnnnnnnnnnnnnnnnnnnnnnnnnnnnnnnnnnnnnnnnnnnnnnnnnnnnnnnnnnnnnnnnnnnnnnnnnnnnnnnnnnnnnnnnnnnnnnnnnnnnnnnnnnnnnnnnnnnnnnnnnnnnnnnnnnnnnnnnnnnnnnnnnnnnnnnnnnnnnnnnnnnnnnnnnnnnnnnnnnnnnnnnnnnnnnnnnnnnnnnnnnnngtcagaggtggggaacccgaaggactataagatacagcgtttccctgggagtccctcggggtctctggttcgactgcgcttacggaactggcggcttctcctcggaagggggcttccaaataagcgtaggatccatggggaggcgtcgtcaatgggtgttgaa

SEQ ID NO: 77152 - DNA, 356 bp, Homo Sapiens
tacaaatagcaaattctaacgaagacaggggaacagggatggttcttccattgttaaaagccatcctcattttgtttatattgccaggtttgtgatttttctgtaaaggaaaaggcagggtgatttaaccagtttgaccacctttcctgtactcttacaggaaaatcgcagcaataattctaattttgtccactttacagccaaagcttagctaatgttccataaaggagataatagccaatcaggtaaggtaatgtgtaattcattattcaaagtggaacatgtttttgtagggggagagtctgcactattaataattgtattgagaaataaaaataaactaggactattcagtt

SEQ ID NO: 77153 - DNA, 1187 bp, Homo Sapiens
  misc_feature (359)..(377): n is a, c, g, or t
gtccgaaagtcagtctctacaagtagccctgctggagctgctattgcatcaacctctggggcgtccaataacagttcttctaattgagactgactccaaggccacaaactgttcaacacacacaaagtggacaaatggcgttcagcagcgggtttggaacatagcgaatccgaatggatctcgatgaaacctgtaccaggtgcttttattttcttgcttttttcccatccatagagcatgacagcatcgattctcattgaggagaaaccttgggcagctccggccaggccttgtaggaaaaggccccgcccgaggttccagcgtcaacggccactgtgtgtggctgctctgagtgaggnnnnnnnnnnnnnnnnnnnctggttccatgtactgtgaacttgaaaacttgcagactcaggggggtccctgatgcagtgcttcagatgaagaatgtggacttgaaaatacagactgggctagtccagtgtctatatttaaacttgttcttttcttttaataaagtttaggtaacatctcctgaaaagcttgtagcacaaaggctcagctggggatggtgtttgacttcggaggaaaaaagttgctattgcccgttaaaggcactagagttagtgttttatccctaaataatctcaatttttaaaaacatgcagcttccctctcccccttttttatttctgaaagaatacatttggtcataaagtgaaacccgtattagcaagtacgtggcaatgttcattccaatcagatgcagctttctcctccgtctggtctcctgtttgcaattgcttccctcatctcagtagggaaaaaattgagtgggagtactgagatgtgtgggtttttgccattggacaaagaatgaggttagaagactgcagcttggagtctctctaggttttcaactatttcttcacaatttgaacacttgacggttgtcccttttaatttatttgaagtgctatttttttaaataaaggttcatctgtccatgcagtcctcttggattctctgaatgtagtaactatgaagctatgccaaaggtaggcagaaaatgggcttgggagccagacactccagggatcagtagttcctacccatagtctttgtgtgcttgctaaatggtgtacatttcttgttaaccacgttattaaaacttgatcagcaaa

SEQ ID NO: 77154 - DNA, 828 bp, Homo Sapiens
gcggccgcacaccggacacgcatgatcgaaggaggccttgtgcttacgcatgtggcccttgagaaaccaagactgtgtaaagctctggccgcacacttggcagcggaactccggaggcgctgggggctcctcgggagcggcgctgtaggtaatacttgagcgagccggactgggtgcccgcgtagtcgcagtgcggacacttgtagggcagctcgcctgtgtgcactcgcagatgcactttgaggtgatgtgctgagcggaaagattttccgcagaaaggacaatccttgccggtggcgccccggcccccttcaggccgggtccctccaaccaacagcccattctcttcctgcgtggcggtcgatcttgcctgggccccagcagcagaggcagagtgccccggtccctcacccgggcgcgggtgcagggaagccagagagcccagcgacctgccccgggcccaggtttcctcctcggcctccaccacctcctcttcttcctcaggctcctccgcacggtgccggcgagcccgggccgggagagcagaggacagcgggcggaagcctccgaagctgcggccgggaccgggctcagcaccctcgccgttgggccggccctcgccagctcgcaggctcaggtagcccaagaggctcgggggctcacggcgctcggccggggtgggagccggggccaagaggagcgctgggcccaacggctcataggccagcaggccgaggtcaggaggctggggggcgcgggcaggcccggaggcaggccccggggcacgcagtgggcccagcttgctggcgtgcaccttcatgtggttct

SEQ ID NO: 77155 - DNA, 1207 bp, Homo Sapiens
aggtgcacgccagcaagctgggcccactgcgtgccccggggcctgcctccgggcctgcccgcgccccccagcctcctgacctcggccttgcaccttcaagtgcaccacagccgccgggctaggggccgccggccaccccaggctgacgcgtccccgccctatgcccgagtaccatcaggagagacccctcccagtccttcgcaggaaggggaggagggctccgggctgtccagacccggagaggcagggctgggggggcaagaacggtagtgggccctcaggggcgattagcttagtgagcttaccccgccggagcgggggagcgctagaggtagttgggtagagaagccagcagggggcagcgtgggacccatatcccagccccaggcggaccagaggtggaaggcgcggcgggcgtaggagggtgggctggcgtgtacccacccagcccaagggagtcacagtgccttagaagtggcagaggtgagggtcaaagaacggggtccctgggctggcagagaaggtttgtgtccctgttgaggagccactctgccagtctttgctggtccataggcgtgagagtttatttttgtacaaggggtgagggtggggggcactgtacccttctagccccatcaggggccctgtagacgtcgctatttttggtacgattcctgtcatccctattgcagagtcgtgtccccaataaacaggtgtcttgaggcacagggccctgtgtctgtctgcctacctatgtcctgcttccctctttgggtccttctgtcaggaaatagtcacctcttcagacacttagttatcacccaaagagtttgataagaaatgcagaatattgggttttacccccaggtttcgatgcagtagctctgatggggcccaagaattagcatttaacaaacagccaagcaagttctcacgcactgtggcctgaggacctcattttgagaactgctggactgtgctggatcccagtttgtctgtgaccagttcagcctcaaggagtaggtgcagtgtgggagaaggagcttcagagagtgtgtggaacctctgggagccactgtggaggagacacattctcccaggctcatacacagtcagctagctctgggcctgggaggggtagaggggaccttccagtcttggttttattttctgtgttctagttaaggggtggttgagggaggataac

SEQ ID NO: 77156 - DNA, 530 bp, Homo Sapiens
gcggccgcacaccggacacgcatgatcgaaggaggccttgtgcttacgcatgtggcccttgagaaaccaagactgtgtaaagctctggccgcacacttggcagcggaactccggaggcgctgggggctcctcgggagcggcaggagctggggtcggggttgcctcacgttcgggctccggctccggctccggctgggggactgatctgggttcgggctggggtggaggctgaggctgaggctgaggcggaggcgcagcggaggtggccgccaggggacgctcgggagccccgtgggccgtcaggctgtggtgcagcagctcctcctcctggctggagccgaaactgcacaggccgcacttccagggcctatgcaggatgtgcaggtggcgttcgcgctccgccgaggtgcgaaacttgcctttgcagtaggggcaacggaaggcggacgatgaaggagcctggggccgcgccagaccctcagtggcaggggtggcctgcatgccccctgagcttcgggctctccccagtc

SEQ ID NO: 77157 - DNA, 615 bp, Homo Sapiens
cttttcagtcttgccccagaggttccctcaatttcagcagcaccgagcggtttataattcattcagttttccaggccaggcagcccgctatccttggatggcctttccacgcaatagcatcatgcacttgaaccacacagcaaaccccacctcaaatagtaatttcttggacttgaatctcccgccacagcacaacacaggtctgggagggatccctgtagcaggggaagaagaggtgaaggtttcgaccatgccactgtcaacctcttcccattcattacaacaaggacagcagcctacaagtctccacactactgtggcctgacaacagaactgagaggagaggattagactctggggtgcttgcatgggcaactggatttttgcatgattcctttatgattttgcttttaatgtatacacccagaagagccaatataaacgttcctcatgcctacagctagcgtgttacctcatagttgttgaagtatttcttcattaggcctttaacataatttattagtgtaataattttggcattgtttctcatgagtgatactatttctaactcataaaaataaacttgtagtactaagatcccaggtgagattaaaa

SEQ ID NO: 77158 - DNA, 830 bp, Homo Sapiens
tttgcatttgtataccatatgaaagtttggtaattatcctattaagtaaaatgcttccaaacaataactaagtataatactccaccatccttataaagctcaatattacaaggcatccatctaatgaaaaatatattttagattatgataaagactaatctttcatagacatttccaagatattagtactctgttattcaacagttacttccctatccacccaacaacctgaaaatatgagttattcaaaaattctcaaagggttttaaatgaacctacctgctacagggatccctcccagacctgtgttgtgctgtggcgggagattcaagtccaagaaattactatttgaggtggggtttgctgtgtggttcaagtgcatgatgctattgcgtggaaaggccatccaaggatagcgggctgcctggcctggaaaactgaatgaattataaaccgctcggtgctgctgaaattgagggaacctctggggcaagactgaaaaggtactattgagagaattggcatttgtagctgcagcaggatgcaggaatccagagcctggacctttggcggttgtagtgtgtgaagaggagttctgaagagatgtgggcgaaagggaaggttggtcttgaacggacagttccttcccaaccaggtctgctaaagcttttcgagtgacatcgaaagggatcaaaacccaagtcatcctctggttgtttagaagaaccaaagccaaaagctgcttgccagtctgtagaggatgatactgggattgtttctgatgtgaagaggctctgtggttctggtgctgtaggccagtcactggatgt

SEQ ID NO: 77159 - DNA, 1201 bp, Homo Sapiens
ggctggaccggtccggaattcccgggatcaatggtaagaatggtgcctgtcctgctgtctctgctgctgcttctgggtcctgctgtcccccaggagaaccaagatggtcgttactctctgacctatatctacactgggctgtccaagcatgttgaagacgtccccgcgtttcaggcccttggctcactcaatgacctccagttctttagatacaacagtaaagacaggaagtctcagcccatgggactctggagacaggtggaaggaatggaggattggaagcaggacagccaacttcagaaggccagggaggacatctttatggagaccctgaaagacattgtggagtattacaacgacagtaacgggtctcacgtattgcagggaaggtttggttgtgagatcgagaataacagaagcagcggagcattctggaaatattactatgatggaaaggactacattgaattcaacaaagaaatcccagcctgggtccccttcgacccagcagcccagataaccaagcagaagtgggaggcagaaccagtctacgtgcagcgggccaaggcttacctggaggaggagtgccctgcgactctgcggaaatacctgaaatacagcaaaaatatcctggaccggcaagatcctccctctgtggtggtcaccagccaccaggccccaggagaaaagaagaaactgaagtgcctggcctacgacttctacccagggaaaattgatgtgcactggactcgggccggcgaggtgcaggagcctgagttacggggagatgttcttcacaatggaaatggcacttaccagtcctgggtggtggtggcagtgcccccgcaggacacagccccctactcctgccacgtgcagcacagcagcctggcccagcccctcgtggtgccctgggaggccagctaggaagcaagggttggaggcaatgtgggatctcagacccagtagctgcccttcctgcctgatgtgggagctgaaccacagaaatcacagtcaatggatccacaaggcctgaggagcagtgtggggggacagacaggaggtggatttggagaccgaagactgggatgcctgtcttgagtagacttggacccaaaaaatcatctcaccttgagcccacccccaccccattgtctaatctgtagaagctaataaataatcatccctccttgcctagcat

SEQ ID NO: 77160 - DNA, 788 bp, Homo Sapiens
  misc_feature (671)..(716): n is a, c, g, or t
ttcgctactgtgtggcactctgtccatcaagcccagtgtgaaggagttcacggaaacctcagctgtgtttgaggatgggaccatgtttgaggctatcgactctgtcatctttgcaacaggctatgattatacctaccccttccttgatgagaccatcatgaaaagcagaaacaatgaggttaccttgtttaaaggcatcttccccccactaatggagaagccaaccttggctgtgattggcttggttcagtcccttggagctgccatccccacagcagacctgcaagcctggtgggctgctaaagtatttgcaaactcatgtaccctgccaaccacgaatgaaatgatggatgacactgatgagaaaatgggaaaaaaactcaagtgatccccgcctggccctggaggtgtactttggcccttgcagcccataccagtttcgactgatgggaccagggaagtgggatggggccagaaatgccatcctgacccagtggaaccggacagtgaagccaaccaggacaagagttgtcagtgaagttcagcgaccccatcccttttacaatttgcttaaaatgctttcattcccattactccttctggctgttacacttacattttattaatgagaaagtctttgaggtctcaaaattcagcatagaagtgtaatnnnnnnnnnnnnnnnnnnnnnnnnnnnnnnnnnnnnnnnnnnnnnnagttcctctctcctttcctgaagatatgaaaatcagtcttggcccatttgaattaaagtataagtaaaatgg

SEQ ID NO: 77161 - DNA, 950 bp, Homo Sapiens
  misc_feature (296)..(311): n is a, c, g, or t
  misc_feature (329)..(745): n is a, c, g, or t
  misc_feature (752)..(810): n is a, c, g, or t
  misc_feature (847)..(847): n is a, c, g, or t
  misc_feature (896)..(896): n is a, c, g, or t
tagaagagaaaggtttgagccaggttgcagtgacggtccaggctctcctgggcaacaaaagcgaaattccatctcaaaaaaagaaaacgcgccccatctcgctccaccacaagcgcctttatatactcaatgatgggtggaggaaaagggcccaagggctcacaccgcacaggagcctttactcaagtttcagctagttttccttcccctgcattttgaactccttttagttgttggtgatatcctttggtgttcactgcctttgtaaaacaagtaaataaagtaagcggaagatnnnnnnnnnnnnnnnncctcgtgccgaattcttnnnnnnnnnnnnnnnnnnnnnnnnnnnnnnnnnnnnnnnnnnnnnnnnnnnnnnnnnnnnnnnnnnnnnnnnnnnnnnnnnnnnnnnnnnnnnnnnnnnnnnnnnnnnnnnnnnnnnnnnnnnnnnnnnnnnnnnnnnnnnnnnnnnnnnnnnnnnnnnnnnnnnnnnnnnnnnnnnnnnnnnnnnnnnnnnnnnnnnnnnnnnnnnnnnnnnnnnnnnnnnnnnnnnnnnnnnnnnnnnnnnnnnnnnnnnnnnnnnnnnnnnnnnnnnnnnnnnnnnnnnnnnnnnnnnnnnnnnnnnnnnnnnnnnnnnnnnnnnnnnnnnnnnnnnnnnnnnnnnnnnnnnnnnnnnnnnnnnnnnnnnnnnnnnnnnnnnnnnnnnnnnnnnnnnnnnnnnnnnnnnnnnnnnnnnnnnnnngcagatnnnnnnnnnnnnnnnnnnnnnnnnnnnnnnnnnnnnnnnnnnnnnnnnnnnnnnnnnnntcgagctcagtcagagtggcgaaccgacagactatanatacaagcgttcccctggagctcctcgggtctctgttcgactgcgctancgaactgtcgctttctcctcggagcgtggctctcaactcagcgtagaccagtgg

SEQ ID NO: 77162 - DNA, 1911 bp, Homo Sapiens
  misc_feature (357)..(397): n is a, c, g, or t
  misc_feature (613)..(622): n is a, c, g, or t
aacctgcagtacagtgaagttcaagatcgggtcatgctcactggccgccacatggttcgagatgtgagctgcaaaaactgcaatagcaaactgggatggatctatgagtttgccactgaagacaaccagcgatataaggaagcccgcgtgatcctggaacgtgctctagttcgagagagtgagggctttgaggagcatgtaccatctgataactcttgaagatacagagagaaatccatcttttcccaggtctccttcactgaaaacaaaaatctacttacatacactgtcaccttagcatcagagtcggattaatgaactgcggaacaagaggttgtgagaatctaagatggaacnnnnnnnnnnnnnnnnnnnnnnnnnnnnnnnnnnnnnnnnncatccaacagcagcgtgtagagagaatattatgcagatgccgttaattttttaccctatgtttacgtcttgaggcagcagagtctgtctgcagctatgtggtgagctatgtaaggaaaaaaatctgggctgttagagtgaaaaagtgtgttttatgtcaattgtgaaaggaaaatgttaggagtatggtttttaaacttgggcttcattttaaacnnnnnnnnnnaaacccagttatttcacttgatttgctagcttcagagaagagatccgaatctgtgcccagcgctaaaggctcagtgttagcatggcttgtgctggccggtgtgccatattcttgttggagatgaaccgtagcaccagagcccattcttccttgtcagtcttggcccaaagatgtcaccattcctagttatttgtcaccacataattggtgttgattggaaactttttctgagatgggacagaactgctgggttgtctttttccatgtaacttaagcatagtaatataaataaagtaatagttggatgctttgggtcctgtgttgcttttaaaaacaccttataaaagaggagagtatttgataagcaattttcatagtagtaaagttttttttcatctcttaaactaaattgaccatgcatataatattcttgtttaaatgaaagcatactgttgaaacccgcagtgttgcatttagaaaacagttgaacagaatgtcaatgtgcattcatgcaaaaaaacatttaatctgcatctgttttagaacaagggggaaatgaagcaacttgtctaaaaatactgctttacaaagcatttcagcctttccccctcagttttgcattgattttttgacaagtctgtagagcctaatagtttccatcaaaggcctagatctcttatttagcatttttttcagctcttctctcagaagttcagctgttgaaacgaaaactgtactttgtaccctcacatacaaagggatcaaatttgacctggtgttattttagccccaaatttatgacattacacaatattaaaatgtaaatgtttctttacccaaactacttctagatattctagtatttgcttctggtggaattaaatgacggtaaaattggctaattatttgaatgaatgaatggatggatgttttgcatgctcaatttctaggtcctttgtctagaaaggaaatttgcctcagttgaattagtgaaatatttctgtcgttgatattaaaagtgacttctgagtacagttaagttcctcctatttgccactgggctgttggttagaagcataggtaactgattaagtaggtatgatactgcatttgaaataagtggacacaaactatcctttctccaccatggactcaatctgagaacaacagcattcatttccattcatttccatactggcttttgattatatgcagattcctagtagcatgccttacctacagcactatgtgcatttgctgtcacaataaagtatattttgtcttgcaaa

SEQ ID NO: 77163 - DNA, 758 bp, Homo Sapiens
  misc_feature (62)..(102): n is a, c, g, or t
ccatagggtaaaaaattaacggcatctgcataatattctctctacacgctgctgttggatgnnnnnnnnnnnnnnnnnnnnnnnnnnnnnnnnnnnnnnnnngttccatcttagattctcacaacctcttgttccgcagttcattaatccgactctgatgctaaggtgacagtgtatgtaagtagatttttgttttcagtgaaggagacctgggaaaagatggatttctctctgtatcttcaagagttatcagatggtacatgctcctcaaagccctcactctctcgaactagagcacgttccaggatcacgcggccttccttatatcgctggctgtcttcagtggcaaactcatagatccatcccagtttgctattgcagtttttgcagctcacatctcgaaccatgtggcggccagtgagcatgacccgatcttgaacttcactgtactgcaggttaactaccttgttaaaaagaaatgctctgccagtggcgcctgtgaaacgagtggagatgagttctgagcggttggtcaggatcgtatcacagtttgcacaagaaaacagacgggtaccaccgatatgatcaaggaaaattctgcccatttttatggctgaagttctaaaaaccctgagcggcggtgagatccgcggctgccagcggcttgtcgctcttcagctggtatgaagcccctcggccacccgagtctccaggtttagtcaggcctggccttggccccgcctctcctgcgttgggcc

SEQ ID NO: 77164 - DNA, 1044 bp, Homo Sapiens
  misc_feature (140)..(175): n is a, c, g, or t
gtgattcagggccgagcagggctccctggaagccccctcttcctgccccaactttattttggttctaaaatcattccagttggcatacccggtccccaccacggctgtcctgggcacacagttaacatgtcatgcagttnnnnnnnnnnnnnnnnnnnnnnnnnnnnnnnnnnnntcagtggcctgcaccgcacagccactgggttagagaaagtcggggtctccatggaacaccgctcgtccatccatgtatctcctggccctgggctgacctcctgctgtggccatagggtagacagcctggccttggggctggcccatggctgtgtcaggtagggaaagccaccatcctgcctccagtcccctgggcccttgttctagcccctcctccccccatatcactggggataatttgttgcactgggtctccacagctcaccagttatggaccaaggaacagggcagccagcctgagggtccatgctgtcacctgtgggtggccccaccgagcaagatgataccccaacctgctggcctgggtgagctcagcccttcccagcactcagccatgaaggcaagaagcggcttcctgggactgcgggacaccaggctggggatgacaagctctgcctgctctcctcctactggggctgtggggtaaccaaagactgatgccagtagaggtgcaacagcccagcccctctgcttctgggtgggagcccccagggtgcccctcgtactccaggcccctgcccccacagcgatcaggccaaggcgatggatcttgaagccacacttgcgtggcttcctccatccagcctgagctccctttcttgatctggtaagtttctctgagaacactcacccgcaagaaactacttgccccagaatccccctctcagatttcgcttctagggaactcaagctaggagacccggtgtcgggggcacccaccccgtgatcgagagccgcctccttcctagcctggcattcagtcttctcctggcgtccctcaagccgcccttccaccctgccttccccggc

SEQ ID NO: 77165 - DNA, 902 bp, Homo Sapiens
  misc_feature (600)..(609): n is a, c, g, or t
  misc_feature (623)..(623): n is a, c, g, or t
gggggagcgcggcggtgatggcggggccggtgaaggaccgcgaggccttccagaggctcaacttcctgtaccaggtgagtctgcgacaagggccccacggggacggtgctcggcgtcccagagtgactgctcccctcccgcaggccgcccattgtgtccttgcccaggaccccgagaaccaggcgctggcgaggttttactgctacactgagaggaccattgcgaagcggctcgtcttgcggcgggatccctcggtgaagaggactctctgtcgaggctgctcttccctcctcgtcccgggcctcacctgcacccagcgccagagacgctgcaggggacagcgctggaccgtacagacctgcctaacatgccagcgcagccaacgcttcctcaatgatcccgggcatttactctggggagacaggcctgaggcccagctcgggagccaagcagattccaaaccactacaacccttgccaaacacagcccactccatttcagaccgccttcctgaggagaaaatgcagactcagggttccagtaaccagtgatggattcaccccatctcccaaataaagtttacttgttttacattggccnnnnnnnnnngcgggccgagtctntccctcgtcggcccgcctcgggcccttcaagaacctttccaagaccatcccggttcggcgccgcgggcccccgctagccgacgccgaaacccgggcccccccgttgctttctccccggaacgacccctggtgcgaccgctctcgtcgggttccggacatttgtcacaccccaagatacgagggcgcgtggccgccccccttcgccggtcctctccgcgaatacgatcctccctcgtgcgccgccgacgcccccttagcgccccctcttgctcgctctgc

SEQ ID NO: 77166 - DNA, 781 bp, Homo Sapiens
  misc_feature (44)..(44): n is a, c, g, or t
  misc_feature (101)..(101): n is a, c, g, or t
gatgcgctaaaattcttagatgttcagcgctcagaacaaaagtntgaaaaatgcattgttcatatgaatgtcatctcttttcagtttccagtatccttttnaaaaaatggcaaaagcctagatttacaatttgatgaacactaaatatttcttattaatataatctatttttgtattttacttaatgagctttaagtgcctgtcgttctgaaaattgtgtatttataattcagcttatctcataattggacctaatagcatttctttgtgcagttaggtgacgagcactgctttgaggcccaagcactagtagagatgcgcgatacaggtctagtttcggtaactgttccagacatcaagcaataaaaaaatgaataccacaaaagatgtttgattttacagtggagccttactgaaccagcattcagaagtttaaggtcctcctaggtatgagtatttttagtagtggatcactgtggacagggtgcagctctaccagttcctgtttcttctgagccagaccctcttcagggaagggaccaattaattttaaaactcacttgaagcacagctggtcatggggcttggtataaagttcctatttccaccctgatacttccaattcctggaaccccagcccactcccccatccctcctccctatcaaactagtataatgattttgaatcggtacagtgtgtttaactgtaactaagttcaacagactattattatctttgtaataaattaacctagcaataaaaattattctgtttcttaaa

SEQ ID NO: 77167 - DNA, 1658 bp, Homo Sapiens
  misc_feature (739)..(750): n is a, c, g, or t
  misc_feature (1483)..(1486): n is a, c, g, or t
  misc_feature (1489)..(1489): n is a, c, g, or t
gctggtacggtccggatatcccgggatatcgtcgaccacgcgtcggagtgaagggcgtacactggcacctggtgttggcctagatcccccatctcctccttccagccaggtctggaagtttcaacagcccaagcttaacttcatgtaaagtcttcactgccagtgggaacatctttgacacaacaagacactccaattgtgatttgagttgaggatctctgcctgccttcctgccgtccttccttcttccccgatccatgctacttttaggggctgcggagagcagcagcagagctgagtaatgatacagggcaccacggagagaaagtagaaccatttcactcctgggaagatggggtatttcccacttccagcaacgaaataacaaatgaaaagttgcatacttattgatgtattgtatgagccagtagcattttatgtacaaaacagaagtcaatgcaacagtatgtatgtgtgcctgtgtgtgtataaaaataaccattgaagctaacttgctaatgtacttaggcaagccacttcccatctctgggcctcgtctttcctccctctaaaatcaaagagctgaattatgtgatccttgaggtctcttccacttataataccaactgtcttgtcagactggcaaattatattggcctctccttatgtggtggtttctctggtaggtcatagttccttatacacagacacctgcatcatcgaaggtctttttttcctnnnnnnnnnnnntgggattttagttcttattctgtgataactatcctcctcatataatactattctttttgacaccatttgaaggaaccaatatttggaccttattttgaggttgtctgtctcgaagaaaaagaaaataaaatgtataggcagggttccttcaattggcattttccccagaattgtgagccaaagcctatagtaattgcagacagcaaatgattccggatctctaaaaggctctctcagatgaaaagggagtaaaggaaaaaagaggtcaaccactgtttctgataatgtacttgagtttcattgttcttttagtttgtattcttataaaaaatgtttacactctgcagattgattttttttgtttagtactgtggctttcttttcctattttatgaaaaaaatgataatctttttgtaaaattgtctgtgaaatataaacattaatatataaagaaaaaccttgaagtgctgtatagtgaagtataaattaatgttttattgatttgtgaagaatttaagactattatataattatcttggtggatctattttatgcatgaccttttaacctttgactttgcttatttcccactacgaaggggaaggtagattttatgaatgattttaatagcaaatatattttataaagtgaaaatccagtgtggaggtagcaaagcatctatctattctgaatcatgtttggaaataaaaattgctcccatctgggaaaaannnnctnaaacaaaccacacacggccggggacaacacctaatctaagtagaaaaattaaattgtgggccccccctggccccctaaaaaacttttctaaaaccattctttgggggcggggggccccctaggaaaaggaaccagggccttaacttgtgtcccagggaaactcgggccc

SEQ ID NO: 77168 - DNA, 1104 bp, Homo Sapiens
caggatggataaactcctcttaggaatggggcaacaaacagctgcagacaaaaatatactctgtaacaacccaacatgctagaagattttccagtttaaaagacacaaaatcctaaatgtcaaaactgcagaggaactcaagaggccactgtccaaagtctgtcacagtcctccatatggcaaagatgaagaaaattggcaatctttttaggggtaccaaggatctcagtttgtacggtctttataaatgcagagcaagatgtggctttcctgcccccatttcacctcaaggcatcttcagcaacccgacatggcttccctctgtgcgcatgaaataacttgaggccagggtctctcagctttaaagccttggaatcctatgcattgtttgtttgtgtgtagatgtgcagtttgaggggtagcttctcttaaggggtcaaactccaccaaaagttcagaatcatgtcactggatcctgagtccatctccaccagaccagggtgccgctcaggtcaggtgctgtggtaactgcagcagatggtccctttagcgatggagtccaaggacatcatggccaagacccagagttttatatcaactgaggaaagtgaagaccagccagagaggctgcagtttagggaagccagaggctcctcccccaccacgatgccaggaaggactatccccagggtgacggaaagaaagcactggactccagcagtatgtccagctgattcaggtgtgctaggttcccagcagaggagggtaagggaggagatccaggggccctggcttagtcatcgtatctggtacacctttctcccccggagaaaattcttgcaaaaaggagaggatcctacacagaccaaaaatgctggtgtcagggcttttacaaagtacctctggtgctgtagaacctgtagcaaggtgctcttggcaggcacccggtatagttctgccctgtcctcatcctcaaagtagacctccaaattatcagggcaatatttttgctctaggtcccaagagggtgtttcaccaaacatcaccattagatgatcaataaacctggagtcctcatgaaaagcagagatgaagtccgactcc

SEQ ID NO: 77169 - DNA, 1485 bp, Homo Sapiens
aatcatcctgatcatttaatgagaaaaaaatatcagtgtacagattgtgactttacaactaacaagaaagtgagtttccataaccacttagaaagccataagctcataaacaaagtcgacaaaacccatgaatttacagaatacacacgaagatacagagaggctagtccactgagttccaataaacttattttaagagacaaggagccgaagatgcacaagtgcaaatactgtgactatgaaactgcagaacaaggactgttaaacaggcatttgttggccgttcacagcaagaattttcctcatgtttgtgttgagtgtgggaagggttttcgacatccttctgaactcaagaaacatatgagaacccatactggtgagaagccatatcagtgtcagtattgtattttcaggtgtgcagatcaatcaaatctgaaaactcacattaagtctaaacatggtaacaatttgccatataaatgtgagcattgtccccaagcatttggtgatgagagggagcttcaacgccatctggatttgtttcaaggacataagacacaccagtgtcctcattgtgaccataagagcaccaattcaagtgaccttaagcggcacatcatatctgtccatactaaggattttcctcacaaatgtgaggtctgtgataaaggttttcatcgtccttctgagctcaaaaagcatagtgatatccataagggtaggaagattcatcagtgcaggcactgtgactttaaaacatccgatccatttattcttagtggccatatcctttcagttcatactaaagatcagccattgaaatgtaaaaggtgcaagagaggattcagacaacaaaatgagctaaaaaaacatatgaagacccatactggaaggaagatttaccaatgtgagtattgtgaatacagcactacagatgcatctggctttaaacgacatgtgatatcaatacatacaaaagactatccacacaggtgtgaattctgcaagaagggattccgaagaccatcagaaaaaaatcagcatattatgaggcaccacaaagaggctcttatgtaataagatcaatataaagaaagaagctatttaggagatatgatatgctacttgggagaaaactctcactaactgtctcaccgggtttcaaagcttgatactaaaccatgactttacattctttgtattaaagatcttaaaatatttgaattcacaggggatcccatagccctttgaaaattacttaaagaatttaagaagcactatagaatggttacagaaaaacttcttaagtatctgtgtaatagtattatatgcataacttaaactacagaggggaaaagcaaaagacaaatactttatttggctgattatgttagatacaaatgtttctgagaagagaatacataattgagtttagtgatgcttttgctattagcaaggcaaacccacttttaatgcaatttagaa

SEQ ID NO: 77170 - DNA, 707 bp, Homo Sapiens
  misc_feature (57)..(57): n is a, c, g, or t
agtctattgcagttgtttctatagcttactgatttaactcagtcctgacacaccttntgggaaatgctgatttaaacttcttaactggcaacagttggaacagtaatcagtttgctaacatatttaaagtcttgaatgttgaagaactcatgtgatttacccttttcaactttttggaaaacgatttaatttattctaattagattaaccctattaatctatggattgggtatcaaaatgaatgccagtccagatgtgcctagacacgaaattggagctgaggactctcacgatatgcaagttcatccaacgtgaagataccataagctttttctctgaaccagagaaatgaaagtcagtttaagaggctgatagatcttggccctgttaaggcatccacttcacagttctgaaggctgagtcagccccactccacagttaggccaagaattagattttaaaacttcatctgtctgtcccagttaactgttaaataaggcctcatcctccactgaagagtatggattgaaggattgtgaactatgtttagtgtgattgtgaacttggtgcctaatgttccatgtctgaagtttgccccagtgctacacgttggagtatacctatgtgtgtgctttgccactgaagtaagattttgcctgtatggtactgttttgtttgttaataaagtgcactgccacccccaatgc

SEQ ID NO: 77171 - DNA, 1627 bp, Homo Sapiens
ataggctaggtagcgaggcctggtgtggaattggcacgagggtcaggatagctcctgctaaatatccagttgtggggtttgcaaaacaaaacagctgtatgtaatcatgccactagttccatctagaactcctttctagttgttatttttaaaatgtttatacataaaaccaccaaaatacatagcttcgacaagatgccaagtttatttctctctcccataacagtgcagtgatagtcagctggtccaggccaggcaaggggctggtccatgatgtcatcaggcacccaggttcctactgtcttgccatgtggccacagttagcaacaaaggaggctgtaaatttagtttctacttgggcagccaaaactctgaggaaggagattctgctagtaaaaaggagtgggggaagaatggccattgggagacaacaagcagactcaaccaggcctctttgttggcttcctttcctcctgctgcacatgagccttcgccgtgcatttggagccatgacagctgatagctccagacctgcatcctcctagcttgggggctctgaatgaaaggtttcttcccttccagttcgaatttggaaactcccaaagttctcaatggtttgttgtgagttccatgtcctcttggatcagtcactgtggccatgcatgtttggccacatgattaatccagtctgggtcatgaccttttcttcatccaaaacaaggtggtgggaagacaaaaacaatagctactacaaacaataggagtttataattatgtgctgatgtattcgaagatgtgttgacagtcgtgagtgtgtatcctaggaaaggcgagctggactctgtctccatggtggctctcaccccagggacctaggaacagcctgtcaccacacaattacttttataaccctggagatgaaaatctccttgtcctcaaaatactcccagaagaacaaccagatgggaaggaccttggttgggactctttccagttcacttggggcagagggaatttaatggctcacgtagctgaaaaggatgggctagattgggcttcaggctgcatcccaggactccaaacagggatctgtctctttggctctcagctctgctttcatttgagttggctttattcttgggcttcacagtgtggccccacagcaccagttattgataaaaagagctcccctttgctgacagaactgctggatttggttctcattggtccagacgaggaaggtatccagcctcaagtcatcattgtggccaggaagatggaatacaccaaatggacaggcctggcatgtacccacagagactgagagttggtgctggtggttgtggtggcagatgatattacctgaagaagggacgaatgggtgctgggcaggacaaagcatcagctgtccagttcaggcctctcctctttccctggtgtcttcattttcctccgtctccctgctgtcccttaccctctgcccaatctctcattactcctggtcttgggagttgccttctgaggatactccactgggggtacctgagcctggattagagggcagggggaggatattgcctagccaaagtgggtgttcaataaaaaaccatttggagatggaaaaaaa

SEQ ID NO: 77172 - DNA, 512 bp, Homo Sapiens
attacatttggacctttaagaaacatataccatcagatataccactattcagtaaaaatctattctagtttttgggaagcttatgtgtcacaaactatcttgcttctagtctccaagactttactaagtttatcaaaaaggtgggctctggtctatgggatcctgagccttgaggtttggatgttctgattattgtaaaacaatttcaagtggattaacttaattcccagctgtttttcttctggaatgggctaatcagtttgaattatctagtccattacaagaatattaaattccttgagctttgtgatctattctgtctttggaaaacctggtaaaaaagtaattttttttctatacaataaggatggatttaccagaacatacccagtattaatcataacaaaaagcagtatagataatgtatatgtgctgtgttcactttaataaccacttcataagtaactactctaactatggggactatttctggatcagtaagatccaagtgt

SEQ ID NO: 77173 - DNA, 1037 bp, Homo Sapiens
ggctggtaccggtccggaattcccgggatatcgtcgacccacgcgtcggctttctctgaagggagcagtctgaggaccaagggaacccggcaaacagcacctcaggtactccaggccctcctggctggagagggctgtggcaatggaaaattagtgccaactgcaatgagtcagcctcggttaaatagagagtgaagaatgctggacaggaacctccaccctcatgtcacatttcttcagtgtgacccttctggcccctctcctcctgacagcggaacaatgactgccccgataggtgaggctggaggaagaatcagtcctgtccttggcaagctcttcactatgacagtaaaggctctctgcctgctgccaaggcctgtgactttctaacctggcctcacgctgggtaagcttaaggtagaggtgcaggattagcaagcccacctggctaccaggccgacagctacatctttcaactgaccctgatcaacgaagagggacttgtgtctctcagttggttccaaatgaaaccagggagcaggggcgttaggaagctccaacaggatggtacttaatggggcatttgagtggagaggtaggtgacgtagtgctttggagcccagggagggaaaggttctgctgaagttgaattcaagactgttctttcatcacaaacttgagtttcctggacatttgtttgcagaaacaaccgtagggttttgccttaacctcgtgggtttattattacctcatagggactttgcctcctgacagcagtttatgggtgttcattgtggcacttgagttttcttgcatgcttgttagagaaaccaagtttgtcatcaacttcttatttaaccccctggctataacttcatggattatgttataattaagccatccagagtaaaatctgtttagattatcttggagtaagggggaaaaaatctgtaattttttctcctcaactagatatatacataaaaaatgattgtattgcttcatttaaaaaatataacgcaaaatctcttttcctt

SEQ ID NO: 77174 - DNA, 1227 bp, Homo Sapiens
  misc_feature (603)..(789): n is a, c, g, or t
gttctgctttattattaaagttgtaatcccttgatatttacagagcaggcacctcggtgccaaggaccaggccatgcccgttctggtctgggaggcagaacctggggttgggtgagccacggggtctgcaggttgcatccgagacccccaggtcctattcttccaccccgtaacaaaaccagaaacctccccaaggcagaacgccaaaggccaggtgtcacccacaccccagcagttccccttagcgccagatggggctccctgagccctgtggctgaagtggggaacacggccatggggcttgtgtggactgaattctcatgtggctgcagccctttctgtagtacagactggggttgttaacatagttcatggtgcctgcagccccttcatggtgggggtgcctggtttgtcctcccaggagaagcagatggtaacactgctggacctggctggaaggagcctgaagcatcggccacgtccactggcttacctgcatgtaacctttcccaatctcagcctcataggatactacacttatggcaaggctaaaggagaggggataagtcacagccccagcacccagcaacacacacggtgagnnnnnnnnnnnnnnnnnnnnnnnnnnnnnnnnnnnnnnnnnnnnnnnnnnnnnnnnnnnnnnnnnnnnnnnnnnnnnnnnnnnnnnnnnnnnnnnnnnnnnnnnnnnnnnnnnnnnnnnnnnnnnnnnnnnnnnnnnnnnnnnnnnnnnnnnnnnnnnnnnnnnnnnnnnnnnnnnnnnnnnnnnnncccgtacctgggccgggctgggaattttaaccatgactctccactccaaaataggtccagatccttggcagccaaagatgatttccagccccgggctcagggcagccagtgcgtagtcctcacatccataccatagggccaggttccgagggcatcatggctgctaggctgaaaaacccgcccttctccaggcaccagaggtcatcctggctttacacgtatcctttgagagtctgtacctgattcaaacacggagaaaccaggaccccgagcagtttgagtgtactggtaatggatgcagctttggccaactagctgagtgagaacacaaggagccgtgactccgacggcccaggcctgtgtcctggatggccgtgtgcagcgaatccgttggcgactcctagatgacccagcctcgtccgatagcacacccagggg

SEQ ID NO: 77175 - DNA, 678 bp, Homo Sapiens
gcccggccgggcccgccatggaccacaagccgctgctgcaggagcggccgcccgcctacaacctggaggccggccagggcgactacgcgtgcggcccgcacggctacggcgccatccccgccgcgcccccgccgccgccctacccctacctcgtcacagggatacccacccaccatcccagggtctacaacatccacagccggaccgtcacccgctatcctgccaactctatcgtggtcgtaggaggctgtcctgtctgcagggttggggtgctggaggactgcttcaccttcctgggcatcttcctggccatcatcctcttcccctttgggttcatttgctgttttgccttgaggaagcgacgatgccccaactgtggagccaccttcgcttaaagggaacaccaggcccggctttcctacacccagctctctttttctaatgtaaatgttgtgtacaatagttttatttgattaagcttcaggactgttttgtaaagcgaggtgggaccgatgtggcacacgccagctgcggtttcccggagcgtggagaggcagtgctgctgctcccgcccgaggctcatgacaactcaataaagcactgcttttattttttgcagtcttcaatttgagaaaggtgagaaataatgttttcaataaatgagattcataccattaa

SEQ ID NO: 77176 - DNA, 668 bp, Homo Sapiens
gctgaagcgagttgccgcgttctctctggcggcgcgacaccggcccgtggaccgcccggccgccctccaggacccggtctgcaggagcggagagggcggtgtggacaccgcctgcaggcgaggagaaggggtggcggagagggtacctggggatacccacccaccatcccagggtctacaacatccacagccggaccgtcacccgctatcctgccaactctatcgtggtcgtaggaggctgtcctgtctgcagggttggggtgctggaggactgcttcaccttcctgggcatcttcctggccatcatcctcttcccctttgggttcatttgctgttttgccttgaggaagcgacgatgccccaactgtggagccaccttcgcttaaagggaacaccaggcccggctttcctacacccagctctctttttctaatgtaaatgttgtgtacaatagttttatttgattaagcttcaggactgttttgtaaagcgaggtgggaccgatgtggcacacgccagctgcggtttcccggagcgtggagaggcagtgctgctgctcccgcccgaggctcatgacaactcaataaagcactgcttttattttttgcagtcttcaaatttgagaaaggtgagaaataatgtcttcaataaatgagattcataccatt

SEQ ID NO: 77177 - DNA, 378 bp, Homo Sapiens
  misc_feature (132)..(140): n is a, c, g, or t
tgcggccgcccgcctacaacctggaggccggccagggcgactacgcgtgcggcccgcacggctacggcgccatccccgccgcgcccccgccgccgccctacccctacctcgtcacagggatacccgccaacnnnnnnnnnctaatgtaaatgttgtgtacaatagttttatttgattaagcttcaggactgttttgtaaagcgaggtgggaccgatgtggcacacgccagctgcggtttcccggagcgtggagaggcagtgctgctgctcccgcccgaggctcatgacaactcaataaagcactgcttttattttttgcagtcttcaatttgagaaaggtgagaaataatgttttcaataaatgagattcataccatt

SEQ ID NO: 77178 - DNA, 1244 bp, Homo Sapiens
  misc_feature (724)..(755): n is a, c, g, or t
  misc_feature (1124)..(1151): n is a, c, g, or t
ctgcgggggaagcggggttctgtagggtcaagactgtggagcacacacggtgaggactcctgaggaggggcaggcctgggtggaggctgttcgcaaagctgcagtgagccggagggagagaggttcaggcagggaagggggtacacaggggttaaggggaccgagggaagtgtggtccctgaaagagaggctgggatgtgtgcaggccattcatcccttctcctctctgttcctcccctccagtcctaccagaatcggcagtcctgtgtgacgggggctgttgggggccagcaggaggatgaggacagcagtgactcggaggtggccgattcccccagcagcgacgagagacgcatcatcgagacccccccacaccgctactaaggcctacacctctccccacgcagagggggaattctgccctggtgaaacagacactccagacatgggagaaggactttctgggaacacagagaccaagagggagagaggcttcagaaccagtcctcctttcatttcaaaaccccagcgggccctctggagtccgccctgcccctcccccggccccccatccctcacttctgggctgtcatgctcctggtgtgccccttgcactggggctggctgggttagaaagtgggctggacttcagctgcctttctacccccaatggcagctgcccccttagcactcactgtgttggggagagggtgacgattgcaannnnnnnnnnnnnnnnnnnnnnnnnnnnnnnnattgaaggaaaccctctcctctccccttcccttctctctcctgtccatgggaagcttttccccctctgcagggctccctcagctggaccatcgtccctgcttctcttatgatcgccccacctcatttccatttcagtctggggaccccatttctccctcctttccaacttccttcctttcttgtcctgtttcccttcctgcccttgcagtcctgaggtcctgcagccccggcccctcctccgtgacctggtgtggccaggctgcggggacgggaggggacgtgggggccccgggtgtacatatataatgtatattttttcaatgttgtcgtgagtgcagcccatgttcctgcgtgcagctcacggcctnnnnnnnnnnnnnnnnnnnnnnnnnnnnaggcatcgtcatgtcctggggcaggggcggggggttgggtgtggtgagggaggggacatatcctagggttttcaaataaaacaatcagaaaaa

SEQ ID NO: 77179 - DNA, 775 bp, Homo Sapiens
  misc_feature (438)..(446): n is a, c, g, or t
  misc_feature (621)..(633): n is a, c, g, or t
tacagtatgacaagataaggctgaagatattctactttagttagtatggaagcttgtctgtgctctttctgatgctctcaaactgcatcttgtatttcatggtgcccagtaaaagtatacaaattccctgcactagcagaagagaattctgtatcagtgtaactgccagttcagttaatcaaatgtcatttgttcaattgttaatgtcactttaaattaaaagtggtttattacttgtttaatgacataactacacagttaaaaaaaatttttttacagtaatgatagcctccaaggcagaaacacttttcagtgttaagtttttgtttacttgttcacaagccattagggaaatttcatgggataattagcaggctggtctaccacctggaccatgtaactctagtgtccttcctgattcatgcctgatattgggannnnnnnnnccagccttcttgatgccaaggggctaattaatattaacaactcccaaagaaacaggcatagaatctgcctcctttgaccttgttcaatcactatgaagcagagtgaaagctgtggtagagtggttaacagatacaagtgtcagtttcttagttctcatttaagcactagtggaannnnnnnnnnnnngatatattagcaagtctgtgatgtactttcactggctctgtttgtacattgagattgtttgtttaacaatgctttctatgttcatatactgtttacctttttccatggagtctcctggcaaagaataaaatatatttatttt

SEQ ID NO: 77180 - DNA, 1487 bp, Homo Sapiens
  misc_feature (141)..(141): n is a, c, g, or t
  misc_feature (170)..(170): n is a, c, g, or t
  misc_feature (215)..(215): n is a, c, g, or t
  misc_feature (237)..(237): n is a, c, g, or t
  misc_feature (1034)..(1034): n is a, c, g, or t
  misc_feature (1042)..(1054): n is a, c, g, or t
  misc_feature (1341)..(1360): n is a, c, g, or t
  misc_feature (1460)..(1460): n is a, c, g, or t
ttgaatgctttaagcgtctcatgacaaagtacaggagactctgccctgtcagcctcacaagaccgcccgtggaccgctgacttgccgtgtctgggtgagttgtgatgagcacagggcgcccacactgcgcccgcagcccanacctcactggtaccagtacatccttgacngtgatggttcctcttgccgtcgtctgacagtgccttcatcacctntaaatgtgtgcgtatgctaccnggaaatgcttggggaaaaaagcgcgagttaagaaagcccacaaatccaagacccattgagaagtgggtgggaaataaggtaaaattttgaaccattccctagtcatttccaaacttgaaaacagaatcagtgttaaattcattttattcttattaaggaaatactttgcataaattaatcagccccagagtgctttaaaaaattctcttaaataaaaataatagactcgctagtcagtaaagatatttgaatatgtatcgtgccccctccggtgtctttgatcaggatgacatgtgccatttttcagaggacgtgcagacaggctggcattctagattacttttcttactctgaaacatggcctgtttgggagtgcgggattcaaaggtggtcccaccgctgcccctactgcaaatggcagttttaatcttatcttttggcttctgcagatggttgcaattgatccttaaccaataatggtcagtcctcatctctgtcctgcttcataggtgccaccttgtgtgtttaaagaagggaagctttgtacctttagagtgtaggtgaaatgaatgaatggcttggagtgcactgagaacagcatatgatttcttgctttggggaaaaagaatgatgctatgaaattggtgggtggtgtatttgagaagataatcattgcttatgtcaaatggagctgaatttgataaaaacccaaaatacagctatgaagtgctgggcaagtttactttttttctgatgtttcctacaactaaaaataaattaataaatttatgtccccnccaccttnnnnnnnnnnnnnaatcccatgcccgccgccctcggcccctcaaaaagtttttctacaccatccgtttggcgccccgggccccagtacgtaaatcgaaccttggccataacctgttttccaaaggaaattccgggccccataactagtggcttgcgatccttcacccaacaaaaaaaccccccgggccgccaacctaagcggttccgaaacaaatcccagaatggcagctcttgaggccctttcactggcctcctataaacccggaagttccaacgcgagcttcaatattaaaaatttannnnnnnnnnnnnnnnnnnnttaatcggaaaaacatggtcggaaactcctctaaaggccattcgctctccacctcgtaaactccccccccaataggcactgaatgaacctcttaaattgnccccgcggctattaaccacccttgtta

SEQ ID NO: 77181 - DNA, 1146 bp, Homo Sapiens
tgcggccgcctccaggccacaggtggacccagggaccttcagttacgccgcttcaattgaattcgtggtggtttctctgctacagcagaagtggaagaagctcttgtcttgtttggcatttgtcccattttttggctaataattggctttgaatttctctgtgccctgcttaccaattatagctttctggattggctgttcttagcagtgcaaatgtcaatgcaaagaagcaagcaggcggctactttctgggaagaagcatagtccgtgctcacactggatataaatctgcaagatttgggggtttggcaaaataggggtggagggaaagctgccatggctgtcagaaattggggctttttgaagaaaagcttgtgtaggcatcagccactggctggccagaattccatgaatggaagcaggtgcccgagtgatctggggctttacatgtggatataaatagaagccgggagcctgaggctttgctttaggaaaatcatgagccagaaaacagaggaggtgattgtcagtagtcacctcacgccgctagtgttttctaatactctctcgaattgtcaaagcaaaggaccctataacagcaacacgtgtgtgactcgaagcagcgagcttcccttgggaaaaggagcctcttctcagcagagggtcccagcctttctgtccttccccatcggaatgccaggctctgtgagtttggatgttggacattgccacctgaattccaggaggccggggagctccagtgatggacttgtccccaaaagagtggtgctgttctcagagccataaatgttccactgaaagtgtctgtcccctggctcacgctggctgcacttgcttgaaggaggctgatttaagggttctaataggaagacaaatgaaactgtcaaattttatctttaagcatgtgagtaagtttgctcattcgcttttactattgatgtatagttttaaaattcttaatttaaaaattattttaatagtaaatttttcacaagtgaacactttttatctttaaattaaaattctgaagctccctagttagttagatccaattgctggttacattttgggaagctctcattttagtgctatgtagtttcattgaataaacatgtttttaatgag

SEQ ID NO: 77182 - DNA, 734 bp, Homo Sapiens
  misc_feature (122)..(122): n is a, c, g, or t
tcaggaattccgatatctgtcacagactcataccaatcacgaagataaataacaggtgaagaatgtatctaccatgcagtgaaagatgcagttgctatgctgaaagccagtgaatccagttntggcaaaccttaatctccctgcacattggaaatgaattacaggcagctgttcaaactcttcaggcaggattcctgtggactttgagattcatgttacctcatcttcttttttaaactgtacccaacttgtgagggtactctgtctaatgtatatttctagtgtttacagacagtaaatgtgtatatgtagtaactatttacagaacatgcatccttaaactgtgacttctcacctagtgcagaacttttaccaggctgtaaaagcaaaacctcgtatcagctctggaacaatacctgcagttattcttcagctgtttggacaacttagattgggtttataactattaggaatcactgcacagtttatttgggttgtgttttgtgtctgagtcccctccctcatcccttagggtccagaagagcaatggaggaagtgacagctaatgttgcagttcttattgtatggcataggactggcattatatagcagaaatcaactactgtacaatttcttggggttaaccatctttagttaaatggaattttaatttaaatgacgctttgctaattttaagtgttaagcattttgcattaaaatattcatataaaaaa

SEQ ID NO: 77183 - DNA, 1701 bp, Homo Sapiens
  misc_feature (113)..(113): n is a, c, g, or t
  misc_feature (439)..(439): n is a, c, g, or t
  misc_feature (450)..(450): n is a, c, g, or t
  misc_feature (1600)..(1600): n is a, c, g, or t
ctggaagccagtattttatttctcttggctgcagagggccgctcttgcctaggcgtccacaggcgcgacgatggggctcgcggaggagtccgcagcagggcaccccacacccngggggaccggcctcggcgagaagggcacacagtggaagaccccaccaagcccggcgccacccagcagcgtggggactgcctgtccgccgtccatcccaccctccccgtcccacgacctcctcctgggctaatggcagcaacaggcagcaccccgccgaattgtccgtgcaactacccgcaaaccctcctccgggcctgaaccagggctgcattcgggccgcctctgcgcctcggtgggtcccaaccctcacggtgccacaggccacgctgcctggagggtcccagggtcaccgacgatgcaggggtgaaggtgaaggccagcgtanaggctgtgtanagaagcagccccgtcccacacccacccctgcctgcgaacttacgggcctggctccagctcctcccactccgcctccagcctggtggcgctgggcaaggacaggcacccgggcgatgggaggcgcagcgtccacaggaagcgcccccaccgcaggccgagctccggctgtcctggggcctggcccaacccactgcgcctagcgcagcccgcactccacgccctgcagcttctcctgctccagggcgcgcacgaggtcctgcacgaagcgcatctcggaggctacttgcttggccagcgcctcgtagcggttctccaggcggctgaagcggcgcttgaggccgctggtccccagcagcgcgcccttggcctcctcctgcgcctgccgcttgagcgcctcggtcttgagcagctcctgccgtagcctccgcaggtcctggcccaggctgtcgctctcctcgcggtaccaggcctccttctcctcgtagatggcggccagcgcctccacgtcctcgtggcagagccgccggctgcgctgcagctcgcgcaggccctcctcggcggccgccgcctcctccagcaccttggagaagcgctcgaagtcggcgtagctgttgttgggcggcaagctggagtgcgacttgatggtgtactccttcagacgcgtggtcttcaggcgccgccgctcgggcttgcggccgctgtcctcaccacgcacgttccgccgccggatcgccttaatccaggaatgttccaggctctgggcaatggtcattctccgcttgggatctttgacgagcagccggcgaatgaagtccttggccagctcgctggtgttgctgaagtactcctcgtcgaagtcgtagttcacggctgagatgttggtgagcgtctcctgcttggtctcgcccaggaacggggatgcaccgctcaggaggatataggtgatgacaccgatgctccacatgtccgcctccaggcccagcggctcatagttcacaatctctggggccacaaactccggggtgccgaagatgttcttgaactcgttccccgcctcgatcttgtgcgcgatgccgaagtcgatgagcttgattcgtgggttgggcacgttcttgtccagcagcatgatgttttccggcttcacgtcaanagtgtgcgatgcccttagagtggcaggtagtgaacgccgtccaggatctgcttgaggaactgggtggcctcgtcctccgtcagcgactccttctccgccag

SEQ ID NO: 77184 - DNA, 663 bp, Homo Sapiens
gctgggcctggaggcggacatgtggagcatcggtgtcatcacctatatcctcctgagcggtgcatccccgttcctgggcgagaccaagcaggagacgctcaccaacatctcagccgtgaactacgacttcgacgaggagtacttcagcaacaccagcgagctggccaaggacttcattcgccggctgctcgtcaaagatcccaagcggagaatgaccattgcccagagcctggaacattcctgcatcgtcggtgaccctgggaccctccaggcagcgtggcctgtggcaccgtgagggttgggacccaccgaggcgcagaggcggcccgaatgcagccctggttcaggcccggaggagggtttgcgggtagttgcacggcacaattcggcggggtgctgcctgttgctgccattagcccaggaggaggtcgtgggacggggagggtgggatggacggcggacaggcagtccccacgctgctgggtggcgccgggcttggtggggtcttccactgtgtgcccttctcgccgaggccggtcccccgggtgtggggtgccctgctgcggactcctccgcgagccccatcgtcgcgcctgtggacgcctaggcaagagcggccctctgcagccaagagaaataaaatactggcttccagataaaaaa

SEQ ID NO: 77185 - DNA, 772 bp, Homo Sapiens
cgagagcgggccgggctcagttcagctgctgtccagacccggatcggcaacagtgccgcctccagacgttctcctgccgctcgcccgcccgtcccagcgcccccagccctcccgcgagggcgccccgggacggaaggatccaccagtctgtcggcgcccgccgttctcgtggtcgccgtcgccgtcgtcgtggtggtagtctccgccgtcgcctgggccatggccaattacatccacgtccctcccggctccccggaggtgcccaagctgaacgtcaccgttcaggatcaggaggagcatcgctgccgggagggggccctgagcctcctgcaacacctgcggcctcactgggacccccaggaggtgacactgcagctcttcacagatggaatcacaaataaacttattggctgttacgtgggaaacaccatggaggatgtagtcctggtgagaatttatggcaataagactgagttattagtcgatcgagatgaggaagtaaagagttttcgagtgttgcaggctcatgggtgtgcaccacaactctactgtaccttcaataatggactatgctatgaatttatacaaggagaagcactggatccaaagcatgtctgcaacccagtcattttcaggctaatagctcgtcagcttgctaaaatccatgctattcatgcacacaatggctggatccccaaatctaatctttggctaaagatgggaaagtatttctctctcattcccacaggatttgcagatgaagacattaata

SEQ ID NO: 77186 - DNA, 530 bp, Homo Sapiens
gcggccgctgtcctcaccacgcacgttccgccgccggatcgccttaatccaggaatgttccaggctctgggcaatggtcattctccgcttgggatctttgacgagcagccggcgaatgaagtccttggccagctcgctggtgttgctgaagtactcctcgtcgaagtcgtagttcacggctgagatgttggtgagcgtctcctgcttggtctcgcccaggaacggggatgcaccgctcaggctgcgagacaggcgtgggggctcagtggggtcctgggctcccaccaccgccgcgccgccgctccggctgcccacgacaggcggagcacagaagacaggctgacgggcaggtgcctgggccactcacactcctgagcccttagaaccttcctgcaacgatcccagacaccacccaagaggcattcaaaatccacccccccaccccgccactgacagcagcagaaatgaacaggcagaagtctccttggagactcaaagtatctgtgcagaacgcagagcccgaaaaaggc

SEQ ID NO: 77187 - DNA, 1032 bp, Homo Sapiens
ccgtcattgtcgtttttgtgattgcgaacatcaccagacgttgatgtcgatatcgctcttagattgctgggcaagatcgcagagtaaacactgagtgaggccagagggttagggatgcacaaccactattgcccaacaacttgaggatcacagccagatgaggttggatgggtgacctcccaccagaggacatccacagaaccacagccagtagtcagcgctctgcggcgctccagttgggtgagcagtgagttagcccagagagtggagttgctcagatgaaacctctgtcaacaaagagggatgaacacccttgcccagcctcccccacaaagcatgaccctgggcaggtgagtgacgggtgtgtcctcgtagagtctattgctgcctggacacctgtcttttgggagctcaaagcaagtgagctcacctacctgccaccgcccaggaccagtctgcccactgcctaaatgatgcccggccagcaggacctggcctgcagatcccagtgagtcatgagcctcagccccctccagcccactggggctctcacctccacatgtgggtagaagctttcctgccccctcttcctccagtagccctcagtgtcgaaggtgagcttgtaggtgcctgccttcatctggtccaggacagtgaccatctgggtctgtgtagctggggagaggatgaggctgcagagatggggaccagaagccccccaccccagctttcctgggtctgcatcccagtgggcctcagacactgccctgccacctgtcagacttgggtgagcagacacagtgaggctgttaggtcctgcagttccagagcagtctagggacaccactgccctgtctttaggaaatcacaacacagagaagcaaaaagggaaaaagtctcccacaatttatcccatgagcaagaaccactttatagctggcatatatttttccagattttctctatgcataagtatatttgtttaaaaacttataaagtggattatactatttgtattattttataaaaaaa

SEQ ID NO: 77188 - DNA, 1366 bp, Homo Sapiens
  misc_feature (83)..(142): n is a, c, g, or t
ggctttctttgctctccttttgttatcttcatcactgggagtctgtttcagaatcagagtcactgtcgctatcttcagaatannnnnnnnnnnnnnnnnnnnnnnnnnnnnnnnnnnnnnnnnnnnnnnnnnnnnnnnnnnntgctctcctccacacacccctccgttccgctagcctaccctgtcagcctttcaataaaagttatgcacaaatgtgaacacctgagatggagctgaacatttcttcactttgttctttttctgaagtcaaactcttatcaaatgccctaaaattattaccacccaagagaaacaggaaaaaggttacatgtttttgtttactgagagtaagatcacctgcatctggaagacgggctggtaaattggtttggctacagaacagaaagaaaacaaaaacaaacctcgtaagggaagtatcgcactcagacaccaccacttcctagagccaaatgagcaatcccaaactgcaagtgccgtaagtgggcctgtgacgtcacaccgcccggcccgaggtatcgcatgtgcgggggaggtccacactacagctgtcctctcgtctagaaggcaccacctcgctttcatgtcccgtgtgttttggaaaagcagtatggtgtgtcatgtctagcggcgaacacttccctccctctgtccttgaggttgtaatataaaaactgtgtttctgtacgtgtgggtgggaattctctgacggtgctcgttcatagcacaagcttacgctgagttctgaactgtcgttcacagctgcgtgtctgcatggtgtcgcatctgttgtacctttggggaaaatttgtatgtaaatgtacagaaataaaaacgttgccccattaacagatttcctctggaatgtcttccctacctcacctgatggtatccaccgaagggcatttcactaccattaatggtgagtaataaaatcctccgtgttcattcagacctcactgcgtcactactttgaacgcctctgtaagctgtgtcttcactcgccccgaggtgggtggagggaggcctctcactctgcttcgagtcctggtcttaaaggtagtcagaggcagaggctggattaaacacacactgtttaccaagtgccactctcagaccacctgagagacggggggccatcagtaaaattaagaggaatttttttcccttgttcgtgtatgttctgctgatccgtggcctgaaggttcctagagacgtcaagaaatgaatatcttacactgtgattctgtgaggaaagactggtaacccaaaactctcttctctaatgtattttttaacgaaaatgacaatatttctttaataaagtatttatacccaactcttctaa

SEQ ID NO: 77189 - DNA, 807 bp, Homo Sapiens
  misc_feature (61)..(78): n is a, c, g, or t
gtgccaagctaaaattaaccctcaactaaagggaataagcttgcggccgcggctgtaggcnnnnnnnnnnnnnnnnnncacatttgtgcataacttttattgaaaggctgacagggtaggctagcggaacggaggggtgtgtggaggagagtagcagggggtgggagggtcaagttgaaacagtgggtgcctgcgaagggtctccctattagccaggaagggaacagcacagaggggttcaagcctgacagacggtgctgggaagtgggcagccgtagcagcctcccctgctgagcccggcgggcccagatgcgtatcaggcttgggtgggtcctgccaccttgctcacttggtaccggatttcccggggctgtgcccacaggcaagtgttgctgctctggcaacatttcataaaggtgttgctcaacagcttcaggtatccctaggctgaagctgccaccaaacaggcacccggcctcctcctcctcaggctgccctgggaggagagctgtgggaccgcctcgccggctgagagccattacctgccgaccgtcggcaagtcagcctcacacccactggactctgctcccaagagcccaggctgttttcctcaaagctagcctcttttccagtcatcgatggattagtcctgatggctgaagtgctgagcagtgtcttcgttggaccagttttttattgtcatttgaggtggagatcagagatcatgaccagaagagtgtgagtgctgtcccttgccaccaacttcctagagatttcgggcagcactctacagcttcaatttccaaa

SEQ ID NO: 77190 - DNA, 698 bp, Homo Sapiens
  misc_feature (17)..(17): n is a, c, g, or t
  misc_feature (45)..(45): n is a, c, g, or t
aaacgtgtaagaatgtntgcagattgattggttaaaagtttttangcacatccccaaccctgaaaacttcgcattaagagccaagcacaatgttggtagctccaagatattctgactgtgttctcagaatgagggattacccatcactgggtattccttcccaagtagaaactttagattttcactggtaatacacattgccaagttttatgggaaatctgaatatactgtgaaaatgcatatctggttagttgtctgctgcccagatcttatcaataccagtaactaaccagtatttaacataaaatgatacaaataaaggcctttttctatttcagtgagggtacatttttcttgatatatatgtactttaaggatattggatctgtttatggatctgttttaggaaacagatttgcaagggataattgtatatatagtagtatttaggtttatttcaaattcatcttagggatgcctagatgcataatttttaccaggacatattgaaaatattgcaaagagatagccagttatattatcccattcattagaaattaccagtgtaactaaacataaatatcccagtttagagtgcttaaacgtagctatctttcttaaggccaggagggtaactttgtggtatctaaagggcttaaatttcagaatgcagaataaattgcctttttaaaaccaaa

SEQ ID NO: 77191 - DNA, 1134 bp, Homo Sapiens
  misc_feature (606)..(606): n is a, c, g, or t
gatatagttttaatttctctctacagttttttttgtttggtttgtgggctgttggaattgtaatttttaattgccttctaaaaaatggaaatttaacaatgtctgatctcagctgaacaaattagatgtttcagttgctcttgggtcaactggcttacagatttacatgtgcacacacacacaaatttcttatcacattttcgacttcttcacttgacctaactgattatgcgaaatacccaagattcatgctactgtaccacagatttgttttcacagcaataaatcttcagttctttgtttatgattccacttaacaaaaggcctgcagaagtgatttattatttgggtatttggagataatacatttgatggttttttggaaaacctttttcactccatactcagatatgcttcattgtcaaatgcatatttagattagattattgaattgtaatgtttatctgctgctttttttaaataaaatttgactgaaaatgtttaattggcattttcttaatgacttagccaaagaagtgcagctattattccatattaataggcttgcatttcttttcctaaatcttatttaggctaaatcagttntatttttctctgattttttttaataccacagaatcacctgagtgtcaattgaaagttgtcaattaacaaggtaaccttttaatctcgtaggaggaatctcattaagacatttttcctgatatgtagagcagtctgttggcaaaaatgcatatattttctttcatatttgtaaaattatatttaatggaaattcttttctttgattatcaaggactttcactgcaggcagtgctatttcttgtgcctaagaatgtttccaaaagtcgcatcgctaatgatatttgccaagttgagtgtacacaaagtttttcatatcctgttcaagttaatcaacatcaagcacatggggatgctttagggtgagtctatagtacaaaatgcataaaccatgtccccaggaaatttgaaaggaagcaggtgctgaatggaatttttttccttttccatgagctgtgttaattctatctccagtaggcctaatgcttgaataagcaagatgtctaatcaataaattattttcatgctcag

SEQ ID NO: 77192 - DNA, 425 bp, Homo Sapiens
atttttcaaacattgtttttaatatacctacctataaagatctatggagaattcacatcagatcatgaatggatagtactttatgattagagcatacagagagagttacaattaagcttttcttttttcttttacaggttaatgactccagagagtaagatcagattcgtccacaaagagatgggcataataccaagctggggtggcaccacccggctagttgaaataatcggaagtagacaagctctcaaagtgttgagtggggcccttaaactggattcaaaaaatgctctaaacataggaatggttgaagaggtcttgcagtcttcagatgaaactaaatctctagaagaggcacaagaatggctaaagcaattcatccaagggccaccggaagtaattagagctttgaaaaaatctgtttg

SEQ ID NO: 77193 - DNA, 2198 bp, Homo Sapiens
cagtcgacggtaccggacatatgcccgggaattcggccattacggccgggggaaacaaaggcacgcaaaacggaaaagcgtgtgtaggggagcggaaaaggaagtcaccaccgtggcctgcgacgaaatggcgaaaagtcttttgaagacagcctctctgtctggaaggacaaaattgctacatcaaacaggattgtcactttatagtacatcccatggattttatgaggaagaagtgaaaaaaacacttcagcagtttcctggtggatccattgaccttcagaaggaagacaatggcattggcattcttactctgaacaatccaagtagaatgaatgccttttcaggtgttatgatgctacaacttctggaaaaagtaattgaattggaaaattggacagaggggaaaggcctcattgtccgtggggcaaaaaatactttctcttcaggatctgatctgaatgctgtgaaatcactaggaactccagaggatggaatggccgtatgcatgttcatgcaaaacaccttaacaagatttatgagacttcctttaataagtgttgcgctggttcaaggttgggcattgggtggaggagcagaatttactacagcatgtgatttcaggttaatgactccagagagtaagatcagattcgtccacaaagagatgggcataataccaagctggggtggcaccacccggctagttgaaataatcggaagtagacaagctctcaaagtgttgagtggggcccttaaactggattcaaaaaatgctctaaacataggaatggttgaagaggtcttgcagtcttcagatgaaactaaatctctagaagaggcacaagaatggctaaagcaattcatccaagggccaccggaagtaattagagctttgaaaaaatctgtttgttcaggcagagagctatatttggaggaagcattacagaacgaaagagatcttttaggaacagtttggggtgggcctgcaaatttagaggctattgctaagaaaggaaaatttaataaataattggtttttcgtgtggatgtactccaagtaaagctccagtgactaatatgtataaatgttaaatgatattaaatatgaacatcagaattactttgaaggctactattaatatgcagacttacttttaatcatttgaatatctgaactcatttacctcatttcttgccaattactcacttgggtatttactgcgtaatctggaacatttagctaaaatatacacttttggcttaaaaattattgctgtcaattccaataataattcttagcttataaccaaagagcagtgtttaaaaggagagcttctatacaaaacctattcctggcgttacttttcatacaatttttgttcgtgtttaacctggaaataatttaccaaataactgagtgttgctgctaaagaacaaaagtggggaggtatcagggaacaagaaaacaagaaagggtatgatcaatcattttcttctgctccaaacagctggagtaaaattcatgggaaatggcccttcatttaaaaaaagatgtacctcactacccactacaaatttggaactttgttcttttcaataattagttttctattgtaaattacctactaaacagtggtagccatgacatggaaagtcaactgattctacaattggacattcatttgtgtgccctggaatttccaactagtaataaacaactactgttgatgtagttttaaaccacttgaagggactcatgaagcatcctgcaacataaatttgcatttttacatcagatttcttttttttcctgaaaaacaactaaccttctaacaactatctttcaaaagtaaatgtaataaaaatgcacaacataaaatgtttatgatcccagcaatacactttttaaaaaatgtgaaagtcaaagaattaagttctagttctgactcatcacaagaggtcaaaagtatttgctactgtaacattcaattcacatttgagaatcatggtaaaaataacttgtatttgccttaccatcatgatcctactgttgagttaggaaaatatggttagacagactcacattactttttttcagaggtaaactctagattactgtgtcaacccaatactatttggccatagatgtaaaaactaccaaataaaagtggattttgtggtctacaacaaaaaaa

SEQ ID NO: 77194 - DNA, 816 bp, Homo Sapiens
  misc_feature (36)..(36): n is a, c, g, or t
  misc_feature (73)..(73): n is a, c, g, or t
  misc_feature (220)..(220): n is a, c, g, or t
  misc_feature (231)..(231): n is a, c, g, or t
gcaggcccaccccaaactgttcctaaaagatctctntcgtctgtaatgcttcctccaaatatagctctctgcntgaacaaacagatttttcaaaagctctaattacttccggtggcccttggatgaagtgctttagccattcttgtgcctcttctagagatttagtttcatctgaagactgcaagacctcttcaaccattcctatgtttagagcattttntgaatccagtntaagggccccactcaacactttgagagcttgtctacttccgattattgcaactagccgggtggtgccaccccagcttggaattatgcccatatctttgtggacgaatctgatcttactctctggaggaatgaacctgaaatcacatgctgtagtaaattctgctcctccacccaatgcccaaccttgaaccaacgcaacacttattaaaggaagtctctggagttcctagtgatttcacagcattcagatcagatcctgaagagaaagtatttttttgccccacggacaatgaggcctttcccctctgtccaattttccaattcaattactttttccagaagttgtagcatcataacacctgaaaaggcattcattctacttggattgttcagagtaagaatgccaatgccattgtcttccttctgaaggtcaatggatccaccaggaaactgctgaagtgtttttttcacttcttcctcataaaatccatgggatgtactataaagtgacaatcctgtttgatgtagcaattttgtccttccagacagagaggctgtcttcaaaagacttttcgccatttcgtc

SEQ ID NO: 77195 - DNA, 497 bp, Homo Sapiens
  misc_feature (19)..(19): n is a, c, g, or t
  misc_feature (82)..(82): n is a, c, g, or t
gcaccgccccctccccagngtgtaagtggctctgctattgtgcgtccctggaagtggggacccccttgtccctcctccctcnccctgttgtctggccgtcgtcaaccccaccttgactgagtgttgagcccgtccttgggctctggtccctgcggggcaggctctcccgggcccacggggcggacgctgcataccaatttgccctgcaccgcctgtcccggagacggagcccgaaggcctgccatggcggctgtgtcgaggatgcgtggcgcctgccgtggcgggacagcgtgggcaggctcatttctgcccccaacccgggccccaggacaggtcagcgcgccctgccccggtgcccaccgctgccccccatccgccctcctgccacttgcccctgacccccctgccgtgcctcccgcagccctcccatgccgttccactcctccctgcctttgagccgaacatgataataaaagctattattgagcgcttactgc

SEQ ID NO: 77196 - DNA, 803 bp, Homo Sapiens
gagtgctgtcttaatatctggaacaggatcgaacctgcaagcacttatagacagtactcgggaaccaaatagctctgcacaaattgatattgttatctccaacaaagccgcagtagctgggttagataaagcggaaagagctggtattcccactagagtaattaatcataaactgtataaaaatcgtgtagaatttgacagtgcaattgacctagtccttgaagagttctccatagacatagtctgtcttgcaggattcatgagaattctttctggcccctttgtccaaaagtggaatggaaaaatgctcaatatccacccatccttgctcccttcttttaagggttcaaatgcccatgagcaagccctggaaaccggagtcacagttactgggtgcactgtacactttgtagctgaagatgtggatgctggacagattattttgcaagaagctgttcccgtgaagaggggtgatactgtcgcaactctttctgaaagagtaaaattagcagaacataaaatatttcctgcagcccttcagctggtggccagtggaactgtacagcttggagaaaatggcaagatctgttgggttaaagaggaatgaagccttttaattcagaaatggggccagtttagaaagaattatttgctgtttgcatggtggttttttatcatggacttggcccaaaagaaaaactgctaaaagacaaaaaagacctcacccttacttcatctatttttttaataaatagagactcactaaaaacaagactagccagtgtttttatatctgagataag

SEQ ID NO: 77197 - DNA, 1969 bp, Homo Sapiens
  misc_feature (600)..(662): n is a, c, g, or t
  misc_feature (1224)..(1224): n is a, c, g, or t
ctactcattggattgccggggatgtccctttaaacagactgctgccttcagctaaaaacttaatgttctttatacctttgtatgtatgacctacttttgtaacagaccatggttgtgtccaaggtaaaaccacagtgatatttttggatgctttgtctgcaatcttgacttgtttttgcagtatcattattcagacttcaaattgtgaatcttttaaacatcttgataatttgttgttgagagctgttcattctaaaatgtaatgaaattcagtctagttctgctgataaagatcatcagttttgaaaggttactgattttcctcttccctcttagttttttacccaatatatggagaagagtaatggtcaatcttaacattttgttttaattgtttaataaagctgctgggcagtggtgcagcattcctacctagtgtcataaaagcaaaatacttacatagctttcttaaaatataggaatgacattacatttttaggagaaagtaagttgctttgcaccgcctacttaattcttttccatatattgtgatacaaacttttgaatatggaatcttactatttgaatagaaatgtgtannnnnnnnnnnnnnnnnnnnnnnnnnnnnnnnnnnnnnnnnnnnnnnnnnnnnnnnnnnnnnncatgctgtgaaacttgactacacaacataaatcactttttaaattccaggaacgggtagtctgacacggtgattatccttttgaggctgaatccgttattaacttgttatttaggtttttactcccagtagcaagggattctaagttagttgcacttacatgattattgttatttaaaactaagaataaaggctgcattttcaaagataaattggaattgctgttggtgaaataacaaccaaaatactgaatctgatgtacatacaggtttctacaggaagagatggtataatttacaatttggagatttaataaccagggctacccagaaaaagtgacttgataacatggtaccaataagtaagggatgctctctcggtttgcttttgccactttcaagattttaacttctcaggttattaatcaaaattattgtataagttagccaatagaatttttaggttaaaacaacagatggggggttagtggagtgtttaatgtcatgggcatttttagtagcatagaccctttgttctgcatttgaatgtttcgtatatttggntttcacagttaatcttccctccccaagtttgctattcaaatcaactgcctgaatgacatttctagtagtctgatgtatttttctgaggaatagtttgtgattccaatgcaggtgtcttcattaccattacctctacactgcagaagaagcaaaactcctttattagaattactgcacatgtgtatggggaaaatagttctgaaaggctagaatgatacaagtgagcaaaagttggtcagcttggctatggagtggtggcaataatctctaaacattccaaaagaccatgagctgaacctaaactcccttggaatctgaacaaaggaatataaaattgccatttgaaaactgaccagctaatctggacctcagagatagatcagccagtggcccaaagccatttcaagtacagaaattatagagactacagctaaataaatttgaacattaaatataattttaccactttttgtctttataagcatatttgtaaactcagaactgagcagaagtgactttactttctcaagtttgatactgagttgactgttcccttatccctcacccttccccttccctttcctaaggcaatagtgcacaacttaggttatttttgcttccgaatttgaatgaaaaacttaatgccatggatttttttcttttgcaagacacctgtttatcatcttgtttaaatgtaaatgtccccttatgcttttgaaataaatttccttttgtaattttaaaa

SEQ ID NO: 77198 - DNA, 2327 bp, Homo Sapiens
gatggggcatgacccatccccagttttgcaggctgacatccgcttgaattgcccattttttgctatctctgagtcgtgagtcgcgagttaggcctggaggtgccattaccccatcagtaggcgcctttccaccttctgagatggatgcatgagcctgtctcacccactcactgctgaggtgcctgtctctccctaaggttgctgtcttcctcgtccctccggcccttcttcctactcagcgtctcacttttggcctattttctgctggatctctggcagcctcgctttctccctgacgtttcagcatcatccccagaggagccacactctgacagattcacctgcaggagctgctgcagtacaagaggcagaatccagctcagttctgcgttcgagtctgctctggctgtgctgtgttggctgtgttgggacactatgttccagggattatgatttcctacattgtcttgttgagtatcctgctgtggcccctggtggtttatcatgagctgatccagaggatgtacactcgcctggagcccctgctcatgcagctggactacagcatgaaggcagaagccaatgccctgcatcacaaacacgacaagaggaagcgtcaggggaagaatgcacccccaggaggtgatgagccactggcagagacagagagtgaaagcgaggcagagctggctggcttctccccagtggtggatgtgaagaaaacagcattggccttggccattacagactcagagctgtcagatgaggaggcttctatcttggagagtggtggcttctccgtatcccgggccacaactccgcagctgactgatgtctccgaggatttggaccagcagagcctgccaagtgaaccagaggagaccctaagccgggacctaggggagggagaggagggagagctggcccctcccgaagacctactaggccgtcctcaagctctgtcaaggcaagccctggactcggaggaagaggaagaggatgtggcagctaaggaaaccttgttgcggctctcatcccccctccactttgtgaacacgcacttcaatggggcagggtccccccaagatggagtgaaatgctcccctggaggaccagtggagacactgagccccgagacagtgagtggtggcctcactgctctgcccggcaccctgtcacctccactttgccttgttggaagtgacccagccccctccccttccattctcccacctgttccccaggactcaccccagcccctgcctgcccctgaggaagaagaggcactcaccactgaggactttgagttgctggatcagggggagctggagcagctgaatgcagagctgggcttggagccagagacaccgccaaaaccccctgatgctccacccctggggcccgacatccattctctggtacagtcagaccaagaagctcaggccgtggcagagccatgagccagccgttgaggaaggagctgcaggcacagtagggcttcttggctaggagtgttgctgtttcctcctttgcctaccactctggggtggggcagtgtgtggggaagctggctgtcggatggtagctattccaccctctgcctgcctgcctgcctgctgtcctgggcatggtgcagtacctgtgcctaggattggttttaaatttgtaaataattttccatttgggttagtggatgtgaacagggctagggaagtccttcccacagcctgcgcttgcctccctgcctcatctctattctcattccactatgccccaagccctggtggtctggccctttctttttcctcctatcctcagggacctgtgctgctctgccctcatgtcccacttggttgtttagttgaggcactttataatttttctcttgtcttgtgttcctttctgctttatttccctgctgtgtcctgtccttagcagctcaaccccatcctttgccagctcctcctatcccgtgggcactggccaagctttagggaggctcctggtctgggaagtaaagagtaaacctggggcagtgggtcaggccagtagttacactcttaggtcactgtagtctgtgtaaccttcactgcatccttgccccattcagcccggcctttcatgatgcaggagagcagggatcccgcagtacatggcgccagcactggagttggtgagcatgtgctctctcttgagattaggagcttccttactgctcctctgggtgatccaagtgtagtgggaccccctactagggtcaggaagtggacactaacatctgtgcaggtgttgacttgaaaaataaagtgttgattggctagaaaaaa

SEQ ID NO: 77199 - DNA, 767 bp, Homo Sapiens
tgaccagcagatacgtttcggagtggttggtgtggtttttgtgatgagggcagcacgtggtggccaaggtggcaagctgagtctcacaggctcactccctcgttggttccctgtgggaatggtaggccaggcccagtaagccatgccccaacacgtcctctcctccggaggaagggccagctgccagctgagtcagcagctagtccatagcacagccttataactgtaaagccaggcattgcccatgagcagagctggaaccagagcttcagtcagtaagagggaggattaccttcaggagaaggcaaggaagaaaactggctgctatctttatagttccactgccctaaccaagtgtccacattctaaatgtgtagtgtccatcccttatgtaatagtggtttcccgcccaaagtgagactttccttttaattggagaagggtatagaggtagtccaggtgggaacgccagaagtgctgattgcccagccattgggaccacctgttcttgccccactaccctctagtgggaggccaaagtaaaggctggctggtgggtgtctgtggattgaggatgtggcagggactggtcctcccacctccctctggccaaagatgggctttgcccgctgtgtgcctgtcaccacccaccagcagtcatgccctgggcttcccaaatggagaggtagcaggcaacgtttttaaaaagaaagaaaacaggaaactgtattgtgtcgggggaggcgggagggagatgagatacgctg

SEQ ID NO: 77200 - DNA, 1023 bp, Homo Sapiens
  misc_feature (338)..(357): n is a, c, g, or t
ggctggtacgcgtccggatatccgggatatcgtcgaccacgcgtcgccaaagtaaaggctggctggtgggtgtctgtggattgaggatgtggcaggactggtcctcccacctccctctggccaaagatgggctttgcccgctgtgtgcctgtcaccacccaccagcagtcatgccctgggcttcccaaatggagaggtagcaggcaacgtttttaaaaagaaagaaaacaggaaactgtattgtgtcgggggaggcgggagggagatgaggaaacggttggatttgtgtgtgggagggtattttttgggggtagttgtctgtaactttcctaagtgcnnnnnnnnnnnnnnnnnnnnaaagtaagttgcaggctttggcttggaaaaccccagggggatggggggcagaaacctgaggctgctgcccctttatctgccttcacggtactgtccccttcccccagctcctccctgaccccatgggccaggcctcagaccttccagctaaccgcttcccatgagccactactctgatgtcagcctataaccaaaggagctggggggtccaggcctggtgaccaacctttctcagcccactcaatcagggtgctccccacctgcaggcaggaggcaacaccctatctgctaccatcagccccttccagagcccatctgccccgcccagccctgccctgcccagccataccctgctctgccccatctgggggtgccctgctcagggatgggctggcagggctgtacccagcctccctggtaagcagagactcaagaaacctctggggtcctgttttctggtcgtgtgatcccaggggtgcacatgggccccttgggtgtctgaacagaagggcatgggagggagggctgcacccctgcagtcttactctgctggtgtagcgggcagctgcccactcccaccccaccctgcaccgcgggctcctgagtcggcagattaagcattttataaattgtattttaaatacatgttttaaacttgaaaaaaaa

SEQ ID NO: 77201 - DNA, 1400 bp, Homo Sapiens
  misc_feature (246)..(263): n is a, c, g, or t
  misc_feature (978)..(999): n is a, c, g, or t
cagtcgacggtaccggacatatgcccgggaattcggccattacggccgggctatagagtgacaggatcaattgcataagcgcaaagccttaaatgctggtttagagaagacccttttttcattcagattctttgttcgtagagcagttatttgaaaaacagttatggaacacaaaacattttatagatttaatatcataacattgcaaatttttcttgtattattgttcacaccactggttatacnnnnnnnnnnnnnnnnnnattggattggggcctgaatacaggctttctagagatctttttcattaatacttttaaatacctttcaggtagttacatcatgtttcttcatgggattggtaaaacttgaagccataaaaatattagttgggggtgtatgggggaaaatagctaaaagtctaatttttacccatttagacttggttatttcctgtgtataaagtgacaaatcggggctctggtatcagggccagctgtaatgtttttaaatgcaggggctgccttctatggtcttcctattttggataatgcagatggtggggaaatctgtaaggaagtaactgattccaggcaaacggttttctctccttctaacccaaccaaacccctaaccatcaccttttaagaacatagtacgccagtgtaacgtgggaacccatgggagatgtgtatttgccctgagtattaaagctagcttagcaaaatacttttaaaaacatattgctaaaatgatacccataaaattaaattagttatattttattttaaaatgcaaaatacattgatatttattaatcattggatttagggaaagggacagatttttggtgaacctgacttgtggcagatggtaaggaatattataaaacatttggatgagaacaatcagggcgaactgcatttttctgttacactggtaatcatttgaaaattgatttacctcagtgtttaacannnnnnnnnnnnnnnnnnnnnnaaataataactaattgtcgagcactgatagagatgcagattttggtggggggaggtggtgggggagataatcacttcaccaactgcagtgcatttgtgtgtttttaaccctcagagaactctgcattttagggtacttgaggctgacttaactaaaagttttaaagtaaccttttttccattgtaaatatttctgtaaatactaccaattggaaattagaacagtagagtacttttctgaatccaatcctatttttattttatacagtatttctcagctgtgatctttggagcaaaagccaacggcaggaaaaaatagtttgtaccagtttcatgaagtatgtctttgggtttttgtaaataattttaactcaaataaaattgctactttcaatacaaaaa

SEQ ID NO: 77202 - DNA, 861 bp, Homo Sapiens
  misc_feature (83)..(83): n is a, c, g, or t
  misc_feature (104)..(104): n is a, c, g, or t
gaggatcctcccgatgaacattacgtggtggccacacagagcaaacaagaacagtctgcaaaagctactgctgaccgaaagtntgcatccaaacctattggatntgaagggatcttcgtggccagtcctctgatcttccagaaagactccattcccaggaggtagatttggggtctgcacagggaagaaggcctgatggccggcaacgattccgaggaggccctcactgcactgatgtccaggaagactgccatctcgctgtttgaaggaaaagccctgggcctggataaagccatcctccatagcatagactgctgttcatctgacgacaccaaaaagaagatgtacagctccatcctagtggtgggaggtggtttgatgtttcataaagctcaagaatttctgcagcacagaattctcaacaaaatgccaccatccttcaggcgaattattgaaaatgtggatgtgatcacaaggcctaaggacatggacccccggctgattgcatggaaaggaggggcagtgttggcttgtttggatacaacacaggaactgtggatttatcagcgagagtggcagcgctttggtgtccgcatgttacgagagcgggctgcgtttgtgtggtgaatggggaggaaatgtcactgccgaagaccaaaaacaagcttcttggtataaaagactcttacagaatatgtgtattgtaatttattgatctggatgcttaagtgtcatggacagtaaatgaatttgaactttatgttgaggacatgacattggtttgaaaatataaactgcttttgagcagtttagtcagggcatttgagaataaataggaactttctcttcagttgtaaaaaa

SEQ ID NO: 77203 - DNA, 1361 bp, Homo Sapiens
  misc_feature (870)..(878): n is a, c, g, or t
ggacgcgtgggaaacaattttacagaacttcagttgtaaactcaataacattacttgtataatggtgctggccatgttgttgttttaatcagttgcctcttttgaaaagaatttttatggaaaacacattcaactatcattaaaaaaatgaagttaagctgttgggaccatttctttaagatttaacaaaagttcagccttttaggtagttgaagggaagtacaccccgtattcagcacatgttgagttttctacaccaggaattttcaatatgtatattgatgaaaacaagctcaattcaaactggacagttttaagataatgttaaaatcagcacttttagagacaacgaaggccaagaatcagtacagtagtattccaaaatgattttctctagaaatttgaaagtagatcgaacagaatgttgtcaaccgcctaccagtacaatcttttgtggaagatactttgaaatcactttctactttgttagtaaagttctgtctttccagagctgcaagttttaaagtgttacttatacagaccaaccaagaatagtgctgaattaagtggcatttagtatctagaagccattttgatccaagaagctacttaagtgtcaaagtcagcatgcagcacatgtagcttttctgtaaacaagggtgtgatatgaaagctgcttttttaagaagagtaaaagcacattccatatacgtaagtgaattttaaaaataaattgaggcaaacagttaagttttatttttagagcaacaagttaactgtaaatattttaatgttagtttgctcatctatgatctgagatcatgccgaagtgagaaaaatctccccaaaatacaatttaatgcattgggnnnnnnnnnctttaacagtaattccagccacaatctttagatcacccttgtaatgtgttacgggtccatttttcctggaatcgtttaatctaaagcagtttcccctgttttggagattttgtagttaattttaattttggctattgtttggaaaagatgagctgtctgtgtagatatgaagtatagttttttccataaaacagatgtttattttgtattaaaaaataccactgtacttgttttacaccatttgtatacatgtggtgatattaatgctaaactgtaaaattcaggaattaaaatgtgaccctgtaattccataattgatgtaagtgtaaggtttgttgtaaatataaattaactccattttgagatatgtccaattttacagtatctttttaaaagccaataaaattatccataaatatttattataaatgttagatatacccaatttatgaatattctaaaaatgggggtaaggaattataa

SEQ ID NO: 77204 - DNA, 705 bp, Homo Sapiens
  misc_feature (81)..(81): n is a, c, g, or t
tgcgtgcctgtgtgggcagggactgcccttgcgaggagggcctggcccaggagcagggcttggagtggggctgtgcccggnacagaagtggaaatagatggggccccaacaccgaagctgccctcacccctccatcagggctgatcgtacatacctccctcctcggccccctgagattggtatggggcacagaaggcagggggtcacccccaccctattctgttctcttctcccagcctcccagcatgtgcctggaaccttgctgggaagagagagctccccctccactccccaccccatagcctgagccttccagctgtcaagtttgaaaagaagccaccgtgcctccagggcctcctgcaccgcagagaggggctctctgctctgggaggctgctcagcgcctctcccacggcctgcactctcctttcccttaaatgggcacagccagggtggctggcatgggactggcactctgtacctccactccgtcaccagggacagccccgagggggtgaggagaggggccttgctctgcaattcccagagccagatcttcctcatccaagcaataacgggacgagggagccagggccaaggacactcagggacactgttggggcagcggcccccacatggtaatgttttctttagagagaagaaaaaacaactggctgtaaacgtaaattatatttcttggagaaag

SEQ ID NO: 77205 - DNA, 617 bp, Homo Sapiens
  misc_feature (137)..(146): n is a, c, g, or t
agtgtggagggtttgtaaataatgtaaagtttgtaaacctgtatttaaaataccaaagtttttcttcttttataacattgtaagatactagaaaaatgggcttcaagttttttaatagctttcacagtttgtgtagnnnnnnnnnnctatttggttaagatgtgagttggaaatgtattatttgaaacatttaaactaatttttgtatttaacagcagtctcagacatttgtcttttcaactcagttgagttgtagatatcaaatagaaatgtccagttttgcctcttttaagtactgtccagttgaaacctcctgactcatgtactactacacaaactagaaaatgcccatttatttttatgttgattcaacactccagatacagattgatacatatatactaatcattttatttcatgtaaaagttttacatctagggtgcctatttatttttatagatgctttcatccagttataagcttattataactttgtaaatatttcagccaacagttgtaatgtttaaaatacttaccttcagaatgttatattttcatgtgaaatcaatttcttctaattcaaaaaaattttaagataaactgatttttaagtttaa

SEQ ID NO: 77206 - DNA, 1093 bp, Homo Sapiens
  misc_feature (95)..(95): n is a, c, g, or t
  misc_feature (103)..(103): n is a, c, g, or t
  misc_feature (122)..(122): n is a, c, g, or t
  misc_feature (131)..(131): n is a, c, g, or t
  misc_feature (193)..(193): n is a, c, g, or t
  misc_feature (248)..(248): n is a, c, g, or t
  misc_feature (265)..(265): n is a, c, g, or t
  misc_feature (313)..(313): n is a, c, g, or t
  misc_feature (356)..(356): n is a, c, g, or t
  misc_feature (359)..(359): n is a, c, g, or t
cagcttacacttatctccggctctatgtgttgaatttgagcgatacaaatcacacaggaacagtatgacatgatacgaattaatacgactcattntaggaatntgcccctcgagccaagaantcgcacganggggggctcagggcccagaccccttccactgtcccggaggaaagctgtagacatgcgctgcnggatggagttggtgctccagaagagatgggccagtgcccccacttgactctcgcnccagctccccagccctntacttcacccacgatgccagcctgttcacaaaatctccagacccctcnggagcagtagcagctcagaagttcagcctggcccactccatgntgnccatcagtggtcacctagacagcgacgatgatagtggctccggaagcctggttggcattgacaacaaaatcgagcaagccatggacttggtgaagtcccacctcatgtttgcggtccgggaggaggtggaggtgctgaaggagcagatccgggaactggcggagcggaacgctgcgctggagcaggagaatgggctgctgcgcgccctggccagcccggagcagctggctcagctgccctcctcgggggtcccacggcttgggccccctgcgcccaatgggccctccgtctgagcctcccttcccttacaatgtgcctttggggctgcccggccttgcgtcagccgcctgccccctcttcctatgcagctttaatgtccccgtgtccccggggtgggagttcaaggctcagtaatggcctggtcccccggcccctgccccatctcctcatcatccccagccttgatggaggagggagggcttcaggacggggcgtcagagggagccccctctgggagggaaccaacccccaccctccctcctgggaccccccagcagtagacggcttgggggagtcggaggctccccggcagacaccccacccccatcttgttcccttgaggtgcctcctctcctctgcccaggggagggagtgtggacagtatctggaagttctgggattcaggttgttattaaaataataataataattaaaaactctgaagaaacttgaaa

SEQ ID NO: 77207 - DNA, 1143 bp, Homo Sapiens
ccacgcgtccgcggagaggcagagacccaggggagccgaggagcggagacacggacccagcagggtcacgcgggaggagactcgggacacccactcgctggctgccaccgggagcagaggggggctcggccgccccctcccacatcagtctccagacccttggggcttcagaggccgctcctaggctcctcggaggaggcgcgggttccttcttttccggagagcaaactttcctcggagatgcctggcaggatgagccgcggcccccggagaggacgggacagcctctgatcgccgcctgcgtgcccccgccactgcccatggccaggaggccccagggaacggacagcccgacctcgtagtgcccagcaaacccaaggcacagaaacccccactggccgacgccccacaccagcagccccccagagcctgagaccggtgagagtgcgggcacatcccgggctgccacgcccctgccctctctgagggtggaagcggaggctgggggctcaggggccaggacccctccactgtcccggaggaaagctgtagacatgcggctgcggatggagttgggtgctccagaagagatggggcaggtgcccccacttgactctcgccccagctccccggccctctacttcacccacgatgccagcctggttcacaaatctccagaccccttcggagcagtagcagctcagaagttcagcctggcccactccatgttggccatcagtggtcacctagacagcgacgatgatagtggctccggaagcctggttggcattgacaacaaaatcgagcaagccatggacttggtgaagtcccacctcatgtttgcggtccgggaggaggtggaggtgctgaaggagcaaatccgggaactggcggagcggaacgctgcgctggagcaggagaatgggctgctgcgcgccctggccagcccggagcagctggctcagctgccctcctcggggggtccccgggcttgggcccccctgcgcccaatgaggccctccgtctgagcctccccttcccttacaatgtgccctttgggagctggccaggccttgttctaagcccgcctgcccccctccttccaattgaaggtctaatggccccccggttcccccgggggtg

SEQ ID NO: 77208 - DNA, 979 bp, Homo Sapiens
ctctgcctgcctggcaccagccagaccctgctctgcccggggggctctgagccccccaggcattcccttcactgcatccctctccattgggggggtgtctaaggaccctttccccttgggcatggcccagccaggggtctctgtcaagtccctggtgtcgtcttatgagacccgagtggtggggatggctccggggctgccccgaaaaaggggctgtgcctcttccccttgctctccccggggtgcatcccccatccgagggacatctgggcccccgccccaccggggcctgggaggccctgggcagcggccttcaacccgcaggggatggacaaaaccctcctctccctcattctctactgtcacagtggctccggaagcctggttggcattgacaacaaaatcgagcaagccatggacttggtgaagtcccacctcatgtttgcggtccgggaggaggtggaggtgctgaaggagcagatccgggaattggcggagcggaacgctgcgctggagcaggagaatgggctgctgcgcgccctggccagcccggagcagctggctcagctgccctcctcgggggtcccacggcttgggccccctgcgcccaatgggccctccgtctgagcctcccttcccttacaatgtgcctttggggctgcccggccttgcgtcagccgcctgccccctcttcctatgcagctttaatgtccccgtgtccccggggtgggagttcaaggctcagtaatggcctggtcccccggcccctgccccatctcctcatcatccccagccttgatggaggagggagggcttcaggacggggcgtcagagggagccccctctgggagggaacccaatccgcacctccctcctgggaccccccagcagtaaacggcttggggcgagctcgcgaggctccccggccgacaccccaccctcaatcttgttccttgaggtgcctcctcttcctctggcc

SEQ ID NO: 77209 - DNA, 1038 bp, Homo Sapiens
  misc_feature (481)..(541): n is a, c, g, or t
  misc_feature (778)..(823): n is a, c, g, or t
  misc_feature (833)..(910): n is a, c, g, or t
cggtccggaattcccgggatgaaagacggagaggcagagacccaggggagccgaggagcggagacacggacccagcagggtcacgcgggaggagactcgggacacccactcgctggctgccaccgggagcagaggggggctcggccgccccctcccacatcagtctccagacccttggggcttcagaggccgctcctaggctcctcggaggaggcgcgggtttcttcttttccggagagcaaactttcctcggagatgcctggcaggatgagccgcggcccccggagaggacgggacagcctctgatcgccgcctgcgtgccccgccactgcccatggccaggaggccccagggaacggacagcccgacctcttaggcgccgggaccctcaggctcagatcagtggccgaggccccagagtttgcaaactcagctctggagttcagcagcaacagcagcaggaaaaacctgcccctgctcnnnnnnnnnnnnnnnnnnnnnnnnnnnnnnnnnnnnnnnnnnnnnnnnnnnnnnnnnnnnngccaggccctcctgccatgtcggacccagacgtccccaggggctcggatgtccccgccatgtggcccccttgttccaggggtgcctgagccccttcaaggagccccaacccacccccaaccttggcccagccctgagccccagggaccatgagcgggggcaagaagaagagtagtttccaaatcaccagcgtcaccacggactatgagggccctgggagcccagggggcttcggatnnnnnnnnnnnnnnnnnnnnnnnnnnnnnnnnnnnnnnnnnnnnnnaatggggagnnnnnnnnnnnnnnnnnnnnnnnnnnnnnnnnnnnnnnnnnnnnnnnnnnnnnnnnnnnnnnnnnnnnnnnnnnnnnnggttttccgggtgggtggaagctggccccacgggcctggggaggagcccttattcgcccgcggtccccttggaacatggtgggtgaagggtttattgaaaggaaacctgggaggcccccccgcctttc

SEQ ID NO: 77210 - DNA, 1508 bp, Homo Sapiens
gaacttacggctaggtacgaggctgggtgttgaatcggcacgaggcggtggccgcgcaggaggacggagccctaaccgcaacccgcgccgcgccgcgccgatttgatttgtatccactgtcaccagcactgctcacttaggactttctggatccggacccaggcagcgcacactggactcttgaggaagaaggagactctaattttggattccttggtggaggaaaataaaacactctggtcttgccgccaacgatgcaagtgtgactgctggcgtcttcatgagctccagaggtcacagcacgctaccaaggactctcatggcccctcggatgatttccgagggagacataggaggcattgctcaaatcacctcctctctattcctgggcagaggcagtgtggcctccaatcggcacctcctccaggctcgtggcatcacctgcattgttaatgctaccattgagatccctaatttcaactggccccaatttgagtatgttaaagtgcctctggctgacatgccgcatgcccccattggactgtactttgacaccgtggctgacaagatccacagtgtgagcaggaagcacggggccaccttggtgcactgtgctgcaggggtgagccgctcagccacgctgtgtatcgcgtacctgatgaaattccacaacgtgtgcctgctggaggcgtacaactgggtgaaagcccggcgacctgtcatcaggcccaacgtaggcttctggaggcaactgatagactacgagcgccagctctttgggaagtcgacagttaaaatggtacagacaccttatggcatagttcccgacgtctatgagaagggagtcccgacacctgatgccttactgggggatttagtgccactgaagcctgcgtcagcagcccgagcggggccggcatctgctccccgccgtctgctccctctccactctcttctcaaatggctgacttctggttctccctcaagtgttttttacactgggtgttcaaatttattttaagagatagggagggaggggacataaagggaatgcatacattgctagtcacatttttaaaattaacattttggaatagtgtttatggaaatctttagcttttaatcatttttaccaatttgaacagtttaataaactggttctgctctcttctgaatctcatgcctttggcaccttggtaggtgcaggaggagctcagtgcaaaaatcactttggggcctcattaaccctttagagacaagctttgccccaggctgcggaccagacagatgcttagggaaggttgataccagcttcagtctctactggattagccctactctttcctttcccctccattatttagtgactctgtaagtaagttaaatacacccttattatttagctgttaagtaactataatgaaatctgctgcaaaatctctcttggaatccatgtgcccaggattatattagcattatttttaataaatctatatgcttaacatatt

SEQ ID NO: 77211 - DNA, 973 bp, Homo Sapiens
  misc_feature (24)..(24): n is a, c, g, or t
  misc_feature (314)..(341): n is a, c, g, or t
  misc_feature (716)..(837): n is a, c, g, or t
  misc_feature (847)..(863): n is a, c, g, or t
gaattattaaaaatgccttttttntgtgctgtacaatgtctactgtactgtgggtcatttagatgagatgaaaaacttaattaaatctgaagtgtcagaggcgcttagtaagccttagtaaagttgtgattgaagaaacttaatacaaatgaactagaggtttgtaatcatgccactcactaacgattttatttctgtagcagaatcattttttctatgtaaggtgttaatgtgtgtgtatgtgctttggttgtaggaaaacttgaaaattccaaaatccttattttcctatttgagaggctggttcagcaggnnnnnnnnnnnnnnnnnnnnnnnnnnnnatgaatggtatatttattacattattttgaaagagaattagtgtgttatgtggataatgttatatacagccaaagtggatgtttctatttggcaaggaaggtaggatttctgaaactcaggccttaaccaataggttggaagacaagaccaattgaagagttaggaaatgtgagtttttgttacttctgttattccagtcttggtttcattgtctcattctttatttttaaaatcttgtgcctaaaagtttttttgcttaattatgaagtagacatgcatgtttacatttatgtaaaatatttgctgtgtaaagtattttttgtttattctcttaaaagatcactatatttaaataaaagtgaaggtcagcaacnnnnnnnnnnnnnnnnnnnnnnnnnnnnnnnnnnnnnnnnnnnnnnnnnnnnnnnnnnnnnnnnnnnnnnnnnnnnnnnnnnnnnnnnnnnnnnnnnnnnnnnnnnnnnnnnnnnnnnnnnnaaactgtttnnnnnnnnnnnnnnnnnaaaacttttgctagaattttctttggggcggggcgcccgggggaaaccgaaagttgggaacaattcttcacgaaaaacccagggcattactggatgtttgaacccccccc

SEQ ID NO: 77212 - DNA, 416 bp, Homo Sapiens
  misc_feature (263)..(324): n is a, c, g, or t
cccctttccctccctccctctccgcattcttcccttggttcagcacaggtaaaacggttcccctccctccctgccttcatggatcaccagctcacgtcatgttgccttctcttttctttgtgtgtgtgtttatttaagttatttttcttcctcctctcccttttctttttggccctccctccctccctcttctgccatgtaactggaggatgtgctatgagtttgcaaacagctggactgtcaggctgctttttttccagatnnnnnnnnnnnnnnnnnnnnnnnnnnnnnnnnnnnnnnnnnnnnnnnnnnnnnnnnnnnnnntggagcactgagcaccatttggaagcttgagagaaaccaaaattaaagagagaaagagagagcgtgcacgctcctgctttgtctttcctgtg

SEQ ID NO: 77213 - DNA, 950 bp, Homo Sapiens
  misc_feature (152)..(152): n is a, c, g, or t
  misc_feature (298)..(298): n is a, c, g, or t
  misc_feature (552)..(560): n is a, c, g, or t
  misc_feature (666)..(755): n is a, c, g, or t
  misc_feature (826)..(885): n is a, c, g, or t
tgcagacagttccgatgaaagcggcatagccacgcataattggtagtcatcatagcacccagcttacattatgtcccgctctattgttggatttgagcgatacattacacaggaacacttgactgatagaattatagatcacttaggattgncctcgagccagattcgcacgagcggcccgacactccacatgatccgctcagcctgcgcagttcagcatgatgccgcccagcctgcgcagttcagcctctgacacccagcgagagggcggggcaggggtcagcccccagcgtgcctngcggatttgttttgagccgtggacttgggttgtaaatttatttgtggggagtgcgctccaggaagagccaccatccctgcccccgttttcccaccggggagtctgtacagagatttttctacgtttttattttttgcctcagagggatgggattggggaggaggggatgggcagcggagggttgggggcatggtctgcaggctcatctgtgtccgcctttcactcctccctctgcccccagtgtttcttctgannnnnnnnncccctttccctccctccctctccgcattcttcccttggttcagcacaggtaaaacggttcccctccctccctgccttcatggatcaccagctcacgtcatgttgcnnnnnnnnnnnnnnnnnnnnnnnnnnnnnnnnnnnnnnnnnnnnnnnnnnnnnnnnnnnnnnnnnnnnnnnnnnnnnnnnnnnnnnnnnncatgtaactggaggatgtgctatgagtttgcaaacagctggactgtcaggctgctttttttccagatgttnnnnnnnnnnnnnnnnnnnnnnnnnnnnnnnnnnnnnnnnnnnnnnnnnnnnnnnnnnnnggagcactgagcaccatttggaagcttgagagaaaccaaaattaaagagagaaagagagagcgtg

SEQ ID NO: 77214 - DNA, 1245 bp, Homo Sapiens
  misc_feature (31)..(31): n is a, c, g, or t
  misc_feature (106)..(140): n is a, c, g, or t
aagagaactgtatagactcaataataggcgnccccctcccccggctgttttttctttagccctgaaaccgacgagcgcagcgagtctgtgagcgaggaagcggcgnnnnnnnnnnnnnnnnnnnnnnnnnnnnnnnnnnncagtcgacggtaccggacatatgcccgggaattcggccattacgtgccgggggccctacctgctttctgctttcccttcgcggtgcccactccactccttgtgcggcgctaggccccccgtcccggtcatggccatgctcagggtccagcccgaggcccaagccaaggtggatgtgtttcgtgaagacctctgtaccaagacagagaacctgctcgggagctatttccccaagaagatttctgagctggatgcatttttaaaggagccagctctcaatgaagccaacttgagcaatctgaaggccccattggacatcccagtgcctgatccagtcaaggagaaagagaaagaggagcggaagaaacagcaggagaaggaagacaaggatgaacaagaagaagggggaggatgaagacaaaggtcctccctgtggcccagtgaactgcaatgaaaagatcgtggtccttctgcagcgcttgaagcctgagatcaaggatgtcattgagcagctcaacctggtcaccacctggttgcagctgcagatacctcggattgaggatggtaacaattttggagtggctgtccaggtgagagcgctgccccacttccctgctcttttctagtccatgcttccttccactttcccccttgctttttttccctaggagaaggtgtttgagctgatgaccagcctccacaccaagctagaaggcttccacactcaaatctctaagtatttctctgagcgtggtgatgcagtgactaaagcagccaagcagccccatgtggtagggtgattatcggcagctggtgcacgagctggatgaggcagagtaccgggacatccggctgatggtcatggagatccgcaatgcttatgctgtgttatatgacatcatcctgaagaacttcgagaagctcaagaagcccaggggagaaacaaagggaatgatctattgagagccctctctcccattctgtgatgagtacagcagagaccttcctgctttttactggggactccagattttccccaaacttgcttctgttgagatttttccctcacccttgcctctcaggcacaataaatatagttataccact

SEQ ID NO: 77215 - DNA, 1029 bp, Homo Sapiens
  misc_feature (55)..(55): n is a, c, g, or t
  misc_feature (89)..(89): n is a, c, g, or t
  misc_feature (98)..(98): n is a, c, g, or t
  misc_feature (115)..(115): n is a, c, g, or t
  misc_feature (178)..(178): n is a, c, g, or t
  misc_feature (228)..(228): n is a, c, g, or t
  misc_feature (258)..(258): n is a, c, g, or t
gatttggcgaaacattccaccagaacagcttgcatgatacgaattatacgactcntataggattgccctcgagccaagatcgcaacgangggtcccantccactcttgtgcgcgntagccccccgtcccgtcatgccatgctcaggtccagcccgagcccaagccaaagtggatgttntcgtgaagacctctgtaccaagacagagaacttgctcgggagctatttcnccaagaaagattcttgagctggatgcattntaaaaggagccagctctcaatgaagccaacttgagcaatctgaagcccccattggacatcccagtgcctgatccagtcaaggagaaagagaaagaggagcggaagaaacagcaggagaaggaagacaaggatgaaaagaagaagggggaggatgaagacaaaggtcctccctgtggcccagtgaactgcaatgaaaagatcgtggtccttctgcagcgcttgaagcctgagatcaaggatgtcattgagcagctcaacctggtcaccacctggttgcagctgcagatacctcggattgaggatggtaacaattttggagtggctgtccaggagaaggtgtttgagctgatgaccagcctccacaccaagctagaaggcttccacactcaaatctctaagtatttctctgagcgtggtgatgcagtgactaaagcagccaagcagccccatgtgggtgattatcggcagctggtgcacgagctggatgaggcagagtaccgggacatccggctgatggtcatggagatccgcaatgcttatgctgtgttatatgacatcatcctgaagaacttcgagaagctcaagaagcccaggggagaaacaaagggaatgatctattgagagccctctctcccattctgtgatgagtacagcagagaccttcctgctttttactggggactccagattttccccaaacttgcttctgttgagatttttccctcaccttgcctctcaggcacaataaatatagttataccactgccaaaa

SEQ ID NO: 77216 - DNA, 995 bp, Homo Sapiens
  misc_feature (83)..(117): n is a, c, g, or t
  misc_feature (766)..(766): n is a, c, g, or t
aaatagtataactcactatagggccctagctcggcctgtatcgaacgacgagcgcagcgagtagtgagcgaggaagcggccgnnnnnnnnnnnnnnnnnnnnnnnnnnnnnnnnnnncagtcgacggtaccggacatatgcccgggaattcggccattacggccgggggctttcccttcgcggtgcccactccactccttgtgcggcgctaggccccccgtcccggtcatggccatgctcagggtccagcccgaggcccaagccaaggtggatgtgtttcgtgaagacctctgtaccaagacagagaacctgctcgggagctatttccccaagaagatttctgagctggatgcatttttaaaggagccagctctcaatgaagccaacttgagcaatctgaaggccccattggacatcccagtgcctgatccagtcaaggagaaagagaaagaggagcggaagaaacagcaggagaaggaagacaaggatgaaaagaagaagggggaggatgaagacaaaggtcctccctgtggcccagtgaactgcaatgaaaagatcgtggtccttctgcagcgcttgaagcctgagatcaaggatgtcattgagcagctcaacctggtcaccacctggttgcagctgcagatacctcggattgaggatggtaacaattttggagtggctgtccaggagaaggtgtttgagctgatgaccagcctccacaccaagctagaaggcttccacactcaaatctctaagtatttctctngagcgtggtgatgcagtgactaaagcagccaagcagcccccatggtggggtgattatcgggcagctgggtgcacgagcctggatgaggcagaagtaccggggacatccgggcttgatggttcatgggagatccgcaaatgccttatggctgtggttaatatgaacatcaatccctgaaaggaactttcgaaagaaagctccaagaaagcccccagggggaagaaaaact

SEQ ID NO: 77217 - DNA, 930 bp, Homo Sapiens
cagtcgacggtaccggacatatgcccgggaattcggccattacggccggggccttcgcggtgcccactccactccttgtgcggcgctaggccccccgtcccggtcatggccatgctcagggtccagcccgaggcccaagccaaggtggatgtgtttcgtgaagacctctgtaccaagacagagaacctgctcgggagctatttccccaagaagatttctgagctggatgcatttttaaaggagccagctctcaatgaagccaacttgagcaatctgaaggccccattggacatcccagtgcctgatccagtcaaggagaaagagaaagaggagcggaagaaacagcaggagaaggaagacaaggatgaaaagaagaagggggaggatgaagacaaaggtcctccctgtggcccagtgaactgcaatgaaaagatcgtggtccttctgcagcgcttgaagcctgagatcaaggatgtcattgagcagctcaacctggtcaccacctggttgcagctgcagatacctcggattgaggatggtaacaattttggagtggctgtccaggagaaggtgtttgagctgatgaccagcctccacaccaagctagaaggcttccacactcaaatctctaagtatttctctgagcgtggtgatgcagtgactaaagcagccaagcagccccatgtgggtgattatcggcagctggtgcaccgagcctggatgaggcagagtaccgggacatccggctgatggtcatggagatccgcaatgcttatgctgtgttatatgacatcatcctggagaacttcgagaagctccagaagccccggggagaaacagaagggaatggatctattggagagcccctctcctcccatttctggtgaatgagtacaggccagagaaccctttcctgggctttttttacct

SEQ ID NO: 77218 - DNA, 1156 bp, Homo Sapiens
  misc_feature (1027)..(1030): n is a, c, g, or t
  misc_feature (1032)..(1032): n is a, c, g, or t
  misc_feature (1034)..(1034): n is a, c, g, or t
  misc_feature (1132)..(1132): n is a, c, g, or t
aattcccgggatatcgtcgaccacgcgtccgggcggagctgggtgcgagcgccctaccgctttcgctttcccttcgcggtgcccactccactccttgtgcggcgctaggccccccgtcccggtcatggccatgctcagggtccagcccgaggcccaagccaaggtggatgtgtttcgtgaagacctctgtaccaagacagagaacctgctcgggagctatttccccaagaagatttctgagctggatgcatttttaaaggagccagctctcaatgaagccaacttgagcaatctgaaggccccattggacatcccagtgcctgatccagtcaaggagaaagagaaagaggagcggaagaaacagcaggagaaggaagacaaggatgaaaagaagaagggggaggatgaagacaaaggtcctccctgtggcccagtgaactgcaatgaaaagatcgtggtccttctgcagcgcttgaagcctgagatcaaggatgtcattgagcagctcaacctggtcaccacctggttgcagctgcagatacctcggattgaggatggtaacaattttggagtggctgtccaggagaaggtgtttgagctgatgaccagcctccacaccaagctagaaggcttccacactcaaatctctaagtatttctctgagcgtggtgatgcagtgactaaagcagccaagcagccccatgtgggtgattatcggcagctggtgcacgagctggatgaggcagagtaccgggacatccggctgatggtcatggagatccgcaatgcttatgctgtgttatatgacatcatcctgaagaacttcgagaagctcaagaagcccaggggagaaaccaagggaatgatctattgagagccctctctcccattctgtgatgagtacagcaaagaccttcctgctttttactgcggactccagattttcccccaacttgcttctgttgagatttttcccctcaccttggcctctccaggcacaattaactatcagttatacccccgcctnnnncnanaccccggcgcgtccccacccattcccctgttcgggccggccctcgcgcgccctccaaaaaagccttttttaaacaccattctgcgtttgtgcgggcgnccgcggcccccattaagggtaaaa

SEQ ID NO: 77219 - DNA, 875 bp, Homo Sapiens
aagctaattggtgaaacctatagaacaagttggttacaaaaaagcagggctggtacggtccggaattcccgggatatcgtcgacccacgcgtcgggcgctaggccccccgtcccggtcatggccatgctcagggtccagcccgaggcccaagccaaggtggatgtgtttcgtgaagacctctgtaccaagacagagaacctgctcgggagctatttccccaagaagatttctgagctggatgcatttttaaaggagccagctctcaatgaagccaacttgagcaatctgaaggccccattggacatcccagtgcctgatccagtcaaggagaaagagaaagaggagcggaagaaacagcaggagaaggaagacaaggatgaaaagaagaagggggaggatgaagacaaaggtcctccctgtggcccagtgaactgcaatgaaaagatcgtggtccttctgcagcgcttgaagcctgagatcaaggatgtcattgagcagctcaacctggtcaccacctggttgcagctgcagatacctcggattgaggatggtaacaattttggagtggctgtccaggagaaggtgtttgagctgatgaccagcctccacaccaagctagaaggcttccacactcaaatctctaagtatttctctgagcgtggtgatgcagtggactaaagcagccaagcagccccatgtgggtgattatcggcagctgggtgcacgagctggatgaggcagagtaccgggacatccggctgatggtcatggaggatccgcaatgcttatgctgtgttatatgacactcatcctgaagaacttcgagaaagctcaagaagccaggggagacacaagggaatgatctattgagagc

SEQ ID NO: 77220 - DNA, 851 bp, Homo Sapiens
  misc_feature (257)..(318): n is a, c, g, or t
gggccactccactccttgtgcggcgctaggccccccgtcccggtcatggccatgctcagggtccagcccgaggcccaagccaaggtggatgtgtttcgtgaagacctctgtaccaagacagagaacctgctcgggagctatttccccaagaagatttctgagctggatgcatttttaaaggagccagctctcaatgaagccaacttgagcaatctgaaggccccattggacatcccagtgcctgatccagtcaaggnnnnnnnnnnnnnnnnnnnnnnnnnnnnnnnnnnnnnnnnnnnnnnnnnnnnnnnnnnnnnnggggaggatgaagacaaaggtcctccctgtggcccagtgaactgcaatgaaaagatcgtggtccttctgcagcgcttgaagcctgagatcaaggatgtcattgagcagctcaacctggtcaccacctggttgcagctgcagatacctcgcatacagcatggtaacaattttggagtggctgtccagcagaaagtgtttgagctgatgaccagcctccacaccaagctaaaaggcttccacactcaaatctctaagtattctatctgagcgtggtgatgcaggaactaaagccagctaagcagccccatgtgggtggattatcggcaacctggcgcaccaacttggatgaggcaaaatacccgggaaatcccggcttattggcatggaaaatccccaaaggcctatggctggggttatatgacctcctcctggaaaaactttcaagaaattccataaagcccaggggaagaaaaaaagggcaaatgatctaattgagaaccctcttctccccattttgggaaggagtaagcgaa

SEQ ID NO: 77221 - DNA, 720 bp, Homo Sapiens
  misc_feature (161)..(161): n is a, c, g, or t
ggccccattgaactcccagtgcctgatcagtcaaggagaagagaaagagaaccgcagaaccagcagtagaaggagactagcatgaaagaagaaggggcaggatgaagacaagggtcctccttgtggcccagtgactgcaatgaaaaagatcgtggtccttntgcagcgcttgaagcctgagatcaaggatgtcattgagcagctcaacctggtcaccacctgggtgcagctgcagatacctcggattgaggatggtaacaattttggagtggctgtccaggagaaggtgtttgagctgatgaccagcctccacaccaagctagaaggcttccacactcaaatctctaagtatttctctgagcgtggtgatgcagtgactaaagcagccaagcagccccatgtgggtgattatcggcagctggtgcacgagctggatgaggcagagtaccgggacatccggctgatggtcatggagatccgcaatgcttatgctgtgttatatgacatcatcctgaagaacttcgagaagctcaagaagcccaggggagaaacaaagggaatgatctattgagagccctctctcccattctgtgatgagtacagcagagaccttcctgctttttactggggactccagattttccccaaacttgcttctgttgagatttttccctcaccttgcctctcaggcacaataaatatagttataccactaaaaaa

SEQ ID NO: 77222 - DNA, 740 bp, Homo Sapiens
atgaagatgcaaagtcctgaccccggaggagtgctctaccgggctgtgcagtctgtgaacgtgacccacgatgcagtgcatgcacaaatggattgaagctccgctcactgatctgcgtgggctcaatgagcaggtgctgcacctgtggctggaggtctctgctccagcctgcccaccgtggagaagtggtaccagccctggtccttcctgcgcagcccgggctgggtccagatcaagtgtgagctccgagtcctctgctgctttgccttcagcctctcccaggactgggagctccctgcgaagagagaggcgcagcagcccctgaaggagggcgtccgggacatgctggtgaagcaccacctcttcagctgggatgtggacgggtgaccccctcctccccagcccaacctcgggcctgcgtctgaggtggcccaggaccccaagctgcagagcccagggaagagcagctccagagccctggccggggccgcgggatatcaatatcaggctgccccactccacgttccccagcacatcccaggtggtgggagcagagggtaccctgccccaccagggtccttagggatgctctaggccaaaccacagtttgtaccaaaaaccttgtgaggaggtgggggagccatgtctgtgctcaggaagagggaaggggatgggggtggctagtaggctcctggcctctttggtttataaataaactgtgtctgtctgtctttgaaaaa

SEQ ID NO: 77223 - DNA, 1109 bp, Homo Sapiens
gcctgttagcccatcttattcaatccatggaaggggtgggtaccacagctgggtcccgggtctgttgtgtcccagcatctgaggggccacgcagtgccttctaaaccactcaaggaagggcaaaaccttggacctgaatacagctctgcagccctagctctctcttcgcagggagctcccagtcctgggagaggctgaaggcaaagcagcagaggactcggagctcacacttgatctggacccagcccgggctgcgcaggaaggaccagggctggtaccacttctccacggtgggcaggctggagcagagcacctccagccacaggtgcagcacctgctcattgagccccacgcagatcagtgagcggagcttcacatccatttgtgcatgcactgcatcgtgggtcacgttcacagactgcacagcccggtagagcagctcctccggggtcaggactttgccatcttcatccaacctgaaggtcttacagagcaccagacgggaatacacggaggcaaagtctctctcgacctcccggcctgcagcctcctcgataaacagccaggggtggcaggcgcccccaagcagggatggcttcttcagtccatgttcgaacagggccttaagggccgggcagagggtccctcgcacgaggtctgtgaccccctccgtcaccgagtcatcccccgcgatggagtactctttgctgcgctcatccaggacttccacgaacttggctggaaaccagcctcgcaggccgttgagctcccccacccagcagtgctcgtccttctgagacacgattgtgatgatgtcgttcttgcggaagcccagctcgtcgtcgtcgtgccgctcaaagtccagcagggccttggctcggcgccggtggctgcgtgagcacgccacgtagttctcgtggtcccgctggtggctctccatgctatagtctggagtcagctccacgctgcagtttttggggtctgtgcactggaagtggcgtgccacgcgcaggatggcttcccggaggtcagccaccagttccgtctgcttgatgttcttggccttgagcctcgtgccgaattcgccacccaggcctcgctaccttgga

SEQ ID NO: 77224 - DNA, 749 bp, Homo Sapiens
tttccagcaggccaaatgacccagactttgggcttcagggactcagaaatcacgcatttggtgaatgctggagtcctcaccgtccgagatgctgggagctggtggctagctgtgcctggagctgggagattcatcaagtactttgttaaagggcgccaggctgtccttagcatggtccggaaggcaaagtaccgggaactgctcctatcagagctcctgggccggcgggcgcctgtcgtggtgcggcttggcctcacctaccatgtgcacgacctcattggggcccagctagtggactgcatctctaccacttcaggaaccctcctccgcctgccagagacatgaagattctgctcatcattgctcagctcctcagagtgggccgggaggggactaaaaaagctgcatgatggtggctgagacagggtcaccttgggaaggcttgggagccaggatgagtgtcgggctctcgtgtgtgcaaaaggtcagatgtgactgctgctgtttgcctggtttctgacccagtggtggggtttgagcaatgcttctctgcccttccatggaaagtggaaccagaaatggtgccaaggctgtggctgttccctttcgtgtaaaatggtgctgttattactctgtcttgaaataggaaggtgggatttctggggaggctggtgaaggagggcagggttcttttctctacgtgtcatgttaaaattgccaaataaagtacctctgcctgtgaaaaaaaa

SEQ ID NO: 77225 - DNA, 702 bp, Homo Sapiens
aatctgttggattctaatgcagttcatcacatcattcatgattttcagcgccatgttatagtacattgtgcagcagagagaagaccagatgttgtagaaaatcagccagatgctgcctctcaacttaatgtggatgcttctgggaatttagcaaaggaagcagctgctgttggagcatttctcatctacattagctcagattatgtatttgatggaacaaatccaccttacagagaggaagacataccagctcccctaaatttgtatggcaaaacaaaattagatggagaaaaggctgtcctggagaacaatctaggagctgctgttttgaggattcctattctgtatggggaagttgaaaagctcgaagaaagtgctgtgactgttatgtttgataaagtgcagttcagcaacaagtcagcaaacatggatcactggcagcagaggttccccacacatgtcaaagatgtggccactgtgtgccggcagctagcagagaagagaatgctggtaagaaggattcctgagtcctgtcttagcgaaggtccgctttgtcttttccatgcttgaactttcacagctgtacttggagtgttactgagtgaaagccaaaagtgcttttttaaaactaggagaccaaacaaaagtagtttacatatacactgtattcatgaagaataaaaatattatgcaataaaaaaa

SEQ ID NO: 77226 - DNA, 2086 bp, Homo Sapiens
  misc_feature (1146)..(1157): n is a, c, g, or t
cagtcgacggtaccggacatatgcccgggaattcggccattacggccgggggctgaggcccgcgtcgatcctgggttggaggaggtggcggccgctgaggctgcggcgtgaagacggcgggcatggtggggcgggagaaagagctctctatacactttgttcccgggagctgtcggctggtggaggaggaagttaacatccctaataggagggttctggttactggtgccactgggcttcttggcagagctgtacacaaagaatttcagcagaataattggcatgcagttggctgtggtttcagaagagcaagaccaaaatttgaacaggttaatctgttggattctaatgcagttcatcacatcattcatgattttcagccccatgttatagtacattgtgcagcagagagaagaccagatgttgtagaaaatcagccagatgctgcctctcaacttaatgtggatgcttctgggaatttagcaaaggaagcagctgctgttggagcatttctcatctacattagctcagattatgtatttgatggaacaaatccaccttacagagaggaagacataccagctcccctaaatttgtatggcaaaacaaaattagatggagaaaaggctgtcctggagaacaatctaggagctgctgttttgaggattcctattctgtatggggaagttgaaaagctcgaagaaagtgctgtgactgttatgtttgataaagtgcagttcagcaacaagtcagcaaacatggatcactggcagcagaggttccccacacatgtcaaagatgtggccactgtgtgccggcagctagcagagaagagaatgctggatccatcaattaagggaacctttcactggtctggcaatgaacagatgactaagtatgaaatggcatgtgcaattgcagatgccttcaacctccccagcagtcacttaagacctattactgacagccctgtcctaggagcacaacgtccgagaaatgctcagcttgactgctccaaattggagaccttgggcattggccaacgaacaccatttcgaattggaatcaaagaatcactttggcctttcctcattgacaagagatggagacaaacggtctttcattagtttatttgtgttgggttcnnnnnnnnnnnnaaatgaaaagtatagtatgtggcactttttaaagaacaaaggaaatagttttgtatgagtactttaattgtgactcttaggatctttcaggtaaatgatgctcttgcactagtgaaattgtctaaagaaactaaagggcagtcatgccctgtttgcagtaatttttctttttatcattttgtttgtcctggctaaacttggagtttgagtatagtaaattatgatccttaaatatttgagagtcaggatgaagcagatctgctgtagacttttcagatgaaattgttcattctcgtaacctccatattttcaggatttttgaagctgttgaccttttcatgttgattattttaaattgtgtgaaatagtataaaaatcattggtgttcattatttgctttgcctgagctcagatcaaaatgtttgaagaaaggaactttatttttgcaagttacgtacagtttttatgcttgagatatttcaacatgttatgtatattggaacttctacagcttgatgcctcctgcttttatagcagtttatggggagcacttgaaagagcgtgtgtacatgtattttttttctaggcaaacattgaatgcaaacgtgtatttttttaatataaatatataactgtccttttcatcccatgttgccgctaagtgatatttcatatgtgtggttatactcataataatgggccttgtaagtcttttcaccattcatgaataataataaatatgtactgctggcatgtaatgcttagttttcttgtatttacttctttttttaaatgtaaggaccaaacttctaaactaattgttcttttgttgctttaatttttaaaaattacattcttctgatgtaacatgtgatacatacaaaagaatatagtttaatatgtattgaaataaaacacaataaaattaa

SEQ ID NO: 77227 - DNA, 917 bp, Homo Sapiens
cccagcaagagaaggcagaggctaagacccatcccgtatctgctctcctgaaataattctggagtcatgcctgaaatgccagaggacatggagcaggaggaagttaacatccctaataggagggttctggttactggtgccactgggcttcttggcagagctgtacacaaagaatttcagcagaataattggcatgcagttggctgtggtttcagaagagcaagaccaaaatttgaacaggttaatctgttggattctaatgcagttcatcacatcattcatgattttcagccccatgttatagtacattgtgcagcagagagaagaccagatgttgtagaaaatcagccagatgctgcctctcaacttaatgtggatgcttctgggaatttagcaaaggaagcagctgctgttggagcatttctcatctacattagctcagattatgtatttgatggaacaaatccaccttacagagaggaagacataccagctcccctaaatttgtatggcaaaacaaaattagatggagaaaaggctgtcctggagaacaatctaggagctgctgttttgaggattcctattctgtatggggaagttgaaaagctcgaagaaagtgctgtgactgttatgtttgataaagtgcagttcagcaacaagtcagcaaacatggatcactggcagcagaggttccccacacatgttcaaaagatggtggccactgttgtgccggcagctagcagcaagaagagaatgctggattccatcaattaaaggaacctttcactggtctggcatgaaccagatgaactaagtatgaaatgggctgtgcaattgcggatgcctttaactccccaagaagtattaagaactattaattgggaggaccgttcttaagaggccaacggccgagaaag

SEQ ID NO: 77228 - DNA, 1166 bp, Homo Sapiens
  misc_feature (750)..(760): n is a, c, g, or t
cagtcgacggtaccggacatatgcccgggaattcggccattacggccgggattatctcatattttctccctctttctcttactcttaccaagttttcctggtggcttggcttccctgactaaagaattaagtctcatttttactttccatttctattttcttaccacttggttggctccctttgtctctgtacctttaccaacattaggatctcacctctttcttcctcccttaattcataagcaccactcctatcaaagtcccatctcttaaccctgggtatcaaacaaactgtgagttttccagaatctgtttcccagttttcccctcagctttcctggtctcccatccgaactgcttctttgtgcacctcttgttctttctcttggctcccagtcttgattcctgtgatcactcttgcatcactaattgcacaagtgatttcaggtgcaattctgattagcctgcgtccacacagtgatcgatgatcctatgtgcctagaaaggacactgtgtgctgctcatgacctgcaacaggaaaaaagccatttcttgttagcagtgtaagaaccttagagcaaaggagttgaccttctgattgaatataagcacaaccatattaaatgaatcaatacaagaaaattatttctgatactatgtatgtacatatttcttctctaaaatgtatcattcttttctaatgtatatgatctaacaaaaatgaaacatgaaatgcagtagcaaccactnnnnnnnnnnnttcaaggacatctaactttttctctcacttttgccctttgtttatccttccctgtgattagataaacaaaataaaaaacaaaatgctgtatttctcttcttacgccagtcagaaccaatccgaaaagaatgtgtgttgactcaggtttggagttatttcaggaagacagatattgaccttttaattgataaatattcttattatcctggaatgccagaaaagaactatgtcctgcttgtctagtttgtattcgctgactttctatgtgatatagatgcatttgtaatactctttttcaagtgctaaaggatttctaaaatttcaaactgattaatatgtttctgctgttctggattttgatgacatttacaataaaacaacctacatttgactttggtttaaaaag

SEQ ID NO: 77229 - DNA, 555 bp, Homo Sapiens
  misc_feature (266)..(274): n is a, c, g, or t
agaggtgttctgtttctgtgagacatttttctaatttttgtgaaacttcactttcctccttctttgcttatacgtgtttgttagattatattgcaaagaagtcaagttactgatatccagtattttacagaggaagatgactttcaaaactagtcatatttctgtagaggaggaagatttttaaaacctttatcattcagcatttgtattttatggatccccaggagaactaaaaaggagatgactctctaccatagtttggtttnnnnnnnnnttactctgtcagttatttatttattatttaatactaaactccaaactgaagtggctctgaggtaaatcagatatgattttaatttaagtttctttattagcagatctataaatggaaggtgaccaatgtcactgcttctaaaatactgtcctaaacaacccagaagattttatttcagctcatgaatagctgttctaaatctgttgtatgttagacatactatgaactacctcttcacttattatggggaagtttccttaataaaagtgtgacgatggaaa

SEQ ID NO: 77230 - DNA, 1138 bp, Homo Sapiens
  misc_feature (79)..(134): n is a, c, g, or t
gccaattcagagccacctttaattgtacttgtcacttcaccagggggacagcagcatgaatgacactcctgctgcgtgnnnnnnnnnnnnnnnnnnnnnnnnnnnnnnnnnnnnnnnnnnnnnnnnnnnnnnnngcatgtgacgacgcaaactgttgctggtaaggacagtaaaaatgtagcttttgccaattccacaggagaatgatttacaaccaaaataacagacacaggccagtcctgcgccacaggggttcacagctctgaatactgggaaagggtgagatcagtcatttcgtgtcccctcacgagatgtccccacagtaggatgcactgagtcagagctaagggagggtggacaagcgctgaactctgcccgcagcacccggaccctccagtggcagcctgcatgctggtgcccttccttgcagcacaagcctcgcccggaacagaacgcctgagagcagcctcgacggcgtgaggctccagggcctcttctggatggcagcagccgacgtgaagacgaagcttttcctgctgggcacgtgtgcatgccagttcctttttctagtaggtccccactgggtgctggctgcactaacaacatagagaactaggaaagttcacaaacactgagcagtaatatctaaagcagtttaaaaataaagccaaaaggaagacaaaaaaatcccacgtcactgagtggagacaaatctatacagcagcagctgccgtgaaagggcccgcagggccgctcctacgcctcctgcaggtcggaagcagtcagtgctgcccggaccccctcgtgaaccggacaggcctcaaagcacgaccccagagggcccctggcagcccccagcagcggcgtccaaagggacattctgtgcccatggccacacttgctcacagcattgtctgcggcccgagagtgaggagtcggggtcccgtcactgccaccagcaaaagcaggcaggggtgctgggggcgtcctgatctgttagcacgtggacagggaggcgcggaagctgccccaggactcaccacctcttttaattatagggaaacagtccactcaagaaagagagaaataaaacccgggaggatctttttccttaaattatcccgggaattccggaccg

SEQ ID NO: 77231 - DNA, 814 bp, Homo Sapiens
gcggccgctccaagcctaaggagacccagcctttcccaaagagtgttgttacagaagatggcccagagcccaaggacaaaggatcattgccacaaccacccattactgaagtggaatcacaggtgttctcagaaaaacttgctactgacacctctacatttgaagctacctctgagggtaccttagaactgcagcagagaaatcccaaagcggagagactgaggtggtcccctgcccaggaggaaagtttcaggcagatggttgtcatccataaggaaattcccacagggaagaaagaccatgaatgtagtgaatgtggtaaaaccttcatttataactcacatcttgttgtccaccagagagttcattctggagagaaaccctataagtgtagtgactgtgggaaaactttcaaacagagctcaaacctcggtcagcatcagagaattcatacaggagagaaacccttcgaatgtaatgaatgtgggaaggccttcagatggggtgctcatcttgttcagcatcagaggattcactcaggagagaagccctatgagtgtaatgagtgtgggaaggcctttagtcaaagctcatatctaagtcagcatcggagaattcacagtggagagaaaccttttatatgtaaagaatgtgggaaagcttatggatggtgctcagagctcattagacatcggagagttcatgccagaaaagagccttcccattgaattgaaggggagaacgtctccagacagaattctacatcggtctaatctactttaggactggatcccataaaagttataagttcctt

SEQ ID NO: 77232 - DNA, 908 bp, Homo Sapiens
  misc_feature (55)..(55): n is a, c, g, or t
gcacagagggttcggaggcgcgtgtcctgcacgagacaccaggggctgcttcccngatattctgagagccaggcggaaggacaggagcagctcttcaaactcacagacaacatacaggacgaattcttcatcgctgtggagaacattgacagctactgcgtgctcatctcctccaaagctgtttacttcctgaaaagtggagactacgtggatcgagaagccattttcctagaagtcaaatacgatgacctctaccactgccttgtctccaaagaccatgggaaggtgtatgtgcaggtgaccaagaaagccgtgagcacgagcagtggagtgtccatccccggcccctcccaccagaagcccatggtccatgtgaaatctgaggtccttgctggcaagttgtcacaagaaataaactacgcaaagagcctctactatgaacagcagcttatgttaagactcagcgaaaaccgagagcagctggagctggactcctgaagccccgctgctgagatgggcgctcccgacacagcgcagacccaccaggaggaaagaggcccagctctcagctgacgatggaggcagaaccggagtcgggtttggggaagttgtcaaggaatgagggaaagtaaatcctcatgaggaaaagtacaaatggaaatcgtattaatttgtgaggcagggagttattttagattatgggaaataatttttaaaggtattggttaaataacgtttaaaaacatgtactgagatgaatctaatttttagattgccctgtattttgttaacatgtatatatgtacaacagtgtgtttgtaaatatataggaacgtttctgaacagggtctgtgctatgtgtaaaggtttgttaactgtaaagtaatataaagttatattggatcttc

SEQ ID NO: 77233 - DNA, 701 bp, Homo Sapiens
  misc_feature (552)..(552): n is a, c, g, or t
tgcggccgcccttccgcaatcggagccctcacagaggccaaactgatataaatctgcttaggaggcctgattcacagacgctacaggatggagcggggcgcaggagccaagctgctgccgctgctgctgcttctgcgggcgactggtttcacatgtgcacaggcagatggccggaacggctacacggcggtcatcgaagtgaccagcgggggtccctggggcgactgggcctggcctgagatgtgtcccgatggattcttcgccagcgggttctcgctcaaggtggagcctccccaaggcattcctggcgacgacactgcactgaatgggatcaggctgcactgcgcgcgcgggaacgtcctacgcaatacgcacgtgctggggcgaatggagtgagccgctgtggtgtcgcggcggcgcctacctagtggctttctcgcttcgcgtggaggcacccacgaccctcggtgacaacacagcagcgaacaacgtgcgcttccgctgttcagacggcgaggaactgcaggggcctgtgctgagctggggagactntggagactggagtgaccattgccccaatggcgcgtgctgcctgcagaccaagatccatggacctagaggcctctgcgatgacactgcgctgaacgacgcgcgcttattctgcttgcgcaggtgacagcgcggccgcggcgctctttccc

SEQ ID NO: 77234 - DNA, 655 bp, Homo Sapiens
ctattgctgctttatgggaactatattcacaggtgcacagacagagggcaggaccggttcccgccggtcatcaaagtgaccaacgtcggtccttggggtgactgggcacggcatgaaatgtgtcccgatggattcttcgccagagggatctcgctcaaggtgaagcctccccaaggcattcctggcgacgacactgcactgaatgggatcaggctgcactgcgcgcgcgggaacgtcctaggcaatacgcacgtggtagagtcccagtctggaagctggggcgaatggagtgagccgctgtggtgtcgcggcggcgcctacctagtggctttctcgcttcgcgtggaggcacccacgaccctcggtgacaacacagcagcgaacaacgtgcgcttccgctgttcagacggcgaggaactgcaggggcctgggctgagctggggagactttggagactggagtgaccattgccccaagggcgcgtgcggcctgcagaccaagatccagggacctagaggcctcggcgatgacactgcgctgaacgacgcgcgcttattctgctgccgcagttgaacggcgccgccgccgccgctctctcccgggccaggaggctagtcccacctcttgctattaaagcttctctgagtgtgaaaaa

SEQ ID NO: 77235 - DNA, 453 bp, Homo Sapiens
acttggcttggaaagtctcaagggcttggtgaatggggggcccgcagaggcaacgcatctccctttgccttgcagctggggcgaatggagtgagccgctgtggtgtcgcggcggcgcctacctagtggctttctcgcttcgcgtggaggcacccacgaccctcggtgacaacacagcagcgaacaacgtgcgcttccgctgttcagacggcgaggaactgcaggggcctgggctgagctggggagactttggagactggagtgaccattgccccaagggcgcgtgcggcctgcagaccaagatccagggacctagaggcctcggcgatgacactgcgctgaacgacgcgcgcttattctgctgccgcagttgaacggcgccgccgccgccgctctctcccgggccaggaggctagtcccacctcttgctattaaagcttctctaagttgactt

SEQ ID NO: 77236 - DNA, 668 bp, Homo Sapiens
  misc_feature (512)..(528): n is a, c, g, or t
gccactctcccttctgagaggcagctgcagctcaggccctaatacactctttgccctgtggcctctcccttttccccccttctggttggaggagggagaagtgggaagtagcttgggaactggtttgtccacataaacttccccattgttccttggcccgccctcagggcagagccccctgcccaggctgggtaagagatgggcttggtccagcagggaccctgagggaacaaacccttttccttctggggagagagtgcccccccctaccatgtagttgaacaggggctaggagctccccactcccctccctctacaagcaggctgtgtgggtttcaattcccatccttcccaccccggctaggtgtcgtccaccctgtatcctgtgtctgagtgtgtgtgggggggttctgtactaatttccatggccggtggcttttccttccatgcatcactcccccccgcatgcccaggggccacccgcctggcattaccgcatgctggggtcattnnnnnnnnnnnnnnnnnctcacgctgtcctgtggtcttgagatttttatttttgcatatgtaatccattctgtacaggtagctaactttgtaaacgctgtgtattccctctgcccccatggctgctggtgtaaataaactgcatctcccgttggtaa

SEQ ID NO: 77237 - DNA, 707 bp, Homo Sapiens
cccccttcagccacttcccagcgagttgaaatgtgcctgcacccccagccgagtgaagcccagaacgcatctatatgcatcgatgtaacaagctcggatcaggaacctaattggtttcccagtagtgggtaatttctcgttgcaaatattaatccgttgtttttctggcgcccagcccggcccgccgcagtactgtactcgaggtacgttcctatgcaaccgagagccccggcaaatacttcatgagcttagcagcctgggctcgagcagctatgcaaacgcgcttttcatttggagcacggggctgatgtgaagataagaattgtttctcctggagaaagatccatcatttctccagcttccaagcccccggcacctctgctcagctcccagatgtgacgagcacctcccgccagggggagtcaggggttgatcaaaccagctcttgtgacccaaaccagtgccgctgcattaaagggaggcccagctactccttcccagctgagatgtgggtacaggtcagatttgtcagggagatggcactaacacgacacaagctcactcccagaaccgcagctgatgtttataataatcgtatgtactgtgcaatttaggaggggaaaaaaaggctgtacaagctttaactctaaaataaatttctatttttttcctcttgcaaaattaataaaagatgttattaagaatat

SEQ ID NO: 77238 - DNA, 1128 bp, Homo Sapiens
  misc_feature (856)..(910): n is a, c, g, or t
  misc_feature (914)..(914): n is a, c, g, or t
  misc_feature (918)..(919): n is a, c, g, or t
  misc_feature (921)..(921): n is a, c, g, or t
  misc_feature (963)..(979): n is a, c, g, or t
gctggaccggtccggaattcccgggattcctgagactgctggcagtagcaaatggctattagagtaactgtataatggttttgcctgcactttctctatgtatatacaaatgtacatgtataaatataaaaattaagtgatcatggttcttggtaacctgtcccaagtgctgtgattcacacgcctgacactaaaaggttcttcctggtccagtcagccagctgtgaccaccagcagcacagctgagtgctgagaatctggctggaaagagaaatgtggctcaagtgctggctcaccttctagctgtgtggccctgggcaggttactgaggctcttccaacctcacttttcacatgtaaaatggcatttctaaaagtacctaccctacctcaaaggaattctgaaaaaagtaagtgaatttgtataaagcaaagcactcacaatatgcctgacacacaaactgcttaataaatgttagtaatttttaaaacctcctcataagcggcttagaaattattcatgtttggtacatatttattgcaagtcaagcagatccaacttttttgaaagctggtggtctaggagtatagttttaattatatttgtaaatactcaaaagtattagatgccagtctaatttaaatgcagtctgactgtagcgagtaactgacctgggcaatgaaaaagcagttgtatttttcttgtggtttttcaagaaaatatcctttttatacagatttagaaagaagaatcaatggctatatcgaagttgattgtgactaatttgttaatacagaaaacaacattaacacaaatctaagagtacctttcctaaaataaaatattttaaactttnnnnnnnnnnnnnnnnnnnnnnnnnnnnnnnnnnnnnnnnnnnnnnnnnnnnnnngggngggnngnttttaaaggttttccctggagggggctaaagttttacgcggnnnnnnnnnnnnnnnnngtaaaaaagggggtccccaattggggaacctccttttttaaagccttagggcctttggccccctctttttacacagccctcgaggaactggggaaaaacgggtataaatttgggggaatttttgggggaagagaaccccttatatcttt

SEQ ID NO: 77239 - DNA, 632 bp, Homo Sapiens
gtgatccgttctctgtactctcataatgatgtggtactgacaacaaagttctctccaacacattgtcagattgcctcagggtgccttagtggacgggtttctttgtatcagccaaagttttaggcacaacttacatcaaataaggaactcttctggtgtttgacttaggaattgcttcaatttagatgaagtattttctttttagaagatcttataagtttgggtcaagatcctggttcttatgggtccatgaacacacttgtgaccttagtacttggtcatccagcatcatacaggcatctccaagttagactctatgcagcatcatcttttgcagcattcctctgctcctgctgatctgtgccactgaactccagttcttctggtcattttgcatggtagctcttgtcacgttccttccttcctcactctctatttctctttccctctccctgtccctctctttctttgtgtttgttgattttggtgtcaattttgtggacatttggcaggagttttgactggggtaggagaaacccatgacattagaattgaataaaacctagaagttggatattggcatattggttgttgaaaaataaatttcatcctcacttatgagtataataaaa

SEQ ID NO: 77240 - DNA, 965 bp, Homo Sapiens
atgtgccgcctgccccgcatacccatccttcacaaaataagctggtaccggtccggaattccttcggaatcgtcgacccacgcgtccgccctcgcgtccggtgaatcctcagtgggccttggcacagcatcaaaccaagttataccttctcaacaccaccaagcttagtgaagaactgttctaccagatactcatttatgattttgccaattttggtgttctcaggttatcggagccagcaccgctctttgaccttgccatgcttgccttagatagtccagagagtggctggacagaggaagatggtcccaaagaaggacttgctgaatacattgttgagtttctgaagaagaaggctgagatgcttgcagactatttctctttggaaattgatgaggaagggaacctgattggattaccccttctgattgacaactatgtgccccctttggagggactgcctatcttcattcttcgactagccactgaggtgaattgggacgaagaaaaggaatgttttgaaagcctcagtaaagaatgcgctatgttctattccatccggaagcagtacatatctgaggagtcgaccctctcaggccagcagagtgaagtgcctggctccattccaaactcctggaagtggactgtggaacacattgtctataaagccttgcgctcacacattctgcctcctaaacatttcacagaagatggaaatatcctgcagcttgctaacctgcctgatctatacaaagtctttgagaggtgttaaatatggttatttatgcactgtgggatgtgttcttctttctctgtattccgatacaaagtgttgtatcaaagtgtgatatacaaagtgtaccaacataagtgttggtagcacttaagacttatacttgccttctgatagtattcctttatacacagtggattgattataaataaatagatgtgtcttaacataa

SEQ ID NO: 77241 - DNA, 649 bp, Homo Sapiens
  misc_feature (34)..(34): n is a, c, g, or t
  misc_feature (87)..(127): n is a, c, g, or t
gccgagcactggaccccgcgccctccctggtctntcagccccaaggtcccattagttatcaagcctgggtgacggagaccttgtctnnnnnnnnnnnnnnnnnnnnnnnnnnnnnnnnnnnnnnnnntggatctgcttagcattggccctagggcagggagtgggttaccttccactgtggattaactcagttcaactgataactactcctccaggcccccagcctgggacagccctggggacacagtcacccagtagcagcactgtgcccagcacaggtaagcactcaataatgacgacggttactaagtactccacccccaccaaacagtaggcagagactgtctctcctgttggccatcataaccccagtactcagtaggcgctgaatgtttggtgaatgagtaagtgaagggaaagctgaggcaccaaccctcagggagccctcagtctggtggatgtaaccaacaaccacagaactacagaactgtatactttagatacatgaattgtgtggtatgtgaattatatctcaaagccatttgaaaaaataccaaatgtgccattaagatttggatgggaagttatgggtaatgagaatataatgacatcttgcaacattatattgagaaaaatacaaattgaaaaa

SEQ ID NO: 77242 - DNA, 764 bp, Homo Sapiens
catggcgaccgcgagtcctagcgtctttctactcatggtcaacgggcaggtggagagcgcccagtttccagagtatgatgacctctactgcaagtactgctttgtgtacggccaggactgggcccccacagcgggtctggaggaggggatctcacagatcacatccaagagccaagatgtgcggcaagcactggtgtggaacttccccattgatgtcacctttaaaagcaccaacccctacggctggccacagatcgtgctcagcgtgtatggaccagatgtgttcgggaacgatgtggttcgaggctatggggccgtgcacgtgcccttctcacctggccggcacaaaaggaccatccccatgtttgtcccagaatctacgtctaaactgcagaagtttacaagctggttcatggggcggcggcccgagtacacagaccccaaggtggtggctcagggtgaaggccgggaagtgacccgtgtccgttctcagggctttgtcaccctcctcttcaacgtggtgaccaaggacatgaggaaactgggctatgacactgggccttctgatacacagggtgtgttggggcccagcccaccccagagcttcccccagtgaaggctccacaggctgcacagtctctgataatgaagggctgccttcccgaagtcagccgctgcccatcggcctgaggggcagcctggtggccagagctgggggcacacagaatagttttgtataataaagtctcattttcagagagcct

SEQ ID NO: 77243 - DNA, 650 bp, Homo Sapiens
ggaacttatagactagttttggagtataaaatccctatcagaagagctcacgtagttaaaagaaaatgttccatccccataaagatgctttcgaaaaggtataccagatttcaccatttccaagaatactttatcttattcactgctcaccaaatgacaatggctcttaattctaagttttggctgtaaagttggttatatgattctagaaggatatactctaagttgttaaaagtatatggatacctgaagtatttcatcgaaagtgacagaagtctatttgagaagctatcagaaagaaatacgatgaccgaagttcacactgttgtgccccttattcacttagaattgtgacttagcaaagaaagacatgacttacaccaacccaaaaaacatttgttcaacaaattgtgttaagattccaagggagatcattaacttattaaagtaaagaaattaaaacacatacacacaaaacttttagtaatactcatttgttttccagttacatagattttctactcattgcagctcaaacaaatgcctgtatttgctactacacactaccatatgtacctgtgtagagcaataacttaatttgtcatgtcataattaagaataagctgctggccgggtgtgggagcgcacac

SEQ ID NO: 77244 - DNA, 741 bp, Homo Sapiens
cagcagcacatgggcaggtgtcctggcagggggacaggagactgtaacaggcccaggtccttgtgcagcccctgaatgcacgcccgccttcggtctgttccttcaagcaagctggcctgggccatgtgcctgtgaaaggcaggctctggcccctttccatgccaaagtcccccaagatctggatatctggggacaagatggtggcctcaggcctgcctcccaggcagttggctgggctcccaactgtctgtcctcaatgccctaccccaactccactagtgaccctcagagtcttctccccttaggacaaggcagacaccccaccatgcgggcctcaggtggcagagaggcccagcctcacaggcctgtggccccacacaccagtcccagcaaggtgaccacggctgctggaccccttccctgttcaggcaggcccagcccctctcagaacctgctgccagctgctggtcttggcccccaccctgaatcttactgagtccctctgggcagcagctcccttctccaccccaccccagcacccgtcccaaatgtggcctcagcttgtcctccccttccccaaactatgcattcattcagcaataaatgagcctttgctgtatgccagacccagttctaggctcttgcagccctggtagaaagcaaaacaaaaactcccgctttcccagagggtcacttggcaggggaaagaatcaggaaataaaataaataatgaacatgaaa

SEQ ID NO: 77245 - DNA, 678 bp, Homo Sapiens
aaattagtcaacaatgcagtcttttttaaaagtcagttttctcaagtagtatgttgtaacgtaagatgtaactgatataactagattttgactggtaaacttaaagtgctttttatatttgaggttgactttaaaaagccattgagcagtcctcagaggttatggactctcaagcgactaatggaatagtgttctgttgtgaagtctagaactaaagcaccttgtattgtctgcttctaaagtgtcctatagtttttaacttaaagtgtaaagagtaacattttatcttatgtcaattaaagttacatttttcatttgttggtgtacatgtgctacctgttttatggggaatgtttaacacgatcctccaagttggttctatgcataaccattcaccaaatactgctgctgtgattccttgaaggaaatattctgtggtctgctatgatgcattgccatcttgctgcttgacaataggtttataaataattagaattacgtgttttaatagtacctttgtatatataacaagatgtaaaattaaagatgaggaatgtgtgtaaatgatcattcactgtttttgttttaaaactggtcagtactatgaagcttctgtggtttgtatgatgttttaactttcactttaaactgcatagaataaattaaattgaaaacaac

SEQ ID NO: 77246 - DNA, 1067 bp, Homo Sapiens
catgatagtttcccctgccccttttgccacttttgctgtccagaaagaaaatttataaccaatccccagctgggtagtttgactgaaattgctaagcaactccagataagaagcaagaagaggaagaggcaggaagagaagcatgtgtgtaagaagcataatcaggttttgactttcttctgtcagaaagacctagagcttttatgtccaaggtgcagtttgtccactgatcaccagcatcactgtgtttggcccataaagttggctgcctcctatcataggaaaaaactggaggaatacaatgcaccgtggaaggagagagtggaactaattgaaaaagtcataactatgcaaaccaggaaatcactggaactgaagaaaaaggtaaaacatagggcagaagaagtcaagtctgaatttgagcaacttaggttatttctccaaaatgagcaagagactgttcttaggcaattacaagatgaagagatggatattttagcacaactaaatgaaagcctaacaaaattttcagattatacctcctcattaaaatatctactaaaggagatagagagcatatatgtgaagtcagaactggaattactggcaaatgttaaggatatctatcacagatataagaatttaaaattccctgagctgtttttattcaaattaaaaaaatatggttaccatctgcctccacaatattctggcctagacaaaattatcaagcgatttcaagtagatgtaattctagatcctgaaacagcacatcgtaaacttatagtctcagaagatagaaaaactgtgcgctatggaaatacaacacaaaatgtacctcataacccaagaagattttatctcctcccagctgttctgggttctaagggatatagttgtggcaggcagtactgggaagtagaagtgaaagacaagcctgaatggattcttggtgtctgtaatgactgtcttcccagaaggaggaagagtcaaccaattttagtacaggatggattatggggaatttggagatctagtcagaataattatattgtattgggccacaa

SEQ ID NO: 77247 - DNA, 686 bp, Homo Sapiens
cagtcgacggtaccggacatatgcccgggaattcggccattacggccgggggcagtgagttcgacacaccatgccgactgtcagcgtgaagcgtgatctgctcttccaagccctgggccgcacctacactgacgcaagaattcttgatgaactatgtatttgaagtttcggtctggagcttgatgaaattaaagacctagagcttttatgtccaaggtgcagttcgtccactgatcaccagcatcgctgatgtttggcccactaaagcaaggctgcctcctatcacggaaaaaactggatgcaatacaatgcaccgtggaaggagagagtgcgaactacattgaaaaacgtcataactatacaaaccagacaaatcactggaactggcagaaacaagacatctgagcaaggaactagctaagtaccagaacaaggctaacgtacacaggcagcaggagcctctgatgttgtaacttgtacaaacattgaccgtcctctgccgcaatagactactgactctcctgtgctctggaacggattggcttcgaggacttcaggtcttcaacagataggatcccaggctccagtgtataaacgggtaatgcctgatgggaacaatccagaaattgattatcacagaagagacagctaagatacgtcctttcgcggtagcagcagatctccgg

SEQ ID NO: 77248 - DNA, 1386 bp, Homo Sapiens
  misc_feature (86)..(120): n is a, c, g, or t
gggaacaactgatcactactatgggcgctagggcgttatttcgaacgaccgagcgcagcgagtcagtagagcgaggaagcggccgnnnnnnnnnnnnnnnnnnnnnnnnnnnnnnnnnnncagtcgacggtaccggacatatgcccgggaattcggccattacggccgggggcagtgagttcgacacaccatgccgactgtcagcgtgaagcgtgatctgctcttccaagccctgggccgcacctacactgacgaagaatttgatgaactatgttttgaatttggtctggagcttgatgaaattacatctgagaaggaaataataagtaaagaacaaggtaatgtaaaggcagcaggagcctctgatgttgttctttacaaaattgacgtccctgccaatagatatgatctcctgtgtctggaaggattggttcgaggacttcaggtcttcaaagaaaggataaaggctccagtgtataaacgggtaatgcctgatggaaaaatccagaaattgattatcacagaagagacagctaagatacgtccttttgcggtagcagcagttctccgtaatataaagtttactaaagatcgatatgacagcttcattgaacttcaggagaaattacatcagaatatttgcaggaaaagagcactggttgccattggtacccatgatttggacactttgtcgggcccatttacttatactgcaaagcgtccttcagatatcaaattcaagcctctaaataagaaccaaggagtatacagccctgtgaactgatgaacatatacaagactgacaatcacctgaaacattatttacatatcattgaaaacaaacccctgtatccagttatctatgatagccaatggtggtcgtccctttcaatgcctcccatcatcaatggggatcattccagaataacagtaaatactagaaatatttttattgaatgcacgggaactgactttactaaggcaaaaatagttcttgatattattgtcaccatgttcagtgaatattgtgagaatcaatttacggtcgaagctgctgaagtgggttttcctaatggaaaatcacatacctttccagaattagcttaccgaaaggagatggtgagagctgacctaattaacaaaaaagttgggaatcagagaaactcccagaaaatcttggcaaactttctgaccagggatggatttaaaatcagaaatcctaggtggaggggaatcacaattgagattgaaaatccctccaaaccagaggttggactttatcccatggcctggggatattggtagaaagatgcaggctattgggcttatggggatataaaaccatttcagatggactcttcccgaaaaactttacaccattaggct

SEQ ID NO: 77249 - DNA, 1253 bp, Homo Sapiens
cataggaagcgaggcctgggtggcgaattcggcacgaggcgtcctttcaatgcctcccatcatcaatggggatcattccagaataacagtaaatactagaaatatttttattgaatgcacgggaactgactttactaaggcaaaaatagttcttgatattattgtcaccatgttcagtgaatattgtgagaatcaatttacggtcgaagctgctgaagtggtttttcctaatggaaaatcacatacctttccagaattagcttaccgaaaggagatggtgagagctgacctaattaacaaaaaagttggaatcagagaaactccagaaaatcttgccaaacttctgaccaggatgtatttaaaatcagaagtcataggtgatgggaatcagattgagattgaaatccctccaaccagagctgacattatccatgcatgtgatattgtagaagatgcagctattgcttatggatataacaacattcagatgactctcccgaaaacttacaccatagctaatcaatttcctcttaataagctcactgaacttctccgacatgacatggcagccgctggcttcactgaagcacttacctttgccctgtgctcccaagaagatattgctgataaactaggtgtggatatctctgcaacaaaggcagtccacataagtaatcctaaaacagctgaatttcaggtggcacgcactacccttcttcctggcctcctgaagaccatagcagcaaatcgtaagatgccccttccactgaaactgtttgaaatctctgacattgtaataaaagattctaatacagatgtaggtgcaaaaaactacagacatctctgtgctgtttattacaacaagaatcctgggtttgagatcattcatgggctgctggacagaattatgcagttgctcgatgtgcctcctggtgaagacaaggggggatatgtgatcaaagcatcagaagggcctgctttcttccccgggcgatgtgcagagatctttgccaggggtcaaagcgtcgggaagcttggggtccttcatcctgacgttatcaccaaatttgagctgaccatgccctgctcctccctagaaatcaatattggaccctttttgtgaagattggtctctgtggtgtgattctcttcccaggtgtccctttctcctcccctagtgtccttaagtcctcctccacagggaacatctatttgggctttgatgtttaataaagtagaaagcactgtcaaaa

SEQ ID NO: 77250 - DNA, 394 bp, Homo Sapiens
cttgaatttgatatctgaaggacgctttgcagtataagtaaatgggcccgacaaagtgtccaaatcatgggtaccaatggcaaccagtgctcttttcctgcaaatattctgatgtaatttctcctgaagttcaatgaagctgtcatatcgatctttagtaaactttatattacggagaactgctgctaccgcaaaaggacgtatcttagctgtctttctttgaagacctgaagtcctcgaaccaatccttccagacacaggagatcatatctattggcagggacgtcaattttgtaaagaacaacatcagaggctcctgctgcctttacattaccttgttctttacttattatttccttctcagatgtaatttcatcaagctccagaccaaatt

SEQ ID NO: 77251 - DNA, 767 bp, Homo Sapiens
  misc_feature (69)..(96): n is a, c, g, or t
  misc_feature (646)..(646): n is a, c, g, or t
ggcacgagggtcactcgcagttgtgagcggccgcctctcccggggacaatgtgggactgagcggcccannnnnnnnnnnnnnnnnnnnnnnnnnnnaggacagccccagcgagagccggccaggttgcagcgcggacacactcgcaggtcgctgtggccccagcctcgcctgacagaatgagcggctcggacgggggactggaggaggagccagagctcagcatcaccctcacgctgcggatgctgatgcacgggaaggaagtgggcagcatcatcgggaagaagggcgagactgtaaagcgaatccgggagcagagcagtgcccggatcaccatctccgagggctcctgccctgaacgcatcaccaccatcaccgggtctacagcagctgtcttccatgcagtctccatgattgctttcaaactggatgaggacctttgtgctgctcctgcaaatggtggaaatgtctccaggcctccagtgaccctgcgccttgtcatccctgccagtcagtgtggctcactgattgggaaggctggcaccaagatcaaggagatccgagagactacgggtgcccaggtacaggtggcaggggacctgctccccaactccacagagcgagctgttatcctggagtcccacccanaggagccactatcccctaccatccgagcctctccctaggtactgttcttctctctgccaaccagggcttctctgtccagggtcagtatggggctgtgaccccagctgaggtcaccaagctc

SEQ ID NO: 77252 - DNA, 2329 bp, Homo Sapiens
gagcggccagccgccgtgccgccgcgccgccgcgcaggacagccccagcgagagccggccaggttgcagcgcggacacactcgcaggtcgctgtggccccagcctcgcctgacagaatgagcggctcggacgggggactggaggaggagccagagctcagcatcaccctcacgctgcggatgctgatgcacgggaaggaagtgggcagcatcatcgggaagaagggcgagactgtaaagcgaatccgggagcagagcagtgcccggatcaccatctccgagggctcctgccctgaacgcatcaccaccatcaccgggtctacagcagctgtcttccatgcagtctccatgattgctttcaaactggatgaggacctttgtgctgctcctgcaaatggtggaaatgtctccaggcctccagtgaccctgcgccttgtcatccctgccagtcagtgtggctcactgattgggaaggctggcaccaagatcaaggagatccgagagactacgggtgcccaggtacaggtggcaggggacctgctccccaactccacagagcgagctgttacggtatctggggtgcctgatgccatcatcctgtgtgtgcgccagatctgcgctgttatcctggagtccccacccaaaggagccactatcccctagcatccgagcctctccctaggtactgttcttctctctgccaaccagggcttctctgtccagggtcagtatggggctgtgaccccagctgaggtcaccaagctccagcagctctcaagccatgcggtcccctttgccacacccagcgtggtgccaggactggatcccggcacacagaccagctcacaggagttcttgttcccaacgatttgattggctgtgtgatcgggcgccagggcagcaagatcagcgagatccggcagatgtcaggggcacatatcaagatcgggaaccaagcagagggcgctggggagcggcatgtcaccatcactggctctccggtctccatcgccctggcccagtacctcatcactgcctgggccgccgccgggcttggcggcctacactgccaagatggcagcagctaatgggagcaagaaggctgagcggcagaaattctccccctactgaggccagctgaggtacaggcaggggcaggcaggaccaccagcagggggctgcctctgcaccctacccgcccaaggagactccaccctggggtcccaaacgccgctaacgcccagacgcatggatgcaccccctaccctgcctccatctatgggagttctttctctcagagtgggggcagtttctggcccaggggtctgagctgcggcagccccagggcagggggccctacctcctcagctctgtgcttggatacagggagcagccaggagactccctagtgcccccaccatggcgggtgtcactcacgcactccccatcccttagggcttcctggcctactgcatccttgtgggagtcagggaggagggcccgttgggtagctggggccaggcttctctccccaccacctgcagatttcttgctgcttccactgatacccttttgactggaatgaactggctgggcttgtcagggggcaccccaaagagggggcactgccaggtagctgggggagtggcatggggcaggggcccagttctcagcagcagacactctgtacagttttttcaatccctgtttttgaataaatattctcagcgaccaacacgaggacctggatgccaatcgagaaggttaccttctagggcggcccgctctagagtatccctcgagggggccccagcttacgcgtacccagctttcttggacaaagggggccctatagggggctcgtattataaactagggcactggcccgtcgcttttacaacgcccggggactggggaaaacctggtaaaccttgggaatcatcttgtccaaggaaccccttacttttttggtgcggggaacaatagtttggccccaccatccgctccccaaagaatttcaaacgcgccttccggggcaaacaagtgaaaatttcctccaaagggtaatctaaagtggttgaacaacaaatactttaatactgtcgctacgcagttctttacaccaccttcttatcataccaccggtgacgtcgtgcgctcacggagtgatcgtactgtatcagccacataccaaatgtatgccaacagacacgagcggctgatgtccaccccgccgacgcacgacaatcgtctacctctccgggcgccccctcatcagacctcacagtacgcgtcttacacacgctacatctatatcgcggaccgtcaac

SEQ ID NO: 77253 - DNA, 1158 bp, Homo Sapiens
gggtccaggaattccctgcgattgacgggcgcccgcggaaggcgacatgggctccgctccctgggccccggtcctgctgctggcgctcgggctgcgcggcctccaggcgggggcccgcagggccccggaccccggcttccaggagcgcttcttccagcagcgtctggaccacttcaacttcgagcgcttcggcaacaagaccttccctcagcgcttcctggtgtcggacaggttctgggtccggggcgaggggcccatcttcttctacactgggaacgagggcgacgtgtgggccttcgccaacaactcggccttcgtcgcggagctggcggccgagcggggggctctactggtcttcgcggagcaccgctactacgggaagtcgctgccgttcggtgcgcagtccacgcagcgcgggcacacggagctgctgacggtggagcaggccctggccgacttcgcagagctgctccgcgcgctacgacgcgacctcggggcccaggatgcccccgccatcgccttcggtggaagttatggggggatgctcagtgcctacctgaggatgaagtatccccacctggtggcgggggcgctggcggccagcgcgcccgttctagctgtggcaggcctcggcgactccaaccagttcttccgggacgtcacggcggactttgagggccagagtcccaaatgcacccagggtgtgcgggaagcgttccgacagatcaaggacttgttcctacagggagcctacgacacggtccgctgggagttcggcacctgccagccgctgtcagacgagaaggacctgacccagctcttcatgttcgcccggaatgccttcaccgtgctggccatgatggactacccctaccccactgacttcctgggtcccctccctgccaaccccgtcaaggtgggctgtaatcggctgctgagtgaggcccagaggatcacgggggctgcgagcactgggcagggcctggtctacaaccgcctcggggctcccagcactggtacgacatctaccgggctctaaccacaagctgtggctgacccccacttggctgcgggaacccgggccccgaacgcccaggggccctggggaattaaccagggcttggcacccgaaaaacaaccccggacctttcgccccgg

SEQ ID NO: 77254 - DNA, 1157 bp, Homo Sapiens
  misc_feature (1082)..(1101): n is a, c, g, or t
cggtcatcagaggatccggctcccacttggttgcgggggcgctggcggccagcgcgcccgttctagctgtggcaggcctcggcgactccaaccagttcttccgggacgtcacggcggactttgagggccagagtcccaaatgcacccagggtgtgcgggaagcgttccgacagatcaaggacttgttcctacagggagcctacgacacggtccgctgggagttcggcacctgccagccgctgtcagacgagaaggacctgacccagctcttcatgttcgcccggaatgccttcaccgtgctggccatgatggactacccctaccccactgacttcctgggtcccctccctgccaaccccgtcaaggtgggctgtgatcggctgctgagtgaggcccagaggatcacggggctgcgagcactggcagggctggtctacaacgcctcgggctccgagcactgctacgacatctaccggctctaccacagctgtgctgaccccactggctgcggcaccggccccgacgccagggcctgggactaccaggcctgcaccgagatcaacctgaccttcgccagcaacaatgtgaccgatatgttccccgacctgcccttcactgacgagctccgccagcggtactgcctggacacctggggcgtgtggccccggcccgactggctgctgaccagcttctgggggggtgatctcagagccgccagcaacatcatcttctccaacgggaacctggacccctgggcagggggcgggattcggaggaacctgagtgcctcagtcatcgccgtcaccatccaggggggagcgcaccacctcgacctcagagcctcccacccagaagatcctgcttccgtggttgaggcgcggaagctggaggccaccatcatcggcgagtgggtaaaggcagccaggcgtgagcagcagccagctctgcgtggggggcccagactcagcctctgagcacaggactggaggggtctcaaggctcctcatggagtgggggcttcactcaagcagctggcggcagagggaaggggctgaataaacgcctggaggcctggccaggtnnnnnnnnnnnnnnnnnnnngaccgcgtatgcggccgcaagcttattcccttgtagtgagggttaattttagccta

SEQ ID NO: 77255 - DNA, 584 bp, Homo Sapiens
gagctcggtacccccccgactagcccgacagggcatagcaccatgcctgcttgtcgcctaggcccgctagccgccgccctcctcctcagcctgctgctgttcggcttcaccctagtctcaggcacaggagcagagaagactggcgtgtgccccgagctccaggctgaccagaactgcacgcaagagtgcgtctcggacagcgaatgcgccgacaacctcaagtgctgcagcgcgggctgtgccaccttctgctctctgcccaatgataaggagggttcctgcccccaggtgaacattaactttccccagctcggcctctgtcgggaccagtgccaggtggacagccagtgtcctggccagatgaaatgctgccgcaatggctgtgggaaggtgtcctgtgtcactcccaatttctgagctccagccaccaccaggctgagcagtgaggagagaaagtttctgcctggccctgcatctggttccagcccacctgccctcccctttttcgggactctgtattccctcttgggctgaccacagcttctccctttcccaaccaataaagtaaccactttcagcaaaaa

SEQ ID NO: 77256 - DNA, 1581 bp, Homo Sapiens
  misc_feature (918)..(1047): n is a, c, g, or t
  misc_feature (1055)..(1211): n is a, c, g, or t
  misc_feature (1215)..(1224): n is a, c, g, or t
  misc_feature (1270)..(1378): n is a, c, g, or t
  misc_feature (1382)..(1460): n is a, c, g, or t
ctgtttgattggcgtacatcaccagaacgttgctgatcgattatcgatcattaggattgcctgagccagaatcgcacagttctcatgcccattcctcactgtacacaggaatatacagatcctccctctttaggatatgtgagaatagagagtatatatgtagggcttgatacctgcatgtaatagagctaataagtgttcactgtataatttctcataactacagagtagtttgatatttcagggagaaataatatatgtgtgtttcccactgctttcacaacaaccctatgttgtaattagcactgttccactggcacctaaagacacggaggctctgggagatttctggccctaggccacgaaggcccacttgggactcaagctgaggtcctgtgattccatttgggagcaggaggagggatttgcaggtgatcttcctgggcctcctgagagcagctcaggtgcccaagatggactcaggcaggcagctctgctgtatgtgaagcccagtgaggggcagtgggggggccatgctgcaggtacaagttaatctccctgtatcgcctctgcccacttacccttactcctttttctacccagataaggagggttcctgcccccaggtgaacattaactttccccagctcggcctctgtcgggaccagtgccaggtggacagccagtgtcctggccagatgaaatgctgccgcaatggctgtgggaaggtgtcctgtgtcactcccaatttctgagctccagccaccaccaggctgagcagtgaggagagaaagtttctgcctggccctgcatctggttccagcccacctgccctcccctttttcgggactctgtattccctcttgggctgaccacagcttctccctttcccaaccaataaagtaaccactttcagcnnnnnnnnnnnnnnnnnnnnnnnnnnnnnnnnnnnnnnnnnnnnnnnnnnnnnnnnnnnnnnnnnnnnnnnnnnnnnnnnnnnnnnnnnnnnnnnnnnnnnnnnnnnnnnnnnnnnnnnnnnnnnnnnnncccttaannnnnnnnnnnnnnnnnnnnnnnnnnnnnnnnnnnnnnnnnnnnnnnnnnnnnnnnnnnnnnnnnnnnnnnnnnnnnnnnnnnnnnnnnnnnnnnnnnnnnnnnnnnnnnnnnnnnnnnnnnnnnnnnnnnnnnnnnnnnnnnnnnnnnnnnnnnnncttnnnnnnnnnnaaattttggggcacatccccccacaagaatttttacccctcaaggnnnnnnnnnnnnnnnnnnnnnnnnnnnnnnnnnnnnnnnnnnnnnnnnnnnnnnnnnnnnnnnnnnnnnnnnnnnnnnnnnnnnnnnnnnnnnnnnnnnnnnnnnnnnncccnnnnnnnnnnnnnnnnnnnnnnnnnnnnnnnnnnnnnnnnnnnnnnnnnnnnnnnnnnnnnnnnnnnnnnnnnnnnnnntattcccaaaagggttgtgtttgtgttaaatataaccccccaccacccctttttgtgggagaggtttttttcttgtttttaataaaaaaatctcacaaacctttctcctggtgggaagggg

SEQ ID NO: 77257 - DNA, 804 bp, Homo Sapiens
  misc_feature (14)..(14): n is a, c, g, or t
  misc_feature (673)..(682): n is a, c, g, or t
agtagtagtaatgngtcttcgattaatatgtctggaattgacaatggtaagggcactcgtctgcgaaatgttcctgtcctttttaatgacacagaaactaatctggcaggaatgtacggaaaagttcgcaaagctgctagttcaattgatcagtttagtattcgcctgggaatttttctccgaagataccccatagcgcgagtttttgtaattatatatatggctttgcttcacctctgggtcatgattgttctgttgacttacacaccagaaatgcaccacgaccaaccatatggcaaatgaaccaagcccagttgttgcagtgattggttgtctttttctagacttgggatctgcaagaaggccaattgcctaaaatttctgagaacagtgcacaagattattttatcactacaagcttttaactttttaagttattgtacaagtattctacctaaatcttccaatttcctttaaatggtaagagtttctaaaacagacaataatttaacaagctcagctctgctttatctgagtttagtggtcctaatatatatgtagagaaagatggtggggttgttcacctctgtacagaccatctgtatgttaggtgacattgattatgggttataatcagggaaactaattgtatttagtgacaaaaataaaaagnnnnnnnnnnataattcagtctgcttttggattttcatatatttaactttgcaaaaagatttactttgtacatgttacaggcttgattggtgtaaatctttttataaatacataaataaaagaaaaatatgc

SEQ ID NO: 77258 - DNA, 769 bp, Homo Sapiens
ctgattttgtccccatgttctcctacctaaatgattggtttccctatggctatttctccaagagttaagggatagctgcttaactatgcacctttacagaacattcttagcagtaatgctcaaatttaaaaggcacactcaagatacttccatgtcatggatccttccccaggtcccagtagtataaatatagggaagaggttagcatgaacttacaaattgttttaagtaatcctcttgaatgccagtcattaaaggactttgcccttctacatcaaattacatccttttcacaaatccccatttctgtaataactggtgcaaacctaaaggtgctttatagttttactactttgcagatttgcaatgctgcatataatgcagaagagcattaaaaacttttgtaaaaactcatgattttgataaacttttaaagtagcgtttatatgtaaatagaactacacatggcacacacacttgcacaagggcttcagaaaaacgtgcaatataggtgagaaaaatgtctattgaaactttctcacaggctgcccttataattaaactagtgttggggcaagcaacatctgtttcaagtagatcagggactagcaaacctaaaaggcagcaagcagcctgcagtttgctcaatccttaagaatacatggttcatacaacatgcttttactatgtcttaagtgtgacttttgaaagatacaagtgttctgtgcatatttgtgtaaataaatacataattttccaccttgtaaaa

SEQ ID NO: 77259 - DNA, 739 bp, Homo Sapiens
  misc_feature (186)..(186): n is a, c, g, or t
aagaaaaaaagagcaaaaatgagatctgtatattacttttatttttaggaccataatcaactttgtaatattcttatataattaattagtggtgtctccgactttatagcaggaactttctggtagtatgagaagaaatcattgggtgactatgactaatgtttcagaattactttttaattgttntaaaaagcactccagataatttatagagtaacataggcctcatatttacactatatgttcgctttataattccgaagttgttatttgctaaatctccaatggttgcaatcaaaccccacaatgctgaaaacagagattgattttgatgttaagaacaaaagaagtatggaaacttccaggctcaaacatgtcccccgtgccacaaggcaaactgcgatgagctcacagtccaggtctcttgctgtgtgtcctgcagggagtgaccaactctccaccttccagcaccattatcagagggtgggaaaaggcacatgaaagtggccagctcctgtcaatttatttgcttacaagggagaatgcttggaaaggttgcattggttgaaaccagtgaggagcatcaccctggggatttcatgttttcactctgttcttagtcccaggagccacaggtaatcgagaatgtttgtgaactctatccacatcccctccccaacctgccaaataacctgttcaaaacaaagaaggcatagaatataaatgaatttcaaaagtt

SEQ ID NO: 77260 - DNA, 694 bp, Homo Sapiens
cccctggccctgattccgccactcttgccggtcacttcaagcacctcacacccatcaaggcagcctggcatcctcgctacaacctcattgttgtgggccgatacccagatcctaatttcaaaagttgtaccccttatgaattgaggacgatcgacgtgttcgatggaaactcagggaagatgatgtgtcagctctatgacccagaatcttctggcatcagttcgcttaatgaattcaatcccatgggggacacgctggcctctgcaatgggttaccacattctcatctggagccaggaggaagccaggacacggaagtgagagacactaaagaaggtgtgggccagacaaggccttggagcccacacatgggatcaagtcctgcaagcagaggtggcgatttgttaaagggccaaaagtatccaaggttagggttggagcaggggtgctgggacctggggcactgtgggactgggacacttttatgttaatgctctggacttgcctccagagactgctccagagttggtgacacagctgtcccaagggcccctctgtatctagcctggaaccaaggttatcttggaactaaatgacttttctcctctcagtgggtggtagcagagggatcaagcagttatttgatttgtgctcacttttgatatggccaataaaaccataccgactgagaaaaa

SEQ ID NO: 77261 - DNA, 2421 bp, Homo Sapiens
  misc_feature (1795)..(2199): n is a, c, g, or t
ggcctgggtggcgaattcggcacgaggcttagctcgtcctacccccatgttgagttctgccctggaaaacccaaagcaagtagtgatcatagtacagaacccgaccaaagtaggctggtgaggaagtccaggctccaggggaacagacgctgcccagtgttcatagcttcctgcaacttgacagagcctgagtttgcctcttagtgggagaatgagagagagctgtagtgtcacctgacattccccaaaccttgtgaagcacgttggcctaagtgtgccgtgatcccagcccacactagcctgggtgcatctgctaatgggagaccaaatctttgtccgggaagcaagaagtgggtgggagaatgtatcctgtttttgtcagtttgtttgccttactcatttctaagtgcaataagggagtgtctcacaggattgcacctgtgacatcctgatggatgcttccctgtggccctcctggggcaagggtggacagactcagacccccagcatggttagcgctgaccttcattgaggtccctttggaaccagatgtcttgttacagacaccttcctctgtgtaagtctcctcaccttgaggggtctttagtaatgcatctgggtagcatctcaactgctggtagcatttatctgacttggaaagttggagaagaggcattcctactggagaaaaatgtcagtgttttcctataagctctgtgttagctattcattatatttgtgcttaaagatgttccttcattcatcaactaggggaagtccagatgcgggttatcttgaaagaaacaaactgacattctaggcagacagttgtctatgtggtctgagggtcagcagctgttagtctccttcctttggctcttgagacccacacatatcactttagccctaacaagggctcctcccacctccacctgttgccccagttgaaaagcatccattatgagctgaggtcagcctggatctggaattgcagcccacataaacataaaggaggatgtccctggtctgttccatccccacggatggtgttgctgctgggcaacagtgttggcttcttttaagtaccccctttcctcctcacccacctccaaactgactagcactcagagggacttatgataaaggttcagctccaggggtagtacctgagtgtgtgccatgccccttcagaccagctgcttccatcagaattccagggtcacagccccaacagaagcagcagtgcctctgtaggaggggtgctgggctctggccttctcatgcagagaggtccgggacagggtcagtatcgtgggcatgtgtatagcttcccaagttcttttacagtccctgctgggactccctgacttactttggttggttcctagtgctacttgttttacaaactacactttgtagaattgattagattaccttgtttatttaatgtgagtttgtgcctttttgtctcaatcttccaatacaggtatattgagaaaaaaagcagtctaataaaatcctagacagaactttctggagtccagtttggtgatgtccattttccagctgtatgtatcctcaaacttgcactgataaccgccattttaccagggcaggattaggaagaggtacaaaggtgtgtctgaaaatttttgcacgtggatttctgcatataatagtcccgtgtcagtttacttatgcaaacattgcacatctgaattgtaattcggccgtttcctactgacaggatgtccttttgcttttgtctgcctcctctcctcgtgccgaattcttnnnnnnnnnnnnnnnnnnnnnnnnnnnnnnnnnnnnnnnnnnnnnnnnnnnnnnnnnnnnnnnnnnnnnnnnnnnnnnnnnnnnnnnnnnnnnnnnnnnnnnnnnnnnnnnnnnnnnnnnnnnnnnnnnnnnnnnnnnnnnnnnnnnnnnnnnnnnnnnnnnnnnnnnnnnnnnnnnnnnnnnnnnnnnnnnnnnnnnnnnnnnnnnnnnnnnnnnnnnnnnnnnnnnnnnnnnnnnnnnnnnnnnnnnnnnnnnnnnnnnnnnnnnnnnnnnnnnnnnnnnnnnnnnnnnnnnnnnnnnnnnnnnnnnnnnnnnnnnnnnnnnnnnnnnnnnnnnnnnnnnnnnnnnnnnnnnnnnnnnnnnnnnnnnnnnnnnnnnnnnnnnnnnnnnnnnnnnnnnnnnnnncggcagcagagggcaggatcgttaaaaggcgcgttgctggtgttttcataggctcggccccctgagatcatcaaaaatcgaccttaagtcatagttgtgaaccggcgagatataagatccaagcgtcccctggaactccctcggggctcctgttcggccgcggtacggaattggcgctttccctcggaggggggttttaaattatcgtggtatacttgtggg

SEQ ID NO: 77262 - DNA, 1010 bp, Homo Sapiens
  misc_feature (29)..(29): n is a, c, g, or t
  misc_feature (64)..(64): n is a, c, g, or t
  misc_feature (108)..(108): n is a, c, g, or t
  misc_feature (167)..(167): n is a, c, g, or t
  misc_feature (199)..(199): n is a, c, g, or t
  misc_feature (209)..(209): n is a, c, g, or t
  misc_feature (216)..(217): n is a, c, g, or t
  misc_feature (289)..(289): n is a, c, g, or t
tgccctcgagccagatcgcacgagggaantgcaagacagtctatgctgcgtgtatgcggacacntagatgtgtgaatatctccgaagacatgcgcttcttgccagctnagagacttgggagctgtacagctctgcactggctgcagatgagcccactgcagtgtatngagtgatgataaaggatggctgtgagattccnacatgactgncctgtgnncggatggatgatgtcaacatgagtctttccatatctgggcagtggctcacctgatgcttctgaagcccatgngaaggacttgagagccaatcaccaccttcttcccaaatgtagacgtcgtggacactggttcaggatggaccccactcatgagagtctctgcggtgtcgggaaatcagagggtgcctctcttctaattgatgctggggccaatgtgaatgtgaaggacagaaatggaaagacgccccttatggtggctgtgttaaataatcatgaagagttagttcagttacttcttgacaaaggggcagatgcaagtgtaaaaaatgaggtaaatgagtccatctttatgtaaagattttcctcggagggggagaaaacatttataagcatgtaaaatttttgttgtttcctgtttcagttcggcaaaggtgtcctagaaatggccagagtttttgacagacaggttgggatgctctttctgcctatcaaggctaatttttagtccttctagactcagaaaaaccaccaaaaccctggattacattcgcctgtctgttttgtttatctagagtgtagtctccttattagaagaaaggaaaaaaaagcagaggccaaagaagtcttgtgtctgctgatgagagcaccactcatctgcgaaacgcacgtaaaacaaagtgaaccgtgactgttaaactagggatgggaaattctgcatcttggggggctgtacatttatttatttagttgaagattcactgatcccactttgaaatacatctttttacctaaa

SEQ ID NO: 77263 - DNA, 788 bp, Homo Sapiens
  misc_feature (121)..(121): n is a, c, g, or t
gtcgagcaaaagtatggggctgatgacagccgggcaaggtacgctctctgggaatacagcgccgagttcggggacgagctgtctttccgcgagggcgagtcggtcaccgtgctgcggaggnacgggccggagaagaccgactggtggtggcccgcgctgcacggccaggagggcttacgtgccgcggaactactccgggctgtcccccagggtgaagcctcaaaggagtaaagtctagcaggatagaaggaggtttctgaggctgacagaaacaagcattcctgccttccctccagacctctccctctgttttttgctgcctttatctgcacccctcaccctgctggtggtggtccttgccaccggttctctgttctcctggaagtccagggaagaaggagggccccagccttaaatttagtaatctgccttagccttgggaggtctgggaagggctggaaatcactggggacaggaaaccacttccttttgccaaatcagatcccgtccaaagtgcctcccatgcctaccaccatcatcacatcccccagcaagccagccacctgcccagccgggcctgggatgggccaccacaccactggatattcctgggagtcactgctgacaccatctctcccagcagtcttggggtctgggtgggaaacattggtctctaccaggatccctgccccacctctccccaattaagtgccttcacacagcactggtttaatgtttataaacaaaatagagaaactttccttataaataaaagtagtttgcacaga

SEQ ID NO: 77264 - DNA, 625 bp, Homo Sapiens
  misc_feature (310)..(310): n is a, c, g, or t
  misc_feature (323)..(338): n is a, c, g, or t
  misc_feature (498)..(515): n is a, c, g, or t
aacaaagcaaaaagcagctcttgcaaatttatgcaaataacgctcttgagttacctggaatacaatgtgcaatgatgatttttctcacctggaaaaaaaacccaagcgctctaaaggctgcgggaccgttactgaacccatgttacgatgaaaacgctgagcacttcaaggggaaaaaaattgtctgactttgttcctaggcgaggcggctttgcacaaggtggacattcccagggccacgtggtgccaggtggcggactggaaggtggcggagtggccagccaggaccggggcagcagagtccctcacnccacaccctcatnnnnnnnnnnnnnnnnacttcacccgccgctactaagtcccactcgctgtgagttttcgggtgggcagacgcactgttgaatctggtagccagggttccctcgaacttgggggatctttttaaaagcaaagtaaatcctgccaccatgttgtagctcaatacaatgtgaactcacnnnnnnnnnnnnnnnnnnaaataaatgtgttcttgttctgccatttttaaatcaaggtttctgttaacgaggcattccattttccattaataaagtttaccattcgcagtcttgcgtgcgcgtgcaaa

SEQ ID NO: 77265 - DNA, 691 bp, Homo Sapiens
aggcctcccaagctgatggacatgagagtagggccctgacaggccttcctcctctcaaacctggcagatggggcctctctggaagagggaggggccctgtcactgtccagagtctcttttaacacttcacctccttctgcagtcagactgaaatataaaaaaggtggtggtggtggtgaaggggctggtggagatgtaggaaccgatctgctatttttaatttcctgtgaggatagagacttgcagttagactcaaagaagtactgtactttcccaggttgactaagaaatgccagtggtggaggtgggtgtttgggaaaggcagggccctgaaatggcctgtccctagggctctccaagcactagccttcccagcttcccgccgccccccccatctcttcctgtctaacttggggaaggggcctgggctgtgaggacagggcccccacaggggatggtttcacgagtgtagtcccggaggccttccctttacagctctcctccagccctgggcacatagcataggctggggacacaggatcctggcctgagaattgaggggaggtggccagcccgcagaggtggggtgctggggctgcatgatttttgccctgcgtcccttctctttggggctcctttcccctctcatacataaaatcgctttcaaattaaaatcgctgttttctggaaa

SEQ ID NO: 77266 - DNA, 369 bp, Homo Sapiens
atatggatttcttatttcccccaggctaggggtccaatcagagctgtagccaccggcctatccagagccacagcaatgccagatctgagccacatctgcgacctacaccacagctcacatcaacactggatccttaacccactaagcaaggccagggatcgaacccacaacctcatggttcctagtcagattcgttaaccactgggccacaatggaaactcgggatgacttgttattttctaaaacacccacctccaccactggcatttcttagtcaacctgggaaagtacagtacttctttgagtctaactgcaagtctctatcctcacaggaaagaaaaaatacatatcgggtaccgagctgcgagt

SEQ ID NO: 77267 - DNA, 1068 bp, Homo Sapiens
  misc_feature (387)..(398): n is a, c, g, or t
  misc_feature (407)..(497): n is a, c, g, or t
ctatctttggcttcccaaacagtaactcactccaggccaagtgtgccttagccgaggtgaccacagtttaatagaccacacacatcgtttaacctgctcttggtcattggaaatttacactgaacaaagtgcaattaactgtagaacagttttatttttattaaaacttgactgaacaaaaggggaccatcaacattgtagacactggaggccttacagagtgctagcctcttccttcaggactcacctggggcctgctgcttttatattttgaaagagtttaagggctaataatttaatttgttgtttgttaaaaattaaaatctccgttctttccggctgcattgcttttgcatgttcacatatgatgtacttttatgatgtacnnnnnnnnnnnngagatggannnnnnnnnnnnnnnnnnnnnnnnnnnnnnnnnnnnnnnnnnnnnnnnnnnnnnnnnnnnnnnnnnnnnnnnnnnnnnnnnnnnnnnnnnnctgagtaactgggattacagtcgtgtgccaccacgctcagccctgagttagtttctagtatttttttctgactttcactctaaggatagcgttgaaaaaagaatgcacgtgtgagttactaaaaagttagaataatgtgcatgggaacagtgcagcaacatgctagaaaatcctcactgcactccagcagaggctagaggaatgccagtgttaccttacgcttctagaagcagagccactccagccagaacccattttgcagtcttctcttcgctcttcagcctgaaggtccagatgtagctggggcctctcagtttggttctatacacagggcactcgtaggtctgtttggtttcttgtctgtccacgggggtggcttttgcaaagatgaccggcatagggcatgccagctccttgagacgggcttcaacaatggttcctgcttgggtgtcccagcgggcgcctatggcaaaaacacagcggttgcaattgtgtggcagcttgctactaatgataatgatcaagttgtttgatgcaataaacattcaacattctggttttgtcataaaaa

SEQ ID NO: 77268 - DNA, 2061 bp, Homo Sapiens
tcttgccagaacaaactgatcacaagaagacagcatatatcagaacgtcctgtaatcatttagttagaaactaactactaactagtctttggaattcgtgacctatggagacagtaattatcaatttattgattctattgatttctcaaattaggaattaacttatgtggattttgcttcctcgttgtattctgattgcccttcatcccaagtgtttactgaaaattccattctagatattcttgttttgacaaatgacactacagtctcgtaatattgtcttttatgtatatacaaaatttacctttttactagcatctgagatagagttactttctggtacccagtatattggagtctgtcagaaactctataataggccaccagtttttattatttaacatttttatttgaatttctaagaagcctattctctatctattttgaaagattttggcactatatttaattggaaggtaaaatattgtacatgtgatccagagtaaatgagaagtctctatctgagctggtcagttactggagtacatgttactaatctgggtttaaagtttacttcattatctgctagtgtcatccacagcagttcatcctcatccacactaagccatcctgttagcttttaaaggaagttaatttaattaacattaatatactctatgggctccctctcccacctgtctgcatagaaaggcagaattagacatagcatgctttggaaaagcaaataggaattgttgggaatgatttaatcttgttgttgtagttgtgtgttgtcacttgtggttctacattcctggtgaatgatgaatgttgctgtcaaagggctgccccctaccttataagggttgctgggcatttgaaggcaggaagatttttaaagatagattgaggttggtttaaaattattcctgtaaaccaacaataaagcaaagaagaggttcatttttgtaaataacactggtttcaaatagtgatgttagacttaacctaatttataaacaagagattaatatctccatgcatagttttagacaaaaaaagatgtttcaataaaattactgtcttgtaatataaatgttgtccacttcccttttccacaggcctagaacagttaaagggaacataatttgtttaggctcccacataaatgtgaatctggccaacaactttggttcatcctttagtgaattagaggatttggctaccctgagtatatttatattcatttcttctgttctccttctgttattatacttaatcttctaaactaaactaatgtgaacagtagggaagcaagggcccaaatgcataagtttctttgcactgttgcacttacttaatacaaataaatgttttttaaagcttttgtagtatgtttttatgagttaacatcctaatgtggtaggtattaggtaatgtgctgtcatgagaaaaattgagacttccaagaaaactggacaccaggtgagggttggtttggagacggaataggtgtagctgcctttccttgaaaaacagtgtgtagagatggctgagtgcaatggctcacacttgtaaccccaacacttgggaaggctgagccggaaggatcagtatatcggtacgtctgagcccaagagttcaagatcagcctgggcagtatagcaagaccccatctccattttttgtttaatgattttttaattaaaaaaaagaacaacaggatagagctgttggggtggcacagtggcccaaagagcagcttcagagataattccttggttctatgatccctgtttaactccaaattacagtcggacttggatacatcatttgtaacattgtaggaaagaaaaaagtcttggttgtgaaaaacgatttgcatttgggtaaaataaagtgaccatgcttttgttctgtaatactgtgtgacctgtggttgttgtaatggtgatcatggagagcaaatatgaacttggcctggattttaaatggcctagaatttgtggtagttgccaaagaggttctcctaggtggtcttaataaacctattcacagaaa

SEQ ID NO: 77269 - DNA, 953 bp, Homo Sapiens
  misc_feature (884)..(884): n is a, c, g, or t
taaatcacaagtagattgccagcgtaatggagaggaaaccagattggatatggactcttttttatgcctattctggtgttgcgtttgtatatccaaatggacgttatcctctcagattcttatctggcactaatttataactattatattatcagagactatgtagcaatatatcagtgcacaggcgcatcccaggcctgtacagatgtatgtctacacgtaagtataaatgaatttgcataccaggttttacacttgcatctctaatagagattaaaaacaacaaattggcctcttcctaagtatattaatatcatttatccttacattttatgcctccccctaaattaatgactgagttggtggaaagcggctaggttttattcatactgttttttgttctcaacttcaaaagtaatctacctctgaaaaatttgtagtttaatatttgtttggtgaatttgtgccactttaatccttccactatcattcccattttgttacatttctgttatggggactttatgttgaaatattgtataaagcatttgtagcaatttaaaaataaaatatttaaaattatttaaattgttttggacgcttcaattgtattatatgtgatttacatttcactttttttgttggcgttgttaacccggagagtgctcctgtattgaactttgctgttagttattttattgcttctttttggagagtgctataaaagactattctaatgaaaacattaaaatttacaatttgacatacaaaaaggggttgtccattgattttaaccaatatagcactgagagagagagaggttaattatagatagacaagagtggtgtttgttgtttttcccctcccagcattgaaatcattgnggcttgtcagatgtattaaaaaaagatttgttgtgctattgctgcaaacacttaataactagaggagaa

SEQ ID NO: 77270 - DNA, 1468 bp, Homo Sapiens
gttaacatgaactctgagagatctagcattgaagaaaataccgcacatcataggaaagcttattttctgcatggtgtcttttcaaagatagaatatttgaagcatgttttctagcgattgtgtgaatgagggtgagctggctgaggcatcgctcaagctggggggtggtgtgtaagaagcacgtggagccacaagaggcacctcctatagtcagctaagggcttccctttctgcgcccagcttttgggtgaagggtgatttctactagacacatctgtgcttcagtcatagatgttaatagaggaagcagttttcctgctgcagattcctgaatagagttgctgaaagagtctacttctggactcaggggaagttgaaggccagtctgtgtagaaaggctgaggcaacggggaaagacctgacagctagttacatacgctctgacatagtactcccatgatggcttccagtgacacatgtgctgatagaattctaaacctctggaatttccctgctggcgacttctatggccgttgactgtacagggtaacctgatgccagatgctatgggcgtgatgagaactagagcattgcagcatggaggaaactgtgaggcaccagatcctgtgcttctgcaggccattttctgaaaacccctgttaggaaggttggatttggcgtgacttgcttgagcaagagtcctggggagagattttgaggtttaatttaacggtatatccagagctaacagtgactcaactcgtctagttctgcaagtcagatgtacacttagagtctctctgtgaagggtttgggtctgagctgtatagtatgtcaaactgccagtaagccagcccctcaccctctgatagatattcctttaatgcaccagacttcatgtttgataaatgattaatggttgaaattgtttctcttcttttgtgttttcccagttaatagatggtcactgtttccacaatgttttatactttcagctttttgtaacttaactataattacttaattttatttttttaaagcttgttgtggtctaatgagaagtatttttcagtgcataatgtttttctgagcttctgtaaatgccatcccaatgtggtttggttttgttgaacagaaaccaaaataaatttcaaaatgttaaagcaagaccaaccacctttccatccaccaaaccttgtcgggcccgcctcggcccctccaaaaactttctagacccatttcgttttggccgcgcgggccccattaggtaacctggaccttggcccttacctgttttcctagggagatccctggccttggccaaagggctttggatttctcccccactaaaaaaacgcccgggcggcaaaccgaggggtttcctgaacaattccccaaaaggggttttcgaagggccctttccggggcacttaccccaacgggaaatccaaatccgacctctaattat

SEQ ID NO: 77271 - DNA, 390 bp, Homo Sapiens
  misc_feature (91)..(133): n is a, c, g, or t
tcccaccctaaatgtatttgggccaaattggccaaagttgcccctgccagatagggcccgtgatactgtgttttggagcccacagaaggtnnnnnnnnnnnnnnnnnnnnnnnnnnnnnnnnnnnnnnnnnnnctttttccctcctttcttatggggaatcctgtaatatgaggtagcttatcacgtcaattaattagggtgctggatggtagagaattttctcactcaactatctacacacagtaaatactgtttcttaggcaaaggtaacttttttatatagttgtaaaattccattatattccattgccaaagaaacattaagaactttgtatagctgtataaaaagcaactaattttttaaagaataaacattttaaagtcagcaa

SEQ ID NO: 77272 - DNA, 844 bp, Homo Sapiens
  misc_feature (57)..(107): n is a, c, g, or t
  misc_feature (184)..(195): n is a, c, g, or t
  misc_feature (368)..(390): n is a, c, g, or t
ttgacgaaataagctacctcatattacaggattccccaaaagaaaggaggaaaaagnnnnnnnnnnnnnnnnnnnnnnnnnnnnnnnnnnnnnnnnnnnnnnnnnnnaccttctgtggctcaaaacacagtatcacggccctatctgcaggcaacttgcaattgccaaatacaatttagtgatnnnnnnnnnnnncctttcagtgatgaaaaaatacttgttaagtcccactgaagtactgctttagtttaactatacataagaaattacttaaccttctgctattccaaatatatttaatgctcatgttttaagatgagccttccacccccaaaagtaactgcattttatctttgaaattaagcggnnnnnnnnnnnnnnnnnnnnnnnccagtgctggtgacaaatgtacagcgaattcacttcttcattctttgcaaagactgaaatcaatgttcaggaccatgaagagctagaaattcacctattttcagagacttgtttgtagactatgcagcaactttgttgtctttctttcagaaagcagtacgatcaatccagaccttttagggtccaaaagctgtggttttcctatattcaaaatccgcaaactcccggcccccacgacctcctctgaatccaccgcgaaatcctcgaggggcagtgaaggtaccacctctgccaccaccacgccctctgccaccacggaaaccaagacctcctctgcctctgtatcccccacggccacggtttggacgaagtgggattccaaatgtttcagcatttaatcttctttcttcagcccaggttgtctccgttctctatgtcatcacaagaaatattg

SEQ ID NO: 77273 - DNA, 722 bp, Homo Sapiens
caagtgccctgtgcgctttgtacatttattggtgttggcgccaaccacacacctttggcctgcatcgctgacctgggccgtcagagcttccagtgcgcagccttctggtgccagccccatgcagggggactctctgaagctgtgcaggctgcctgtatggttcagtaccagaagtgtcttgtggcctctgcagctcgaggcaaggcctggggtgcccaggcccgtgcccgcctgcggctcaagcggaccagctccatggattccccaggaggtcccctgcccctccccctgctcaaaggaggggttggcggtgcaggggcaacccctcgaaagcggggtgtcttctcttttcttgatgccttccggctgaaaccctctctgctccatatgccctaaacttatctgggaaggctggggaagtaggctctgggtccatgcctaactctgtaccgttttattcctcaaggcctatagcctgtcactccttgaagccttctctgcctgtccctccgatccttgtccaccgtctatttattgcccaatttattgtttatacggatgactgggaggcactgcaccacaacgtaggaccctggctcccctttccttgggtccttgtgttccttgcccctgtccaaccctggacagttggctctacctcagtaacactttatagcaaaatcagtgcaaataaaaatccctcagtgacctcaaataaaaaa

SEQ ID NO: 77274 - DNA, 757 bp, Homo Sapiens
agttgtggagtggcgtggacgacttaagtcctggtctgcgtggaggtcgacgactccgtcgcagactacggacctgtctgggtctcagccgccaaagaccccgtccggtaggaagtactagccggacatcatgagtggctgtcgggtattcatcgggagactaaatccagcggccagggagaaggacgtggaaagattcttcaagggatatggacggataagagatattgatctgaaaagaggctttggttttgtggaatttgaggatccaagggatgcagatgatgctgtgtatgagcttgatggaaaagaactctgtagtgaaagggttactattgaacatgctagggctcggtcacgaggtggaagaggtagaggacgatactctgaccgttttagtagtcgcagacctcgaaatgatagacgaaatgctccacctgtaagaacagaaaatcgtcttatagttgagaatttatcctcaagagtcagctggcaggtttgttgaaatacagttttgagttattttgatgtggctttttaaaaaagttaatgggtagctaatgttgtattgttttattaaaagtagttttaaattaatggatttaatggaattgtaattttaaacatttaattaaatgtaatttgggggatattttgaactttaatattagtgatcaaatgtaaatgttttgaggatatttttcttgttttttaaaatcaatttttaaccaaatattaaaccctttatttgccagcc

SEQ ID NO: 77275 - DNA, 802 bp, Homo Sapiens
cagtcgacggtaccggacatatgcccgggaattcggccattacggccgggggtggagcgccaaagctgcgaagtgcgtcagttgtggagtggcgtagacgagttaagtcctggtctgcgtggaggtcgacgactccgtcgcagactacggacctgtctgggtctcagccgccaaagaccccgtccggtaggaagtactagccggacatcatgagtggctgtcgggtattcatcgggagactaaatccagcggccaggagaaggacgtggaaagattcttcaagggatatggacggataagagatattgatctgaaaagaggctttggttttgtggaatttgaggatccaagggatgcagatgatgctgtgtatgagcttgatggaaaagaactctgtagtgaaagggttactattgaacatgctagggctcggtcacgaggtggaagaggtagaggacgatactctgaccgttttagtagtcgcagacctcgaaatgatagacgaaatgctccacctgtaagaacagaaaatcgtcttatagttgagaatttatcctcaagagtcagctggcaggatctcaaagatttcatgagacaagctggggaagtaacgtttgcggatgcacaccgacctaaattaaatgaaggggtggttgagtttgcctcttatggtgacttaaagaatgctattgaaaaactttctcggaacaggaacatacactgggagcaaacactacaaattaactcgacaggcagcaaaaggcacagtaggtcacgaagcaggtctcgatcccggaccaga

SEQ ID NO: 77276 - DNA, 1040 bp, Homo Sapiens
  misc_feature (78)..(112): n is a, c, g, or t
  misc_feature (803)..(829): n is a, c, g, or t
aaccttgatatacatatagggcgctagctcgccgcagcgaacgacgagcgcagcgagcagtgagcgaggaagcggcgnnnnnnnnnnnnnnnnnnnnnnnnnnnnnnnnnnncagtcgacggtaccggacatatgcccgggaattcggccattacggccgggggccctccattttgtggagcgccagagctgctaagtgcgtcagttgtggagtggcgtagacgagttaagtcctggtctgcgtggaggtcgacgactccgtcgcagactacggacctgtctgggtctcagccgccaaagaccccgtccggtaggaagtactagccggacatcatgagtggctgtcgggtattcatcgggagactaaatccagcggccagggagaaggacgtggaaagattcttcaagggatatggacggataagagatattgatctgaaaagaggctttggttttgtggaatttgaggatccaagggatgcagatgatgctgtgtatgagcttgatggaaaagaactctgtagtgaaagggttactattgaacatgctagggctcggtcacgaggtggaagaggtagaggacgatactctgaccgttttagtagtcgcagacctcgaaatgatagacgaaatgctccacctgtaagaacagaaaatcgtcttatagttgagaatttatcctcaagagtcagctggcaggatctcaaagatttcatgagacaagctggggaagtaacgtttgcggatgcacaccgacctaaattaaatgaaggggtggttgagtttgcctcttatggtgactnnnnnnnnnnnnnnnnnnnnnnnnnnngaaaggaaataaatgggagaaaaataaaatttatttgaaggcagccaaaaggacagtaggtcaagaagcagggtctcgatcccgggaccagaagtccttctaggtcctcgtagcccgatcccggttcccgtaagtcgcaaatctttcaggcgggtccaagaaagcaggaccaggagcccgaagcccggagcaagtcccgtttttgttttgt

SEQ ID NO: 77277 - DNA, 909 bp, Homo Sapiens
cagtcgacggtaccggacatatgcccgggaattcggccattacggccgggggagttgtggagtggcgtagacgagttaagtcctggtctgcgtggaggtcgacgactccgtcgcagactacggacctgtctgggtctcagccgccaaagaccccgtccggtaggtgagtggctcactttgagggcaagccttctcggatcgaggcttcttcatggccgctcagatcgtgagcggccggggctgctctctttgcggaggatggcgtctaatgagcgcagttgattcgaggaagtactagccggacatcatgagtggctgtcgggtattcatcgggagactaaatccagcggccagggagaaggacgtggaaagattcttcaagggatatggacggataagagatattgatctgaaaagaggcttgggttttgtggaatttgaggatccaagggatgcagatgatgctgtgtatgagcttgatggaaaagaactctgtagtgaaagggttactattgaacatgctagggctcggtcacgaggtggaagaggtagaggacgatactctgaccgttttagtagtcgcagacctcgaaatgatagacgaaatgctccacctgtaagaacagaaaatcgtcttatagttgagaatttatcctcaagagtcagttggcaggatctcaaagatttcatgagacaagctggggaagtaacgtttgcggatgcacaccgacctaaattaaatgaaggggtggttgagtttgcctcttatggtgacttaaagaatgctattgaaaaaactttctggaaaggaaataaatgggagaaaattacattcttgaaggccgcaaaggcacagtaggtcagaagcagttcgatccggacagagtctctagttcgtaccgatccgtc

SEQ ID NO: 77278 - DNA, 2469 bp, Homo Sapiens
  misc_feature (1022)..(1042): n is a, c, g, or t
  misc_feature (1665)..(1707): n is a, c, g, or t
  misc_feature (1814)..(1885): n is a, c, g, or t
  misc_feature (2040)..(2040): n is a, c, g, or t
  misc_feature (2423)..(2423): n is a, c, g, or t
  misc_feature (2427)..(2427): n is a, c, g, or t
aaaaccataacgctaggtacgaaggcctggtgtgtgaatcggcacgagggtggcgtaacgagttaagtcctggtctgcgtggaggtcgacgactccgtcgcagactacggacctgtctgggtctcagccgccaaagaccccgtccggtaggaagtactagccggacatcatgagtggctgtcgggtattcatcgggagactaaatccagcggccagggagaaggacgtggaaagattcttcaagggatatggacggataagagatattgatctgaaaagaggctttggttttgtggaatttgaggatccaagggatgcagatgatgctgtgtatgagcttgatggaaaagaactctgtagtgaaagggttactattgaacatgctagggctcggtcacgaggtggaagaggtagaggacgatactctgaccgttttagtagtcgcagacctcgaaatgatagacgaaatgctccacctgtaagaacagaaaatcgtcttatagttgagaatttatcctcaagagtcagctggcaggatctcaaagatttcatgagacaagctggggaagtaacgtttgcggatgcacaccgacctaaattaaatgaaggggtggttgagtttgcctcttatggtgacttaaagaatgctattgaaaaactttctggaaaggaaataaatgggagaaaaataaaattaattgaaggcagcaaaaggcacagtaggtcaagaagcaggtctcgatcccggaccagaagttcctctaggtctcgtagccgatcccgttcccgtagtcgcaaatcttacagccggtcaagaagcaggagcaggagccggagccggagcaagtcccgttctgttagtaggtctcccgtgcctgagaagagccagaaacgtggttcttcaagtagatctaagtctccagcatctgtggatcgccagaggtcccggtcccgatcaaggtccagatcagttgacagtggcaattaaactgtaaataacttgccctgggggcctttttttnnnnnnnnnnnnnnnnnnnnnttcccaaaccatacttgctaaaaattctggtaagtatgtgcttttctgtgggggtgggatttggaaggggggttgggttgggctggatatctttgtagatgtggaccaccaaggggttgttgaaaactaattgtattaaatgtcttttgataagccttctgctcacatttttgtgaatgtctgaagtatatagtttgtgtatattgacagagctcttttataactaaagcaaatttaatttttttgtactagaaaaaaatttgaacattttagttcttggttataaaaatgttaattcagaattagtttaatgccttaattaaactaattaatagctttggacacttaaaagagctctaaatttgcttgtacataaaggcttaatttgttttccttgttagggtcaagggtgtcctccactctttaacagctgctggacagacacattagagcagctgtttgttattgataataaaatattatacacctaggaaaaaaaacaaacaaacgcatcaaaccacaaaataaacccgtccaccatccgcatcccgcaaacactccttcacacccacgcattccggcctctgataccctattcgcgccacgcgaccccagcccgtacnnnnnnnnnnnnnnnnnnnnnnnnnnnnnnnnnnnnnnnnnnntcggcttccctatcacaacccccccacgcccctccgcttcttcccctctccgcgaccatctccccgtccttgccatacccaccgcagcttgcccgcgcgcgttatgnnnnnnnnnnnnnnnnnnnnnnnnnnnnnnnnnnnnnnnnnnnnnnnnnnnnnnnnnnnnnnnnnnnnnnnnttgacgaatttccccgaccgctccccccctcgcgccctattctctcctgtctcgtattgcgcatacccgttttccgctacgacctcgccgcgcccgccccacattccctattctcccgccgcgttcggtttatcgccctttccatccccgttaantccctgcccgcgcgcccgccctcttgtttgaccgccgcgccctccaccgccttatccgcgcccgccctattcatcacccatttataccctcatgccacgctgttcgtaccgcgcgcatcctctttatctccccctatccccaccccttctctttgtcccgccctacatgtgccaccaatctcaccttcctctggctgtcccgcccctatataaaccactctgccaagcgctctcgtttcccgcttacgcggcgttattccataccgccacgcggcgctatgtctccgcctatatttacctatttaccgcttcacctctgttgatacgccccgtgtcgtgcgccggatatcccaccccgtactctaaccgccccgcctccctgnctancgcccgcatatttttcccctctttccgccgccctgttgtccc

SEQ ID NO: 77279 - DNA, 708 bp, Homo Sapiens
  misc_feature (444)..(490): n is a, c, g, or t
ctcatgtatttctagtgagtaaggaaaagaacgcaaacacttttgaaaattgtttggttgtttcttgtaaatttaaacaaataccctattatattatccagcgagtccatccttaggtttttatccaaggataaagaggtgaaaactcatatctaacaaatagacttctgaaaagatgaaaatagaagctttattcataaaagacaaaaactggaaataacccaaatattcattcacaggagaatgaataaacagactaggttgaatccatacaatggaatggtagcagacaataaaaagaaaatgaactattgatgccccctactgcacagcagaagctctgaatcgtgttcctgaatgaaagaagtcaggtatgaaagaataaacattgtatgattccatttatatgaaaatgaatctgtgatttaaaaatcagactagtannnnnnnnnnnnnnnnnnnnnnnnnnnnnnnnnnnnnnnnnnnnnnnaatagttgctttggggtttatggatggagtggcatggtagaggttagctgaagggggcatgaaataactttttgggggtgctagagtgttgtaaatcttacagtgggggagggacaggagtgcaggcatttgacaaaacacattgaattgtgaaatttaagatttttgaatttctttgtatgtaaattacctgccaataaaaacatgacgaatagagc

SEQ ID NO: 77280 - DNA, 1212 bp, Homo Sapiens
  misc_feature (1061)..(1061): n is a, c, g, or t
  misc_feature (1063)..(1064): n is a, c, g, or t
  misc_feature (1077)..(1077): n is a, c, g, or t
attgggcgggagggaatgtctcagaccccgtttgggtttcatggggcccacgggtgttgtctcctaggggagaggcaaaccttatgggcgcccagtgttgccaactttatccttacagagggacccggcggcggcccaaaacgaaatgggtttaggaaaaggttccttcgaggggccgtaggcgcgcccgacaagatttagagcctctcggtcccggttattttaataggctcaactcgaagactttaatgtacattatgctcttggaaaaacatctccaaggaaacaagtggaagcaaaagtctcaaccagcagggattctcattcaaaaacatggtgtgagccccagtcttggaaaaggatggcacagggactgtgatcatagtacaacagtttgatgtcagggtggcagggcctgtgtacttgtctagagaggaaccctgccacacagcacgaaggactcccgaggaaccaggagctcattactccggtgactgacagctccacagcgggactgggaagatttaggctgaccaggtcttcttcagcacttggaaggcacaaaacttcgtaaaggccttaagaagcctgctctgggcagaaacctttctggttgttgttgactctccaggtcatcagaaacagtcacggtggctctggtggaggaaggggagggtcccacttctgggtgaggcctcggaatggaacaggtgggaggtgacagcaccagcaaggcctctgaggccagggtccacacccaccttggggagatgacccactgggcctctggacaggagaatgggatttcgatggagaaagctgaagctgaccacctgctagattgaatccagctgcctcccttgaaactctcttcccaatcaagggctcccaaggagctgcaggccaagtcctctgctcctatttagcaagaggcaggcggcaattcgggctgatctcccatcaccctcatttaacgcataaaagtcacaacaacttctcagaccctgggcatcaagggtcctgtttctagctctagggaaacatcagtctttctgactttngnntcatctccatcanagataggtgcgtgtagaattctcaagacgttgtgttaaacggttaataacaagtaacaagctgtagggaacaaagtctcagaggtacccttgagaaaaattaataaagattgcacttaacggaatctctgagcaa

SEQ ID NO: 77281 - DNA, 2040 bp, Homo Sapiens
  misc_feature (1830)..(1831): n is a, c, g, or t
  misc_feature (1906)..(1906): n is a, c, g, or t
  misc_feature (2001)..(2001): n is a, c, g, or t
ccccaccccccacccacctatctgctaggtacgaggcctgggttggaattcggcacgaggcgtggggcgaggcgctgttcatcaaagaaaaagggttcttttggtcacccaccactggccccatggctgccgtgcagatggatcctgagctagccaagcgcctcttctttgaaggggccactgtggtcatcctgaacatgcccaagggaacagagtttgggattgactataactcctgggaggtcgggcccaagttccggggcgtgaagatgatccctccaggcatccacttcctccactacagctctgtggacaaggctaatccgaaggaagtaggccctcgtatgggtttcttccttagcctgcaccagcgggggctgacagtgctgcgctggagcacactcagggaagaggtagacctgtccccagccccagagtctgaggtggaggccatgagggccaacctccaggagctggaccagttcctggggccttacccatatgccaccctgaagaagtggatctcactcaccaacttcatcagcgaagccacagtggagaagctacagcccgagaatcgacagatctgtgccttttccgatgtgctacctgtgctctccatgaagcacaccaaggaccgcgtggggcagaatctaccccgctgtggcattgagtgcaaaagctaccaagagggcctggcccggctaccagagatgaagcccagagccgggacagagatccgcttctcagagctgcccacgcagatgttcccagagggtgccacgccagctgagataaccaagcacagcatggacctgagctatgccctggagactgtgctcaacaagcagttccccagcagcccccaggatgtgcttggtgaactccagtttgcttttgtgtgcttcctgctggggaatgtgtacgaggcatttgagcattggaagcggctcctgaacctcctgtgccggtcagaagcagccatgatgaagcaccacaccctctacatcaacctcatctccatcctgtaccaccagcttggtgagatccccgctgacttcttcgtagacattgtctcccaagacaacttcctcaccagcaccttacaggttttcttttcctctgcctgcagcattgccgtggatgccaccctgagaaagaaagctgaaaagttccaagctcacctgaccaagaagttccggtgggactttgctgcggaacctgaggactgtgccccggtggtggtggagctccctgagggcatcgagatgggctaactcggggagcgctctcagctgcgaggggccccttcccacagggctgcagtcctgagcctctccatttacttcttcccatcctgggacctgccagggcagcaatctctccaggtcctgcaaagatgggagccagaaattccctttttcactgataaatatatttcttcattgccaaagaggctgtacccatcctgaaggcacatttgtgggttccccatcagccaggccttggtgctaacctggctgaatttcacacaggctcttacacacacacgctcctaggagacatctgcctacacggcaaccatatttcctctgaatgagaaggaattgaaccaaaagtccaagaaagaactgattgcttgttccataggagcttaggaaacaagaaaccctggattgcccagggggtctgagaagttggttggtgactttttttgcggttaaatgaagggtgatggggagatcagcccgaattgccgcctgcctcttgctaaataggagcagaggacttggcctgcagctccttgggagcccttgattgggaagaganngttcagggaggcagctggattcaatctagcaggtggtcagcttcagctttctccatcgaaatcccattctcctgntcagagggcccagtgggtcatctcccaaggtgggtgttggaccctggcctcagaagcctttgctggtgctgtcaccctcccaccctgttccattnccgaggcctccaccccagaagtggggacccctccccttt

SEQ ID NO: 77282 - DNA, 744 bp, Homo Sapiens
  misc_feature (20)..(20): n is a, c, g, or t
tgctgtgtgctgtagtgccnccgtccctgggctaaagccagacccattcttaacagggagttgtatcatgaattttccaggttgctcctgcacccgtggcactggaaacccagctccccgtgtcagaccccgctgtcttcctgagccctggggctcactgtggaggagctgacggcctgggcccttggccagtcctggctcttccctgggcctcaccagggacactcttgaatgtatggcctcaggcgctccctagagggggcctaaaccccctcacctgtgagctaccccctttagggatcccttgcccccttggagatcccttgccccccagtgcctctgctcgtgggtccctggacacggccttgaagccaaccttctttggaggagcaacagcagcagccttggccgacgcgtccaactcccaaggctgccgtggagggcaggggggtggtgcttgcctggatgtggccccgagtgcctcccctccctccctctgtgggggagtctcccgcctgaacctgaagatggagcagggcccccgcttcgccctggagcctcttcctgtgcctggctcaagctggctgcctgtcagtcttggggaatctggcccaggtctcctcagcctctgccccagttctgggagaagtttctactggtgtatattttttactggaaatgagccttttaggaatgaatgtagactggtttgtattaaaatgtgtcaattgctaagaaaaaaaa

SEQ ID NO: 77283 - DNA, 656 bp, Homo Sapiens
  misc_feature (17)..(17): n is a, c, g, or t
atggacatgatcagtgntaaggaaagcagcagagagagacgctccggcgccccagccccactatcagtgtccagcgtgctggttccccagagcacagctcagcatcacactgacactcaccctgccctgcccctggccagagggtactgccgacggcactttgcactctgatgacctcaaagcactttcatggctgccctctggcagggcagggtagggcagtgacactgtaggagcatagcaagccaggagatggggtgaagggacacagtcttgagctgtccacatgcatgtgactcctcaaacctcttccagatttctctaagaatagcacccccttccccattgccccagcttagcctcttctcccaggggagctactcaggactcacgtagcattaaatcagctgtgaatcgtcagggggtgtctgctagcctcaacctcctggggcaggggacgccgagactccgtgggagaagctcattcccacatcttgccaagacagcctttgtccagctgtccacattgagtcagactgctcccggggagagagccccggcccccagcacataaagaactgcagccttggtactgcagagtctgggttgtagagaactctttgtaagcaataaagtttggggtgatgacaaatgtt

SEQ ID NO: 77284 - DNA, 1218 bp, Homo Sapiens
agatagggctccgattattcaaggatgttcctgatagccggattttggtgtgtggtggagacggcacagtaggctggattctagagaccattgacaaagctaacttgccagttttgcctcctgttgctgtgttgcccctgggtactggaaatgatctggctcgatgcctaagatggggaggagggtatgaaggacagaatctggcaaagatcctcaaggatttagagatgagtaaagtggtacatatggatcgatggtctgtggaggtgatacctcaacaaactgaagaaaaaagtgacccagtcccctttcaaatcatcaataactacttctctattggcgtggatgcctctattgctcatcgattccacatcatgcgagagaaatatccggagaagtcaaacagcagaatgaagaacaagctatggtacttcgaatttgccacatctgaatccatcttctcaacatgcaaaaagctggaggagtctttgacaggtgagatctgtgggaaaccgctggatctgagcaacctgtccctagaaggcatcgcagtgctaaacatccctagcatgcatggtggctccaacctctggggtgataccaggagaccccatggggatatctatgggatcaaccaggccttaggtgctacagctaaagtcatcaccgaccctgatatcctgaaaacctgtgtaccagacctaagtgacaagagactggaagtggttgggctggagggtgcaattgagatgggccaaatctataccaagctcaagaatgctggacgtcggctggccaagtgctctgagatcaccttccacaccacaaaaacccttcccatgcaaattgacggagaaccctggatgcagacgccctgtacaatcaagatcacccacaagaaccagatgcccatgctcatgggcccacccccccgctccaccaatttctttggcttcttgagctaagggggacacccttggcctccaagccagccttgaacccacctccctgtccctggactctactcccgaggctctgtacattgctgccacatactcctgccagcttgggggagtgttccttcaccctcacagtatttattatcctgcaccacctcactgttccccatgcgcacacacatacacacaccccaaaacacatacattgaaagtgcctcatctgaataaaatgacttgtgtttcccctttgggatctgct

SEQ ID NO: 77285 - DNA, 1752 bp, Homo Sapiens
  misc_feature (1461)..(1472): n is a, c, g, or t
  misc_feature (1517)..(1534): n is a, c, g, or t
  misc_feature (1543)..(1581): n is a, c, g, or t
  misc_feature (1628)..(1700): n is a, c, g, or t
tacggcctagtacgggctgggtggctgaatcggcacgaggcctcaatctgccccctccaattggcggtgccggtcccccgctggggcttcccaagccaaagaagaggaaagagcccgtgaagatcgcggcgccggagttgcataagggagattcagattctgaggaagatgaacccacaaagaagaaaactatccttcagggatccagtgaggggactggtttgtctgccttgcttccccaacctaaaaacctgactgtgaaagagactaacaggttgctcctgccccatgccttctcccgcaaaccctcggatggctcccctgatactaagccctccagactggcttctaagaccaagacttcctctcttgcccctgttgtgggcaccacaaccaccactccgtcgccctctgctatcaaggctgctgccaagagtgctgccctgcaggtgacaaagcagatcacgcaggaagaagacgacagtgatgaggaagtagcccccgaaaactttttctccctccctgaaaaggctgagccacctggagttgagccatacccttaccccatccccactgtccctgaagagctgcctccaggcacggaaccagagccggctttccaggacgatgcagccaatgccccccttgaattcaaatggcagcaggttcaagtggggcccccttggatgcctaagcctggggacaactacagctacaatcagttttccacatatggcgatgccaatgccgctggtgcttattatcaggattattacagtggtggctactatcctgcacaggacccggccctggtccccccccaggaaattgccccagatgcctccttcatcgatgacgaagcatttaagcggctgcagggcaagaggaaccgagggagagaagaaatcaactttgtggagatcaaaggtgatgaccagctcagtggggcccagcaatggatgactaagtcattgacagaagagaaaaccatgaagtcattcagcaaaaagaaaggtgagcagccaacaggccagcagcggcggaaacaccagatcacatatcttattcatcaggccaaggagcgggagctggaactgaagaacacctggtcagagaacaagctcagccgccgtcagacccaagccaaatatggattctagggctctggaactgattgctcccaggatctcctgccagcccagctggcctggcccccagcttcacctctgggaccccagctgctctaagcccaggatctctttccccaaggacccagccctcgcctctgcgagaatgaacatatttgatagatttttcttaacaagttagaaaattcagctcctttctgtcctggagctagcaaagacttgtgtgatgcctccgaaggggctctgagttctggggtgggagttttgctctctgtcaggtgtgataaaatgttgaaccctccccaccaccacnnnnnnnnnnnnaaaccagggatgtctgttgaaataaaacattcagtctgacaaacnnnnnnnnnnnnnnnnnnctcgaggcnnnnnnnnnnnnnnnnnnnnnnnnnnnnnnnnnnnnnnncatggtcatagctgtttcctgacccagctttcttgtacaaagtggtnnnnnnnnnnnnnnnnnnnnnnnnnnnnnnnnnnnnnnnnnnnnnnnnnnnnnnnnnnnnnnnnnnnnnnnnntgcagtacccgggaatttaacccgcctaatgagcgggcttttttttgtgatc

SEQ ID NO: 77286 - DNA, 746 bp, Homo Sapiens
gcagtaactataacggtcataaggtagcgaggcctgggtggcggttgcccgggactaggagcttaagtgaagaggtacgccttgttcggtggaaatcagccgtagccatgagtttctgccggggctagccctagagtacggagcaggcggacttttcggttccccgccccgccaggtggcggggcctactaggcctccgggcatccccggtctcaagtaggcctcatctgccggcaagggcgcccgaaacgcgggaggcgccatgtcgctggttgcttacgccagcagcgatgagagcgagccggatgaggctgagcccgagccggaggaagaggaggcggtggctcctacatctgggcccgctttagggggcttgttcgcttctctccctgcgcccaagggtccggccttgctgcctccgccccctcagatgctggcgccagcctttcccccgccgctgttgcttcccccacccaccggagaccccaggcttcagcctcctccccccttgcccttcggcctgggaggcttccccccacctccaggcgtgagcccggctgaagcggcgggagttggggagggactgggattggggttgccctcgccccgaggccctggcctcaatctgccccctccaattggcggtgccggtcccccgctggggctttccaagccaaagaagaggaaagagcccgtgaagatcgcggcgccggagttgcataagggagattcagattctgaggaag

SEQ ID NO: 77287 - DNA, 1079 bp, Homo Sapiens
ggtccggaattcccgggatatcgtcgacccacgcgtccgcttgaatctgcagaaagcagctccgagccccagaccagctctcaggatgactttgatgtgtactctggcacacccaccaaggtgagacacatggacagtcaagtggaggatgagtttgatttggaagcttgtttaactgaacccttgagagacttctcagccatgagctaactgccccctggcggccaggaagagaaacagctcctccccgactaggtgaaggctggccaggcaccaagcatgtgtgtgcacttgtacctggtggtttctctgttagcagtccattagctcatgctgaattatttttgccttactttcttaagaaacattaattttatgtatagtgagtatattttgcatgttttaaattgtaaatggagctaagtccaagaaagtacttgaagctctcttccagcgagcttaattgcgtaatccctgttgtcctccagggtaagctgacacgtctacataactggttttccacaggcatcttcagttattgcttgtcaggtggactgttttggatttaaccatgtaatccatgggaccaattgagagtcagctacttttataggcatcaaagtattctcagacacctttaatatctttatggaaacttaatttttggccttttatcaatatgtcataacagcattctgaagtcagacattgttaaattgagctattaaactaatgagttttatgtaagttatatggtcttaatttggtacttgtaaatagcactagttagactctttagaatactccaagagttagggcagcagagtggagcgatttagaaagaacattttaaaacaatcagttaatttaccatgtaaaattgctgtaaatgataatgtgtacagattttctgttcaaatattcaattgtaaacttcttgttaagactgttacgtttctattgcttttgtatgggatattgcaaaaataaaaaggaaagaaccctctttcactgactggggctgttgccaggtgggccagctgccgtgagagctgacatgtttgggagggtcagaaaaa

SEQ ID NO: 77288 - DNA, 1127 bp, Homo Sapiens
ggaccggtccggaattcccgggatatcgtcgacccacgcgtccgcgcgggtttctgcctcaggccctgccctgctctactctgcgctctctgcccgcgccgccgccgcctcagcctcggccctgcgctgcgcgcccggcccgtgctgccatggcctgccgcccgcgaagcccgccgaggcatcagagccgctgcgacggtgacgccagcccgccgtcccccgcgcgatggagcctgggacggaagcgcagagccgacggcaggcgctggaggcccgaagacgccgaggaggcagagcaccgcggcgccgagcgcagacccgagagctttaccactcctgaaggccctaaaccccgttccagatgctctgactgggcaagtgcagttgaagaagatgaaatgaggaccagagttaacaaagaaatggcaagatataaaaggaaactcctcatcaatgactttggaagagagagaaaatcatcatcaggaagttctgattcaaaggagtctatgtctactgtgccggctgactttgagacagatgaaagtgtcctaatgaggagacagaagcagatcaactatgggaagaacacaattgcctacgatcgttatattaaagaagtcccaagacaccttcgacaacctggcattcatcccaagacccctaataaatttaagaagtatagtcgacgttcatgggaccagcaaatcaaactctggaaggtggctctgcatttttgggatcctccagcggaaagaaggatgtgatttgcaagaaatacaccctgtagaccttgaatctgcagaaaaggcagctccgagccccagaacagcttctcaggatgactttggatgtggactctggcacaccccacaaaagtgaagacacatgggacagtccaagtgggaggaggagtttggattttggaagcttggtttaactgaaacccttgaggagacttctcagccatgaaggctaactgcccccctggggcggccaggaaagaaaaaaaggcttccttcccccaactaagggggaaagcctggcccagccacccaggcatgtggtgtgcccctttggaccctgggggggtttttctggttagcagccccatttaacttcgtggc

SEQ ID NO: 77289 - DNA, 719 bp, Homo Sapiens
  misc_feature (14)..(14): n is a, c, g, or t
cagcaatggtgctnacaggcgaggtggtgtccccctttgtcctccgcccagggcagggaaagtgcttagtattagcgtgatgcttggggttattggagcctgagcttgacctcaaacgggtggcgatttgatgggtacccccaggctggggaaaatgacagcgcttctcctaatcagctcactggattccatcaccctgagcggtaaaccagatgggcgtcaccccaagttctgcagacacatacacaacccgtttgctgcagagccggacccagtggctacacccacagcggtctgtggtagagaactctcttccttctttccaccgacaggggcgagggctgcttcctcgcggcagcccccgcgaagaaatctcgagagaactggcatgaggagttaggttcatcacaaatacacacacactgcccccaaccctctgccgttgcctctctcagaaaaacaagacgtactgaatgaaatattttactaagcgttcagtctgtgcctcctgcatgggtgggagtgaggggaacgagacccccagcctctgcaaatgctacccccaggctcctgggagacctggcgatgcactcctgggctcagggcccatcaggcagcctcttaccctagagctctctccactctgaggttcagaaggaccccaacccacaccgtaggcgttccccccaagtaaagttaggtagcaaaagccaaaaaaa

SEQ ID NO: 77290 - DNA, 719 bp, Homo Sapiens
caaatgaggccccgagaggtcatgtaatcgccggaggtcaagcagcaggccccaggccagaattcaggtctcctgactccctggctagtgtttttttccacgtggaaaatcacactggcgcctttccaagctgacagccaactcctgatgaaggaggaggaaggacagcatgaagacaagaactcagctaacccgagtatgtcctctgagcaagtggcacttctcttggcttgagcagcagtaacttttacagcctctgatcatcctctggacatattggtaggatgatcaaaaaggagaagagtctgcaaagccagcttctccagtgatgaaggtatcactcagtaaacatccctcccaaactccttggggctgcattcccagagatcttaaatagggcagggcatgttctgagaaacatggctttgtgcccatcctgcaatatggagaatctggagagacacagatagacagaagcctaagaaagttccgcactggtttctttgctttctgaaaagggtctagaaagatccccaaacagtgtttcctcacactgcaaactgaaggttaatattttctacattctttatagtacaaggttcatgtatgaacctactaaataaaaatagatcctagataaaatgtacttactaggtcagccttttgatttccctaggtacagttagcctagatttaagtaataaactgtataaattgtc

SEQ ID NO: 77291 - DNA, 1003 bp, Homo Sapiens
ttacaaatgccagctctgctactatgagaccaagcacacggaggaactggacagccaccttcgggatgagcataaggtaagccgtaactttgagctggttggacgggttaacttggatcagctggaacagatgaaggagaaaatggagagctccagcagcgatgatgaggacaaggaagaagaaatgaacagcaaggctgaagacagagagctgatgagattttctgaccacggggctgctcttaacactgagaagcgttttccatgtgaattttgtggacgggcgttttcacagggctctgagtgggaaagacatgtgactgagacacggcatggcattgaatgacaccccaagcaggtgagcagagaagaaatcccaccccaaaagagatccatggagaaccagtgttaaaatgcccctcccatagaggaaaaggaagatgacgaggccattgggatagacttttcccctaaagaatgaaacagtagccatctgtgtagtaactgccgacaaatctctcctggagaatgcagaggccaaaaaagaatgagcgtttggtgaaattcttaatcaaaccttacttgaacagtgatgaaaaagtgggagggctggcttgggctgagaagggagggacagaaaagagaagacagaacaaagctgctttttaggactgaacaatctattttcaaagcactggtacctgtgtgagtgagtatgtaaattaaagttatttaaatggttggaatatgtggctccttttccatcactacatcttttcttccggatcttcatcatggaagtttcatttgttgcggaatatggaagcacctcccaatggtacggtgcaccctgtggtggtcttggacagtatgtggaaacagaagctccatgacggtagaagacttctcattggggagcaactttttgacgcacaacttttggtgcgtttttctagttttaataccttaagctttttcaagacctaactgcagccgctttggg

SEQ ID NO: 77292 - DNA, 712 bp, Homo Sapiens
gcattttgggctacaaagaacagtttctgcggctacgcaagtcatccgtgtgtcagaatggtcaagactatgttgtgaccaagcagccctccatctgcctctgttccctggaggactttctctgtgattttggctactaccgtccagaaaatgactccaagtgtgtgggaacagccagaactgaagggccacgacctgggagttttgtctgtacggaagagaaggaacaccttaacaacaaatggggtaccgggaaaattccagggggacaaatgccagggtggggtaaatcccagtccgagaagtaaaagacttgaaaaaagaaatgcacaagcaactttttgagtccggaaaaacagaattccaagtcaaattctgttccaattatcctggccatcgtgggattgatgctggtcacagtcgtagcaggagtgctcattgtgaagaaatatgtctgtgggggaaggttcctggtgcatcgatactctgtgctgcagcagcatgcagaggccaatggtgtggatggtgtggatgctttggacacagcctcccacactaataaaagtggttatcatgatgactcagatgaggacctcttggaatagctcttcagaggagctggacccagcatggatggtggaaccacagtacctcttacactccctgtggctccaacttcaggaaataaatttcccattgcgagggacccaaa

SEQ ID NO: 77293 - DNA, 962 bp, Homo Sapiens
  misc_feature (519)..(578): n is a, c, g, or t
cttttcaacgagaaggattggacgtcagagtatgtcagaaaaacgcacaaagcaattttcagatgccagtcaattggatttcgttaaaacacgaaaatcaaaaagcatggatttaggtatagctgacgagactaaactcaatacagtggatgaccagaaagcaggttctcccagcagagatgtgggtccttccctgggtctgaagaagtcaagctcgttggagagtctgcagaccgcagttgccgaggtgactttgaatggggatattcctttccatcgtccacggccgcggataatcagaggcaggggatgcaatgagagcttcagagctgccatcgacaaatcttatgataaacccgcggtagatgatgatgatgaaggcatggagaccttggaagaagacacagaagaaagttcaagatcagggagagagtctgtatccacagccagtgatcagccttcccactctctggagagacaaatgaatggaaaccaagagaaaggtgataagactgatannnnnnnnnnnnnnnnnnnnnnnnnnnnnnnnnnnnnnnnnnnnnnnnnnnnnnnnnnnnatgaaagccaagaagggaatgctgaagggcttgggagacatgttcaggtttggcaaacatcgaaaagatgacaagattgagaaaacgggtaaaataaaaatacaggaatcctttacatcagaagaggagaggatacgaatgaagcaggagcaggagaggattcaagccaaaactcgagaatttagggaacgacaagctcgagagcgtgactatgctgaaattcaagattttcatcggacacttggctgcgatgatgagttaatgtatgggggagtttcttcttatgaaggttccatggctctcaacgctagacctcagagcccacgagaagggcatatgatggatgctttgtatgcccaagtcaagaagccgcggaattcccaa

SEQ ID NO: 77294 - DNA, 1065 bp, Homo Sapiens
  misc_feature (86)..(86): n is a, c, g, or t
  misc_feature (90)..(90): n is a, c, g, or t
  misc_feature (93)..(93): n is a, c, g, or t
  misc_feature (103)..(103): n is a, c, g, or t
  misc_feature (109)..(110): n is a, c, g, or t
  misc_feature (123)..(123): n is a, c, g, or t
  misc_feature (176)..(176): n is a, c, g, or t
  misc_feature (185)..(185): n is a, c, g, or t
  misc_feature (193)..(193): n is a, c, g, or t
  misc_feature (239)..(239): n is a, c, g, or t
  misc_feature (267)..(267): n is a, c, g, or t
  misc_feature (297)..(297): n is a, c, g, or t
  misc_feature (374)..(374): n is a, c, g, or t
  misc_feature (379)..(379): n is a, c, g, or t
  misc_feature (990)..(1009): n is a, c, g, or t
gtagcaacgattatgatatcatcttggcccccgttacatttgctccgtttttttgttgatgtggcgaaaaattcacacggaaagtntgantgntaggattatncgctcnnttaggatttgccntgggccaagattcgcacgagagcgtaagtggacagggagggtttgagacatcntgattcctnttgtcatnacataacgcccagtgcctgggagagcggcaccgctgcgcttctttntgtttgagctcattgacacagctttccnagtttgtggccacatcactcaccggggccngtgtgctgtcctcgaggaccatgacaagcatgtgtcggtgggttgcctcttgctcttggaggttgagcctcagttcnaaggngacaatagatgcttcctgttctccatctgccccagcatggctgtgtacacacacacgggctacaacgaccactacatgtacttgaaccatggacagcagacgatcccgaacggactgggtatgggggggcagcacaattactttgggctttgggtggatgttgattttgggaaaggacacagcagagccaagcccacgtgcaccacgtacaacagcccgcagctgtcggctcaggagaacttccagtttgataagatggaggtgtgggcggttggagacccctcagaggagcagttggccaagggcaacaagagcatcctggatgcggaccctgaggcccaggccctgctggagatcagtgggcattcgcgccacagcgaagggctccgggaagtcccggacgatgaatgaggagccgcctgagccttcctggagccaggacctggattcctctgggtagagggcaccgcctgcagcccctcttccctcccacatggtttaactgtaatagcgtaccgcacgggtcacagcctggtagtcccacatgtgccaagaagacgccctctgaagccatgtcctgactcatgggtggatctcccagaaatagatgnnnnnnnnnnnnnnnnnnnngccctacagggtcaccctcaggatctctccaagaaatcttgtgtaaaattagtaaa

SEQ ID NO: 77295 - DNA, 734 bp, Homo Sapiens
gggggagggggaattcctttggcttgaaagtgccctaggctccatacactttactgcaaagcaccagagctaggtaagagctgggaaaacgcatcctcctgggctgtgagggagctcacagcgaaatgaaagacgggactgcagcttgcagatcctgagaacccggtgtgacaagggtttgggtagtgtgttccttaaaggcttggaggaaatgctgtggcgttctcagacacagattcatttttccatcattgacagtcccagtgacagcccgtcaatttaggctgggcacatcgattttgaaagcttgctagatttgtgttgtgtaccctccagtaaccaaaattatgtgagatatattactacatgggatggaaaatgtgttcagatttggcctttctaaaataaggaaaataagaaagaaaagtgctatgggagtattttctcctcctcctccttccctctcaaataagcatttctcaccagccaacatccctcttgcatcactgaatcataagatcccagggcagcgctttttctgaggggccaagtgaaacatcacaggtggaaacgtaccaagcaggtgcaaatgttatgacccaaaactgctactgagcagtgggagagagtttctctgttgttccagaaaagtttgagcagctaataatttgcttaatgtttgcaattgtttaggtatctttttatagtaaaaataaatccataaaatgttgcat

SEQ ID NO: 77296 - DNA, 733 bp, Homo Sapiens
  misc_feature (94)..(111): n is a, c, g, or t
caattcagacccaagagtagcccccgagggcatgtacctggtgggaagcagctcaggtacccttgggggttgcagggcccttacgcaggtattnnnnnnnnnnnnnnnnnnggggtgcgtgtgtgcgtgcgcgtgtgcgtgcctatgcttttctctgtgggcacatcaggatgcccctcggagagcatgtgcacgtgtccccacctgagcgagcgtgtgtgtgtgctcctctgcgtcccaggtttggacgtctagggtttggtgtgcctgtcttctgccctccctgagcccacagggtcagtcaatgtatcttctacgtgcctctccctctgccttctctcacagtgcccccggctccagagctcaggggtaggggttctcctgagggtgcaggggatccttctcatctcctggaccctccagggcactctggtccctattccccagctcctaggcagctgagccgggtcccttaggggaggtgaccaggagctttggtgcagggagctcttggtggggcaaagggctggacccctgccaggtctgtggacatggttatatgcccgggagaggggggtgcagggccccagggatggcccccaatcccacctctgtttattctgtaaactgcaacctataaataacctttagcattcctattgtaacaaaattaatttttatgaaataaattatatttcctagtctaataaaatccgggttgcatttggctgtc

SEQ ID NO: 77297 - DNA, 1590 bp, Homo Sapiens
agtaactataacggtcctaaggtagcgaggcctgggtggcgaattcggcacgagggtgaggggctgcaggtggcggcgcagtctcggtaggcggtatgagtttggctgggggccgggcaccccggaagaccgctgggaaccggctttctgggcttttggaggcagaggaggaagatgagttctaccagacgacttatgggggtttcacagaggaatccggagatgatgagtatcaaggggaccagtcagacacagaggacgaagtggactctgactttgacattgatgaaggggatgaaccatccagtgatggagaagcagaagagccaagaaggaagcgccgagtagtcaccaaggcctataaggaacctctcaagagcttaaggcctcgaaaggtcaacaccccggctggtagctctcagaaggcgcgagaagagaaggcactactgccattagaactacaagatgacggctctgacagtcggaagtctatgcgtcagtctacagctgagcatacacgacaaacgttccttcgggtacaggagaggcagggccagtcaagacggcgaaaggggccccactgtgagcggccactaacccaggaggaactgctccgggaggccaagatcacagaagagcttaatttacggtcactggagacatatgagcggctcgaggctgataaaaagaagcaggttcataagaagcggaagtgccccgggcccataatcacctatcattcagtgacagtgccacttgttggggagccaggccccaaggaagagaacgttgacatagaaggacttgatcctgctccctcggtgtctgcattgactcctcatgctgggactggacccgtcaacccccctgctcgctgctcacgtaccttcatcacttttagtgatgatgcaactttcgaggaatggttcccccaagggcggcccccaaaagtccctgttcgtgaggtctgtccagtgacccatcgtccagccctataccgggaccctgttacagacataccctatgccactgctcgagccttcaagatcattcgtgaggcttacaagaagtacattactgcccatggactgccgcccactgcctcagccctgggccccggcccgccacctcctgagcccctccctggctctgggccccgagccttgcgccagaaaattgtcattaaatgaagagatgtctagtcctcagaaacttctttcctgccctgattggggctcttgctgttccgtttcttctccctgcttctcccctttgtcatctctgatctttgcctaatctgtttctttttccttttcccctagttcttacaggtttcgttgtgttttttaatctaataaaatagaaggattccccctcaactacacaaacactaaaaaacataccccttgtcgggcccgccttcgggccccttcgaaaaagctttttccaaaacccattctcggttggggccgcgccggggccccccgttagggttaaagtggaaaaccttgggcccataacgtcgtgttttccttagggagaaaccctgggggccctgaacatagtggcttggggattctctccccaaat

SEQ ID NO: 77298 - DNA, 732 bp, Homo Sapiens
  misc_feature (84)..(84): n is a, c, g, or t
tcacacccttaggctggacctccctccctcctctggtgttaaggctgctttgggggtggcttgttacccccttttcctcctctntgaagacggagctgccccagctgtggctgggggtgtggaggcagtgggatgaactgggggacaggtctgcgctgcagtgggatctggctgctctgcctcctttcccaccccagctgaccatgagactttgctgagaagtggaggccacaggacaggctggctggctggctggctgcttgacccagtgtgactctccttcactgagtgataccctgctccgggcccatgccccaaggagcccttcagagcccacactgccagtcgaggcctggctggaggctggccacagtggaaattctgccgagcctcttgtcccttccctgctctgctgcatggggccccatggctttggctggccactgagggtagggtgtggaggtgtggaggccccctgaggagctgcggcggcccaggtacgaagctgcaactctgcgcgcagtgggcgagatctcatcagccccaggctgcaggtgaggcttcaggggatgctggggccccactgcccctccgctgccttgccctccatccttcctctgttccttctggccgggcaccacagcactggggctcacctcttggttgatcctcttgtactgggagaggtgccttttgtatccccaattaaaggtagaaaaccaccctgctagc

SEQ ID NO: 77299 - DNA, 741 bp, Homo Sapiens
  misc_feature (65)..(65): n is a, c, g, or t
ggcacatgtgacatgtgcagcacacgggttcacgcaggctgggggcatgttagtttctacgactntgaagtcacaggcaaggaggggcacagtgcgtgtggatgagcctgcgtgaacacacgtggggaagggcaggatgccagtgccgggagtgtggtgtggacaccctcatccttagggtgctggaagttgggctgagggagttagcagcagtgcgaggcgtgtgtctggaggcagcgatgtgatcagcttggtctcccaggagcatggtctgtctcggggagtgacttacgggtgaggaaagcggaggccagcacacaccctttgaggtacgtgtcatcctcggcaagacctcgggcacaggagggggaggaggagtaatacagagaggccagtgggaaagatggcgtgaggctggagcccatctgggaatgcaggatgcttgcttctctttggaaaatcacctgtttcagtagaatgaaagggggtgcaggccatctctgtaggcgaacagcacaaccatttgtaacaatccaagactcgtttgtgatttaaagttctcagcaagctaggaagagaagagaacttcctcaaccagctaaatgatacctgcagaaaaccagctgatataatacaaggtggacggactgcatccctgacatggagaccaggcagggtgtctgttccctgcacccctggttgcactgtactggagatcttcaccagtataattagggaagc

SEQ ID NO: 77300 - DNA, 1086 bp, Homo Sapiens
gttaatcggacgagggcgctgagcactagagagagcgtcttgtggctgcggctgccctcagtctcctccgcgcggttacccctgtacccgccggccatccgtcctggcgctccggatgagtcaatgaggggcagggcccgaggagtggtcttcccaagaacccctgtgtggcctcccatagtgccggtgctgtgtacctcctccccgacgaaaaggggaaactgaggccccgaggtggagtgggaagagcctggctggaccgtcaggcccagccgctggtgcagtggtccgtcccctctgccggggtgggcccctcgggatttcgcgtgtcctcgggaaagagacttggcgggcctcgtgggctgtgcggctatcctggagacagatgacagctctcccttggatggctttgctggttcctgcatccagccagcgcccccatttttcctgcagcacccctgatctgcactccctgaggggctcccactgtccgcggtgtgaggatgtccctggatagtccactgtgtgcagaggcatgggagttgtcatgttgggaacatgctagacctcagtatccttgagggatgctgccttgggtctggaaactgttagaggaaaccccaagaggtgcaggcactgagcctctcaggacaatgacctggggtcccagctcccctggaggggcctcctcatgattgtttgggggttgatcacagaccaagagtgacgagtgatgtcaccctgtgactcatggccggaccttcttgcccctattgtctcagcacaacattattcgacttttccctcagcgtgggtgggcagaggaaaagccctgtggctctggggacttgggatccagagttgaagacccttcagctggctctgccctgccagtgccacagagtgccatggcccaggaagacaggttttcttccatctaggccaggccatccagtggccatcctccgtgtcctcccgcctcctcctggtgtgacttctgaaaaccaagaatttgttcctgttgactttttctgtgctatggaccattgtcctctcacccactcaataaatcttgaaacatgcaaa

SEQ ID NO: 77301 - DNA, 1174 bp, Homo Sapiens
gcctgcccctcagcctcctccgcgcggttacccctgtacccgccgccatccgtcctggcgctccggatgagtcaatgaggggcagggcccgaggagtggtcttcccaagaacccctggtggcctcccaaggccggtgctgtgtacctcctccccgacaaaaggggaaactgaggccccgaggggagtgggaagagccggctggacgtcaggcccagccgctggtgcagtggtccgtcccctctgccggggtgggcccctcgggtttcgcgtgtcctcgggaaagagactggcgggtgagccgcgccctcggccttcgctgggctaagccgaccccatgcagacgtcaaacccccctaggcctcgtgggctgtgcggctatcctggagacagatgacagctctcccttggatggctttgctggttccgcaccagccagcgcccccatttttcctgcagcaccctgatctgcactccctgaggggctcccactgtccgcggtgtgaggatgtccctggatagtccactgtgtgcagaggcatgggagttgtcatgttgggaacatgctagacctcagtatccttgagggatgctgccttgggtctggaaactgttagaggaaaccccaagaggtgcaggcactgagcctctcaggacaatgacctggggtcccaactcccctggaggggcctcctcatggtaagtgaatgccaagaggttaagttggcctgtgtttccgaggtggaaattccaggtcgctggcttcatttgtcttctcttttagattgtttgggggttgatcacagaccaagagtgacgagtgatgtcaccctgtgactcatggccggaccttcttgcccctattgtctcagcacaacattattcgacttttccctcagcgtgggtgggcagaggaaaagccctgtggctctggggacttgggatccagagttgaagacccttcagctggctctgccctgccagtgccacagagtgccatggcccaggaagacaggttttcttccatttaggccaggccatccagtggccatcctccgtgtcctcccgcctcctcctggtgtgacttctgaaaaccaagaatttgttcctgttgactttttctgtgctatgaaccaccgccctctcacccactcaataaatcttgtatcatgcaaa

SEQ ID NO: 77302 - DNA, 1400 bp, Homo Sapiens
  misc_feature (1366)..(1366): n is a, c, g, or t
cattacattatatcatctactactaacttactattttcttggctggtaccggtccggaattcccgggatccgcgggcgctgagcactagagagagcgtcttgtggctgcggcctgcccctcagcctcctccgcgcggttaccccctgtacccgccgccatccgtcctggcgctccggatgagtcaatgaggggcagggcccgaggagtggtcttcccaagaacccctggtggcctcccaaggccggtgctgtgtacctcctccccgacaaaaggggaaactgaggccccgaggggagtgggaagagccggctggacgtcaggcccagccgctggtgcagtggtccgtcccctctgccggggtgggcccctcgggtttcgcgtgtcctcgggaaagagactggcgggtgagccgcgccctcggccttcgctgggctaagccgaccccatgcagacgtcaaacccccctacgtcggcacagcctctctgaggggaggcttagtgcccccttgagaaaacatttgtctactctggtgaccgcagtctatggaagcctgtctgaggtgctccaccatcctcaccaacatacttcgcacccctcaccagactcctaaccctcggatcttttatatacccgtaacccctaccccatgtggatcccataactctacgtatcctgtcaacccctcagagccactcactctaacccatgcaatcctcacactcacccacatatcaagctcattctcgcactcccctttacgtccttatacggctctctacttgatttcaccgctcactatgggcagtctaactacgtaattgctgccgttgggggccattcatacccccgaaatacccgataacctgtcaaatccttatccaatacgatacttttcctcgctactacaaatccactcttgcaaaagcgaacccttgcgtgccccgactactcataacatactatacccttttacgacagactcggctgatcaactctctcgctattcttgcctatgctaccgctaccctattatcacacgcgcatttctccccatgctccaacacaatctcacatcttttatccacccacctcctcttgcacatatctcatctatccatttctcgttcagtctcaccctaaaaccccaattccctcttctcctctatctgctcgtatccatctacatattcgcaacgatctcgcatgatccacctcagactatatattttctttcgcgaaaatccaggtcggtcagttgaccatatttcttgcgacctccgccttagtccctattattttcgatcactctagcttttggtatgcatgcctgggaacacgaacttcgcaactttcctgcacgtgtntctgcttatctcaataccctgctcacatacgtgt

SEQ ID NO: 77303 - DNA, 1561 bp, Homo Sapiens
  misc_feature (112)..(112): n is a, c, g, or t
  misc_feature (1072)..(1100): n is a, c, g, or t
aagaaatctctcgcctctgcttattctaggagttgggctgtgaagctggaaacatcagaggctgtctccttggaacttcatactatgtgcaatgtttccaagctttacttcngatgtgaagaaaatgttaaggagtcatcaagttagtgtgactctggatccagatacagctcatcacgaactaattctctctgaggatcggagacaagtgactcgtgatacacccaggagaatcaggacacatcttccaggagatttactgccttcccctgtgtcttgggttgtgaaggcttcacctcaggaagacgttactttgaagtggatgttggcgaaggaaccggatgggatttaggagtttgtatggaaaatgtgcagaggggcactggcatgaagcaagagcctcagtctggattctggaccctcaggctgtgcaaaaagaaaggctatgtagcacttacttctcccccaacttcccttcatctgcatgagcagcccctgcttgtgggaatttttctggactatgaggccggagttgtatccttttataacgggaatactggctgccacatctttactttcccgaaggcttccttctctgatactctccggccctatttccaggtttatcaatattctcctttgtttctgcctcccccaggtgactaaggaaaagagcagaagctccttggtttaaccagcacagagaaaataatataaatcccataagggcagacgtttggtctgttttcttcgctgtcatttccttagtagttagactagtgctgagattttagtggatatataattgatttatgttgaatatatggacttagcaactaaaaataccacagatggttaacctggactggggcaaagcaagataatagtgatgatcgtatgttgctgtctccatccgtctttaatgggtcagggctttgatttccaagggtcttcaggtgatgagtaggggtacccacaagtcagaaggtctgcgttctcctagtttgtttgctgccatttgaactcatgtagggaatgaaagaaagctgcaattatccgccaactgcatttnnnnnnnnnnnnnnnnnnnnnnnnnnnnnaacattgactcttccaaccactgacatgttgtttaataatctaagcggcagtcctggaggctaccagacttactgagttctacctgagaaacagccaagcaaagtgtgagagaagggttaagactggcttacaatgagatgcttcaaatgaaaagggaattatgagtaaaattgaactttgatgggggattcagttctggaaaagaatttggtattttccagtctgctaggaccaattaccttgaaatattttaaaatctcagtaaatagttattgctgaaatggctgttggcagttcttattatgattcagagaagagcaaatagaccttaacttcattttgaaaaagaccaaattaccatacccgagtgagtaatgacaggactacaactaaaacataaacaacattaatgatgaccataaaaagtcacaaaattgctaaatgttataatttagagttg

SEQ ID NO: 77304 - DNA, 414 bp, Homo Sapiens
  misc_feature (132)..(165): n is a, c, g, or t
aaaagccacaagagataaaatgaaagatgccatcatagctaaattggctaatcaggctgcagattattttggtgatgctttcaaacagtgtcaatacaaagatactctccccaagatgagccttaaagcgcnnnnnnnnnnnnnnnnnnnnnnnnnnnnnnnnnnttaacaaattcatctgatactttgattagaattcagttttgccaacagggataaaaaattgggctgctaatggacagctaaggaaagcaaccatcttaaaccacatatcacaggaagtataatgttttaatgtaaacctttctgaagtgacaattgtaaagactattcagtgatgatcatttgttaatgacaaagcaaatcactagtaaatttggaaaaattaactcaagaaaacttaaagattgaaaa

SEQ ID NO: 77305 - DNA, 2590 bp, Homo Sapiens
gtccgctgccttaagtcgagagccgaccgtggacatatctccagatactgttgggaccctcagtcttattatgctggcacaggctcaagaagtattttttttaaaagccacaagagataaaatgaaagatgccatcatagctaaattggctaatcaggctgcagattattttggtgatgctttcaaacagtgtcaatacaaagatactctccccaaggaggtgttccctgtcttggctgcaaagcactgtatcatgcaggccaatgctgagtaccatcagtctatcctggcaaaacagcagaagaaatttggagaagaaattgcaaggttacagcatgcagcagaactgattaaaacagtggcatctcgctatgatgaatatgttaatgtgaaggatttttctgacaaaatcaatcgtgcccttgctgcagcaaagaaggataatgacttcatttatcatgatcgagttccagaccttaaagatctagatcctattggcaaagccacacttgtgaaatctaccccggtcaatgtacccatcagtcagaaatttactgatctgtttgagaagatggttcccgtgtcagtacagcagtctttggctgcctataatcagaggaaagccgatttgattaacagatcaattgctcagatgagagaagccaccactttggcaaatgggggtgctagcttcccttaatcttccagcagcaattgaagatgtgtctggagacactgtacctcagtctatattgactaaatccagatctgtgattgaacagggaggcatccagactgttgatcagttgattaaagaactgcctgaattactgcaacgaaatagagaaatcctagatgagtcattaaggttgttggatgaaaaaaaagcaaccgataatgatttaagagcaaaatttaaggaacgttggcaaaggacaccatccaatgaactgtataagcctttaagagcagagggaaccaacttcagaacagttttagataaagctgtgcaggcagatggacaagtgaaagaatgttaccagtctcatcgtgacaccatcgtgcttttgtgtaagccagagcctgagctgaatgctgccatcccttctgctaatccagcaaagaccatgcagggcagtgaggttgtaaatgtcttaaaatccttattgtcaaatcttgatgaagtaaagaaggaaagagagggtctggagaatgacttgaaatctgtgaattttgacatgacaagcaagtttttgacagccctggctcaagatggtgtgataaatgaagaagctctttctgttactgaactagatcgagtctatggaggtcttacaactaaagtccaagaatctctaaagaaacaggagggacttcttaaaaatattcaggtctcacatcaggaattttcaaaaatgaaacaatctaataatgaagctaacttaagagaagaagttttgaagaatttagctactgcatatgacaactttgttgaacttgtagctaatttgaaggaaggcacaaagttttacaatgagttgactgaaatcctggtcaggttccagaacaaatgcagtgatatagtttttgcacggaagacagaaagagatgaactcttaaaggacttgcaacaaagcattgccagagaacctagtgctccttcaattcctacacctgcgtatcagtcctcaccagcaggaggacatgcaccaactcctccaactccagcgccaagaaccatgccgcctactaagccccagcccccagccaggcctccaccacctgtgcttccagcaaatcgagctccttctgctactgctccatctccagtgggggctgggactgctgcgccagctccatcacaaacgcctggctcagctcctcctccacaggcgcagggaccaccctatcccacctatccaggatatcctgggtattgccaaatgcccatgcccatgggctataatccttatgcgtatggccagtataatatgccatatccaccagtgtatcaccagagtcctggacaggctccatacccgggaccccagcagccttcataccccttccctcagcccccacagcagtcttactatccacagcagtaatatgtctgctcagcagctcagctgattcagatcagagggaaagaaataccaaccctgcaataagtgtactaaactctacgctctggttaatgtaatgtactctcctggactgaatgcagtgtataatttctgtctacagctagaagctgtgccccagttccacatttgattacacatgtgagatttgctgctgttgcagtataaacactaggtataataggatttgaaattgcattacagttcataaaaattgaaaatgagaaattaaacctgcaagtgaaacatttgaaacgattatactttctacataagacatggttgggacatcagatacttacaaagatggtttaagtatggatactagagaaaattaagttttctttctctttggtttattgatttggtttaatttccattatgctattttgcataatcaaggcactgtaaatcttataattttaaaataaattacttaagaacaa

SEQ ID NO: 77306 - DNA, 716 bp, Homo Sapiens
  misc_feature (60)..(113): n is a, c, g, or t
gtgtccatactatgtccagccaaatagatgcacaaaattccaatcccagtaaaagacctnnnnnnnnnnnnnnnnnnnnnnnnnnnnnnnnnnnnnnnnnnnnnnnnnnnnnnatgtagaagatgattcatttatgggctgtcaaattgccccagactttgtcttttttcaaaattttcagtcagttggcagtggtacctttaccttacttcatcagagaaagatgaatttttgaatctgaacttcctctgcaaatatttattgttggtgtctcatcattaccaaaccaagggaaaattgctaagagaaggtgaatagctgagaatcacacacagtggtgaatcttgtaatgttttagtttggagcaagtgacaggaagttataggggctagttaagaaataggagcaaggataacattagattgttgctcactgagaattgatgaaaggattgacttacaaatcaatccttgattgggggctaagtggcagttgaaaggaacattatagacctctgttgccctgttttataacttaagctgggtagctgtgcagaggaacagagagccaggctgtcctcccaaggtattaaattggagcctaagggttatagatttgaagacatgagagcctaagatacagcagaattcaaatatttaaggaattctgcctgccggtgactattactaagctctatagaagatagaagaagcaaa

SEQ ID NO: 77307 - DNA, 1924 bp, Homo Sapiens
aacgaggtgagacgctgcggctgcgaggctgtcccgcgcggagtggggagtgggggtgccgcagggtcgggctggcgcggacctcggctcaggagcatctatcggctgcacgccaacatcaacacaggcgaagatggtctccaagcgcattgcccaggagacctttgatgcagctgtgcgcgagaacatcgaggagtttgcgatggggccagaggaggcagtgaaagaggccgtggagcagtttgaatcgcaaggggttgatctgagcaacattgtaaagacggcggacctaaagtctcgtgcagacggatcccaggagcccacacatgacatccctgcagatgctcagtgacctccaggagtctgtggccagactctcgcccccaggaggtgtcagcatacctcacccgcgttctgcgaccagtgcaaacaggacaagggctgccgcttcctcgcggcccagaagggggcctaccccatcatcttcactgcctggaagctggccactgcaggtgaccagggccttctgctccagtccctcaatgccctgtcggtgctgactgatggacagccagacctcctggatgcccaggcctgcagctcctagtggccacgctgacccagaatgctgatgaggctgacctgacctgctctgggatccgctgtgtgcgtcacgcttgcctgaaacatgaagcagaatcggcaagacctggtgaaagctggcgtgctgcctctgctgactggtgccatcacccatcatgggcaccacactgacgtggtcagggaagcctgctgggccctgcgtgtcatgaccttcgatgacgacatccgtgtgccctttggccatgcccacaaccatgccaagatgattgtgcaggagaacaaaggcttgaaggtgctcatcgaagccaccaaagcgttcctggataaccctggcatcctgagcgagctctgtggaaccctgtcccgcctggccattcgcaacgagttctgccaggaggtcgtcgacctcgggggcctgagcattctggtgtccctgctagccgactgcaatgaccaccagatgagggaccagagcggcgttcaggagctcgtgaagcaagtgctgagcaccctgcgagccatcgcaggcaacgacgacgtgaaagatgctattgtccgtgctggtgggacggagtccatcgtggctgctatgacccagcatctgaccagcccccaggtgtgtgagcagagctgcgcggccctgtgcttcctggccctgcgtaagcccgacaacagccgcatcatcgtggagggtggcggggctgtggcagcactgcaggccatgaaggcacacccgcagaaggccggcgtgcagaaacaggcttgcatgctgatccgaaacctggtggcccacggccaggccttctcgaagcccatcctggacctgggggctgaggcactcatcatgcaggcccgatctgcccaccgtgactgtgaggacgtggccaaggccgcctgcgggacctgggttgtcatgtcgagctccgagagctgtggacaggccagaggggcaactggcgccatgaccccaggcccagtctgggccgtgactctgggtgagtcgtgtgactcaggaatgggggtagatccatgtcctccactgtccccccattagttcttgtccccttcacaatggagaagtgtgtttctggcaggccctaggtaaagggtcggcggagggcgggagccttgtagggaaggcctcttacacagaagaaggcagcccatggtccaagcaattttgggtcccagcagcaggcacgatgttattgtcctggtctttcccagcccaggctacagaggggcaagggcgtccaataccaactgccctttggaatgggcgcatgggggcagtctggagggaggaaacaaggggggcccg

SEQ ID NO: 77308 - DNA, 729 bp, Homo Sapiens
cggcaagcctttctcgaagcccatcctggacctggggcctgaggcactcatcatgcaggcccgatctgcccaccgtgactgtgaggacgtggccaaggccgccctgcgggacctgggttgtcatgtcgagctccgagagctgtggacaggccagaggggcaacctggcgccatgaccccaggcccagtctgggccgtgactctgggtgagtcgtgtgactcaggaatgggggtagatccatgtcctccactgtcccccattagttctgtccccttcacaatgagaagtgttttctggcaggccctaggtaaagggtcgggggaggggggagccttgtagggaggcctctacacagaagaaagcagcccccatgtcccagccacttctgggtcccagccagcagcacggatgttactgtcctgctccttcccccagccccacgccctaccagagggggcaaagggcacgtcccatcactcactgccctgtctgaaatgtggcagccactgtgggccaggctcagggcagggcaggcgattccagtggggttgggccccctggcgcctgctgcttactgcagtttcatgcaggcctctgctccttgtctttcttacctgtaaaatgggtctcagatgctccgccctgcttggccccagcttgtctgtctctgggtcctgggccagccaggatacctgataataaaagatcattgggtgaacagcgaaaaaa

SEQ ID NO: 77309 - DNA, 1045 bp, Homo Sapiens
cgggccgccgcggcccggctctcttgcgcaagcgcgctgtccgctccttctgggcggacgctctggaggcaaaacatttccctgctgggggcggcgaccaccgtgagcgtcccggaaggggcggcaaagacgcctccgtcgcgcacgaggtggcctcgttggctttaccttggttcgcggtcgtccttggttatcgtgagcgtccgcgagtctctgggaggccatagcctaggggcgccacagcgcctgcgcgcgtacggcggccggaaggggctagaggcggctccctgggtgacaaccgcgcgccccacctttccccacgtggccgcgaagaccggctcaggagcatctatcggctgcacgccaacatcaacacaggcgaagatggtctccaagcgcattgcccaggagacctttgatgcagctgtgcgcgagaacatcgaggagtttgcgatggggccagaggaggcagtgaaagaggccgtggagcagtttgaatcgcaaggggttgatctgagcaacattgtaaagacggcacctaaagtctctgcagacggatcccaggagcccacacatgacatcctgcagatgctcagtgacctccaggagtctgtggccagctctcgcccccaggaggtgtcagcatacctcacccgcttctgcgaccagtgcaaacaggacaaggcctgccgcttcctcgcggcccagaagggggcctaccccatcatcttcactgcctggaagctggccactgcaggtgaccagggccttctgctccagtccctcaatgccctgtcggtgctgactgatggacagccagacctcctggatgcccagggcctgcagctcctagtggccccgctgaccccagaatgctgatgaggctgaccctgactgctctgggatccgctgtgtgcgtcacgccttgcctgaacatgaacagaatcggcaagaccctggtgaaagctggcgtgctgcctctgctgactggtgccatcacccatcatggccaccacactgacctggtcaagaaaaccttgcctgg

SEQ ID NO: 77310 - DNA, 1083 bp, Homo Sapiens
ggtgaaagacccgctgttctatctagatgcccagaagggccgctacgtcccgctggaccaagaggcctacagccgcatccaggcaggcgaggagaagctgtgattccccccatccctctgagggccggcggatgctggatccggagccccaggttccgccccagagcggtcctggacaaggccagaccaaagcaagcagggcctggcacctccatcctgaggtgctgcccctccatccaaaactgccaagtgactcattgccttcccaacccttccagaggctttctgtgaaagtctcatgtccaagttccgtcttctgggctgggcaggccctctggttcccaggctgagactgacgggttttctcaggatgatgtcttgggtgagggtagggagaggacaaggggtcaccgagcccttcccagagagcagggagcttataaatggaaccagagcagaagtccccagactcaggaagtcaacagagtgggcagggacagtggtagcatccatctggtggccaaagagaatcgtagccccagagctgcccaagttcactgggctccacccccacctccaggaggggaggagaggacctgacatctgtaggtggcccctgatgccccatctacagcaggaggtcaggaccacgcccctggcctctccccactcccccatcctcctccctgggtggctgcctgattatccctcaggcagggcctctcagtccttgtgggtctgtgtcacctccatctcagtcttggcctggctatgaggggaggaggaatgggagagggggctcaggggccaataaactctgccttgagtcctcctagcctgtgtgcaaaccacccaagcccaccctgaccccagaaccccacagccccactgtggccgcttgatcccccacgccaaccccctggcccattgacccgcctcatctgttcattcacttatttaagctgagggtgtagcaggtaagatgccgcagcccctgcctccaatgtgctggttcagccgggggcagtgcccatgtgaatttggcaaggtgtttaacagtgtgggcttgaaagtccaaacccg

SEQ ID NO: 77311 - DNA, 400 bp, Homo Sapiens
gaagctgcgcaggtctcctctgacctttctctttcaggtgtggagcagaggatcatgtggaagcagtgaaaaagctccagaactcccaccaagatcctgcagaagaataacctgaatctgctcagagacctggctgtgcacattgcccatagcctcaggaacagtccagactggggaggtgtggtcatattacacagggtggctgaggtcctggaaggcaaaggagcagggaagaaaggccgttttcagggcaaggccaccaagatgagccggcggatggaggcgcaggcgcttctccaggactacatcagcacgcagagtgctaaggagtgagggcttagggcactcccctcctgtttccacaggaatcttttggtcaataaaatataattgctcccgg

SEQ ID NO: 77312 - DNA, 402 bp, Homo Sapiens
cagaagaataacctgaatctgctcagagacctggctgtgcacattgcccatagcctcaggaacagtccagactggggaggtgtggtcatattacacaggagaccctcctgttcttaactgtgggcgatgagaaaggtggtggactcttcttactggcagggccacctgcgtctgtggagaccctggggcccagggtggctgaggtcctggaaggcaaaggagcagggaagaaaggccgttttcagggcaaggccaccaagatgagccggcggatggaggcgcaggcgcttctccaggactacatcagcacgcagagtgctaaggagtgagggcttagggcactcacctcctgtttccacaggaatcttttggtcaataaaatagattgactcagaaaaaaaa

SEQ ID NO: 77313 - DNA, 1328 bp, Homo Sapiens
ggacacacgcctgcaggtatggcgttctggtgtcagcgtgacagttatgcccgagagttcaccaccaccgtggtctcttgctgtcccgcggagctgcagactgaagggagcaacggcaagaaagaagtgctgagcggtttccaagtggtgctggaagacacagtgcttttccctgagggcgggggacagcctgatgaccgtggtacaatcaatgacatctctgtgctgagagtgactcgccgtggggaacaggctgatcatttcacccagacacccctggatccaggaagccaggttctggtccgggtagattgggagcggaggtttgaccacatgcagcagcattcagggcagcatctcatcacggcagttgctgaccatctatttaagctgaagacaacatcatgggagttagggagatttcggagtgcgattgagctggacaccccctctatgactgcagagcaagtagctgccattgagcagagcgtcaatgaaaaaatcagagatcggctgcctgtgaatgtccgagaactgagcctggatgatcctgaggtggagcaggtgagtggccggggtttgcctgatgatcatgctgggcccattcgggttgttaacatcgagggcgttgattccaacatgtgctgtgggacccatgtgagcaatctcagtgaccttcaggtcattaagattctgggcactgagaaggggaaaaagaacagaaccaacctgatatttctgtctgggaaccgggtgctgaagtggatggagagaagtcatggaactgaaaaagcactgactgctctgcttaagtgtggagcagaggatcatgtggaagcagtgaaaaagctccagaactccaccaagatcctgcagaagaataacctgaatctgctcagagacctggctgtgcacattgcccatagcctcaggaacagtccagactggggaggtgtggtcatattacacaggaaggagggtgattcagagttcatgaatatcattgccaatgagattgggtcagaggagaccctcctgttcttaactgtgggcgatgagaaaggtggtggactcttcttactggcagggccacctgcgtctgtggagaccctggggcccagggtggctgaggtcctggaaggcaaaggagcagggaagaaaggccgttttcagggcaaggccaccaagatgagccggcggatggaggcgcaggcgcttctccaggactacatcagcacgcagagtgctaaggagtgagggcttagggcactcacctcctgtttccacaggaatcttttggtcaataaaatagattgactcagaaaaaa

SEQ ID NO: 77314 - DNA, 1470 bp, Homo Sapiens
caccttacggctaggtacgaggcctgggtggcgaattcggcacgaggcagaaagattggtggacaggagcagcggccggtggggagggcgctcggcggcggcctgcggccatggccaccgtgatggcagcgacggcggcggagcgggcggtgctggaggaggagttccgctggctgctgcacgacgaggtgcacgctgtgttgaagcagctgcaggacatcctcaaggaggcctctctgcgcttcactctgccgggctccggcactgaggggcccgccaagcaagagaacttcatcctaggcagctgtggcacagaccaggtgaagggtgtgctgactctgcagggggatgccctcagccaggcggatgtgaacctgaagatgccccggaacaaccagctgctgcacttcgccttccgggaggacaagcagtggaagctgcagcagatccaggatgccagaaaccatgtgagccaagccatttacctgcttaccagccgggaccagagctaccagttcaagacgggcgctgaggtcctcaagctgatggacgcagtgatgctgcagctgaccagagcccgaaaccggctcaccacccccgccaccctcaccctccccgagatcgccgccagcggcctcacgcggatgttcgcccctgccctgccgtccgacctgctggtcaacgtctacatcaacctcaacaagctctgcctcacggtgtaccagctgcatgccctgcagcccaactccaccaagaacttccgcccagctgggggcgcggtgctgcatagccctggggccatgttcgagtggggctctcagcgcctggaggtgagccacgtgcacaaagtggagtgcgtgatcccctggctcaacgacgccctggtctacttcaccgtctccctgcagctctgccagcagctcaaggacaagatctccgtgttctccagctactggagctacagacccttctgatcacagcacccaggagcttgtctccaggaaggcggccccgtcccctactcatacccaccacagagcaccagccagtgccaacgccaggctgctatttatctccctatcccaccccctaccccacctaacacatttgcactgccgggaatggacactggaagtgccaggaggaaggaaggctggtttggtggggtagtggggaggtcagggaggcggggccaagggtgtcccacattcccaacaccgccctctgatcaccatgggaatctttggactcaggacagggccaggcgcagggctctccctcctctccccttcgctgtcccctccccctggagggcatggtgtcggggggtggcactgagctatgagtcccggggatggtgaggaacgccacagacagagccaccctaggagtgagtatagtgctggtgactgtgtttcatagccccagtccagggctgtctaagaaataaagatcatcagactccaaaaa

SEQ ID NO: 77315 - DNA, 799 bp, Homo Sapiens
tgggtatgagtaggggacgggccgccttcctggagacaagctcctgggtgctgtgatcagaagggtctgtagctccagtagctggagaacacggagatcttgtccttgagctgctggcagagctgcagggagacggtgaagtagaccagggcgtcgttgagccaggggatcacgcactccactttgtgcacgtggctcacctccaggcgctgagagccccactcgcttggtggagttgggctgcagggcatgcagctggtacaccgtgaggcagagcttgttgaggttgatgtagacgttgaccagcaggtcggacggcagggcaggggcgaacatccgcgtgaggccgctggcggcgatctcggggagggtgagggtggcgggggtggtgagccggtttcgggctctggtcagctgcagcatcactgcgtccatcagcttgaggacctcagcgcccgtcttgaactggtagctctggtcccggctggtaaagcaggtaaatggcttggctcacatggtttctggcatcctggatctgctgcagcttccactgcttgtcctcccggaaggcgaagtgcagcagctggttgttccggggcatcttcaggttcacatccgcctggctgagggcatcccctgagagtcagacaccctcacctgtctgtccaagctgctagatgaagtctcttgctgcaggccctcatccgagccgagagtgaagccagagagcctctgagatgtcctgcactgctcaacagcgtgcactcgtcgtgcagcagcacgactcctctcacaacgt

SEQ ID NO: 77316 - DNA, 1251 bp, Homo Sapiens
  misc_feature (57)..(307): n is a, c, g, or t
  misc_feature (398)..(512): n is a, c, g, or t
tcggcacgaggaagccttagtgttagttgtttgttgtttttttcttttgcgacggannnnnnnnnnnnnnnnnnnnnnnnnnnnnnnnnnnnnnnnnnnnnnnnnnnnnnnnnnnnnnnnnnnnnnnnnnnnnnnnnnnnnnnnnnnnnnnnnnnnnnnnnnnnnnnnnnnnnnnnnnnnnnnnnnnnnnnnnnnnnnnnnnnnnnnnnnnnnnnnnnnnnnnnnnnnnnnnnnnnnnnnnnnnnnnnnnnnnnnnnnnnnnnnnnnnnnnnnnnnnnnnnnnnnnnnnnnnnnnnnnnnnnnnnnnataagacactgtgcctgggcctcttagtaatttttgtatgtaattttcaaagtatccgggattacaggcgcccgccactacactagctaannnnnnnnnnnnnnnnnnnnnnnnnnnnnnnnnnnnnnnnnnnnnnnnnnnnnnnnnnnnnnnnnnnnnnnnnnnnnnnnnnnnnnnnnnnnnnnnnnnnnnnnnnnnnnnnnnntgagccaccgcgcccggcctaggtcatttgtttttgggtttggatggcaagatcatggataagacagcaggctttgattatagagctctgagttcaaatcctggctctaccacttgtcagtggtgtaacttggaggaagatgcttagcctgagcctgttttatgttttgagacgattggggtaactttgtccttccttcaggtgttcctgggtgaggagtaacgtgaagtcatgtctataagagatgtagcacaggtctccggcatgtagaaatggtcagtaactcctagtgtgtagctagcctctgatgagatggtaaactcaggaggctggcaccacggctgtgctactcacggtcatgctggagggatgcagaaactaaatgaatccacagctacttactcatcttgcctctggcaggttcaccttaaaattgttgctaccaagcttcctgtggtcaaagagcccttgaggaagcaagctccacggccaccatagataacccattcctgaaagtttttcataaacccccacttgttgcttttaaaattttataagcagcttacacatgtagaaaatgatcctccagcccaccaccacatagtaatcactgacactgtgaggtgtctcagctggggttctgctgtgtgtgtgtgtattttacaaaatatgtatggtttctgttcagctcttttcagttaacagatgaacttttgtatcattaaatatttttgaaaac

SEQ ID NO: 77317 - DNA, 503 bp, Homo Sapiens
ccttctctggcaggtatccccagcagtcaattaacaataagccagtataaaacacctaaataaccaatctacaatctcccttcacaagtttttttactgtttttagatgaatgtacgatgagaaattcaacgttaataattctggattttcttatcacaaaaaagaaaatgaaggacctcaaagcacctgaacagtttatcgaccagtttgaatctatttatcttcatttgaatgtcttctagaatatgtaaaaagtcataaaatgtatcttccatgctacatgtacaataagaacttctataattgtatatatgcctttgatgtattttcccctcaagattatcaactgtgtgttcgacagtgaatattcaatctggtaccagttgaaatttttggttataaatgtaatacgaattgtttcacaaacagaaaacatgtaaagcagtattaaaatttggccaaacaagtgttctgtatctactttaataaatggttattcttt

SEQ ID NO: 77318 - DNA, 685 bp, Homo Sapiens
gagggaaataactttaggtataattctaagaactgcataataacttgaatactttttctctgacaggacaagttcagaaagagattgatttaattatgggccctaatgggaagccttcttgggacgacaaatgcaaaatgccttatactgaggcagttttgcatgaagttttaagattctgtaatatagttccattagggattttccatgcaacctctgaagatgcagttgtacgtggttattccattcctaaaggcacaacagtaattacaaatctttattctgtacactttgatgaaaagtactggagagacccagaagtgttccatcctgagcgatttctggacagcagtggatattttgccaagaaggaagctttggttcctttttccctaggaagaagacattgtcttggagaacacttggctcggatggaaatgttcttgttttttacagcattgcttcagaggtttcatttgcattttccacatgaactagttccagatctgaagcccaggttaggcatgacattgcagccccaaccctacctcatctgtgctgaaagacgctgaaactgcctgggatgttttcgggaacaagaatgtatatttgccttatccctgaacttggtttaatcaaatcaatgtgtgtattagaataaaagtcacagcatcaaaaagccaaa

SEQ ID NO: 77319 - DNA, 1319 bp, Homo Sapiens
  misc_feature (1088)..(1192): n is a, c, g, or t
  misc_feature (1194)..(1199): n is a, c, g, or t
gggtggcaggagcaggatggcggcggcggcggctgcaggcgaggcgcgccgggtgctggtgtacggcggcaggggcgctctgggttctcgatgcgtgcaggcttttcgggcccgcaactggtgggttgccagagcccggggcagccgccatcgctgtgctcccggttaccctggataccccgatgaacaggaaatcaatgcctgaggctgacttcagctcctggacacccctagaattcctagttgaaactttccatgactggatcacaggggaaaaaccgaccgagctcaggaagcctaatccaggtggtaaccacagaaggaaggacggaactcaccccagcatatttttaggcctcatctcagtgcctatgaggggcctgccagaaaagtcactaacctgtctcagtgtggccttgtccagccttgtgttttctgtaacccctgtttgtggtacgagataatgagtcctatttttctctcacataatatgcatttgctctcctaggacagtgtaatacatttatgtgaagtaaagacatgcgagactggtggcctgcaaatagcatccgtcaatctgtgttaactgcatagggagggctctgcatagcacctgctatagcggtgtcatgttggatcgcttttgtgactgttcatctgtccttgacagtggctgtcatcttgactactttgttgatttgttggtattggggacattttaaaggctgagttatttttgaatgtcatgtttatgtcatagacgtagttttcgcatccttgaattaaactgccttaactccttttgtggtataagcaaaactccatggactctgtcctggtatccttttcctgtgtggttgccctgtgtcctctggcctagggttaagtgtgcaagataactactcgtgagtattcagaatgttgttcctaataaatgcacttgttgtctgtcttctttaatcaaatcacatcttatatacagcagtcagagatgagtatactagaatcatggattgctggaggtcttttaatctggtgttctcggaagggggtggatttaaatcctgaaataaatatttcaacacaannnnnnnnnnnnnnnnnnnnnnnnnnnnnnnnnnnnnnnnnnnnnnnnnnnnnnnnnnnnnnnnnnnnnnnnnnnnnnnnnnnnnnnnnnnnnnnnnnnnnnnnnannnnnntttgggcgcccgccctccccccccaaaaaaatttttttaaaccctttcttttgggcgccccgcggccccaaagggaaaggaaaaatgggccaaatttgtttcccaaaagaaaacccgggc

SEQ ID NO: 77320 - DNA, 1108 bp, Homo Sapiens
aagaaagaacccatttcctcaaaaaaggggatgccaatcacatgaaccgcgggtaataagtcaggggcttatgccagagccctcccctattccatgttgaccccagattggccggatggttattttccaggcccaccagtcttggcaagtattttacttcccataaaagtatttccacggtcctaggagagcaaaagcatattatgtgagagaaaaataggactcattatgtagtaccacaactagggggttacagaaaacactaggatggtcaaggcctcattgagacaggttagtgacttttctgggcaggcccctcataggcactgagatgagccctaaaaatatgctggggagagttccgtcattccttctgtggttaccacctggattaggcttcctgagctcggtcggtttttccctgtgatccagtcatggaaagtttcaactaggaattctaagggtgtccaggagctgaagtcagcctcaggcattgatttcctgttcatcggggtatccagggtaaccgggagcacagcgatggcggctgccccgggcggcatgccgctgttcttcccagccaggctctggcagagctggtgaacagcacccttggccatgccgtacccgatcataccaggagtcccatccagggcagcctttgcgccagccaaggtcaggaggcctccttccttgagatgcttggtagccagatggctggagatggtcgatgtccatatgctctgcttccacatcaggtcacagttcttaaagagagacttggatttggcattgcccccggcccatcctccagcaacgcaaagaattgcatccaccttctcttcacccaagagctttccaacctcagcagtcacctggtcagcctgctcagtgaacgagtctgtcattttaacaatgatgctagcgctggcctcttcattctccaccacatcaacgctggcaacccaccagttgcgggcccgaaaagcctgcacgcatcgagaacccagagcgcccctgccgccgtacaccagcacccggcgcgcctcgcctgcagccgccgccgccgccatcctgctcctgccagcccggctcccgcagctccccc

SEQ ID NO: 77321 - DNA, 224 bp, Homo Sapiens
gccgtgggcgccgtcccgcaggaccctgtggttgggctgaccccgcttcagggtgccgtacacgaagactagggccatccgggcagagctgtaagcttgtttcttcaaggaagtgttgccttagaatccagatccacagtaagcctgagagtcttaaaaacttttgacttcagaatccttccacatgattcaagaaaaagttaagtccacttcacagggtgacc

SEQ ID NO: 77322 - DNA, 1241 bp, Homo Sapiens
  misc_feature (81)..(81): n is a, c, g, or t
  misc_feature (90)..(90): n is a, c, g, or t
ggcacgaggatttaccttcacgctggagccaagatcgctgcggggagtcccgtgaagcaccactgccctctaagaccttgnggaaggggngggggaaacaccagaaggtgtgggtgctgagctccgctgcgtcagactgccaggacctgagtggaactcagtgctgaaacctgggttctcactgcagctggatagcagctctgcccggatggccctagtcttcgtgtacggcaccctgaagcggggtcagcccaaccacagggtcctgcgggacggcgcccacggctccgcagcctttctgggctgcgcggccgcacgctggagccctacccgttgtgatcgcggggagcacaacatcccgtggctgctgcacctgcccggctcggggcgcctcgtggagggcgaggtctacgcggtagacgagcggatgctgcgctttctggatgacttcgagagttgcccggccctgtaccagcgcacggtgctgcgggtacagctgctggaggaccgggccccgggcgcagaggagccgccagcgcccaccgcggtgcagtgcttcgtgtacagcagggccaccttcccgccggagtgggcccagctcccgcaccatgacagctacgactccgaggggccgcacgggctgcgctacaacccccgggagaacagataagggggacgggcagggtgggcctaggtttgagagccctggggctccaagatgcgcccagcccatgctgggtgaaggcggaagccgaacagggccctttccaatgaatctgccggaaaggaaccaatctttcagtggcagctgattttacaaataatgttgagatacgaatagcaaggtgcttccctcccatctttctacctggtaagaaaaatttaggattttaactcccctaaatgacatttagagaactcgtgttatgcctaattcttcttcctccctcgtgttgtttctgctgttggctctgctttgagctcaagataataataaatatttaggatcagtgtaaagacttggtgttcccgttagattttagcagccctactatactgattttggcctgtaacccctgagaaagccgattttacacggttgggtagaatttgtagaaaagatccacagggcaagcatgttgtatatcagagtgcgtatagcaccattcttcctaattttcagatcaagcttcacagcaaatattaaagattatttaaatttgaagtcgatgttttgggaa

SEQ ID NO: 77323 - DNA, 1097 bp, Homo Sapiens
  misc_feature (69)..(103): n is a, c, g, or t
tagactatatgggccgccgttatagcgaacgacgagcgcagcgaagtatgtgagcgaggaagcggccgnnnnnnnnnnnnnnnnnnnnnnnnnnnnnnnnnnncagtcgacggtaccggacatatgcccgggaattcggccattacggccggggcggcgcactgatcccgcctggggccggctgagtggcacttaagcgggccatgccatgcaaccttgggcgctgccaaccgtgggcgagctctgggtgtgcgggcggcctggcgcggcgctccgctgtgtcagcgtgttatgatgccgtcccgtaccaacctggctactggaatccccagtagtaaagtgaaatattcaaggctctccagcacagacgatggctacattgaccttcagtttaagaaaacccctcctaagatcccttataaggccatcgcacttgccactgtgctgtttttgattggcgcctttctcattattataggctccctcctgctgtcaggctacatcagcaaagggggggcagaccgggccgttccagtgctgatcattggcattctggtgttcctacccggattttaccacctgcgcatcgcttactatgcatccaaaggctaccgtggttactcctatgatgacattccagactttgatgactagcacccaccccatagctgaggaggagtcacagtggaactgtcccagctttaagatatctagcagaaactatagctgaggactaaggaattctgcagcttgcagatgtttaacgaaaactaatggccagattttttgggtccttcccaaagatgttaagtgaacctacagttagctaatttaggacaagctctatttttcatccctgggccctgacaagttttttcacaggacatatgtatcatggaagaatagaggttattctgtaatggaaagtgttgcctgccaccaccctctgagagctgagcatttcttttaatagtcttcattggcaatttgttcttgtagcaatggaaacatgtgggattgctaatttcttattattaagtaattatttttaaaatatctggagtatattatcctgaacacctattcccaaccttcat

SEQ ID NO: 77324 - DNA, 1418 bp, Homo Sapiens
  misc_feature (76)..(110): n is a, c, g, or t
atgtatagatcatataggggctcctctcatatgcgaacggacgagcgcagcgagtattgagcgaggaagcggccgnnnnnnnnnnnnnnnnnnnnnnnnnnnnnnnnnnncagtcgacggtaccggacatatgcccgggaattcggccattacggccggggaccgcgctccccgccgaaatcaagctccgagtcatccgtgtggggcattcgtcccccctggcacagttggcctctttccagaaccacgttattgtttgttttacgtctaaattcgcgtcggttcttatttctctccctggcaaggtctgaagacgggtaggagaataacctgtgtcagcgtgttatgatgccgtcccgtaccaacctggctactggaatccccagtagtaaagtgaaatattcaaggctctccagcacagacgatggctacattgaccttcaggctccctcctgctgtcaggctacatcagcaaagggggggcagaccgggccgttccagtgctgatcattggcattctggtgttcctacccggattttaccacctgcgcatcgcttactatgcatccaaaggctaccgtggttactcctatgatgacattccagactttgatgactagcacccaccccatagctgaggaggagtcacagtggaactgtcccagctttaagatatctagcagaaactatagctgaggactaaggaattctgcagcttgcagatgtttaagaaaataatggccagattttttgggtccttcccaaagatgttaagtgaacctacagttagctaattaggacaagctctatttttcatccctgggccctgacaagtttttccacaggaatatgtatcatggaagaatagaggttattctgtaatggaaaagtgttgcctgccaccaccctctgtagagctgagcatttcttttaaatagtcttcattgccaatttgttcttgtagcaaatggaacaatgtggtatggctaatttcttattattaagtaatttattttaaaaatatctgagtatattatcctgtacacttatccctaccttcatgttccagtggaagaccttagtaaaatcaaagatcagtgagttcatctgtaatattttttttacttgctttcttactgacagcaaccaggaatttttttatcctgcagagcaagttttcaaaatgtaaatacttcctctgtttaacagtccttggaccattctgatccagttcaccagtaggttggacagcatataatttgcatcattttgtcccttgtaaatcaagatgttctgcagattattcctttaacggccggacttttggctgtttcctaatgaaacatgtagtggttattatttagagtttatagccgtattgctagcaccttgtagtatgtcatcattctgctcatgat

SEQ ID NO: 77325 - DNA, 997 bp, Homo Sapiens
tggaccggtccggaattcccgggatcttaagcgggccatgccatgcaaccttgggcgctgccaaccgtgggcgagctctgggtgtgcgggcggcctggcgcggcgctccgctgtgtcagcgtgttatgatgccgtcccgtaccaacctggctactggaatccccagtagtaaagtgaaatattcaaggctctccagcacagacgatggctacattgaccttcagtttaagaaaacccctcctaagatcccttataaggccatcgcacttgccactgtgctgtttttgattggcgcctttctcattattataggctccctcctgctgtcaggctacatcagcaaagggggggcagaccgggccgttccagtgctgatcattggcattctggtgttcctacccggattttaccacctgcgcatcgcttactatgcatccaaaggctaccgtggttactcctatgatgacattccagactttgatgactagcacccaccccatagctgaggaggagtcacagtggaactgtcccagctttaagatatctagcagaaactatagctgaggactaaggaattctgcagcttgcagatgtttaagaaaataatggccagattttttgggtccttcccaaagatgttaagtgaacctacagttagctaattaggacaagctctatttttcatccctgggccctgacaagtttttccacaggaatatgtatcatggaagaaataaaaggtattctggaaatgaaaaagtggttgcctgccaccaccctctggagagttgaacatttcttttaaatagtcttcatggccaatttgttcttgtaccaaaatgggaccagggggaatggctaatttcttaattattaaagagtttatttttaaaaaatcttgaggatattatcctggacacttaatcctacctttcagggttccaggggaaaaaaccttttgaaaaaccaaagttccggggggtccccctggaaaaaa

SEQ ID NO: 77326 - DNA, 841 bp, Homo Sapiens
tggttccttcccatagatgtgtaacgtgaaccttacagttagctaattatggacaagctctatttttcatgcctgggtccctgacaagtttttccacaggaatatgtatgcatggaagaatagaggttattctgtaatggaaaatgtgttgcctggccaccaccctctgtagagtctgagcatttcttgtgtaaatagtcttcattgccaatttgttcttgtagcaaatggaactatgtggtatggctaatttcttagttattaagtagtttattgtagaaatagtctgagtatattatcctgtacacgttatccctaccttcatgttccagtggaagaccgttaggtaaaatcaaagatcagtgagttcatctgtaatatttgtttttacttgctttcttactgacagcaaccaggaatttttttatcctgcagagcaagttttcaaaatgtaaatacttcctctgtttaacagtccttggaccattctgatccagttcaccagtaggttggacagcatataatttgcatcattttgtcccttgtaaatcaagatgttctgcagattattcctttaacggccggacttttggctgtttcctaatgaaacatgtagtggttattatttagagtttatagccgtattgctagcaccttgtagtatgtcatcattctgctcatgattccaaggatcagcctggatgcctagaggactagatcaccttagtttgattctattttttagcttgcaaaaagtgacttatattccaaagaaattaaaatgttgaaatccaaatcctagaaataaaatgagttaacttccaaaaaaagtatgaaaaaa

SEQ ID NO: 77327 - DNA, 636 bp, Homo Sapiens
  misc_feature (102)..(115): n is a, c, g, or t
cttcctatttatttcaacactgggacaaatgctgggagcaggtttatctgggttaagctgagtttaaaatacccagttttaatatccttttcccccaggtannnnnnnnnnnnnnaaagaaaatgagtagatacgtatttaaaaacttaacccacttaaaatttgccttacctttcatgactgtcaagttttatggccagagaggacaaaacagttcaaaattaaataattgaagtcctccttgagtgatgtcttagggtttattccctgagaggtggtttgtgccatctagactgaactttgggtaactatcgagtgccagttacacagcttattaaatccagagtcttttcaataaaggttaagtgacttcctcaaactagacttagatttaaaccaggggtctacctccaaagtctattattaaatgctgaaacacaacaagacttacttattactaccgtatgtccactggctttggttaaaactgagaacaaaacagctgtaacatgctttaagtaacaattagcagtgattcccaagtctgctgttctcaatcctaaaacacatcacccttacctgagttaatcctagcacaccaactttgctacttttcctcttggtatttagtaagca

SEQ ID NO: 77328 - DNA, 958 bp, Homo Sapiens
acatgacagaaaaatcctattgtgagatttaatgtgcgttatgtgttttttatttatagcgatggttaatccactttcaatactgttgtttccaaggtagttctcattttcttttcccttctcctattccctttttccagtccctctacacctctccccagatagaggccagattcaagcccataggtctcctgagaaggtcagcaaagccacagctattttgctgtcttgcttccagtgactgcccaagaatgaggcagctggacctttgtctcaaaatgctctctctcggtgggccgccctgtggcagttccagacactgctggacttttggcatcaatgcagaggccccatatgttgaacagtctaagaggcagcatatgcatctttgagagtcagagcagagatggagagagagaatgtagggaggatgtgtttatttgaattttagccaatttaatagtatctcaagtttttaaaaaaagataaatctttttaaaaaatccttagggaatgagccaactataagagaacatcaaaatgtaatcatacggaacatgtgttcttcctcatctgtcaaaggaggtggtcggactagatgatttctaagacctcttccagttctgatttcagctgtagaaaaagcatagtgggatcactgtatagggagagattcttccaatatccataaatttatatctttaaaaaattcaataaattatttgcagcatatttttcaaattgtacataacaagcatgtgttctttttataaaggaaaaagtaaacattttaaaattgaaaaaatttatactccaaatgcagccatatgcttcaactaaatgtgagaccacccaccccttcctacccaaagaaaggtgttttctttgtctcatgcaggacttacatttgaaaaagagtttctaatctggcaatacacatactttaaaaatcaaaaaa

SEQ ID NO: 77329 - DNA, 1278 bp, Homo Sapiens
gggcgagcggagacgcaggccgaaccgcccagcgtggggccctagccggcgtcccctgcctccagaacgcgggctggaccccaatggagaacaggtggtgtggcaggcgagcgggtgggcagcccgcatcatccagcacgagatggaccacctgcagggctgcctgtttattgacaaaatggacagcaggacgttcacaaacgtctattggatgaaggtgaatgactaaagctttgctactggggctgaggattccggataccaagacgcaaacactttcactttgagctgggcaaatcttacttggcatcaacttggatggctcgcatatgacaggaaactggattgccaaggcatggcagactgagctggaggaagatgtcagaaatgtttgccctgaaatcagttacggacaaaatgttggctacaacttgaggagaaaaatcacccccaaaggagtggacatttcctaacaattctgtatggaggaaggtggggtaattgcattcgtctgcagtagacacgagttcctcggacctgtataatctcccaaagccaaggtttggtaataatgtagtccccaaatacctgaaagctgtctttaaaaatgcaggtaagcatgtgactggccatttgtgccgagttcttatttttacggagggcttgtggccttagacgccagtttgcttatggaaatgaaacagaatagtccctgttcaaggatgtgtttcatgacagcacgagtgtaaatgagtgcccacacattttaacagccttgggcaggattttgctgctgagatccctagagcagctggttcttggctcattcttggggtagaggccgcggatcagggctgggggcaggggtgacaattgagaagtgcactgagccctttcctgttaacaattgggcatagaaagcaggattagtacttcctggttatacacttattttgtaaaaatagaattaatatcacagcaaccaatgtgtaggtttaagaaagtggccaaagtgctgggatcagttgtgagccacactacccagccaaactccagttttagttaaactgtttcacctcatttttatgctgagttttgtaaagtaggtattcttgctgaacagagtcctgaaaatcaaactatacaagtagtaggaagtccattaagctgtttagaggaaaaagtgttataaatggcagttaaatgaacccaggaaagacccatcctcctttgtggctttctctgaggccccatgaggccaagcagaagcaaactggc

SEQ ID NO: 77330 - DNA, 441 bp, Homo Sapiens
cagtgcatgtactttgggctgtccttcagccgggtgggagctgatttccggggtcagttggctcctgttttccagcgggtggccatcagcactttccagaaagcaaatcttacttggcatcaacttggatggctcgcatatgacaggaaactggatcgccaaggcatggcagactgagctggaggaagatgtcagaaatgtttgccctgaaatcagttacggacaaaatgttggctacaacttgaggagaaaaatcacccccaaaggagtggacatttcctaacaattctgtatggaggaaggtggggtaattgcattcgtctgcagtagacacgagttcctcggacctgtataatctcccaaagccaaggtttggtaataatgtagtccccaaatacctgaaagcgtgtctttaaaaatgcaggtaagcatctgactggc

SEQ ID NO: 77331 - DNA, 1155 bp, Homo Sapiens
  misc_feature (596)..(596): n is a, c, g, or t
gaaatggaatatgtttcatatgccgttaatccgggggactctggaatgatattgctccagttggcaatctactgtgtattcttgaacacggtcggatccgtcgcaatctgtcgtcgccgtacttccggttgtctggtcctgcatgcttgttcatctggtctaaccttgcggtcgttaatggaaacgtctgttccaatggagggcttgaagtttaaccgctttaaactattccttcagggccccgaaaatggcctttgtcttccggtccattccttgacttgccaactgcctagatatacgagtcactattgttcccatatttgcttaacatccatttcgtaggccttcccccgtgtgtccattctgctttgatagcagtcactccagttaccgtgtccatctttctcagacgaggaccctactgcgtgcccttgccatgggtgatgcacaactgtgaaatgagagtgccatcttccaatggtcttaggtgtctacagaaggtctcacaattcctgtccaggttgctggagtactcgacctttaccggggcatagtccgtccacctggactctctctctgggccagtgcatgtactntgggctgtccttcagccgtggtggcgagctgatttccgggtgtcatgttggctcctgttttaccacgcgggtggccatcagcactttccagaaagcaattcaggaaacagtggagaaattccaggaagaaatgaactcctacatgctcatctcggctccagccatcctgggcaccagtaacatgcctgctgctgtgccagccacccagccggggacgctgcagccacccatggtgctcctagatttcccacccctcgcctgctttctcaacaatattctggttgccttcaatgatctgcgcctctgctgccctgtggccctggcgcaggatgtgactggggccttggaagatgcccttgccaaggtaactaaaataatcctggccttccatcgcgctgaagaggctgccttcagcagcggggagcaagagctctttgtccagttctgcactgtcttcctggaagaccttgttccgtatttaaatcgctgtctccaagtcctttttccaccagctcagatagcacagactttaggtaagagaatgaaaattctgtaaact

SEQ ID NO: 77332 - DNA, 633 bp, Homo Sapiens
  misc_feature (56)..(149): n is a, c, g, or t
  misc_feature (309)..(339): n is a, c, g, or t
  misc_feature (349)..(349): n is a, c, g, or t
  misc_feature (352)..(366): n is a, c, g, or t
atttcggaacgaggcaacaacaaaacccactcaggctatatttaaactagatgagnnnnnnnnnnnnnnnnnnnnnnnnnnnnnnnnnnnnnnnnnnnnnnnnnnnnnnnnnnnnnnnnnnnnnnnnnnnnnnnnnnnnnnnnnnnnnntatactgatggggtatctatactgtttggcatcaatatggtggccactggggagcatggtaccaccaggttgcctaaggaggggtgaactggcccaggttggaaacagagtgggtcaaaacttctgtgctggtcagtagtgggatcatgcctgtgaattnnnnnnnnnnnnnnnnnnnnnnnnnnnnnnnagaccccatnttnnnnnnnnnnnnnnnctaatgggaaagtgcttcattttggaagtgctgaaattctgaacccactagtgcaccagtggtaaattatcatgttacctgttatgccagatgaccaagagctaaggacatccccctgctaaaagcagtttatttcttgtacaccaagggtcaggcctcatacagaaaacatgagcaaactgatgactatgaaaataggaactgttactttttaatgttttctgcaaaagcttttgaaataaatagttcactgttttgcaaaaaaaa

SEQ ID NO: 77333 - DNA, 695 bp, Homo Sapiens
cccaaatgcaagttctcgtacgccatgccccgaggaggctgcatgcactttcactgtacccagtgccgccaccagttctgcagcggctgctacaatgccttttacgccaagaataaatgtccagagcctaactgcagggtgaaaaagtccctgcacggccaccaccctcgagactgcctcttctacctgcgggactggactgctctccggcttcagaagctgctacaggacaataacgtcatgtttaatacagagcctccagctggggcccgggcagtccctggaggcggctgccgagtgatagagcagaaggaggttcccaatgggctcagggacgaagcttgtggcaaggaaactccagctggctatgccggcctgtgccaggcacactacaaagagtatcttgtgagcctcatcaatgcccactcgctggacccagccaccttgtatgaggtggaagagctggagacggccactgagcgctacctgcacgtacgcccccagcctttggctggagaggatccccctgcttaccaggcccgcttgttacagaagctgacagaagaggtacccttgggacagagtatcccccgcaggcggaagtagctgagggcaagggtcccgatgagggtcccatggcctgctccctcaggaacagctccagcaccaataaagaggcatcttaccaaaaaaaa

SEQ ID NO: 77334 - DNA, 171 bp, Homo Sapiens
gcctactactactactatacggctgcgagaagacgacagaaggggtacccttgggacagagtatcccccgcaggcggaagtagctgagggcaagggtcccgatgagggtcccatggcctgctccctcaggaacagctccagcaccaataaagaggcatcttaccacccagt

SEQ ID NO: 77335 - DNA, 1146 bp, Homo Sapiens
  misc_feature (26)..(26): n is a, c, g, or t
  misc_feature (1085)..(1093): n is a, c, g, or t
gaaccgccttggtgcttctgggatantccactactatacagctataactaggatgtctactggaatgttggctttttgaaatactatgagctcaacaaggtgcccaattttctactggctgcaccagtggctatactggtcgcctgggcaacttggacatacgtgaccactcacccttggctctgccttacacttgggctgcaaaggagcaagaacaataagaccctagagaagcccgatcttggattcctcagtcctcaggtgtttgtgtacgtggtccacgctgcagtgctgctgctgtttggaggtctgtgcatgcatgttcaggttctcaccaggtttatgggctcctccactcctattatgtactggtttccagctcacttgcttcaggatcaagagccgctgttgaagatccttaaagactgtgccttggaagcctcttgcagaggactccccaccaggacaaaaggtccccagaaatcctatcatgggacttttgtatcactggaaaacctgttctccagtcacacgatacattctaggctacttcctgacttactggctcctgggactactcctacattgcaacttcctgccttggacatgacctggactctccagggacaggttggaagccaacttaacccaggggtctgaaagtaaaaatacacattggaactgcctctgctgccctgggatcattactgtgtcccattataatctttctctttctcttttgaaagctggtcaggaatgggagaagtgtcagacactagagagccccttctggtcctggctagggcaaattttagacaactattttctctgtaagtgaagattgtcgtattccaagtctaaaatacacctggatctgtctagtcaatcaacatagcagagacagtcttaaacctaccattgacctgtgtgtaaatttaaatgtcaatttattgaagtgtaaatttcatcaaaggcattagctgacaggctggtaacagtccacacaagatggtataggcctgaacagtgtagtggcagtaataaagtgggaccattttttccaaatgcgacattgtttctgatgnnnnnnnnnatgatttgtgcatgtatttttatatgaaaaaaacttacaaagatatgcaaatt

SEQ ID NO: 77336 - DNA, 2982 bp, Homo Sapiens
  misc_feature (1265)..(1282): n is a, c, g, or t
cggtccggaattcccgggataagagggcgttgagcaactccaaggatggctgctctaaagaggacgtagacaagtttggcaacgagatcacccagctggcccggcccctgcctgtggagtatctcatcatagacatcacaacaactttccccaaggatccagtttacactttttctatttcgcaaaatccatttcctattgaaaaccgggatgtattgggtgagacacaggacttccatagcttggccacctatttgtctcagaatacctcatctgtgttcttggataccatctcagatttccacctcttgctgttcctggtcaccaatgaagttatgcctctgcaggacagcatcagcttgctgctggaggccgtgcggaccagaaatgaggagctcgcccagacatggaagaggtctgagcagtgggccaccatcgagcagctgtgcagcacagttggcgggcagctcccaggtctccatgagtacggcgccgtcgggggctccacacacacggccactgcagccatgtgggcctgtcagcactgcacgttcatgaaccagccaggcacaggccactgcgagatgtgcagcctccccaggacctagggcgcctgccctctgctggctaggaccgggcccagcccagcccttcctgaagccagaagcgttgctgagtgtgttccctgtaactgccccatagtgggcagccctggaggaacaaggggctggctgtcctgggctccctgacccactgaagcttctcagcacgttcctccctggagagcgggcgccacggctggtattctgcaggctgaatgcagtctccagactggaaacgcagagcggctcctcacgcctaatcctgttgacaagtcccccgccgtgttggaaagacctctcgcctctacgtggcacctggaattggggcgcacagggaggggccgatgctgccaccacccagccttctctttattttcagtgctttttgtttggcctccctgcccccatgtttttctggctgggagctcctggttacccccttgtctgactgcttggtggcaggcaccctgcctgtgagggccactttcctcttctagtagctgttgtctggtggggacgcagtggccctggacacggctcccctctgcaggtctgcaggtcggtttgctgcctgccctcctcctctcacccgatgtccaggtgggattttaaagtctgcattggttataataacagttatcagtaattcctgcccagaagacnnnnnnnnnnnnnnnnnnaagataaaaactgcacaaaagggggagtgagagagactagtttccacatccttccctcctttagtgaagcccccgaggttgtgtccagggtgatgagtgtggacgggggcaccagtcagttctcccttgaagtaaacctcagtgcctgagacttttctaccaagccacacagctgcagcaactgcagatactgcgggctgagcaggagcagtggtggcgcctgccctgaggctgccctgcgatggcctgggtgggagagctgggtcaccggtgccgatgctctggccctccccaatacgctgcttcgtcccactgcaccgcctggctgagggcgttaggggctgtgcctcttgtgagggccatttgggacctccctggggcactgcacaattgatagtgtaccaatagagggagactgggcgatctggaacagcacgtggtggggtcctgcttgtgtgctctgcgttcctctgtggcgtggccaggccggggcatggctcttacccggggagtggtgggcatctcgatgcttctttgccttaatgatggccacatctgggctgctctgcacccacgggagaggctggcccagctgcagactgcttagggacttctgtgtccatcctggggggtaagcccacgtgacccacattcttggcactatgaacagagaacatttgcctgttggcttctgaagtggtcagggccatggctgacacctccaggtccgcctggcatgggacaccaagtggaaggcccaagcagctcatctgctcttgggaccaggggccagttgggttgggtctggtcacggcagagctattgtggagggtcaggaagggtggagaggagctgggttgaagcggactgctgcggatgcaactcccagcttgcccaccgcgggctgtctgctctccctcctagcagctgtcacactgaagttttgtcctctgctgtctcctctggtcctgagatgagctgtgagcctaggtggccaaggcttcctgcattgcttccctgtgagtccaaggccttcccccaccactgggcagaggctggacagcacggacttctagagagagccgcgttgccagttcctctcccactcgctcgtccttatccaccacgctattatagtttccgttgtcctccaccagcatttcccttactctgaagttccggcattcacatcattcatgttttcttttgtcttttagctaaaggaaaagcattggcgatttgtctgattctggttttgagttactctttgttcagtaatgcactttattttattgtccaaagagagtcagagctaagcatacaggcttgggggtgagccctgctgtgagagttcaggccctgggaggctcagccacctcctcttgtgggaaggaggtctcagccccacctcgcatcttcacctgcccttggtgtggacacaccctctcatgctaccagcaccataatccagtgggggtgactgggtgcacacctgcccaggtgaacacagcggctgccagtctcctggtcccgagaggaggtggggcctggccctggctccctccaaccagctgctcctgggacacaggtgctcctgcttcggctctgtttcggctcacaggtgtgcatcactgggcttggatttgcattacattgaccccagccctgcagtggaacctaataaaagcgcctgaagcaaa

SEQ ID NO: 77337 - DNA, 716 bp, Homo Sapiens
aaaaatgaaacttttcagtgattcactttactaacattctatttgagaaggcttattggtaaagtttggggataaaggcattgcttaacttcttatataatttaggtataaattctgtgacatgctcttgagctttaccctagttgaacatacatgtgtagatttacacatactgtttcattctaaaatttagaaattgttcattaaatcccatttgaggtataagtcactcaggaagttaaaatatctctacacgtatatttttacattaaaaatacagtgttagcataaatccccttttcaggaagaacaaaaatgtcagtgcatagttagataaaatggtaaaatgttttactgaaagcatacttttttggaaaatagattcatgaagcctttaagtgctgcttctgtcagtcaaacgttaaaaactttaacattttcaaagtgcccagactgtgtacaaagacacatgtaatggagattgtacaggttgtttttttgtttgaacctttgaaagagtttaatcttaacgttttctaattttaaaattttaaaatcttgtttaacaaaagcttgtattaagatactgttttcatttcattacagaattgtttataaaagttcatttgttgaaaaataaggatcctttttaataccacagcatttgtactgttcctttttaatatactgaaaaaataaaagggagggggtgtgtt

SEQ ID NO: 77338 - DNA, 693 bp, Homo Sapiens
tgtcatctgtgcaggcaggtaggcggctgccgggtgcagcaggcagcgtgactgatgtgaagaccgcccaatcctcacgtgctaagacccgagtatcgtgtttaattgcagtgtaggcacgtcgccattcaaactcagttctggggtggttttgcataaagttttgccaacgtgttcttttttctgtatgtattattgcctttttataaaaggtgttgaagtattgtctcagtgataaaaagaaagagatgttaatggttgttgtatatttcaccgtatccaattgtaagtatttgcagggtacagcagagccttagcttgcaagagcgtttgtgcaggaggtgtccctcaacacccaggagctgaagggattggaaaggtttggattctttgtaaatgtcctgcttttctttctctctgtgtgtatctatttacatgccttagcacacgccctcccatcctgatccctttgccctgtcgccggaacaaccagaatgctggtgcgctgccggcacagtacaagttgatgaaaccctaatcagttatcttgtgtgacaggggaagaagagaaactccatagtattccttgtagaatatacatacctgtaggatgctgtgtaatgggaaaccatagaattgggcttttgtcatttcaaagttggagaaatgtatgaataaaatgtataaaacctg

SEQ ID NO: 77339 - DNA, 2348 bp, Homo Sapiens
cagtcgacggtaccggacatatgcccgggaattcggccattacggccgggggtggaggtgagctgtcgcgggcggcgcccggccttgctcaacgcccagcagtccccaccgtcgctgccgccgccaccgccctcggccgctgccgaggcctcctgcagccatcatgtccgccagcgccgtctacgtgctggacctgaagggcaaggtgctcatctgccggaactaccgtggcgacgtggacatgtcagaggtggagcacttcatgcccatcctgatggagaaggaggaggaggggatgctgtcgcccatcctggcccacgggggggtccgtttcatgtggatcaaacacaacaacctgtatctggttgccacatccaagaagaacgcgtgcgtgtcgctggtcttttctttcctctataaggtggtgcaggtgttttccgagtacttcaaggagctggaggaggagagcatccgggacaactttgttatcatctacgagctgctggacgagctcatggacttcggctacccccagaccaccgacagcaagatcctgcaggagtacatcactcaggaaggccacaagctggaaacaggggccccgcggccaccagccaccgtcaccaacgcggtgtcctggcggtccgaaggcatcaagtatcggaagaatgaggtgttcttggacgtcatcgagtctgtcaacctcttggtcagcgccaacggcaatgtcctgcgcagcgagatcgtgggctccatcaagatgcgagtcttcctctcgggcatgcccgagctgcgcctgggcctcaacgacaaggtcctctttgacaacacgggccgcggcaaaagcaaatccgtggagctggaggatgtgaagttccaccagtgtgtgcggctatcacgcttcgagaatgaccgcaccatctccttcatcccacccgacggcgagttcgagctcatgtcctaccgtctcaacacccacgtcaagcctttgatatggatcgagtcggtgatcgagaagcactcccacagccgcatcgagtacatgatcaaggccaaaagccagttcaagcggcggtcaacagccaacaacgtggagatccacattcccgtgcccaatgatgccgactcacccaagttcaagacgacggtggggagcgttaagtgggtccccgagaacagcgagatcgtgtggtccatcaagtccttcccgggcggcaaggagtacctgatgcgggcccacttcggcctgcctagtgtggaggccgaagacaaggagggcaagcccccgatcagtgtcaagttcgagatcccttacttcactacctccggcatccaggtgcgctacctgaagatcattgagaagagtgggtaccaggccctgccctgggtgcgttatatcacgcagaatggagattaccagctccggacccagtgaggggctgtcgcagccaacaccccggcctcggggctcctggtggcagcaccaggggacacacctgccaaacccaccagatggaggggccctccctggtctctggccaccctcccagcctctgcccagggacccctgccttccccaggccatctgctctgccgtcgacactcgtctcagaagcccctttcccagaagaggctggtcttcaagaagtctcgtttctttgcccctgaagtcagtttcaggggaaggatgtgaaatttttccgtgtagaggttacagccttttatgctgttgagctcccaggtaccaaaaagcttggccaacgcttgccagccagccagctgcaggtggcatctgccacgaaggaagcgccagcctcgccaggccagcaggggcgtcgttttgttgccattttgttgaacgttatgggtttatgggtgttcctggaacttgtctttgtgcattcgttgctgtttgtgttaccctcactgtccccatgtcccacccacgtcctacggcactcaggaagcacttggtgaggacgagccctcacccttcttgtcttccttcccagcagcgcccgcagcgggccatttacacgtcgaggctggcacctggcgcgctcgggggccactgtagcgtctgcctgctccctggactcgcaggcctcgcctgtggcgccttcccagggccagcctgggtcacgagatgctgtcactcagccagatcagtattgacccaccaggggaggtggggtttggtgagagacgccagcctcagactttttcccactgagggtccagagagcggggccacgtgtcacccacgtctgcgcttggtcacccgtcctccccaccctgtgtgtgtttatgtcatagttacattaaattccattcattgaataaaaaaa

SEQ ID NO: 77340 - DNA, 1754 bp, Homo Sapiens
ggggcaggaagaaggaagcggcgccgccatcgcctcccggcgctccctccccgactcctaagtccttcggccgccaccatgtccgcctcggctgtcttcattctggacgttaagggcaagccattgatcagccgcaactacaagggcgatgtggccatgagcaagattgagcacttcatgcctttgctggtacagcgggaggaggaaggcgccctggccccgctgctgagccacggccaggtccacttcctatggatcaaacacagcaacctctacttggtggccaccacatcgaagaatgccaatgcctccctggtgtactccttcctgtataagacaatagaggtattctgcgaatacttcaaggagctggaggaggagagcatccgggacaactttgtcatcgtctacgagttgctggacgagctcatggactttggcttcccgcagaccaccgacagcaagatcctgcaggagtacatcactcagcagagcaacaagctggagacgggcaagtcacgggtgccacccactgtcaccaacgctgtgtcctggcgctccgagggtatcaagtataagaagaacgaggtcttcattgatgtcatagagtctgtcaacctgctggtcaatgccaacggcagcgtccttctgagcgaaatcgtcggtaccatcaagctcaaggtgtttctgtcaggaatgccagagctgcggctgggcctcaatgaccgcgtgctcttcgagctcactggccgcagcaagaacaaatcagtagagctggaggatgtaaaattccaccagtgcgtgcggctctctcgctttgacaacgaaccgcaccatctccttcatcccgcctgatggtgactttgagctccatgtcataccgcctcagcacccaggtcaagccactgatctggattgagtctgtcattgagaagttctcccacagccgcgtggagatcatggtcaaggccaaggggcagtttaagaaacagtcagtggccaacggtgtggagatatctgtgcctgtacccagcgatgccgactcccccagattcaagaccagtgtgggcagcgccaagtatgtgccggagagaaacgtcgtgatttggagtattaagtctttcccggggggcaaggagtacttgatgcgagcccactttggcctccccagtgtggaaaaggaagaggtggagggccggccccccatcggggtcaagtttgagatcccctacttcaccgtctctgggatccaggtccgatacatgaagatcattgagaaaagtggttaccaggccctgccctgggttcgctacatcacccagagtggcgattaccaacttcgtaccagctagaagggagaagagatgggggcttgaacacggggcttccttacagccccggatgcagattttagagggagggcaggtgcgggctgtgtgtgtctgtgtgagggcaggtcctggacttggcagtttcttgctcccagcacccgccccttcctcacctcttccttattccataggctgggagagaaactctctctgcttccctcgcccttggagctttccccatccccctgattttatatgaagaaatagaagaggggcttgaagtccccctcgcgagtgccttcttgcaattacctgccttagcgggtgttgcgggtccctccttcacagccgctgagcccagaggtcccgctggcccctcctctgaattttaggatgtcattaaaaagatgccatctaaaaaaa

SEQ ID NO: 77341 - DNA, 716 bp, Homo Sapiens
  misc_feature (75)..(75): n is a, c, g, or t
cgtgagcatctctgtggtcagcggtagcaccagcactggaggcatcagcggaggattaggaagtggctccgggtntggcctgagtagtggctttggctccggctctggaagtggctttgggtttggtggcagtgtctctggcagttccagcagcaagatcatctctaccaccaccctgaacaagagacgatagaggagacgaggtccctgcagctcactgtgtccagctgggcccagcactggtgtctctgtgcttccttcacttcacctccatcctctgtctctggggctcatcttactagtatcccctccactatcccatgggctctctctgccccaggatgatcttctgtgctgggacagggactctgcctcttggagtttggtagctacttcttgatttgggcctggtgacccacctggaatgggaaggatgtcagctgacctctcacctcccatgggcagagaagaaaatgaccaggagtgtcatctccagaattattggggtcacatatgtcccttcccagtccaatgccatctcccactagatcctgtattatccatctacatcagaaccaaactacttctccaacacccggcagcacttggccctgcaagcttaggatgagaaccacttagtgtcccattctactcctctcattccctcttatccatctgcaggtgaatcttcaataaaatgcttttgtcattcattc

SEQ ID NO: 77342 - DNA, 1070 bp, Homo Sapiens
gcataaactgccctgacttgggtttctgccacttgcaaccaagagtccgacctaccctcccatcagtatcactgacctttgcctcagaggccagaaggccaagcttccaaggaccagaagaaactgggggctctaggagtcacatgtttacattgcagagaaggaaatgaagaactcggagaaggcaggcagaagcaaagccaggcagagatcctcagattcagctcccaattctccgtaagaaacgagactcccttccaagtgcggtagctgctcttctgtgtcctgcgggtcttccctgcagcccctgcgaacctcgccccttcctctactcccctggcccggaaagtgcccactcacctgctgcatcagcctttctgccactctggggtcagtgaggtcttccggggaagccacactcagccgcaggaggaggaaacctccattttcacctgcactcacgtctgtggtcggcctcgtccgggcagtcgtgggcgtggctgttgggggcttcatcgtggtcttcgctgaggttgtgatcttggctaaggtgctgttcgtccctcggctgctgttggttgtagtcggagggacagaaggaagagggtccctgctggtggggaagggccccttggttgcgatgtccatggtcggtgtctctgaaggggtgaagttcttgagggcggcttccgaggggctgtaggaggaagcagagctcccagcaaaggaagttgttttgcccactgctgacccagcctctatggagaccggagctgctcctgagactttgacgtaacttggtgtctcaacagagagggctgaggtttcttccaggggattcctgctaactgtgaccaaagctccactgagggtcgtggccccgggtgctgtcacttctctttctgtggcgctgttagtggggagtggggtcccaaccgtggcatgaggtgcagctgactctgtggtgccggctgtggacaggtctcggcagaggctgtgacctcagtgatgtgtggttttgcttcagtggagtcaggcagagctggtggatcggagtttacgagccttct

SEQ ID NO: 77343 - DNA, 855 bp, Homo Sapiens
agacaccaagttacgtcaaagtctcaggagcagctccggtctccatagaggctgggtcagcagtgggcaaaacaacttcctttgctgggagctctgcttcctcctacagcccctcggaagccgccctcaagaacttcaccccttcagagacaccaaccatggacatcgcaaccaagggcccttccccaccagcagggaccctcttccttctgtccctccgactacaaccaacagcagccgagggacgaacagcaccttagccaagatcacaacctcagcgaagaccacgatgaagcccccaacagccacgcccacgactgcccggacgaggccgaccacagacgtgagtgcaggtgaaaatggaggtttcctcctcctgcggctgagtgtggcttccccggaagacctcactgaccccagagtggcagaaaggctgatgcagcagctccaccgggaactccacgcccacgcgcctcacttccaggtctccttactgcgtgtcaggagaggctaacggacatcagctgcagccaggcatgtcccgtatgccaaaagagggtgctgcccctagcctgggcccccaccgacagactgcagctgcgttactgtgctgagaggtacccagaaggttcccatgaagggcagcatgtccaagcccctaaccccagatgtggcaacaggaccctcgctcacatccaccggagtgtatgtatggggaggggcttcacctgttcccagaggtgtccttggactcaccttggcacatgttctgtgtttcagtaaagagagacctgatcacccatctgtgtgcttccatcctgcattaaaattcactcagtgtggcccagaaaaaaa

SEQ ID NO: 77344 - DNA, 542 bp, Homo Sapiens
gaaatctttcgggtaagagtatggatggttcttcttttacccaatctgcttatagctttttttgtaaacagggaaatgttgagtggtacttgtattcccttatcaaattaatcacatagcttttatacagaaactcttcctgtgtgagctgttaaggtgccaaattggctgtcatttgtattcatgacacataccataaagcatctgctaatgctttaatggattgattcaattaagacctgagtgacactatttgtaaatataactagttgtgaagcacacatacctttattttgggaatttatgagaaaatatagaaaaccacagatcagggattcatatatgtagctcaaaaattcccaaaagtttactgttagagttggcaatttcctatcactatttcagtgtcagaacaaactgaaaataatggctcgtgtttatgttgaagataaatagcaccattattgggggaagttattcaaaagcaggcttttgagcaccatagtctaaatgccaataaaaataattcatacataaaaaaa

SEQ ID NO: 77345 - DNA, 451 bp, Homo Sapiens
aagcgacctttttctgagccaggggaccaccatgggatgttgacctctggcaaacggtcacatttggagtccagcagcagaccccactgaggggctgccgagcctcagggcaggtctcccgcccggcatgtgtgttcaggaactgagcctggggacgcccacccacacccactgctatgtggagctcacagcctcacatgtgaacacccgtgtctgggttgcctggggtgatcctccctcctgcgtggtggctgtctctggaaagcatccctttgccgctgccacgggcagccccagcccccgtccgtccaggctcacccacagtagtgatgcagacgtgacgtgggggaaaggggctgagccctgtggctgggttctgacaactgtaacggttttgtcgagcttaggcccctttggagggagaatcaataaataacaaacaccaactaaa

SEQ ID NO: 77346 - DNA, 2198 bp, Homo Sapiens
  misc_feature (1399)..(1399): n is a, c, g, or t
  misc_feature (1436)..(1436): n is a, c, g, or t
  misc_feature (1461)..(1461): n is a, c, g, or t
  misc_feature (1470)..(1470): n is a, c, g, or t
ggtaccggtccggaattcccgggatcgggcgcgccgggcctggggaaggggcgggcgcggggacccgatgcgcgggagcggaggccgagatggcttcggcgggaggcgaagactgcgagagccccgcgccggaggccgaccgtccgcaccagcggcccttcctgataggggaccagcggttccaggcgggaatcccgcttctgtgtctccagtcgaccgtgtgtgagaagatcatggagttgctgggacagaacgaggtggaacagcggcagcggaaggtggtcatcctgagccaggacaggttctacaaggtcctgacggcagagcagaaggccaaggccttgaaaggacagtacaattttgaccatccagatgcctttgataatgatttgatgcacaggactctgaagaacatcgtggagggcaaaacggtggaggtgccgacctatgattttgtgacacactcaaggttaccagagaccacggtggtctaccctgcggacgtggttctgtttgagggcatcttggtgttctacagccaggagatccgggacatgttccacctgcgcctcttcgtggacaccgactccgacgtcaggctgtctcgaagagttctccgggacgtgcgccgagggagggacctggagcagattctgacgcagtacaccaccttcgtgaagccggccttcgaggagttctgcctgccgacaaagaagtatgccgatgtgatcatcccacgaggagtggacaatatggttgccatcaacctgatcgtgcagcacatccaggacattctgaatggtgacatctgcaaatggcaccgaggagggtccaatgggcggagctacaagcggaccttttctgagcccaggggaccacccctgggatgctgacctctggcaaacggtcacatttggagtccagcagcagaccccactgaggggctgccgagcctcagggcaggtctcccgcccggcatgtgtgttcagggactgagcctggggacgcccacccacacccactgcttcctctcggcgcaccccaggggaagtgttagcagcgaggccttcctcactcaggagtggaaactcaggatgtgtcactcagactcaacttgctgggacactgacaggcgttcctgaggttttcagccacttaggctcgttgcggtttaaagatccctctaggtcactgagaaatgccacagaatgtgcaggaagcctgggaggcttctgtgaggaatgtgaggcacattatcggggaaattgaggagacagcctagacactggctggcctgatgttttgttgacagtgaacccacagtgggagagagttttttccagtctgatctggttcttacacactcacacacataactcaaaagttttgtgaacaagtnactttcctctttttactatgttacatgtcctcatgtntttcctgttttcctgtttcataacnacaaggctnggttgtggcctaacaaacctatatttcatagaacccagtggtttgcagtccaagcgcgtggcctacacggatatggggagccactgagggatgttttccccccttgcttgtgccttaaaggcagagaagcgaggcggatgccctggaagcacccagcatcacacccaggcttgtgcggggccaggctgggagcccatgcagtagggcagaaggcagcggaggccaggtctgtcccggctggagaacagcgtccacgcagtcctgcctggggtcaggccctcactgaccctcaggggagcccccaaggtgctgtctgtctagacaggctgtcccaccccagggtggctagtggccatatgcagggaatggtgcttctggctgtggcacgcactggatcacccaggtcccagcagacatggccgcccaaagtcagcaagcctcctttgtgctatgtggagctcacagcctcacatgtgaacacccgtgtctgggttgcctggggtgatcctccctcctgcgtggtggctgtctctggaaagcatcccttgccgctgccacgggcagccccagcccccgtccgtccaggctcacccacagtagtgatgcagacgtgacgtgggggaagggggctgagccctgtggctgggttctgacaactgtaacggttttgtcgagcttaggcccctttggagggagaatcaataaataacaaacaccaactacaaaaa

SEQ ID NO: 77347 - DNA, 685 bp, Homo Sapiens
gcggcccgcaacgggctcctcaccaaccactacgtgtgtgaggtggacgggcagaatgttatcgggctgaaggacaaaaagatcatggagattctggccacggctgggaacgttgtcaccctgaccatcatccccagtgtgatctacgagcacatggtcaaaaagttgcctccagtcctgctccaccacaccatggaccactccatcccagatgcctgaagccactgcagggcagggcaggcagggggggcttcccgccctcctgcagcaaagggcaaccaccctcggatgatgggttgcagccggcctgctgcttaaggtgggggctgccatgaggggggcgtgtccaggagggtgaccatgggatggcttatacacacaggcctccttggagcctcagactccaagctaggctgaggctcaggcagggcccacaggcagccgattctcttgtgctgatttaaatgctggacacggaggcaggctgtttaaacgctgcttaaagtcgcaactgggcccctttcaagaaattttgctctaccaggaaaacagttacacattttaagagaacagagctacgttctttgtgagagctttttccttggcttgacttgctctttgtcacagactgcataagttgtcagccttgactatcttttgaataaagatttgattttaaacaaaa

SEQ ID NO: 77348 - DNA, 1012 bp, Homo Sapiens
  misc_feature (879)..(879): n is a, c, g, or t
gtagcgaggcctgggtggcgaattcggcacgagggccggtcctcgaggcgagaagggagaagctgcactgacggaggatgacatccggggctttgtgcgccaagagatgagtcagcactgtgcctgccagggccagttcatcgcatctggatcacgacccctccctagttatgctgcagacactgccggctcccagctccatgctgtgcctgtgctccgcgtctctcatgcagaggaggaagagcgggtaccccctgaggatgatgagtactctgaatactccgagtattctgtggaggagtaccaggaccctgaagctccttgggatagtgatgacccctgttccctgccactggatgagggctcctgcactgcctacaccctgcgctggtaccatcgggctgtgacaggcagcacagaggcctgtcacccttttgtctatggtggctgtggagggaatgccaaccgttttgggacccgtgaggcctgcgagcgccgctgcccaccccgggtggtccagagccaggggacaggtactgcccaggactgaggcccagataatgagctgagattcagcatcccctggaggagtcggggtctcagcagaaccccactgtccctccccttggtgctagaggcttgtgtgcacgtgagcgtgcgtgtgcacgtccgttatttcagtgacttggtcccgtgggtctagccttcccccctgtggacaaacccccattgtggctcctgccaccctggcagatgactcactgtgggggggtggctgtgggcagtgagcggatgtgactggcgtctgacccgccccttgacccaagcctgtgatgacatggtgctgattctggggggcattaaagctgctgttttttncaacaacacacaacctacgaaaacgaggtcccatcgtctcccagggcattcatgttgcgggtggcgggacaaaaagaggtatatgaaatgggggccacttgggcccttaacgcgtgttttcctggaacccaaa

SEQ ID NO: 77349 - DNA, 2079 bp, Homo Sapiens
  misc_feature (2017)..(2017): n is a, c, g, or t
  misc_feature (2047)..(2047): n is a, c, g, or t
  misc_feature (2061)..(2061): n is a, c, g, or t
ctcgtaccggtcaggtatccgggatatagtcgaccacgcgtcgccacgcgtacgggcaggagctgctcttctggggtatcgcgatccaacttaaggatgaggcagacttggtgacaagctggtctgagcagcgcttccagagccagaactgagcccagtgagagcgcaccctggggcagcctggattcctggggtgtccccggcagccacacacagccatgcactacccaactgcactcctcttcctcatcctggccaatggggcccaggcctttcgcatctgcgccttcaatgcccagcggctgacactggccaaggtggccagggagcaggtgatggacaccttagttcggatactggctcgctgtgacatcatggtgctgcaggaggtggtggactcttccggcagcgccatcccgctcctgcttcgagaactcaatcgatttgatggctctgggccctacagcaccctgagcagcccccagctggggcgcagcacctacatggagacgtatgtgtacttctatcggtcacacaaaacacaggtcctgagttcctacgtgtacaacgatgaggatgacgtctttgcccgggagccatttgtggcccagttctctttgcccagcaatgtccttcccagcctggtgttggtcccgctgcacaccactcctaaggccgtagagaaggagctgaacgccctctacgatgtgtttctggaggtctcccagcactggcagagcaaggacgtgatcctgcttggggacttcaatgctgactgcgcttcactgaccaaaaagcgcctggacaagctggagctgcggactgagccaggcttccactgggtgattgccgatggggaggacaccacagtgcgggccagcacccactgcacctatgaccgcgtcgtgctgcacggggagcgctgccggagtctgctgcacactgcggctgcctttgacttccccacgagcttccagctcaccgaggaggaggccctcaacatcagtgaccactaaccccgtggaggtggagctgaagctgagccaggcgcacagcgtccagcctctcagcctcactggtctgttgctgctatcactcctgtcccctcagctgtgccctggctgcctgagcgtccccctacccccccagggcctgctgccttttgggacttaaaccccagcctcccccgtccatccagccctggggctggggggcttcaactatagttgccctgtgactgtagtccacccctgcctgccttgtttgatttggctcttgttctttggttgggcttgtgcctagattaggagaggaagccaggggccctgcactcatgccacctgccaggtagtgtagtatcaggagtggagacaaagtgggctctgggttggggtaggggaagggagggttcagaaagaggaatgaagatgttgtatgacaagaaggaaagttactgagaacaaaaacccagattggtgagataggacacttgtgcagcagatatgccaatgggccatgtttattgtggattggtaagaatcaccaggaaaccattaagccccaatagctacaaggagggtggttaatctgctatatcaaactccttccctgaaaccagcaaacaccgggaaacattttggctcattataatccggtgaacaatgcagtcaggcctgttataaccgctgagcagccacactcgcacctcctgggtgctgtagtctgtgttggtacaggcttctgcatgcctggtaaagtccagccaaggctggtcaaggcaacatctccacacagaaaatctgcaccagttatgtaagctaaaaagctgtgtgaacccaggtgtcccggaaaggggctgcaggacacagcaaaatgccagcagcatgccggacccctcccttccatcctcctctccaaagaagagaggtcaggaaaaacactggctgggacgctagaagggtcatgtgttaactataatcacatttatggtttggaaccatcaccccaaggtaaaaanaaaataaaaggtattcccaggtatgttttngcaaaataaaatanaggtaattaaaaacctaa

SEQ ID NO: 77350 - DNA, 942 bp, Homo Sapiens
agttccatcaactcgcaaagtagaatccttacctactacttttctgataataattttaatatttgttatgtttggttgatgcgagcagctgcactgctcatgcagttagctagcatgtgacatcatgtgacaaagttcatgtaattagatggaagaaacctcactgattaattttaagaaccttttagggatgcaggaacaatgaagtggccacagtatgtgctgtttttgaagcatttttaaaaacgaattgtagttgtttttcttcatttaaaatggatctgttggaggttatgtgtgtatgttgtagttttattgcagccacaataattttaccaaagttttcacataggcagttagcctttacttaatatcaagacaagtgaaaaaatattggcatcgatgaaaccgataacattggcctcattggatttctttacccattcacagtgtaaagaagttaccttcatgctttcattgtacctgcaggcctgtgggcttgtacagtagataattaatttctaaaaagaacagctgcctattttcttcctaggttaggttatatcttcataatcacaagaattagtgatggcaaaataaaattttgcttatgaatcttttacattgtttatatatgattaatatcatcatatatattttctgtattaagctcatttggcttcatttaagctgtatacttagtcatatatctttcattagttctatggatatgagcagatccctttactggagcccagtatgtgctgtgtgagttagaagtcattcttgctgagaaggtgaataggtagggatttgccttgttttgtaagtctacaatttgccaagagtaaataacactggaccagctgtaaaagtaaacagtgtgtttatgcattgagatactaaagcatttaagaaaaaattaaatgatctcttttgttt

SEQ ID NO: 77351 - DNA, 1280 bp, Homo Sapiens
  misc_feature (699)..(853): n is a, c, g, or t
  misc_feature (861)..(877): n is a, c, g, or t
  misc_feature (902)..(911): n is a, c, g, or t
  misc_feature (949)..(1070): n is a, c, g, or t
  misc_feature (1081)..(1089): n is a, c, g, or t
  misc_feature (1096)..(1106): n is a, c, g, or t
ctgcctgcagctcggccgcttgaaggaccaggacaaggctgcccccgagatggtttctctgctgaagaggaataactgtgggaaagccctggacatcgcccgccaggcccgagacatgctggggggtaatgggatttctgacgagtatcacgtgatccggcacgccatgaacctggaggccgtgaacacctacgaaggtacacatgacattcacgccctgatccttgggagagctatcacgggaatccaggcgttcacggccagcaagtgagccgctccatcaggggcccgaaactctcaagcccctttctggagagatgcctggctggaccgtaggagcgctgtgctctgagcttagaaagggaggtggcggatggagtgggaagtgagagacactgatttttaaatatcaaaatttcccttctgaagtcgttcggatgtgttccttaaaaagaagatggaattctctgtagagcgtctcaatccacttttaaccatggatgagagcagactccatttaccctgaaatagcagcttctcttgagaggagagtgacatggaagcaactccgtctgctgcagctgaccccctcacactgagttcacagtgcgccctccctccctcccatctgggggtagtgccttatgctgggtgttggagcagagtgagggagaggaaaataaagacctgcacatctgnnnnnnnnnnnnnnnnnnnnnnnnnnnnnnnnnnnnnnnnnnnnnnnnnnnnnnnnnnnnnnnnnnnnnnnnnnnnnnnnnnnnnnnnnnnnnnnnnnnnnnnnnnnnnnnnnnnnnnnnnnnnnnnnnnnnnnnnnnnnnnnnnnnnnnnnnnntctttggnnnnnnnnnnnnnnnnnaaaaattttttaaaacctttttttnnnnnnnnnncccccaaaggaaaaggaaatgggcaaaattttttcccnnnnnnnnnnnnnnnnnnnnnnnnnnnnnnnnnnnnnnnnnnnnnnnnnnnnnnnnnnnnnnnnnnnnnnnnnnnnnnnnnnnnnnnnnnnnnnnnnnnnnnnnnnnnnnnnnnnnnnnnnncccccgggggnnnnnnnnnatatttnnnnnnnnnnngggcccttctttggagaaggggggggaaatttaataaaaactcccccgcccggtgggaaccctccccaaacgggggagtgtaaaacctgtttttccccgggggggattacaaccccctgtggccccccttggggaaataatatttccccccccgggggaaaaaaagggggggag

SEQ ID NO: 77352 - DNA, 1160 bp, Homo Sapiens
  misc_feature (517)..(611): n is a, c, g, or t
gcacgaggtgataagtaacgcctcataatatttgttcccagctttttaaattgaagctggttgcataatctggggaatagtcataatttcatgtgttatacagtttaaaaagcctgcaaaagtgactttgcttgtttactttctgcctcagattgactattttaaccaatattgtcacgactagatcatagctcctagtgaataacatgaggtgttttaaagttaggtctattacagaattaacataagcacaattttaattttatgatatctgatatgcctatctaatacatcttaatgcattaaatgctgcagataagaatcttgctatttttcaagtagacaacattagaaagttgaatcatgaactcattcaattcatcaagtcaaaagcactgagtgttttgctagtctagtgacatgggttattgtatttccgagaagtgcctctcatttctggggagttgtttacatataccctgcatttaaaccaattaaaacaatccaagtttctttnnnnnnnnnnnnnnnnnnnnnnnnnnnnnnnnnnnnnnnnnnnnnnnnnnnnnnnnnnnnnnnnnnnnnnnnnnnnnnnnnnnnnnnnnnnnnnngtatatcagtatttgcagtatttgctgtgattacttaggtttagactttctcaacttcttagatgactaaatgggctgaagacttgtaactaacttgaataggatagacttcataccctgtgacaaaaaggatggggaagagaatatcattggtcttgccatatacctcctagctaaaaggaaaatggtttgtagttgttcttgggcctactgtgttgcttttcagaaggacataagactttctactttatctgatatggatatcgtctacttcctcattcctttatgctcacttatggagtagttacatagaaatataactcttggtggtactgtattttaaggtaattcagaagcagtatgtattatttatgtacatgtacaggacaccattcaaaatggcttgaaaatattcagcatgtttgttatttgctgttatattgtatgtttagttttgtatgtgataaacagaattgatgtaagtttttgtggacttgaatttctccttccttgagatcaattaaacagcagaaaaatattgtctggaaa

SEQ ID NO: 77353 - DNA, 749 bp, Homo Sapiens
  misc_feature (412)..(480): n is a, c, g, or t
  misc_feature (679)..(679): n is a, c, g, or t
cacgcttgcttgtgtactgctcttagatgatataaaaacaaatcaaattcccaaaccaaaaagctgcactcttttgtctgggtaaatacagctatgacatgtctatttccatggtttagaatatcaccagtgggaatctactgtggaaaattgagtacaacactatcatcatatgatttgttttgctcatatttggctgtgccattggctgcggagccaggcagtgaactccacacaatgaggagcctgtgaaaacgcagagaaggcaagaaaggatgcaaacatttaggcagcatccgatggtagctggcttgtggtttacctggcctttggttagataactgtgcctgatccctatggccaggaaggaagacagtgctaatgaaaatgaagatctgtacaacaaaagtannnnnnnnnnnnnnnnnnnnnnnnnnnnnnnnnnnnnnnnnnnnnnnnnnnnnnnnnnnnnnnnnnnnnagctgaagaattcacatttgggctgatgggcctggggtagggatgaccaacagaccacatgcttcttgtctcttctactccctgatcctctgatagacagggctaagtgatcatccactccttccaccctccagcctccgagtgggccacttttcaagcatggaattccaggttctgcaccctcggattcaaccaaccnaaggattgaaactatttgaaggaaaagaacaataataatacaaataaaagccaataacaatataacaact

SEQ ID NO: 77354 - DNA, 649 bp, Homo Sapiens
  misc_feature (568)..(577): n is a, c, g, or t
gtatgaaagaaacccttgaactgagtgggaatatggtccagtcctatattctacagtttttaaaatcaggagcagagggagatgacactggagcaccccacagcccacaggaaagagaccagatggtcagaatggcccttaaacacatgggcagcatccaggcaccaactggagacacagccagaagggccatcatgggctttttagaagagatcctggccgtttgttttgactcatctggatcacaaggggcactcccagggttaacaaatcagtgaagatcccaccatactttctagatgtcgaaggcggcagtaggaagacctgagcttgagcataagatctgtgggatttcatcttaggggcagaaacaatccgttcactatttatttagaatgacttagcagccatttaaattttcacagagggctcaaccacctttggagtgactccatagcactggccatggtcagggttgttggaacatctgacctgtgcatccaggagccgaggagtcaggttgtaatacaggccaagcagacgggctttgagggcatttagtctcagnnnnnnnnnntgtagaaggatttcggaattagaattttgtgtattgtatctgtagttttgtaataaactaacgaaaaataaa

SEQ ID NO: 77355 - DNA, 843 bp, Homo Sapiens
gtaaaagtagcagtttggtatgagttggcatgcatacaagatttactaagtgggataagctaattatactttttgttgtggataaacaaatgcttgttgatagcctttttctatcaagaaaccaaggagctaattattaataacaatcattgcacactgagtcttagcgtttctgatggaaacagtttggattgtataataacgccaagcccagttgtagtcgtttgagtgcagtaatgaaatctgaatctaaaataaaaacaagattatttttgtcatgctgactccactgcttgaaaaatttgtttactgccccccagatttttaaagattaatacagtaaatataaaaattaattttggctccctaagctatatatgtatttgacaattttaaccgcaaagtaagttgtttaataataaccactgatttctttaagctgacttaatgaactcctaatatcagcaaatttgaggcctaaaggcactaaactaactctagactcagaattacatccaacagaattactcatctaatatcagtgaaattattcttgcacataaaggcaaacctaagtacaaagttaagtcttttactaaaggatgttacctaggatgagcagtatatgtttattaggaaattaactacatgaattgaagagaccagacttcaaaatctaatttttataaatatgctctatgttctcattggataaaactggttattaaccaattttccagaacagctgtacaagatttctgcatggcagccggctaaatggtagaaaataatatgtttaagctggaatagcttataattttatttaaataaaattgctgctat

SEQ ID NO: 77356 - DNA, 2536 bp, Homo Sapiens
caaaaatatgctgaggaggagttggagcaggttcgggaggccttgaggaaagcagagaaggagctagaatctcacagctcatggtatgctccagaggcccttcagaagtggctgcagctgacacatgaggtggaggtgcagtattacaacatcaagaagcaaaatgctgagaagcagctgctggtggccaaggagggggctgagaagataaaaaagaagagaaacacactctttggcaccttccacgtggcccacagctcttccctggatgatgtagatcataaaattctaacagctaagcaagcactgagcgaggtgacagcagcattgcgggagcgcctgcaccgctggcaacagatcgagatcctctgtggtttccagattgtcaacaaccctggcatccactcactggtggctgccctcaacatagaccccagctggatgggcagtacacgccccaaccctgctcacttcatcatgactgacgacgtggatgacatggatgaggagattgtgtctcccttgtccatgcagtcccctagcctgcagagcagtgttcggcagcgcctgacggagccacagcatggcctgggatctcagagggatttgacccattccgattcggagtcctccctccacatgagtgaccgccagcgtgtggcccccaaacctcctcagatgagccgtgctgcagacgaggctctcaatgccatgacttccaatggcagccaccggctgatcgagggggtccacccagggtctctggtggagaaactgcctgacagccctgccctggccaagaaggcattactggcgctgaaccatgggctggacaaggcccacagcctgataggagctgagcccctcagccccacctggtggctctccacatttggattcttcccgtactcacagccccagctacccagacccagacacaccatctccagttggggacagccgagccctgcaagccagccgaaacacacgcattccccacctggctggcaagaaggctgtggctgaggaggataatggctctattggcgaggaaacagactccagcccaggccggaagaagtttcccctcaaaatctttaagaagcctcttaagaagtaggcaggatggggtggcagtaaagggacagcttgtccttcccctgggtgttctgtctctccttccctcccttccttcaagataactggccccaagagtggggcatgggaagggctggtccaggggtctgggcactgtacatacctgccccctcatccttgggtccttcattattatttattaactgaccaccatggcctggcctgccctgcctccgtcccaaccatgggctgctgctgtcactcccttctccacttcagtgcatggcttagttgctgttccctcagctcccagctccaacttctgggggtcagcttctgtctctgctgtcccagttttgaggtttggtttcttgtttctgtctcttgctttcgggctcctccctcccaccactccccaacttcccctagcagttgcagggaagataggacgagtagcttctgacatgtgtgcctcagatctgttccaccccactcacagtggttctgtttgctccagactggggctagggcctaatctttgaagtttgttctttggtattgatgtgggtcagaaggagcctcatcctaatctcactcaggcctccagggatccatgggggagtgaaaccaattctcagagaacaacccaccagagacttttaaagagaggccaggcttgggaatgggttgggagaggcatctgttcattggagcatgagtggatgccagaactgtaggttataaggcagtcactttttctctctactcccacccacacctgcctccctcttacccctgctcccccacactgcaggaggatttgtctctaagaggtgctgccccaaagctccccaagcatcaatactcctagggctcaggacaagtggctcccctggccaggagagccacagccatgatacagggctcttatggagccctggagttgttgggcaaggatgctgtcattttttgaaccaaaagacaaacaggttaaaaggaaaaaaagtaatctgaatttcccaagtgcctacgctgcatattccccttgttagatcccattttcatgttactttgtagccttggccagaggctcaaaaaggacacaaccagtttggggaaggggtggctaaggaagatggtataggtgaaggcggctgtgtgaccactttcccccacccttcccaccctctagacaactctctcccttacctgtttttgctatggctgtaaaggtatttttcctctgccccactccctgccatacctttatcctgggatcctattttgggcctggggtgggtatacctggggctggtcttaggagggtgctaggctgcagactgccttgtactccctggacaccctcaaatggggttttctgtgttatttcataaaattctttgaagtccaataaagcatgtaggagattttaaccact

SEQ ID NO: 77357 - DNA, 1221 bp, Homo Sapiens
  misc_feature (302)..(406): n is a, c, g, or t
  misc_feature (408)..(440): n is a, c, g, or t
agatccaaataaatataggcaacttatatttgataaaggtgcaaaggcaatacgatggtcccaaataaaaaatataatgtatttggagatcagaatcaaggccagagtaaccgagtgtagcaagggaaggagatcagctacagaagagattagagaagtcaacagggtttagcgatgcaacatcccttaggctatgaaaagagatcaatgtttgtagcaggattttattttgagacactgactgaggtttctctcattctcctaccacctcacacagtcaggtaccttcaccatcctcaggnnnnnnnnnnnnnnnnnnnnnnnnnnnnnnnnnnnnnnnnnnnnnnnnnnnnnnnnnnnnnnnnnnnnnnnnnnnnnnnnnnnnnnnnnnnnnnnnnnnnnnnnnannnnnnnnnnnnnnnnnnnnnnnnnnnnnnnnncatatcttatatgcacagccctctaggagaagaggttgttcaaggagcacagatattagaatttttgcctttgagttccaaaacacagcctttaaagtcgtggtagaaataacgatcttgaaagacaacattctttaacagccagactttctgagacaggaaataataatggctccatatatttagcattcattgtgtgccaggcacagctctgagtcccttatattgagacctcaggaaaaccctgatataggtaatgctgttgtctccattatatggttgagggaaccgaggcacagagagaggaattaacttgctcaagtcacgcagcagagccaggacttgagcccaagcagtctggctccagatcctatgcctctgaaagtaagggaagagagtcacagagagaacgcactgggagggggagaaacaggggtgggaagttggtggaaaaaggaactaaaaatttctgagagcctgccagggtggaagctgcacccctttccctttgttctgagctgaggactccagtcttgggaggacattcccaggacagatgaagggatctgcccctatggttgtttctcgctgaatcagagtctcagtcttgctccttaaacccattcttaatcctgttccctctcctgctcaaacacctcccagggctccctactgcccacaggataaagtttttacttgggctctgggagaacccactaagggcctagatgccctgtgctcagccagagaggccgtcagggttttgggttcagagacgtca

SEQ ID NO: 77358 - DNA, 734 bp, Homo Sapiens
gcaatcaccattaaccccagcccacaggccttcttaattgttaacagacattctgagaagtgcatgccctccacaaagcctacacacatgtgttcgagtgtgactctaggaaatgagcagatgtaatggaaacctcagtattgactcatcccgattgttatatatgagtggaatttgcatctcatttagtgtttatttcagtagattccagttgaggtcatggagtgctaaatttatatgcatcatagcacctttctcaaaggaattgggagctcttttgcaaaacaaaagatgtcttcttttcccttagcccttggttttgtttggcagatggtgtatgtgaagagaacattagttgtggaagaggtatgtatgactcccttgggtacagtcattgatatttgttaaagacagcctgagagtctgttgtcttggcctttctgggggatgaagaagttgttactgagaagcagttttcctgccttcttggaaagacctcagtcaacacaggaaacaatgggagaataacatttgatcctacctaaatggacaacattgtgtaatatgggcggagagggcttagaaattcagaaagagatcagtgtggaccagaataaaaggctttgagaaagaaaggtggaccttgaggaactggtaatatttaaatagaaatgggtactggcttaggagagtttcaccatcataaaagtttggggcctggcatggtggcccat

SEQ ID NO: 77359 - DNA, 1058 bp, Homo Sapiens
  misc_feature (143)..(143): n is a, c, g, or t
  misc_feature (159)..(159): n is a, c, g, or t
  misc_feature (174)..(175): n is a, c, g, or t
  misc_feature (181)..(181): n is a, c, g, or t
  misc_feature (189)..(189): n is a, c, g, or t
  misc_feature (732)..(740): n is a, c, g, or t
gtgttccctccagagtgacatgcggcgtttgagcaagccaagagaccgcttcgtatggttggggccaccccccctccctccattgtgcctgagtttgccccaatcggtgcccggccaccctgacgggaggatcaaatcctgantacattgcactgcttntgtttaggctgatcnntaaatnaaattagncaaaaaatcccaacaagtagccaggactgcagagacactccagtgcagagggagaaggacttgtaattttcaaagcagggctggttttccaacccagcctctgagaaaccatttctttgctatcctctgccttcccaagtccctcttgggtcggttcaagcccaagcttgttcgtgtagcttcagaagttccctctctgacccaggctgagtccatactgcccctgatcccagaaggaatgctgacccctcgtcgtatgaactgtgcatagtctccagagcttcaaaggcaacacaagctcgcaactctaagatttttttaaaccacaaaaaccctggttagccatctcatgctcagccttatcacttccctccctttagaaactctctccctgctgtatattaaagggagcaggtggagagtcattttccttcgtcctgcatgtctctaacattaatagaaggcatggctcctgctgcaaccgctgtgaatgctgctgagaacctccctctatggggatggctattttatttttgagaaggnnnnnnnnngtcatgtatatatacacataaaggcatatagctatatataaagagataagggtgtttatgaaatgagaaaattattggacaattcagactttactaaagcacagttagacccaaggcctatgctgaggtctaaacctctgaaaaaagtatagtatcgagtacccgttccctcccagaggtgggagtaactgctggtagtgccttctttggttgtgttgctcagtgtgtaagtgtttgtttccaggatattttctttttaaatgtctttcttatatgggttttaaaaaaaagtaataaaagcctgttgcaaaaatgaaa

SEQ ID NO: 77360 - DNA, 666 bp, Homo Sapiens
  misc_feature (39)..(39): n is a, c, g, or t
  misc_feature (52)..(52): n is a, c, g, or t
acagggcttgagggccagtgaggtgctggtcaggcaccncaggcctccttgngacctgcccaggggcaccctgagagctcctgaaacccccacttagcttccagacctttctgcaaaagctcctcctggctttcctccctcccccaatctatgggtcacagctaacagatctgagggcaactgctgtgctagtggccagggctgcacctgccatccccggctctgccactttagggccttctagaggcagtgtccttaggaagtagctctgaggcatgggttttctgctcctgtgcagggcagctgatgggataaggtggggaaggacggtcagtgcttgggccccagctggccagcctggcgatggggaaaccaaaccatgtcccccagcgaagggccagagtgggaacctgtcctcatgcccttcgtcctgaggagccctgaggtgggcagcaggggccaggggaagttttcaggccttcatcaaagagaacaacatcctcagctccgcacccctcatcctgtatcagcacttaccggtgtgtgactgcccttgtcagctagcatacggtgggcccacctggcccactggctgtttatgccactgatttatgatagggaatattatctttgaacccaatgaagtgttttctcccccatcacaaa

SEQ ID NO: 77361 - DNA, 917 bp, Homo Sapiens
  misc_feature (397)..(438): n is a, c, g, or t
gaactcgccccacttctcccagcctgatgctgtcctctcggcccaccatcgggcaggtccagcgcttcctctggggatgacaacaggcacctgactcaccccggtcacctcccagggtccatggccagggcctctgtgtttggggggccacttgcccttcatcctgccaggcgctttgcccgccctgcctcagcctgggccctgtgcccttgagccctccacccctggcccaagacccccccaaactgtctgactctgtgtttcctgccctgaggagagaggggtcagattgcagcgggccgagtgccctctccgtcccctctcctcccacccacgccacaggccagcctactcttccctccatccatggccacacccccagccattttgtaccatnnnnnnnnnnnnnnnnnnnnnnnnnnnnnnnnnnnnnnnnnngtgaagacatcttcttggtttttattttgaaacaatttttaggcttgttccgggggtctctgtgctgcctgtactgtattgacctgttttataggtgcctttttattaaaaagaaaattcaaaatccagcctcttgcctctttgcatctgcttcagactcccccatcgattacccagcttgcgaggagatactcagagaaaaaaagggacgtcttagggcttcctcgttgtcctgccgtgaagacactctcacgtgagccacagctgttatttccccagtggggcctcccaaggagcttggctgcttggcttgagtgggacaagggcaggggtccctgactccccacctgatcaaaggctggggaggtggtagggagcacccagaactgccggacgggcctcccacaccccaggtgagcaaacaagcacggagcagcttcctgcggttccatctgagtgacatcctcacgggggcaggg

SEQ ID NO: 77362 - DNA, 1022 bp, Homo Sapiens
  misc_feature (129)..(170): n is a, c, g, or t
  misc_feature (741)..(742): n is a, c, g, or t
  misc_feature (765)..(765): n is a, c, g, or t
  misc_feature (767)..(767): n is a, c, g, or t
  misc_feature (771)..(771): n is a, c, g, or t
  misc_feature (776)..(776): n is a, c, g, or t
  misc_feature (812)..(812): n is a, c, g, or t
  misc_feature (840)..(840): n is a, c, g, or t
  misc_feature (844)..(844): n is a, c, g, or t
  misc_feature (860)..(860): n is a, c, g, or t
ggattttagaattttctttttaataaaaaggcacctataaaacaggtcaatacagtacaggcagcacagagacccccggaacaagcctaaaaattgtttcaaaataaaaaccaagaagatgtcttcacnnnnnnnnnnnnnnnnnnnnnnnnnnnnnnnnnnnnnnnnnnatggtacaaaatggctgggggtgtggccatggatggagggaagagtaggctggcctgtggcgtgggtgggaggagaggggacggagagggcactcggcccgctgcaatctgacccctctctcctcagggcaggaaacacagagtcagacagtttgggggggtcttgggccaggggtggagggctcaagggcacagggcccaggctgaggcagggcgggcaaagcgcctggcaggatgaagggcaagtggccccccaaacacagaggccctggccatggaccctgggaggtgaccggggtgagtcaggggcctgttgtcagccccagaggaagcgctggacctggccgatggtgggccgagaggacagcaccaggctgggagaagtggggcgagttccctttgtattacagctgccagtgcaagaccaggccctccaggccaggaaggctagggacgggtcctggtagaagacaccctgtctagaatggcccttggtcctggaggtggggcgcaaaaggcctcagccagggaactgccctgccacctcccgaggcaggaaaggaagtgagannagggagagtttttttactcctgngngcanagtanggggacaacacccagtcgtatatggcttcagctctngacaaaggcggatagggagctctcctgngtangagcacggagccaggnggaggcatggctgtgctgggtggcacaacaatctgtcatggctgagctgggcaaggacacttgcgtagtggcagcaaagagcgcagtgtgttccgatcattcaggatgagacgagggaggatgtcaactctgcgatctggctcaggcatctaatgatcatat

SEQ ID NO: 77363 - DNA, 704 bp, Homo Sapiens
  misc_feature (640)..(651): n is a, c, g, or t
tcctgcaggtattttccatctgctgtgccaaggctgagcggcagaaacttgtctcataaattggcactgatggagcatcagctgtggcccacagagagccttgctgagaagggggcaggtaaagcagagattttagcattgccttggcataacaagggcccatcgattccctactaatgagaggcagggagagcatgggcaatggagacccaccaatgatccccaaccccggtgggtactggctgcctgccctgggccagggaatggctccttataccaaagatgctggcacatagcagaacccagtgcacgtcctccccttcccacccacctctggctgaaggtgctcaagagggaagcaattataaggtgggtggcaggagggaacaggtgccacctgctggacaatcacacgaaaggcaggcgggctgtgtactgggccctgactgtgcgtccactgctgtcttccctacctcaccaggctactggcagcagcatcccgagagcacatcatctccacagcctggtaaattccatgtgcctctgggtacaaaagtgcctcaacgacatgctctggaaatcccaaatgccacagtctgaggttgatatctaaaatctatgccttcaaaagagtctctgnnnnnnnnnnnnaacctggtagacggtataaaagcagtgcaaataaacacctaaccttctgcaaa

SEQ ID NO: 77364 - DNA, 1312 bp, Homo Sapiens
  misc_feature (697)..(697): n is a, c, g, or t
catttccaagaatatatatacatttgcatgtgtgtggtgtctgtgtgtataaaacctaattacatagatattattattgtgtcaaactgttttgcaatttgttttcactgtctgagagatctgtcagtacatagctttctttctcattaaaaaaagtatataatattccatactaaggatgcaccagtttatgcagccattgatggaacttagtgatgaacatttatgttgtttacagtttccaatactgtattaaacaatgcttcaataagctaacttgtgcatatgtgagagaactgttttgtagaatagttatattactatgcttttctaacaaaacaatttcacataataaaactcccagttcattctataaatgcctcctttccataaatattttcagcaaacatacaagatggttttctcctatcttccaaattattcttacaactggctaaactggaatactaaatgatatgttttagttttagaagcaacctctttgtcttcctttgcttctcttctctttatggggacaactagaaataacccctgattaatctcaaatcacaaggctaacacatgcaaggaagacacaataagaggaagtcaaaataggaataagctatttcccttttttatttgttttagttacaggctgaataaatgcaatgaaattcctcactgctgtaatctntgctgaagcccctccgtaactgctggaaaactgtatgttctctaaataggtactgttttataaactgaatttcccctttcttgaaaaatattaaaactacaacaacaaaacaaaacacagaacccacaggaagacatcagtcaaacgagaaatttgcttattcttctggcatcttcattcttgaacccctaaatgccacaatttgtaatatgaatgatgacatgataaaaagttatacagcaaacagctgatgccagacaataatttttaagagctagctggccgggaacagtggctcatgggttgtctgaggggtaattggaagttaacttatacaaaatgtttcgtaaatggatttttatgtaaaatcatgtcaactacagccactctcctcagtaggtgtcctgagattagtaaattcagtaaaagaaacaaaccctgaatttttttacccaaaagtaaaacggagaagcaatactatgtttacttattcttcaacaactgactctggagcagcattcagaatataggggatgtcacctataaacacaatcccctttaaaatcaatcttcttgtgctcccagattaacgagaaaaaatgccttcggaaaaat

SEQ ID NO: 77365 - DNA, 732 bp, Homo Sapiens
ttttcactgactggctactgaagagcaaggcagagctggtggcatctcagaactggcatctggacctccctaactgggccccgctggtcccatttgctcattagaatttcctctcacatcagtgggatacagaattcagtttctcccttgccaggtccttgggatggttgacccctgcctctgcagtagccttttgtgagtctgctaaggtagctctcacacacctcggctctggggttgatacctgagcctgcaatagagccctgaaatcaagagcatggcttgagtgtgtgaatatgatgtgtgcacatgcttaatgagcgtgcaagtgtgcacacgtttgtggagaggagggtgttctggcctgagaaggtaaagaagaggcatgtccagtatgctttgcagggtgtgtttgctcttttccatgcccatgcaacccagattggggtggagcaggaaggagctcttttctgttcccaagcctcagaactcttgagctgtggcttacttgctgtcttcaccaggttcaagctccgtgggccacactgctgctgtgccaagaaggtgtacagcctccccaggatggggcctcatacaacccttcatctgcactcaacatttaatcgtgtccttgctgtctttttattttcctttttgtttgttagcaaaaacctctatttagatttcaataatcagagaagtgtaaaataaaacagattatattgtaaaaaa

SEQ ID NO: 77366 - DNA, 2689 bp, Homo Sapiens
  misc_feature (181)..(298): n is a, c, g, or t
  misc_feature (685)..(719): n is a, c, g, or t
  misc_feature (1841)..(1921): n is a, c, g, or t
  misc_feature (1933)..(1942): n is a, c, g, or t
  misc_feature (2059)..(2067): n is a, c, g, or t
  misc_feature (2547)..(2556): n is a, c, g, or t
  misc_feature (2598)..(2606): n is a, c, g, or t
cagtcgacggtaccggacatatgcccgggaattcggccattacggccgggggaaagttatgccacagataatgagaaaatgacatctactccagagacactgctagaggaaatagaagcaaaaaatagagaattaatagctaaaaagacaaccccacttttgagcttcctgaaaaacaagnnnnnnnnnnnnnnnnnnnnnnnnnnnnnnnnnnnnnnnnnnnnnnnnnnnnnnnnnnnnnnnnnnnnnnnnnnnnnnnnnnnnnnnnnnnnnnnnnnnnnnnnnnnnnnnnnnnnnntatagacaaagctaaagaagatagacagaattccagaaagggacaaattaacaggatgaaccaaagattaagctgctcaagaagccagacaaaaggagatgaaaaagaattggacaacaagagaaaaagccaagaaattggacaaagagaatctcagtgatgaaagagccagtgggcaaagttgtacattgcccaagcgttctgatagcgaacttaaagatgaaaaaccaaagagacctgaagatgagagcggcagagactatagggagagggaacgggaatatgaacgagatcaggagcgcatacttcgagaaagagagaggctgaagcggcaagaagaagagcgccgtaggcagaaggagcgctatgagaaagagaagacttttnnnnnnnnnnnnnnnnnnnnnnnnnnnnnnnnnnncacacttcgggataaaggaaagaaggctgaaagtacagaatcaataggcagctcagaaaaaactgaaaagaaagaagaagtggtcaagagagatcgaataagaaacaaagatcgtccagcgatgcagctttaccaaccaggagctcgaagccgaaatcgactctgtcccccctgatgacagcaccaagtctggagattcagcagcagaaaggaagcaggaaagtggtattaccccatagaaaagaaagaggagaggagtgataagtccagatggccttaagtgtcctgactgtctaggcagccaaagagcacaccgttaagcaatccagaaggtgccttcagggccaaagaatatgagagaaagggaagccgctggtgctggtggggtacactgcagaggagtaagtcttgtgtcaaagcaggaatctgatcagaggttcagaattggaagtacaatttcattgcttttgcaatttctacaaattaattttaaagtgtcagaaaaaggtgacggcaaggacatgcattgcaatttgcagggggaattgtcaagtgaggacttcatcacatatgacacgagagaaaagtaagagctggttctaaaatcaaaagctgttgttcatcctgaattgaattttctgaatttgggtggagcagagtcgctttgaagccttgttccgatctaattctattgtattgttgatgataagtgttgacattgggtagtgtagaagcaacaagcatgtccttgtagtacaggtacagtgaaggatagaacacactttcgttgatacaaaaatttaaatagttatgttacttctgtatccagtgtcctaaagttttaggattagttttagttttttgtttgcttatatgagcttagcgtaaagaatatttttaaacttcgtgttttgtcatcagcatcttttctattaagaggtaaaatgtagtccttgtttgactcttgacaatccagtgtgtttgatcttaggtctcatgatctgagtgcataccctctccaggaaggaaactgcaccagtgtctattcctgttaaatagcaacttttagtctcagcttgtttcgttttgatgtcaataaatagtaacagcattcaagtgtgnnnnnnnnnnnnnnnnnnnnnnnnnnnnnnnnnnnnnnnnnnnnnnnnnnnnnnnnnnnnnnnnnnnnnnnnnnnnnnnnngtgaagaaaaannnnnnnnnnaaaaaaagattccaaaaaatttagtgtgggggcccgcccccaaaaaggtagggaaacggggcctaagcctgttccctagaaaacccccgaacaagacgagggttgggtttccccccnnnnnnnnncccccgcgggacgccctgtgctttcgaaaaaactcaagcagggagtccgggaggccatttccgggactcttcccccgggaggccccaggcggaggcccgaatataaaaattacggcccccgcccatggccgcatgacgcgggggacggggtggggaaatgccataaaaaatttccccgcccgaacagtgggagcccctccgcacaagacgggactgtggaaacaaccctggaacaccctggaggggaaaaagaaagccgccctttggggcgccatgggcggaattagactcatggcgcccgcggggcgtaaaacgcggcggggctaaaaaaacctgggcttctagcttgggcccccccactaaagactaaagattggggggaaacctcaccgcgggggttggggcgtggcataaaaaaactcgtattccccaaaatacccccctttaagggaaacgcggcacaggtctttccccgtggannnnnnnnnnttcttgagcaactttgtggtgtaaaaattgggcgggaaatcnnnnnnnnnatattctctcccaaacgcagaaaaaagagttcctattggcccccagcaaaacggggtaaacaaggggggaacccctttcccgg

SEQ ID NO: 77367 - DNA, 989 bp, Homo Sapiens
ataatagcaagcatttattgaacgattactattacatgtattgaatcaagcaacactccaaggcagctgctatttactgaagaatacaagtgtattctttggtttgtggccctttcctctgtctttaggaagccaatagcatagcgtcttctgtctccaactctgctttcctctctgcttctgtcatcagggggctgcatcctgcttttctcttagaaggactcttgtgattacatcaagcctactctgataatccaggataatctcccaatctcaagagccttaatttaatcacatctacaaagtctcttttgccatataataaaacatggacaggttccagggattagaatgtggacatcctggggggccattattcagcctgcaacagagggtgactttattttcacaagcatgtaaggaaaactctgagctgagactgcagtttctctacttcttccttacatcatctgtgtaactcggctcatgctgctctagaagagaccatctcccctgctccatcatatctgcagccctggctgctgcagggaaaggcactgcctttcttctccaggtgtcttttgttcttcttccgccctggccccttgctgccatgcaggactctgctgggagtgacgtgggtctctttccctgagagagctgaagatctgcaaggagaccttctccctgccttttgcttcgcattttgaagggagggaggagactagccagaaccactgaccaggggaagcactcttatcctcttagaaaggaccttagaaatcatctatcccctccaccccatccctgccttgccacgaggattaattgctctctaagtgccttggccaatgttgactttcagcctaagcttgacctctcaagcaagttgtttccttcctaacaatagtatttcaagtgaattcattaaaacttcttagttgcaagtaatagaaactaacttaaattaactcaagcaaaaaacagac

SEQ ID NO: 77368 - DNA, 665 bp, Homo Sapiens
agaccctcagctcaatgagcgagtgcaccgtgtgcgggcgctacagagcacactcaaggcaaagctgcaggagctgcaggtcctagaagaagtgctgggtgaccctgagctgacaggagagaagttccgccagtggaaggagcagaaccgggagctgtactcagagggcctgggggcctggggagtggcacaggctgaaggcagctcccacatcttgacctctgactccacagaacagtcccccaactccctgccctctgaccctgaagagcactcccatctctgccccctgacctcagagagcagcctccgacctcctgacctctgaccctggccagcactctagctcctgacctttgacccgagggccacctcaaccccagcttctgacgtgtccaggacagagcatccctggattctgttcagggtgggaagtagtactgctagtcatggtctcaccccgagctgacccctctgcctgggctttgtgccaccctctcccttgccaaagaagaaactctccccccaaatcctccaacctctggggccacagccctgcccctccagttccttggcagttctcccccaaaccaggtctgtacaggtgttctttattttacatgagggctactttccaaccaaataaagtcaatttttctaagaaa

SEQ ID NO: 77369 - DNA, 631 bp, Homo Sapiens
ctagagatcgcttaggagagagaactggaaggaatggtacgggggctgagcaaggtggcgtgtccctcctaggccacccacagcccctgacccaggaacagtggcggagctctttcatgcggccgcaaccgagaccctcagctcaatgagcgagtgcaccgttgtgcggggcgctacagagcacactcaaggcaaagcttgcaggagctgcaggtcctaagaagaagtgctgggtgaccctgagctgacaggagagaagttccgccagtggaaggagcagaaccgggagctgtactcagagggcctgggggcctggggagtggcacaggctgaaggcagctcccacatcttgacctctgaccctgaagagcactcccatctctgccccctaacctcagagagcagcctccgacctcctgacctctgaccctggccagcactctagctcctgacctttgacccgagggccacctcaaccccagcttctgacgtgtccaggacagagcatcctggattctgttcagggtgggaagtagtactgctagtcatggtctcaccccgagctgacccctctgcctgggctttgtgccaccctcatcccttgccaaagaagaaactctctcctagtagg

SEQ ID NO: 77370 - DNA, 744 bp, Homo Sapiens
  misc_feature (34)..(34): n is a, c, g, or t
  misc_feature (60)..(60): n is a, c, g, or t
caatgtgtctggaggtcccctccttacagccacncgactcagtgaactgcggctgctgtntgagctcgcgacggagccggctcggaacatcagatcaaccaccagggcttctctgctgaggtgcagctcattcacttcaaccaggaactctacgggaatttcagcgctgcctcccgcggccccaatggcctggccattctcagcctcttggtcaacgttgccagtacctctaacccatccctcagtcgcctccttaaccgcgacaccatcactcgcatctcctacaagaatgatgcctactttcttcaagacctgagcctggagctcctgttccctgaatccttcggcttcatcacctatcagggctctctcagcaccccgccctgctccgagactgtcacctggatcctcattgaccgggccctcaatatcacctcccttcagatgcactccctgagactcctgagccagaatcctccatctcagatcttccagagcctcagcggtaacagccggcccctgcagcccttggcccacagggcactgaggggcaacagggacccccggcaccccgagaggcgctgccgaggccccaactaccgcctgcatgtggatggtgtcccccatggtcgctgagactccccttcgaggattgcacccgcccgtcctaagcctccccacaaggcgaggggagttacccctaaaacaaagctattaaagggacagaatacttcctgttaaaaa

SEQ ID NO: 77371 - DNA, 1180 bp, Homo Sapiens
ctagtagccggtttgatggcgaggcgggcttcgccttccccgtggaccccaggtccagtctgccgctgatgagactgctgtgcagctgagcgagttgctgaggcgctgcccgtgctcatgaagcgctccatcacggcaccgctggccgcccacatctccttggtgaacaaggccgctgtcgactacttcttcgtggagctgcacctggaggcgcactatgaggcactgcggcacttcctgctgatggaggacggcgagttcgcccagtccctcagcgacctgctctttgagaaccttggagctgggcaaaagcccggaaagctgctcaaacccgcggtgtgctgaacttctgtgctgatgcaaggccctgcagtgcagcctgcatggggacaccccgcacgcctccaacctctccctcgctctcaagtacctgcccgaggtgttgtgcccccaaagccccggatgtgctgagctgcctggagctcaggtacaaggtggactggcctctcaacattgtcatcaccgagggctgcctgagcaagtacagcggcgtcttctccttcctgctgcagctgaagctcatgatgtgggcgctcaaggacgtctgcttccacctcaagcgcacagccctgctgagccacatggccggctctgtgcagttccgtcagctgcagctgttcaagcacgagatgcagcatttcgtgaaggtcatccagggctacatcgccaaccagatcctgcacgtcacctggtgcgagttcagggccaggttggccaccgtgggcgacctggaggagatccagcgtgcgcacgcagagtacctgcacaaggccgtcttcaggggcctgctcacggagaaggcggcgcccgtcatgaacgtcatccacagcatcttcagcctcgtgctcaagttccgcagccagctcatctcccaggcctgggggccccctgggggcccgcggggtgcagagcaccccaactttgcactcatgcagcagtcctacaacaccttcaagtactactcccactttctcttcaaagtggtgaccaagctggtgaaccgcggctaccagccccacctggaggactttctgctgcgcatcaacttcaacaactactaccaggacgcctgaggctgctctgcgggggacgtgcacaataaaggtgttctcggaccctg

SEQ ID NO: 77372 - DNA, 1526 bp, Homo Sapiens
caccggagcggattaaacgagaggacttcgtggggctgcccgaggctggagcctcaatgcgggagcggacagggctgtggggctcagtgagaccatgtcctggctggccagctacctggagaatgtggaccatttccccagctcaacccctcccagcgaactgccctttgagcgaggtcgcctggctgtcccttcagcaccctcctgggcagagtttctctctgcatccaccagtggcaagatggaaagtgattttgccctgctgacactatcagatcacgagcagcgggaactgtatgaggctgcccgagtcatccagacggccttccgaaagtacaagggccggcggctgaaggagcagcaggaggtagcagcagctgtaatccagcgctgttaccggaagtacaagcagctgacctggattgcacttaagtttgcactctataagaagatgacccaggcggccatcctgatccagagcaagttccgaagctactatgaacagaagcgatttcagcagagccgccgagcggctgtgctcatccagcagcactaccgctcctaccgccgcaggcccggccctccccaccggacttcggccaccctgcctgcccgcaacaaaggctcctttctcaccaagaagcaggaccaggcagcccggaagatcatgagattcctgcggcgctgccgacacaggatgagggaactgaagcagaaccaggagctggaagggcttccccagccgggactggccacatgacctgggccaccgcctttctcaccaccctgggggcgcctcgtgccagtcttaacagggagagggctttctggggcagggggagcccctgtcggcagctttcctgttcacctttgttggagccctctgtaggcctcctccctcctccccacgccttgctcccacacccctctcctcgtccctcctggtcgtgccccgtctcttttggtcctggctccagaaaacccgcgccccacatacctgcatcttccgctgtgacctccggagccctgcctgcccctgctccccagctcctcctgcctgcacccgactcggccccctcctgacttgccttatttatttgttcgacgcgtctctgaatgtatccgcctcggttcccaccactgccttcgctgcgcacgcccctcgtgtttcagggctgaccgtgtccccacccgactccgcatgtttgcgtctgtttcctccctctctggccctgtcttaccccatcacccgactctggccactgacctcagggccgaaggggaggtggtgtacataggaacgcgttgcggagtccgccccgtcccccgaggggaggggtcttgtacatactgtaacatacagagtatagtgaagaatctatttaaggcgccgcggggagggctgcacggccgggcttgtggttctctagcgcggcgggggcctcctgccggctccacgggcactttctacttgtgcatgggcttggtttatacgaattgccattaaacatcgctgcaccaaaaaa

SEQ ID NO: 77373 - DNA, 960 bp, Homo Sapiens
  misc_feature (48)..(48): n is a, c, g, or t
  misc_feature (134)..(134): n is a, c, g, or t
  misc_feature (136)..(137): n is a, c, g, or t
  misc_feature (197)..(197): n is a, c, g, or t
  misc_feature (212)..(212): n is a, c, g, or t
  misc_feature (225)..(225): n is a, c, g, or t
  misc_feature (252)..(252): n is a, c, g, or t
  misc_feature (631)..(661): n is a, c, g, or t
ctttgattgacgtacatccccagacagttgctgtccgattatcgctcnttaggattgcctgagccagatcgcacgaggagccgagacggcccccgatcagtcgcagtgcatgattgagctccaccgagggcacntnngcgggtgggagcagtggacacgatggggcctccccatccagagctcaactggggtgcccntatctccgacccacncaggctccatccntatgaccgcccctgcatggccctcccntacaaccccatgatggggtcatgatgcccccacctccacctccagtccctccagcagtgcagcctccgggggcccctccagtcagagacctgggctctgtccccccagaactgacagccagccgccaaagcttccacatggccatgggcaatcccagcgagttctttgtggatgttatgtagcccactgtggggccaggctgggccgggcgctcctggtgtgtgactgggtgtcctggccgtcatgtgcttgctcttacagtgcctgggctcagcctaccagctgctgccatacaggagattgtggccactgtgactctcaccagcagtgcctggttcctcccccttccctcaggggtagacaagggacctttgattannnnnnnnnnnnnnnnnnnnnnnnnnnnnnngggggttaaaatagagtttcttacatttttgggacttttttaataggcatttcctcttttatatgaagaattcccatccattgggccccttctaaccccagaatgtgacctcctcctccagttacccacagccctgccctttgcagggttgggggtggtcagcggtaccccggggttaggcatcctagacagcagcctgaggaagctgggagatttgggccatgtagctgcctttgttactctatttattttagtcacttgtataaaacaccaaataaagcaatagaggcaaactcaag

SEQ ID NO: 77374 - DNA, 1804 bp, Homo Sapiens
  misc_feature (11)..(11): n is a, c, g, or t
  misc_feature (1118)..(1140): n is a, c, g, or t
tcaatgaaaanggggacatataaaagcaggctgaacggtccggaataccgggatatcgtcgacccacgcgtccgcccacgcgtcggctggagcgagctatagagtccttggtgaaacctcaggccaagaagaaggctggagaccaggaagaagagagctgtgaattctccagtgctctggagtacttgaaattacttcattcttttgtggactctgtgggggttatgagccccccactctccaggagctccgtgctcaagtccgccctgggtccagacatcatctgtcggtggtggacgtctgcaatcactgtggccatcagctggctccagggagacgatgcagctgtgcgctctcattttaccaaagtggaacgcatccccaaggccctggaagtgacagagagccccctggtgaaggccatcttccatgcctgcagagccatgcatgcctcactccctgggaaagcagatgggcagcagagttccttctgccattgcgagagggccagtggccacctatggagcagcctcaacgtcagtggggccacctctgaccctgccctcaaccacgtggtccagctgctcacctgtgacctgctactgtcgctacggacagcgctctggcaaaaacaggccagtgccagccaggctgtgggggagacctaccacgcgtcaggcgctgaactggcgggcttccaacgggacctgggcagcctgcgcaggctggcacacagcttccgcccagcataccgcaaggtgttcctgcatgaagccaccgtgcgcctgatggcaggagccagccccacccgcacccaccagctgctggaacacagcctgcggcggcgcaccacgcagagcaccaagcacggagaggtggatgcctggcccggccagcgagagcgggccaccgccatcctgctggcctgccgccacctgcccctctccttcctctcctccccgggccagcgggcagtgctgctggccgaagctgcccgcaccctggagaaggtgggcgaccggcgctcctgcaacgactgccagcagatgattgttaagctgggtggtggcactgccattgccgcctcctgaccaccaggctcagcccacccctccacnnnnnnnnnnnnnnnnnnnnnnncccctcagcatcttcccgctgagagtggtggggaagagccttgtcttcttagctgtcacctgccgaggcttctgggccactcaggccagtgcacccctgggcagagccccttaaagctgctgtcactagatgcccatggtccagggcctggtgggcgtgagaggataggtggcaggccagaaactgggcagccctgacttgatagcagcagggggagctcccaagctgccaagcccctgcctccagccttcctgagtttctctctcctgaacccctactctctcctttttgcttcctcagtttttatcaggctttctctgggggacagcagtctctgagcaccagggagcagttgccctcaggcctgtgcccagcatgccctcccctttttatacgaatgttttctaccagtgtgcttgggtttgccatgatgcgaggctgagttgctgtagcgtcttgattctctccctgggtctgcgttccctcccctgggcctgactgagcctgctcattgtttttccctttattacacaggacagccaggggaggaggggggcccagccctgggaggctggtgggaggcagggggcaggcctgcggatgcatgaaataatgttggcattattttttaattttttaaaaaataaatggtatctttaatttt

SEQ ID NO: 77375 - DNA, 1037 bp, Homo Sapiens
  misc_feature (45)..(45): n is a, c, g, or t
cggctaggtagcgaggccgggtggttgaatcggcacgaggctgangcccagcactgacaatgtggacacctggggtagggagggtcgggtttcaagctgaggttgaaaagggatgtcgaatgggctaaggataagagacagcagggttcgttatcttttctggctcaggtggaggaaaaagaaggatccccattctgtgggtgttccttgaccatctctctacgctagagctgaggtcacttctctgctatgacaacatagctgggttctgaccttttgaccatcaggaaagcaatgtcagcagctgagctgagcctgctctgagggagaaggggggggtcctgtccagatgcagaaggggagcttgcctgctgctctcacacaatggagcccttgtttctcttccttgaaccagtatttcccaagattgagtgacagcccaggagaggatgtgggtctcatgcagagagctgggatcttcttggccattaaagtatattgttcacccccaccccgcgagaaccaagctcaggagttgcctgcctctgcacacatgctgagtgtgctgtttgtgtatatggcaggaccgtccctatggggcatgtgtgagctccgcagctgggtcaggctcctcggtccaggtttacttcatcccgcctggacgtgatttggctttgactgtctctcctgcagcccaaagcacttcctccccgtggttgctgtagctgtctcattggagcagtgcctctccaagtttgaggatttgaacaaagaactgggactggtgacttgttaatgaacagttcagagggcagagggccatcatctcagcttgtggagacctttctttccctggatgctgcttctcagctaactccctctctcttcgtgtgtgtactcggccttcagggtttccaccgatttttacaccttcttcccaccacgatagcttggctttaatgtggaattaaattatatatttttaaaacctgtttttaaaattttgtttcttgcactaaattatgtcagtaccttgg

SEQ ID NO: 77376 - DNA, 507 bp, Homo Sapiens
tcatgcgatgtacagcaatcaacaattggattatgaatggaaggtgtaaacccatattatttgcgtgtacgaaggaagaatcctgtgacaagcacttactccaaaatgagtctacagttataccaagtggatagtagaacttatctactggatttccgtagtattgatggtatgtacatcacacaaaacaacatagattagaccttgttactaacttggtattttacgccttgattcttttgaggcttcttgacttgttcctagtaattcaactgcaaaggaataaaaaatgtgatttcttgtgcctttgcaatattaacatttatgaatcttatttttcttgtaatcttatagcatattgtccttttaagattatcatcttgtaaaatccttaaagccaggtgtagtctgatcctaaggtgatagttttctgctgcatttgtttttttggtgtagttcattttgataagagacaatgttttatttagaaataaatattgactcttc

SEQ ID NO: 77377 - DNA, 1091 bp, Homo Sapiens
  misc_feature (702)..(702): n is a, c, g, or t
gaatcgtttgcagttgccgaccatctcataatagataacagaagaataatgaataaagcaaaagatttctaatttggcgacaagcccacctgattctattcttgatgatcatcacctgactcggccccatcatgaaagagtaccattcttggttgctgaaacaccaagggcacgccatacccttgatgaattaaatccacagaaatccaaacaccaaggtgtaaggaaagcaaaatggcatttaggaattagaagtcaaagtcgaccaaatgatattatggcagaagtatgtagagcaatcaaacaattggattatgaatggaaggttgtaaacccatattatttgcgtgtacgaaggaagaatcctgtgacaagcacttactccaaaatgagtctacagttataccaagtggatagtagaacttatctactggatttccgtagtattgatgatgaaattacagaagccaaatcagggactgctactccacagagatcgggatcagttagcaactatcgatcttgccaaaggagtgattcagatgctgaggctcaaggaaaatcctcagaagtttctcttacctcatctgtgacctcacttgactcttctcctgttgacctaactccaagacctggaagtcacacaatagaattttttgagatgtgtgcaaatctaattaaaattcttgcacaataaacagngaaaactttgcttatttcttttgcagcaataagcatgcataataagtcacagccaaatgcttccatttgtaatcaagttatacataattataaccgagggctggcgttttggaatgcaatttgcacagggattggcacatgatttatagttaaaagcctaatatgcagaaatgaattaagatcattttgttgttcattgtgcagtatgtatatagcataatatacacagtgaattataggtctcaggcttacttgatttttggctattttatatttagtgtacacagggctttgaaatattaatttacataaaggccttcatatattattacgtgttatatattacgtgttataaatttattcaataaatatttgcctagaattcccaa

SEQ ID NO: 77378 - DNA, 1186 bp, Homo Sapiens
ccagggcttcctacacagctttacccagtggggttgatagtcaatatgaaaggactgtaaagtacatcaagcgattgaatttggaatgctagaggacatggccgttggcatttccgatttaaagaaagtcgcatttaaaataattgaagccaaatccaatgatgtgttgccagttataacaggaagacgagaacattacgtgttagaggtcaagcttccagccagaatgtttgagtcactacctctacagattaaagaaggacagttgcttcatgtgtatccagtactttttaatgttggaatcaatgaacagcaaactctggctgaaaggtttggagatgtctctttgcaagaaagtattaatcaggaaaacttcgaacttctacaagaatattacaagatatttatggaaaagatgcctcctgattatatttcacattttcaggaacaaaatgatttaaaagcattgctagaaaatctccttcaaaatatccaatccaaaaaaagaaagaatgtagaaattatgtggctggctgcaacgatttgccgcaaactgaatggtattcgtttcacctgttgtaaaagtgccaaagacaggacatcgatgtcagtgacacttgaacaatgctcaatcttgagagatgagcaccagttacacaaggacttctttatccgagcgctggattgcatgagaagagaaggatgccgcatagagaatgtactgaagaatatcaaatgcagaaagtatgctttcaacatgctacagctgatggctttccccaagtactacagacctccagaggggacttatggaaaagctgacacctaagtttaccaacatgttaataaacaggaacacaaatacatttcagttggataatcttcaccttggtcttttttgtttgtttttattgtcatgaatttgtggtgggggagatgatcacagatgtttcccaaaatctaggaactacttcaattcatcatcagcatattgctctgaaagaaatccattttaaaaaatcttacatgattcagtactgtcatttctagttctaagcttctatgtgttgagcctagctgattgagattggttcacaaagtgtaaatttcattcatgagtatttaaatgtttctgaggaaacatggatcatttcaataggactaggggtgattcacagagcaccac

SEQ ID NO: 77379 - DNA, 1509 bp, Homo Sapiens
cagcagaagcaggtaacagctcttgcacctgtttctcttgcacctgacgtgtagctgctcctacccacctctcctggctgagccttgcctgatacagcagcccggaggcaccacttgcttcccgagtctcaccctcccaggcagctcctacactcaactgcttctctaggaaaggtctcacctccagcctggagcagtcgggattacagaaagccccatccttggcttagggagcgccatgacgactgaaattggttggtggaagctgactttcctccggaaaaagaaatccactcccaaagtgctgtatgagatccctgacacctatgcccaaacagagggagatgcagaacccccgaggcctgacgctggaggccccaacagcgactttaacacccgcctggagaagattgtggacaagagcacaaagggcaagcacgtcaaggtctccaactcaggacgcttcaaggagaagaagaaagtgagagccacgctggcagagaaccctaacctctttgatgatcacgaggaaggacggtcatcaaagtgaagggctgaggagggtgctagcacctcttggctccctgccatcagccagatctgagacaggaccttgccacgctggcctctttggccatagctgaagctgtggggccagttgatacctgctggcaggaaatggctgtttttaggttgtatttatgtgccgccacttttgtaaggcctgggagatcccagggtcctccaacctccccctgaccacatacaaaggcactctagttcaagagtgaaaaatctcacccaggaggaacagccctccttgaagcaatggcagggccagcagggaggtgggcatggcagggaatggagagagtgagccagacagacttcacctccttactggacacagggtcaagggcgagtttcaattgctgctccctttactttctctacctgtgactactccctggaccaatcctgaggagggcacattttccagaagccacgtgataggggctggtttctgtggagccagaggcagagacactgaacttgagctcacctcctaacaccggcagtaaacttcctggaactttgccctcaggtgcggaggggacagaggaccctggcactctgttagggtgctgtagaagactagattgatggtagtttggcctgttagttcctgttttggccatgacttttgcagatggcaagtcacacaccctcaaagggaagctacacgggccaaatcgggggagtgggtggggaattttctcctctccctttcctactataatagtatttaagacatatcagctccagagatgagtcctggagccttgaattttgtttaacaaaataattgtaggtttctctctgtaataacaacgctggaaaggccgagaacctcttttatgctcatgtcttgcatttattgagatgactgtttctcatgcctttatgttccttcatgtaagtaaagtggacctttgtgctcaaaaaaaa

SEQ ID NO: 77380 - DNA, 688 bp, Homo Sapiens
  misc_feature (367)..(426): n is a, c, g, or t
  misc_feature (540)..(580): n is a, c, g, or t
tggctgtgggccagcatgaggaggagtatttttcgggccctgagcctaaggctgtgctgaagaagttcagggaggagctggctgccctggataaggaaattgagatccggaatgcaaagctggacatgccctacgagtacctgcggcccagcgtggtggaaaacagtgtggccatctaagcgtcgccaccctttggttatttcagcccccatcacccaagccacaagctgaccccttcgtggttatagccctgccctcccaagtcccaccctcttcccatgtcccaccctccctagaggggcaccttttcatggtctctgcacccagtgaacacattttactctagaggcatcacctgggaccttannnnnnnnnnnnnnnnnnnnnnnnnnnnnnnnnnnnnnnnnnnnnnnnnnnnnnnnnnnnattcagatctatatggcaaatagccacaattatataaatcatttcaagactagaatagggggatataatacatattactccacaccttttatgaatcaaatatgatttttttgnnnnnnnnnnnnnnnnnnnnnnnnnnnnnnnnnnnnnnnnnaataggattttgaacccaaattgagtttaacaataataaaaagttgttttacgctaaagatggaaaagaactaggactgaactattttaaataaaatattggcaaaag

SEQ ID NO: 77381 - DNA, 1041 bp, Homo Sapiens
  misc_feature (84)..(84): n is a, c, g, or t
  misc_feature (86)..(86): n is a, c, g, or t
  misc_feature (220)..(220): n is a, c, g, or t
  misc_feature (223)..(224): n is a, c, g, or t
  misc_feature (289)..(289): n is a, c, g, or t
  misc_feature (320)..(320): n is a, c, g, or t
  misc_feature (560)..(619): n is a, c, g, or t
  misc_feature (728)..(938): n is a, c, g, or t
tagatcatataggattgctcgagccagaatcgcacgagtcactggccagctgatgtactctgtgcctatcacctgcagatgcgntncccgccaccaccaggattacgctgagacatgatgcgacatgcccactcccaccagcttctctccagattccatcacttgcagctggcagacgccagcccgtatgtgctgtggcccagcatgaggaggagtattntcnnggccctgagcctaagcttgtgctgaagaagttcagggaggagctgctgcccctgataagggaaantgagatccggaatgcaaagctggacatgccntacgagtacctgcggcccagcgtggtggaaaacagtgtggccatctaagcgtcgccaccctttggtatttcagcccccatcacccaagccacaagctgaccccttcgtggttatagccctgccctcccaagtcccaccctcttcccatgtcccaccctccctagaggggcaccttttcatggtctctgcacccagtgaacacattttactctagaggcatcacctgggaccttactcctnnnnnnnnnnnnnnnnnnnnnnnnnnnnnnnnnnnnnnnnnnnnnnnnnnnnnnnnnnnngatctatatggcaaatagccacaattatataaatcatttcaagactagaatagggggatataatacatattactccacaccttttatgaatcaaatatgatttttttgnnnnnnnnnnnnnnnnnnnnnnnnnnnnnnnnnnnnnnnnnnnnnnnnnnnnnnnnnnnnnnnnnnnnnnnnnnnnnnnnnnnnnnnnnnnnnnnnnnnnnnnnnnnnnnnnnnnnnnnnnnnnnnnnnnnnnnnnnnnnnnnnnnnnnnnnnnnnnnnnnnnnnnnnnnnnnnnnnnnnnnnnnnnnnnnnnnnnnnnnnnnnnnnnnnnaataggattttgaacccaaattgagtttaacaataataaaaagttgttttacgctaaagatggaaaagaactaggactgaactattttaaataaaatattggc

SEQ ID NO: 77382 - DNA, 1034 bp, Homo Sapiens
atgagcagtaagctggagttagagtggaagaagggtttaccaaaattcttcctgcagactagttgctaacagggtttctttgagaggcttaaaaatttcaaaagtattatttaagccactctaaccctgcatgaaaaattggagttagaaatactgatttctgagaccacgtataccagtgaaaattagcttctgagtaaatttctaatttatgccctgctttatttagcctcgctatatgtaacacatggattattttttccctctagtttttaactatatcctagattaaaaccagcatatgctaagaatgtttttacattctgtttcctcctgtgatctttctgaaccaataataaacagtcaactgtgatgctttttagtatgaacaatgatagttttctaaaatctgaaaatcaatacctgagtatgtgatgtggcaatgcattcttctagataagcactaaacaaagtatggaccctcaatttatgtctttaagatttaaagtgaagtaaatttctaaggaactgtgtcctttcctagcaggaataaacagtgaaaatttggtaagtatttaacttgaagtgcatgtaatagtgatgagagtaagtagccaaatttccgtaatataaggtaatgtttaaaagtgagcaataattattgcatctcttttgcgacttcatgtagatgtgattaacattttttacaaatttgcctgcataaagattaaattggaacataccttactcctttgtctggtttttttattttgtatggtgctttaaatactaattttatatttcaagctttttgcagggtagaaataagtggctgttaaagaaaatatcttcaagaaggattatttcagtgtccctttttaaaactcgatgatggctttcagtttatttaagtcttctgtttttcagctccagttaaaactgacaataggcagctatcaaaaatggaaaaaatcttgtgctctttctggaatattagaggaatcagttaataatagtaaagtggtattaacccc

SEQ ID NO: 77383 - DNA, 1364 bp, Homo Sapiens
  misc_feature (1205)..(1264): n is a, c, g, or t
gcatcgccctgggtctctcgagcctgctgcctgctcccccgccccaccagccatggtggtttctggagcgcccccagccctgggtgggggctgtctcggcaccttcacctccctgctgctgctggcgtcgacagccatcctcaatgcggccaggatacctgttcccccagcctgtgggaagccccagcagctgaaccgggttgtgggcggcgaggacagcactgacagcgagtggccctggatcgtgagcatccagaagaatgggacccaccactgcgcaggttctctgctcaccagccgctgggtgatcactgctgcccactgtttcaaggacaacctgaacaaaccatacctgttctctgtgctgctgggggcctggcagctggggaaccctggctctcggtcccagaaggtgggtgttgcctgggtggagccccaccctgtgtattcctggaaggaaggtgcctgtgcagacattgccctggtgcgtctcgagcgctccatacagttctcagagcgggtcctgcccatctgcctacctgatgcctctatccacctccctccaaacacccactgctggatctcaggctgggggagcatccaagatggagttcccttgccccaccctcagaccctgcagaagctgaaggttcctatcatcgactcggaagtctgcagccatctgtactggcggggagcaggacagggacccatcactgaggacatgctgtgtgccggctacttggagggggagcgggatgcttgtctgggcgactccgggggccccctcatgtgccaggtggacggcgcctggctgctggccggcatcatcagctggggcgagggctgtgccgagcgcaacaggcccggggtctacatcagcctctctgcgcaccgctcctgggtggagaagatcgtgcaaggggtgcagctccgcgggcgcgctcaggggggtggggccctcagggcaccgagccagggctctggggccgccgcgcgctcctagggcgcagcgggatgcggggctcggatctgaaaggcggccagatccacatctggatctggatctgcggcggcctccggcggattcccccgccgcaaagagggctcatctacctctgggggcccggacggctgctgcggaaaggaaaccccctccccgacccgcccgacggcctcaggccccgcctccaaggcatcaggcnnnnnnnnnnnnnnnnnnnnnnnnnnnnnnnnnnnnnnnnnnnnnnnnnnnnnnnnnnnncgcttttgtgtatataaatgttaatgatttttataggtatttgtaaccctgcccacatatcttatttattcctccaatttcaataaattatttattctcc

SEQ ID NO: 77384 - DNA, 656 bp, Homo Sapiens
  misc_feature (50)..(50): n is a, c, g, or t
ggattctgccaccccctgtgccacgggggttcctaacctcgcctcctctntgcagggcgactccgggggccccctcatgtgccaggtggacggcgcctggctgctggccggcatcatcagctggggcgagggctgtgccgagcgcaacaggcccggggtctacatcagcctctctgcgcaccgctcctgggtggagaagatcgtgcaaggggtgcagctccgcgggcgcgctcaggggggtggggccctcagggcaccgagccagggctctggggccgccgcgcgctcctagggcgcagcgggacgcggggctcggatctgaaaggcggccagatccagatctggatctggatctgcggcggcctcgggcggtttcccccgccgtaaataggctcatctacctctgggggcccggacggctgctgcggaaaggaaaccccctccccgacccgcccgacggcctcaggccccgcctccaaggcatcaggccccgcccaacggcctcatgtccccgcccccacgacttccggccccgcccccgggccccagcgcttttgtgtatataaatgttaatgatttttataggtatttgtaaccctgcccacatatcttatttattcctccaatttcaataaattatttattctccaaaaaaa

SEQ ID NO: 77385 - DNA, 972 bp, Homo Sapiens
aacactcagcacttcatttacttctcatccacaaccaaatgatagccatgatgattgaagttcccattttacagatgagaaaactgaggcacttagaggttacataacttgcccaaggtcacacaagtaattagaagagctgggactcaaacccaggcaggcagtctagttacagggtccaagctttgatctccattacatcctagaaggagcagcctgttccagaaaggggaatgaagactaacctgtactagttgattgagttttttgctacaatttcatactccagagcctcctgtctcttccatcctttctctgcacaccccttctttcctgcaggaacttcttagcagatccacaatgtgtgtcatctacccaacctcattatccgggcccctgtctcatcctcccacaccatccatgtcacagcctggctgcctactgcctttcaaaggataaccagttgtccagtttataaactccaatttgactttaataaattaaattccaagccatcacacagcaatggacatcatcatcgtctcccaacacacagaggtgcagccttgcgtggctccatcatcacagtctttaaataaagcccctaaagccatctctctggggaaggcttcccaccaggctcccggctccctccttcccacagagccactgctcacagagaaggcatcaagtacaaaaaacggtaataaagggggagggagggatgaggagcaggaggggaggcaggaaggtggggagtacctgccccccatcccgggccggccctgctctctgtgagctgccaacattctcagaggcagacactggtgctggtctgagtggggacctgagggaggtgtgggagccccatcccaaagggaattacccaccctcctgggacagaaaagaagggtcacctgggagagatgccctctatcatctgttcacggagggtcctaagccacacatata

SEQ ID NO: 77386 - DNA, 456 bp, Homo Sapiens
  misc_feature (213)..(213): n is a, c, g, or t
  misc_feature (235)..(284): n is a, c, g, or t
aaactccaatttgactttaataaattaaattccaagccatcacacagcaatggacatcatcatcgtctcccaacacacagaggtgcagccttgcgtggctccatcatcacagtctttaaataaagcccctaaagccatctctctggggaaggcttcccaccaggctcccggctccctccttcccacagagccactgctcacagagaaggcatncaagtacaaaaaacggtaatannnnnnnnnnnnnnnnnnnnnnnnnnnnnnnnnnnnnnnnnnnnnnnnnntacctgccccccatcccgggccggccctgctctctgtgagctgccaacattctcagaggcagacactggtgctggtctgagtggggacctgagggaggtgtgggagccccatcccaaagggaattacccaccctcctgggacagaaaagaagggtcacctgggaaagatgcc

SEQ ID NO: 77387 - DNA, 521 bp, Homo Sapiens
ctagagctcactgttttctagttagtccatctggaagtggagcctttttccagtttgcacaaatgtgccatattggcttgtagctggcatgcatccaagtccataggtcctgcctcttcaatcctggctttctagggcctgggatgatcattgctagaactgagagaccagcctggctcagtgaacttcagggcgttccattcattctttcagtaaatgtttgcagcacatgtgttacatgtcaggcagtgaaaccccccacagcagccttccctctcagaggatacatttgtaaccattacacagtcatcaaaggaataattttttttaatcaccagtgtgcatacagtcatggagttgggtattcccagctaccagggaggctgaggtgggaggattgcttgatgccaggagttagggaatatagtgcaccgtgattggacttgcgaatagccactgcactgcggcctggacgacgtagtgataccctgactcttataaataaataaatgaataaacac

SEQ ID NO: 77388 - DNA, 1275 bp, Homo Sapiens
  misc_feature (701)..(787): n is a, c, g, or t
  misc_feature (810)..(876): n is a, c, g, or t
gctaaataaggtttgtaccaaaggctggtgggaacacaaagaagggatcattaattttgtcagaggcagtcaaggaagactttgtagagagtgacctctgagttgtactttaacagctgtgttggaaagttcaggtgagagaggaaaggaacggtgttcaagacagagggaacagcagccgcaaagatgtggaagcttgaagacccctgaaaactttgctgagtttgggccacaggttacacgggagcaaatggggcaggtatgaggctgacaccgtgggttggggtgagatatgaaggcatgtggtcaggttaaagggtccagacttaattcattgggcaattgagaaaaaacagaggacttggagcataggtgtgaaacatcagattttagaaagacatgtcagtagacaatcactgtatttcaggctttagtgattcctcacttggtccatgatacaagcctccatgtcacactttgcttgctgctttgtatatctgctcagctgaggcattttaacataaccgtatgttaaaagggtcattattcccactgtacagttggcgaaagagaatctcagggagcttaaaaagaataccctttggcaaagccaagattcacaccgaagtctgttggatcaccaagtctgtgtttcattatactgaattagaagataataacaacgagaaagaaaaaaatgnnnnnnnnnnnnnnnnnnnnnnnnnnnnnnnnnnnnnnnnnnnnnnnnnnnnnnnnnnnnnnnnnnnnnnnnnnnnnnnnnnnnnnnccagaatacgtaggagtggaacnnnnnnnnnnnnnnnnnnnnnnnnnnnnnnnnnnnnnnnnnnnnnnnnnnnnnnnnnnnnnnnnnnnaagagatgtttcaaaggaagacttggtaatagttggctagcaagcgggaagaccgagagagaaggaggaaagaggtgactttaagatttttaacttggatgaaggcagaaagggatgtgagtggggaaatgaggagtttattctcacagtcatttactttgccatcatagtgtgacatccaggtggaaatacccaatagatgccttggcaaagtgaaccacgggcttcagaggagtcaaggctatatcaaggtcaacacctcatccagtgctgtgctgggggcagctcacaccagctccagggaagcaactattaaatattctgaaattttgcaagccagttgttaacacagccattaataaaaattaaatcaaaagaattaaataaattatatttttg

SEQ ID NO: 77389 - DNA, 571 bp, Homo Sapiens
  misc_feature (53)..(110): n is a, c, g, or t
  misc_feature (519)..(528): n is a, c, g, or t
acacacacatttttaatcaggaagaaaaatactttaaagacatgccaatttgnnnnnnnnnnnnnnnnnnnnnnnnnnnnnnnnnnnnnnnnnnnnnnnnnnnnnnnnnnaattaaataatcggcaggttaaatgaatgtaaaatgaggaatgtacagtgaaaaacaaactaatataaagcattccagttgataaaaacctcctcaggcttatggtttgttttccaaggaaattatgtttcaatgtaaagtttgaaatactccagacatacattccatgtaggttttgggtgccaatgttaaaatttcaaattttgcatgcaaggcttagcaaagaaacactggcagaattccagcatttgcaaaattctaagttttggtgaatattgtaaatattacaattggtattagaaagccatgatgaatccagaattaagagaaaacccatttcataaatattttgtttgattaaaaaataccaggcttaccatgttctaaataattcaagaaaatatctttnnnnnnnnnnggactgcaatttaacagtaatctgtatatctttagctgccatt

SEQ ID NO: 77390 - DNA, 756 bp, Homo Sapiens
cagcatcacacgtcaggttagcagtgaggggacccgggaggctgacaggcgcgaaccctgtcatgatgacaaggcaaggcagcaataggctgagcccgaaggtatttctccagatccacagggagaggtctcaccctccagctgtggatgctaaaccctgccagatgttccagccttgatctgtctgctcctactcctcacatctggaggattccagcaggaggggttttggaggggacctgcttgcaacctgctgagggcttgtctgctcccacagcaccatctaagacccctcctctagaagtggggaaggccagatgtgtagcttcgggtatcagaggaggctgacctggcccccatcccaagttacaagaacttcagtgagactaagggacccccatcctagggatcttgtcagggttccttactgaccagaggagcccgcagcaatctccacagcctcctgggtctcacccctttcatgggctcttcatcaggacacttccctctcttttgggagcttctctgggcagaattgggctgggacctctctccccaactgccctgctctcctcatactcaccggtttgaccagaaattctccaaatccagccatagatggctgctgggtgtgcagcaggagaaggaggatggtcagccttggagcatctctcaattacgggacagtccctctttggaagcaggctcctgtgctttcctgtgttaataaacagtaataatcctttccatctctgc

SEQ ID NO: 77391 - DNA, 1056 bp, Homo Sapiens
gggacatcccaagattgggagagggttcatctgatcgtggcaggtggttatgacgagagagtcctggagaatgtggaacattatcaggaattgaagaaaatggtccaacagtccgaccttggccagtatgtgaccttcttgaggtctttctcagacaaacagaaaatctccctcctccacagctgcacgtgtgtgctttacacaccaagcaatgagcactttggcattgtccctctggaagccatgtacatgcagtgcccagtcattgctgttaattcgggtggacccttggagtccattgaccacagtgtcacagggtttctgtgtgagcctgacccggtgcacttctcagaagcaatagaaaagttcatccgtgaaccttccttaaaagccaccatgggcctggctggaagagccagagtgaaggaaaaattttcccctgaagcatttacagaacagctctaccgatatgttaccaaactgctggtataatcagattgtttttaagatctccattaatgtcatttttatggattgtagacccagttttgaaaccaaaaaagaaacctagaatctaatgcagaagagatcttttaaaaaataaacttgagtcttgaatgtgagccactttcctatataccacacctccctgtccacttttcagaaaaaccatgtcttttatgctataatcattccaaattttgccagtgttaagttacaaatgtggtgtcattccatgttcagcagagtattttaattatattttctcgggattattgctcttctgtctataaattttgaatgatactgtgccttaattggttttcatagtttaagtgtgtatcattatcaaagttgattaatttggcttcatagtataatgagagcagggctattgtagttcccagattcaatccaccgaagtgttcactgtcatctgttagggaatttttgtttgtcctgtctttgcctggatccatagcgagagtgctctgtattttttttaagataatttgtatttttgcacactgagatataataaaaggtgtttatcat

SEQ ID NO: 77392 - DNA, 919 bp, Homo Sapiens
  misc_feature (319)..(327): n is a, c, g, or t
  misc_feature (852)..(852): n is a, c, g, or t
aaggatcaaagagctaatgcgtgtccggcacctcgcgtagtgtgagcgctccacaagtgtgagcaagggacgtctgggttgttttcttttttccacctctcagtttaaataaggttgctgtgaacgcttttcctgctgagggttatttcctcagatgcagaaccccgcctcaagatatgattcgaggtcggggggtcaggcagctgcgtggggctttttccatgcagacagaagcatcttcaaaatcggaatctgtttacagcaaagggatgtgttattttccccgcatcctttgcagcactgggcttgttttatcgannnnnnnnnctcattcgatcagcaaggctgtgcattcctccgtgtactgtttaactgtctgtatttcctgagggattcatggtttgttcactgcctttgattgtttttcaggtggtgtctgggacagtgcctggtgctgtcagctggagctggcaggcccacattggaagcatcttctaagtaggaaggggagacaagggcttgaagctgggggagatggggaaagcctcccgccccatccacgccatccctgccttcccctcgtcctgggtattttggagcctgccagctgaggagtgctctcccagggttgggactgcaggcgcctgacaaactgaagagcactgaagctggagatgcaaagaagagggagcattgactatgttcttggagcaacgagcaagtcagtgaggcacgcgtgtgacaggtgcctttcctgaacccagcaatcctcctcccctttccctggctctcctgggaactcctaatgaagtcagaataagccactccatcaatttatgatccccagatganctgtgtccctttgctccttaatcactcaggtacccagattctctattagcaagaagcccagaacccc

SEQ ID NO: 77393 - DNA, 1000 bp, Homo Sapiens
gtgtcaagacgtcagggattggtgcagccccacgtcaggggtgattgtcttgactttctctccatttgagttctgggtggtaggctcccttcccccttgcttacaggtgctgtcctgggcacaggaggtacgcgcctggctctgccactgttctcttccctctgctgcaaagcccagttaaggaaatgtctccaggtccaaagagataggatggtctgggccccacctgttggaagggaacagccagggaagaaccacctgcctgggcagggcctcgcctgagggagggcctggggcagggcacaaggggttgatctcagcccacaagccccaggggcagcccaggaaagcagggcacaaggggttgatctcagcccacaagccccaggggcagcccaggaaagcaggcgacggatgtggatcctgacctcctgagaggtgtgaggtgcagggatacccacctctgccttgacggccgcgcaccccttaggaagtggctgtccagcgcctgcctgtgctgggcctgggagaggagctgtcttgccagggctcccaggcagggagaggcaggtgaggttctcagccgatgtgttagaggttgagcatcgcctgtgcccagcttgctggctgtcagtgcttgatgtgcccatcctcagctaaaacccagagctggcatgttggtcatccccacctcagacgggacgcccagtccagagctggtgagccctgggccagcctttgggcctggcctgccccattcaccggccagcgccccacctccctggctggagggtcggggaggggctggcagagatggttggtccacagggctagccctgggtggtgggagaggggcccagggtcagggtgagagagagctgggccagggagctgctgcaggatgattttgaggtgtgggggaagcactcttggttggttttggtttgctttttaaaaattgtggtaaaatacataacaaaagtaactatcgtaaaaaaaa

SEQ ID NO: 77394 - DNA, 707 bp, Homo Sapiens
  misc_feature (629)..(646): n is a, c, g, or t
ataggtgaacactaatagaacccagctggttaaacaaaaaaggcagggctggtacggtccggtatccgggattcgtcgacccacgcgtcgcctagccaaggagtgtgaatttatagatctaactgtcataggcaaaacaaaagcttcgagctgttgcgtgtgtgagtctgttgtgtggatgtgcgtgtgtggtccccagccccagactggattggaaaagtgcatggtgggggcctcggggctgtccccacgctgtccctttgccacaagtctgtggggcaagaggctgcaatattccgtcctgggtgtctgggctgctaacctggcctgctcaggcttcccaccctgtgcggggcacacccccaggaagggaccctggacacggctcccacgtccaggcttaaggtggatgcacttcccgcacctccagtcttctgtgtagcagctttaacccacgtttgtctgtcacgtccagtcccgagacggctgagtgaccccaagaaaggcttccccgacacccagacagaggctgcagggctggggctgggtgagggtggcgggcctgcggggacattctactgtgctaaaaagccactgcagacatagcaataaaaacatgtcattttccnnnnnnnnnnnnnnnnnngcctacagccgcggccgcaagcttattccctttagttgagggttaattttagcattggcac

SEQ ID NO: 77395 - DNA, 2096 bp, Homo Sapiens
  misc_feature (1998)..(2036): n is a, c, g, or t
ccatagtgaacatagaacacgtgtttaaaaaaagcaggctggtccggtccggaattcccgggatatcgtcgacccagcgtcgcgcgcgtggcgtgtggctcccgtcgtctggccaagtctcagcgcagcgcaccggccggcgtctcgttggcctggagcccacacccaccgggtccctgaccccgcgccccccgcgcccggttcccggcatgcctcgcgcccgtaagggcaacacgctccggaagggtggtcagcgccgtggaggaggtgcccggagcagtgcccaagctgactcgggttccagtgacgatgaggcagccagtgaggcccgcagcaccgccagtgaatgccccagccttctcagcaccactgcagaggacagccttgggggggatgtcgtggatgagcagggccagcaggaagaccttgaggaaaagctgaaggagtatgtggactgtctcacagacaagagtgccaagacccggcagggtgctcttgagagcctgcgcctggccctagcgtcccgcctactccccgacttcttgctggagcgccgcctcacgctagccgatgccctggaaaagtgcctcaagaaagggaagggcgaggaacaagccctggctgctgctgtgctaggcctgctctgcgtgcagctgggccctggacctaagggtgaggagctgttccacagcctgcagcctctgctggtctctgtgctcagtgacagcacagctagccctgctgcccggctccactgtgcttctgcccttggcctgggctgctacgtggctgccgctgacatccaggacctggtctcttgccttggcctgcttagaaagtgttttcagccggttctatggcttgggggggcagctccacaagtcctgtggttcctgccagcctgcacggcctgctctctgctgccctgcaggcctgggcattgctgctcaccatctgccctagcacccaaatcagccacatccttgacaggcagctgccccggctgccccagctcttgtccagtgaaagtgtgaacctgcggatcgctgccggtgaaaccattgcactgctctttgagcttgcccgggaccttgaggaggagtttgtttacgaggacatggaggccctctgcagtgtcctgcgcactctggccactgacagtaacaagtaccgtgccaaggctgatcgtcggcgccagcgctctactttccgcgccgtgctgcactccgtggagggcggtgaatgcgaagaagagatagtgcgcttcggctttgaggtgctctacatggacagctgggctcggcaccggatctacgctgccttcaaggaagtgctgggttcgggcatgcaccaccacctccagaacaatgagctactccgtgacatctttggcctgggccctgtgctgttgctggatgccactgccctgaaggcctgcaaggttccacgctttgagaagcacctgtacaatgctgctgccttcaaagcccggaccaaggctcgaagccgtgtgcgggacaagcgggcagacatcctgtgaagcaggacctgctgaagaggagactttctatgcccttggtccgtatttttaacagaagacagtgcaacaactggtctccaccagtatttgtcactttattttttttaatgacaaaaccaaaaacagacatggggtgggtagctgggggcccggacacttgggaccctgacccctttgtccctgcactcagccctgtggccccttcctgtcctgtctcaggccaggctaaatatgtgccttcctcagggctgtggggcaggcactagggggcctttcccttcctttcctttctcaggccttgctcccccaggatgacccactcttaggggggtggtggcatctggacaaatgccaccacagcaggtggggtggcaaagctacctggaatggatttgtgtgctgatttttaaggattattacagataattaaacagaacggtcagccttctgtggtcttnnnnnnnnnnnnnnnnnnnnnnnnnnnnnnnnnnnnnnngacagcgtatgcggccgcaagcttattccctttagttgagggttaattttagcttggcac

SEQ ID NO: 77396 - DNA, 726 bp, Homo Sapiens
gctgcggaggtggcggccgggctgggatagcgcgagtgtccgcggccgagcagcagagatttttgctgtgagaattaattactagtaacagttcaatatgggggacattctggctcatgaatctgaattacttggactagtgaaagagtatttagattttgctgaatttgaagacaccttgaaaacattttcaaaagaatgcaaaataaaaggaaaaccactgtgtaaaacagtaggcggatctttcagagactccaaatcattgacaattcagaaggatcttgtcgctgcatttgacaacggagaccagaaggtgttcttcgatctgtgggaggagcacatttcaagttccatccgagatggggactcctttgcccagaagctggaattctatctccacatccattttgccatctatcttttgaagtactctgtggggagaccggtgggtttacctggtgatgcgggtgggtctgagtggtgtgttaaggaacagtgtttgctgtcattgtccacatgggcatggatttcatatgtggctgtgctgtcataatgcttacgaggtacaggcatcctctctcctggtgagtgattttctactgtattcccagcagtttatattctaatttctatggagatttaataatttctgtaatcaaagctatattcctaaatacctcaagtttttgaaacctcatcaaaataaagtttatttggcaacttaaa

SEQ ID NO: 77397 - DNA, 818 bp, Homo Sapiens
gcggccgcaggcgctgggcctttcgctccagcctgtcaagtctctcagcctcccgggccttcgtgcccatcttaaggctgaagctgagctgccacccaagctgccgctgcaggaggaggagccagaggacagccagagtgagccctcaccatctgccaaacagcacaaaaaagccaagaagcgcaagagcctgggggctcccgtgctccacgctgtggccagcatggtgtctgcacccttagagacattgaggctggagcgaaaggcccagcgcctgcggccgctgtaccagtacgtcaactattgcaaccctgagctgaaccaggcagggaagggggacggggaggctgaggtggaggcagaggcagagctggccccggttcccgaggagggaggtgtggagcaactgcaggccttgctgcccttggcaggtgagctgggcccaggcctcgctttgccctgtcccagtccactagtgacccccacccatgccctggctcccctcggagaggaggctggagaggagcctgggggcttgcccagcttgggggtgagtgaccacaaggccgaggtggataagtcaacccaggtggacatcgacaagatgctgagtgtctgcactgctccacttgtccccccgctctctcctcagtacaagtgactgtcccgccccactggtggctcccctccttccacgcctgaatttggcttcaggcttcctgtgggcctaggccctctggtggcgggggcaaatttggcacctgcccccacttgggactttggtcttgctgaaaataaatatttttctttttcaaaaa

SEQ ID NO: 77398 - DNA, 463 bp, Homo Sapiens
ggagaccagttcctggtgcctgcccatgaggcccgcggaacccagagtgaagaccagcgcccagcaggcgcagcttcggagtcggagctccaggaggaaggacccaagctgggggaggagcggcccaagccgcatgccggggcgctagaggagagaggccccaggcccgtggtctccattgtgaggccccgtcatggtccaaagagaaagcctgtcaagtctctcagcctcccgggccttcgtgcccatcttaaggctgaagctgagctgccacccaagctgccgctgcaggaggaggagccagaggacagccagagtgagccctcaccatctgccaaacagcacaaaaaagccaagaagcgcaagagcctgggggctcccgtgctccacgctgtggccagcatggtgtctgcacccttagagacattgaggctggagcgaaaggcccagcgcctgcggccgc

SEQ ID NO: 77399 - DNA, 1379 bp, Homo Sapiens
  misc_feature (74)..(93): n is a, c, g, or t
gttaacgacggccagtgccattctacaattaaccctcactaaagggaatacgcttgcggccgcggctgtatgcnnnnnnnnnnnnnnnnnnnncacggtttattcattcagcagactttactcattagttttcaagtctttcgcaatgccaattcccccaaaattaacaatgtctctcaaaatccaagaaataaaatgtgtactgtatttacaaatataaaatttaaaaattttaagattataaaaattgaagaattacatcatctgtcaggtgagagtgtcaacctgcaaaagcaattaacttatttttaaaaaaagaaattggagaatcaaccatttaagcatgattttaagttcaagaattttcagatgttattttcttacatggcttccaactaattttatacagtaagttcaagtccatagcaaaggtaataaaactgccagttgaccttgatagaaactatggaaatttataataaaatttcaagtcattttaaaaagaatatgaagccttgtttgctcctacaatgcaacaaaatctagattccttttcttgatataaatctctattattctgaaaatctaccaagagatttatgtataaaatatttgtaataactgttttacatgtgtggtgcctttaaaataatatatctgaagactaaatatgtcattaataataaaaaatacaaacaaaaacaacggctagaataggaaagactgaaagtgccaatgacaagtcatttgatcacagatacctctatgttcctacatagctctaataagttgttatgaatatgaacaacatgtatcttacttgatctcttagagacaaaaatatagatagggagatgggagttataaggtgtcaacagattcatcatttgaatcaaaataaaacaatctgaatatcatcactgcttctactatatcactacagtgtgatcgcattcagatttaaaaggtttgagtccactctcaaagacggatatatttctactttctccacagtacagtctggcttcactgagttactggtaaagacacgggcacctgattagactgaggtgctggagacccactgttcatggcttgtggaggcactgcagctggctccatcttgctaatgtgtgtgatgaatcgaagacgaagttttaaagctggttttaagttacagataatcttctctacttgctctttcacgctgtcaccagtaaacatatacttcatgtgatagaggaagtcacagatgggatccatgtaatttaaatgggtgctacactggtcaacattcagcagcatgtcataaaacgccacaccaatctctatcatacaacgagttctctcttgctgaaatctttgtaaaaatggtccaa

SEQ ID NO: 77400 - DNA, 757 bp, Homo Sapiens
  misc_feature (159)..(173): n is a, c, g, or t
aaatcaaatcaaaccacaatacatgtacctcatacatgcaaggatggtactatcaagagagattagtgttagagtacagagaaaaaggaagctttgtatactgttggtgggaatgtacattggtacagccattgtgaaaaacaatatggaggttctgcnnnnnnnnnnnnnnnctaccatgtgatccaacagtctcactcctgggtatatgcatatatgaccaaaggcagtgatcagtatttcaaagagatatctgccactcgcatatgttcattacagcattattcacaatagtcaacatatggaaacaaacttagcatccattaatggatgaataaagaaagtgtgatgtatatttaaacagaatattactcagccgtaaaaaggaaatcctgacatttgtcacatgaataaacctggtggacactataaaataaggcagacataggcaaatacttcatgatcccacttaattgtggaatattaaaaacttaaactccgaggcagagggaggaacggtggttactagagtccagaaggtagggaaaatggagaaatgttggtcaaaggttaaaaaccaagttgtaaggtgaacacgttctggagatttaatgtacagcatgggtggtcatcaatgtgttaatttgactgtggtaaccattacagaatgtatatatatacatcaaaacataactgtacatcatgaacatatacaatctttgtgaagtattttaaaataaaaaaggaatgtttactg

SEQ ID NO: 77401 - DNA, 565 bp, Homo Sapiens
  misc_feature (91)..(146): n is a, c, g, or t
  misc_feature (164)..(191): n is a, c, g, or t
ctaaaaatgcaaacattagccaggcgtagtgacgtgcacctgtagtcccagctacccaggaggccaggcaagagaattgctggagttcatnnnnnnnnnnnnnnnnnnnnnnnnnnnnnnnnnnnnnnnnnnnnnnnnnnnnnnnnagagcgagactgtgtctnnnnnnnnnnnnnnnnnnnnnnnnnnnnggaaagaatcagactggcttgggactctgctgtcccctgcccgtgacctcccaaaagcgtgtgttagagactgacctgcctagtgcgtcagtggagggggcactttggagaggggcttggatcgtgaggccccgccctcgtgaatggctcagtgccttgtgaaagggcttgatggagggagtttggtcccttttccccttttgtctctctgctgtgtgaggacaccatgttcctcccctctggaggatgctgtaacaagctgtcatctcgggaggagacaccaggccctgaccagacgctgaacatgccagcaccttcatcttggactttccagcccccagaactgtgagaaataaatttctgttctttataaa

SEQ ID NO: 77402 - DNA, 2187 bp, Homo Sapiens
  misc_feature (1248)..(1277): n is a, c, g, or t
  misc_feature (1412)..(1449): n is a, c, g, or t
  misc_feature (2038)..(2054): n is a, c, g, or t
ggacaacatgacagagaaggaattctggacacgttttttccagtcccattattttcacagggatcggctgaatacagggtcaaaggatctctttgcagaatgtgccaaaatagatgaaaaaggcctaaaaacaatggtttcattaggagtgaaaaacccactactagatttaacagctttggaagataaaccattagatgagggctatggcatttcctctgtgccatctgcttccaattctaaatccataaaagagaatagtaatgctgccatcatcaagagatttaaccatcacagtgccatggtcctggcagctggactcagaaaacaagaagcacaaaatgaacaaactagtgagcccagcaacatggatggaaattccggagatgcagactgctttcagccagcagtcaaaagggcgaaattacaagagtccattgaatatgaagacttggggaaaaataattctgtaaaaacgattgcactaaacctcaagaagtcagataggtattatcatggtccaactccaatccagtcactacagtatgcaacaagtcaggacattattaattcttttcaaagtattagacaagaaatggaagcttatacacccaagttaactcaggttctctcaagtagtgctgccagtagtaccatcacagcactgtcacctggaggggcacttatgcagggaggaacacagcaagccataaaccagatggtgccaaatgatattcaatctgaattgaaacacttatatgtagccgttggagaacttctacgacatttctggtcctgctttcctgttaatacgccattcctagaagaaaaggtagtgaaaatgaaaagtaatttggaacgattccaagttacgaagctctgtccattccaagaaaagattcggagacagtatttaagcacaaatttggtaagtcacatagaagagatgctccagacagcctacaacaagctccacacatggcagtcacggcgtctgatgaagaaaacgtgaggtggccatgatgcttacaggttttgtgagattgagagaactatgacctgcagcaactctggaaacctggcctgacagacaagcagatgacctcacaggagtgataagaaacatctgctccacgccaactcccagagctgatgctattgtacttgcacattggagactgaaaggaaagaagggactaaatgctggggaggtaaattaagacagaaccaaatgagctaagttgcaannnnnnnnnnnnnnnnnnnnnnnnnnnnnngtacatgtgtatgtacatatatattttaaaagactgtttactgcagttgctcaggaactgcttttgattcacattaagctgctttcagaaattaaaaaaacactttttaaagggtgcattgataaaatctgaggnnnnnnnnnnnnnnnnnnnnnnnnnnnnnnnnnnnnnnctaagtttatggcacagggtagaccttaagtattcctcctccatccttcattcttcaccctccattggatcctcaagttttaatgaattccaattataccttacatcagcaagttaaaaaaagtactttaaaataaagcaaagggagactgttgctcaaccatcaggaaacagttgtcagaagacatcattggttctgtgtttcctacggaaataagaaacgataaatattgcactgaatgtttgtggtttggagtccctgaataataaagaggcaatatatttgcagaaagtcgcatagggttttttaatgcagaattttgtcagaagacaatggcgctgcatgtttttctttgagtgcaaatgtacattgctaagatttttttaagatggcatgtgctttgaaaagaagatattgcatttttaagagtttaaaaatcttatgagtgagaaatattaaaaaaatcttattttcacctctttagaagaaataaaagatgtttctcctatctccttttctctagtatttgactgttactgtccttggcgaatcgataatcattgcatagtgactgaaaagcctaagtgcnnnnnnnnnnnnnnnnngatgttcttgtttctgaacttcgtgccatattttgttcctgatgggatcaacttaatgtttaagactttagatgtcttgtattaaaaattacacaaaaaaagtaaaactttttatacttacccttttaactct

SEQ ID NO: 77403 - DNA, 1002 bp, Homo Sapiens
cagttcctcaaactgttctttggttggcagtgacatcaaaccaagcaacttttcctgcacaaaaagtgtagctgagtatctgatcattctctgcagccgcaaattgcttggatgtggtggagggtcctggttcaagcccaaggttaagatcttcttacttaaagcgtctatcagctcatacactttctgcacttccactcgaaggtcactggcatgttccagactgtaggttgtctccccagcatttaatgatgctgccatcctgatgtattctggagctttctggtcaactttctccatgcaaagtcgtaatttctcgtagagcttcacgatgtcaggtgtgtgctccttctcatcaatctgctgctctctcttgagcagcgtgtccttgcagtgtgtacagcagcggatccggtcatcgtccttctcatccaggaccgagctgacactgctcatgctgctgatgctgcctcggcgggagccatggacactgttgggtgactggctggggctggtgtgggtgctcagggactccttgctggcactggtgagcttgtttgccaagggaaggctgatgagctccatacacttcttgcacataatagacccgcagaggcggcagtggtggcggcggttccggatgctgaacttattcccacagtctggacagaaagggacatcctggtcgttgacccaaggcaccacagacttttctattgctcgaatctttgcagactcagtatttgttctgtcaaatgcagtgagcttctctaacctgattattagtttattgacttccacaacatagtggtcaattctagcagctcggtgttttttgaagtcggaaagatggcttctcacagcacctagagggaaggaaggtagggagacaaatgacttatagtttctctgagggagcctagtctctaccttgcctcttatcccagtgaatttcaaaagcaggttggtcaacatagcgagacacagtctctctccaaaaaa

SEQ ID NO: 77404 - DNA, 693 bp, Homo Sapiens
tttatctgtaaacatatgattgatttatgttttaataatgaagaaacaggaaacaaaccatttcaggggaacatacaagtaattttatcaacatagtatttgcagagaaagaattcacttattcaaaatatcacaatactgaatttcacagttaaattcacatgcagattgtaaaattatgttatgggatgttttgatggagtgtgttaaatataaaagtaatccaatgcaatactatttagcacattgtacaaaactaatttttcaatgggattaatacatttactatctttcctataaggtgtgatgtattcaaagtgctctgtagcattgagtttgaaatcaggaaacaaatactgttagagctccacagtaatacagctcagtaataaatgaacttgaatataatgtagatgaaatctactcataaaactttaagacagatgatggagatttatgatgtgcagtgagtaatatccttgaatagggagtagggcagagggacttcgtgcatgtatcaatacaatcataataaaaataagtttaagattgactccaccacttttatattgagtgccatttactagagaaagaaagacagataaatcagaagacaggaaaagacagagagacatagagaggcaaagaaagaaagttcaaatgcctctgtagttgccgtctaggagcgtaatc

SEQ ID NO: 77405 - DNA, 1187 bp, Homo Sapiens
  misc_feature (1164)..(1176): n is a, c, g, or t
ccttttccgtgcctgtgaggcccttcttcaggttggggtgtgaggacagccccatcttcatctgccctgcactcacaggagccaatggggtcacggtgcctgaagagggcctgacacttcacagagtggggacccaccagagcctatagaatcaattccttggactcacagccatgcagacaagccctggccatctcagcagccaccgcacaacacccctaatgaaagacacgccctcctcccctctggtcacacaagagaacatcttccagctgcctctttcacacccactacagacctcagccccagttttctcctcctcactaggctgtgtttttagtagttcctttgcttgtaactatgggatgggatccaggcatagggaactagttgttacacagctcccagccaagaagaaagtgtgagaatgttgatgggcagcaaacctgctgtttaacatcagggtgaccacattaagcccagtattccagttggcaccagaagatatggacttggaatgaggcctacagggttcaccaggatgtaagaggagagaggaatccacaggaccaccagaagaggagagggaaccagatatgcagatcagagatagaggaagtggaaccagagagctgggagggaccaaggttgtaagggtggctaagtcccaccataacagctaaggggacctgggagatgatggctcatttccacccagccccaggatttccagagcgcacatccacaggcctggacctgggatgaagatgaatgaagaacatggatgcacgtggatgtagtttggctcaggtgtccctgcagttggcaaggagtcagtactcagtccctgagtgtggctgaaatttgaggtcctggctgagccaaggagtaatggaccagatctacctcagtattcaagttcagtggggacaccagtggcttcaaacttcctggtttcatgatatcttgagacgccttacaaatgatggaggattccaaagagtttttgtttatttgggttaatatttgttggtatttatggcatttgagattgaaactaagaaatgttttaatttaatacatgttaaaatagcattaataaatcagttataggttaatgtagataggatgttttgtgaaaaagcaatctattgtgtccaaatnnnnnnnnnnnnngtgtgacactg

SEQ ID NO: 77406 - DNA, 1108 bp, Homo Sapiens
  misc_feature (36)..(36): n is a, c, g, or t
  misc_feature (42)..(42): n is a, c, g, or t
  misc_feature (70)..(70): n is a, c, g, or t
  misc_feature (1038)..(1066): n is a, c, g, or t
atgggacgactcctttagacatgcaggtgtcagctncagatntaatggagaatgctggatcaagtactcntagcacaaggaaccctggaatatcattggagtgtgaggcacataccgtacaacagaggaagatcgtccccgtataaataactatgttacaggaatgcgtacatgtgcttcccgagattcgtccaacatgtgtgaagaaccctaatcccaacaactgattgaatgggaaaagacacttatagcccatgatgaacacctctggccacccttcagcgtgcacggtgatgcctggctctgttcccaaccaccccaagtacgacatctcagacatgacttctattgccaggctggtcaagtggcagggtcatgagggagacatcgataagggtgctccttatgctccctgctctggaatccaccagcgggctatctgcgtttatggggctggggacttgaattggatgcttcaaaaccatcacctgttggccaacaagtttgacccaaaggtagatgataatgctcttcagtgcttagaagaatacctacgttataaggccatctatgggactgaactttgagacacactatgagagcgttgctacctgtggggcaagagcatgtacaaacatgctcagaacttgctgggacagtgtgggtgggagaccagggctttgcaattcgtggcatcctttaggataagagggctgctattagagtgtgggtaagtagatcttttgccttgcaaattgctgcctgggtgaatgctgcttgttctctcacccctaaccctagtagttcctccactaactttctcactaagtgagaatgagaactgctgtgatagggagagtgaaggagggatatgtggtagagcacttgatttcagttgaatgcctgctggtagcttttccattctgtggagctgccgttcctaataattccaggtttggtagcgtggaggagaactttgatggaaagagaaccttcccttctgtactgttaacttaaaaataaatagctcctgattcnnnnnnnnnnnnnnnnnnnnnnnnnnnnncctgagcaggcggccgcaagcttattccctttagtgagggta

SEQ ID NO: 77407 - DNA, 1184 bp, Homo Sapiens
  misc_feature (582)..(612): n is a, c, g, or t
ggcacgaggatattatgaaaagctgacggaatttgtggcagatatgaccaaaatttttgataactgtcgttactacaatccaagtgactccccattttaccagtgtgcagaagttctcgaatcattctttgtacagaaattgaaaggcttcaaagctagcagggtgaatgaaagaacatggctgcttctcccagactgactgaccttggcatccgcataaagcatcattgttttcaaaaatgaagggtgcttaattgttcccttttttctatattctgtaggtctcataacaacaaactgcagtctacagcttcttaaagttcagcgtgttaacctaacataaaacacagcaagaatctggttgtctgaactattttaaattaaggagccagatgtttttagtcaggctatcctgacaagacttgacctaaacttcgtttttattggtcataacagtccaattatattcttggccaattttgtccaacggacaagaaaaaagcaaagtcaacgacaccattatcttgtcaagatcagatggttttactattgtggcagaagcgagaaaactttgtttcttgnnnnnnnnnnnnnnnnnnnnnnnnnnnnnnngatactatggggtcaagtgtaactccatggaaatgccacgtctgctcttcagtgaagaagctggtttagagtctcacagaaaacttttgactgtatttatttattgttgcaaaaaagacgcttttttattgctgccctcatttgtcagctaagtattttttcttataaaatccagccccggttacatataatcatctgtatcttatcatgattcctgtaggtaaaagtacaagacgacctctagatgtcttttctttctatgaaaggagctgctatgtacacatgtgcacacacacacaactgggaatcaacaatgagtttattgttcatggtagattaaaattaagcttgcataaaggttgggctaagtggtcctggactacagactctgttgccttgaatataacagtacaatttgtcaattactctgcaccaggctaaagtgagtaaaatctatttgaaggtatcttgtttgtaaacatttgtcagattctaatttttttcttttgtattaaaattcaactatggatgtatatgaaacaaaataaatggagataattttctcccaaatt

SEQ ID NO: 77408 - DNA, 460 bp, Homo Sapiens
cagtagctgcaccctgccccccagtgacaccagctcctccagcccctccagcccctccaccttcacctccccctccacctgctgtgcaacacacaggccttctgtccacgcccaccttacctgctgcttcccagaagaggaagcgggaagaggaaaaagactccagctcaaagtccaagaaaaagaaaatgatctctactacctcaaaggaaactaagaaggacacaaagctttactgtatctgtaaaacgccttatgatgaatctaagtgagtagatctttttgagctctagttttttgtcttgaaagtttagctattaaattggattttgaagaaaatgaatattttgggagtgatataaatgaaaatattaaatttaagagtaatgtttcatccatggtcttgcatgtgatattcttaccattgacgctagtaaagtaaaatttgctatttaaaaaa

SEQ ID NO: 77409 - DNA, 526 bp, Homo Sapiens
ccagcagtcatcctctgggctctgccagcaagttggcagcaggtgtggggggtggaacacaagcttagaagtcacaaaatcagtattctgggccctacatgatgagctgtcactgagtgatgctggcattgcaactgcttctgtaaacagtggtgtgagcactgtcatgacatcctctgttgactggcactgtggacagacatactcatcaatgagctctgcctcactctgcaagatgccaatgcagcacccatggtaccaattctgaccccgatcatggccaataaaaaatctgcaagatccgaaatggaaatgataacttcctgctatgagtcagctaaacattcctgaatccaaccattctacccctggcaaactccagtatctgatgctctatcacatgtggaaacaaagtcactcacatcggtttcaacaagtacactgcttagtgaaatatgggtctttaaaaacatactggaatttgaaaaaataaaccacacactgatggtaatgtcttcctctgaaa

SEQ ID NO: 77410 - DNA, 483 bp, Homo Sapiens
gatattatgaaaagctgacggaatttgtggcagatatgaccaaaatttttgataactgtcgttactacaatccaagtgactccccattttaccagtgtgcagaagttctcgaatcattctttgtacagaaattgaaaggcttcaaagctagcagattgtgatatctttagtctgaatttttaactggaatcagaactggatgttggggtcacgctttgttgtattgtacctcgtgatgacctaattcaaaattgccccccaaaaaggcagattaggtaatataattttttaatggtaaagatgtatcggggtaaaaaagttactctagcagccatgttgaacaagtgtatttaaaaattgtaaactcttggaatactgtatttatctgctatttcaatataaagtcctttgacgtagtcctggtaactgtacagtaatttggtttactaatgaaagttgtgaataaaactgtgaaactagaaa

SEQ ID NO: 77411 - DNA, 1520 bp, Homo Sapiens
  misc_feature (927)..(957): n is a, c, g, or t
cacgcccaccttacctgctgcttcccagaagaggaagcgggaagaggaaaaagactccagctcaaagtccaagaaaaagaaaatgatctctactacctcaaaggaaactaagaaggacacaaagctttactgtatctgtaaaacgccttatgatgaatctaaattttatattggctgtgatcggtgtcagaattggtaccatgggcgctgcgttggcatcttgcaaagtgaggcagagctcattgatgagtatgtctgtccacagtgccagtcaacagaggatgccatgacagtgctcacgccactaacagagaaggattatgaggggttgaagagggtgctccgttccttacaggcccataagatggcctggcctttccttgaaccagtagaccctaatgatgcaccagattattatggtgttattaaggaacctatggaccttgccaccatggaagaaagagtacaaagacgatattatgaaaagctgacggaatttgtggcagatatgaccaaaatttttgataactgtcgttactacaatccaagtgactccccattttaccagtgtgcagaagttctcgaatcattctttgtacagaaattgaaaggcttcaaagctagcaggtctcataacaacaaactgcagtctacagcttcttaaagttcagcgtgttaacctaacataaaacacagcaagaatctggttgtctgaactattttaaattaaggagccagatgtttttagtcaggctatcctgacaagacttgacctaaacttcgtttttattggtcataacagtccaattatattcttggccaattttgtccaacggacaagaaaaaagcaaagtcaacgacaccattatcttgtcaagatcagatggttttactattgtggcagaagcgagaaaacttgtttattgnnnnnnnnnnnnnnnnnnnnnnnnnnnnnnngatactatggggtcaagtgtaactccatggaaatgccacgtctgctcttcagtgaagaagctggtttagagtctcacagaaaactttgactgtatttatttattgttgcaaaaaagacgcttttttattgctgccctcattgtcagctaagtattttttcttataaaatccagccccggttacatataatcatctgtatcttatcatgattcctgtaggtaaaagtacaagacgacctctagatgtcttttctttctatgaaaggagctgctatgtacacatgtgcacacacacacaactgggaatcaacaatgagtttattgttcatggtagattaaaattaagcttgcataaaggttgggctaagtggtcctggactacagactctgttgccttgaatataacagtacaatttgtcaattactctgcaccaggctaaagtgagtaaaatctatttgaaggtatcttgttgtaaacatttgtcagattctaatttttttctttgtattaaattcaactatggatgtttatgaaaccaaaataaatgggataatttttctccc

SEQ ID NO: 77412 - DNA, 758 bp, Homo Sapiens
  misc_feature (34)..(34): n is a, c, g, or t
  misc_feature (100)..(100): n is a, c, g, or t
gagcgagctctcaggatacgaagacatttgacgnttgcgctgtccgaggagctccatgcggcactggagtgagtggctgacagcgatccgggcttggttntgtgaggttccttcaagctaagccagctcagagaacacggggagcggtggtgctacacggacttcggagcatagagtggcgctgagtgagtggctgagaccgaccacggttcttgacttagtggaattgggtcgaaggagtggagaatgggagggctcgggctactgagagtggagatgggggcgggggtggtggtgaagagagttggagaaggaatggacgaattcttgagcaaaaggaggggaagagacaatctccagccacccgccccacgcttgacttcttatcactttggctgtggtgccgcctagtggaaaaaggaagtccctgcagcagtccccgcactctttaagcagctgtttaccgaaggcaccagttcagccaggagtgaaatccggagaggagcaacgccagcctgggtcacagtccatcaaaccccatgagcccgaccactctcgctcttccttacattcccacgtcccccttctctcccaacccctcatatcagcaagggaaattaattaatgagatttgataaatcagtagatagaatgaggtccccattctgaaatatttagcagactggaaccaccacgcaagcctctgtagggggtggatggagacacttctaactttaataaactgcgactgaacgtgg

SEQ ID NO: 77413 - DNA, 1015 bp, Homo Sapiens
gccgggtgaatcggacgaggcaagatggcggtacgatcgctgcagcgagggtctggcggctaaaccgtggtttgagccaggctgccctcctgctgctgcggcagcctggggctcggggactggctagatctcacccccccaggcagcagcagcagttttcatctctggatgacaagccccagttcccaggggcctcggcggagtttatagataagttggaattcatccagcccaacgtcatctctggaatccccatctaccgcgtcatggaccggcaaggccagatcatcaaccccagcgaggacccccacctgccgaaggagaaggtgctgaagctctacaagagcatgacactgcttaacaccatggaccgcatcctctatgagtctcagcggcagggccggatctccttctacatgaccaactatggtgaggagggcacgcacgtggggagtgccgccgccctggacaacacggacctggtgtttggccagtaccgggaggcaggtgtgctgatgtatcgggactaccccctggaactattcatggcccagtgctatggcaacatcagtgacttgggcaaggggcgccagatgcctgtccactacggctgcaaggaacgccacttcgtcactatctcctctccactggccacgcagatccctcaggcggtgggggcggcgtacgcagccaagcgggcaatgccaagcagggtcgtcatcttgttacttcggccgatggggcagcatgtgagggggacgcccatgccggttcaacttcgctgcaaaattgagtgccccatcatcttcttctggcggaacatggtacgcatctcaagcccactctgagcagttcgcgggatgcttgaggccaaggcccggtttgctctgccatcggtggtggaagttttgcggtaaagcccagggcccgggcgggaaccgccttctaggcgcccggggcccgccgcattctctcggggggccttgtaagccccgggttttcggggggggtcccc

SEQ ID NO: 77414 - DNA, 1492 bp, Homo Sapiens
cggcagtaactacttaacggtctaaggtagcgaggcctgggtggcgaattcggcacgaggaagctctacaagagcatgacactgcttaacaccatggaccgcatcctctatgagtctcagcggcagggccggatctccttctacatgaccaactatggtgaggagggcacgcacgtggggagtgccgccgccctggacaacacggacctggtgtttggccagtaccgggaggcaggtgtgctgatgtatcgggactaccccctggaactattcatggcccagtgctatggcaacatcagtgacttgggcaaggggcgccagatgcctgtccactacggctgcaaggaacgccacttcgtcactatctcctctccactggccacgcagatccctcaggcggtgggggcggcgtacgcagccaagcgggccaatgccaacagggtcgtcatctgttacttcggcgagggggcagccagtgagggggacgcccatgccggcttcaacttcgctgccacacttgagtgccccatcatcttcttctgccggaacaatggctacgccatctccacgcccacctctgagcagtatcgcggcgatggcattgcagcacgaggccccgggtatggcatcatgtcaatccgcgtggatggtaatgatgtgtttgccgtatacaacgccacaaaggaggcccgacggcgggctgtggcagagaaccagccctttctcatcgaggccatgacctacaggatcgggcaccacagcaccagtgacgacagttcagcgtaccgctcggtggatgaggtcaattactgggataaacaggaccaccccatctcccggctgcggcactatctgctgagccaaggctggtgggatgaggagcaggagaaggcctggaggaagcagtcccgcaggaaggtgatggaggcctttgagcaggccgagcggaagcccaaacccaaccccaacctgctcttctcagacgtgtatcaggagatgcccgcccagctccgcaagcagcaggagtctctggcccgccacctgcagacctacggggagcactacccactggatcacttcgataagtgagacctgctcagcccacccccacccatcctcagctaccccgagaggtagccccactctaaggggagcagggggacctgacagcacaccactgtcttccccagtcagctccctctaaaatactcagcggccagggcggctgccactcttcacccctgctcctcccggctgttacattgtcaggggacagcatctgcagcagttgctgaggctccgtcagccccctcttcacctgttgttacagtgccttctcccaggggctgggtgagggcacattcaggactagaagcccctctgggcatggggtggacatggcaggtcagcctgtggaacttgcgcaggtgcgagtggccagcagaggtcacgaataaactgcatctctgcgcctggctctctaccaaaaaaa

SEQ ID NO: 77415 - DNA, 1027 bp, Homo Sapiens
tgaaacggtgcagtaactataacggtctctaaggtagcgaggcctgggtggcgaattcggcacgagggatggcggtagcgatcgctgcagcgagggtctggcggctaaaccgtggtttgagccaggctgccctcctgctgctgcggcagcctggggctcggggactggctagatctcacccccccaggcagcagcagcagttttcatctctggatgacaagccccagttcccaggggcctcggcggagtttatagataagttggaattcatccagcccaacgtcatctctggaatccccatctaccgcgtcatggaccggcaaggccagatcatcaaccccagcgaggacccccacctgccgaaggagaaggtgctgaagctctacaagagcatgacactgcttaacaccatggaccgcatcctctatgagtctcagcggcagggccggatctccttctacatgaccaactatggtgaggagggcacgcacgtggggagtgccgccgccctggacaacacggacctggtgtttggccagtaccgggaggcaggtgtgctgatgtatcgggactaccccctggaactattcatggcccagtgctatggcaacatcagtgacttgggcaaggggcgccagatgcctgtccactacggctgcaaggaacgccacttcgtcactatctcctctccactggccacgcagatccctcaggcggtgggggcggcgtacgcagccaagcgggccaatgccaacagggtcgtcatctgttacttcggcgagggggcagccagtgagggggacgcccatgccggcttcaacttcgctgccacacttgagtgccccatcatcttcttctgccggaacaatggctacgccatctccacgcccacctctgagcagtatcgcggcgatggcattgcagcacgaggccccgggtatggcatcatgtcaatccgcgtggatggtacgatgttgttgccgatacaacggcccaaagaggccgaagggggtgtggcaaaaaccag

SEQ ID NO: 77416 - DNA, 755 bp, Homo Sapiens
  misc_feature (41)..(82): n is a, c, g, or t
  misc_feature (85)..(119): n is a, c, g, or t
gaaagaaatgatagatcatatagggcgctagctcgtctgannnnnnnnnnnnnnnnnnnnnnnnnnnnnnnnnnnnnnnnnncgnnnnnnnnnnnnnnnnnnnnnnnnnnnnnnnnnnncagtcgacggtaccggacatatgcccgggaattcggccattacggccggggagagtcactcctgccttcaccatgaagtccagcggcctcttccccttcctggtgctgcttgccctgggaactctggcaccttgggctgtggaaggctctggaaagtccttcaaagctggagtctgtcctcctaagaaatctgcccagtgccttagatacaagaaacctgagtgccagagtgactggcagtgtccagggaagaagagatgttgtcctgacacttgtggcatcaaatgcctggatcctgttgacaccccaaaaccaacaaggaggaagcctgggaagtgcccagtgacttatggccaatgtttgatgcttaacccccccaatttctgtgagatggatggccagtgcaagcgtgacttgaagtgttgcatgggcatgtgtgggaaatcctgcgtttcccctgtgaaagcttgattcctgccatatggaggaggctctggagtcctgctctgtgtggtccaggtcctttccaccctgagacttggctccaccactgatatcctcctttggggaaaggcttggcacacagcaggctttcaagaagtgccagttgatcaatgaataaataaacgagcctat

SEQ ID NO: 77417 - DNA, 981 bp, Homo Sapiens
  misc_feature (661)..(661): n is a, c, g, or t
  misc_feature (672)..(672): n is a, c, g, or t
  misc_feature (878)..(887): n is a, c, g, or t
gagcatagtaatatgaacccgctgtttaaaaagccaggctggtaccgctccggaattcccgggatatcgtcgacccacgcgtccgatgaagtccagcggcctcttccccttcctggtgctgcttgccctgggaactctggcaccttgggctgtggaaggctctggaaagtccttcaaagctggagtctgtcctcctaagaaatctgcccagtgccttagatacaagaaacctgagtgccagagtgactggcagtgtccagggaagaagagatgttgtcctgacacttgtggcatcaaatgcctggatcctgttgacaccccaaacccaacaaggaggaagcctgggaagtgcccagtgacttatggccaatgtttgatgcttaacccccccaatttctgtgagatggatggccagtgcaagcgtgacttgaagtgttgcatgggcatgtgtgggaaatcctgcgtttcccctgtgaaagcttgattcctgccatatggaggaggctctggagtcctgctctgtgtggtccaggtcctttccaccctgagacttggctccaccactgatatcctcctttggggaaaggcttggcacacagcaggctttcaagaagtgccagttgatcaatgaataaataaacgagcctatttctctttgccncacaagagaanggcgaagccccccccgctaaactgggggggccgcctctagagtatccctcgaggggcccaagcttacccgtaccccacttttcttggacaaagtggcccctatagtgaggtcgtattataaactaggccctggcccgtcgttttacaacgtcctggactgggaaaacgtgtaccttgggatctttgtggaaggaacccttattctnnnnnnnnnncataattgggacaacctcctttccaagatttaaaggttcctaagggaaattataaaactttctaaggggggataaggggggtaaactcacctgg

SEQ ID NO: 77418 - DNA, 1858 bp, Homo Sapiens
agctgggaaatgggcgggattctcgggatcccttctgcaggcgatgcaggtggagaaaggggccacggggatcagcctcagccctcacctgcccggggagctggccatctgcagccgctcgggagccgtctgcctgtggagccctgaggatgggctgcggcaaatctacagggaccctgagaccctcgtgttccgggactcctcttcgtggcgttgggcagacttcactgcgcaccctcgggtgctgaccgtgggtgaccgcaccggagtgaagatgctggacactcagggcccgccgggctgtggtctgttgctttttcgtttgggggcagaggcttcgtgccagaaaggggaacgtgtcctgcttacccagtacctggggcactccagccccaaatgcctcccccctactcttcatctcgtctgtacccagttctctctctacctagtggacgagcgccttcccctggtgccgatgctgaagtggaaccatggcctcccctccccgctcctgctggcccgactgctgcctccgccccggcccaactgcgtgcaccccctgctcctcggaagcccagggtgggcaacctgcagctgctgcacctggcaagagaaggggcgtcggtgccccgcctggcaggccccccccagtctcttccttccaggatcgactccctccctgcatttcctctgctggagcctaagatccagtggcggctgcaggagcgcctgaaagcaccgaccataggtctggctgccgtcgtcccgcccttgccctcagcgcccacaccaggcctggtgctcttccagctctcggcggcgggagatgtcttctaccagcagctccgcccccaggtggactccagcctccgcagagatgctgggcctcctggcgacacccaacctgactgccatgcccccacagcttcctggacctcccaggacactgccggctgcagccagtggctgaaggccctgctaaaagtgcccctggctcctcctgtgtggacagcacccaccttcacccaccgccagatgctgggcagcacagagctgcggagggaggaagaggaagggcagcggctgggtgtgctccgcaaggccatggcccgagggcagctcctgctgcagagagacctgggctccctccctgcggcagagccaccccctgcacccgagtcaggcctagaggacaagctcagtgagcgcctgggggaagcctgggcaggccgaggggctgcctggtgggagaggcagcagggcaggacctcggagcccgggagacagaccaggcggcccaagcgccggacccagctgtccagcagcttttcgctcagtggccatgtggatccctcagaggacaccagctcccctcatagccctgagtggccacctgctgatgctctgcccctgccccccacgaccccgccctcccaggagttgactccggatgcatgcgcccagggcgtcccatcagagcagcggcagatgctccgtgactacatggccaagctaccaccccagagggacaccccaagctgggccaacacaactccccactcccaggcctccagcgtccgggccactcgctcccagcagcacacacccgtcctctctagctctcagcccctccggaagaagcctcgaatgggcttctgaggacacaaggtgggctgccctcaagccccagagagcccctcatccttcctctgggaccagatgtgccttccacagttgaaacttgagaagcagagctcgccaccttctggaggccactgtgatgatgagccaagcaatttggagccaagttgaagggacagggcaacaaaatacagtagtagtttcttttgtattttgt

SEQ ID NO: 77419 - DNA, 1863 bp, Homo Sapiens
ccacgcgtccgagaagaagtttttctgtggaggactgcagcattttgggcatttacagtgtttcttggagatataattttactcacagatgttgttattcatgaggaccaatggattggcgagacagtactacaatcaacatttagcagtcagttattaaatcttgggagttattcatctattcagcctgaagaatattccagtgtagttagtgaagttgtacttcaagacttactggcatatgtgtcctcaaaacattcctacctaagagatcttcctccgaggcagcctcagagggtgaacagtatagactttgtagaattggagcaccttcaacctgatgtattagtccacgcagtactaagagttgttgatttcactatactgacagaggcagtatacagttatagaggacagaagcagaaaaaagttatgttaacagtggaacaggcccaagatcaacattatgcgcttgtattatggggtcctggagcagcctggtaccctcaacttcaaaggaaaaaaggagtggttctgattaaagcccagatttcagagctggcatttcctattacagcatctcagaagatagcgctaaatgctcacagttctctgaagagtattttttcttctcttcccaacatcgtatatactggttgtgcaaaatgtggattggaactagaaacagatgagaacaggatctacaaacaatgttttagctgcttgccatttactatgaagaaaatatattataggcccagcgtttaatgactgcccattgatggaagacatgatggttgtaatccgtgtagaatcaaagctgatagagaagattcttctcaacatttctgcagactgcctcaacagagtgatagttccttcctcagagatcacctatgggatggtcgtggcagacctgttccactccttgttggcagtcagcgcagaaccttgtgtattaaagattcagagcctttttgtgttagatgaaaacagctatccattacaacaagatttctccctcctggatttttatcctgacattgtaaagcatggagccaatgcccgtctctgaggccagaggaagaaattgcaggcatttcaaggaagaagtactgaaatgatttgtcttttgaaataaatgaatgacagggcttttgctttggattttttatgaaatatattttacaaagagaattgcactagatatataaattaaaacttttttctaagaaaatcctgtgaggtttaaaaagattgtttttgtcttttggtttcttcctttctcctggagaaatgatctaccagtcaaggcaatatgtagcagatccctgggaattaaaggtttgcccatttgttcactgtatttagtccctgctacattccaggcattgtactaagtatggggaaccacagagaagacattccctcagaaactgctgcagtgctttcgcttatccctacctaaaaaaccgtcaatgtgaaatcatttccttgattataactataatgataatggattagtttatataaacctatgtttagacaagttcaagacaagcgtgtctttctataaaaagtattgaaaatgaaggaaatgagatcatgtttcaatttattaaagcagggaagagcgttctgtggttagttcgtgtctaggatttgagtgccttactgaatgcatttaccagcaaacatgtagcaatctgttctctcattgtgattgtggaagaagctcatgtaaaatgatagtcattaatgaggaagtatggcgtggtacttattctgtaagttcagagtatgctgagtgttaatagattatcatattgcctgaaaataaattcatgatgacatgaaaaaaaa

SEQ ID NO: 77420 - DNA, 1031 bp, Homo Sapiens
cctcgcagtggctatgtgttcagcggcccaccggtggtggcttgcggagcgtccaccggccctgtgcaggcacaacatccaagctgcggctcaagccccatgcaaggcgtttcaccatggccccgctgccccaatctcttgggaacaggggtcatcccatcctgcccagacactgccgcagccctggccccgatggcctcaggcaacaccttggcgacatcaagaaatggggccactggagtccagaccacaagccagtatttttggcgggacaagctcgctccaccctccgtccaccggcctatctggggggctctgggtgtcccaggggatccgggcacctgaaagggacaaaaagcacagcctgaggctcaccctccttgcgctcactggtcaagtgcgcaaattttggaaaagccagacctcagaggatccttaccagtacgtgggtgagtacgtgggcccagcacagggacaggggcggggacagaaaggtcccttcgctgtcatggggctgtcacggggctgagcctggctcgaggaagcccccttttccagaagagatgtgaaacaagacatacaatttcacagattccagagctctgggtacggccggccaatgctgctccccacccaaccccacccctgggactcttaaaagagggaaacagaacaaactgcctagccagacccaggggcccatgaccaagaagaaagcaagcaccatgactgggtccaggctggcccgaggggccatggtgcaggtagccacctgggatgtgcagaacaggagcagcaggacggtgtaggcagcaatcagggcagcagggggcagccgccagcaccacccatgccctgctgcgggcacccaggagggaccccaggtgaagccagatcctccttgttccgacgggagacagcgccctgcctgggccctgctgcccatggtggcacaagctgtcagcacggatgaggctggaggctccctcgtgccgaattcgccacccagcctcctacctagacctttattt

SEQ ID NO: 77421 - DNA, 700 bp, Homo Sapiens
ccttgagcatcaggcccagacagagcctggcaggcatcctggcgagaaggaccaggtcccctctgggtggacatgcacccatccccagtccaggaaaccatctcccccaggaccttctgtctgggactcaggagtcctaaggaaaaggaattctaaaacatgggggaaggggaggtagagcactgatgggtgaaaaagtgaggccaacacacagggcaagtggtgtcgatggagtcgaagcgctgaaggaatagggcggctttccttccagcgagcatcattcggctgttaccaaaacaaacatcttaatctgcacctttctccactggccatcttgtccttgggtcagtgggacatgggcacctcgggaggcccgggccctgcccagctacagttccacccctcagcttgaggaccaatgactgaggtctatgccagttcctgatcccatctcactctctggacctaccaggtgactgctgctgggtgactcccctgaggcggctatacccttaagccagccccactacttccttccctgcctcccagctcagtatttaaacatcatctcccttctctttctcgcataactccccacccctttctccccgatccacccaggcctttctgtaaataaaagctcccaagttgggtacaaaccaggatattggagttactctatcctggagttaactaggat

SEQ ID NO: 77422 - DNA, 873 bp, Homo Sapiens
gctattagtgaactatagaacagttgttacaaaaaagcaggctggtacggtccggaatcccgggatattgtcgaccacgcgtcggcagactctgatgacgagctcatcagccgcaggccattcaccatccctcaggtgctgagaaccaaagtgcctagagaagggcaggaggaggatgacgacgatgaggaagacgatgctgacgaggaggctcccaagcccgaccattttgttcaggaccctgcagtgctgagagagaaggcagaagccaggcgcatggcctttctcgccaagaaagggtaccggcatgacagctcaacagcagtggccggcagcccccgaggccatgggcagagccgcgagacaacccaggaacgcaggaagaaggaagccaacaaggcgacaagagccaaccacaaccggagaaccatggccgaccgcaagaggagcaaaggcatgatcccatcctgagacctggtgcagggccagtggggaggcagcggcaccagactcaccaggccgtgctcccatcgcctggggcctcctcactaggggccccaagttcaactcaacccctcaacagcctcagctttgcagcccctgagaaggccgcctctcatctaccagccagccatgagcgccttcctgcagaacacacagtgccttatgccacagccgaagaatccgtggggccggcaagcaggcaccttcccccagctgcgctagcgggaaagagatggggatggagtcccaaggcaagcgccccaaacctcgggccacaagacaccacttcccctttaccctggacagcaggaaacctgtatattcaaaaacacaaaaagtcctgctaataaaatttttgaccccttaccc

SEQ ID NO: 77423 - DNA, 658 bp, Homo Sapiens
  misc_feature (116)..(116): n is a, c, g, or t
ataaaactagtcatccacctagccaaagatcctttccagcagcacaaaaggaatttgtaaggagaacagagattaactgtcagatatctttctaatctgtaaatttatccaaagtntgaaaataccatgaagaatcttaggaatgccagtaaccagggaatgggatatttgcatatcacaacatctacaggctaaatacactccgaatgcttctcaatgtggggaagtatgagaatggccaaagtggtatatactgtagtcacattcagctataaaaaggaataaagtatcgatgcatgccacaacatgggtgaacctagaaaatactgatctaaatgcaagaagccaggcacaaaaggccacatagtatatgttcccatttatgtgaaatgtgcagaataataataaaaatgtatagaatagcaaatctgtagggacagacatgaggtgagtggttgccagaagtggaaatgggagttaactataaattgcacagggtaccttacagagatgatggaaatgtcctaaaactagattatggcaatagttgcactacgtgatcagtttattaaaaatcgttgatgtgtgtgtgtaaaatgggtggattttatggtttataaattataccttaataaaggttaacaaaaaatgtgaaaaa

SEQ ID NO: 77424 - DNA, 1605 bp, Homo Sapiens
  misc_feature (81)..(115): n is a, c, g, or t
  misc_feature (1342)..(1486): n is a, c, g, or t
  misc_feature (1493)..(1508): n is a, c, g, or t
aagatgtataatcactatagggcgctactcgtcgcaaccgaacgacgagcgcagcgagttagtgagcgaggaagcggccgnnnnnnnnnnnnnnnnnnnnnnnnnnnnnnnnnnncagtcgacggtaccggacatatgcccgggaattcggccattacggccgggggtggcaggagcaagcgtctgccgcggtggccgggtgccgatttgacaagatcaaagctgcaggaaaatggacagtgaggttcagagagatggaaggatcttggatttgattgatgatgcttggcgagaagacaagctgccttatgaggatgtcgcaataccactgaatgagcttcctgaacctgaacaagacaatggtggcaccacagaatctgtcaaagaacaagaaatgaagtggacagacttagccttacagtacctccatgagaatgttccccccattggaaactgacgcttggctcctttcttgtggatggattttctcaaagtacacagataaagcatggtttgtttcagtctccaaattcaaacctttgagtaataaatcagcactcaaaaatgtacacccatttagtttgtggtagcaaagtgcaatgcgaaattgaatgagaaactgagatttctcagtaatggtgaatatttcgctctttaaacctaaaactcttcattgagtagcttatatttgaacatgattggttaaacatttgcctctacctctgattttgctttgctgtcaaagtttaacaccttccaactacttatgtgtgtcctgtaacacaggtgattgaacgtatgagagggaaaggcaaagaaaaaggaagccagacactaggagaattattaacttctcatacttccccacattgagaagcattcggagtgtatttagcctgtagatgttgtgatatgcaaatatcccattccctggttactggcattcctaagattcttcatggtattttcaaactttggataaatttacagattagaaagatatctgacagttaatctctgttctccttacaaattccttttgtgctgctggaaaggatctttggctaggtggatgactagttttattcaaagccttttctcaaagccctttcagttacaaccaccccactatggaatcagtatttagttatacatttgtataagaacctgtattttgaaaaacacattcatgtatatttattcctggaattatttgcctgttaaacagtgtctttcatgttctctccccagattgtaaactctgtaagaagctgcttgtatctgtatcccttgttgaaactctgaaaacactgaataactaaaatctcttctcatccttttnnnnnnnnnnnnnnnnnnnnnnnnnnnnnnnnnnnnnnnnnnnnnnnnnnnnnnnnnnnnnnnnnnnnnnnnnnnnnnnnnnnnnnnnnnnnnnnnnnnnnnnnnnnnnnnnnnnnnnnnnnnnnnnnnnnnnnnnnnnnnnnnntttgcgnnnnnnnnnnnnnnnnaaaaaattttttaaaacttttttggggggcgcgcggcccccaaagggaaaggaaaaagggggaaataagttgtttccacaaaaaaaccccggcggcc

SEQ ID NO: 77425 - DNA, 984 bp, Homo Sapiens
ctggtaccggtccggaattcccgggatatcgtcgacccacgcgtccgcccacgcgtccgccagagcccccggactaggttttggaggcgcgggaatgcgttcgttgctcactgtcagacttccccctattcccatcggccgaggctgtcactttacgctcataaccggttttctttactgcactcgtgtcaggaggaaagggacttgcgaggcacccccagacctccccgtctccgcttccacgtttggtacatcctgcctgaggcaggaagccgcagctgagggacggcctgtcgtacggtgcggatggaggtggcctgcgaggctcatttctagcaaggaacaaggctttcccgctttgattttataaatattatgtttacaaagctgtaatatataaaaattgataagacgtgtccctgtccctggaaacgcaggcaccgcatgtctggaaagacattcatctggactgttttgacagactccccagttggtgccatgctctgtgcttaaggaactgagagacccctggaggggtgggtaccgggaccgcaactcagactggggtttggaggcggactcctataggaagcgacctgggacctaagatttttagactgactgtgggttcactggacatacacaaggaagacacacaaagcagcattgcacggcatcgggactgtcacatttgacaagatcaaagctgcaggaaaatgggacagtgatggtcagagcatatggataggatctttgaatttgattgatgatgcttggcgagaaatacgagctggctttatgaaagatgtcgacaagtactactgtaatgagcttcctgaacctggaagaagacaatggtggcgccacagaatctgtcatagaacgggcaatgtagtggcacagacttaacccttacagacccttccatgagaatggtcccccccttggaaactgcaccctgggcgccttttctgggtggaggga

SEQ ID NO: 77426 - DNA, 1058 bp, Homo Sapiens
  misc_feature (56)..(56): n is a, c, g, or t
  misc_feature (202)..(409): n is a, c, g, or t
tgaaaacccacacgcgcttttacgtctgccctttctgcctttctcacatgtcttcntgcgtatccctgatctgtgataccgtatacgcctttgatgagtgtacgctcccgcagccgacgaccgaggcagcgatcatgagcgagaagcgagagcgcccatacgcaaccgctctccccgcgcgttgccgatcataatgcagctnnnnnnnnnnnnnnnnnnnnnnnnnnnnnnnnnnnnnnnnnnnnnnnnnnnnnnnnnnnnnnnnnnnnnnnnnnnnnnnnnnnnnnnnnnnnnnnnnnnnnnnnnnnnnnnnnnnnnnnnnnnnnnnnnnnnnnnnnnnnnnnnnnnnnnnnnnnnnnnnnnnnnnnnnnnnnnnnnnnnnnnnnnnnnnnnnnnnnnnnnnnnnnnnaagaattcggcacgaggagacatgcagtcaagtggccaatacttcatgtgaagataagcaatgagatccttcttgctgtctttcttttgactgttctgggcaatatcaaattagtttcagtggcttgattctaggccaagattctggcaacagattgtagtcttaccttgttttcttcaatctcactggatctctctctctttttaccccccttaggctgagggtaaaaagctgggattggtaggctgggtccagaacactgaccggggcacagtgcaaggacaattgcaaggtcccatctccaaggtgcgtcatatgcaggaatggcttgaaacaagaggaagtcctaaatcacacatcgacaaagcaaacttcaacaatgaaaaagtcatcttgaagttggattactcagacttccaaattgtaaaataatggcctgaatttaagttttctaagataaactcagtggtttggtttttattattaatagagatagaactattgtgtgttaatattagcattagtcaataagttattttaatgtcagatttttgaatgttattatatattacctgtatgatggaaggattaccactgtacacaaatctaatcaataaaaacgttagaaccttctgcttagagtactttt

SEQ ID NO: 77427 - DNA, 514 bp, Homo Sapiens
gcagaaggaaacaccctgatatcagtggattatgaaatttttgggaaggtgcaaggggtgtttttccgtaagcatactcaggctgagggtaaaaagctgggattggtaggctgggtccagaacactgaccggggcacagtgcaaggacaattgcaaggtcccatctccaaggtgcgtcatatgcaggaatggcttgaaacaagaggaagtcctaaatcacacatcgacaaagcaaacttcaacaatgaaaaagtcatcttgaagttggattactcagacttccaaattgtaaaataatggcctgaatttaagttttctaagataaactcagtggtttggtttttattattaatagagatagaactattgtgtgttaatattagcattagtcaataagttattttaatgtcagatttttgaatgttattatatattacctgtatgatggaaggattaccactgtacacaaatctaatcaataaaaacgttagaaccttttgcttagagtactttt

SEQ ID NO: 77428 - DNA, 1234 bp, Homo Sapiens
  misc_feature (38)..(39): n is a, c, g, or t
  misc_feature (41)..(44): n is a, c, g, or t
  misc_feature (46)..(46): n is a, c, g, or t
aattaaaacagcaaccaggtaactgccccaacccatcnngnnnngnacccgggatgggcagtcgttgtttgaaaaaaatatattttctttttttaaaaacaacaccaaagcaaacccatagcccctgtcaagccagtcctcagggagagtgagctggaaggctccccctgcacttctctgagcagagatcttgggcccctcccactggaccccagcctgagcagagggcaaggctctgcctgctggtaccctagggggtgggggagaagcgatcagctccaaaccatgcaagaaaaacaagccaaacccataaagcaaaagaaaaaatcaacagaggataaattaacaaaaacacgaaaggtgaatgacaccgataacggtggcgggcaggactgggtgagccagtgtgctccgcagaggccctgtttgccagtgccaggggaaggccttgggcggctcatggcatctccctcatgggagtcttggggtattcacacaactcatcccctcttgtgtaccccgcaccaaagccgggatagaggtgtggccaccctgggccaaagtgtgcaaagtccattcagtcgagagattaaaaaaatatacaacttggatggcatccaggctgggcaaggcggtggcccatccacccaggcactggcagcctgctgtgcaggggcagcagcatccacagggggcatccaggccccctcagtccaggatctcagcagctggagacgggtcctaggagcagcagggagaggcactggtggggccgacaagggcctggctgggagccccaatggtctgcttctttggcacttgggacaaatggctcgccacagagccaggtgggagcagccccctcggttcctcccagatgccctgggccaggatggcagtagcttatggtgtgggtgagcactgcccccgcagatggggctgtggggctctggagggccggagtggggtccgaggcccagcccctatgagtcttctcccaggatctccttcacgaaggcagcaatgtccgtcttcttggttttgtgcaaggtgaagaaggggtgctccatcagctccaggtagctcatacgctctgcggggttcttcctcaggcactgagcagtgaagtccacaaactcgggggagaaacggtcggctgggagctggggggacggctcctccaccacctgcttcagctgctggaacggggtccccccgacctcgtcagtccctg

SEQ ID NO: 77429 - DNA, 1788 bp, Homo Sapiens
tttccgggatccggattccctgctctaggtcgcggcgggacagtgccagtgggcgtgtggggcggggcagggcagggaagggaagggcggagctggggtgagggtccaaggggcccaggacttggccggcgtgatctcagctctgcagaccctgcggtgctgggagccaccatggagagtaggtgctacggctgcgctgtcaagttcaccctcttcaagaaggagtacggctgtaagaattgtggcagggccttctgttcaggctgcctaagcttcagtgcagcagtgcctcggactgggaacacccaacagaaagtctgcaagcaatgccatgaggtcctgaccagagggtcttctgccaatgcctccaagtggtcaccacctcagaactataagaagcgtgtggcagccttggaagccaagcaaaagcccagcacttcccagagccagggactgacacgacaagaccagatgattgctgagcgcctagcacgactccgccaggagaacaagcccaagttagtcccctcacaggcagagatagaggcacggctggctgccctaaaggatgaacgtcagggttccatcccttccacccaggaaatggaggcacgacttgcagcgttgcagggcagagttctaccttctcaaaccccccagccggcacatcacacaccggacaccaggacccaagcccagcagacacaggatctgctaacgcagctggcagctgaggtggctatcgatgaaagctggaaaggaggaggcccagctgcctctctccagaatgatctcaaccagggtggccccagggagcactaattccaagaggcaggccaactggtcccttggagggagagaagagcaaactgctgggctgaggcagcactttgagttgcggggaggaaaaacaccaggcaggaacggaattctggccctggccaagcgactaaccatgctgcggggaacaggaccccaaagagagtgaccctccaggactatcgcctcccagacagtgatgacgacgaggatgaagagacagccatccaaagagtcctgcagcagctcactgaagaagctgcccctggatgaagcaagtggcttaaacatcccctgcagagcaggcttctcgaccctggacgcaacccccgcggggcagagcctgaggcccaggatgtggaccccaggcctgaggctgaggaagaggagctcccctggtgctgcatctgcaatgaggatgccaccctacgctgcgctggctgcgatggggacctcttctgtgcccgctgcttccggtgggtgcaggtggaatgttctgtgcgagagctcaagggctgcctggatccctgacttgtatccctttgttccacagagagggccatgatgcctttgagcttaaagagcaccagacatctgcctactctcctccacgtgcaggccaagagcactgaagacaccctggtcctcccggaagggcagtcccacaggcagcggcacccatttctgggcccagccacaggacgtccgatgggagagcttgtctggctctactgatgatggataggccccttcctgagccttggtgtccctggaatgaggaaagattctccattcgagagaatgactgggagggaagaagtcggggccctcctattagaagcccagactggaagtgagaggcatgatggggagagaccagactgaatctacgggtgagccctgtaacctggctctagggcacaggcccctcccctggcacttagtgggtctaataaagtatgttgattc

SEQ ID NO: 77430 - DNA, 1219 bp, Homo Sapiens
gcagccttggaagccaagcaaaagcccagcacttcccagagccagggactgacacgacaagaccagatgattgctgagcgcctagcacgactccgccaggagaacaagcccagaaatggaggcacgacttgcagcgttgcagggcagagttctaccttctcaaaccccccagccggcacatcacacaccggacaccaggacccaagcccagcagacacaggatctgctaacgcagctggcagctgaggtggctatcgatgaaagctggaaaggaggaggcccagctgcctctctccagaatgatctcaaccagggtggcccagggagcactaattccaagaggcaggccaactggtccttggaggaggagaagagcagactgctggctgaggcagcacttgagttgcgggaggagaacacgaggcaggaacggattctggccctggccaagcgactagccatgctgcggggacaggaccccgagagagtgaccctccaggactatcgcctcccagacagtgatgacgacgaggatgaggagacagccatccaaagagtcctgcagcagctcactgaagaagctgccctggatgaggcaagtggctttaacatccctgcagagcaggcttctcgaccctggacgcaaccccgcggggcagagcctgaggcccaggatgtggaccccaggcctgaggctgaggaagaggagctcccctggtgctgcatctgcaatgaggatgccaccctacgctgcgctggctgcgatggggacctcttctgtgcccgctgcttccgagagggccatgatgcctttgagcttaaagagcaccagacatctgcctactctcctccacgtgcaggccaagagcactgaagacaccctggtcctcccggaagggcagtcccacaggcagcggcacccatttctgggccccgccacaggacgtccgatgggagagcttgtctggctctactgatgatggataggccccttcctgagccttggtgtccctggaatgaggaaagattctccattcgagagaatgactgggagggaagaagtcggggccctcctattagaagcccagactggaagtgagaggcatgatggggagagaccagactgaatctacgggtgagccctgtaacctggctctagggcacaggcccctcccctggcacttagtgggtctaataaagtatgttgattcattgggaa

SEQ ID NO: 77431 - DNA, 399 bp, Homo Sapiens
ctcaagcgtcattttaaagtcgtttcagttggcgtcatccgtcatagctaattatcatgtccgaaaatcttttcaaagatggcccacttactttttggtggccagactcacgtgttgcagtgttctggtaattgattatgtaagttacgttgtgatggagggaacaccaaggttttgtgaggcgcgctgcacagtgaggtcaggcagtgcatggtaacttcattatggcttagacgtctaacatagaactgcaaatgtgacatgtaaagaagaggtgtaatctgaggtctagaaaaaccagttttctttttgaggcagtaatgttgacatctcattgatttccatgttttgttctattattggattttgagggaaaataaaaataagttctttttcatg

SEQ ID NO: 77432 - DNA, 708 bp, Homo Sapiens
caaactctggaatgaatggtgtagaacaacagacactacacatctgtcctccacagaggctttttgtgtgttttatcatctaaaacccaatccctcggtttttctctgtcagtgcagatgctatgttgcagaagatcaacagtatcagtggctggaaaaggtttttggctcttgtccaaggaagaacatgcagataactattctcacatgtcgacatgttaccgattataaaacctcagaatccaccggcagccttccttctcctttcctgagagccctaaaaacacagaatttcaaagactcggcgtgttgtccattgctagaacaaccgaatatagtacacgaccttcctgcagcagttctaagctactgtcaagtatggaaaatcccagcaattctgtacttgtgttatactgatgtgatgaaattagacctaatcacagtggaagcttttaagcctatactttctaccagaagcttgaagggtttggttaagaatattccccaaagcactgagatactaaagaaattgatgacaacaaatgagattcagagtaacatttatacatgatcttaaacattgttttgtagtgtatattacttgtccattcctttaaggggagcagcctgcactcttttgtagattacttttgggggatatattttgagaatgatgaaacggaataaaattgtaaaaaactaattgta

SEQ ID NO: 77433 - DNA, 438 bp, Homo Sapiens
aggagaccatcgaaggccaggagatcatcggcgagtgtggcagggaaagggcctgttgaactgactttcccacttgccttttcgttgagaaggagagtaaaggccacgcctgtcccatggctgtttttaagtctcgagtgtggagattgttggtcgtggagggaggggtgttgcctctgcctgaatccctggggtctcactgtattcacttttttctctcctttcagaatattccccaaagcactgagatactaaagaaattgatgacaacaaatgagattcagagtaacatttatacatgatcttaaacattgttttgtagtgtatattacttgtccattcctttaaggggagcagcctgcactcttttgtagattacttttgggggatatattttgagaatgatgaaacggaataaaattgtaaaaaactaaaaaa

SEQ ID NO: 77434 - DNA, 994 bp, Homo Sapiens
  misc_feature (822)..(822): n is a, c, g, or t
taggtagcgaggcctgggtggcgaattcgacacgaggccgggataagggcagcgcgctcaccgcagctggaaggtgcgcgggcctggcagccgcgacggcgcctaaggccggggctccgcggtcttccgagtggcccccgcggttgccgccgctccttggctctgcttgggccctgggtctccgtgaagccgcggcgtccagcggcgccagccccagggaagtgcggctccttcgaagacaaacaaaaacatctttggaagtttctttgctagaaaaatatccgtgctccaagtttataattgctataggaaataatgcagtagcatttctgtcatcatttgttatgaattcaggagtctgggaggaagttggttgtgccaaactctggaatgaatggtgtagaacaacagacactacacatctgtcctccacagaggctttttgtgtgttttatcatctaaaatccaatccctcggtttttctctgtcagtgcagttgctatgttgcagaagatcaacagtatcagtggctggaaaaggtttttggctcttgtccaaggaagaacatgcagataactattctcacatgtcgacatgttaccgattataaaacctcagaatccaccggcagccttccttctcctttcctgagagccctaaaaacacagaatttcaaagactcggcgtgttgtccattgctagaacaaccgaatatagtacacgaccttcctgcagcagttctaagctactgtcaagtatggaaaatcccagcaattctggacttggggtatactgatgtgatgaaattagacccaatcacangtggaagcttttaagcctatactttctaccaaaagcctgaagggggttgggtaagaatatttcccccaaagcactgagatactaaagaaattgatgacacacaaatggagattccgagtaacaatttatacatgatcctaaacccttggttttggaaagggtatttacctgg

SEQ ID NO: 77435 - DNA, 771 bp, Homo Sapiens
  misc_feature (129)..(185): n is a, c, g, or t
gggaagctgtttccttgaagacattgctttcagtcaccatacatgtctaaataatttagcttatcattcattctatgtaggaatgagataagaaaggatatgatggcaggaaaagaaatgctattcatnnnnnnnnnnnnnnnnnnnnnnnnnnnnnnnnnnnnnnnnnnnnnnnnnnnnnnnnnaaagcactaatttattgcagtctttattttagaaaaatgtgaagcatttttttctcccctaaaatgaatatatttagatgacaagtctttagtgctggtagaggaactaattgattttgtactatagtaggaaagtgtttatatgtttcaccagaaataaaatatgtagggtttgtatgtaatcttctgtgtttatcctatgttgatttaccttaaatttgcaacatacatatccacataaatattcatgactttcttatatttcattaaaatgttttatggcttcttaaaatcatcactgtgcttctaaatatttttacgtaaaatcattgtataatgctatactgtgatatacatgaaagtttatcttgaacagtgctctttaacaatattaaatttaaatttatcttggttttgctatgcttatgggtaattcatagaaaacagaaaaaatactgttcccaaaaggcagttatatatttcagtttaatatcacctataagtttgagaaaggtttccatgtttcctacccctcactgcacttaggaaaatttttatttttgaataaagttagataagtaaattt

SEQ ID NO: 77436 - DNA, 1390 bp, Homo Sapiens
  misc_feature (77)..(77): n is a, c, g, or t
  misc_feature (1273)..(1282): n is a, c, g, or t
  misc_feature (1308)..(1340): n is a, c, g, or t
atatgttccatcacacatttgtacttcactgaattctcaaaaaccattgcagaagtgagtcatccttgaaaagtgcnagaaaaagaaaatagcagagatgggtccagtgcagtggcttgccactcaaaagaaggcagcagacaaagtcgtcttccttctttccaatgacgtcaacagtgtgtgcgatggtacctgtggcaagagcgagggcagtcccagtgagaactctcaagacctcttcccccttgcctttaaccttttctgcagtgatctaagaagccagattcatctgcacaaatacgtggtggtctactttagagagattgatacaaaagacgattacaatgctctcagtgtctgccccaagtaccacctcatgaaggatgccactgctttctgtgcagaacttctccatgtcaagcagcaggtgtcagcaggaaaaagatcacaagcctgccacgatggctgctgctccttgtagcccacccatgagaagcaagagaccttaaaggcttcctatcccaccaattacagggaaaaaacgtgtgatgatcctgaagcttactatgcagcctacaaacagccttagtaattaaaacattttataccaataaaattttcaaatattgctaactaatgtagcattaactaacgattggaaactacatttacaacttcaaagctgttttatacatagaaatcaattacagttttaattgaaaactataaccattttgataatgcaacaataaagcatcttcagccaaacatctagtcttccatagaccatgcattgcagtgtacccagaactgtttagctaatattctatgtttaattaatgaatactaactctaagaacccctcactgattcactcaatagcatcttaagtgaaaaaccttctattacatgcaaaaaatcattgtttttaagataacaaaagtagggaataaacaagctgaacccacttttactggaccaaatgatctattatatgtgtaaccacttgtatgatttggtatttgcataagaccttccctctacaaactagattcatatcttgattcttgtacaggtgccttttaacatgaacaacaaaatacccacaaacttgtctacttttgcctaaagttacctattagaggtcactgtcagagttctcagtttcttagttactatttaacttttcatgttcaaaatgaaaataattcttaagttgaaagccctcttgaagtaacctttttataaatgagttattataatggtttacttnnnnnnnnnncaggggtgggtgcagtggctcatgcnnnnnnnnnnnnnnnnnnnnnnnnnnnnnnnnnaaaggatcgctcaagcccaggctacgtcacaaagcgagaccaacatctct

SEQ ID NO: 77437 - DNA, 966 bp, Homo Sapiens
  misc_feature (739)..(739): n is a, c, g, or t
ggtgtcagagagcatgcagcgtcagggcctactgcaagggatggcctacactgtccagggcccaccaggccagcctgggccacaggggccacccggcatcagcaaggtcttctctgcctacagcaacgtgactgcggacctcatggacttcttccaaacttatggagccattcaaggaccccctgggcaaaaaggagagatgggcactccaggacccaaaggtgacaggggccctgctgggccaccaggtcatcctgggccacctggccctcgaggacacaagggagaaaaaggagacaaaggtgaccaagtctatgctgggcggagaaggagaagaagtattgctgtcaagccgtgagctagccatggcaggacagctcctggaccaggtctcataatgcatgtggcacttaggtccaaggtctccagagggtgaaagctggagtctgtcaatgtcctactgagacagcacagccaacctagctagcaacatttgttttagtctgaacaatatatacttatagaattcagtcaaagatacacaatctgaaacagcttcatggggtggactctaacagtagttgcaatgttttagaatgagacttacttctctgctatctagatctgaactccttggcttctttacttagttcaagccccagcctaggaaagccagttacataaaagttggctcaggagtcttagagctttacctaaatatgagcccagaaaacggaanggaatggggggtggggcgccctttcctggaggtgaccttgaatggggggtgtgttcttggttactgttctaaggctgtgccatcagctccttcctcccctgttcattctgcattctctagtcagttggcctaggaagtgactccttgcaactaaaaaaattaagaaattcactttccccctctaagaaggggatgataggggttttctaaatgggttaatatggaaa

SEQ ID NO: 77438 - DNA, 929 bp, Homo Sapiens
  misc_feature (440)..(440): n is a, c, g, or t
attcagtacagatgcaaagtagtagctcagaggctctgggtaatagcattcctgagattgatgacatccattacctcactagtccaacttctccagactaacgcagacttttctcttcccttggcctttcctctcctcgccattgggccaattccttcgatttctcatttcccttgaagttagggccattcacagtttcatggtcaaagccagttccaggttcaatagtctgtgatttatccaggctctgaggtatgcaccgcttctgttttgctcgttcctccaagagctagtttggccagaaaggggatgctttataccatagaacacatccaccttctagaacctgctctagaaggccaggccctcagattccacatggttggagttctggccaagtctggagctttcttcacactcggctctcagagctctgggtntcagaaaaaactgagcatggtgagagaagacagtgtcagacgcgaggccccctggaggacctttggaacctctgatagtctgtcataccagagcatgattttctctaaggttcagacctggcttcactgaggaatagttcaggggatcagggcctagagacaagactcccaactgccttatttccctcctgttttcctggcaaccccactacttcctccaaaggtttctgtatgcgaagttgctaggcctgctggctgagctcccgagcattaatgaggcctacgggtaccaaatccagcacatccagggcctgtctgccatgatgccgctggtccaggagatctgcagctgaggccatgctcacttccttccccagctcacctggaacaccctggatacactggagtgggaaaatgctgggaccaaagattgggccgggttcaaagggagcccagtggttgcaatgaaagactaaagcaataactgcc

SEQ ID NO: 77439 - DNA, 694 bp, Homo Sapiens
gggaccggtccggaattcccgggatatcgtcgacccacgcgtccgcgggccctcttcctgcaggcccggcgctcgcggggaccccagcgagcgccgggccctcttcctgcaggccacgccgcaccaggacatcagccgccgcgtggccgccttccgctttgagctgcgcgaggacgggcgccccgagctgcccccgcaggcccacggtctcggcgtagacggtgcctgcaggccctgcagcgacgctgagctgctcctggccgcatgcaccagcgacttcgtaattcacgggatcatccatggggtcacccatgacgtggagctgcaggagtctgtcatcactgtggtggccgcccgtgtcctccgccagacaccgccgctgttccaggcggggcgatccggggaccaggggctgacctccattcgtaccccactgcgctgtggcgtccacccgggcccaggcaccttcctcttcatgggctggagccgctttggggaggcccggctgggctgtgccccacgattccaggagttccgccgtgcctacgaggctgcccgtgctgcccacctccacccctgcgaggtggcgctgcactgaggggctgggtgctggggaggggctggtaggagggagggtgggcccactgctttggaggtgatgggactatcaataagaactctgttcacgcaaaac

SEQ ID NO: 77440 - DNA, 611 bp, Homo Sapiens
acttcggctaggtacgaggctggggttaaatcggcacgaggggccacggtctcggcgtagacggtgcctgcaggccctgcagcgacgctgagctgctcctggccgcatgcaccagcgacttcggtgagtgtccccgccatggggggagcctggagcctgccttcccctgaatgcctaccgcagccacatgcctccccacagtaattcacgggatcatccatggggtcacccatgacgtggagctgcaggagtctgtcatcactgtggtggccgcccgtgtcctccgccagacaccgccgctgttccaggcggggcgatccggggaccaggggctgacctccattcgtaccccactgcgctgtggcgtccacccgggcccaggcaccttcctcttcatgggctggagccgctttggggaggcccggctgggctgtgccccacgattccaggagttccgccgtgcctacgaggctgcccgtgctgcccacctccacccctgcgaggtggcgctgcactgaggggctgggtgctggggaggggctggtaggagggagggtggtgggccactgctttggaggtgatgggactatcaataagaactctgttcacgc

SEQ ID NO: 77441 - DNA, 725 bp, Homo Sapiens
  misc_feature (20)..(20): n is a, c, g, or t
  misc_feature (92)..(92): n is a, c, g, or t
  misc_feature (181)..(181): n is a, c, g, or t
gctccatgtgacctctgacntaattccatccttaacctctgacctctgatctagcctgtgactgtgaccctgtgggtgtctggaaggggatntgtgtgatgctcacattaatgagatccatggcctcctctttgggcagtgttgctgcaaagtgtgtgtatggggtcagcactgtgactcntactggcctggtcactatggcctgagctccacccaacctcagagctgccagtgtgagtgacactcagggtgggcccccgcctccatgtcctcctggctctgcccccagttactgccctgataacacacgcacctaccccacctcactgcagttccattagcaagctaagagccctaagccttcgcctgcaggtgtgaccccagggttcaggtccctggtactcatgtctgttatccctccagtggtacctgtcactgcaaatgctttgtctctgggcaggacggtagccattgtctggtgaggcttggcccaccttctgatttaaccttgacctttggcactgagcttcttggagctatagccttataatgagtataaggctatagttatcatgactgtggactgagccttgtacttgggtgggtgccgctcactgacttggtcaccagggtcagcatcactttggctagctgaacctgtatatgccctcaggtgggagtttcggaaacaaaagggaaattgattaaacttgtattatacactg

SEQ ID NO: 77442 - DNA, 1048 bp, Homo Sapiens
  misc_feature (925)..(925): n is a, c, g, or t
ggggccattggcctggcaggcaggatcgaggaggaagtggctgattactgagcggttcttcctcacctggcttgggccactgtgcacagctgtgccgctggctcagccccgccccctgcggccctccgccgtggcttccccctccctacagagagatgctgtcccgtgggtggtttcaccgagacctcagtgggctggatgcagagaccctgctcaagggccgaggtgtccacggtagcttcctggctcggcccagtcgcaagaaccaggtgacttctcgctctccgtcagggtgggggatcaggtgacccatattcggatccagaactcaggggatttctatgacctgtatggaggggagaagtttgcgactctgacagagctggtggagtactacactcagcagcagggtgtcctgcaggaccgcgacggcaccatcatccacctcaagtacccgctgaactgctccgatcccactagtgagaggtggtaccatggccacatgtctggcgggcaggcagagacgctgctgcaggccaagggcgagccctggacgtttcttgtgcgtgagagcctcagccagcctggagacttcgtgctttctgtgctcagtgaccagcccaaggctggcccaggctccccgctcagggtcacccacatcaaggtcatgtgcgagggtggacgctacacagtgggtggttgggagaccttcgacagcctcacggacctggtggagcatttcaagaaagacggggattgaggagggcctcaggcgccttggtctacctgcggcagccgtactatgccacgagggtgaatgcggctgacattgaaaaccgagtgttgggaactgaacaagaagcaggagtccgaggatacagccaaaggctggcttcctgggagggagttttgaagaagtttgcanaaagcacggaggtggaaggaaccttgcacccagccgttctgggaaagggccagccgggcccagaaaaaccaaggggcaaaggaacccgcctaacaaagaaacattttcctcccccctttttga

SEQ ID NO: 77443 - DNA, 2224 bp, Homo Sapiens
ttccagacagcggaggcttagtccctgatctctctgcctgcccagactagctgcacctcctcattccctgcgcccccttcctctccggaagcccccaggatggtgaggtggtttcaccgagacctcagtgggctggatgcagagaccctgctcaagggccgaggtgtccacggtagcttcctggctcggcccagtcgcaagaaccagggtgacttctcgctctccgtcaggacctcagccgatccctgccctcctgcctctactcctgcaccgactggcctcaccgcctggtgccctgcagggtgggggatcaggtgacccatattcggatccagaactcaggggatttctatgacctgtatggaggggagaagtttgcgactctgacagagctggtggagtactacactcagcagcagggtgtcctgcaggaccgcgacggcaccatcatccacctcaagtacccgctgaactgctccgatcccactagtgagaggtggtaccatggccacatgtctggcgggcaggcagagacgctgctgcaggccaagggcgagccctggacgtttcttgtgcgtgagagcctcagccagcctggagacttcgtgctttctgtgctcagtgaccagcccaaggctggcccaggctccccgctcagggtcacccacatcaaggtcatgtgcgagggtggacgctacacagtggggtggtttggagaccttcgacagcctcacggacctggtggagcattttcagaagacggggattgaggaggcctcaggcgcctttgtctacctgcggcagccgtactatgcccacgagggtgaatgcggctgacattgagaaccgagtgttggaactgaacaagaagcaggagtccgaggatacagccaaggctggcttctgggaggagtttgagagtttgcagaagcaggaggtgaagaacttgcaccagcgtctggaagggcagcggccagagaacaagggcaagaaccgctacaagaacattctcccctttgaccacagccgagtgatcctgcagggacgggacagtaacatccccgggtccgactacatcaatgccaactacatcaagaaccagctgctaggccctgatgagaacgctaagacctacatcgccagccagggctgtctggaggccacggtcaatgacttctggcagatggcgtggcaggagaacagccgtgtcatcgtcatgaccacccgagaggtggagaaaggccggaacaaatgcgtcccatactggcccgaggtgggcatgcagcgtgcttatgggccctactctgtgaccaactgcggggagcatgacacaaccgaatacaaactccgtaccttacaggtctccccgctggacaatggagacctgattcgggagatctggcattaccagtacctgagctggcccgaccatggggtccccagtgagcctgggggtgtcctcagcttcctggaccagatcaaccagcggcaggaaagtctgcctcacgcagggcccatcatcgtgcactgcagcgccggcatcggccgcacaggcaccatcattgtcatcgacatgctcatggagaacatctccaccaagggcctggactgtgacattgacatccagaagaccatccagatggtgcgggcgcagcgctcgggcatggtgcagacggaggcgcagtacaagttcatctacgtggccatcgcccagttcattgaaaccactaagaagaagctggaggtcctgcagtcgcagaagggccaggagtcggagtacgggaacatcacctatcccccagccatgaagaatgcccatgccaaggcctcccgcacctcgtccaaacacaaggaggatgtgtatgagaacctgcacactaagaacaagagggaggagaaagtgaagaagcagcggtcagcagacaaggagaagagcaagggttccctcaagaggaagtgagcggtgctgtcctcaggtggccatgcctcagccctgaccctgtggaagcatttcgcgatggacagactcacaacctgaacctaggagtgccccattcttttgtaatttaaatggctgcatcccccccacctctccctgaccctgtatatagcccagccaggccccaggcagggccaacccttctcctcttgtaaataaagccctgggatcactgtgaaaaaaaacctcgtgccgaattcgccacccaggcctcgctaccttgga

SEQ ID NO: 77444 - DNA, 852 bp, Homo Sapiens
ccgggggtggtgaggcggccggcactgggagctgcatctgaggcttagtccctgagctctctgcctgcccagactagctgcacctcctcattccctgcgcccccttcctctccggaagcccccaggatggtgaggtggtttcaccgagaactcagtgggctggatgcagagaacctgctcaagggcccgaggtgtacacggtagcttcctggctcggcccagtcgcaagaaccaggtgacttctcgctctccgtcagcgtgggggatcaggtgacccatattcggatccagaactcaggagatttctatgacctgtatggaggggagaagtttgcgactctgacagagctggtggagtactacactcagcagcagggtgtcctgcaggaccgcgacggcaccatcatccacctcaagtacccgctgaactgctccgatcccactagtgagaggtggtaccatggccacatgtctggcgggcaggcagagacgctgctgcaggccaagggcgagccctggacgtttcttgtgcgtgagagcctcagccagcctggagacttcgtgctttctgtgctcagtgaccagcccaaggctggcccaggctccccgctcagggtcacccacatcaaggtcatgtgcgagggtggacgctacacagtgggtggttcggagaccttcgacagcctcacggacctggctggagcactccacagaacgacggggattgaggacgccctcagcgcgcctttcgtctaccttgcggcagccgtactatgccacgagggttgaatgccggtgacattgagaaccgagtgttggaacttgaacaggaagcaggagtccgaggatacg

SEQ ID NO: 77445 - DNA, 367 bp, Homo Sapiens
ctgaggcttagtccctgagctccttctgcctgcccagactagctgcacctcctcattccctgcgccccttcctctccggaagcccccaggatggtgaggtggtttcaccgagacctcagtgggctggatgcagagaccctgctcaagggccgaggtgtccacggtagcttcctggctcggcccagtcgcaagaaccagggtgacttctcgctctccgtcaggtaggtgggccccccgcaaccccgggcattttggccactctcttgtgccatccaggccctgaaccactcattcctggttccccgtggcagtgctgactccccgtctgttcccttgccccgaacccccagagtcacatcctgtctgg

SEQ ID NO: 77446 - DNA, 769 bp, Homo Sapiens
ggatacaatgtataacaaagatgtctaggcaatttaattgcatcattcagattgcaaaagaaatggttagccacacaagaagataatgtgcctttaagcaacttaaaagtaattcttgatgagcaaggcagaatggaatagcaacggggcctcatatcacagtcaaaacatctgcttctggtcccacctctgctattacccagccttggacaagacatccagtttcttgatttgaaaagtgcacatactagggtaaactgaataatttccaaagtcgtctttttacggtgaactttaacattctatgatatatggatgaaaactacaatgacaaataaatagcaagttcgttcttgtaactccctcttgtgtataaatatctcgatgtcatttaagaaggcattgtgcttgggggggtttagttttcataagctcagcatccttactgcttcttttggtgatagcatcccgcttttctttgagaaattccctgcctccatcctacacagtccgatgaacaagctcctccccgccccttagtgttggcctctacaacctgacctggattctcccaatccgattttctcttccagaattgaaagttgagctgaatgacacaggggcagaaaatggttgttcgtgagtcattctgacgtcagctctttgaagagactgcccatagctcccgtctattattgcaggttttgggatgccttgctattggtcttccaaagactagcttttccttagattctctgagttactcctt

SEQ ID NO: 77447 - DNA, 774 bp, Homo Sapiens
  misc_feature (68)..(68): n is a, c, g, or t
  misc_feature (106)..(106): n is a, c, g, or t
gcagccagcagcacctgtggcagccgccaccagccacaggcagcgagcagactggccctcacattcgngacacctcccaagctctggagcttacccagtatttttntgaggctgtttctacccagatggaaaagtggtatgaaaggaagattgaagaagcacgaagccaagccaatcagaaagcccagcaagataaggctacattgaaggaacacattaaaagtttagaagaggaacttgccaaactaaggactagggtgcagaaggaaaattagcaccaataaagaggaaatatgaaaggattcttgaagatttccagttttgcaactgcataatagctatgcccaaggagtcaactattgtatatattgcagatttgcctttttaaaaaaatcactaattctacaatgtgccagatacatgtttcctatgcccaggaagttatgaagacttcaacaattaaactgaaaccaggggaagcttgcttagttttgggtttcattataaactcttagcctcagtccaggttaatctgaagtttgaaagctcagattaagcaagccatgccaagaaactggacgatgtgtaagcctagactctaaaattcaagatgtgtgaaataatataagtcaaaagcaagaaaaacgtaatcccgtctgaactcaagtagtcattcatataaatttgaacacacctgctgtgcctagacaagtgtctttctgtaagagctgtaactctgagatgtgctaaataaaccctctttctcaaattcgt

SEQ ID NO: 77448 - DNA, 1541 bp, Homo Sapiens
  misc_feature (44)..(78): n is a, c, g, or t
  misc_feature (566)..(574): n is a, c, g, or t
  misc_feature (614)..(614): n is a, c, g, or t
  misc_feature (618)..(618): n is a, c, g, or t
  misc_feature (771)..(821): n is a, c, g, or t
  misc_feature (1083)..(1093): n is a, c, g, or t
  misc_feature (1414)..(1466): n is a, c, g, or t
aacgaccgagcgcagcggagttcattgagcgaggaagcggccgnnnnnnnnnnnnnnnnnnnnnnnnnnnnnnnnnnncagtcgacggtaccggacatatgcccgggaattcggccattacggccgggggatctaagttgggatctgatgttaaacaataaattcagtttaaaaaaaatatggagctcagaaaaggatgtgaaaaactttgcattggcctggcgtcattattacaaaaacacctatgtgatgacataaaatacttgggtgatatcagaacaactatccttaatagtttttataattaaagtttcctaaacttcagtctccaataaacatttaaggattggaaccacatcactgtcagccccgctgctacaatgcctttgtacaatttttttacataaggcaaataaggcttttgtacaaagcctgaataccttctgttccaatggtgtccaaatggttattatattgtgaaaaacctggccttggtcacaatgcaaacaaaagtacagatgaaagtgcttttgggacagtttgcaaatggtgttaaagctacggannnnnnnnnaaagtgttcagcatcttaacgtgtattaaagctatggatntttntttaaagtcttcagcatcctaattcaccctttctaacttaagaaaaacatgacttaagacactgcgttctaagttgggtgggtctattatagtgtggatacccagttatctgtgagcgtatgggggtgggctgagggtcaggtgaggaaggannnnnnnnnnnnnnnnnnnnnnnnnnnnnnnnnnnnnnnnnnnnnnnnnnncgtcggaccgcttctaggctactaagtgtcaatggaaaagaaaatgtattcaaaatacttaaatcaaaactagaagatggggaaaaaaagatttattctatacaaagccttgtctggaccactttagagagacttctatttttttaacccttctataaatatttgatggcacttgaaatattcctgcaataaaatgtgatttgtgtaaagaaaaaaagattttgtaatgtgaaacaaagaaagaaagtaatgtaattttctnnnnnnnnnnntacaaacaaacaaactttgtattattttcttgatggaatttgtctatctgtctttggaaaactttttatttcattgaatgtgccatagtagaaatgtgtgtttttagttttagactaaggaatagctagttgttgtgttccgacattccaaaatgcaaaacaacctagtagtatctttcatgaaaaggtttaagtagtatgtaagcttctctcaatgttgcttttttgcacatgttcttcattcctctctagtacaatatgtacatagagcacttgcgggtgtaccttgatccctcagggaaaaatacatatttgtacagnnnnnnnnnnnnnnnnnnnnnnnnnnnnnnnnnnnnnnnnnnnnnnnnnnnnngctaaggaatgtcgatcgaatcacttgttattgttgaggggcagccagataataatcctaaagccactgtttcca

SEQ ID NO: 77449 - DNA, 249 bp, Homo Sapiens
ggcacgaggattccaaatctcaagaggtctagtaccggcagttatgaagagagagtgaaaaggctctcagtgtctgagttaaatgaaatcctggaagaaattgagactgccattaaggagtactctgaggagctggtgcagcagttggctttacgagatgaactggagtttgaaaaggaagtgaaaaacagctttatttctgttcttattgaagtgcaaaacaaacagaaagagcacaaagaaacagca

SEQ ID NO: 77450 - DNA, 1971 bp, Homo Sapiens
  misc_feature (76)..(108): n is a, c, g, or t
  misc_feature (783)..(838): n is a, c, g, or t
caggatttctatgagttccaggagccggcccggagcctcctggaccaggagaactgtaacgcgagccccgagcctnnnnnnnnnnnnnnnnnnnnnnnnnnnnnnnnngccgacggtttcccggccctggcctgcagcttggaggagaagctgagcctgtgcttccgcccctcggatccgggcgccgagcccccgaggacggccgtgcggcccatcacggagcgcagcctcctgcagggggacgagatttggaatgccctgacagataattatgggaatgtgatgcctgtagactggaagtcatcgcatactaggaccttgcacttgcttactctgaacctctcagaaaaaggggtaagtgacagtttgctctttgatacgtcagatgatgaagagctgagagaacagctggatatgcactcaatcatcgtctcctgtgttaatgatgaacccctcttcacggcagaccaggttatttgaagaaattgaagaaatgatgcaggaaatcaccggaccccagaagatgatgaaaacccctacacagtcagatcggctttcaatgctttcccaggaaattcaaactctcaagaggtctagtaccggcagttatgaagagagagtgaaaaggctctcagtgtctgagttaaatgaaatcctggaagaaattgagactgccattaaggagtactctgaggagctggtgcagcagttggctttacgagatgaactggagtttgaaaaggaagtgaaaaacagctttatttctgttcttattgaagtgcnnnnnnnnnnnnnnnnnnnnnnnnnnnnnnnnnnnnnnnnnnnnnnnnnnnnnnnnggcagctctcagaatgggaagaatgagagaagtcatatgcccggcacatatttgactacagtcattccttatgagaaaaaaaacggaccaccgtctgttgaagatcttcaaatattaacaaaaattcttcgtgccatgaaggaggacagtgaaaaagttccgagcttgttaactgattatattctgaaagttctgtgtcctacatagagcagcaactttatctgcggtgggctccaagctagatttccgacagcatcatcctgagagctggctaccattacccttcttgctattggaaactcagcacatttgaacttgggtttgattcagtattaacagatcttgactacactaattctttatattatagaaccaacggaaatatgggcactattttgaattctagagatggtttttgttaaatctactaataaactgttctcttagtagattaagagagagtaatattaattgtgcatgtgcagttgtatttctcattaactgacagtatgcccatttgtttttatggctttcttatctaaactgcactgatgaactagattaaagccttgggagatttatactataaattcagtgatggcaagaaccaacactgtttttttgtgagaattgtcagtgtaactattacctaccagtattgttcagagagattgaaacagaataaacgggctgttcttgaagaagcaaaaccagaatatgcattactttggtttaatacttagtgctaacattgaaactgttggtggtgatggattttgtagcttgctgcttgtttcaccactggtcaaattttaaccattaaattgccattcacttttagaatcttgtatttaagttttgattttcaaatgttctgcttcatgtgtctgtgaagaattgtactttaaaagtgtgtgtcctctgaggtgcttgagaaagtgtacactgcagaactgcccattctcattactgtgtcctattttattcatgcctgtgtgtttttcttaagtatgaattctagatacagctacttatggattcatcaatatcatgagcacttttgctggttccagtcaaatcaatggcatttaataaattttttaagaagtaaaaatacatgtttgagagcctta

SEQ ID NO: 77451 - DNA, 762 bp, Homo Sapiens
  misc_feature (17)..(17): n is a, c, g, or t
  misc_feature (156)..(156): n is a, c, g, or t
tcgagctcaccgttatnttccagcctccagatcaagccctgcagtcaggcgagcatggagaagccgagcatggaggagacaagcacgaggtcagaattggagctggcagagcagacggagatggagggagaaaaggaagaaagcctggtggaaggngagaaggaggaagaggaggagaccccaccctccccctgggtcatccaccccaatgatgtcctcaagattctggaggccttcgtcatgggtctgaagaagcctagggactcgcgggccccgctgagggtacagaagaatgtgcgtgacaactccaaggactcggagtactggcaggccctgaccacagtgatcccttcctccaagcagaacctctgggatgccctctacacagccttggagaagtaccaccttgtcctgacccagagggccaagctgctgctggaaaacagttctctggagcagcagaacacagagctgcaggcgctactgcagcagtatctgaactccaagatcaactctgaactgcaagttcctcccactcaggtgttgcgggtacccacaaaatgagctggaccgccaaaggctgatgtgttagggctggcctgatgctggtgtctgtgccggagccagctcatatcacccactgggccgcacctgggcctgctctctggattttccagggctgtctttatagcctgtcgaaataaggagccagaggagttacctgtgtcctgcattatgattaaagccttttaaagttgaaaa

SEQ ID NO: 77452 - DNA, 1019 bp, Homo Sapiens
  misc_feature (63)..(63): n is a, c, g, or t
  misc_feature (67)..(67): n is a, c, g, or t
  misc_feature (70)..(70): n is a, c, g, or t
  misc_feature (72)..(72): n is a, c, g, or t
  misc_feature (76)..(77): n is a, c, g, or t
  misc_feature (107)..(107): n is a, c, g, or t
  misc_feature (120)..(120): n is a, c, g, or t
  misc_feature (155)..(155): n is a, c, g, or t
  misc_feature (185)..(238): n is a, c, g, or t
  misc_feature (241)..(241): n is a, c, g, or t
  misc_feature (264)..(264): n is a, c, g, or t
  misc_feature (963)..(978): n is a, c, g, or t
ccccggcaggacagtggtgttaaaccacaatgtgggctgagagggcagagagatacatcagcncacntcntnactnntgggccctgatggagagagggcagtgcggnagctctgcttccntgtgcccgcccttgttgcactatgactagggagtncgaggtggggagatgagctgcccgactcannnnnnnnnnnnnnnnnnnnnnnnnnnnnnnnnnnnnnnnnnnnnnnnnnnnnnctnctgcctgctctctcctcctgacncaggcagccaagggcagggataggcgcagtgtcagatgaagcagcgccagagagggacctcccagctcttattgcaccctccccacctcaccaactttggtccctctctgggggcatgaatggttaacaaacaccagagcagtactccaatattggagagtcgctgggggcacagggctttgaatcagggtagtatcctgccttccctcccctgaccccacatggtctcagggcccccttagggccacctaccccactgatagcttcctccttctctggcacaaggggagccccagggcttgggggagggcgtaaggtggggggaaatgccactgcttttagcaaaagcctccctcccagaattagccagcttgcctcctgcaccccacccccaccaaccaggggagccactaagctgactaacaactgtcccctcacccaccagctatttccccagggtagagtgggcaattctcaccttcaaagagtccccgcctgcccaggcctttggcacagaggctgagtggacagtcaggagagaggcgagaggcaaggcgaagcctgtgtccctgtttcagttgcactggggttggagcccagggtaggggtttccagcttccccaggctccggccttgtcagtctctttgcatgtgtggatttttctgtgtgtgtttctgtttgggtttttgttgttgggnnnnnnnnnnnnnnnnaataaagaaaagaagatgtgtatatttttggcaacgacaaa

SEQ ID NO: 77453 - DNA, 687 bp, Homo Sapiens
agaacaacagtggtgccagtcatcaaacatacagtgcgtcctattgagtcactgctaatttcatgagcctggtatttgctgcctattgtatttgtggttggtgagaggcattttcaaaccctgtataaataatccatgctgttggtcataagttaactgtattaagaacagtaaaataaataaaaaccaatagtactaattttgctttaaaaaaatttctaatttttttcacataaaacaattatcctaaaggttaatagttgatcgaaacagaataatagaaaaattcttctttaatttccattaaaaagcaaatagcattgacacatttaaagcttttcatttaaagtagtggatgtttttgaagtatctaaaatagtagcagaatattttatacttggtccttgcaatggtgtgagttttaatgattgcattatcgtgattggtggttatgagtttcagaaatctatacttggcatccaactcatgagtggattttatataggatggaacaggaaggtatgtcctgtcagtatcttaaccctttcaacaagacatttacctatttgtctttccttacgttctcaaaatattaactcgaattgtaaattaagcaaaaatgtaaaaagtatatgttgatgggacaagaagaatagtatttatttaataaaacatatattatattga

SEQ ID NO: 77454 - DNA, 681 bp, Homo Sapiens
gtctcgccctgcagccacggtctacgggaagggcgtgtatttcgccaggcgcgcctccctgtcggtgcaggaccgctactcgccccccaacgccgatggccataaggcggtgttcgtggcacgggtgctgactggcgactacgggcagggccgccgcggtctgcgggcgccccctctgcggggtcctggccacgtgctcctgcgctacgacagcgccgtggactgcatctgccagcccagcatcttcgtcatcttccacgacacccaggcgctgcccacccacctcatcacctgcgagcacgtgccccgcgcttcccccgacgacccctctgggctcccgggccgctccccagacacttaaccgaaggggccaccctctggcctcctgcttcccaggctcccagctccgcacaggctgatgctccccgcccccaactgtggccgcctgagctgtccccggggacgcccctgcctccctctgcgggctccagaaggcggtgtgggggatggcggtcagcagcggccgagaggggctgggctaggtcccagcctgggccgaccccaccaccaggggtcagcagagcccaggaggcgacactgcccgcccgccgctcccagacctcgcccgagtcggctctgttgtttgaataaacgtgaacgtgaaaacagacggaagggaaa

SEQ ID NO: 77455 - DNA, 729 bp, Homo Sapiens
  misc_feature (56)..(56): n is a, c, g, or t
atctctgaatgggcgggggaatagtacatacagattctcctatgtagaggcatcanaaaggcattaatttttttaacccgatagcacgttcttcacatcataccatgagatgtgtaatctgctgcaagacttatgccaaactgaacgacagaagtttaggctggttttgtcaataattctgtaactctgcgctgcttgttcttaaataaaccagtgcgtgtttgtttcttcaagagcagtaatttcttcaaaaaagcgatcacagcaataaactctgttggatttctttcatttatgccttcctttgctaggggcgtttgggttggtggggaggacatcttcagctctgccttttgtgagtctaaacaatgattccacttaatggtgcattggcttcctctgtgtctccatccctggcttctccctcctgagtgcccgttcctgccgctggctgagcagcgtggcaggttgtcagatcatgtcagtcaaacccatgatctgaccgatactgtccccaccgaattaatgggatcagctcatcaccgggcacggaacagacctccgtccctcgccttcctcctctctttcttccctctctctactgtaacattgtcctggcggagtcttctctgtctttatcacctagaatcttctcctgatgaacaaccacatttttcaaaatgaatgtttcacgaaaaacccctatcatctcataaacaagtgaaattg

SEQ ID NO: 77456 - DNA, 2546 bp, Homo Sapiens
  misc_feature (1548)..(1564): n is a, c, g, or t
gctctgagccgcgagggcgccgacagccgggggcccggacgcagcccggctcctcccctcctccgccccttccccagcctgacctggcccgccgctgcagcggtgacccctcccccggctgccgccgtcgccgccgcggtgaccccctccccggctgccgccgccgccgcctcggccgaccagggacctgcccgcctgcggctgctccggacctagaggatcaagacataatgggagcatttttagacaagccaaagatggaaaagcataatgcccaggggcagggtaatgggttgcgatatgggctaagcagcatgcaaggctggcgtgttgaaatggaggatgcacatacggctgtgatcggtttgccaagtggacttgaatcgtggtcattctttgctgtgtatgatgggcatgctggttctcaggttgccaaatactgctgtgagcatttgttagatcacatcaccaataaccaggattttaaagggtctgcaggagcaccttctgtggaaaatgtaaagaatggaatcagaacaggttttctggagattgatgaacacatgagagttatgtcagagaagaaacatggtgcagatagaagtgggtcaacagctgtaggtgtcttaatttctccccaacatacttatttcattaactgtggagactcaagaggtttactttgtaggaacaggaaaagtcatttcttcacacaagatcacaaaccaagtaatccgctggagaaagaacgaattcagaatgcaggtggctctgtaatgattcagcgtgtgaatggctctctggctgtatcgagggcccttggaggattttgattacaaatgtgtccatggaaaaggtcctactgagcagcttgtctcaccagagcctgaagtccatgatattgaaagatctgaagaagatgatcagttcattatccttgcatgtgatggtatctgggatgttatgggaaatgaagagctctgtgattttgtaagatccagacttgaagtcactgatgaccttgagaaagtttgcaatgaagtagtcgacacctgtttgtataagggaagtcgagacaacatgagtgtgattttgatctgttttccaaatgcacccaaagtatcgccagaagcagtgaagaaggaggcagagttggacaagtacctggaatgcagagtagaagaaatcataaagaagcagggggaaggcgtccccgacttagtccatgtgatgcgcacattagcgagtgagaacatccccagcctcccaccagggggtgaattggcaagcaagaggaatgtcattgaagccgtttacaatagactgaatccttacaaaaatgacgacactgactctacatcaacagatgatatgtggtaaaactgctcatctagccatggagtttaccttcacctccaaaggagagtacagctcaactttgttgaaacttttaacatccatcctcaactttaaggaaggggatatgacatgggtgagaatgattacatcagagaacttcagcagtacaacagctagcccagaactgannnnnnnnnnnnnnnnngtaaatttgagacttatgtaagcgtgatttcaaaccataattcgtgttgtaaatcagactccagcaatttttgttgtatgattttgtttttttgtaaagtgtaattgtccttgtacaaaatgctcatatttaattatgaactgctttaaatcactatcaaagttacaagaaatgtttggcttattgtgtgatgcaacagatatatagccctttcaagtcatgttgtgtttggacttggggttggaacagggagagcagcagccatgtcagctacacgctcaaatgtgcagatgattatggaaaataacctcaaaatcttacaaagctgaacatccaaggagttattgaaaactatcttaaatgttcttggtaggggagttggcattgttgataaagccagtcccttcatttaactgtctttcaggatgttccttcgttgtttccatgagtattgcaggtaataatacagtgtattcataagaatctcaatcttggggctaaatgccttgtttctttgcacctcttttcaagtccttacatttaattactaattgataagcagcagcttcctacatatagtaggaaactgccacatttttgctatcatgattggctgggcctgctgctgttcctagtaagatattctgaattccattttatcaataaagcttgatttaacaaacaagaaacttaatcatgtatgtgtaattcctcttttaccctggccttttaaaacactgtgccgttgtaatgagacgtttctcatagggaaagatgttagtctcttttaattggacaacactgtcactcaaggcatagatgaaactttccttccattagaaagactaaaagatttaattcttggttgtaccttaatctattttttaaataggtttctttcaggctgcttatttttcattaagatgtgtatcagcttggatttgcctactgtttaattaaaatatttattgaaaaagttaaa

SEQ ID NO: 77457 - DNA, 1082 bp, Homo Sapiens
  misc_feature (737)..(746): n is a, c, g, or t
atatttcacaatatatatttaaagaccaccctaatcttccaatgagaattccttacatcaaaaggacatacaacttaaaagatactgcagcactcctagaatctcactgaatcatttataattaatcaagtccgttgtgtagtataaatatgtctcccaggatgaggtcactcaagtttgtaggcttccattcgaccctgtctgatttcaaaagtagtctctgcaaacatagcttcaccttttcaggcatctgttataattcagctggaagacatcatcatcacttgctctgatcctcttttgaagtgataatattggatttccatccttatataacccatttattaattcctttaacctcagtgactattcttccttctcttcatttataccccaaatcttccacctttggaagcaaaggtttgcctccatttgtacaccctgtctgtctaggcggaacgcagcaatgccagtctagcaggtgctccctttcagtccactcatattcagatagggttaggctacacaggtccagaactggtgggctgtttttactaccaggcaaaatagctgcattcactgttaaccccaattttgccaaatgagatgaaggcacaacccacttctatcaggcccataaggaattctgatataaggtttataatgagccatccctacttacagcccttgtaattgcagccctgatcctatgaccactgcaccaagtaggtgaaagnnnnnnnnnngaggacaagagaattaaaaatatataatgttttattgtcaaaaatagacaaactttaatttcctttaacaggaatattaatttaacagccttccataagccatcaccattttgtaagcataacaggcaagagagtcaaagataactgttagtgggaaaaggacaacagttctacatccatgcccaagaagccttgcccagtcagtggtgacaactccaggacagcggcagaaacacagtgaacctttggagcttaacaatagccatgcaaaacaacatagatttatcttggcccaattctataaagattggctttgtagtatctttccaagcattt

SEQ ID NO: 77458 - DNA, 540 bp, Homo Sapiens
gagcaggagctgggcctttgagggcccctgctccaaccccaagctgcatttatgatataacccatcacagctggattttaaaaatacacaaaaaaatatataatatacattataaaacctaggtggggtttggaggtggcctgagcgatatgcaaacagtgaggaccttcaggaagctcgggcagggtcgggatgaggaagggaaggggcacagtacttcatatgaaactcataaatacccacaggtggctgctggacaggatgatcttccgccggccgcagggcgggtagatggccagggcctcctggaagctctgctcgatgtccgggctccacacgccctccgcatcgttgtccagccccttgtccaggccctcgggcccatcctcccgggcctccccggggctgctgctggcgttccagctgttggacgctattgtgctggttgctctgggctctgggcctgagcccactgggcgcctgagcctggtccgagctcgcgggggcgctccggccgggccgctccgccgggcccgatgg

SEQ ID NO: 77459 - DNA, 453 bp, Homo Sapiens
gcttttgatttttctcttgcctgaggcttgaatctgacaaacccttggtgggcactgctcccttaggttcttccccacctcaatctacctgcctagagtagcagctcccagacccagttctgggactgaaggttaacccttcacctgctgtcccttcttaacacccaggcccccagagccagctgggcctgtccagcagccacctgtgggtatttatgagtttcatatgaagtactgtgccccttcccttcctcatcccgaccctgcccgagcttcctgaaggtcctcactgtttgcatatcgctcaggccacctccaaaccccacctaggttttataatgtatattatatatttttttgtgtatttttaaaatccagctgtgatgggttatatcataaatgcagcttggggttggagcaggggccctcaaaggcccagctcctgctcaaaaa

SEQ ID NO: 77460 - DNA, 724 bp, Homo Sapiens
  misc_feature (440)..(440): n is a, c, g, or t
ggggagagagtatgaagtcgaggcgcgccgaattcggcacgaggggcccggcggagcggcccggccggagcgcccccgcgagctcggaccaggctcagccgcccagtgggctcaggcccagagcccagagcaaccagcacaatagcgtccaacagctggaacgccagcagcagccccggggaggcccgggaggatgggcccgagggcctggacaaggggctggacaacgatgcggagggcgtgtggagcccggacatcgagcagagcttccaggaggccctggccatctacccgccctgcggccggcggaagatcatcctgtcagacgagggcaagatgtacggccgaaatgagttgattgcacgctatattaaactgaggacggggaagactcggacgagaaaacaggtgtccagccacatacaggttctagctcgaangaaggtgcgggagtacaggtttgcatcaagccatgaacctggacaggtctcaaggacaaagccttcagagcatgcgtccagtcctctgccaaatcgctctgccatgtcctgcaacaagtcagccacttccccttgccaggcgttttccaatcctcggtttggaacacccctttccgggagaacctggaccttagaataagctttgaaacggctcctaagcccctgggcaattaaaataaacctggcccccctaggggtttggtggggggaaaatttcccccggg

SEQ ID NO: 77461 - DNA, 979 bp, Homo Sapiens
  misc_feature (213)..(213): n is a, c, g, or t
  misc_feature (246)..(246): n is a, c, g, or t
  misc_feature (326)..(326): n is a, c, g, or t
  misc_feature (915)..(925): n is a, c, g, or t
cagcaatattgatgtcatcaagccccagctaaatatctcggtgtgtgttgatgtggggtacattccacggacgttgacatgtacgattatcgctcatataggattgccctgagccagatcgcacgagggcacgtcaaagcagcaggtggtattaatctggccgatgcctcccttcccatgtacagcctttgattcccccgcagaagcgctgtnttgcgctgagtctggccactgcttaatgcattntggcaggaaggagagagggatggagaactctgctcgctcttcaaccctcccatgtgtcttttcccttccgtcccttcctntcctccccacaggcggaatgctttcttctgagccgggtgggctctcctgcagggagaatgcaggggtctgtgcttggctcttagcaaagcaggtggcccacagtgacctccaggaggtggctgattttcctttgtgccttcttatttctcagtaggaacttggaagggaagagctctgaaggagccagaggggcagtcaccttacatgagggtgaggaaggagaagcccagccagcctctacccatccctccctcccaattaggctgcactggggccgaacgcttccctgggctcccactgccttctaaggagccaaggagaattccctgcccactttctgttcctccatgcccaaactggcagatgcttctctgggagcaaggccacatgggctgatgcagctttgagtgctcaggttctgttttctggaagttgctggagaagggctgtcagggtgcttctatgaatatgggcttcagctgtagcacttggcagaaacgtgatgtgtcccacaaactgctggtggaggaagaagatgttcgtcagccaattcaacctccagccagcttcttgagcctatttggtttnnnnnnnnnnngtcttctaatcagaagccactgattttataataaataacacttgttttgaaaaa

SEQ ID NO: 77462 - DNA, 1545 bp, Homo Sapiens
  misc_feature (151)..(187): n is a, c, g, or t
  misc_feature (378)..(378): n is a, c, g, or t
  misc_feature (381)..(381): n is a, c, g, or t
  misc_feature (394)..(414): n is a, c, g, or t
acacacacccatccgcacctaatccaactagctgtagccggggtatcggcgaggctattacctgtcttaaaagtatcaggagttgtcaggcagagaagagagtgtttgcaaaagggggaaagtagttgctgcctctttaagactaggactnnnnnnnnnnnnnnnnnnnnnnnnnnnnnnnnnnnnngtttgagccccaggcttaagcctttccaaaaaataataataacaatcatcggcggcggcaggatcggccagaggaggagggaagcgctttttttgatcctgattccagtttgcctctctctttttttcccccaaattattcttcgcctgattttcctcgcggagccctgcgctcccgacacccccgcccgnctncccttctcctctnnnnnnnnnnnnnnnnnnnnnaaagtcccggccgggccgagggtcggcggccgccggcgggccgggcccgcgcacagcgcccgcatgtacaacatgatggagacggagctgaagccgccgggcccgcagcaaacttcggggggcggcggcggcaactccaccgcggcggcggccggcggcaaccagaaaaacagcccggaccgcgtcaagcggcccatgaatgccttcatggtgtggtcccgcgggcagcggcgcaagatggcccaggagaaccccaagatgcacaactcggagatcagcaagcgcctgggcgccgagtggaaacttttgtcggagacggagaagcggccgttcatcgacgaggctaagcggctgcgagcgctgcacatgaaggagcacccggattataaataccggccccggcggaaaaccaagacgctcatgaagaaggataagtacacgctgcccggcgggctgctggcccccggcggcaatagcatggcgagcggggtcggggtgggcgccggcctgggcgcgggcgtgaaccagcgcatggacagttacgcgcacatgaacggctggagcaacggcagctacagcatgatgcaggaccagctgggctacccgcagcacccgggcctcaatgcgcacggcgcagcgcagatgcagcccatgcaccgctacgacgtgagcgccctgcagtacaactccatgaccagctcgcagacctacatgaacggctcgcccacctacagcatgtcctactcgcagcagggcacccctggcatggctcttggctccatgggttcggtggtcaagtccgaggccagctccagcccccctgtggttacctcttcctcccactccagggcgccctgccaggccggggacctccgggacatgatcagcatgtatctccccggcgccgaggtgccggaacccgccgcccccagcagacttcacatgtcccagcactaccagagcggcccggtgcccggcacggccattaacggcacactgcccctctcacacatgtgagggccggacagcgaactggaggggggagaaattttcaaagaaaaacgagggaaatgggaggggtgcaaaagaggagagtaagaaacagcatggagaaaacccggtacgctcaaa

SEQ ID NO: 77463 - DNA, 933 bp, Homo Sapiens
  misc_feature (131)..(170): n is a, c, g, or t
  misc_feature (827)..(827): n is a, c, g, or t
ccgggccccccaaagttccggccgggccgagggtcggcggccgccggcgggccgggcccgcgcacagcgcccgcatgtacaacatgatggagacggagctgaagccgccgggcccgcagcaaacttcgggnnnnnnnnnnnnnnnnnnnnnnnnnnnnnnnnnnnnnnnnaaccagaaaaacagcccggaccgcgtcaagcggcccatgaatgccttcatggtgtggtcccgcgggcagcggcgcaagatggcccaggagaaccccaagatgcacaactcggagatcagcaagcgcctgggcgccgagtggaaacttttgtcggagacggagaagcggccgttcatcgacgaggctaagcggctgcgagcgctgcacatgaaggagcacccggattataaataccggccccggcggaaaaccaagacgctcatgaagaaggataagtacacgctgcccggcgggctgctggcccccggcggcaatagcatggcgagccgggtcggggtgggcgccggcctgggcgcgggcgtgaaccagcgcatggacagttacgcgcacatgaacggctggagcaacggcagctacagcatgatgcaagaccagctgggctacccgcagcacccgggcctcaatgcgcacggcgcagcgcagatgcagcccatgcaccgctacgacgtgagcgccctgcagtacaactccatgaccagctcgcagacctacatgaacggctcgcccacctacagcatgtcctactcgcagcagggcacccctggcatggctcttggctccatgggttccggtggtcaagtccgaggccagctccangccccctgtggttacctctttcctcccactccagggcgccctgccaggccggggactccgggacatgatcagctgtatctccccggcgcgaggtgcggaaacccgg

SEQ ID NO: 77464 - DNA, 2119 bp, Homo Sapiens
  misc_feature (82)..(116): n is a, c, g, or t
  misc_feature (1539)..(1559): n is a, c, g, or t
gtgtatacgatcactatagggcgctacctcgtttagccgaacgaccgagcgcagaggaagtttttgagcgaggaagcggcgnnnnnnnnnnnnnnnnnnnnnnnnnnnnnnnnnnncagtcgacggtaccggacatatgcccgggaattcggccattacggccgggggcggggagtgcgcctttcagcctcacctgcagctgcgcctccttgcacctgcgcctgtgctttttctcccagcactgcggacgcgactcgagggtgacgctcgctccgctcgtcccgctcgtcatggcctacccgggatacggaggagggtttggaaattttagcattcaggtgccaggaatgcagatgggacagccagtgccagaaacaggcccagctatactcctcgatggatactctgggccagcatattcagacacttattcctcagctggtgactccgtgtatacttacttcagtgctgttgctggacaggatggtgaagtggatgctgaagaacttcagagatgtttgacacagtctggaattaatggaacttactctcccttcagtttggaaacctgcagaattatgattgccatgttggatagagatcacacaggaaaaatgggatttaatgcattcaaagagctatgggcagctcttaatgcctggaaggaaaacttcatgactgttgatcaagatggaagtggcacagtagaacatcatgagttgcgtcaagccattggtcttatgggttataggttgagtcctcaaacattaactactattgttaaaccgttatagcaagaatggcagaattttctttgatgattatgttgcttgctgtgtgaagcttcgagcattgacagatttctttaggaaaagagaccacttgcaacaagggtctgcgaatttcatatatgacgattttttgcagggcactatggcaaattgaatgccttagaattttaaaccttgaagagacactgtgaattctcctgtctggaacaagtgaactggactaccttaaaacttctaaggggtccctatgttcttcctacctgttaaacctcttccctttctgtgtgtttttattttagcagatagttcaaagcaataaaagatttcttttttaatttgaggtattactgcttttggaaaagttattttataaatatgtgcatattgtcataaaatattgtatgattaattgatttaaataatgcttagccttaattttagataatgtaaatttagaggaatgtactttacaagatagattgtataagaagccaaataatgaaagcctagaaaaaactaatttatacttatctgaaggttacaaattagacttttaaattttctttgtagttggtggtgtttgagggttggctagaaatgaaagcctggattttgtgccatgtttgtaatatagtttgttccttgatcaaataatcagagaaaagaaacttaaagatctttgtctgtgaagaagaaaattatctccctagttcaatctgtagtgaaataagactacagaaggcattgnnnnnnnnnnnnnnnnnnnnnggagtaaatatttttcttaaatatgttttattgtcttctctaagcaaaaagttcttaataaacatagtatttctctctgcgtcctatttcattagtgaagacatagttcacctaaaatggcatcctgctctgaatctagactttttagaaatggcatatgtttttgatgatatgtcaacattcaaaattgtcctaattaaattgttgtttaaatgtaatgtcaactctttataaacttaaaaataaacaagtaattaaccactctaattgttcagaaattttacatttgacttatttgacaacattaacattagtggtggctttgccattaaaaacccagtaagtattttgagtgcatctatgtgatgtggtgttttgagcatagtaggcaccacagcaacttttctgcgtggtactaaaactgccgaaaatgcgacgtagaatcaccagatctttagtgtttaatatccctggtataagatgttataattaatgtaatttctttcttggcaaacacctcatgtctgtcttagtgaagatttaataaaccacttattttt

SEQ ID NO: 77465 - DNA, 1056 bp, Homo Sapiens
  misc_feature (42)..(60): n is a, c, g, or t
  misc_feature (796)..(796): n is a, c, g, or t
ccctcactgaaagggaataagcttgcggccgcctgctcaggnnnnnnnnnnnnnnnnnnncaacacattaaaaaaataggtttaatgcaggtgggtcatggcatgacgaatttcacaggcaccggggacagcaggcggccaggtgctcagagggcaccaaggtgccacaactccctgcagcgttgacaccgcacgagcggcaccaccagccccctcccgcctcccgtcccaccttcaccctcagccaagaggcttgggtgactctgagtaatacgttaacaaaaaacaaagcttctttgaggaaacagcatgacttagtgcaaaagattctctgcagcaagaaatgaggcccacgcagggaagctcccgcctacctgcccagggcgtggacgcagcccgggctcatcagaggtcatccacagaagctgccgataaattagagagcacggtttacggccagagattttttgctttctctacctgatttagggtttttcaaaaagtttctcttccagtggcacacaactgtcctcatggctcctgggccactggtccgcctgacagggtagggtcacaagtcccacccatgcccagagtgtggggacatggatttgaggtgacactagggttgtcagtaccacaccctgtgtcctgctctagggtagcctctgcctgttgtccttgcaatcattattcagggcgccctcccacttgcccccaaagtcacacggccatgggcagtccaccatagtgctgccgtgactgcaaggctgaggagcagagcaaggggtcctgngtgagactccggcatggtggcacctccctgacacagatccggcgccctcagccactgccctgtgcatcattgggcccccctcgtgccgatcttggctcgaggcaattccctaatgagtctataatcgtatcagtatactgtcctggtgaatgttacgccacattcaaacatcagcggagcaaatgtagctggggctatgatgacatcaattatggtgcgcatgcgcttcatcggactgctgcatgatatgaccgacgcgg

SEQ ID NO: 77466 - DNA, 627 bp, Homo Sapiens
  misc_feature (127)..(127): n is a, c, g, or t
accccgcgagtgcgctgccgcacgtgcacccatgttcgcctactggaggcgaggaagtcgcgggccgctggacgagagctgtgagcggctgttgcgcaccctgcacggggcgcgtcacatggtccgngacgcacccaaattccgcaaggtggcagcccagcgcctgcgaggattccggcctaacccggagctgagggaggccctgaccaccggcttcgtgcggaggctgctctggggtagccggggcgcgggagctccgcgcgctgaacgctttgagaagttccagcgcgtcctcggcgtcctgtcgcagcgcctggagcctgaccgctgagagcgcagacacccttcttcacacccgggacccccaggtttttgcgaaccccagaagagaccaaaggagtcgtcccaggctcctcgcgcctcaggtggaatcctgccctgtgcctcacagaagaggtggggaccgcagtcagggtcacctggaccatggtgaacatgtgacctgcagatctggcatcagaggccagagttcaaatgtgactccacctcttaaaagccgtgatttctagcagttgacttcacctctgtgtcggcctttaacaaaatcatagccatacagcagctcag

SEQ ID NO: 77467 - DNA, 1158 bp, Homo Sapiens
  misc_feature (1025)..(1025): n is a, c, g, or t
  misc_feature (1041)..(1042): n is a, c, g, or t
  misc_feature (1045)..(1047): n is a, c, g, or t
  misc_feature (1067)..(1067): n is a, c, g, or t
aaaagcaggctggtaccggtccggattcccgggatatcgtcgaccacgcgtcggccctgcggcccgcctcgtgttccacacccagctggcccatggcagtcccactggccgcatcgagggcttcaccaacgtcaaggagctgtatggcaagatcgccgaggccttccgcctgccaactgccgaggtgatgttctgcaccctgaacacccacaaagtggacatggacaagctcctggggggccagatcgggctggaggacttcatcttcgcccacgtgaaggggcagcgcaaggaggtggaggtgttcaagtcggaggatgcactcgggctcaccatcacggacaacggggctggctacgccttcatcaagcgcatcaaggagggcagcgtgatcgaccacatccacctcatcagcgtgggcgacatgatcgaggccattaacgggcagagcctgctgggctgccggcactacgaggtggcccggctgctcaaggagctgccccgaggccgtaccttcacgctgaagctcacggagcctcgcaaggccttcgacatgatcagccagcgttcagcgggtggccgccctggctctggcccacaactgggcactggccgagggaccctgcggctccgatcccggggccccgccacagtggaggatctgccctctgcctttgaagagaaggccattgagaaggtggatgacctgctggagagttacatgggtatcagggacacggagctggcggccaccatggtggagctgggaaaggacaaaaggaacccggatgagctggccgaggccctggacgaacggctgggtgactttgccttccctgacgagttcgtctttgacgtctggggcgccattggggacgccaaggtcggccgctactaggactgcccccggaccctgcgatgatgaccccggcgcaaacctggtggggggcccccagcaggggacactgacgtcaagacccgagcctccagcctgagcctagctcagcagcccaaggacgatgggnaagggggaggtggggnnccnnnccccctgcccccccttccanttcgggtaccatcccccctcccttggggtcccaagtcttggggcgggggtttccccggggccgccccctggtgccccctgtattcccccac

SEQ ID NO: 77468 - DNA, 1210 bp, Homo Sapiens
  misc_feature (85)..(98): n is a, c, g, or t
aattaggctaggtacgaggctggttcaatcggcacgagggcaggctctttgcggaggtggtcggggggcccccaaatgggcttgnnnnnnnnnnnnnnagccctgcggccccgcctcgtgttccacacccagctggcccatggcagtcccactgaccgcatcgagggcttcaccaacgtcacggagcctcgcaaggccttcgacatgatcagccagcgttcagcgggtggccgccctggctctggcccacaactgggcagtggccgagggaccctgcggctccgatcccggggccccgccacagtggaggatctgccctctgcctttgaagagaaggccattgagaaggtggatgacctgctggagagttacatgggtatcagggacacggagctggcggccaccatggtggagctgggaaaggacaaaaggaacccggatgagctggccgaggccctggacgaacggctgggtgactttgccttccctgacgagttcgtctttgacgtctggggcgccattggggacgccaaggtcggccgctactaggactgcccccggaccctgcgatgatgacccgggcgcaacctggtggggcccccagcagggacactgacgtcaggacccgagcctccagcctgagcctagctcagcagcccaaggacgatggtgaggggaggtggggccaggccccctgccccgctccaatcggtaccatcccctccctggttcccagtctggccggggtccccggcccccctgtgccctgttccccacctacctcagctgggtcaggcacagggaggggagggatcagccaaattgggcggccacccccgcctccaccactttccaccatcagctgccaaactggtccctctgtctccctggggccttgggttctgtttgggggtcatgaccttcctagtttcctgacgcagggaatacaggggagagggttgtccttccccccagcaaatgcaataatgccctcacccctcctgagaggagccccctccctgtggagcctgttacctccgcatttgacacgagtctgctgtgaaccccgcaacctcctccccacctcccatctctccttccaggcccatccctggcccagagcaggagggagggagggacgatggcggtgggtttttgtatctgaatttgctgtcttgaacataaagaatctatctgctgttggagaaaa

SEQ ID NO: 77469 - DNA, 1103 bp, Homo Sapiens
  misc_feature (30)..(30): n is a, c, g, or t
  misc_feature (58)..(58): n is a, c, g, or t
  misc_feature (61)..(61): n is a, c, g, or t
  misc_feature (87)..(87): n is a, c, g, or t
  misc_feature (94)..(94): n is a, c, g, or t
  misc_feature (97)..(97): n is a, c, g, or t
  misc_feature (106)..(107): n is a, c, g, or t
  misc_feature (110)..(110): n is a, c, g, or t
  misc_feature (113)..(113): n is a, c, g, or t
  misc_feature (120)..(122): n is a, c, g, or t
  misc_feature (182)..(182): n is a, c, g, or t
  misc_feature (186)..(187): n is a, c, g, or t
  misc_feature (209)..(210): n is a, c, g, or t
  misc_feature (241)..(241): n is a, c, g, or t
  misc_feature (246)..(246): n is a, c, g, or t
  misc_feature (251)..(251): n is a, c, g, or t
  misc_feature (281)..(281): n is a, c, g, or t
  misc_feature (303)..(303): n is a, c, g, or t
  misc_feature (312)..(312): n is a, c, g, or t
  misc_feature (1043)..(1061): n is a, c, g, or t
gattgagcgatacaatcacccaggaacagnttgacagatacgatttatcgactccacntanggattgccctcgagccagaaatcgcnacgagcntgntcggagatnnggnccnggctgcnnntgcctccccctgatatactctatagtgcaaaaaggataaagcatctgtacatgtattttntatnntttatccagaagtgctagacanngaccagataaagcaggctgttggatgctacntgtgntgaantgtgtccccccaaaatatatggtgaagtcntaacccccatccccgtgaatgngaccttgtntggaaatagggtctttgcagatatagtcaagatgaggtcacattggattagggtgggccccaaatccaatgactggcatccttaggagaagagagagttgtggtaatagacacaaatgcagtgggaagaagaccaggggacaagaggcaagttggagtgatgcagccggaagggaagggacaccaaggatctccggccaccagcagaagccagcagagaggcatgggacaggttccccacaagccttagaaggaagcatggccctgacttcagaattccagactccagaactggaagaataaatgtctgttgttttaagctgcttagttcatgctgagttcatgctgacttgttactatagccccagaaagctaatacagtcgtttatgtaattacataacctgacacacaagatcgacccattcactgctgcccagtccaccattttcataatgaagtagaaatgggaggtaagaaaaacattccagccagttctgtttagccctgggacacatatttgtcccgtcaggaatcttatgccctcctggaacccccgcccacctcagtccagtcccagtcaggcgaacggcctctggacagggactgaggtggctctgagccactggagatcatttttcttggaggatggagattggctagtacctctggcctaactgtgtaggtcaatactcttttacattgccttctaataaaagcagaatgatacagcnnnnnnnnnnnnnnnnnnncctgagcaggcggccgcaagcttattccctttagtgaggtta

SEQ ID NO: 77470 - DNA, 967 bp, Homo Sapiens
  misc_feature (453)..(464): n is a, c, g, or t
tgattaatatcttgctaatcataggttatggaaagactgtgtttctgttataagactctgttagaaattactgatgcacacactatattgtaaattcttatctttgtataccgtacttctacatacaaatgtactgtacttctacatacaaatgttatgttaaagaattacttcatccccatgtgaccatctcacctcataatcaaatgaccctaaatccctcactaacctacccccgccctcactaaacttaataataaatgctggtatatccagtgcattgttggcaccacgggaccagaaggcggtgacccccctggacccagctttcactatcttgtgtgtgtctattatttctcaacctgccgatccacctgggaacaaagagagaaccccgttgcattgcaggctactggccagatcccgcaataaatcatgacctggacaaatacnnnnnnnnnnnnagtaattaaaagtaaggatggcaaagtgaagctgaaaaaatgacaatttcacatccttccctcctttccagctagttaggaaggagacagaatttcccaagttgattccaagatcacacagtgagtcaacaacataggctgaagaaattgtaggagcaatggacagagacaggacccagcaggaggtaaagaggagacatattttccaagcactgggacaaatggaaataattacttggccacttgctgccccatcattgtatcaccttccttcaatcttttggctgccactctcatgtagggatccacggtgaggaacaaagcttcaagcaggacctctccattttttaagggtgggagctcagatgtcttcaactcaaagtcactattagtaggatagccaacaaagtgcttcttcagggtccatgtcttagtacgaaccatcctgaagctcaggagcccgaaggttccactgcctggggaaggcggctgggactgcgcag

SEQ ID NO: 77471 - DNA, 1273 bp, Homo Sapiens
  misc_feature (19)..(19): n is a, c, g, or t
  misc_feature (27)..(27): n is a, c, g, or t
caacccaaacacccccccntttttggnccataacggtcctaggtagcgaggcctgggtggcgaattccagcacgaggccttccccaggcagtggaaccttcgggctcctgagcttcaggatggttcgtactaagacatggaccctgaagaagcactttgttggctatcctactaatagtgactttgagttgaagacagctgagctcccacccttaaaaaatggagaggtcctgcttgaagctttgttcctcaccgtggatccctacatgagagtggcagccaaaagattgaaggaaggtgatacaatgatggggcagcaagtggccaaagttgtggaaagtaaaaatgtagccctaccaaaaggaactattgtactggcttctccaggctggacaacgcactccatttctgatgggaaagatctggaaaagctgctgacagagtggccagacacaataccactgtctttggctctggggacagttggcatgccaggcctgactgcctactttggcctacttgaaatctgtggtgtgaagggtggagaaacagtgatggttaatgcagcagctggagctgtgggctcagtcgtggggcagattgcaaagctcaagggctgcaaagttgttggagcagtagggtctgatgaaaaggttgcctaccttcaaaagcttggatttgatgtcgtctttaactacaagacggtagagtctttggaagaaaccttgaagaaagcgtctcctgatggttatgattgttattttgataatgtaggtggagagttttcaaacactgttatcggccagatgaagaaatttggaaggattgccatatgtggagccatctctacatataacagaaccggcccacttcccccaggcccacccccagagattgttatctatcaggagcttcgcatggaagcttttgtcgtctaccgctggcaaggagatgcccgccaaaaagctctgaaggacttgctgaaatgggtcttagagggtaaaatccagtacaaggaatatatcattgaaggatttgaaaacatgccagctgcatttatgggaatgctgaaaggagataatttggggaagacaatagtgaaagcatgaaaaagaggacacatggaatctggaggccatttagatgattagttaatttgtttttcaccatttagcaaaaatgtatactaccttaaatgtcttaagaaatagtactcataatgagtttgagctacttaataaaatacatttaagtggtatacaaacaccacaag

SEQ ID NO: 77472 - DNA, 914 bp, Homo Sapiens
  misc_feature (763)..(763): n is a, c, g, or t
  misc_feature (774)..(774): n is a, c, g, or t
  misc_feature (865)..(865): n is a, c, g, or t
caaggtgagcctgatcacagcctcggtagtatttattttgaaataaaagttcccatcccttggtaggcctcgctgtgaggcacaacgtcttcgaggggaagttgaagtggggtcttcttattcactggtccctagaccgcaccttctggtatcttctaaggcaattctggtaccgcactgtgtctgggttggcctatttaaatgtctgagccagctgttccaggatttcaatgagtttctcctcttcggccggtgaggaggacgctgtagcgagaggcaagtgtgtagaaactggcttccgatctaaaagtgagagggaaccgcagagaggtgtgagctgctgcagcgtggctgggtccatgtccctgtgctgctcaggccttgaaccgacgcctgctggagtggcagcaccctacagctgttagacccccatccctgctgtcaaaggtcccacagggatcaggcagcatggattgatatgtaaagtgcagtttgggaactgggaggctgcagccagggctggacgggagaccacgtttgggtgatcagcaggaaggggtgcggccatcctcccggataccccaggggtcaccagcgcttcagaattcctcaagcaagggtggttctcatcaagaacagaggaaagagaagccaagcaaagagcctggcttccacccgaggtcaagtgctgtcttcggatggcgtcactcacacgcctgccccttaggagccactggggagagacgtgacaatactgcttcanaatagagagcnagtccttacaccttgcactgaagagcaagtcgtactcctttgcatgcacttgatacgccctctggctcacaactgcaagaatctcattcangtagatgcttccgtccaagactgataaggtatcaatccaagatacactg

SEQ ID NO: 77473 - DNA, 1822 bp, Homo Sapiens
  misc_feature (288)..(339): n is a, c, g, or t
  misc_feature (477)..(477): n is a, c, g, or t
caggaacttggtaccttcatttaatgatatagtgcacacagggtttttccataggcatgattggcagcagagtcttcagccctgaacagattttgcacaggtgttctataatttattaacttcatctcctaccaccagcactgtgataagcaaccttgttttccctatctttatttcttaggatgaattccaaggcttctgataaatagtgattttcagaaaggccatgccagcagtgtgtgagagcctgattcccaaaaccccatggccaggcccggctgggaggtnnnnnnnnnnnnnnnnnnnnnnnnnnnnnnnnnnnnnnnnnnnnnnnnnnnnacagtagtggccactccacagaggcttgaggacaaatgcgttaatccgcaaacagcgctaagaccagttcttggcgccgcgggtgcaccctggggtgtgtgctgtggctgctgctgctttcagttcccttgtttgtanaggaggaaagagctgcagagagcccaggtgagctgcctgaggtcatggagttggtgaggccaatccggaagagattctgctcccctccaccgctgctccaaacacgctcccagatcattcgagctgtgtccttgtggctggcccatttaccttctatgcaatcatttatttccaaaaacctggggagtggtgaggcagtctgggcctctcccactaccttcctcagctcctgctcattcctgtctggggtgtcggccagccaggatgcatggaagaaaaatggatgccgggtgcccttgggcccaccgctccgtcagaaccacttgctgcctcttgttttgtgcatagaccatagttccatcaaatggtgttctttcggactggagatcattggtgttcagtttctgaaccaacattcctcctgaggagacggttatcactcgggggtcgtgttctttctccagcacagggatcaggccggtcgagagaatgtacacacccagagtataggcagcaaagtttttttcaagtccatcttctgtgagctctcttttattgaacatgcaacctgcattattgatcagaacatggagtttatgttcctgcttgaaattttcaacaaatttccagatttgcttgggatcagacaagtccacaatgtgcagaaaaatgttctggttaccgctctcccggatgatctcacccctggcatcttctgctggggcttgatctcgacaaaccaggtgaactgtgccacctcgcttggcgatttcaagggcagttgctttgccaatgccgctgtttcctccagtgaccaaaaagactcttccaggaatctggacctccaagtcatgagggacaaagtctttacatgcagattcatagccactcttggtgtactcgcgcagccccttggcgaaccacacgacgctgcggtacagggacatgccgggagcgccccacgcctagccccaccgcgctcccggcgcggcctccgccctggtcccgccccccgggagtcgcccgccctgacatcatcccggttatgtaagagccgcggcttccggttccttgctccaccggtaaggcaaggggtctcggggccggccggtcgactccgccccagcctcaaagggtggagtgagggcggaccggccctggtgggggccgcagtcgaggtccgcagtctcctcggggtcgaaatcgggcatcagcgccgtttaaagaacaccgtcctgctgggcatggccgggatgcgaaaatggccctgcaacgcacctcctagaatttggttacctagaaaaccatgtggaataaaacgacgaggcttatgatatttaaaaaa

SEQ ID NO: 77474 - DNA, 521 bp, Homo Sapiens
  misc_feature (13)..(13): n is a, c, g, or t
  misc_feature (23)..(23): n is a, c, g, or t
  misc_feature (184)..(184): n is a, c, g, or t
gcgaccgctcagntagtgcggtncggcagaggagagggccagccacagcatggtgtccgcgccctgggctcggagcgcagggttccccgaacctggcgtggaacccggcatcgctgcctcacacctggggtgtcggcccagccaggatgcatggaagaaaaatggatggccgggtgcccttggnccaccgctccgtcagaaccacttgctgcctcttgttttgtgcatagaccatagttccatcaaatggtgttctttcggactggagatcattggtgttcagtttctgaaccaacattcctcctgaggagaacggttatcactcgggggtacgtgttctttctccagcacagggatcaggccggtcgtgagaatgtacacacccagagtattggcagcaaagtttttttcaagtccatcttctgtgagctctcttttattgaccatgcaacctgcattattgatcagaacatggagtttatgttcatgcttgaaattttcaacaaatttccagatttgct

SEQ ID NO: 77475 - DNA, 528 bp, Homo Sapiens
gcggccgctgggctgtgcggctgcggcagaggagagggccagccacagcatggtgtccgcgccctgggcctcggagcgcaggcggtccccgaacctggcgtggaaccccggcatcgcctgcctcacacctggggtgtcggcccagccaggatgcatggaagaaaaatggatggccgggtgcccttgggcccaccgctccgtcagaaccacttgctgcctcttgttttgtgcatagaccatagttccatcaaatggtgttctttcggactggagatcattggtgttcagtttctgaaccaacattcctcctgaggagacggttatcactcgggggtcgtgttctttctccagcacagggatcaggccggtcgtgagaatgtacacacctgaggggcagtccctccttccgaggatccttcaagccaaatgttccttttcccaggactggaagaaagatgccttagagcctcatgtaccgacaggaaaagatgtccacactacaggaatacaggaagggaaaaagaaaac

SEQ ID NO: 77476 - DNA, 757 bp, Homo Sapiens
  misc_feature (167)..(167): n is a, c, g, or t
tgactgtcagtagactgccatggaaaccccaaggatgcctgtcctgttggacatgtgtcagagactgactccaaagatatctcccaaagagcaaaagccaccatcttcctgttggtgcccagacacaggtgcatgagctccaaggactccttcccaggccacctctntgctgcctgatctaaactcacctcatttctgggagctggtctgagagtctgccttggagatgtgttggatgggaactaggggtttgtaggctccattgtgagcaatactgatgggaaatgaccccaactggtatggatattttgcataaagcccctgaaatctgacatgctcagggtcagagccatgaaccactgtcttgacaaaccccatgtacatggactaataaggaaggtgtgggcaccatggcgttagtgttcaactggagagtgggaaagagatttgcatgtgccaccagccctgatagagacagtgacagaacacactgattctcaacattgcagacacctgctgtctttgtccctatgtaggtttcccccaatatttaggggatcaggtcagataaaggccttcctctgaaatggaaattatttaaaatcgatgaggaagtcatccaggaatgacttcctctggggatctgtggatgatggtgctagggtttgtaccagaccaaatcaaggtaactagagcctccccaaggtgattgtaacccatctcctaaataaaacttgcatcgactcggttgcattac

SEQ ID NO: 77477 - DNA, 944 bp, Homo Sapiens
gtgaataagttatacttttatttttcagaaacaaaaatgacaagtggcaacttgcctttgtaaaagattaaagagtatcagagtaataagctatctctcatagagacagaagcccgagaaacactattatacagctttcaaaggaagtcctattaaataaatctcacaataatatactttaactcaacaaaacaaaaaccacaaaaaattatacagaactcataaaatggtatatgaatgaaaaagagaaatctttaaatccatacactagaagttctctattaaaatcaaggaggctcaaatctgtttcttttaaaaaatatttatggatataattgcgtttttctaaatgtttcattagtaatactcagtcttgtaagtctggttccatagtaatctataatgtaactacttccatctgaaggtccaacaatctgcattgaaataagaatgaaatcaattaggctcccaattccacaaaaccctacagtgcaaaactttaacaaacccaaagcagggtatccaaggtaaaatcgatctgctcccaaccatccaagaaaaagagacaatgcgactgccactttgtaggaatagccatttacatttcggcaagatatgggcttgaaaaaaccaacttcgttcccagtaaaatgtgtttcattgccactggaatccttacaagttatgttgggtgctggaaaacaggaaacatgagctgtgtagtttgtacagttaactggttcttgcgtagcgtcatttatttttggatctttacaaatatattgtcccactttgaggtcctcgcacttaagcgactcctcgcccccggcggaggtggcaacagccccccagggtcctgtagtgactgagacgaaccacaggacaccaacgagtctggccgtcacggcctccggagcagacggaccagacggccaggcggccgc

SEQ ID NO: 77478 - DNA, 859 bp, Homo Sapiens
  misc_feature (548)..(567): n is a, c, g, or t
  misc_feature (569)..(579): n is a, c, g, or t
  misc_feature (581)..(588): n is a, c, g, or t
  misc_feature (590)..(605): n is a, c, g, or t
  misc_feature (607)..(612): n is a, c, g, or t
  misc_feature (614)..(619): n is a, c, g, or t
  misc_feature (623)..(626): n is a, c, g, or t
  misc_feature (629)..(701): n is a, c, g, or t
  misc_feature (708)..(708): n is a, c, g, or t
  misc_feature (710)..(711): n is a, c, g, or t
  misc_feature (715)..(716): n is a, c, g, or t
  misc_feature (734)..(734): n is a, c, g, or t
  misc_feature (736)..(736): n is a, c, g, or t
tattatgtaaacatttaggtgggattccagattcagatttgaaacttaaaacctgaaaggcccattgagaaggccagtatctgcattatcattcatgtaatctctctacattatacagaagtgctccaagaatgagaaaaaaaatacattgagcaaatgaaatgttaaaatgtacatctgcaataacctcattggactcttaaaaaatattgtgttttaacgtatttcttctttctgttttaggatttgagcctccttgattttaatagagaacttctagtgtatggatttaaagatttctctttttcattcatataccattttatgagttctgtataattttttgtggtttttgttttgttgagttaaagtatattattgtgagatttatttaataggacttcctttgaaagctgtataatagtgtttctcgggcttctgtctctatgagagatagcttattactctgatactctttaatcttttacaaaggcaagttgccacttgtcatttttgtttctgaaaaataaaagtataacttattcacnnnnnnnnnnnnnnnnnnnngnnnnnnnnnnngnnnnnnnngnnnnnnnnnnnnnnnngnnnnnngnnnnnngggnnnnggnnnnnnnnnnnnnnnnnnnnnnnnnnnnnnnnnnnnnnnnnnnnnnnnnnnnnnnnnnnnnnnnnnnnnnnnncccggananngggnngggaagcgccgggcgagncncacaaggggcggaagagaaaacagtgggcccaaaaggccccacgccgcaaaaggagacaaccccccggccacagaaaaaccgccgcgggcggggcccaccaccaccccacccgcgcgggagga

SEQ ID NO: 77479 - DNA, 479 bp, Homo Sapiens
ggtccgtctgctccggaggccgtgacggccagactcgttggtgtcctgtggttcgtctcagtcactacaggaccctggggggctgttgccacctccgccgggggcgaggagtcgcttaagtgcgaggacctcaaagtgggacaatatcctctgtggagaacacccccccatggaggcgaggtagagttggggtcgcagtttcctgttttccagcacccaacataacttgtaaggattccagtggcaatgaaacacattttactgggaacgaagttggttttttcaagcccatatcttgccgaaatgtaaatggctattcctacaaagtggcagtcgcattgtctctttttcttggatggttgggagcagatcgattttaccttggataccctgctttgggtttgttaaagttttgcactggtagggttttgtggaattgggagcctaattgatttcattcttatttcaatgcagattgt

SEQ ID NO: 77480 - DNA, 970 bp, Homo Sapiens
  misc_feature (95)..(378): n is a, c, g, or t
  misc_feature (380)..(389): n is a, c, g, or t
ggtcctaggtagcgaggcctgggtggcgatctcggcacgaggattacttagaactaggcaaagatgaaagtatagccaactattcttggctatannnnnnnnnnnnnnnnnnnnnnnnnnnnnnnnnnnnnnnnnnnnnnnnnnnnnnnnnnnnnnnnnnnnnnnnnnnnnnnnnnnnnnnnnnnnnnnnnnnnnnnnnnnnnnnnnnnnnnnnnnnnnnnnnnnnnnnnnnnnnnnnnnnnnnnnnnnnnnnnnnnnnnnnnnnnnnnnnnnnnnnnnnnnnnnnnnnnnnnnnnnnnnnnnnnnnnnnnnnnnnnnnnnnnnnnnnnnnnnnnnnnnnnnnnnnnnnnnnnnnnnnnnnnnnnnnnnnnnnnnnnntnnnnnnnnnngactcaagtggaccctacaatgaagcctacacatcccaatagaagccccttcttatgctgagggaagcagccctcagaacatgatagcttgtatccagcagagtggcacgtgctggcacacctcacagaagcaccctggccctggatgcctgcaacctcagaagagtgcagctcccagagggaggcagccatccatctgggatggtcctaagcatggaatcctaactcctgattccgtctcctatttcttgcttggctacgccagttcccaaatctggtagatgtccatgcccatgtgctcctgctgggactcaattcaggctatgtatgactatgaagtcaggctcatctgcttactggctgtgtgaactttttgtatcttggttttcttcatccatgaaatccaagtaatactacctaattgttactgtggagattaagttcaaatgcaatgtatagtaatattaagcaatttctagttattattctagccagtaatggacttcagaatcttttattacaccatataagaatatgtatgtaaagacattttggaatttcctggatgagaaggaagtctg

SEQ ID NO: 77481 - DNA, 935 bp, Homo Sapiens
  misc_feature (607)..(616): n is a, c, g, or t
  misc_feature (746)..(746): n is a, c, g, or t
gctcatcccccactggccagaggtccctgaaaagctccctttaaggctgtctggggctggcgtcccccagttcttcatcatgactctgcctcaagccccctggatgggattcaaagtaccagtgaccttaggtgctccagtggcttcttcggggaaaggaaccacactttcaggactgggaagttcttcccatcaccaccccaaacccttcctgttgccctggaagccccagtcctgttctcagcagaggtggcacggtgttggctggtgcgggcaggggaaggttgttgtcctctgagcaggggcacacgcctccacctgcgggggctgctgttgtgtttctgtgtgtggcttcccctgtttgcggctgaggcttgaacttccgggcctgcacagcttacagctgcagcgtctccccgtggctgactcagggtgactggcctcctgctccgaaatgtggagttggtgagactgggtggctgtgggctgcctgaccctccttccctgccctagggtttctgtgatctggtgagtcagttgctccccagtgtttaacagacattgaggacaccctcttatctttacacaaagtgtctcttatagtagnnnnnnnnnntgaagcccagggaaaaccagaaatgaagctggcagagatcaaagtccaagttagagctaaatattcactcctggctttgctttcctggcactgatgccggaacaggacaagccatttagctgctgtgggnttggcctgagactgcaaagcacaccttccagaatgccatggtgtccagggcgctccaggactccccagcacgccctcagctctgacctgacagtcatccaactggtcctaaccttgccagcatctactttgctctatgtccttgcacaacaacagaccacatcaccacgccactctcaacattcatcac

SEQ ID NO: 77482 - DNA, 739 bp, Homo Sapiens
  misc_feature (36)..(36): n is a, c, g, or t
ggggtgcatgtaacactgagaatcatgtagataatntggggtgttgagcacgcatggcctgtggggagtctggccggcttgcctcatgtggaccccccaccaccctggggcagaggagggggccggctgttggggccgtcatggaagcactagggttacactagggcaggccccatgtcccctctggaactcctcacagttcacaccttgaagcccaggcacttgcgatgggaccagcgaggtcaaatgcaggacccctggtcctcactgttaccatgaagtgatgcaaatggccggtcttcagaaaccagagctagccccacccgtgccaccaaggcacaccagcccctgagcagtcgcagggcccaggcagaagggtccggcaggctcctcactcatgacgtggcctgagggggctgggcagctggtcctcggagcccccacctggtgcaccaggccgtgaacctcagcaaaggccccgtctcttgatgcccaaggtttggcaatggttgggggttactttctccagaccacagcaccctcgaggccaacactggggaaagctggagcccctgctcttcacccccacctcccagggctgttgaaccccaaggagcaccagacccaggacccccccaggagggccagaggcaggaagtgcctgatggtgccaggggagggtggatgcctgactagggcctgaaaacagagggcatagcttccaataaagcatggaaag

SEQ ID NO: 77483 - DNA, 670 bp, Homo Sapiens
ggccctgccagctgcttgcgtcgttgggcccagggtggctggcaggagtcccagctgcttgctttaggacctggcagcttttcttgccgtccctcccctgcctccagaatcacagcccttctccccaagggaggctgaggaggcttctccaccagtggcagccccacccccgtccctggccattcttggcctccaccccgctcaggcccctactcgggcgctcccagaaggagccacctctcagtgcctcacctccccctgcctcccagcctccgcagatgaggttcctgccccttcctcctcgtaaccaaaaccctcactgctcccaggacggtcttatttataaaccagatacatgttcttagtctggtcccagaccaaggagctggtcagacggccctttctaatcctacatgttgagcttatgtaaaaaatgttgtttcctcctgtttttggttcctttcttacccacaaaccattactacttgaaacttaaaaaagtcgccaagtgtaaaggctaaagagaagcagtttgacggaccttgtgatttgtactgtttgctgcggagctatttaaagattttggaataaatatacaaaactacggttgtgaaataaaaacttaaattgtatattttgaaaaataaaacactgaaaagaaaccaacaaa

SEQ ID NO: 77484 - DNA, 689 bp, Homo Sapiens
  misc_feature (20)..(20): n is a, c, g, or t
aagagcagaggatggagggnaagaagcccagggtgatggcaggcaccttgaagctggaggataagcagcggctggcccaggaggaggagagtgaggccaagcgcctggccattatgatgatgaagaagcgggagaagtacctgtaccagaagatcatgtttggcaagaggcgaaaaatccgagaggccaacaagctggcggagaagcggaaagcccacgatgaggcggtgaggtctgagaagaaggccaagaaggcaaggccggagtgagtgcctgcggcccctcacagggctgaggccagcccctagcagctggatgtggcagaggcaggccagaggacctaagtgtgatggaccagagtcacttctcctcctcctttctccagccagccctgacccctcatgctctctggctgggccagtgggcagccctcgcttcccttggatggagctgccctgctggtgcctggtcagagaagaggcctctgtgcccagcctgattctctgctcccaggagccagtgacatgaggtgcagaggcccacccagccccctacctactgcccccattcatcctggctttccacagccccctcccacacagttggacccgtgattctcagggtgctgtgatggggtgagggtagggggagcatttgttattaaatgactggacttttgtgccaattgc

SEQ ID NO: 77485 - DNA, 1189 bp, Homo Sapiens
  misc_feature (36)..(36): n is a, c, g, or t
  misc_feature (39)..(39): n is a, c, g, or t
  misc_feature (93)..(93): n is a, c, g, or t
  misc_feature (96)..(96): n is a, c, g, or t
  misc_feature (113)..(113): n is a, c, g, or t
  misc_feature (147)..(147): n is a, c, g, or t
  misc_feature (171)..(171): n is a, c, g, or t
  misc_feature (235)..(235): n is a, c, g, or t
  misc_feature (242)..(242): n is a, c, g, or t
  misc_feature (261)..(261): n is a, c, g, or t
  misc_feature (268)..(268): n is a, c, g, or t
  misc_feature (271)..(271): n is a, c, g, or t
  misc_feature (280)..(280): n is a, c, g, or t
  misc_feature (338)..(338): n is a, c, g, or t
  misc_feature (355)..(355): n is a, c, g, or t
  misc_feature (384)..(384): n is a, c, g, or t
  misc_feature (468)..(646): n is a, c, g, or t
  misc_feature (1143)..(1143): n is a, c, g, or t
cagcttacattatctccgctcgtatgtgttggaatngancgataacaatcacacaggaacagctatacatgatacgattttatccgactcatntanggaatttggcctcgagnccagaaatcggcacgaagatgtcatcagtagctntatatgatgatcagccagatgccntaaaagatacgtgtctcaatatcactagtgtattttcaagtaaaataacccatcactatatggntatcgcnttggtagtcacagacatcntatcganganacatgaaanccgtggagtcggctcgggagcctgctgtctccactctctacagccagtgcggaagtcntgaaatgacacgactcntggaaaagcaggaggggcagagctttctntgagtgacttcggtgaagcaacgtgaggctgccttgctggaaacattatataatggggcttccctgcccctttcacagcacccnnnnnnnnnnnnnnnnnnnnnnnnnnnnnnnnnnnnnnnnnnnnnnnnnnnnnnnnnnnnnnnnnnnnnnnnnnnnnnnnnnnnnnnnnnnnnnnnnnnnnnnnnnnnnnnnnnnnnnnnnnnnnnnnnnnnnnnnnnnnnnnnnnnnnnnnnnnnnnnnnnnnnnnnnnnnnnnnnnnctctggtgttaatgtcagagtcacaggctaccacaggttagaccgctgctttcttctgcaaacctcattccagaaagatgtttatgggctcagtcgccagtgttcaaactgaattcccgagagtcgttttccttccattactcttggaattgctttctcactgagctttatgtgcgtaggaaacttcgccttcattctaactctctctccaccctgcaataataagcaggaaaacatttattgtaggccacaccatcacccacttacagaagaattggggcactcatcactgtatcactttgtttcatcatggactttactgttggataaatctacagtttatgctttatttgagacgatgtgactactgattcctcgagggggtttatatttctttttgcattaaaggccactgctaaaaatgaagcaaataattgataccctcctttcagggaaaatgttttcattcttttgtaagtcagttttctgattaccanaagaaatgtgtatttattgttgaaaccttataaaattaggaaaagt

SEQ ID NO: 77486 - DNA, 1107 bp, Homo Sapiens
  misc_feature (50)..(51): n is a, c, g, or t
  misc_feature (62)..(62): n is a, c, g, or t
  misc_feature (144)..(144): n is a, c, g, or t
  misc_feature (202)..(203): n is a, c, g, or t
  misc_feature (207)..(207): n is a, c, g, or t
  misc_feature (354)..(387): n is a, c, g, or t
  misc_feature (1009)..(1034): n is a, c, g, or t
ccgcttctacctcatggggttcagtgtggatcatgcacgcgcgatgtttnntaaacagatcnggcctggtcaacttagtcatccacgactacacgttaagaagagcagcgactgggtatctgggtccatggatcccagccagcnccgagtctgctgttcgtccccagaacttgagctgcatcctccgctgttgcactggcanncggngactggagagccaccagccacttgaacacagcatgctatcacttctcaggaagttgtgagggtgaggagaatagccgggcccactctgcagagggagggaacaggcacaggctagaggcatgggctgatagagtgagtcctctcccnnnnnnnnnnnnnnnnnnnnnnnnnnnnnnnnnngacacctgctgggcatctgctgtgtgcgagacactgtgctgggtgccccagacacaagacagaaactcgggtcgctctgtgtgcctccacactggccttccctgctgcgtggacgcaggctctgtctcctaggctttaagccccatgcatcaggtggaagacaatttccagcagcctctgcccgcttgtttttcctcctctccttttcctgccgccttggtcttttttgtcttttgtgcagggccgtctctcgcagcgcccgtctgtgctccgcagcgtctaggaaaggattagtgtgagcagagcacgcaggctttggtgaacagagccgagcttggtttcaacatctaattcaatttgttctgccgagattgaaatatgaaatggttgccagtcaaacgttcaaaggacggggaagggagagtgagcgcatgctgaaatttaaattttaatgaaaatgactttaaccctttggtacaccttgcaaaatgtaacccatcctcccatcctgtgaaagcggcctctcgggttagagcttttccacccacttctcttccactgagcttcactaataatatgtaatcatttttttcagccgtcttaataataaaagattaatagnnnnnnnnnnnnnnnnnnnnnnnnnncctgagcaggcggccgcaagctttttccctttagtgagggttaatttcgagcatggcactggccgtcgttacc

SEQ ID NO: 77487 - DNA, 895 bp, Homo Sapiens
  misc_feature (804)..(822): n is a, c, g, or t
cagcttgcttggtgatgttctggccctttttccaccatgggatgtctcacctctagctctaagggcagctgaccacctgccagcccctctctggttccagaagattacccttcgcaccggcacaggagagatcttaaatggtctctgggctgctgggacatgcaggctctgagtggggactgcacccactcatgctgttcctgaggccgccctctccagtcccaggagccgtgtctagagttcctgaccagccaccttctgccagaactgcaggcctgcggctgggtcttaggctcccgctgccatttgggtaagccggtggctggtctcgtctgccgggggaagggtggggaggtgcaatgggatgggaggcaggatgcttgcccagaaaggtgctttccttcagacggtgcagggcctgggccagccttacaggtcagtagactagactcgactacttggggtcagtgattcttttgtaacgagtctttcatgatgtgactttgaggccccaacatgacagccactgggccaccgggacccaagaagacagccccctgccccatcttctggcacaggccatcccgagtgcatgtccctgttgcccactgcactgatcatgaagccaccggccactgccacgcatgttgcacctgtgccatcgtgctccctcctgatgggcaccgtggtggaggaagtcacccagctgtttctcagtcccagaggccggtggctggttttgaacttgtgttgactgttgatacttatttactgtataaatataatttatcatttgtaccatgnnnnnnnnnnnnnnnnnnncctgagcaggcggccgcaagctttttccctttagtgagggttaatttcgagcatggcactggccgtcgttacc

SEQ ID NO: 77488 - DNA, 1671 bp, Homo Sapiens
  misc_feature (212)..(224): n is a, c, g, or t
cagaagccagtctgcgtcaggcacgtctcctgctgcgtgacatgtgcagtgctgtaatcggctcccgcttgctctcctggagcaagctctgccctggctgtgggtatcaggactgtgaccaaagcatttctagtcccttctctctttctaaggacccaaatttccctgggggcatcctgcttcctgaaagctgttggatttcagtgattttnnnnnnnnnnnnnagcacaggagagcacccacagccgcagaaggggaatgtgtcctcctgctctgcttcctcagggcccagcaggcgggggtttgagccctggaccccaggctcttagagactaaggggcagctcctgaccaaagacgatacagcttggcactttaaagcattaacagcaggtgtgaccctgagggctcctccatggtgctgcattgagtccagctttccttctgcccttcctccaggagaaggggcccaaggtccccgtggatggtctccacctgtgcttggaaccagtgtaactggctgctccctgctcccagggactgacacggggatcatctctgtgaccgccctccgtcgggcccctgccagccttctcccctccacgcaaggctgtgctcttcctctggtttctgtgtgtccgtttgagtgtctgcgccccgcccccccatacttcctggggatgatgtgtgaaaacctgacacctagattttattttggaaatattctatgacccactttacagatgaggaaactgaggcctcaagcgtgggaagggtaaagtgaaaaagtaaaacccaggtctgatgccaaagctgctttcttctctgcctcctcctcacgcaactcacacctccttttcttctagctttgttgtcctcccaggaaccaaaaaaccccagctattttctgaccaaaatgtgtttcataacaaaccatctggtgcctttccacacagaactggcaggagcctcgtgtcctgctagctgtctctcttgttgatttccgtgaaaatgcaagtgtttgaagtctgctcattccgagggtgaaacaaaatccaaccctgtcagaatcatgctgttctctttgctgacactgtgaccctgggtcgggacagaccagcagcaatctgtctttagaatctctttccttcctccccttttgcccccgtggggctcccggcatcctgaaagccagcaaagcctccagcatcttttccatcctgaggtgcctcccagtggcctggcttgtcggagcaagtttcatcagccctagggaaaacacggccctcctgggaacctccttacctggagtaaccggacaccttagacggaggtgcctgagggtggggtgggatttgcagggtcattatcagaacatgaggataacttccttgcccctgctctgtagccacctccttggcaccggcctctatttgtcataaggcggcgtgggcgaggcctgacacaggccagccttggcacgaggggggccaggggttctgagaagcgctgccctgtgagagccacgctggccttcgtctccatctctggttgacgggctgtccgtgtgcctcctgtgtgtctgcagacaagtcttgctgtgctttatttgtgaaactttaatgaggaaaaaacaaataataaatgttctcgttttgaaactcaaaaaaaa

SEQ ID NO: 77489 - DNA, 651 bp, Homo Sapiens
  misc_feature (59)..(59): n is a, c, g, or t
  misc_feature (156)..(156): n is a, c, g, or t
  misc_feature (195)..(207): n is a, c, g, or t
ctattacctgtacagtatggtttatacgttggtgagtttctaaggggaagccggccagngagcgagcccagaacggaccggacgcctgtgcacccccagccctgccccttggccgcagaggcctcagccctggggagggagggggcactggtgccncccagcctctccaacccccaaactgctgctgcggggaannnnnnnnnnnnngccttcagagccctcccccttggactagagcggctgggcagagctctaaacaggggcaggggctcctctgccagcctgtgggcatggcagtcattcctggaaggggcaggacctccggccttgtccatttcgggggaaacttgggccctgccaaggggcagagcttgaccctggaaattctgggccatccccctccacccccaccctgaggctccccctgcaggtgggggggtacccgcaccgggaatgagcaggctcagcaggggggcagccccacccctagtctgccctcccctctcccccaggctctttctccagccctgtctccatctgccccaacctcagcccaccttgtctcttggacctattttctatgtcgcctggaggagtccggcaccccctccccggccatttgtgacaaaatatgaataaactactgcaaat

SEQ ID NO: 77490 - DNA, 991 bp, Homo Sapiens
  misc_feature (102)..(102): n is a, c, g, or t
  misc_feature (104)..(104): n is a, c, g, or t
  misc_feature (107)..(107): n is a, c, g, or t
  misc_feature (131)..(131): n is a, c, g, or t
  misc_feature (156)..(156): n is a, c, g, or t
  misc_feature (195)..(195): n is a, c, g, or t
  misc_feature (214)..(214): n is a, c, g, or t
  misc_feature (223)..(223): n is a, c, g, or t
  misc_feature (264)..(264): n is a, c, g, or t
ggagctcacagtctggcatgcatgctctgtggatgcctaaagtgtcagagactcagatgatgcatatcggccccagacccagcggagatccaaccatgggtntnttntaactcttaccataccgcaactcntaagcagagtgacgtggcaagtctnatcgtgatggacatcacatgcaaatgcacccacagcgtntacaatgaccctcttgctntacatcttntgaatgctatgacaacggaactctttccagctctgggctcntgagacgttgtggaggaccaggcgtgggtacaagtgaacgtgccatggacaggaggtgggacccccccattggagacgtggagtaccttacagccttcaggacagtggtgatgcccattgcccacgagttctcacctgatgtggtcctagtctccgccgggtttgatgctgttgaaggacatctgtctcctctgggtggctactctgtcaccgccagatgttttggccacttgaccaggcagctgatgaccctggcagggggccgggtggtgctggccctggagggaggccatgacttgaccgccatctgtgatgcctctgaggcttgtgtctcggctctgctcagtgtagagctgcagcccttggatgaggcagtcttgcagcaaaagcccaacatcaacgcagtggccacgctagagaaagtcatcgagatccagagcaaacactggagctgtgtgcagaagttcgccgctggtctgggccggtccctgcgagaggcccaagcaggtgagaccgaggaggccgagactgtgagcgccatggccttgctgtcggtgggggccgagcaggcccaggctgcggcagcccgggaacacagccccaggccggcagaggagcccatggagcaggagcctgccctgtgacgccccggcccccatccctctgggcttcaccattgtgattttgtttattttttctattaaaaacaaaaagtcacacattcaaa

SEQ ID NO: 77491 - DNA, 848 bp, Homo Sapiens
gggaaaaaagagaaggcgctgtcccgctcttgctacggtggcctggaggagtggcgaaaccggaacagagaatttatcacttctgggactcacagtcgtgatgtctttcaagagggaaggagacgattggagtcaactcaatgtgctcaaaaaaagaagagtcggggacctcctagccagttacattccagaggatgaggcgctgatgcttcgggatggacgctttgcttgtgccatctgcccccatcgaccggtactggacaccctggccatgctgactgcccaccgtgcaggcaagaaacatctgtccagcttgcagcttttctatggcaagaagcagccgggaaaggaaagaaagcagaatccaaaacatcagaatgaattgagaagggaagaaaccaaagctgaggctcctctgctaactcagacacgacttatcacccagagtgctctgcacagagctccccactataacagttgctgccgccggaagtacagaccagaagcccctggtccctctgtctccctttcccctatgccaccctcagaggtcaaactccaaagtgggaagatcagtagggaacctgaacctgcggctggcccacaggccgaggagtcagcaactgtctcagcccctgcacccatgagccccacaagaagacgagccctggaccattatctcacccttcgaagctctggatggatcccagatggacgaggtcgatgggtaaaagatgaaaatgttgagtttgactctgatgaggaggaaccacctgatctccccttggactgatacccttttcccattcattcacaaataaattacaatgggtgctgagaacttaaaa

SEQ ID NO: 77492 - DNA, 1183 bp, Homo Sapiens
cctatctcagcggaccccaaaaacacgctggtaccggtccggaattcccgggatcttcccccttcgcggccgagatggaccctgggctcggcgtcctccggaaaactgcactgtgaggcggggcgatggggaagggccgaagccccgccagcccagctaaagcagacggctcgcactgcgacccgaagcgcgagtcatggctggggccttagtggcaacaagtgctgagatcagcgggctcagtagcaggaacacaagcacccccttgcggtgtctggaggaagcggcgcggacagtctcccgctccaccgtgtcgggcctgaagaggccgctgaacgctcgcgattactgaggcatctggtaggatcgcaaggccatcaacctacaggtgaagctcgaggcgctgtggcgctttgaagccggagagaagctcagtagaatcgggaaggcgctggggctgtccaactccaccttggccaccattcgtgacaacaaggaaaagatctgggcgagttcccaggaggccacactgcaggcggccaccaagttgacgcgtggccgcagcctggtgatggagaacatggagcagctgctgagcatgcggatggaggaccagagccagcgcaacatgcccctcagtgtggtgctcattcgggagaaagcccacagcccgttcgagaaccgcaagcaggagcagggcgagggcgcctagcccgagagcttcggggccggtcgagggtgattcgctggctttaaggcgcgccacagcttgagcagcatcggggccagcggcccaagaacgcagcgtgcaagaacccagcgttaatgcgcagggtgatcccggagggcggctacacactctggctggtgttcaccatgaataagctctggctggtgttcaccatgaataagcccaggttcctctgtaagcgcctgccgagaggacgttcattttcctgtggaagatgagtcggcccctgggtcaaagccgccggagacctcctgaccctattgctcggtggcaacgcagccggcgactttaagctgaaggccctgctggtgtacccctcggagaacccgtgtttcctcaagggctccttcaagcccaacctgcccttggtgtggtgctcgcacaagaaagcctgggtacagcctgggtgacagagcgagactccgtctcaaa

SEQ ID NO: 77493 - DNA, 1099 bp, Homo Sapiens
  misc_feature (156)..(164): n is a, c, g, or t
  misc_feature (397)..(397): n is a, c, g, or t
ctacgtttaggcacgacagcgccgttaagcaacacaaaatgaagggcgaggaatgatttggcgtacacactgggctgggaaaattctaaataggtaaccttcgggcttgcacctgggcgtcttcttcggagtccagatctgggaagtcctagaatnnnnnnnnntcacaagaggtgtgatcagttatacttcaggttactgccatgtggagagcatagcaggaacataaaaggagaaaatggaagtgttaggagagcaacagggtgaacaagacgtaatagagatgggaaaaagaagcacaaagacatagcaagacatttgatcttcagagagaaaatttcggacctaaaccgtgagtaaagcaaatcctgaggagcccttgcttgcctgtaaccangtgtgaggtcgtgagactgcaggaacatgttcgattcggtttatgcgtgcttggctaccattgcggggaaagagaaagctttaacatatttgtgagcctaaaccgttgctatttagtaagtggtataaaggttggttatattatctgctagccataaaccatcatttttttccttaaagtgttgtgaatgaaacgcagccaaactgtggccaaattcagagagaaaattcaattcttaagtatgtgttctggaagagtttcctcttagtatagtgcccagaatttcgattggtcattctttggtcattgttcatacttaagtaaggtggcttttgatgaaacggtatcatctgatggtcttttgaaagttaatgtgagacagctaatgtcaacccctcgtacatttaggaaaaccggttagagtggggaagagttccctttttttgtcagtggattgaacagttagatataggacctaccaaaaaacacttcttcaagccagttgtttgtgacattagagtattaagagtcaaaccatggtgatagacacagatttttgtggctgataaacaacatactcttcattcttattagtgctggtcctaacactagcagataaagtggaaattgctgtatgctgtaagacactctgtatatgtaagataaaatgaccatttgaagattaaaactcctgtgagactg

SEQ ID NO: 77494 - DNA, 687 bp, Homo Sapiens
  misc_feature (94)..(197): n is a, c, g, or t
  misc_feature (344)..(363): n is a, c, g, or t
tggaatagttgaggtggatggttctaccctttctgccttctgtttgggacccagctggtgttctttggtttgctttcttcaggctctagggctnnnnnnnnnnnnnnnnnnnnnnnnnnnnnnnnnnnnnnnnnnnnnnnnnnnnnnnnnnnnnnnnnnnnnnnnnnnnnnnnnnnnnnnnnnnnnnnnnnnnnnnnaggcgtcactgtatgtagttcatggctactgtactgacagcgagagcatgtccatctgttggacagcactattctagagaactaaactggcttaacgagtcacagcctcagctgtgctgggacgacccttgtctccctgggtaggannnnnnnnnnnnnnnnnnnnctgatgaggccccagctggggcctgttgtctgggaccctccctctcctgagaggggaggcctggtggcttagcctgggcaggtcgtgtctcctcctgaccccagtggctgcggtgaggggaaccaccctcccttgctgcaccagtggccattagctcccgtcaccactgcaacccagggtcccagctggctgggtcctcttctgcccccagtgcccttccccttgggctgtgttggagtgagcacctcctctgtaggcacctctcacactgttgtctgttactgattttttttgataaaaagataataaaacctggtactttct

SEQ ID NO: 77495 - DNA, 1382 bp, Homo Sapiens
  misc_feature (267)..(267): n is a, c, g, or t
  misc_feature (322)..(337): n is a, c, g, or t
  misc_feature (397)..(397): n is a, c, g, or t
  misc_feature (410)..(410): n is a, c, g, or t
  misc_feature (1007)..(1015): n is a, c, g, or t
  misc_feature (1091)..(1109): n is a, c, g, or t
  misc_feature (1154)..(1179): n is a, c, g, or t
acatttagaaacacacgtattttatttttaccaaaaaaatcaataccgacacctgttggaggtcccacagaggagtgctttcttcaacacaacacaagggaaagacaatggcgccagaagagaacccaccaattagaaccttgatatgcaatggtgacgagacataatgaccactagtgcaccaagggagggtggatcccctcaccacacccactggggtcagaggaagacacgacctgcacagaataagacaacagacctcgcctntcaggagagggagggtcccagacaacaggccccagctgggccttcatcagccctnnnnnnnnnnnnnnnntcctacccagagagacaagggtcgtcccagcacagctgagactgtgactccgttaagccnagtttagttctcntagaatagtgctgtccaaccagatggacatgctctcgctgtcagtacagtagccatgaaccacacacagtgacgcctctagaaacgtggttagtgcaactgaggaaggaatttttaatcttatgtgattttaattggcttaactttaaacagccgcatgtggttactgtatgggatagcacagccctagagcctgaagaaagcaaaccaaagaacaccagctgggtcccaaacagaaggcagaaagggtagaaccatccacctcaactattccagccccatcagaaggcaccaggaacagggcaagagaaaaaggcaaaaacccacccagccacatgaaaattcactcactcaaccacccagcaacatcaaactggaaacaccacactatttcctgaaaaaaatatatttatctatttttctagaaccaaggaagaataataatatattataagaacacagacacaaatatcccaccatccccttcattatattttgggatctgctaaaaacaacctatgtttcggcaaaagctattttataagaggaagcagcttcagaaagggccaaggccatgaggagcggggtttaaagtatnnnnnnnnnctggggaaggggtttaatgaaagagaacaaagaaagaagaggggaagggaggccctatctaaagctataaatagtnnnnnnnnnnnnnnnnnnngaattaataaaaatcatctctccggctcttctctcattttcaagnnnnnnnnnnnnnnnnnnnnnnnnnncattaaatacaaacttagcaggtgctgtggaaatgtgcgagagaatgaagacacctcggcacctccacactcttgcccaggcagagatatacactctgcacaaaggaatgaacagttaaaaaaacgaacaaacactaaaaatagatttacaaatattctataaatccatttcagcataaactctcagctcttttcaccatcct

SEQ ID NO: 77496 - DNA, 663 bp, Homo Sapiens
  misc_feature (66)..(169): n is a, c, g, or t
  misc_feature (313)..(330): n is a, c, g, or t
cctttctgcctctgttggggacccagctggtgttctttggtttgctttctcagggctctagggctnnnnnnnnnnnnnnnnnnnnnnnnnnnnnnnnnnnnnnnnnnnnnnnnnnnnnnnnnnnnnnnnnnnnnnnnnnnnnnnnnnnnnnnnnnnnnnnnnnnnnnnnaggcgtcactgtatgtagttcatggctactgtactgacagcgagagcatgtccatctgttggacagcactattctagagaactaaactggcttaacgagtcacagcctcagctgtgctgggacgacccttgtctccctgggtannnnnnnnnnnnnnnnnnagggctgatgaggccccagctggggcctgttgtctgggaccctccctctcctgagaggggaggcctggtggcttagcctgggcaggtcgtgtctcctcctgaccccagtggctgcggtgaggggaaccaccctcccttgctgcaccagtggccattagctcccgtcaccactgcaacccagggtcccagctggctgggtcctcttctgcccccagtgcccttccccttgggctgtgttggagtgagcacctcctctgtaggcacctctcacactgttgtctgttactgattttttttgataaaaagataataaaacctggtactttctaaaaa

SEQ ID NO: 77497 - DNA, 540 bp, Homo Sapiens
  misc_feature (75)..(75): n is a, c, g, or t
aatcacataagataaaactccttcctcagtgcactaaccacgtttctagatgcgtcactgtatgtagttcatgcntactgtactgacagcgagagcatgtccatatgttgcacagcactattatagagaactaaactcgcttaacgagtcacagcatcagctctcctgggacgacccttgtctccctaggtagggggggaggaatggggaagggctgatgaggccccagctggggcctgttgtctgggaccctccctctcatgagaggggaggcctggtagcttagcctgggcaggtcgtgtctcctcctgaccccagtggctgcggtgaggggaaccaccctcccttgctgcaccagtggccattagctcccgtcaccactgcaacccagggccccagctggctgggtcctcttctgcccccagtgcccttccccttgggctgtgttggagtgagcacctcctctgtaggcacctctcacacctgttgtctagttactgattttttttgataaaaagataataaaacctggtactttct

SEQ ID NO: 77498 - DNA, 611 bp, Homo Sapiens
  misc_feature (131)..(131): n is a, c, g, or t
tatgtctcgatcgttaaaccccgttcccagtttgttttttatactttaaaccccgctcctcagggcctgggccctttctgaagctggcttcctcttataaaatagctttggccgaaacatagttttttttnagcagatcccaaaatataatgaaggggatggggggatattggtgtcggtgttcttataatatattattattcttcctgggttctagaaaaatagataaatatatttttttcaggaaatagtgtggtgtttccagttggatgtggctgggtggttgagtgagtgaattttcatgtggcggggtgggttttggcctttttctctggcccggttccgggtgccttctgatggggcgggaatagtggagggggatggttctaccctttcggccttcggttggggacccagcgggtgtccttgggttggcttactacaggctctagggctgtgctatccaatacagtaaccacatgcggctgtttaaagttaagccaattaaaatcacataagattaaaaattccttcctcagtggcactaaccacgtttctagaggcgtcactgtgtgtggtcatggctagtgtataacgatcgagacataggg

SEQ ID NO: 77499 - DNA, 2271 bp, Homo Sapiens
  misc_feature (779)..(797): n is a, c, g, or t
  misc_feature (1239)..(1290): n is a, c, g, or t
tagtagagcctgggttaatcggcacgaggcccgtgtcctccgcgcaggcgggcggcccggagcgctggtgccggcagaggcggcgacggtggcgcccctcctcatcatgtcgtccctggggatgagcccaggagaagatggacttggtcacctactttggaaagagacccccaggcgtgctgcattgcacaaccaagttttgtgactacgggaaggctcccggggcagaggagtacgctcaacaagatgtgttaaagaaatcttactccaaggccttcacgctgaccatctctgccctctttgtgacacccaagacgactggggcccgggtggagttaagcgagcagcaactgcagttgtggccgagtgatgtggacaagctgtcacccactgacaacctgccgcgggggagccgcgcccacatcaccctcggctgtgcagctgacgtagaggccgtgcagacgggccttgacctcttagagattctgcggcaggagaaggggggcagccgaggcgaggaggtgggcgagctaagccggggcaagctctattccttgggcaatgggcgctggatgctgaccctggccaagaacatggaggtcagggccatcttcacgggatactacgggaaaggcaaacctgtgcccacgcaaggtagccggaaggggggcgccttgcagtcctgcaccatcatatgagtgttctcaccaccacttatgcccctagaagggaaggggagagggaaacgtgccctctgtttgatccttggtgtgtgacannnnnnnnnnnnnnnnnnnactcaaagttaacctacctgtaactttttaaaaacttgtaaaataactgaccctcccttcctgtccgccctcttcccctctaatgctcacgctcccaacacaaggtgggcagggaggcaccattcaggaacctggaccaaagctgacgaggctgggccaagccagggatggggccacagccagaaccccgagccctacttccaggttctggttagctcagccccagcccagcccagctgctctgcccagagctgggtgagtggggagacacctcagagccccgcaaaacccactgaccggaggcaaaaggcagtggggctgggggtagttttccatggtcacagagaactagtggtggctctgagaaggggaggacctctgggctttgattccatctccttgtcttttttctttgtttttagagacagggtcctgctatttnnnnnnnnnnnnnnnnnnnnnnnnnnnnnnnnnnnnnnnnnnnnnnnnnnnntgggctcaagcaatcctcctgagtgatcccatttcttaatcagtgtagccccaagaaggctggggctatttaccagggtagaaaaaggagcttacctcccacctttggtcctaagtccctgccccctccccttcacaccataactaggtaacagtttgataactagggaagaaagcagaacagttaagcagccgccacatccccgctggctgggggcctcactccaggaaggggctggactggctgtcctttccagtggcctggctccgctgtgtggatggggagatcggggccagaggcagaaccctggtgaggaagctccagtcctgctctctacccagcccatcttgcctccatggtgcctctggaggcctctgggcctcctctaacaggggctggtgggcaccaagagccaatggagtagacccctggctggtaagggccaagtcccaccggttgcttctgggaaggggtttctaacactagtctgtgtgctgtggttcctggggtgccctccactgccctctgttcagtaacagggccttgctaatcgggttgtcactcaacaaaagtgctttggatttaagttactatcctggctttgcccaacctcagcaacctgtaagactgataatgaaataaatcatgttaatcctaccaaaaaacccggcccccggtagacataaaaaatggcggggcggcctcgggccttccaagaaatctttcctaaacccatttcggtttgggccgccgcgggcccccattaagcgaaagcggaaccatggggccataagcggcgttccccaagggaggatccggggtcattggacaaagcgcggtgtgggactcctccccccaatcaccaagaactcccgccggggcggcgaccaccccggagccgttctctctcacctataatccctcccgagtgggtggagccgcgccgcgcggcgtttcgccccctaatcgcggcgcgatagc

SEQ ID NO: 77500 - DNA, 1229 bp, Homo Sapiens
  misc_feature (1176)..(1176): n is a, c, g, or t
ctcccgtgtcctccgcgcaggcgggcggccccggagcgctggtgccggcagaggcggcgacggtggcgcccctcctcatcatgaacagaggcttctcccgaaaaagccacacattcctgcccaagatcttcttccgcaagatgtcatcctcaggggccaaggacaagcctgagctgcagtttcccttccttcaggatgaggacacagtggccacgctgctagagtgcaagacgctcttcatcttgcgcggcctgccaggaagcggcaagtccacgctggcacgggtcatcgtggacaagtaccgtgatggcaccaagatggtgtcggctgacgcttacaagatcacccccggcgctcgaggagccttctccgaggagtacaagcggctcgatgaggacctggctgcctactgccgccgccgggacatcagaattcttgtgcttgatgacaccaaccacgaacgggaacggctggagcagctctttgaaatggccgaccagtaccagtaccaggtggtgctggtggagcccaagacggcgtggcggctggactgtgcccagctcaaggagaagaaccagtggcagctgtcggctgatgacctgaagaagctgaagcctgggctggagaaggacttcctgccgctctacttcggctggttcctgaccaagaagagctctgagaccctccgcaaagccggccaggtcttcctggaagagctggggaaccacaaggccttcaagaaggagctgcgacaattcgtccctggggatgagcccagggagaagatggacttggtcacctactttgggaaagagaccccaaggcgtgctgcatagcacacaccaagttttgtgactacgggaaggctcccggggcagaggagtacgctcaacaagatgtgttaaagaaatcttactccaaggccttcacgctgaccatctctgccctctttgtgacacccaagacgactggggcccgggtggagttaagcgagcagcaactgcagttgtggccgagtgatgtggacaagctgtcacccactgacaacctgccgcgggggagccgcgcccacatcaccctcggctgtgcagctgacgtagaggccgtgcagacgggccttgacctcttagagattctgcggcaggagaggggggcagccgaaggcgaggaggtggngcgagctaagcccggggcaagctctattccttggggcaatggggcgctggatg

SEQ ID NO: 77501 - DNA, 709 bp, Homo Sapiens
  misc_feature (47)..(47): n is a, c, g, or t
  misc_feature (208)..(208): n is a, c, g, or t
gcgtgcagagcccactgggcacggtggtcggcctggtgtgaggcccnccggggaccggcagtgtgtccagggaggggatggccctgagcccagcggctcctcccgctgagtgtaattcttcccaccactcagcgcatggctgcactggctcacgaggcaatcgggactcatgacttgctggctgctggctgctgctgacctcgcgcgnctggggttccactggaggaactgggcctgccgccccggcctcacctgctgcccgcatgctggggtcccatggaggaaccaggcctggcgccccggcctcgcccagcggctggtgtgggcagctgttccctgcctcgcagtgtcctggaggcagctgtctcgcagactcagcttggtctcccgcaggcttcagaaaaacccaattgcacgtgtgggattcttccccagcccttgggtgcggggtctctgtgcacttgagagctgggggacccacccaccgtctcccactccaagttcatcccagagcgtggggcccgctgggcacctggcacctggcctgcagatgctgctacgagtgaccagtgctgtgtggaggaggccaagggcggcccctgggaaaccgggcttcaacagtacaaggaaaagaaacttgctctgttttgtaagagcgtgttccttttcctcttttttgtcactttaaagaccaaaaagaataaagaaa

SEQ ID NO: 77502 - DNA, 906 bp, Homo Sapiens
  misc_feature (29)..(29): n is a, c, g, or t
  misc_feature (244)..(244): n is a, c, g, or t
  misc_feature (665)..(741): n is a, c, g, or t
  misc_feature (745)..(746): n is a, c, g, or t
  misc_feature (748)..(773): n is a, c, g, or t
ttaaccccttcttggaattggctctcttnttcaaaggaccaggtcctgttcctctttctccccgactccaccccagctccctgtgaagagagagttaatatatttgttttatttatttgctttttgtgttgggatgggttcgtgtccagtcccgggggtctgatatggccatcacaggctgggtgttcccagcagccctggcttgggggcttgacgcccttccccttgccccaggccatcatcnttccccacctctcctcccctctcctcagttttgccgactgcttttcatctgagtcaccatttactccaagcatgtattccagacttgtcactgactttccttctggagcaggtggctagaaaaagaggctgtgggcaggaaagaaaggctcctgtttctcatttgtgaggccagcctctggcttttctgccgtggattctccccctgtcttctcccctcagcaattcctgcaaagggttaaaaatttaactggtttttactactgatgacttgatttaaaaaaaatacaaagatgctggatgctaacttgatactaaccatcagattgtacagtttggttgttgctgtaaatatggtagcgttttgttgttgttgttttttcatgccccatactactgaataaactagttctgtgcgggtnnnnnnnnnnnnnnnnnnnnnnnnnnnnnnnnnnnnnnnnnnnnnnnnnnnnnnnnnnnnnnnnnnnnnnnnnnnnnggannannnnnnnnnnnnnnnnnnnnnnnnnntttgggggccgccctcggccttaaaaaatttttctaaacctttctttgggcgcgcggccccagaaggaaagggaaactgggcataactgtttccaaggaaaccctggccaagaaaaagggtttggattccccc

SEQ ID NO: 77503 - DNA, 658 bp, Homo Sapiens
aggccctgaatgtctttgccaatgactatgacacagaggatggcacaggtgtccgggattacatccatgtcgtgaatctggccaagggccacattgcagccttaaggaagctgaaagaacagtgtggctgccggatcccgtacaaggtggtggcacggcgggaaggtgatgtggcagcctgttacgccaaccccagcctggcccaagaggagctggggtggacagcagccttagggctggacaggatgtgtgaggatctctggcgctggcagaagcagaatccttcaggctttggcacgcaagcctgaggaccctcccctaccaaggaccaggaaaagcagcagctgcctgctctccagcctctggcaggaactcagggccctggagctgctggggccaagccaaggcctcccctacctcaaaccccagctgggcccgcttagcccaccaggcatgaggccaagggctccactgaccaggaggccgaggtctctaactcttatcttccacagggtccaagagttcatcaggacccccaagagtgagtgagggggcaaggctctggcacaaaacctcctcctcccaggcactcatttatattgctctgaaagagctttccaaagtatttaaaaataaaaacaagttttcttacactggg

SEQ ID NO: 77504 - DNA, 1402 bp, Homo Sapiens
ggaccggtccggaattcccgggatatcgtcgacccacgcgtccgcccgagcaggactctccagtcctcagtcaccttggacaaagaagtgtggatcctcagattccatcttttccaactccaaggagggggctccctgcctgagagcctgcggcgggtccaggagctgacaggccgctctgtggagtttgaggagatggacattttggaccagggagccctacagcgtctcttcaaaaagtacagctttatggcggtcatccactttgcggggctcaaggccgtgggcgagtcggtgcagaagcctctggattattacagagttaacctgaccgggaccatccagcttctggagatcatgaaggcccacggggtgaagaacctggtgttcagcagctcagccactgtgtacgggaacccccagcacctgccccttgatgaggcccaccccacgggtggttgtaccaacccttacggcaagtccaagttcttcatcgaggaaatgatccgggacctgtgccaggcagacaagacttggaacgcagtgctgctgcgctatttcaaccccacaggtgcccatgcctctggctgcattggtgaggatccccagggcatacccaacaacctcatgccttatgtctcccaggtggcgatcgggcgacgggaggccctgaatgtctttggcaatgactatgacacagaggatggcacaggtgtccgggattacatccatgtcgtggatctggccaagggccacattgcagccttaaggaagctgaaagaacagtgtggctgccggatctacaacctgggcacgggcacaggctattcagtgctgcagatggtccaggctatggagaaggcctctgggaagaagatcccgtacaaggtggtggcacggcgggaaggtgatgtggcagcctgttacgccaaccccagcctggcccaagaggagctggggtggacagcagccttagggctggacaggatgtgtgaggatctctggcgctggcagaagcagaatccttcaggctttggcacgcaagcctgaggaccctcccctaccaaggaccaggaaaagcagcagctgcctgctctccagcctctggcaggaactcagggccctggagctgctggggccaagccaaggcctcccctacctcaaaccccagctgggcccgcttagcccaccaggcatgaggccaagggctccactgaccaggaggccgaggtctctaactcttatcttccacagggtccaagagttcatcaggacccccaagagtgagtgagggggcaaggctctggcacaaaacctcctcctcccaggcactcatttatattgctctgaaagagctttccaaagtatttaaaaataaaaacaagttttcttacactggaaa

SEQ ID NO: 77505 - DNA, 852 bp, Homo Sapiens
taggaggcggtgcctctgcagcaagcgtggggcgcgggaacccgagcaggactctccagtcctcagtcaccttggacaaagaagtgtggatcctcagattccatcttttccaactccaaggtgccatggcagagaaggtgctggtaacaggtggggctggctacattggcagccacacggtgctggagctgctggaggctggctacttgcctgtggtcatcgataacttccataatgccttccgtggagggggctccctgcctgagagcctgcggcgggtccaggagctgacaggccgctctgtggagtttgaggagatggacattttggaccagggagccctacagcgtctcttcaaaaagtacagctttatggcggtcatccactttgcggggctcaaggccgtgggcgagtcggtgcagaagcctctggattattacagagttaacctgaccgggaccatccagcttctggagatcatgaaggcccacggggtgaagaacctggtgttcagcagctcagccactgtgtacgggaacccccagtacctgccccttgatgaggcccaccccacgggtggttgtaccaacccttacggcaagtccaagttcttcatcgaggaaatgatccgggacctgtgccaggcagacaagacttggaacgcagtgctgctgcgctatttcaaccccacaggtgcccatgcctctggctgcattggtgaggatccccagggcatacccaacaacctcatgccttatgtctcccaggtggcgatcgggcgacgggaggcctgaatgtctttggcaatgactatgacacaagaggatggcacaggtgtccgggattacatcc

SEQ ID NO: 77506 - DNA, 1465 bp, Homo Sapiens
  misc_feature (38)..(38): n is a, c, g, or t
  misc_feature (42)..(80): n is a, c, g, or t
  misc_feature (83)..(117): n is a, c, g, or t
agatgatacgatcactatagggcgctagcgtcggtagntagnnnnnnnnnnnnnnnnnnnnnnnnnnnnnnnnnnnnnnncgnnnnnnnnnnnnnnnnnnnnnnnnnnnnnnnnnnncagtcgacggtaccggacatatgcccgggaattcggccattacggccgggggatttgagtgagctccccaagtttgagaaaaatttttatgtggaacatccggaagtagcaaggctgacaccatatgaggttgatgagctacgccgaaagaaggagattacagtgagggggggagatgttgtcctaaacccgtgtttgccttccatcatgctaacttcccacaatatgtaatggatgtgttgatggatcagcactttacagaaccaactccaattcagtgccagggatttccgttggctcttagtggccgggatatggtgggcattgctcagactggctctgggaagacgttggcgtatctcctgcctgcaattgttcatattaaccaccagccatacttggaaaggggagatggcccaatctgtctagttctggctcctaccagagagcttgcccagcaagtacagcaggtggccgatgactatggcaaatgttctagattgaagagtacttgtatttatggaggtgctcctaaaggtccccagattcgagacttggaaagaggtgttgagatctgcatagccactcctggacgtctgatagatttcctggagtcaggaaagacaaatcttcgccgatgtacttaccttgtattggacgaagctgacagaatgcttgatatggggtttgaaccccagatccgtaaaattgttgaccaaatcaggcctgataggcagacactgatgtggagtgcaacctggccaaaagaagtaagacagcttgcagaggatttccttcgtgattacacccagatcaacgtaggcaatctggagttgagtgccaaccacaacatcctccagatagtggatgtctgcatggaaagtgaaaaagaccacaagttgatccaactaatggaagaaataatggctgaaaaggaaaacaaaacaataatatttgtggagacaaagagacgctgtgatgatctgactcgaaggatgcgcagagatggttggccagctatgtgtatccatggagacaagagtcaaccagaaagagattgggtacttaatgagttccgttctggaaaggcacccatccttattgctacagatgtagcctcccgtgggctaggtttgtatagataggtgtctctgtcaatggtatatgtatcttttggtttaaagattcgtcatttcaaattcagacttcaagtttagaaagttgtatatacatgtggttagataaatatttgaaagaaaaaaatacaaagcgtgattctccccattccctgcccccctcccctccctttttgtataatttaataaagaaatggtcgcgcttctgtttt

SEQ ID NO: 77507 - DNA, 779 bp, Homo Sapiens
  misc_feature (505)..(555): n is a, c, g, or t
tttaaaatatagaagttctgagttagacctgtttagctcagaatagtgggctaaactaccataaaattctctgtatatcttaaatggtaatgggtcaaaaactccagaaaatcatcagttgataacacacctacagataagtgcatgggtaggaggggatagccaagtgcccatgataatttgacctcagtaaattaaactgggcaatacacatatttgctattctgatactgcattagacttataaaattccatctaataagcattcataaaactggacctctctgtatatatctagcttagacagggatagggaaaagaataactgaagaaactagcttacaatagctaggtttcgtcaggcttattctatccagccagaaaccaccaccagagagaagctgagccattcagctgtctgtctcctctccctctgtttgaatagtcatgcctaggccttgctgcagaccaaagcctgtttgttaggagcaggaagagactttgnnnnnnnnnnnnnnnnnnnnnnnnnnnnnnnnnnnnnnnnnnnnnnnnnnngcagggaatggggagaatcacgctttgtatttttttctttcaaatatttatctaaccacatgtatatacaactttctaaacttgaagtctgaatttgaaatgacgaatctttaaaccaaaagatacatataccattgacagagacacctatctatacaaacctagcccacgggaggctacatctgtagcaataaggatgggtgcctttccagaacggaactctg

SEQ ID NO: 77508 - DNA, 1540 bp, Homo Sapiens
  misc_feature (201)..(211): n is a, c, g, or t
  misc_feature (1279)..(1279): n is a, c, g, or t
tgtctcgagtttttaacttggatacctgctattctgccaaaagacaatttctagagtagttttgaatgggttgatttcccccactcccacaaactctgaagccagtgtctagcttactaaaaaaagagttgtatataatatttaagatgctgagtatttcataggaaagctgaatgctgctgtaaagtgctctttaagtcnnnnnnnnnnnaatccccttctaatgaatgaaactaggggaatttcaggggacagagatgggatttgttgtatgataaactgtatgtagtttttagtctttctgttttgagaagcagtggttggggcatttttaagatggctggctactcttgttttccctcatgataataaatttgtcataactcagtaacatgaacttgcccctagaggtagttgttaataattttgaaatattaaggtcttgccaagcttctgatgattcacacctgtactactgattattaagcaggacagactgagctttctgttgcaaataccttggaggagaaagtaatttctaaatatacagagaggtaacttgactatatatgttgcatcctgtgcctcccttcatattaatatttgataaagattttaatttatgtaaaacttctaaagcagaatcaaagctcctcttggggaaatggcaagtctttaggataggcaagaccctgtatgaatagtaccaaagcattaccgcatggtagagaacacactcgattaaaaatgttaagctatctgaaaaataaaatgtgcaagtcttcaggatggcacaaaacaaaggttaatgcttcttggggcacatttcttagagggcttgctgagtgtgtaaatataatcgacttttgtttgtgttacatgacttctgtgacttcattgaaaatctgcacaattcagtttcagctctggattacttcagttgacctttgtgaaggtttttatctgtgtagaatgggtgtttgacttgttttagcctattaaatttttattttctttcactctgtattaaaagtaaaacttactaaaagaaaagaggtttgtgttcacattaaatggttttggtttggcttcttttagtcaggctttctgaacattcatgaaaagcctctcacttgaacccaaaccagagtactcttactgcctcttttctaaatgttcaggaaaagcattgccagttcagtcttttcaaaatgagggagaaacatttgcctgccttgtaataacaagactcagtgcttattttttaaactgcattttnaaaattggatagtataataacaataaggagtaagccaccttttataagcaccctgtagttttatagttcttaatctaacattttatatttccttcttttggaaaaacctacatgctacaagcccacatatgcacagactatacagtgagttgagtttggctctcccacagtcttttgagtgaatttaccaaagtcagccattatcatccctcctgagttatttgaaatgaattttttttgtacattttggctggcgaatgg

SEQ ID NO: 77509 - DNA, 1378 bp, Homo Sapiens
  misc_feature (80)..(114): n is a, c, g, or t
tacgatacgatcactatagggcggctagctctttgcagcgaacgacgagcgcagcgagtagtgagcgaggaagcggccgnnnnnnnnnnnnnnnnnnnnnnnnnnnnnnnnnnncagtcgacggtaccggacatatgcccgggaattcggccattacggccggggtcttcaggatggcacaaaacaaaggttaatgcttcttggggcacatttcttagaagggcttgctgagtgtgtaaatataatcgacttttgtttgtgttacatgacttctgtgacttcattgaaaatctgcacaattcagtttcagctctggattacttcagttgacctttgtgaaggtttttatctgtgtagaatgggtgtttgacttgttttagcctattaaatttttattttctttcactctgtattaaaagtaaaacttactaaaagaaaagaggtttgtgttcacattaaatggttttggtttggcttcttttagtcaggctttctgaacattgagatatcctgaacttagagctcttcaatcctaagattttcatgaaaagcctctcacttgaacccaaaccagagtactcttactgcctcttttctaaatgttcaggaaaagcattgccagttcagtcttttcaaaatgagggagaaacatttgcctgccttgtaataacaagactcagtgcttattttttaaactgcattttaaaaattggatagtataataacaataaggagtaagccaccttttataggcaccctgtagttttatagttcttaatctaaacattttatatttccttcttttggaaaaaacctacatgctacaagccaccatatgcacagactatacagtgagttgagttggctctcccacagtctttgaggtgaattacaaaagtccagccattatcatcctcctgagttatttgaaatgattttttttgtacattttggctgcagtattggtggtagaatatactataatatggatcatctctacttctgtatttatttatttattactagacctcaaccacagtcttctttttccccttccacctctctttgcctgtaggatgtactgtatgtagtcatgcactttgtattaatatattagaaatctacagatctgttttgtactttttatactgttggatacttataatcaaaacttttactagggtattgaataaatctagtcttactagaaaataaaaggagctgttttgtggctttgtttgacaggtcctcagtaagaataatgcttttggctttcacatatacccaggttaagtgcttcgtattaataacaagccatgaagggaataaattcctacccactgcgacatcgaccttggcccaaaagacattttaactg

SEQ ID NO: 77510 - DNA, 756 bp, Homo Sapiens
  misc_feature (598)..(615): n is a, c, g, or t
gggttcttagtcgtgtgtacatcattgggaatggagggaaataaatgactggatggtcgctgctttttaagtttcaaattgacattccagacaagcggtgcctgagcccgtgcctgtcttcagatcttcacagcacagttcctgggaaggtggagccaccagcctctccctgaataactgggagatgaaacaggaagctctatgacacacttgatcgaatatgacagacaccgaaaatcacgactcatccccctccagcacctctacctgttgcccgccgatcacagccggaatgcagctgaaagattccctggggcctggttccaaccgcccactgtggactctgaggcctctgcatttgcgggtggtctgcctgtgatattttggtcatgggctggtctggtcggtttcccatttgtctggccagtctctgtgtgtcttaatcccttgtccttcattaaaagcaaaactaaagaaaaccgaacacaaactcaagaaacattaacacaaagcaacaatatgcacaacgggaccatgctgcaagaagataaacaccccccgtacgaaacatcaacaataacaatattttttttgtggnnnnnnnnnnnnnnnnnnaaaaaaatttttcaaaacatttccttttggaccccccgggcccccctaagggaaaagggaaaagtgggccctatagcttttttcccacagaaaaaaccccggggccaggaaaaaaaggggggtgggaaatcccccacccac

SEQ ID NO: 77511 - DNA, 1831 bp, Homo Sapiens
  misc_feature (1482)..(1550): n is a, c, g, or t
  misc_feature (1552)..(1554): n is a, c, g, or t
  misc_feature (1556)..(1558): n is a, c, g, or t
  misc_feature (1560)..(1564): n is a, c, g, or t
  misc_feature (1567)..(1569): n is a, c, g, or t
  misc_feature (1579)..(1595): n is a, c, g, or t
  misc_feature (1602)..(1602): n is a, c, g, or t
  misc_feature (1609)..(1609): n is a, c, g, or t
  misc_feature (1660)..(1660): n is a, c, g, or t
  misc_feature (1696)..(1704): n is a, c, g, or t
ggcagtaactataacggttctaaggtagcgaggcctgggtggcgaattcggcacgaggaccacaccgacctcttcgagcaccccccgagaaaatgccagtgtcccggaactgctggctccaatcaaggtggagccggactcgccttctcgcccaggagcagttgggcagcaggaaggaagccatgggctgccccagtccacgttgcccagtccagcagagcagcacggtgcccaggacacagagctcagtgcaggcactggcaacttctatttggaaagtgggggctcagcaagaactgattaccgagccattcaactagccaaggaaaaaaagcagagaggagcggggagcaatgcaggagcctcacagtctactcagagaaaaataaaagaaggcaaaatgagtcctccccatttccatgcaagccagaacagttggttgtgtgggagcctcgtggtgcccagcggaggacggccaggaccagctccagcagctggggtgcagtgcggggcgcagggcgtccaggtccagctggtgcaggatgacccctccggcgaaggtgtcctgccctcggcccgcggccagccaccttcctccccttcctcactgtggacctgcccgtctacgtcctccaggaggtgctcccctcatctggaggccctgctggaccggaggccacccagttcccaggaagcactatcaacctgcaggatctgcagtgacggcagcctcggcctgggcaggccaaggccacggtctaggacacaccttccctgagactcatgacatgagcctggggagacctcatttggtttccgttcagaagaccagcgtagcccttttgagacttttgggtacatttatcaaaaatgttttccttttgttttaccaggaatgagttcgggctatactctttgaaactgcctttgtgagcaaagtgctttggcaaggcaagggtctccctcagcagggctaggtgcactacagcctctttccccgtgtcccgttggatctgagctgtgtagcacttgttgcattacaaagaaaaagacttctgcaggaaatagggtagagaacaggctgtctagtcagatgcagcttgatctgtggcaaaaccaagtgtggtctttcagcttcagtgtgttagcatcccagcacctgggatggggtttgtgggcaagttgattttgccacactgtagggcccaggtggtcccattgccaccgtgaagccaaattctagcccaagtctggtagagcagtcgggcagctagttttccggggaggatgatgtggtgggacagaggacctcagtggcctattacggagccctcttcccagactaaattcatagccgagagctcggggggatggtagagttaaaatttaaaataattttctaaattctgtatttggatattagtgtttaagtggtaatttggcaacagtttataaagtgatgttctgaataccataaaaaannnnnnnnnnnnnnnnnnnnnnnnnnnnnnnnnnnnnnnnnnnnnnnnnnnnnnnnnnnnnnnnnnnnnannnannnannnnnaannnaacaaccacnnnnnnnnnnnnnnnnnaattttntatttgncccccgggcccccaaacgtgtttccataaattggccccccttttgttcccntccggtggtgggggggccctcgccccctatgtagannnnnnnnnaaccccacatcggtgtgtcggggggcgccccccccgcgggcttccttgaacaccactgcaaacgtgtctgctcctgtaacaaaaataactccgttttcttacaaacacgggggtttaattcctaaac

SEQ ID NO: 77512 - DNA, 749 bp, Homo Sapiens
agcgaggagtccggcctgcaggcatggtgtgtatagcatcctcaaggacaccaaaatccacgtgtaaggagaagatggtgtcaatgccccaaaacacgtacggggagtccaagggccgggtgaggaagggtatgccctcccgtgagcacagagactctccatgggagggggagcagtattctcctggatccctggggcctgggtgggctgggggacagctgaggatgggcctagcagatgaagcttgccagcaaggccaaagcaaacggtttctcctgtggatagtggacagagacctttgtaaccaatggaattattcatttttctctatcttttattttttcaaagatattatttgactctatcaaaagtctctcctttttaaaccttttcttatggatggctgtcaatcccgaggcagaagttttcaggtggagaccaagcggcctttgctcttcttccttcttcctgccacactctgctttcttcctgccatggacccctggaggagacctatggagggacagttttgacctgacccctagaggagacagttttgacctcttcagcaccaggaaggaagctctgaggatggttgcagtgaggaagcatgggtctttaaggacttctctctcttttttgctggacattattgagtttgtgggaccctgcctcttcctgctacctgtgggtctgcccagagtccctgcaggcctgtccatgcattaaaaattcctattgtctatcaa

SEQ ID NO: 77513 - DNA, 2327 bp, Homo Sapiens
  misc_feature (1129)..(1129): n is a, c, g, or t
  misc_feature (2208)..(2262): n is a, c, g, or t
gctggtaccggtccggaattcccgggatatcgtcgacccacgcgtccggcaccaggtcctgctagaggaccctgagcaggagggcagtgcagaggaagaggaactgggtgtcctgccttgcccttccacatccctggatggagagaacaggggcatcaggacaaggaaccccatccacttggccttcccaggccctctgttcatggaagggctcgctgactccgctctggaagatgtggagaacctgcgacatctgatcctgtggagcctgctgccaggtcacaccatggaaactcaggctgcccaggagcccgaggacgacctgacacccacaccttctgtcatcagcgtcacctctcacccctgggacccaggctccccagggcaagcaccccctgggggtgaaggggacaacacccagcttgcagggctggagggggaacggccagagcaggaagacatgggtctctgttctctggaacacctacccccaaggaccagaaattctgggatatgggagtctccagaactggacaggaatctggctgaagatgcttcaagcacagaggcagcaggaggttacaaagttgtgagaaaagctgaggtggcaggcagcaaggttgtccctgcactaccagagagtggccagtcagagcctgggccacctgaagtggaaggcggaacaaaggctacggggaactgcttttatgtcagcatgccatcaggacccccggactcaagcaccgaccactcagaggcacccatgagcccccctcagcctgacagcctccctgcagggcagacagagcctcagcctcagctgcagggaggcaacgatgatccaagacgccccagccgctctcctccaagcctggccctcagggacgtggggcaggatcttccataccattgagcagctcactctcaagctcaacaggctcaaggatatggagctggcccacagagagctgctcaagtcccttgggggagagtcatctggtggcaccacgcctgtgggcagtttccacacagaatgcagctagatggacagatggctccctctcacctcccgctaaggagcccctagcttctgactccaggaacagccatgaactggggccctgccctngaggatggctctgacgcccccctgtgaagacagcacagcagacgcagccgcgtcacccaggaccataaccggtacaaaccaaccaaatcctctgcgtccccactcctccttcagggactggcctgagaccggggcacagggtaggggggatcccaacactcctccctgtggaggaggcagttagggaaactaggatccagccaaggcccggggggagacccgcatgttgcttggtctgctcaagtcggagtcaggtttcagtgtcttttccctcccttagcccaaccctccaaggcctcatgtctcctaagcatgctgactgcatccgaaaggcccccactcaccatggtctgccctcaccccacatatgtgtgtacacgcgcacgcctgtatgtgcgctgccctcagacatgcaagtgaaaggaggaggcttctgtgtaaatgcactttcttcctcccctctttctccataagaccccaggcagaggtgggtgcctcccctcccctctttgtcactttggtttcctataaatatgtatgtatcgtatgtgcatctttgctattgtaaataactttgaccttttttgttcctgttcctgaagtgctggaggcagttatggaaggagctgcttagggaagaggggtttcacttgtatctccttagttaacaacccagttccaggatcgagcctaaagcgggagccaggcctgagtgttcctgtccctgtgagtgggaaggtcttctggctccccatcccacctggctccagagcctgccctccacagcttgctgccaagctactccctccctccctggacttctcatcttcacaagatggggatcatgggggtttcttaccccacctatgtccccctcttccccaccctgtccctgtagaaaaccagtgaagcaggtacggagctgaggactgggccccaggaggtggggacaggggtctgaatgccgagtccctgaattcacccaggaccatccaaggggccaccgcagcattggccccatcaccacgtcctcacccaactctccctgatgaatagaatatacacactgtgctaggtgnnnnnnnnnnnnnnnnnnnnnnnnnnnnnnnnnnnnnnnnnnnnnnnnnnnnnnnggaaatgactgttctgctgttaagataatgtatactcttttattttcttcctttcatggttaaga

SEQ ID NO: 77514 - DNA, 1363 bp, Homo Sapiens
  misc_feature (1216)..(1222): n is a, c, g, or t
  misc_feature (1224)..(1225): n is a, c, g, or t
  misc_feature (1227)..(1231): n is a, c, g, or t
  misc_feature (1234)..(1234): n is a, c, g, or t
  misc_feature (1240)..(1240): n is a, c, g, or t
gcagtactctacggtttaaggtagcgaggctgggtggcgaattcggcacgagggcgccgtggttggaaggtcgtccctgtgaccggcttggcggttggagcggctgtcgccatgttgtcggtagcagcccgctcgggcccgttcgcgcccgtcctgtcggccacgtcccgcggggtggcgggcgcgctgcggcccttggtgcaggccacggtgcccgccaccccggagcagcctgtgttggacctgaagcggcccttcctcagccgggagtcgctgagcggccaggccgtgcgccggcctttggtcgcctccgtgggcctcaatgtccctgcttctgtttgttattcccacacagacatcaaggtgcctgacttctctgaataccgccgccttgaagttttagatagtacgaagtcttcaagagaaagcagcgaggctaggaaaggtttctcctatttggtaactggagtaactactgtgggtgtcgcatatgctgccaagaatgccgtcacccagttcgtttccagcatgagtgcttctgctgatgtgttggccctggcgaaaatcgaaatcaagttatccgatattccagaaggcaagaacatggctttcaaatggagaggcaaacccctgtttgtgcgtcatagaacccagaaggaaattgagcaggaagctgcagttgaattatcacagttgagggacccacagcatgatctagatcgagtaaagaaacctgaatgggttatcctgataggtgtttgcactcatcttggctgtgtacccattgcaaatgcaggagattttggtggttattactgcccttgccatgggtcacactatgatgcatctggcaggatcagattgggtcctgctcctctcaaccttgaagtccccacgtatgagttcaccagtgacgatatggtgattgttggttaagagacttggactcaagtcataggcttctttcagtctttatgtcacctcaggagacttatttgagaggaagccttctgtacttgaagttgatttgaaatatgtaagaattgatgatgtatttgcaaacattaatgtgaaataaattgaatttaatgttgaatactttcaggcattcacttaataaagacactgttaagcactgttatgctcagtcatacacgcgaaaggtacaatgtcttttagctaattctaattaaaaattacagactggtgtacgaannnnnnnannannnnnaanaaaaanaaaacatgttcgggccgccctcggcccctcgaagaagctttctcaagaccatttcgtttttggcggccgcgcgggcccccgtaaggggtaaggtggaaacatgggccccattaagctggtttt

SEQ ID NO: 77515 - DNA, 1526 bp, Homo Sapiens
accggccagtactactaacggttctaaggtagcgaggcctggcgtggcgaattcggcacgaggcgccgaccaagatggagactgccgagcagccttgagccgttgagcagctgaacagaggccatgccggggcactccgaggcctgagacgaccacgcctgtgccgctgaggaccttcatcagggctccgtccacttggcccgcttggctgtccaatcacactccagtgtcaaccactggcacccagcagccaagagaggtgtggcgtggccctggggacgcatggctgaggcaggaacaggtgagccgtcccccagcgtggagggcgaacacgggacggagtatgacacgctgccttccgacacagtctccctcagtgactcggactctgacctcagcttgcccggtggtgctgaagtggaagcactgtccccgatggggctgcctggggaggaggattcaggtcctgatgagccgccctcacccccgtcaggcctcctcccagccacggtgcagccattccatctgagaggcatgagctccaccttctcccagcgcagccgtgacatctttgactgcctggagggggcggccagacgggctccatcctctgtggcccacaccagcatgagtgacaacggaggcttcaagcggcccctagcgccctcaggccggtctccagtggaaggcctgggcagggcccatcggagccctgcctcaccaagggtgcctccggtccccgactacgtggcacaccccgagcgctggaccaagtacagcctggaagatgtgaccgaggtcagcgagcagagcaatcaggccaccgccctggccttcctgggctcccagagcctggctgcccccactgactgcgtgtcctccttcaaccaggatccctccagctgtggggaggggagggtcatcttcaccaaaccagtccgaggggtcgaagccagacacgagaggaagagggtcctggggaaggtgggagagccaggcaggggcggccttgggaatcctgccacagacaggggcgagggccctgtggagctggcccatctggccgggcccgggagcccagaggctgaggagtggggcagcccccatggaggcctgcaggaggtggaggcactgtcagggtctgtccacagtgggtctgtgccaggtctcccgccggtggaaactgttggcttccatggcagcaggaagcggagtcgagaccacttccggaacaagagcagcagccccgaggacccaggtgctgaggtctgagagggagatggcccagcctgaccccactggccactgccatcctgctgccttcccagtggggctggtcagggggcagcctggccactgcctagctggaatgggaggaagcctgcaggtggcaccggtggccctggctgcagttctgggcagcatcctcccaagcagagaccttgctgaagctcctggggtgtggggtgtgggctggaagcactggctccctggtagggacaataaaggttttgggtctttctgag

SEQ ID NO: 77516 - DNA, 865 bp, Homo Sapiens
cgaagccaggctccagctccagcctctcccttcgggaaaggtggacagtgttcaagggtctgctgtggtacattgttcccttggtcgtagtttactttgccgagtatttcattaaccaggacttgtaagtgaggggtgctaggaggggtgtggaggtggcgattggggctgggacccacacagccccgtccatctcccctgtctggtatttgttgcagtttgaactcctctttttctggaacacttccctgagtcacgctcagcaataccgctggtaccagatgctgtaccaggctggcgtctttgcctcccgctcttctctccgctgctgtcgcatccgtttcacctgggccctggccctgctgcagtgcctcaacctggtgttcctgctggcagacgtgtggttcggctttctgccaagcatctacctcgtcttcctgatcattctgtatgaggggctcctgggaggcgcagcctacgtgaacaccttccacaacatcgccctggagaccagtgatgagcaccgggagtttgcaatggcggccacctgcatctctgacacactggggatctccctgtcggggctcctggctttgcctctgcatgacttcctctgccagctctcctgatactcgggatcctcaggacgcaggtcacattcacctgtgggcagagggacaggtcagacacccaggcccaccccagagaccctccatgaactgtgctcccagccttcccggcaggtctgggagtagggaagggctgaagccttgtttcccttgcaggggggccagccattgtctcccacttggggagtttcttcctggcatcatgccttctgaataaatgccgattttaacccttg

SEQ ID NO: 77517 - DNA, 1850 bp, Homo Sapiens
  misc_feature (963)..(963): n is a, c, g, or t
  misc_feature (999)..(999): n is a, c, g, or t
  misc_feature (1007)..(1007): n is a, c, g, or t
gaggcctgggtggcgaattcggcacgaggcagggtccctgctgtagacggggcgggggagagtacgatgggtggggcgtggtgggtcgtagggcgctcgagatggagcccccagcttccttgatggatcgcggggcgcgagtgccctagacaagccggagctgggaccggcaatcgggcgttgatccttgtcacctgtcgcagaccctcatccctcccgtgggagccccctttggacactctatgaccctggaccctcgggggacctgaacttgatgcgatgggaggctgtgcaggctcgcggcggcgcttttcggattccgagggggaggagaccgtcccggagccccggctccctctgttggaccatcagggcgcgcattggaagaacgcggtgggcttctggctgctgggcctttgcaacaacttctcttatgtggtgatgctgagtgccgcccacgacatccttagccacaagaggacatcgggaaaccagagccatgtggacccaggcccaacgccgatcccccacaacagctcatcacgatttgactgcaactctgtctctacggctgctgtgctcctggcggacatcctccccacactcgtcatcaaattgttggctcctcttggccttcacctgctgccctacagcccccgggttctcgtcagtgggatttgtgctgctggaagcttcgtcctggttgccttttctcattctgtggggaccagcctgtggtggtgtggtcttcgctagcatctcatcaggcccttggggaggtcaccttcctctccctcactgccttctaccccagggccgtgaatctcctggtggtcctcagggactgggggaagctggggcttgctgggggccctgtcctacctgggcctcacccaggccggcctctcccctcagcagaccctgctgtccatgctgggtatccctgccctgctgctggccagnctatttcttgttgctcacatctcctgaggcccaggnaccctggnagggggaagaagaagcagagagcgcagccccggcagcccctcataagaaccgaggccccgggagtcgaagccaggctccagctccagcctctcccttcgggaaaggtggacagtgttcaagggtctgctgtggtacattgttcccttggtcgtagtttactttgccgagtatttcattaaccagggactttttgaactcctctttttctggaacacttccctgagtcacgctcagcaataccgctggtaccagatgctgtaccaggctggcgtctttgcctcccgctcttctctccgctgctgtcgcatccgtttcacctgggccctggccctgctgcagtgcctcaacctggtgttcctgctggcagacgtgtggttcggctttctgccaagcatctacctcgtcttcctgatcattctgtatgaggggctcctgggaggcgcagcctacgtgaacaccttccacaacatcgccctggagaccagtgatgagcaccgggagtttgcaatggcggccacctgcatctctgacacactggggatctccctgtcggggctcctggctttgcctctgcatgacttcctctgccagctctcctgatactcgggatcctcaggacgcaggtcacattcacctgtggggcagaagggacaggtcagacacccaggccccaccccagagaccctccatgaactgtgctcccagccttcccggcaggtctgggagtagggaagggctgaagccttgtttcccttgcaggggggccagccattgtctcccacttggggagtttcttcctggcatcatgccttctgaataaatgccgattttatccatggaaa

SEQ ID NO: 77518 - DNA, 957 bp, Homo Sapiens
aggctggaccggtccggattcccgggatggcctctgcatagtgcagaacattctgctgctcttaaagaccctcatccctcccgtgggagccccctttggacactctatgaccctggaccctcgggggacctgaacttgatgcgatgggaggctgtgcaggctcgcggcggcgcttttcggattccgagggggaggagaccgtcccggagccccggctccctctgttggaccatcagggcgcgcattggaagaacgcggtgggcttctggctgctgggcctttgcaacaacttctcttatgtggtgatgctgagtgccgcccacgacatccttagccacaagaggacatcgggaaaccagagccatgtggacccaggcccaacgccgatcccccacaacagctcatcacgatttgactgcaactctgtctctacggctgctgtgctcctggcggacatcctccccacactcgtcatcaaattgttggctcctcttggccttcacctgctgccctacagcccccgggttctcgtcagtgggatttgtgctgctggaagcttcgtcctggttgccttttctcattctgtggggaccagcctgtgtggtgtggtcttcgctagcatctcatcaggccttggggaggtcaccttcctctccctcactgccttctaccccagggccgtgatctcctggtggtcctcagggactgggggagctgggctgctgggggccctgtcctacctgggcctcacccaggccggctctcccctcagcagaccctgctgtccatgctgggtatccctgccctgctgctggccagctatttcttgttgctcacatctcctgaggcccaggaccctggaggggaaagaagaagcagagagcgcaacacagcaagcccctcataagaaccgacgccccgagtcgacaccaggctccaatcccagaactctccttc

SEQ ID NO: 77519 - DNA, 1046 bp, Homo Sapiens
  misc_feature (45)..(45): n is a, c, g, or t
  misc_feature (47)..(47): n is a, c, g, or t
  misc_feature (80)..(80): n is a, c, g, or t
  misc_feature (89)..(89): n is a, c, g, or t
  misc_feature (104)..(104): n is a, c, g, or t
  misc_feature (139)..(139): n is a, c, g, or t
  misc_feature (151)..(151): n is a, c, g, or t
  misc_feature (155)..(155): n is a, c, g, or t
gtacatttcaccaggacagcttgactgatccgaattatacgatcntntaggaattgccctgagccagaatccgcacgagnccgaaagtntgggaaaacacaccngagagaggatagcccgtccactgagaaaagtgaanaagtaccaaccntggngaaatgtccctgagaccaatacacttcagatgaagaggaggaaaaacagtctactgcttatgaaaagcaatttcctgcaaccagtaaggacaactttgatatgtgcagttcaagtttcacatctagcaaactccttccagctgaaatcaagggagaaatggagaaaacccctgtgactccaagccaaggaacagcaaccaagtaccctgctaaatccggcgccctgtccagaaccaaaaagaaactctaaggttccctccagtgttggacagtacaaaaacaaagctgctcttgttagcactttgatgagggggtaggaggggaagaagacagccctatgctgagcttgtagccttttagctccacagagccccgccatgtgtttgcaccagcttaaaattgaagctgcttatctccaaagcagcataagctgcacatggcattaaaggacagccaccagtaggcttggcagtgggctgcagtggaaatcaactcaagatgtacacgaaggttttttaggggggcagataccttcaatttaaggctgtgggcacacttgctcatttttacttcaaattcttatgtttaggcacagctatttataggggaaaacaagaggccaaatatagtaatggaggtgccaaataattatgtgcactttgcactagaagactttgttagaaaattactaataaacttgccatacgtattacagcagaagtgcttcagtcattcacatgtgttcgtgagattttaggttgctatagattgtttaagacagcttattttaaatgtagaaaaataggagattttgtaactgcttgccattaacttgctgctaaattcccaatgtattgattaaatcaataaaaaacagatgttactcaaaaa

SEQ ID NO: 77520 - DNA, 518 bp, Homo Sapiens
aattgatgtgcattgctttgtgtctgaaaattaatcaagaccttttatttgcagtctactgcttatgaaaagcaatttcctgcaaccagtaaggacaactttgatatgtgcagttcaagtttcacatctagcaaactccttccagctgaaatcaagggagaaatggagaaaacccctgtgactccaagccaaggaacagcaaccaagtaccctgctaaatccggcgccctgtccagaaccaaaaagaaactctaaggttccctccagtgttggacagtacaaaaacaaagctgctcttgttagcactttgatgagggggtaggaggggaagaagacagccctatgctgagcttgtagccttttagctccacagagccccgccatgtgtttgcaccagcttaaaattgaagctgcttatctccaaagcagcataagctgcacatggcattaaaggacagccaccagtaggcttggcagtgggctgcagtggaaatcaactcaagatgtacacgaaggtt

SEQ ID NO: 77521 - DNA, 668 bp, Homo Sapiens
  misc_feature (582)..(582): n is a, c, g, or t
  misc_feature (642)..(642): n is a, c, g, or t
ccctaatgttcatcattctgtgaggtttaatgatcagcgtgtttatttccacagttaatcattgaaacaataaatgatttttggctttgcagcagttaggaacatgttttatagtcctgattatagcccactctgccctgaccatcatgaatacttttttggaggtttagggatttcatgtgaatgaatttatttaaaatgtattcttgcccctgaattgttctattatgaatgtttgtgaacatatggcaagtgaaatgaaattttttagtgtacttttgctttaaacttcagtgaaatgctcagccaagagaagttgtaacttggctgtgctatgccagggagaccaaattcagttcaatctctttgaaggaaaagttttacaaaccataaactggcattatcacttggaaaggcccccactgagactgaggaggtaggtacaagaaaggatcatccttcttttagtggctcattttttccctccctctgcactttcggcacttttagacatttttgggaaaaaagctgtagcagcagcaatgattctgctggcaagaataagaaactggagagaagcanagaatatttctgtgcagatgtcccttgcattgtttctgttccaagaacattatttatatnaagactcacagaatcaaagattcacg

SEQ ID NO: 77522 - DNA, 2464 bp, Homo Sapiens
cggctggaccggccggattcccgggatagatggtatgccggcatcttccatttccgctgtggcaatttggggagtgggtggacgtggtcgtggatgacctgctgcccatcaaggacgggaagctagtgttcgtgcactctgccgaaggcaacgagttctggagcgccctgcttgagaaggcctatgccaaggtaaatggcagctacgaggccctgtcagggggcagcacctcagagggctttgaggacttcacaggcggggttaccgagtggtacgagttgcgcaaggctcccagtgacctctaccagatcatcctcaaggcgctggagcggggctccctgctgggctgctccatagacatctccagcgttctagacatggaggccatcactttcaagaagttggtgaagggccatgcctactctgtgaccggggccaagcaggtgaactaccgaggccaggtggtgagcctgatccggatgcggaacccctggggcgaggtggagtggacgggagcctggagcgacagctcctcagagtggaacaacgtggacccatatgaacgggaccagctccgggtcaagatggaggacggggagttctggatgtcattccgagacttcatgcgggagttcacccgcctggagatctgcaacctcacacccgacgccctcaagagccggaccatccgcaaatggaacaccacactctacgaaggcacctggcggcgggggagcaccgcggggggctgccgaaactacccagccaccttctgggtgaaccctcagttcaagatccggctggatgagacggatgacccggacgactacggggaccgcgagtcaggctgcagcttcgtgctcgcccttatgcagaagcaccgtcgccgcgagcgccgcttcggccgcgacatggagactattggcttcgcggtctacgaggtccctccggagctggtgggccagccggccgtacacttgaagcgtgacttcttcctggccaatgcgtctcgggcgcgctcagagcagttcatcaacctgcgagaggtcagcacccgcttccgcctgccacccggggagtatgtggtggtgccctccaccttcgagcccaacaaggagggcgacttcgtgctgcgcttcttctcagagaagagtgctgggactgtggagctggatgaccagatccaggccaatctccccgatgagcaagtgctctcagaagaggagattgacgagaacttcaaggccctcttcaggcagctggcaggggaggacatggagatcagcgtgaaggagttgcggacaatcctcaataggatcatcagcaaacacaaagacctgcggaccaagggcttcagcctagagtcgtgccgcagcatggtgaacctcatggatcgtgatggcaatgggaagctgggcctggtggagttcaacatcctgtggaaccgcatccggaattacctgtccatcttccggaagtttgacctggacaagtcgggcagcatgagtgcctacgagatgcggatggccattgagtcggcaggcttcaagctcaacaagaagctgtacgagctcatcatcacccgctactcggagcccgacctggcggtcgactttgacaatttcgtttgctgcctggtgcggctagagaccatgttccgatttttcaaaactctggacacagatctggatggagttgtgacctttgacttgtttaagtggttgcagctgaccatgtttgcatgaggcagggactcggtcccccttgccgtgctcccctccctcctcgtctgccaagcctcgcctcctaccacaccacaccaggccaccccagctgcaagtgccttccttggagcagagaggcagcctcgtcctcctgtcccctctcctcccagccaccatcgttcatctgctccgggcagaactgtgtggcccctgcctgtgccagccatgggctcgggatggactccctgggccccacccattgccaagccaggaaggcagctttcgcttgttcctgcctcgggacagccccgggtttccccagcatcctgatgtgtcccctctccccacttcagaggccacccactcagcaccaccggcctggccttgcctgcagactataaactataaccactagctcgacacagtctgcagtccaggcgtgtggagccgcctcccggctcggggaggccccggggctgggaacgcctgtgccttcctgcgccgaagccaacgccccctctgtccttccctggccctgctgccgaccaggagctgcccagcctgtgggcggtcggccttccctccttcgctccttttttatattagtgattttaaaggggactcttcagggacttgtgtactggttatgggggtgccagaggcactaggcttggggtggggaggtcccgtgttccatatagaggaaccccaaataataaaaggccccacatctgtctgtg

SEQ ID NO: 77523 - DNA, 977 bp, Homo Sapiens
aaggtcagtaaccctaacggtttaaggtagcgaggcctgggtggcgaattcggcacgagggccaccgggaagccagcctcaggactgcagcgacccccaaacacccctcccccaggatgtcggaggagatcatcacgccggtgtactgcactggggtgtcagcccaagtgcagaagcagcgggccaggagctgggcctgggccgccatgagaatgccatcaagtacctgggccaggattatgagcagctgcgggtgcgatgcctgcagagtgggaccctcttccgtgatgaggccttccccccggtaccccagagcctgggttacaaggacctgggtcccaattcctccaagacctatggcatcaagtggaagcgtcccacggaactgctgtcaaacccccagttcattgtggatggagctacccgcacagacatctgccagggagcactgggggactgctggctcttggcggccatcgcctccctcactctcaacgacaccctcctgcaccgagtggttccgcacggccagagcttccagaatggctatgccggcatcttccatttccagctgtggcaatttggggagtgggtggacgtggtcgtggatgacctgctgcccatcaaggacgggaagctagtgttcgtgcactctgccgaaggcaacgagttctggagcgccctgcttgagaaggcctatgccaaggtaaatggcagctacgaggccctgtcagggggcagcacctcagagggctttgaggacttcacaggcggggttaccgagtggtacgagttgcgcaaggctcccagtgacctctaccagatcatcctcaaaggcgctggagcggggctccctgctgggctgctcccataaacatctccagcgtctagacatggaggcatcactttcaagaagttggagaagggccagcctactctggaacggggcaaggaggtgaataccaaggccagttgta

SEQ ID NO: 77524 - DNA, 804 bp, Homo Sapiens
tgaaggatgctccagtcagacgctgagagttatgacagccagcagagccccgctcagcgcttgagatatctgtagagtcactgggagcctgcgcaactcgtaccactcggtaaccccgcctgtgaagtcctcaaagccctctgaggtgctgccccctgacagggcctcgtagctgccattaaccttggcataggccttctcaagcagggcgctccagaactcgttgccttcggcagagtgcacgaacactagcttcccgtccttgatgggcagcaggtcatccacgaccacgtccacccactccccaaattgccacagctggaaatggaagatgccggcatagccattctggaagctctggccgtgcggaaccactcggtgcaggagggtgtcgttgagagtgagggaggcgatggccgccaagagccagcagtcccccagtgctccctggcagatgtctgtgcgggtagctccatccacaatgaactgggggtttgacagcagttccgtgggacgcttccacttgatgccataggtcttggaggaattgggacccaggtccttgtaacccaggctctggggtaccggggggaaggcctcatcacggaagagggtcccactctgcaggcatcgcacccgcagctgctcataatcctggcccaggtacttgatggcattctcatggcggcccaggcccagctccctggcccgctgcttctgcacttgggctgacaccccagtgcagtacaccggcgcctcgtgcagaattcggcgcgccgtcacttcatactctttcccccgtag

SEQ ID NO: 77525 - DNA, 972 bp, Homo Sapiens
gagcgaggcctgggtggcgaattcggcacgagggtccggcaggggtctgctcgctgccagcccggcccctcctcagagcagctgccgcagcccgaggatgtcggaggagatcatcacgccggtgtactgcactggggtgtcagcccaagtgcagaagcagcgggccagggagctgggcctgggccgccatgagaatgccatcaagtacctgggccaggattatgagcagctgcgggtgcgatgcctgcagagtgggaccctcttccgtgatgaggccttccccccggtaccccagagcctgggttacaaggacctgggtcccaattcctccaagacctatggcatcaagtggaagcgtcccacggaactgctgtcaaacccccagttcattgtggatggagctacccgcacagacatctgccagggagcactgggggactgctggctcttggcggccatcgcctccctcactctcaacgacaccctcctgcaccgagtggttccgcacggccagagcttccagaatggctatgccggcatcttccatttccagctgtggcaatttggggagtgggtggacgtggtcgtggatgacctgctgcccatcaaggacgggaagctagtgttcgtgcactctgccgaaggcaacgagttctggagcgccctgcttgagaaggcctatgccaaggtaaatggcagctacgaggccctgtcagggggcagcacctcagagggctttgaggacttcacaggcggggttaccgaggggtacgagttgcgcaaggctcccagtgacctctaccagatcatcctcaaagcgctggaagcggggctccctgctgggctgctccatagacatctccagcgttctagacatgaaggccatcccttttcaaaaagttggtgaagggccaatgcctactctgggaccggggcccaagcagtggactacccaagggcaagtggtgagcc

SEQ ID NO: 77526 - DNA, 1002 bp, Homo Sapiens
  misc_feature (158)..(158): n is a, c, g, or t
  misc_feature (181)..(181): n is a, c, g, or t
  misc_feature (231)..(231): n is a, c, g, or t
  misc_feature (335)..(335): n is a, c, g, or t
tttggatggcgtacatccccggacgttgctgtcgattaccctcttagatgcctcagcaaatcgccgagggagagagagagatcactgagtctccaccccccgatcacatgcctgaccccgcccgcccccctattgccccagactcccttcccgacaantatcgactgagcagtcccgacgntgccccggcgcccccgcttcggctttcgcgtttcccgcggcgcgcgtacnccgggctgggcctggacgcttctcggagggccgctcgctcataagagcgccttacgtcgggagccgcaccgaggcccagggctaccccacggtggcaccggccngcagcctgagctctcccaactgcttcggcccgcagcccggaggccccgagatgcggcgcgtgaactcggcgggtcgcgcgcccccccggaggcctgcacgcgccgaggctgtccctggagggcgccgcccggggcgccgcggaggccaagcacaaagcgcccggcagcgccgactacggcttcgccccagctgccggcaggtctccctacaccaccacccgctatggaagccccatcaacacgttcaccgtgaggcctgggacccgccatcccatctcctatgtctgctcaggggcccatcggaaagccacctcctgagccaggggttctcttagctctactccaacaaactgtgtctttaaggatctgggcacttgtttcttgtggggggtgggaggtacacagcaggtgttgggcgacctgactcagacacagaggagtctttgatccccaaagaccaacgatgagaagcagtggcccaggaagaccgagagtgggcttctgtttcccaaagcgctggtgtgactgtggactgtttacacgtggggggtgggaggggaaggagggtagagagaaggaaccattaaggacctgggcgctgagtttctgctctctggtactatctgctttagcaagagttatttaaaacagttttacaagcacggaa

SEQ ID NO: 77527 - DNA, 863 bp, Homo Sapiens
  misc_feature (94)..(94): n is a, c, g, or t
gtccgcctggttcgcggttacgcaggctttggcctcacctaggtcgcgggccggtatgtagctggggacactccgctgtccgtgcgcgggctgntgcaggatggcccagcacagcgctgtggtcgtttgcaggtcggggacctcgtgctccacatcaacggagagtcaacgcagggcctcacccatgcccaggccgtggagcggatccgagctggaggcccccagctccacctggttattcgtcggcctctggagacccaccctggcaagcctcgaggggtgggagagccccgaaaaggagttgtcccgtcatggccagatcgcagcccagatcctggagggccggaggtaacggggtctcgcagcagcagcacttccctagttcagcaccctccatcccggacgacgctcaagaagacccggggcagcccggagcctagtccagaggcggccgccgatggccccacggtttctcctcctgagcgccgcgctgaggatcccaacgaccagatcccgggttccccggggccctggctagtgcccagcgaggaacggctctcgcgggccctaggggtccggggggcagcgcagctcgctcaggagatggcagccggaaggcggagacactgagcctacctctgacagcgcggggctcactagttaccgcccaacctggatccggcgcgtgtggccgctgggcacttggcacctccccaagagcttccacttggtttggtccccccacccgctgctcagtggctctgaccacactcccctcgcagcgtcagtggtacgacccttccagccggctagcctgcgcttctggttctgggagggggaggtaataaaatggttcgatccgg

SEQ ID NO: 77528 - DNA, 1161 bp, Homo Sapiens
ggaagtgattgaatcataagatataaggggggtaaagtattaaaaataacttttttgtttgataacttgagaatttagaagattttgccaagtatgtgttgttgcttgacttcttaaatatggcattgatgaatttaaagtaggagcatcagttattacttctgattcattaatggccagaattttgtgtttggtgtaatagttgtgtcaccattcttgttgctttttaaaaatcaggctaatcatgtggtccatgtctcttcaaagcttgacctgcacaaatgccatatttctatttggaccacatattctccattttgcattgagcagtagagtacagtggaaagggaataagaatactgattattctgaacagtttagtcccaagagaatagcgttttaaaaaagaaaaacaagatttggagtcattgtgggttatttttggtgggatggaggatcttaaaaatgcctaattgtgagagaatcaattgctgaaagtgttaaaatttctgaaaataaatgcttaattacatatacaggaattaaatagtttggaagagggttggattatcattacctttacaatactgtataatcagaagttctctgaacctcaattgtatatctagacataaaaattgttttctgtataggatgttgtttggtttgtttctgagtgtttaaattttgcaaaaacaaatgttaaatttgtgcttcagtacctagataaattggaaaggttaatgttctagtttctggaaggtaagcctgggagacacataagcaattcactgctataatttagttgatgtaaaatgacggaaactgactcaatatgtcaggtttaactctgcccaaaagcagcagacatgtaagcagatgtgcaataaaaaatgatcttgatccatttcactaatgtgtgcttgacattttttactatattgacatttattatggaaagagttaataattattttttctgatgtgctacactagtggccagtatatggttaagttgatgttgtatttattctaagacggatttaaaaaggcagttttctaaatatgaacttgtgaatttttgtatgtgtgtttgagtaaattgagaaatgaattttataaatgttctattgatgttgcagtaaagaagccttttgaagt

SEQ ID NO: 77529 - DNA, 759 bp, Homo Sapiens
aaatttcagaagacaattcggccatctcagaaacaagaaagccccacaggtaagtaactgtgaatgcaggctgcagctggaccgttgcggcagccagggaaagagttgtgggaaggagtcatcaggatgagatagagaagacagctggagacggcaagaagtcagctgaacagctgagatgggcgaacaaggagccaccgtttactgcagctctgctcccacacgctgccgaacacgcctctgggctttccagatggtttcccctgttgattctgtgctgaaagccctgccccttggagaaatacctggaggatccaagtggcttccattcagagaaggacaaattcaagaagctatgctatgacctcatgagtggggcagtggagtcaggaaagcatgcgatgttaactcacacgcccagccgctgctctcatccagtgtctcatggcttcgagggaaataatagcaacagcaagccacgttaagacagagtcttgctgcttctttgagtgacactgggaagcttgattctgactacacagcatcccctgcatattcctctccactcagtctgctgcctccttggtgctccttggtcttcctctgaacatggtacctcattacacgggccttggccttcccacagtgtggtggtcttaggcggtcatgcttcttacacaagcctgctcaggttcatccaagtaacaggctgttctggtgctcacccaggtaatagggctgttcttaggttcatccagg

SEQ ID NO: 77530 - DNA, 986 bp, Homo Sapiens
tggcgtccggtcctatgttccccgctttcttcgctccctcttggtgtctgtcggctacttggctccctggcctccctctacgggcctagtattggtccccagggagcctggtcgagaggccacggggagtggtgatgtccttttatgcggcgcttggcgcctatacactgggctcagcctgctctaccctcctggtgcacctcatctagaagggaggacacaaggacattggtgcttcagagcctttgaagatgagaagagagtgcaggagggctgggggccatggaggaaaggcctaaagtttcacttggggacagagagcagagcacactcgggcctcatccctcccaagatgccagtgagccacgtccatgcccattccgtgcaaggcagatattccagtcatattaacagaacactcctgagacagttgaagaagaaatagcacaaatcaggggtactcccttcacagctgatggttaacattccaccttctttctagcccttcaaagatgctgccagtgttcgccctagtagttattacaaagccagtgccaaaacccagccatgggctctttgcaacctcccagctgcgctcattccagctgacagcgagatgcaagcaaatgctcagctctccttaccctgaaggggtctccctggaatggaagtcccctggcatggtcagtcctcaggcccaagactcaagtgtgcactagacccctgtgttctgtgggtgaacaactgcccactaaccagactggaaaacccagaaagatgggccttccatgaatgcttcattccagagggaccagagggcctccctgtgcaagggatcaagcatgtctggcctgggttttcaaaaaaagagggatcctcatgacctggtggtctatggcctgggtcaagatgagggtctttcagtgttcctgtttacaacatgtcaaagccattggttcaagggcgtaataaatacttgcgtattc

SEQ ID NO: 77531 - DNA, 981 bp, Homo Sapiens
  misc_feature (22)..(22): n is a, c, g, or t
  misc_feature (107)..(108): n is a, c, g, or t
  misc_feature (134)..(134): n is a, c, g, or t
  misc_feature (180)..(181): n is a, c, g, or t
  misc_feature (200)..(200): n is a, c, g, or t
  misc_feature (207)..(207): n is a, c, g, or t
  misc_feature (209)..(209): n is a, c, g, or t
  misc_feature (273)..(273): n is a, c, g, or t
  misc_feature (647)..(663): n is a, c, g, or t
ttgtcatccatagcacccagcnttcacttatgtcccgctcgatgtgttggatgtgggcgatacaattcacacagggacagttgacatgatacgaattatcgactccnntaggattgccctcgagccagatcggncacgagccatctagaaaatgtaaacgactctgccacagcacagatnntatgtgaggactcagattntgagacntnacaattgcagagaaaggttgcagcctgcacaccatagcccacctctctgagcagactttggttntgtgtggtgacgtggcacatgtttgtacactgggatttttcaaaggacgctacgcgagcagactgacttgcctcttctgtgagcactgtggcttttgtcagatggagtgccggtctgcagaggactgctctttcgaatccacagtgttatctgtgtaaatagctttaatttttcttctgtgtcttaggtgaagttttgttcatgtagcaaccaggtagacagtgaccaaataaggctgtaaatgtgctgtagttttctactgtgatgtacttgaaggagaacctgtgtcctctacttttctgatctcccacaagtattttgtgtttgtttcctgagtcctgaggttattattttactcctgttttgcccccagnnnnnnnnnnnnnnnnnctggagacccagggaggcccatggtggagatcatttgtaaggaatggatcatggtctgggtttccaaaactaccctagtacagtgaatgagagaaatctgcctggaaattgtttcagaaccatgtacctttatgctttgtgattgtgaaacattgacttttttgtaaccccaaaatgaaaactgtttagtaaaggggatctattttgtgtgttttgaaacttaggtgcaatgtcccctggaaaaagctaaagaaatgtatatgttcaatgacattttaaaataaaatattatatatatgtatatacgacatattcagc

SEQ ID NO: 77532 - DNA, 974 bp, Homo Sapiens
  misc_feature (47)..(47): n is a, c, g, or t
  misc_feature (69)..(69): n is a, c, g, or t
  misc_feature (71)..(71): n is a, c, g, or t
  misc_feature (80)..(80): n is a, c, g, or t
  misc_feature (100)..(100): n is a, c, g, or t
  misc_feature (116)..(116): n is a, c, g, or t
  misc_feature (119)..(119): n is a, c, g, or t
  misc_feature (144)..(144): n is a, c, g, or t
  misc_feature (151)..(151): n is a, c, g, or t
  misc_feature (160)..(160): n is a, c, g, or t
  misc_feature (165)..(165): n is a, c, g, or t
  misc_feature (213)..(213): n is a, c, g, or t
  misc_feature (215)..(215): n is a, c, g, or t
  misc_feature (233)..(234): n is a, c, g, or t
  misc_feature (238)..(238): n is a, c, g, or t
  misc_feature (244)..(244): n is a, c, g, or t
  misc_feature (258)..(258): n is a, c, g, or t
  misc_feature (260)..(260): n is a, c, g, or t
  misc_feature (356)..(356): n is a, c, g, or t
gactatacgattatcgctcttagggattgctcgagccagaatcgcangagagttgagtcagcagcctcncntgagacctntagagcaggcaccagtgccntttgtgtccaccagcntcntgagccacgtgtatggagctcctcntagttcncaccagtcncagcnttggaagcccagcccaggatgtcagactcggggcagatccactgcccntntgccaacacatccagacnntccntcagcnttggagctagcatntntggggccagggcttgcttcctcgctccatagccctaaactgcccagcgctcccaccagcagaactgagcctgcctcctcctcccagcttgccccgntgcccagaggaccccacgcctctcagaggcagaggtcccatgccagcctttgacccacaacggccacacagccgcctccagaccagcactcggactgccctgcagtggccgcttgggcctccctggcggtcccgccctgccctaggctttaccttggaagcctgagaggcgccggctctcttgctcctccatcgatggacactgcattgcttctcatcggacacttgtggagcgcaggggcctggggagcagcgctaaccctggaggcagcctttgggtgatggctttttcttcccttttcctcccgcgggcctgttttcaggtgttcctagcatttctgcctccaggcaggacggcaggggtgagcagctttgggagagacacctggcctttttctcctggagcctctccctcccggccctgggaagtgggcgcagccctgtgttcccccagcttggcagatgggctgcatgcggcgctcccttccttcccacgctcagcggccccggccagaccctggcagacttcacacctcattgctttaccccctggggcctggggaaatgtctgtactttgggaagtcacagaaatacatttttgtgcaaaatggaaaaaaa

SEQ ID NO: 77533 - DNA, 656 bp, Homo Sapiens
gtttcttgtgcttatatatgtctacatttttttcagctgcctactgaatcactcttctatcgtgctgttcttcaggatattattaaagattgttatggcatcaccaaatgtgatcggcatgttggtaaaatttattccaaatgttcttcttttctggattatgtcagacggtctctaaagaagcttggattagatgagtccaagctgccagaaaaaattataatgaactactacgagaagtataagcctcgaatgaatgagctggaagcttttaatatgttgaaagttgtactggctccctgtatagagactttgattcttctggatcgactttgttacctgaaagagcaggaagatattgcatggtctgctcttgtgaagttgtttgatcccgtgaaatctcccagatgttatgctgttattgccctgaagaagcagcagtgatttccattgaagcaaattattagatgtatttctctatgagacctgttgctgagattgcttttctaaacatatatgtcctgttatacaaaaatttttaaatgactgttatgtattttaaataataaaataatggctaacaacagaaggttataatccatttttccattgtcaaagcatacattaataaaagaagaacctgtcataataatata

SEQ ID NO: 77534 - DNA, 917 bp, Homo Sapiens
ataggctaggtagcgaggctgggtggcgaatcggcacgaggggcagcgctgagggtagcgggatagcagctgcaagcgcgcgtgggaggcgggggctctgggcggaacaaaaatcacaggatgtcagaggatgtttcccgggaagaactgggataaaggaagggtcccagcaccatggaggacccgaaccctgaagagaacatgaagcagcaggattcacccaaggagagaagtccccagagcccaggaggcaacatctgccacctgggggccccgaagtgcacccgctgcctcatcaccttcgcagattccaagttccaggagcgtcacatgaagcgggagcacccagcggacttcgtggcccagaagctgcagggggtcctcttcatctgcttcacctgcgcccgctccttcccctcctccaaagccctaatcacccaccagcgcagccacggtccagccgccaagcccaccctgccggttgcaaccactactgcccagcccaccttcccttgtcctgactgtggcaagacctttgggcaggctgtttctctgaggcggcaccgccagatgcatgaggtccgtgcccctcctggcaccttcgcctgcacagagtgcggtcaggactttgctcaggaagcagggctgcatcaacactacattcggcatgcccggggggagctctgagtgcagcttaagcctctccacggtgacgggtggctctgtggctggtaggactcacccatgatatggggtgcaggaactctgggggccctgaaggatttgcttccctcccctgggaaggcagagggctcttaataaagaggacccagaagattcttatttagagcttcagtctttggagcacacagggccttcgtgagacagtgaaatcagataataatgagatcttttgt

SEQ ID NO: 77535 - DNA, 674 bp, Homo Sapiens
caaatatatatgctgaaaggtgaaagctcgctggtagcaaaggtccctgtttcacgaggtccctctaattggtcattgactcttggcagctgttgcccagcctctgctgctggggacgtggagcacaatcttctgcagggtgcgggcctggcctttggtttactgactgtgtctaacacacacctcccgctcactgcccttcctcactccccttctagttagtcaagcctttcccagtcactcttaccacctcctttcctggaagccaattcacatttgggtctctgataagaatgaagatgctaataattaagaatgtccaggagtgctttgtaataagtgccctttcctattcatcacatgccatatagaccccagggtgcctcctgctgacctgggaggctcagatgcagccagggggcagtgtcctgctcggcagacagtgcacaacacagggccaagaagagccgtcctccagggccatgcatgctggcatgacagagttctcagacataatagtagacagatgcttctgggtatcagggcacggggcagacagatcttgatttatgttaagttaaaatggcttaacctttgttggggcactcattaggaacctttctttgtgagcaaaacagtccatcaaaattattgaaaataaagtgctcttgtcc

SEQ ID NO: 77536 - DNA, 1072 bp, Homo Sapiens
  misc_feature (42)..(64): n is a, c, g, or t
  misc_feature (90)..(137): n is a, c, g, or t
  misc_feature (813)..(813): n is a, c, g, or t
  misc_feature (824)..(824): n is a, c, g, or t
  misc_feature (844)..(844): n is a, c, g, or t
  misc_feature (899)..(899): n is a, c, g, or t
  misc_feature (910)..(910): n is a, c, g, or t
  misc_feature (918)..(918): n is a, c, g, or t
  misc_feature (990)..(990): n is a, c, g, or t
  misc_feature (1009)..(1009): n is a, c, g, or t
acctcaactaaagggaataagcttgcggccgcctgctcaagnnnnnnnnnnnnnnnnnnnnnnncaataaaacatttttattctgtacannnnnnnnnnnnnnnnnnnnnnnnnnnnnnnnnnnnnnnnnnnnnnnngcacagagaaaccttagccaacaaatccctgagtccatgggaacccaggacactaacaaagggaaaggagagtccatgcctaaagagtaggaaatatggcaacatctttccctttcctcctggttccctgcaacagagggaagggaacagtcactacaaattactaaaacgagggtttaggtggggcaggaaagtggggtgagagtggtaggatggggaactcagatgccaccagtctgggaaagtaaaacatttgatccagcatgaaagccaacatgaccgcagaggaaaaagaccagactgatgggcatgcagctggcctttggtatatgccaagcctttgcttggtagccccacgcctgggccagcacaacaaatagcacctgtggggcctataagccgggaggggatgggggagatagggactggggaaatggcccttgagtgaaggaaagggagataaagctgaggaagaggcctcaggcctcagcacagggtggcaacactaccattcactgtccctgtgccatttcttcagactctgggccgccaccaccaccagatggccaagagcagataaccttttgtccacagccaggtagagatgggcaacttacatggccttgagaagaggtatagaaaaaggagtgcttttgagggctaccccctgttgtgnacattcctgangtgcagagacacaccagcanacatgccagtcttagtagtgggacgaagaatgatgagtggatcagtcagctcggnagacaggcacnggttgcangtttgatgagcaccaggtgagacacagcttcgagcactgcctgatctgtctctccctcagatgcctttctgncacacagttgcactctcanaagtggaggagcagtgaaagacctctctctactatacacaaacgctctgcgatctggctcagg

SEQ ID NO: 77537 - DNA, 1121 bp, Homo Sapiens
cagtgtgttactattttgtgcattttcctatatggggtatttttgatatgtcgacgagtttgcacgatgttatagttctgaagatgattgcttcttcacctggttgccagttcttgatgctgaaatggtttggttagtgcaacagtatactcataggattatatgaaacaatttgcatcggacttttgtcctctctaaatttacaagtattctatactgtacttaggaccatgcattcgtagaatatttagatacctaggtagtatatatggtttctgtactgctagtgactgttattctctgacccagtaggactttaacttgtgttttctccagttgctctagctcgtgttcctgttgggttgatcacttagcaccattatttgagaaagctggttctacactggtgtaggatagctgtggaatagattaatcctgtctgcatgatgaattaattctcttaagaactaagctctgtgccagtgctttccgtgaagcagtatacctttaatcagaactcattcccagaacctggatgctattacacatgctttggaagaaacgtcaatgtatatccttttactaactctaccactttggggcaaagctaattccagcactggtctttgaatgctgtatgcaaccagtacgtgaataccacatagcagctgcactgttcttaagagggctttccattacttaccaccgatctacaagggttgatccctgtttttaccatcaatcatcaccctgtggtgcaacacttgaaagacccggctagaggcactatggacttcaggatccactagacagttttcagtttgcttggaggtagctgggtaatcaaaaatgtttagtcattgattcaatgtgaacgattacggtctttatgaccaagagtctgaaaatctttttgttatgctgtttagtattcgtttgatattgttacttttcacctgttgagcccaaattcaggattggttcagtggcagcaatgaagttgccatttaaatttgttcatagcctacatcaccaaggtctctgtgtcaaacctgtggccactctatatgcactttgtttactctttatacaaataaatatactaaagactttaaaaaaaa

SEQ ID NO: 77538 - DNA, 705 bp, Homo Sapiens
  misc_feature (33)..(33): n is a, c, g, or t
  misc_feature (229)..(261): n is a, c, g, or t
gactctccggaagcccaagaggtcccgtccatntacaagctgaagctgagacccaggattcggccccggagagaccacaggcctgagaagcagccttcacgaatccccaggccactggcctatgtcttcctgggtccagccaggcagccccccaaggacaggctgttgagagctgtgctgggcagcaagggaggggaggcatcccgggtggatggagcttcagtaggtnnnnnnnnnnnnnnnnnnnnnnnnnnnnnnnnnccagccgctccattggagagcagcccccaacctccagagggcctgcaacctcactggcttaatcaagctccacttccacctgaggaggagtcctgggtctgaggcacatgagcgtgttgggtaggagggaagcaaaaaggatggccatgtatacactggattcacagctgcgggaacagaagggatgttccctcacctccacacagggccttgggcaggagtgggtcagaagacaaatatagactccatctgctcatctgagcaaaggggcaacccactgctctcactccaactccagaggtaggccaggggcagtaggaccatcctgtatctcattactctcccctagaacggctcaccacactcctggcctctggcccctggccatgcccacctgtttccataactcccataagttattaaatgcatgtgattctgcccttg

SEQ ID NO: 77539 - DNA, 764 bp, Homo Sapiens
  misc_feature (34)..(34): n is a, c, g, or t
aattcggcacgaggcggcacgagggacccccagnaatagggtttcttgcccaggcttgggacaatgacactaagtctcccagaatatgggaccttgcccaggcttggaacaatgacacctcccagaatatgggactttgtccaggcttgaggacaatgacagtaagtcatcattcaccccaagccatcaggccttggagctctccttctcaccctgggagaattccaggagattcctggcaaaggtggcaagcctatctcctcctcccatcagggcagccagagccaccaccctccctctcctccactgtagcctaatctagagcatgttctcaggcagagtggggtatggagaagggtgatcacacttttccattccactccacccacagacttgattagaggaagcagcttgagaaccccaagtttggtttcagtgcacggccccagccacatggaccccatagttccacccctaccacttgcctgggggtacattcagcagagtgagtagcagcacaggtctgaaaatgtgcctcctaccccaatacctggctgtgcctcaccagaaacggtctgtacccacatgagcggccagcagctcggggcatggcccagccatttccttgggcacaggccaaacctgggagcagagccagctctctggacccaggattcggccccggagagaccacaggcctgagaagcagccttcacgaatcccccaggccactggcctatgtcttcctgggtccagccaggcag

SEQ ID NO: 77540 - DNA, 1035 bp, Homo Sapiens
  misc_feature (146)..(146): n is a, c, g, or t
  misc_feature (307)..(307): n is a, c, g, or t
  misc_feature (958)..(977): n is a, c, g, or t
aaataacgaaaaaggaatgcacgcagaatgaaaggggcgggcccggatttctaaagaaagacagcacggctccgccataaacttgtttgaacttaggtagttagattcccacataggttgtacaacaacatgaatctcagacatancaatacctggctggagtggataacgccctaatgtgggattgaagccagttccattaacacatgatgatgtgaaacgcagcttctcttaattatcaagacagtgccagttttgcgtctgattggagccagccgagcaacataatgccaggtcaacccgtcgngcgattccagccccggggtgcagttaaggcagtgacatcaatgtctggcccaggtgagcacctccgaaatgccctgtgcatactggccacacccctgatcaggtacgactgctgtggacagacccacgaaatgtgggctggcgggacaagacctcctatcgctggcagcttttgcaccggcctcaagttggctacattcgggtgaagctctatgagggaccccagcttgtggcggattctggggtgatcattgacacatccatgcgaggggggcgtcttggtgtattctgcttctcccaagaaaacataatttggtccaatctccagtatcgatgcaatgacacagtgcctgaggactttgagccattccggaggcagctgctccagggaagggtgtgaggaggaggccaccagattcagaattcagaattttagaccctttggccttggggtccatcctggagaccctgaggtctaagctacagcccctcagccaaccacagacccttctctggctcccaaaaggagttcagtcccagaggggtggtcaccccacccttcaggggatgagaagttttcaaggggtattactcaggcactaaccccaggaaagatgacagcacattgccataaagttttggttgttttctnnnnnnnnnnnnnnnnnnnncctgagaggcggccgcaagcttattcccttgtagtgagggttaattttagcttggcac

SEQ ID NO: 77541 - DNA, 965 bp, Homo Sapiens
ataggttattgcatcaacctcttgagctcaagcgagtcctcctgcattagcctcttgagttgctgggactataggcatgtaccaccatgcccagctaatttataattactattattgttttgtagggacagagttttgctatgttgcccaaattggtctcaaactcctggcctctcactcctgccgtcatggcctccaaagtttaatttttttaaaagtaactgttagatggaggaatatggtgacccactattgttgagaaatttgttttccacttgtcacgtcacataagatgattgctaaaatattgtactggtgttcggtggtgagtcatatgtttgaaagttaataattataaataggtaatttccttctaatatgttggtactgtctatggccataccaccctgaacatgcctgagcttgtcataatatgttgagtacccaaaagatttgtttatattgttaatcttagggaaaaaaaattaaaatccagtagatcagaacatcaggctttcagatacaaattgatttactggtttttattttgctgattataatatttggtatatttaaggtaatctagttaactagatgctatttcatagattatattgaatgatttaaaactttattttcaaggatagtttattttaaatggcatattgaaaacatcattattaagatccagtaggtaggacatttattggattaaaatgaagcatttatctatgtctttaggtgtcattgttccctttctgaattagctgtacatataagccttcctttggttttaagtactgattttttgttaaaaaaaagagggactgtttaccattcttccactgtgctgttataaagttgtatttgaaaggtaatgttgtttttattaatcttttgtcttaaaataatttaaagtgctttgaattttaaaacattaaacaaatcctataataccaaaaaaa

SEQ ID NO: 77542 - DNA, 691 bp, Homo Sapiens
ctgtcccagaaacgatggactcacgctttgtccttaaactgactcaccatccgaggagttcccatgacgccaaaacagcgaatgtccatcaacaggaatcggatgggaacagaattccatggtctcaatgacttaagtttatgggaagtcattgtggccataatggtagcagaagtagcgagcacgctcaggtgataggacgactcctgagacccagcgactgtggagacagcctcgggaagccctggcccgtggatggatcccttggctgtctgaggactgctccagaagtgcgggaatccagggcccacccagaagaccgtgaacagttccttagcctcccaccccccaaggcagctcttttcatccaactcagtttacaggcgtggtttgtttttcaaactgggcttcctggatgtacaaatggaactgtggtgagggtgcgggctggggttttctcctgggcgtcaccaagggcagccctgggctctggctggggatgaagacgaaacccgatcgggaaagtaagtggagcccccggccccgccgagccacagccccccaactgcctattcccactgcccagttgtttgtccacatcaggagttgctgattgaattcttgctactcttctggctctggggtcggccagtggattcaggagttgaaacaataaagcgcgcgtcacgat

SEQ ID NO: 77543 - DNA, 1312 bp, Homo Sapiens
ggaccggtccggaattcccgggatgcccggagccgctgccgccgcccccagctcccccgcctcggggagggcaccaggtcactgcagccagaggggtccagaagagagaggaggcactgcctccactacagcaactgcacccacgatgcagagcatcaagtgcgtggtggtgggtgatggggctgtgggcaagacgtgcctgctcatctgctacacaactaacgctttccccaaagagtacatccccaccgtgttcgacaattacagcgcgcagagcgcagttgacgggcgcacagtgaacctgaacctgtgggacactgcgggccaggaggagtatgaccgcctccgtacactctcctaccctcagaccaacgttttcgtcatctgtttctccattgccagtccgccgtcctatgagaacgtgcggcacaagtggcatccagaggtgtgccaccactgccctgatgtgcccatcctgctggtgggcaccaagaaggacctgagagcccagcctgacaccctacggcgcctcaaggagcagggccaggcgcccatcacaccgcagcagggccaggcactggccaagcagatccacgctgtgcgctacctcgaatgctcagccctgcaacaggatggtgtcaaggaagtgttcgccgaggctgtccgggctgtgctcaaccccacgccgatcaagcgtgggcggtcctgcatcctcttgtgaccctggcacttggcttggaggctgcccctgccctccccccaccagttgtgccttggtgccttgtccgcctcagctgtgccttaaggactaattctggcacccctttccagggggttccctgaatgcctttttctctgagtgcctttttctccttaaggaggcctgcagagaaaggggctttgggctctgcccccctctgcttgggaacactgggtattctcatgagctcatccaagccaaggttggacccctccccaagaggccaacccagtgccccctcccattttccgctactgaccagttcatccagctttccacacagttgttgctgcctattgtggtgccgcctcaggttaggggctctcagccatctctaacctctgccctcgctgctcttggaattgcgcccccaagatgctctctcccttctccaatgagggagccacagaatcctgagaaggtgaatgtgccctaacctgctcctctgtgcctaggccttacgcatttgctgactgactcagcccccatgcttctggggacctttcctacccccatcagcatcaataaaacctcctgtctccagtgaaagaa

SEQ ID NO: 77544 - DNA, 726 bp, Homo Sapiens
ctgacgcccgtgtcctgcccaaattcaacgcagccgccttcttccacgcacacatctcttacctagaagcctgacactgacctctgcctgctgcttgtctccactgaccgtgaggacttctttgcagtctctgactgccgccgccgcttccaggagcgccttcgcaagcgcggagcccacctggccctgcgagaggcactgcgcacaccctactacagcgttgcccaagtgggcatccctgacctgcgtcacttcctctataagtcaaagagctcgggactcttcaccagccctgagattgaggccccatacaccagtgaagaggagcaggagcggctgctgggcctctaccagtacttgcacagtcgtgcccacaatgcctctcgcccactcaagaccatttactacacgggccccaacgagaacctcctggcctgggtgacaggcgcctttgagctctacatgtgttacagccccctggggaccaaggcgtcagccgtcagtgccatccataagctgatgcgctggatccgcaaagaggaagaccgcctcttcattctcacgcccctcacctattgatgggaatgtgtgcgggctcagccttcctggacacactaggtgtgggaagccataggagcctccagatgggggctggcctctcttgcccagccagcgggcagggactgtgggttggtgaatgcattaaagtgctttggggaagacaaa

SEQ ID NO: 77545 - DNA, 1557 bp, Homo Sapiens
  misc_feature (1279)..(1310): n is a, c, g, or t
  misc_feature (1443)..(1443): n is a, c, g, or t
  misc_feature (1464)..(1464): n is a, c, g, or t
ccagggaggctcgcgtgtgaatcggcacgaggggaaaggatggggaaagcgaagagctgcgctggaaggcggttttcggagggagctgccgctgaggctgacatccttctttcctgtcccgctctcagatggctacaaggtagtattcgtgcgccggagcccgctggtgctagtggcggtggctcgtacgcggcagtcggcacaagagctggcgcaggagctgctctacatctactaccagatcctaagccttcttaccggtgcgcagctgagccacatcttccagcagaagcagaactatgatttgcggcgcctactctcgggctcagagcgcatcaccgacaacctgctgcagctcatggcacgagaccccagcttcctgatgggggcggcacggtgcctgcccctggcggcggccgtgcgcgacactgtgagcgccagcctgcagcaggcgcgtgcgcgcagcctggtcttctccatcctgctggcccgcaaccagctcgtggcactcgtgcgccgaaaggaccaatttctgcaccccatcgacctgcacctgctcttcaacctcattagttcctcctcgtcctttcgcgagggcgaggcctggacgcccgtgtgcctgcccaaattcaacgcagccggcttcttccacgcacacatctcttacctagagcctgacactgacctctgcctgctgcttgtctccactgaccgtgaggacttctttgcaagtctctgacttgccgccgccgccttccaggagcgcctttcgcaagcgcggagacccacctggccctgcgagaggcactgcgcacaccctactacagcgttgcccaagtgggcatccctgacctgcgtcacttcctcctataagtcaaaaagctcgggactcttcaccagccctgagattgaggccccatacaccagtgaagaggagcaggagcggctgctgggcctctaccagtacttgcacagtcgtgcccacaatgcctctcgcccactcaagaccatttactacatgtgttacagccccctggggaccaaggcgtcagccgtcagtgccatccataagctgatgcgctggatccgcaaagaggaagaccgcctcttcattctcacgcccctcacctattgatgggaatgtgtgcgggctcagccttcctggacacactaggtgtgggaagccataggagcctccagatgggggctggcctctcttgcccagccagcgggcagggactgtgggttggtgaatgcattaaagtgctttggggaaaannnnnnnnnnnnnnnnnnnnnnnnnnnnnnnnaaaagggcggccgctctagagtatccctcgaggggccccagcttacgcgtacccagcttttctggtacaagtggtcccttatagtgagtcgtaatataaagctaggcactgggccgtcgttttaacaacgtcntgactggggaaaactgctagnctggggatcttttgtgaagggaacccttacttctggtgggtgggaacttaattgggacaaactatcctaccggaaatttaaagcttcttaagg

SEQ ID NO: 77546 - DNA, 1124 bp, Homo Sapiens
  misc_feature (181)..(229): n is a, c, g, or t
gccctctcctcccatagtcactttctctctgccaaactcatttcttcttgtgcccaagacctctctcctgagcccctgtggaaacttcaggaaggatgaatccgtctttgtgctccacggctcgtaccttgatcaggctgtgcatcacagtaattccgttctaggtaggcagagttgatcnnnnnnnnnnnnnnnnnnnnnnnnnnnnnnnnnnnnnnnnnnnnnnnnnatagtcatttttattttcacagtgcttggaacatggtggaaaatgaatgttggaattattggagtaatataatttgtatcaaatgtccttttgaattaagagatttagttatgtttactaagaatgtaaactttgaattggtttgcattttaacaattaggatggtttattgatgtgaattttgaaatgtagaggtataatgttaaattattttatactttatggaaatcaagtgaaatgtttgaaaaaatgccgccattatcctctggtattttctactctctggaattatgtgctgtaaatgatcggctgtaaatgtgaggcgcaccacccacccctgtgtggaaagtgttgtggcgcttcctgccacccacccacctctctgccgttgctccttgtgacacttgtctgtcgtctcccatccaaactccaagcttacagctacctcagtactgctttgcttgtctgaaacacctcctttgccttccttcagtgtcccgctcaggtgcagcctcctccctaaagctcatctcagcttttgatctgaatgatgatggaaacatgcagacagcctctcagtcttactatttaatgttgtagctgggaaaaaacccagagaggttaactgatatactgggttgggactaggatgtgggttttgtgactctgaatcccatgttctcaaactacgctgccttccgaagtctggcatttgttagctcatgcttccttgtagtccagcttcttatgtgcctgttatattctccagtaagattgtaagccccttaagggcagggacgtctttgcatctctagcactgctatagtgttctatccttagttatgaactagataaataaatggtggtggcaacaatcctagtttcctaaaaaaaa

SEQ ID NO: 77547 - DNA, 3510 bp, Homo Sapiens
caaggtagcgaggcctgggtggcgaattccgcacgagggcctgctgcaaggcctgcctggcacttctcccgtgctgcaaccgaggtcacatggtgggctttaaggaagaccactacatgctgcgggagaacctgatggcctctgaccacttggacacgcccatgctgcgcagcgggaacctcaagggccgtgacgtggtccgctggaaggtcaccaacaacatgcagcggcctggctttgccactcatgccgccagcatcaaccccacagagctggtgccctacgggctgtccttgcgcctggcccgcctttgcaccgagaacctgctgaagcctgacactcgggagtgcgcccagctgcgccaggaggtggaggagaacctgaacgaggtctacaggcagatctccggtgtacacaagctccagcagaccaagttccggcagcagcccaatgccgggaaaaagcaagaccacaccattgtggacacagtgctgatggcgccccgctcggccaagccggccctgctgaagcttacagagaagcaggtggaacagagggccttccacgacctcaaggtggcccccggctactacaccctcactgcagaccaggacgcccggggcatggtggagttccaggagggcgtggagctggtggacgtacgggtgcccctctttatccggcctgaggatgacgacgagaagcagctgctggtggaggccatcgacgtgcccgcaggcactgccaccctcggccgccgcctggtaaacatcaccatcatcaaggagcaagccagagacgtggtgtcctttgagcagcctgagttctcggtcagccgcggggaccaggtggcccgcatccctgtcatccggcgtgtcctggacggcgggaagtcccaggtctcctaccgcacacaggatggcaccgcgcagggcaaccgggactacatccccgtggagggtgagctgctgttccagcctggggaggcctggaaagagctgcaggtgaagctcctggagctgcaagaagttgactccctcctgcggggccgccaggtccgccgtttccacgtccagctcagcaaccctaagtttggggcccacctgggccagccccactccaccaccatcatcatcagggacccagatgaactggaccggagcttcacgagtcagatgttgtcatcacagccaccccctcacggcgacctgggcgccccgcagaaccccaatgctaaggccgctgggtccaggaagatccatttcaactggctgcccccttctggcaagccaatggggtacagggtaaagtactggattcagggtgactccgaatccgaagcccacctgctcgacagcaaggtgccctcagtggagctcaccaacctgtacccgtattgcgactatgagatgaaggtgtgcgcctacggggctcagggcgagggaccctacagctccctggtgtcctgccgcacccaccaggaagtgcccagcgagccagggcgtctggccttcaatgtcgtctcctccacggtgacccagctgagctgggctgagccggctgagaccaacggtgagatcacagcctacgaggtctgctatggcctggtcaacgatgacaaccgacctattgggcccatgaagaaagtgctggttgacaaccctaagaaccggatgctgcttattgagaaccttcgggagtcccagccctaccgctacacggtgaaggcgcgcaacggggccggctgggggcctgagcgggaggccatcatcaacctggccacccagcccaagaggcccatgtccatccccatcatccctgacatccctatcgtggacgcccagagcggggaggactacgacagcttccttatgtacagcgatgacgttctacgctctccatcgggcagccagaggcccagcgtctccgatgacactgagcacctggtgaatggccggatggactttgccttcccgggcagcaccaactccctgcacaggatgaccacgaccagtgctgctgcctatggcacccacctgagcccacacgtgccccaccgcgtgctaagcacatcctccaccctcacacgggactacaagtcactgacccgctcagaacactcacactcgagcacactgccgagggactactccaccctcacctccgtctcctcccacgggctccctcccatctgggaacacgggaaggagcaggcttccgctgtcctgggcctggggtcccggagtcgggctcagatgaaagggttccccccttccaggggcccacgagactctataatcctggctgggaggccagcagcgccctcctggggcccagactctcgcctgactgctggtgtgcccgacacgcccacccgcctggtgttctctgccctggggcccacatctctcagagtgagctggcaggagccgcggtgcgagcggccgctgcagggctacagtgtggagtaccagctgctgaacggcggtgagctgcatcggctcaacatccccaaccctgcccagacctcggtggtggtggaagacctcctgcccaaccactcctacgtgttccgcgtgcgggcccagagccaggaaggctggggccgagagcgtgagggtgtcatcaccattgaatcccaggtgcacccgcagagcccactgtgtcccctgccaggctccgccttcactttgagcactcccagtgccccaggcccgctggtgttcactgccctgagcccagactcgctgcagctgagctgggagcggccacggaggcccaatggggatatcgtcggctacctggtgacctgtgagatggcccaaggaggagggccagccaccgcattccgggtggatggagacagccccgagagccggctgaccgtgccgggcctcagcgagaacgtgccctacaagttcaaggtgcaggccaggaccactgagggcttcgggccagagcgcgagggcatcatcaccatagagtcccaggatggaggacccttcccgcagctgggcagccgtgccgggctcttccagcacccgctgcaaagcgagtacagcagcatcaccaccacccacaccagcgccaccgagcccttcctagtggatgggccgaccctgggggcccagcacctggaggcaggcggctccctcacccggcatgtgacccaggagtttgtgagccggacactgaccaccagcggaacccttagcacccacatggaccaacagttcttccaaacttgaccgcaccctgccccacccccgccatgtcccactaggcgtcctcccgactcctctcccggagcctcctcagctactccatccttgcacccctgggggcccagcccacccgcatgcacagagcaggggctaggtgtctcctgggaggcatgaagggggcaaggtccgtcctctgtgggcccaaacctatttgtaaccaaagagctgggagcagcacaaggacccagcctttgttctgcacttaataaatggttttgctactgct

SEQ ID NO: 77548 - DNA, 1096 bp, Homo Sapiens
gggctccttctggtggctcatccccctgctcctcctcctcctgccgctcctggccctgctactgctgctatgctggaagtactgtgcctgctgcaaggcctgcctggcacttctcccgtgctgcaaccgaggtcacatggtgggctttaaggaagaccactacatgctgcgggagaacctgatggcctctgaccacttggacacgcccatgctgcgcagcgggaacctcaagggccgtgacgtggtccgctggaaggtcaccaacaacatgcagcggcctggctttgccactcatgccgccagcatcaaccccacagagctggtgccctacgggctgtccttgcgcctggcccgcctttgcaccgagaacctgctgaagcctgacactcgggagtgcgcccagctgcgccaggaggtggaggagaacctgaacgaggtctacaggcagatctccggtgtacacaagctccagcagaccaagttccggcagcagcccaatgccgggaaaaagcaagaccacaccattgtggacacagtgctgatggcgccccgctcggccaagccggccctgctgaagcttacagagaagcaggtggaacagagggccttccacgacctcaaggtggcccccggctactacaccctcactgcagaccaggacgcccggggcatggtggagttccaggagggcgtggaacctggtggacgtacgggtgcccctctttatccggcctgaggatgacgacgagaagcaaccttgctggtgaaaggccatcgaacgtgccccgcaggcactggccaccctcgggccgccgcctgggaaacatcaccatcatcaaggagcaagcccagaagacgtggtggtcctttgagcagcctgagttctcggtcagccgcggggaaccagtgggccgcatccctgtcatccggcgtgtcctggaacggcgggaaagtcccaggtctcctaccgcacacaggatggccaccgcgcaggccaaccggactacatcccccgtggaagggtgacctgctggtcccacccttggggaagcctggaaaaaaactgcaagggaaaactcctggaaacctgcaaaag

SEQ ID NO: 77549 - DNA, 646 bp, Homo Sapiens
gcggccgctcgcaccgcggctcctgccagctcactctgagagatgtgggccccagggcagagaacaccaggcgggtgggcgtgtcgggcacaccagcagtcaggcgagagtcgtgggaggagacggaggtgagggtggagtagtccctcggcagtgtggtcgagtgtgagtgttctgagcgggtcagtgagttgtagtcccgtgtgagggtggaggatgtgcttagcacgcggtggggcacgtgtgggctcaggtgggtgccataggcagcagcactggtcgtggtcatcctgtgcagggagttggtgctgcccgggaaggcaaagtccatccggccattcaccaggtgctcagtgtcatcggagacgctgggcctctggctgcccgatggagagcgtagaacgtcatcgctgtacataaggaagctgtcgtagtcctccccgctctgggcgtccacgatagggatgtcagggatgatggggatggacatgggcctcttgggctgggtggccaggttgatgatggcctcccgctcaggcccccagccggccccgttgcgcgccttcaccgtgtagcggtagggctggactcccgaaggttctcaaccgcatcacccgttcggtaccggctcgatcgatcatgtctt

SEQ ID NO: 77550 - DNA, 719 bp, Homo Sapiens
gactcttcaatgaaaatgtatttcacattaaacacaaggtacatatcatgcaaatgaggcatcaccatggtcacaatggtgctgtgaggtacaacaaatcacaagaaaacagacatttagcaaaataaggttccaggaaagatgagaggcattttctgaaagccagaccatgctatggtttctgtgtgcctgtcataaagggacttggccagtatttgccgagatggacagcaccgcattatgtggaggcatgtactttattgagtagagacacatacacagacatataatttctgtaactaatacattcttaaatgtagctggctgtaaaagcacatgaacaagattactactgagacttctttgtatctcctggttgcaaacctctctcagaattatgaatctttccaaacccttaattatacaagtcaaaacaaaaagtttcaaagaagaaaaggtcattttaatttgaaagccacatttcgccacaagaaacaaaattaagaaaacacaccattatatggcataaaatgtgtggagtatacattctagtgtcatttttcccattcagattttttcttgaagtccattaaagtgacatactgggtccaatgtgggccccctattgtttcagaatgctatggtttttgtttgcgcctggttttattaaagctgggcaaacacaggagcaaacaaagaaaactcccaagatccaatag

SEQ ID NO: 77551 - DNA, 987 bp, Homo Sapiens
  misc_feature (78)..(78): n is a, c, g, or t
  misc_feature (118)..(118): n is a, c, g, or t
  misc_feature (232)..(232): n is a, c, g, or t
  misc_feature (288)..(288): n is a, c, g, or t
gatatgtacatatgccccgttaatttcccgtgttttttgatggcgaacatcaccgaacatgactgtcgattatgatcnttagattgctggagccagatcgcagagaacatgattatgntagtggagtcttgaccaggattgagcttatgacttgatgttcttgatatgatcactccacttagtgaatagcagtgcctctcaaggaattagattctaactaaatcaatacttntacattcctgaggaaagtatctgtaagtcagagatctgatcaaatactcaaccttntggaattgatcctctactgtaatactcatatgctagattattgaattttcagagtgaaaaaaaattgacagggtaatatataggccatattatagtgaagatcataagtataaatgtcctcgtttaatctttccatattgaggacagcctctgcatataaaaatgttcattgggagaaaaattatttttaaaactaaatttttatagtagtcctccattactggcaattaaggagcaacccacaaaatgtcattatgtggttctttgattaggcataaaaagtattgcaaacagcttttctattcctttggaatatgaatctttttaatgtctaaagttaacctgcaacattttctagtaggacaagtcaatgtaaattaggtaatttttgcctgttttataccttctgttgcattttgttcaaatgaaaacattttttaaaacatgattgaatttttacttctcagataattggtttgagtgtggaatttcttttttaacactttgatatgtaagttagtgtaaattaatacttttataacactactaggctttatatttttatggaatgttttaaaatttgaaatttttgaagtgttaatttagcagtactttatcattatgtgccaatactgacaagaaaaacaattttttatgtatttaatatactatggtattcaataaattctattttaaaat

SEQ ID NO: 77552 - DNA, 1881 bp, Homo Sapiens
tgtactatgacccggcgtaaaaagcaggctgtacgctcggattccgggatatcgtcgacccacgcgtcccggtgcacgctgcaaagaccagcaagctctctggaccttggagcaggcctgccgccttcatgtccactctcctcatcaatcagccccagtatgcgtggctgaaagagctggggctccgcgaggaaaacgagggcgtgtataatggaagctggggaggccggggagaggttattacgacctattgccctgctaacaacgagccaatagcaagagtccgacaggccagtgtggcagactatgaagaaactgtaaagaaagcaagagaagcatggaaaatctgggcagatattcctgctccaaaacgaggagaaatagtaagacagattggcgatgccttgcgggagaagatccaagtactaggaagcttggtgtctttggagatggggaaaatcttagtggaaggtgtgggtgaagttcaggagtatgtggatatctgtgactatgctgttggtttatcaaggatgattggaggacctatcttgccttctgaaagatctggccatgcactgattgagcagtggaatcccgtaggcctggttggaatcatcacggcattcaatttccctgtggcagtgtatggttggaacaacgccatcgccatgatctgtggaaatgtctgcctctggaaaggagctccaaccacttccctcattagtgtggctgtcacaaagataatagccaaggttctggaggacaacaagctgcctggtgcaatttgttccttgacttgtggtggagcagatattggcacagcaatggccaaagatgaacgagtgaacctgctgtccttcactgggagcactcaggtgggaaaacaggtgggcctgatggtgcaggagaggtttgggagaagtctgttggaacttggaggaaacaatgccattattgcctttgaagatgcagacctcagcttagttgttccatcagctctcttcgctgctgtgggaacagctggccagaggtgtaccactgcgaggcgactgtttatacatgaaagcatccatgatgaggttgtaaacagacttaaaaaggcctatgcacagatccgagttgggaacccatgggaccctaatgttctctatgggccactccacaccaagcaggcagtgagcatgtttcttggagcagtggaagaagcaaagaaagaaggtggcacagtggtctatggggggcaaggttatggatcgccctggaaattatgtagaaccgacaattgtgacaggtcttggccacgatgcgtccattgcacacacagagacttttgctccgattctctatgtctttaaattcaagaatgaagaagaggtctttgcatggaataatgaagtaaaacagggactttcaagtagcatctttaccaaagatctgggcagaatctttcgctggcttggacctaaaggatcagactgtggcattgtaaatgtcaacattccaacaagtggggctgagattggaggtgcctttggaggagaaaagcacactggtggtggcagggagtctggcagtgatgcctggaaacagtacatgagaaggtctacttgtactatcaactacagtaaagaccttcctctggcccaaggaatcaagtttcagtaaaggtgttttagatgaacatcccttaatttgaggtgttccagcagctgtttttggagaagacaaagaaaattaaagttttccctgaataaatgcattattatgactgtgacagtgactaatccccctatgaccccaaagccctgattaaatcaagagattccttttttaaaaatcaaaataaaattgttacaacatagccatagttactaaaaaaaa

SEQ ID NO: 77553 - DNA, 880 bp, Homo Sapiens
  misc_feature (22)..(22): n is a, c, g, or t
  misc_feature (783)..(783): n is a, c, g, or t
  misc_feature (797)..(797): n is a, c, g, or t
  misc_feature (800)..(800): n is a, c, g, or t
tatagtgctaggtagcgaggcntgggtgtgtgaattcggcacgaggcgccttcctcgcgcgctgtgtgtgcacgctgcaaagaccagcaagctctctggaccttggagcaggcctgccgccttcatgtccactctcctcatcaatcagccccagtatgcgtggctgaaagagctggggctccgcgaggaaaacgagggcgtgtataatggaagctggggaggccggggagaggttattacgacctattgccctgctaacaacgagccaatagcaagagtccgacaggccagtgtggcagactatgaagaaactgtaaagaaagcaagagaagcatggaaaatctgggcagatattcctgctccaaaacgaggagaaatagtaagacagattggcgatgccttgcgggagaagatccaagtactaggaagcttggtgtctttggagatggggaaaatcttagtggaaggtgtgggtgaagttcaggagtatgtggatatctgtgactatgctgttggtttatcaaggatgattggaggacctatcttgccttctgaaagatctggccatgcactgattgagcagtggaatcccgtaggcctggttggaatcatcacggcattcaatttccctgtggcagtgtatggttggaacaacgccatcgccatgatctgtggaaatgtctgcctctggaaaggagctccaacacttccctcattagtgtggctgtcacaaagataatagccaaagttctggaggaacacaagctgcctggtgcaatttgntccttgacttgggnggnagcagatattggcacagcaatggcccaagatgaacgagtgaacctgctgtccttcactggggagcactcagtggggaaaa

SEQ ID NO: 77554 - DNA, 1584 bp, Homo Sapiens
  misc_feature (77)..(77): n is a, c, g, or t
  misc_feature (79)..(79): n is a, c, g, or t
  misc_feature (93)..(625): n is a, c, g, or t
  misc_feature (655)..(677): n is a, c, g, or t
  misc_feature (864)..(878): n is a, c, g, or t
cttagtatggaagcccacctcccgaggagaaagcgacagtatcgtagcgcagggtcgaacagagacgcacgaggagntncaggggaacgcttnnnnnnnnnnnnnnnnnnnnnnnnnnnnnnnnnnnnnnnnnnnnnnnnnnnnnnnnnnnnnnnnnnnnnnnnnnnnnnnnnnnnnnnnnnnnnnnnnnnnnnnnnnnnnnnnnnnnnnnnnnnnnnnnnnnnnnnnnnnnnnnnnnnnnnnnnnnnnnnnnnnnnnnnnnnnnnnnnnnnnnnnnnnnnnnnnnnnnnnnnnnnnnnnnnnnnnnnnnnnnnnnnnnnnnnnnnnnnnnnnnnnnnnnnnnnnnnnnnnnnnnnnnnnnnnnnnnnnnnnnnnnnnnnnnnnnnnnnnnnnnnnnnnnnnnnnnnnnnnnnnnnnnnnnnnnnnnnnnnnnnnnnnnnnnnnnnnnnnnnnnnnnnnnnnnnnnnnnnnnnnnnnnnnnnnnnnnnnnnnnnnnnnnnnnnnnnnnnnnnnnnnnnnnnnnnnnnnnnnnnnnnnnnnnnnnnnnnnnnnnnnnnnnnnnnnnnnnnnnnnnnnnnnnnnnnnnnnnnnnnnnnnnnnnnnnnnnnnnnnnnnnnnnnnnnnnaagaattcggcacgagggcggctgtaggcnnnnnnnnnnnnnnnnnnnnnnnaacagtttttcacaacaaaatttattagaagaatagtggttttgaaaactctagcatccagtgagaactaccatacacaacattacagctgggaatgtttctccaaaatgtcatggtcaaataatacaatggaaccattaaatcttacacatgcacgaaagaacaagcgcttttgacatacaatgcnnnnnnnnnnnnnnnggggggggaccacatggattaaaattttaagtactcatcacatacattaagacacagttttagtccagtcaaaaatcagaactgcattaaaaaatttaatgtagtgcaatcaaaccaaaaaacttaatttgtgatcataagtgctctactacataaacattgatcatagcaaggaacaaaaagttcaaatcacacagtacaaaaaaatctgtaaataaatataaactacagtacaagagaaatattaaattatacaattccatcaaactgtaaacagtatattgaaatgaggtccataagagtaaagggggttcctgttttgttgtatgacacttgaacttctagaaatctgaaagataccattttccatatctccaaaggctatgggttttatatgtggagagaatttattttagatgtaagatatcaaatattaaagcagagaaataatctattttgttaaccacagatagtactgcagaaaacaaaagcaattttaaagaggcaagtcttaacattaaagatgcaaaggactaaaacactggaattagaacttcgcatcagaaaaaacttgtcactgagaacttcaaggctacaaaatacacggacaaaactgtctgctgatatgcagacctagacctctgctaatttttttgacattttacatactcatgttacaacaccaactttggcagaatcactactg

SEQ ID NO: 77555 - DNA, 699 bp, Homo Sapiens
  misc_feature (502)..(557): n is a, c, g, or t
gagataatagagatgctgcagtctgaagagactcccagcacctctcagttgaatgaattaatgatggcttctgagtcaactttactggctcaggaaccacgagagatgactgcagatgtaatcgagcttaaagggaaattcctcatcaacttagaaggtggtgatattcgtgaagagtcttcctataaagtaattgtcatgccgactacgaaagaaaaatgcccccgttgttggaagtatacagcggagtcttcagatacactgtgtcctcgatgtgcagaagttgtcagtggaaaatagtattaacagctcactcgagcaagaaccctcctgacagtactggctagaagtttggatggattatttacaatataggaaagaaagccaagatttaggtaatgagtggatgagtaaatggtggaggatgagagtcaaaatcagaattatagaagaagtatttcctgtaactatagaaagaattatgtatatatacatgcagaannnnnnnnnnnnnnnnnnnnnnnnnnnnnnnnnnnnnnnnnnnnnnnnnnnnnnnnatccatagtggacttattcagaacatagatatgtattcagcttgtcttcaaatacggccaagcagaaaatgttttatattttataaatcatcttttgactctgtatttaaattctatgatactgaaaataaaggcattctgg

SEQ ID NO: 77556 - DNA, 1305 bp, Homo Sapiens
tgcttcagactgcaaagaatttgttgaaagaggagaaattggtgcatagctatccgtatgactggaggaccaagaaacctgtggttattcgtgccagcaagcagtggtttataaacatcacggatattaagactgcagccaaggaattgttaaaaaaggtgaaatttattcctggatcagcactgaatggcatggttgaaatgatggacaggcggccatattggtgtatatcaaggcaaagagtttggggtgttccaattcctgtgtttcatcataagaccaaggatgaatacttgatcaacagccaaaccactgagcatattgttaaactagtggaacaacacggcagtgatatctggtggactcttccccctgaacaacttcttccaaaagaagtcttatctgaggttggtggccctgatgccttggaatatgtgccaggtcaggatattttggacatctggtttgatagcggaacttcatggtcttatgttcttccaggtcctgaccaaagagcagatttgtacttggaaggaaaagaccagctcgggggttggtttcagtcatccttattaacaagtgtggcagcaaggaagagagcaccttataagacagtgattgttcatggatttacccttggagaaaagggagaaaagatgtccaagtctcttgggaatgtcattcatcctgatgttgtcgttaatggaggacaagatcaaagcaaagagcctccgtatggtgctgatgtccttcgctggtgggtagctgattccaatgtcttcaccgaagttgcaattggcccatccgtgctcaatgctgccagagatgatattagcaagcttaggaatacacttcgctttcttttgggaaatgtggctgatttcaacccagaaacagattccatccctgtaaacgatatgtatgtcatagaccagtacatgctacacttactgcaggatttggcaaacaagattaccgaattatacaaacaatatgattttggaaaagttgttcggctgttacggacgttttataccagagagctctctaacttttatttcagtataatcaaagataggctctattgtgaaaaggaaaatgaccccaaacgacgctcttgtcagactgcattagttgaaatttggggatgtaatagttcgttcttttgctcccattcttcctcacctggctgaagaggtgttccagcacataccttatattaaagagcccaagagtgttttccgtactgggtggattagtactagttctaatctggaaaaagcccgggtcggaagaagctgtgga

SEQ ID NO: 77557 - DNA, 1583 bp, Homo Sapiens
  misc_feature (74)..(108): n is a, c, g, or t
  misc_feature (267)..(267): n is a, c, g, or t
  misc_feature (335)..(335): n is a, c, g, or t
  misc_feature (554)..(554): n is a, c, g, or t
atgatagatcatataggggctagctcgttgagcgaacgacgagcgcagcgagtagtgagcgaggaagcggccgnnnnnnnnnnnnnnnnnnnnnnnnnnnnnnnnnnncagtcgacggtaccggacatatgcccgggaattcggccattacggccgggcctgatgtgtcgttaatggaggacaagatcaaagcaaagagcctccgtatggtgctgatgtccttcgctggtgggtagctgattccaatgtcttcaccgaagttgcaantggcccatccgtgctcaatgctgccagagatgatattagcaagcttaggaatacacttcgctttcttntgggaaatgtggctgatttcaacccagaaacagattccatccctgtaaacgatatgtatgtcatagaccagtacatgctacacttactgcaggattggcaaacaagattaccgaattatacaaacaatatgatttggaaaagtcgttcggctgttacggacgttttataccagagagctctctaacttttatttcagtatgatcaaagataggctctantgtgaacaaggaaaatggacccaagagagctcttgtcagactgcattagttgaaattttggatgtaatagttcgttctttgtgtcccattcttcctcacctggctgaagaggtgttccagcacataccttatattaaagagcccaagagtgttttccgtactgggtggattagtactagttctatctggaaaaagcccgggttggaagaagctgtggagagtgcgtgtgcaatgcgagactcatttcttggaagcatccctggcaaaaatgcagctgagtacaaggttatcactgtgatagaacctggactgctttttgagataatagagatgctgcagtctgaagagacttccagcacctctcagttgaatgaattaatgatggcttcttgagtcaactttactggctcaggaaccacgagagatgactgcagatgtaatcgagcttaaagggaaattcctcatcaacttacaaggtggtgatattcgtgaagagtcttcctataaagtaattgtcatgccgactacgaaagaaaaatgcccccgttgttggaagtatacagcggagtcttcagatacactgtgtcctcgatgtgcagaagttgtcagtggaaaatagtattaacagctcactcgagcaagaaccctcctgacagtactggctagaagtttggatggattatttacaatataggaaagaaagccaagatttaggtaatgagtggatgagtaaatggtggaggatgggagtcaaaatcagaattatagaagaagtatttcctgtaactatagaaagaattatgtatatatacatgcagaaatatatatgtgtgtgtgtatctgtggatggatatatgtatatctcttcctatatatatccatagtggacttattcagaacatagatatgtattcagcttgtcttcaaatacggccaagcagaaaatgttttatattttataaatcatcttttgactctgtatttaaattctatgatactgaaaataaaggcattctggaaaaataaaaa

SEQ ID NO: 77558 - DNA, 415 bp, Homo Sapiens
  misc_feature (218)..(276): n is a, c, g, or t
tgtcagtggaaaatagtattaacagctcactcgagcaagaaccctcctgacagtactggctagaagtttggatggattatttacaatataggaaagaaagccaagatttaggtaatgagtggatgagtaaatggtggaggatgggagtcaaaatcagaattatagaagaagtatttcctgtaactatagaaagaattatgtatatatacatgcagaannnnnnnnnnnnnnnnnnnnnnnnnnnnnnnnnnnnnnnnnnnnnnnnnnnnnnnnnnncatagtggacttattcagaacatagatatgtattcagcttgtcttcaaatacggccaagcagaaaatgttttatattttataaatcatcttttgactctgtatttaaattctatgatactgaaaataaaggcattctgg

SEQ ID NO: 77559 - DNA, 1630 bp, Homo Sapiens
  misc_feature (873)..(913): n is a, c, g, or t
  misc_feature (1244)..(1260): n is a, c, g, or t
  misc_feature (1330)..(1388): n is a, c, g, or t
ggcacgaggaaaaaaagaaagaaagaaaggtcggaatttcttttgggtcaatatttttaagtgtgtgaggagatgctcagtagcagcagcctatggcaagagcttataaatgattgatgcaaatttgcactctgctccccctctgtaaggatactgatagcacaacctcttccccccaccccgccccgccttttggtcgtccatccctgtccctttctggccctcttcctgtagcccagtctcaggctttcctcttcctgaagccctacagagttagggaatggagcccaggcaccaggggtctaaagtgtgagccactgagaagagagacgccaactgcacccttgccacttccaaagcaatagaggcagagtggtcccctctttgccacctaggccagttttgaccctggcattaactggccttagaagaaactggatcctggtagggggtggcattttgtttgtttcttccaatctgctgaatcttttgactgcaccttacaaacagcagtctgctcccatgaccctctgcccacttccattggtctccaggccccaataatctggggttgaaactttgaggaaatgccagtgacttattccagagtgcctcagttaggggaacttctctgtaaagaaccctgggtattgagcaaaaaccttattatcgttaatgacctataattggaagcttcctgcctttttctttggttgctcctgtggaaaatactgaaaagattactttgttttattttgttgtctttttataaaaggggaggtggagagaccccttcagagcagggattgtgccgggagagtgcctctgactttgggacatttcatccacagaaatttccaagccaatggtttnnnnnnnnnnnnnnnnnnnnnnnnnnnnnnnnnnnnnnnnnaaaaacatgcatttttaccgtgcacgtaaattggtcagcagaaaagggagcccagaaaaggcagcagatggaccatgcccttgctgggttttccttttctttgggactgtgaggggaaatggtttttagaggtgagggttggtccatgtggaggaaagaagtgtctctgttgggggacagaggaacctggggagtccatcgcatgtcctacaatctgctcttagacacggccttgccaggagagcctgccctcagactgcaggaccagaacccctgcctccatctttccaagcaccggggcgaaaaaccacaaaggaaaggaagaaaattnnnnnnnnnnnnnnnnnaaatcacttggtgattaaaaaaataactgctccataaataaaactcctaaagtcacttatgtttaaaggnnnnnnnnnnnnnnnnnnnnnnnnnnnnnnnnnnnnnnnnnnnnnnnnnnnnnnnnnnngatttagagtcaatctccaatgttgtgctaaaaagtttaaattaaatgtaagcattaaggggataagtcttatgctatctcagttgacattgaggttattttgggccagagaaggaggaagctagttggactttgttttgttttccaaaagttctccactattggttttagagagagcaaggacatctttcctctgacacgtgggaatgggtgatatttgtgtaataaaatttttaaaagac

SEQ ID NO: 77560 - DNA, 1385 bp, Homo Sapiens
  misc_feature (50)..(276): n is a, c, g, or t
  misc_feature (291)..(291): n is a, c, g, or t
  misc_feature (301)..(406): n is a, c, g, or t
  misc_feature (506)..(516): n is a, c, g, or t
  misc_feature (1089)..(1135): n is a, c, g, or t
  misc_feature (1137)..(1158): n is a, c, g, or t
  misc_feature (1160)..(1160): n is a, c, g, or t
  misc_feature (1162)..(1167): n is a, c, g, or t
  misc_feature (1169)..(1217): n is a, c, g, or t
  misc_feature (1219)..(1234): n is a, c, g, or t
  misc_feature (1236)..(1237): n is a, c, g, or t
tgcctttgctgcttttgctcacatgtcttcctgcttatcccctgatctgnnnnnnnnnnnnnnnnnnnnnnnnnnnnnnnnnnnnnnnnnnnnnnnnnnnnnnnnnnnnnnnnnnnnnnnnnnnnnnnnnnnnnnnnnnnnnnnnnnnnnnnnnnnnnnnnnnnnnnnnnnnnnnnnnnnnnnnnnnnnnnnnnnnnnnnnnnnnnnnnnnnnnnnnnnnnnnnnnnnnnnnnnnnnnnnnnnnnnnnnnnnnnnnnnnnnnnnnnnnnnnnnnnnccaggcttaccactntatgctccgnnnnnnnnnnnnnnnnnnnnnnnnnnnnnnnnnnnnnnnnnnnnnnnnnnnnnnnnnnnnnnnnnnnnnnnnnnnnnnnnnnnnnnnnnnnnnnnnnnnnnnnnnncccaagattcggcacgaggaagatcactgcagtggaaactgttctggaagaggctgcaacatagcccatgcttagggactggatggtttttgcaagagcnnnnnnnnnnnttaaactaccatctcccaacttttaaagccagatacttgacaaggattttagatcttaatgggttcgatggtagggaatacggaaaggatacactgctaatattgtgtctaacaataaagcaaacaactcgatgctgtaagaagacaagctgtttgagctttcaaacacacatgcacacagcacaattcagaaatacccaggaggattcctgcaggcttaacagttggcatcgtactgaaatgaaacgtgtattaacaagaaaatgtcaaacttttggggaaacaaattttctgttacttcccacccaactaaaagggaagataaaaccatcatcaccagaacaaaacagattttctccaaacaagtacaatgatagtgccgggttggcagttaactctttcaccctactaaattcaagagctcatctccaccctgtcctgtatattttctacatttctattaagaggctacttggtagtgtcagcgggcatcttttacaccttctagtagctcaagctagtaaaaccttgtacttctctattgcgccgccattaaaagcagcattagtgccnnnnnnnnnnnnnnnnnnnnnnnnnnnnnnnnnnnnnnnnnnnnnnncnnnnnnnnnnnnnnnnnnnnnncncnnnnnncnnnnnnnnnnnnnnnnnnnnnnnnnnnnnnnnnnnnnnnnnnnnnnnnncnnnnnnnnnnnnnnnncnncctttgggggcggctcttttccccctaaaaaaatttttttcaaaacatttttgtggggccgccgcggcccccccgccgaaagaaacacgggcccatattatcgttttccacagaaaaaacccgcgcaaaaaacaagaggggttgaatc

SEQ ID NO: 77561 - DNA, 664 bp, Homo Sapiens
  misc_feature (26)..(26): n is a, c, g, or t
  misc_feature (82)..(82): n is a, c, g, or t
cagattaagaaagaaggtgcatttantgtcacccagaaccgggcgctgcagctgctttatgatctgcgttacctcaacattnttctgacagccaagggtgacgaggtgaagagtggccggagcaagccagactccagaattgagaaagtgactgaccacctggaagccctcattgatccatttgacctggacgttttcacgccacacctcaacagcaaccttcatcgcctggtgcagcgaacttctgttctgtttggattggtgactggtacagagaatcagctcgccccccggagcaagtacgttcaactcccaagaaccccataacatcctgccacttggatccagtcagatcaggtttggacttctcccacttgagcatgacaagcactcgaaaggctaaatcaaccaagaaacatcgaaacaaaagctcagtacgatgccaactgttaagcctgcaggaatcctccggggttgtccccccggcaagctccacagctggtgaaccgacagttcctggctccttgttcagacagcttgtcagtgaagaagacaacacgtctgcaccttcattattcaaacttggctggctctctagtatgactaagtaacatggcaacacatctgtctctccctaaataaatactaccacattatttcttct

SEQ ID NO: 77562 - DNA, 726 bp, Homo Sapiens
  misc_feature (72)..(85): n is a, c, g, or t
taccatcgaacccattaagatctaaaatccttgtcaagtatctggctttaaaagttgggagatggtagtttnnnnnnnnnnnnnngctcttgcaaaaaccatccagtccctaagcatgggctatgttgcagcctcttccagaacagtttccactgcagtgatctttcagttctgcccacattaggttagcaggctgtggagagaagtgcctgtgtcttacccttttcccaagacagtcctcactttccaaattctagtttggtcacaaaggctcatgctgttccgtgtccgtcttcaaatctggaccgacagcaaagtcctctgactagagccatcgtgcttcgtcagctccgcttgtgtgtgccgtgtggactccgagtggcgtcgcgcggagggcgagtgggcaggagggctcaggccaactctaaggcacttttctctacatccaatggcaggttgtccccccggcacgctccacagctggtgacccgacagttcctggctccttgttcagacagcttgtcagtgaagaagacaacacgtctgcaccttcattattcaaacttggctgggctctctagtatgactaagtaacatggcaacacatctgtctctccctaaataaatactaccacattatttcttctaaaggtgcctctgctcatctgattctcagccacaccaatctttccagtttcactgatggaatgtggcccctagttactg

SEQ ID NO: 77563 - DNA, 1268 bp, Homo Sapiens
caacgattggtcctcagctccgggcagagctacagagcattgaagaaggtgtgcaagggcaacaggatgccctcaacagtgccaagctgcactcagttcttttcatggccagactctgccagtccctgggagagctgtgcccccatctgaagcagtgcatcctgggaaaatcagagagctcagagaaaccagcaagggagtttagggctctgagaaaacagggaaaggtgaaaactcaggaaatcattcctacacaggccaagtggcaagaggttaaagaagtactcctccagcagagcgtgatgggctaccaggtctggagcagtgcacttgtgaaagttttgattcatggattcacccagtcattacttctagatgatgctggctcagttctggccacagccaccagctgggatgagctagaaattcaggaggaggcagagtctggcagcagtgtcacatccaagatccgactccctgcacagccgtcctggtatgtacagtccttcctgtttagtttatgccaggaaataatcgggttggaggccatgccttgccaaaggtgacattacaggagatgctgaaaagctgtatggttcaagtagtagctgcctatgagaaactctccgaagaaaaacagattaagaaagaaggtgcatttccagtcacccagaaccgggcgctgcagctgctttatgatctgcgttacctcaacattgttctgacagccaagggtgacgaggtgaagagtggccggagcaagccagactccagaattgagaaagtgactgaccacctggaagccctcattgatccatttgacctggacgttttcacgccacacctcaacagcaaccttcatcgcctggtgcagcgaacttctgttctgtttggattggtgactggtacagagaatcagctcgccccccggagcagtacgttcaactcccaagaaccccataacatcctgccactggcatccagtcagatcaggtttggacttctcccactgagcatgacaagcactcgaaaggctaaatcaaccagaaacatcgaaacaaaagctcaggttgtccccccggcacgctccacagctggtgacccgacagttcctggctccttgttcagacagcttgtcagtgaagaagacaacacgtctgcaccttcattattcaaacttggctggctctctagtatgactaagtaacatggcaacacatctgtctctccctaaataaatactaccacattatttcttctaaaaaaaa

SEQ ID NO: 77564 - DNA, 427 bp, Homo Sapiens
  misc_feature (366)..(366): n is a, c, g, or t
gtagagacagggtttcaccatgttagccaggatggtctcgatctcctgacgtgatccgtccaccttggcctcccgaagtgccccgcagaagcctcttggcagcctttacctgatctgactggatgccagtggcaggatgttatggggttcttgggagttgaacgtactgctccggggggcgagctgattctctgtaccagtcaccaatccaaacagaacagaagttcgctgcaccaggcgatgaaagttgctgttgaggtgtggcgtgaaaacgtccaggtcaaatggatcaatgagggcttccaggtggtcagtcactttctcaattctggagtctggcttgctccggccactcttcacctcganacccttggctgtcagaacaatgttgaggtaacgcagatcataaagcagctgcagcgcccgg

SEQ ID NO: 77565 - DNA, 829 bp, Homo Sapiens
gttcaaacaattctcgtgcctcagcctcctgagtagccggcatgcgcttccatgcccgactaactttttttacttttagtagagacagggtttcaccatgttggtcagccggatcttgaactcctgacctcaggtgatcctcttgcctcagcctctcaaaagcactgggattacaggcatgagccaccaaatccggcctctttcttaaaattctgatatatttctctagcatgttttaactgcttttgttagcagaatggacaatgactaaattttagcacattcttttcaattaaataggttatagtacacagtcacaaattcaaagagctatggaatacatatgcatcagaaaagcaatttatgttccatacacaatcaatgctaaatgcagtgtaaggacagatcaattctgcaaaatcagagatggtgatataaacatctgctttcagtcaatgaaggttagaaaggggccaagcaatgaagaaacactgagaaaaataaatcctaattatatatttataaatcactactaacctaccaataatactttgtgaaaagagtatttcagcttttgtgtcttggggcaaaaataattttcaaattattttaataataatgggattactccaaatatatgacaaagcacagtcatcagcagctggagttttccctactggtcacagctgcacagaaatagccatggatttgtttaaaatattacatttttgataaaagcacagagaacaggagtaaagaaaagttgtcttgctattatttgtgggtttcatttctatttacattgtgaaggcactgaggaagatgtaag

SEQ ID NO: 77566 - DNA, 816 bp, Homo Sapiens
gtattggagaaggactgggtcagagatctctttatttttaaatggttgtttttgttttaatttgcacacctacacagaggaaataacttaggtactttctgtttttttaaaaaaaataataaggtctcatggcttcattcagagaccacagtaacaacagcagcccaccaatcagagaagctggttgttattaaccaagctacagattcacactttctggcctaaaccctaatgggatgaggcttttcaccccaggccatgctggtggtgattttttagcccctaaataaaacactggactatttcctgtttacttcattgattgcaactacaaaggtggactcaaagcaaagcacaatcatgccagccaacattccagaattctgctgagaactccaagtctgtgaggggagaggttttacaagccagacaggcctgggggactgcagtccccaaggagaccctgccacatgctggccctttgagtgagaatgctgcatctttctacatatcttcatgagaatactgagaattggattttccttttcaaaatgcactttgctttttttgtatgttttgttatgttgagatgtttctaaagaaaagattttatgtaattataagatgaagcgtagtgaattgtacagctgttgtaataatgacctatttctatataaaataaaattgtatggcttatgtgtaaattattttgtatctgagataccagttccttttcccaaatataaaagtataaaagttttcttgtgtttttctgtgagtgaaaattttgtaataaattaacaaatttgtaccaaa

SEQ ID NO: 77567 - DNA, 809 bp, Homo Sapiens
gggacggaaggagcggcggcgacggaggaggaggatggaggcggtggtgttcgtcttctctctcctcgattgttgcgcgctcatcttcctctcggtctacttcataattaccattgtctgatttagaatgtgattacattaatgctagatcatgttgctcaaaattaaacaagtgggtaattccagaattgattggccataccattgtcactgtattactgctcatgtcattgcactggttcatcttccttctcaacttacctgttgccacttggaatatatatcgatacattatggtgccgagtggtaacatgggagtgtttgatccaacagaaatacacaatcgagggcagctgaagtcacacatgaaagaagccatgatcaagcttggtttccacttgctctgcttcttcatgtatctttatagtggtagcaactgcccttgctaatcaccgtaacctcggctgagaaagaagaggaagcgaaatccaagatgcagctcagttcatcaaagcctagcaggtcccctcagctgccttttcatgcctgccacagactacagtaggacaaaacctgacctggtctttgaagttaagagctaagaaagcttcctatagtagtatctcccatggcacttaccacattcctatctggtattacaattatttgtatgcaattaatcactcttagattgtatgttcctggagggcagaatatgcccattcatatttgtatcttcttccttctgctcttggcacctaacacagtgccttgcacacaaacaataaatgattgttgagtgaataagt

SEQ ID NO: 77568 - DNA, 1041 bp, Homo Sapiens
  misc_feature (46)..(46): n is a, c, g, or t
  misc_feature (86)..(86): n is a, c, g, or t
  misc_feature (194)..(194): n is a, c, g, or t
  misc_feature (258)..(258): n is a, c, g, or t
  misc_feature (269)..(269): n is a, c, g, or t
  misc_feature (530)..(599): n is a, c, g, or t
cctgggccagatcgccgagtgacatatatcatagtgattagatatnttgttttagcatcattcagcagacagctgatccagtatcnaaggaaagatgtttgtatgtaactgttcatttagtgcgtacattattggtgatgctgtgttcagacatgtgacaacatgcagtgacacagagagcagcacagaccccntacgtaaaagcttgaacttgtaattgcaggcccggttgctagtagaacatgaaagtgtaatgcntggccctgctntcatctcaagagttctcatagtccagtgtagagacaacatgtaagccacagcagcaggaagaagagctgtggaaggaggctgtgcaactgcccggggctgagaggccaacttccccaacgaggtgccctagagccaatcacaaaacctgagtaagaagttactgctttgatggagtggtgggatggggagaagaggttccaggcatagaacagtatgtatctgactagagaatttaaaggtttttttctggacataggtgnnnnnnnnnnnnnnnnnnnnnnnnnnnnnnnnnnnnnnnnnnnnnnnnnnnnnnnnnnnnnnnnnnnnnnaactatagcctaacataggttttaagttgtacttcccccaactccccacccccagtcactcttttttagtgaaaaagtttggacatgaaagatcctaatatattctttcctttgggtatgaatgattgtcttttactcaaatgattgttcctttgtgaaccttagggacgcaagtctggacaaaccaggctctgtaggaacattcctgagaaaacattagtgacattcatttcttctttccacagtatgatcttagctttgataaatgactgaagctggagaagccgtggttgaagtcagcctacactacagtgcacagttgaggagccagagacttcttaaatcatccttagaaccgtgaccatagcagtatatattttcctcttggaacaaaaaactatttttgctgtatttttaccatataaagtatttaaaaaacatg

SEQ ID NO: 77569 - DNA, 961 bp, Homo Sapiens
cagtcgacggtaccggacatatgcccgggaattcggccattacggccgggggggtttgacggaaggagcggcggcgacggaggaggaggatggaggcggtggtgttcgtcttctctctcctcgattgttgcgcgctcatcttcctctcggtctacttcataattacattgtctgatttagaatgtgattacattaatgctagatcatgttgctcaaaattaaacaagtgggtaattccagaattgattggccataccattgtcactgtattactgctcatgtcattgcactggttcatcttccttctcaacttacctgttgccacttggaatatatatcgatacattatggtgccgagtggtaacatgggagtgtttgatccaacagaaatacacaatcgagggcagctgaagtcacacatgaaagaagccatgatcaagcttggtttccacttgctctgcttcttcatgtatctttatagtatgatcttagctttgataaatgactgaagctggagaagccgtggttgaagtcagcctacactacagtgcacagttgaggagccagagacttcttaaatcatccttagaaccgtgaccatagcagtatatattttcctcttggaacaaaaaactatttttgctgtatttttaccatataaagtatttaaaaaacatgaatgagtttctgtagatttctagttctcaactttagcctgaacgccaacacttgaaggtgtttttcatcctctgtatgttgacggtggttattggtctgtacagaacaggactgccatcccaagtttgcatgcaaagaaataaaggacacactttaaagggcaactgaaagatgagcggagcaaggtgcccttagggtctactgaagtcttcgtcacaccactgctgctggccaaagaaattcctttgtggttggcactcctattggtaaattttaaggggaa

SEQ ID NO: 77570 - DNA, 742 bp, Homo Sapiens
  misc_feature (266)..(296): n is a, c, g, or t
gatgcatacctcagtgcagaaccacagaatctctgcagcggaaacgccgtgcatctcttgtctgttggcagcgagcacatcgtgctggagacacgagtttctaagcagctggcacgagggctgctgacggcatgggtcgtgcttcagggtggcaatacctcttaggaacttagggcaggaagcaatacttcagcattgaatgtgtgtaaatagttgctttgagttgcaattgctattttcttctcagtcccagctcagatcgaatnnnnnnnnnnnnnnnnnnnnnnnnnnnnnnnggtaaacaagcacacacaattttatccaatgcaaacaaatgtagagcatcagttacaaaaccctcgaatagcttgagagccccacaggctctgccacacccgtgacttcatccacactgacgtcacccgcgggggctccccctgcacatttgcacacgatccggagagccgaaggccgcgtgcttcctgtcacatgggctgtaatcatttgtagtttccaaagacacgtctgcatttgaatttctagattttcgaggtaaggagttttttttaattggttgtttggaaaatcacatcatgcctagaatctgaaattgaattagcaagaaccgactgtttgcattttccatatatccttttatctgctctttttaaattgttaattctaataatttcaaaatgcattcactgaagaaatggacattaaaatattctaaaatttaaaa

SEQ ID NO: 77571 - DNA, 1368 bp, Homo Sapiens
cggcgtcatgtctccgaggtgtcgcgcgccgcgacgccaagaagctggtgcgctccccgagcggcctgcgcatggtgcccgaacaccgcgccttcggaagcccgttcggcctggaggagccgcagtgggtcccggacaaggagtgtcggagatgtatgcagtgtgacgccaagtttgactttctcaccagaaagcaccactgtcgccgctgcgggaagtgcttctgcgacaggtgctgcagccagaaggtgccgctgcggcgcatgtgctttgtggaccccgtgcggcagtgcgcggagtgcgccctggtgtccctcaaggaggcggagttctacgacaagcagctcaaagtgctcctgagcggagccaccttcctcgtcacgtttggaaactcagagaaacctgaaactatgacttgtcgtctttccaataaccagagatacttgtttctggatggacgacagccactatgaaatcgaaattgtacacatttccacccgtgcagatcctcacagaaggcgtccctcctggaggaggcaacgcacgggccacaggcatgttcctgcagtatacagtgccggggacggagggtgtgacccagctgaagctgacagtggtggaggacgtgactgtgggccaggaggcaggcggtggcgtggctagtggccatgcacaaggctgccaagctcctctatgaatctcgggaccagtaactctacgtggggctgagcttggagtacgtgtggtcaccaggactgagtcgcttggaacagcagagcctgctccttgcgtaccacagggattaatcctgcttgtgctgggaaatgcaactcactcatgtatttggagaaacaggagtgttcacttatctagtgcaatatgttcacagtttattaatgctttaaacagcttcatgttttagaatttgtgtattgtcaatacttaattgggggtgggagagactgagctacactactgctaaactatttttagcataatatataccatttttatgagttcgcaggtctactagaaggttctggcccatcaatattcatttcatttaattcttccacagaaccagtttgggcagtaggaactcaggcttctggtctgcagtggagcctgttcgcctctaatagccagtttacagcacttgccttagcctgtttcacagacttgtccacttaccttgtcactaatttggggcttctgggctgtgagtgatcctttgatacttcaccaaggggaacgtgggggctttgtgttttgtacttttcactcactatttcactttattaagatgactgtacagcaatttgtatataaagcttatgattaaaaactattttgaacatacggaaaaaa

SEQ ID NO: 77572 - DNA, 979 bp, Homo Sapiens
  misc_feature (28)..(28): n is a, c, g, or t
  misc_feature (90)..(90): n is a, c, g, or t
  misc_feature (94)..(94): n is a, c, g, or t
  misc_feature (116)..(116): n is a, c, g, or t
  misc_feature (137)..(137): n is a, c, g, or t
  misc_feature (150)..(150): n is a, c, g, or t
  misc_feature (157)..(157): n is a, c, g, or t
  misc_feature (160)..(160): n is a, c, g, or t
  misc_feature (178)..(178): n is a, c, g, or t
  misc_feature (183)..(183): n is a, c, g, or t
  misc_feature (204)..(204): n is a, c, g, or t
  misc_feature (213)..(213): n is a, c, g, or t
  misc_feature (233)..(233): n is a, c, g, or t
  misc_feature (263)..(263): n is a, c, g, or t
  misc_feature (269)..(269): n is a, c, g, or t
  misc_feature (280)..(280): n is a, c, g, or t
  misc_feature (292)..(292): n is a, c, g, or t
tttctcccagttagagcagtcaggatcntatcaaccaatcccgtggcagagcggaccccaaaaacagtatgccaccaccgagacaggatntccntgctcgactccatgcagccgcntgagcgcaatgccgtatgcgntgaagccatcttntcccagntgntgggacaacagcacctcntgagntcaaggagggacctcataccntgctgtgcntgagcccgcgatgctggcantacggagagagtgagaggaccaagatgcgnggtgtnttcccttctcntacacccggtcntggacagcgatggcagtgacaggctgcacatgagcctgcagcaagggaagagcagcagcacgggcaacctcctggacaaggacgacctggccatcccaccccccgattacggcgccgcctcccgggccttccccgcccagacggccagcggcttcaagcagaggccctacagtgtggccgtgcccgccttctcccagggcctggatgactatggagcgcggtccatgagcaggaatccctttgcccacgtccagctgaagccgacagtgaccaacgacaggtctgcccccctcctcagctgatggccacatctgcagtgctgcccatctggtggcttcccccgcccttcccatgtagcctgttctgtcatcatctgtgcgttcctgtgtagagaacatccaggccccggctgcctggtcttgccccacttgagtctggcctggactggatcccagctgttctaggcagggccaggcagagtggggcgcaggcccctgaagggcgagacccagtggctgggctgcccagggctgaggggccgcctcttgagggtacacgcctctggtcacatggccatggagccttgggtacccctgagttaagggaggacatttggccagctggtggctgggaggggagcctggctgccctgctgcttctcctgcctaataaacaggcttctcctgc

SEQ ID NO: 77573 - DNA, 663 bp, Homo Sapiens
  misc_feature (94)..(94): n is a, c, g, or t
ggacaaggacgacctggccatcccaccccccgattacggcgccgcctcccgggccttccccgcccagacggccagcggcttcaagcagaggccntacagtgtggccgtgcccgccttctcccagggcctggatgactatggagcgcggtccatgagcagcgccgatgtggaagtggccagattctgagccgcctgactagagttagaatccctttgcccacgtccagctgaagccgacagtgaccaacgacaggtctgcccccctcctcagctgatggccacatctgcagtgctgcccatctggtggcttcccccgcccttcccatgtagcctgttctgtcatcatctgtgcgttcctgtgtagagaacatccaggccccggctgcctggtcttgccccacttgagtctggcctggactggatcccagctgttctaggcagggccgggcagagtggggcgcaggcccctgaagggcgagacccagtggctgggctgcccagggctgaggggccgcctcttgagggtacacgcctctggtcacatggccatggagccttgggtacccctgagttaagggaggacatttggccagctggtggctgggaggggagcctggctgccctgctgcttctcctgcctaataaacaggcttctcctgcaaa

SEQ ID NO: 77574 - DNA, 653 bp, Homo Sapiens
ttctcctacacccgggtcttgaacagcgatgcaagtgacaggctgcacatgagcctcagcagagggaagagcagcagcagtggcaacctcctggacaagacgacctgccatcccaccccccgattacgcggccgctcgccggccttccccgcccagacggccagcggcttcaagcagaggccatacagtgatgccgtgcccgccttctcccagggcctggatgactatggagcgcggtccatgagcagtggcacggcacgctggtgtccacagtgtgaggacgctgaccccgggcagccgctgctctgaagagcttccgcgccttccccctggtctcgtccattttcctcctcagctctcgctggtttgttcttgggttgtttttcttttccacctgccccatgccttttggttggtgaccccagactctgtgatcccccagggtccatggtgctgctccatccgccccccctcccctgtgtttacgcgccccatcctgtgtgtcccagccttttgagcagaaactgccaggcaggacctgctgggccgtgcggggcaccctcggcctcaccctgcagtgtctgtggcactcactgcttttctaaggctcgccgtgagccaggtctaaagtttgaagaaaaagaaaaactctt

SEQ ID NO: 77575 - DNA, 467 bp, Homo Sapiens
  misc_feature (18)..(18): n is a, c, g, or t
  misc_feature (348)..(348): n is a, c, g, or t
  misc_feature (366)..(366): n is a, c, g, or t
  misc_feature (397)..(397): n is a, c, g, or t
  misc_feature (417)..(417): n is a, c, g, or t
  misc_feature (429)..(429): n is a, c, g, or t
  misc_feature (441)..(441): n is a, c, g, or t
  misc_feature (450)..(450): n is a, c, g, or t
ccagagccacatgtgagngaggatgacgatgatgagctggacagcaagctcaattataagcctccaccacagaagtccctgaaagagctgcaggaaatggacaaagatgatgagagtctaattaagtacaagaaaacgctgctgggagatggtcctgtggtgacagatccgaaagcccccaatgtcgttgtcacccggctcaccctggtttgtgagagtgccccgggaccaatcaccatggaccttactggagatctggaagccctcaaaaaggaaaccattgtgtttaaaggaaggttcttgaatattaggagttcaaaatttcacttccaaagttgaacaggggtntttgttttccaggcctgnaattacgtttccagccacaccttaccagganttggggttgaaaagttgggntaaaagccaacnttttttggtttnggccagttnttgggaccttgggcctt

SEQ ID NO: 77576 - DNA, 452 bp, Homo Sapiens
  misc_feature (65)..(65): n is a, c, g, or t
  misc_feature (422)..(422): n is a, c, g, or t
ttcacttcaaagtgaacagggatattgtgtcaggcctgaaatacgttcagcacacctacaggacntggggtgaaagtggataaagcaacatttatggttggcagctatggacctcggcctgaggagtatgagttcctcactccagttgaggaggctcccaagggcatgctggcccgaaggcacgtaccacaacaagtccttcttcaccgacgatgacaagcaagaccacctcagctgggagtggaacctgttcgattaagaaggagtggacagaatgaattgcatccacccctttccccaccctttgccacctgggaaggaattctcttcagggcgtgtttcagcaccctgttccctcctccctgttccacagctggggttccctctttcaacatttgccacattttccttatttgatggcnttttttcccacctgttcattcaacgtggtt

SEQ ID NO: 77577 - DNA, 1030 bp, Homo Sapiens
  misc_feature (43)..(84): n is a, c, g, or t
  misc_feature (87)..(121): n is a, c, g, or t
aaagaatcgtatagactcatatagggcgcctagctcgtcaggnnnnnnnnnnnnnnnnnnnnnnnnnnnnnnnnnnnnnnnnnncgnnnnnnnnnnnnnnnnnnnnnnnnnnnnnnnnnnncagtcgacggtaccggacatatgcccgggaattcggccattacggccggggagtactcagaagtcagagttgagagacagaggcaccccggacagagacgtgaagcactgaataaatagatcagaatgactgaaaaagccccagagccacatgtggaggaggatgacgatgatgagctggacagcaagctcaattataagcctccaccacagaagtccctgaaagagctgcaggaaatggacaaagatgatgagagtctaattaagtacaagaaaacgctgctgggagatggtcctgtggtgacagatccgaaagcccccaatgtcgttgtcacccggctcaccctggtttgtgagagtgccccgggaccaatcaccatggaccttactggagatctggaagccctcaaaaaggaaaccattgtgttaaaggaaggttctgaatatagagtcaaaattcacttcaaagtgaacagggatattgtgtcaggcctgaaatacgttcagcacacctacaggactggggtgaaagtggataaagcaacatttatggttggcagctatggacctcggcctgaggagtatgagttcctcactccagttgaggaggctcccaagggcatgctggcccgaggcacgtaccacaacaagtccttcttcaccgacgatgacaagcaagaccacctcagctgggagtggaacctgtcgatttaagaaagagtggacagaatgaatgcatccacccccttttccccacccttggccacctgggaagaaattctcctcaggcggggttcaagcacccctggtcccctcctccccctggtccaacaggctggggggtccccttctttcaaaaaccttgcccaaccaattttccctttaaattggaatgggcatttcttttttt

SEQ ID NO: 77578 - DNA, 901 bp, Homo Sapiens
ggggagtactcagaagtcagagttgagagacagaggcaccccggacagagacgtgaagcactgaataaatagatcagaatgactgaaaaagccccagagccacatgtggaggaggatgacgatgatgagctggacagcaagctcaattataagcctccaccacagaagtccctgaaagagctgcaggaaatggacaaagatgatgagagtctaattaagtacaagaaaacgctgctgggagatggtcctgtggtgacagatccgaaagcccccaatgtcgttgtcacccggctcaccctggtttgtgagagtgccccgggaccaatcaccatggaccttactggagatctggaagccctcaaaaaggaaaccattgtgttaaaggaaggttctgaatatagagtcaaaattcacttcaaagtgaacagggatattgtgtcaggcctgaaatacgttcagcacacctacaggactggggtgaaagtggataaagcaacatttatggttggcagctatggacctcggcctgaggagtatgagttcctcactccagttgaggaggctcccaagggcatgctggcccgaggcacgtaccacaacaagtccttcttcaccgacgatgacaagcaagaccacctcagctgggagtggaacctgtcgattaagaaagagtggacagaatgaatgcatccaccccctttccccacccctggccacctggaaaaaattctctcaggcgtggttcagcacccctggtccctccctccctggtccacaagctggggtcccctccttcaacaactggccaccattttcccttaatggaatgccatcctttttccccaccccctggtccactccaacgttgggttcccctagaaaacaggaagggcctttaaaa

SEQ ID NO: 77579 - DNA, 1360 bp, Homo Sapiens
  misc_feature (79)..(87): n is a, c, g, or t
  misc_feature (1289)..(1317): n is a, c, g, or t
ggggatcaagagataggcagtgcaaaggaacaggatttgagacagcccagggtttcctcttcaagtaggtctaaaacannnnnnnnnctcattgacttccttcctgttctaactgccagtactcagaagtcagagttgagagacagaggcaccccggacagagacgtgaagcactgaataaatagatcagaatgactgaaaaagccccagagccacatgtggaggaggatgacgatgatgagctggacagcaagctcaattataagcctccaccacagaagtccctgaaagagctgcaggaaatggacaaagatgatgagagtctaattaagtacaagaaaacgctgctgggagatggtcctgtggtgacagatccgaaagcccccaatgtcgttgtcacccggctcaccctggtttgtgagagtgccccgggaccaatcaccatggaccttactggagatctggaagccctcaaaaaggaaaccattgtgttaaaggaaggttctgaatatagagtcaaaattcacttcaaagtgaacagggatattgtgtcaggcctgaaatacgttcagcacacctacaggactggggtgaaagtggataaagcaacatttatggttggcagctatggacctcggcctgaggagtatgagttcctcactccagttgaggaggctcccaagggcatgctggcccgaggcacgtaccacaacaagtccttcttcaccgacgatgacaagcaagaccacctcagctgggagtggaacctgtcgattaagaaggagtggacagaatgaatgcatccacccctttccccacccttgccacctggaagaattctctcaggcgtgttcagcaccctgtccctcctccctgtccacagctgggtccctcttcaacactgccacatttccttattgatgcatcttttcccaccctgtcactcaacgtggtccctagaacaagaggcttaaaaccgggctttcacccaacctgctccctctgatcctccatcagggccagatcttccacgtctccatctcagtacacaatcatttaatatttccctgtcttacccctattcaagcaactagaggccagaaaatgggcaaattatcactaacaggtctttgactcaggttccagtagttcattctaatgcctagattcttttgtggttgttgctggcccaatgagtccctagtcacatcccctgccagagggagttcttcttttgtgagagacactgtaaacgacacaagagaacaagaataaaacaataactgtgnnnnnnnnnnnnnnnnnnnnnnnnnnnnngaccgcgtatgcggccgcaagcattattccctttagttgaggg

SEQ ID NO: 77580 - DNA, 838 bp, Homo Sapiens
gcggccgccaacaccctctgctgtccagggggggtctgtggccctaagattggccggcctctccatgcatctggccagcgtccccttggagacaccttcaccctcaagcgctgcagaagcatgaggtgagggcctgcagcgctctgtaccgtttagggtgttggaccagccgggagcctggcaggcctggcccagcggccagggtgagtgttctcagaccccgggcagctggtggttctccagggccaggtaccccttttgtgtgtgcgacctctgactaggtccctgtgggaatggggcagatggcggccatcaccactgggtcccagggcagaagcttacataccggccttgagcagcccgaccttccaccgctgcctggatcccaagcctcagccgacccaggggaccttggtggcaacggtgtgactgacagcaccacccctagcctttgcatgcccaggggtcgagagccagtatccggcccagacaatgccacccgccatggaagaaaagctgaccctgcccacctgctgcagacccgggccccgggccgaggttgctttctgtgacgaccgcctggtgacgctggacaccaggagggttatggcactgccctcccctcctggagcccctggcactgaccacctggacttgacctgactcctggtcactggccaaacacccatcctcaccccagccaccccgggccctggctggtgccgtgtgacacctgtagcccacctgtgtgtctttgctccgcccacccctgcgtggcgccggtcaggcgcaaacctggcgccagtgtctaaatgtccatcattctcagaccaaaaaa

SEQ ID NO: 77581 - DNA, 1686 bp, Homo Sapiens
  misc_feature (69)..(69): n is a, c, g, or t
  misc_feature (1129)..(1274): n is a, c, g, or t
  misc_feature (1283)..(1296): n is a, c, g, or t
  misc_feature (1322)..(1331): n is a, c, g, or t
  misc_feature (1339)..(1490): n is a, c, g, or t
  misc_feature (1516)..(1526): n is a, c, g, or t
  misc_feature (1625)..(1633): n is a, c, g, or t
aggctggaccggtccggattcccgggatgcatctgccaatccggagccaagagaaatgctatttatttntggagtagtagtaaaaagggctcaaaggataaggaggccattcaggcctattctgaatccctgatgacatcagctcccaagggctctgtgctgcaggaagcaaaactgtagggtcctgaggacaccgtgagccagccaggcctggccgctgggcctgaccggccccccagcccctacaccccgcttctcccggactctcccagcggacagccccccagccccacagcctgagcctcccagctgccatgtgcctgttgcacacctgcacacacgccctggcacacatacacacatgcgtgcaggcttgtgcagacactcagggatggagctgctgctgaagggacttgtagggagaggctcgtcaacaagcactgttctggaaccttctctccacgtggcccacaggcctgaccacagggggctgtgggtcctgcgtccccttcctcgggtgagcctggcctgtcccgttcagccgttgggcccaggcttcctcccctccaaggtgaaacactgcagtcccggtgtggtggctccccatgcaggacgggccaggctgggagtgccgccttcctgtgccaaattcagtggggactcagtgcccaggccctggccacgagctttggccttggtctacctgccaggccaggcaaagcgcctttacacaggcctcggaaaacaatggagtgagcacaagatgccctgtgcagctgcccgagggtctccgcccaccccggccggactttgatccccccgaagtcttcacaggcactgcatcgggttgtctggcgcccttttcctccagcctaaactgacatcatcctatggactgagccggccactctctggccgaagtggccgcaggctgtgcccccgagctgcccccaccccctcacagggtccctcagattataggtgcccaggctgaggtgaagaggcctgggggccctgccttccgggcgctcctggaccctggggcaaacctgtgacccttttctactggaatagaaatgagttttatcatctttgaaaaataattcactcttgaagtaataaacgtttnnnnnnnnnnnnnnnnnnnnnnnnnnnnnnnnnnnnnnnnnnnnnnnnnnnnnnnnnnnnnnnnnnnnnnnnnnnnnnnnnnnnnnnnnnnnnnnnnnnnnnnnnnnnnnnnnnnnnnnnnnnnnnnnnnnnnnnnnnnnnnnnnnttttggggnnnnnnnnnnnnnnaaaaaattttttaaaaactttttttnnnnnnnnnnccccaaannnnnnnnnnnnnnnnnnnnnnnnnnnnnnnnnnnnnnnnnnnnnnnnnnnnnnnnnnnnnnnnnnnnnnnnnnnnnnnnnnnnnnnnnnnnnnnnnnnnnnnnnnnnnnnnnnnnnnnnnnnnnnnnnnnnnnnnnnnnnnnnnnnnnnnnccccagggggttttaattttaatttnnnnnnnnnnnggccctttttagggagagggggggatattcttaaaattttccgcccaaggggaacccctcccaaaggggttggggaaacctgtattcccccggggggannnnnnnnntgtgccgcctgggggaaaaaaatatttccccccggggggaaaaagcgggggcg

SEQ ID NO: 77582 - DNA, 700 bp, Homo Sapiens
  misc_feature (625)..(643): n is a, c, g, or t
gaggagtaatagcttttctcaaatatacttttagaattgaatgtacattatcctatatgtaaaaaagcaaattattaattttaatggagctctcgattgacctttttagcatacttttatagcatgtatattaaaatagaatatattttagcaaaagattgccataaaaccctgacttggctcattttgatatttgcactgtgaagagggcttaaattccaatgtagcaatgtggtggcagacaaatgaaaaactaggaagttctttcacagtaatgcctagttgttccaaatttgctatatttggaggtgctctactggtacttcctgcttgactctctgacctgtgggatgcacattcttcctcagcgctttttccttgttgtggtgacgtacattcactatctgagagtgaaagaccacacacacccctctttttaaaattattgtatctcttccttttcactttggtttgaacaaagatagtgtcaccttgttccgtgaaaaagaaaaagcataaacagtgtatatttagggtatatgggtgatagcttatgatgtgtgtcaatcagttctctgaatcttttactgaaactgagacaggaaaataaaactgaaacaaatcnnnnnnnnnnnnnnnnnnncctgagcaggcggccgcaagcttattccctttagtgagggtaatttgagcatggcac

SEQ ID NO: 77583 - DNA, 699 bp, Homo Sapiens
  misc_feature (24)..(24): n is a, c, g, or t
  misc_feature (82)..(82): n is a, c, g, or t
  misc_feature (586)..(622): n is a, c, g, or t
atgcccaagtgcaaacacgtggcntacgtgaaagcacgcaggagccctcacgagggggaccttgagttcattagcatggacngcacaaaggatgcgggcctccccccgcagcgacctcaagagcctgggttactgcatgctgaagtggctctacgggtttctgccatggacaaattgccttcccaacactgaggacatcatgaagcaaaaacagaagttgccttgggattcattttaatgtaagctggactttgtcatgccagaaacaaggctcggtcaccgtcagcagtttgcagttttccacctcctcccagttcctccgtgtggttgacccagatatctccgttatgcagccgcctccgggggaccacctccctccctttgagtcagccacagacagcctacttgacggccccgctggcccccacattccactgaactgtgcggatgccacagtgaccccctctcaggcacagcatgacctcctgaagtcgagcctgcttgctttgaacctaccagttaaaatctcctcaaaatgtttggataccgcccattggcccctcacagccacgagctccctgaccannnnnnnnnnnnnnnnnnnnnnnnnnnnnnnnnnnnncttgggacgggtggggaggtcacctttgggtgtgcggtgtgcccccaggacctgtaagtaataaaatctttatttcc

SEQ ID NO: 77584 - DNA, 238 bp, Homo Sapiens
gttgcacactgcaaatggaaagttcttctaggttctggggatgtcatcttctaggtactggggatgtcatcatgaccatacgggatgaggagcccctgctttgctgcaggatctgcgtgtgtctccatatgaccccattggcctcccgatggtgccctaggtggaatccagcccttgttcccatctggagggaagcgtgtgtttagtgtgtagtctccacccgcctcctcctcatcct

SEQ ID NO: 77585 - DNA, 958 bp, Homo Sapiens
taaggcccataccaaagcatgtgctgttcagagaggtctgtgctgcacgtggcatgccggcttgctggatgccctggagttcctccatgagcaatgagctatgttcagtggaacatgtgacagctgaaaatatctttgtggatccagaggaccagagtcaggtgactttggcaggctatggcttcgccttccgctattgcccaagtggcaaacacgtggcctacgtggaaggcagcaggagcccttcacgagggggaccttgagttcattagcatggacctgcacaagggatgcgggccctcccgccgcagcgacctccagagcctgggctactgcatgctgaagtggctctacgggtttctgccatggacaaattgccttcccaacactgaggacatcatgaagcaaaaacagaagtttgttgataagccggggcccttcgtgggaccctgcggtcactggatcaggccctcagagaccctgcagaagtacctgaaggtggtgatggccctcacgtatgaggagaagccgccctacgccatgctgaggaacaacctagaagctttgctgcaggatctgcgtgtgtctccatatgaccccattggcctcccgatggtgccctaggtggaatccagaactttccatttgcagtgtgcaacagaaaaaaaacaatgaagtaatgtgactcaaggcctgctgtttaatcacagataagcttctagaacaagccctggaatgtgcattcctgccactggtttcaggatactcatcagtcctgattagcctcccggagggccccagtttccctcccgtgaatgtgaagttccccatcttggtggcctgcccttcagccagtgtcctagcaaagctggatggggttgggccggcccacaggggggacccctcctacccttgacacctctgtgctttggtaataaattgttttaccagaaaaaaa

SEQ ID NO: 77586 - DNA, 949 bp, Homo Sapiens
ggtcagaggattgggcctgggtgggagcagccactcagcagcactgccactgcctttggccacctgaggtgacccccaggcctccccggccttgtacagtgtacctctgtgtatctgtacagcctcgctcctgccaccccacccttgcgttctgcattaggtacttccctgaaaaccacgtgtaagaagtgatgcttttgccagtggatgatctggaatgcgaccggagcacttgctctgaggaatcccagggtgactctgtcggggaagaatccggtcacagcctcccctcagagacaggcctcagttcgagggcagcccattatctgtcgcagacatctgccatgtccctgagactgcgggaggcaggggatgcatgggtgtccccatctgtccctggtgagaagcaaggctagctctgccttccacatgcttctcaggatgccaagaggcctaggaacccagaaacccccttggaggagctgtgtatgcgggggtgccaggaagggcatagctcctgcccccaggcctaggcatgctgcttgctcggccatccccacttcctcctctaccccaacacatgcaggctaggccttgccctggaacgtggaggccctgcccggggctggggcctagtccagcagccaccaaagtctggcagactttctgcatttgagaaacatgacaaagggccccgcagcccttctgcacccagcacagcctgcccagcccagccctgcccccgggcactgcacagcctgtctgggggccagaccaccccattgtccatccttgttgtccgtgagtccttggcctccaccaagcacgtgtggccattgtgtgcctgccttagtgactccgtggttttgtgaggagcagagtgtgtatgatttttgcctcagaaactatactcttctgtgtaacagaccaataaacaacatttgtcaac

SEQ ID NO: 77587 - DNA, 602 bp, Homo Sapiens
  misc_feature (79)..(79): n is a, c, g, or t
  misc_feature (90)..(90): n is a, c, g, or t
  misc_feature (99)..(99): n is a, c, g, or t
tccggtcacagcctcccctcagagacaggcctcagttcgagggcagcccattatctgtcgcagacatctgccatgtccntgagactgcgngaggcaggngatgcatgggtgtccccatctgtccctggtgagaagcaaggctagctctgccttccacatgcttctcaggatgccaggaagggcatgctgcttgctcggccatccccacttcctcctctaccccaacacatgcaggctaggccttgccctggaacgtggaggccctgcccggggctggggcctagtccagcagccaccaaagtctggcagactttctgcatttgagaaacatgacaaagggccccgcagcccttctgcacccagcacagcctgcccagcccagccctgcccccgggcactgcacagcctgtctgggggccagaccaccccattgtccatccttgttgtccgtgagtccttggcctccaccaagcacgtgtggccattgtgtgcctgccttagtgactccgtggttttgtgaggagcagagtgtgtatgatttttgcctcagaaactatactcttctgtgtaacagaccaataaacaacatttgtcaacactgg

SEQ ID NO: 77588 - DNA, 924 bp, Homo Sapiens
  misc_feature (591)..(621): n is a, c, g, or t
  misc_feature (656)..(681): n is a, c, g, or t
  misc_feature (778)..(787): n is a, c, g, or t
cactggcatagcacggtagtggtttggggaggtttccgcaggtctgctccccacccctgcctcggaagaataaagagaatgtagttccctactcaggctttcgtagtgattagcttactaaggaactgaaaatgggccccttgtacaagctgagctgccccggagggagggaggagttccctgggcttctggcacctgtttctaggcctaaccattagtacttactgtgcagggaaccaaaccaaggtctgagaaatgcggacaccccgagcgagcaccccaaagtgcacaaagctgagtaaaaagctgcccccttcaagcagaactagactcagttttcaattccatcctaaaactccttttaaccaagcttagcttctcaaaggcctaaccaagccttggcaccgccagatcctttctgtaggctaattcctcttgcccaacggcatatggagtgtccttattgctaaaaaggattccgtctccttcaaagaagttttatttttggtccagagtacttgttttcccgatgtgtccagccagctccgcagcagcttttcaaaatgcactatgcctgattgctgatcgtgnnnnnnnnnnnnnnnnnnnnnnnnnnnnnnnggtattaagtcgttgcctttatttgtaaagctgtnnnnnnnnnnnnnnnnnnnnnnnnnntaaaaaggaaaatgtttcagatgtttatttgtataattacttgattcacacagtgagaaaaaatgaatgtattcctgtttttgaagagaagaataannnnnnnnnnctctagggagaggtacagtgtttatattttggagccttcctgaaggtgtaaaattgtaaatatttttatctatgagtaaatgttaagtagttgttttaaaatacttaataaaataattcttttcctgtggaaaaaaa

SEQ ID NO: 77589 - DNA, 788 bp, Homo Sapiens
  misc_feature (43)..(43): n is a, c, g, or t
  misc_feature (62)..(91): n is a, c, g, or t
  misc_feature (96)..(96): n is a, c, g, or t
gtgaaagagaaagaatgggtcgtggtgaagtgctctcacttancagaatggagagaacatcnnnnnnnnnnnnnnnnnnnnnnnnnnnnnnaaggngaggaaagccaccttgacagcccaggtccctccaggtcacccacagccagtttcaggaaggctgcccctctctcccactaagttctggcctgaagagacctgctttcttggcctggcttccacctctccactcctgtgtctacctggccagtggagtggtccatgctaagtctaacactcctgggagctcaggaggcttctgagcttctcctgtactgtgcatcgtgagggccagagacaggaatgtaaggattggcaactgtgttacctttcaagtttatctcaataaccaggtcatcagggacccattgttctcttcagaaccctatctgggagagaaggcgaaccacctccgggtttccatcatgtcaaggtcacaggcatccatgtgtgcaaaccatctgccccagctgcctccacagactgctgtctccttgtcctcctcggccctgccccacttcagggctgctgtgagatggaattccaggaaagaacttcaggtgtctggaccctttctatctagataatatttttagattcttctgctccctagtgacctacctgggggcaaagaaattgcaaggacttttttttaagggtcagagttttcaaaacaaaagcatcttccctagaaatttttgtgaattgtttgcacttgtgcctgttttaaattaaattgagtgttcaaagcc

SEQ ID NO: 77590 - DNA, 863 bp, Homo Sapiens
gcgctgaaatgaaggaacgagggggcaaccagaccagtggcatcgacttctttattacccaagaacggattgttttcctggacacacagcccatcctgagcccttctatcctagaccatctcatcaataatgaccgcaaactgcctccagagtacaaccttccccacacttacgttgaaatgcagtcactccagattgctgccttccttttcacggtctgccatgtggtgattgttgtccaggactggttcacagacctcagtctctacaggttcctgcagacagcagagatggtgaagccctccaccccatcccccagccacgagtccagcagctcatcgggctccgatgaaggcaccgagtactacccccacctagtcttcttgcagaacaaagctcgccgagaggacttctgtcctcggaagctgcggcagatgcacctgatgattgaccagctcatggcccactcccacctgcgttacaagggaactctgtccatgttacaatgcaatgtcttcccggggcttccacctgacttcctggactctgaggtcaacttattcctggtacccttcatggacagtgaagcagagagtgaaaacccaccaagagcaggacctggttccagcccactcttctccctgctgcctgggtagcccgtcctgtgtcctccacagggacaagcagtgggaggagtctgaatggtcaccaggaagcccgggctccatcttgacctcctttttcagggacaggagcaacaggcccctcttccctgactctaagcccttccctgtaaggtgaggcagggtctggagagctctttattggaacagatctggtggttcaaataaacacagtcatgc

SEQ ID NO: 77591 - DNA, 885 bp, Homo Sapiens
  misc_feature (236)..(236): n is a, c, g, or t
  misc_feature (699)..(712): n is a, c, g, or t
gtgaaacccaccaagagcaggacctggttccagcccactcttctccctgctgcctgggtatcgtggccaccccagtttccagtccttggtgagcaagctccggagccaagtgatgtccatggcccggccacagctgtcacacacgatcctcaccgagaagaactggttccactacgctgcccggatctgggatggggtgagaaagtcctctgctctggcagagtacagccgcctgnctggcctgaggccaaggagaggaatgtcatgcaggggacctcctgggtccgcagtgtactgcgagggagcacagatgtccatcccccgctggggtggagagcggcagcaggcctgatggatgagggatcgtggcttcccggcccagagacatgaggtgtccagggccaggccccccaccctcagttggggctgttccgggggtgactgtgagcgatcccaccccaaacctgagatggggtagcccgtcctgtgtcctccacagggacaagcagtgggaggagtctgaatggtcaccaggaagcccgggctccatcttgacctcctttttcagggacaggagcaacaggcccctcttccctgactctaagcccttccctgtaaggtgaggcagggtctggagagctctttattggaacagatctggtggttcaaataaacacagtcaaaaaacccgcccccacnnnnnnnnnnnnnncatggtcggccgccctcggcccctccgataagcctttcctaaacccattccgtttgggcggcgccggggccccagtaaggtaaggtgaaacatgggtcaatagcctggttttccctagcgaagatccctgggtccagtgacctaggtgcgttgtggatttcctccccccaaat

SEQ ID NO: 77592 - DNA, 953 bp, Homo Sapiens
  misc_feature (65)..(116): n is a, c, g, or t
ttttacatatcacagtcttttattaataattctctgcctagaacactgggaattttgttgttgcnnnnnnnnnnnnnnnnnnnnnnnnnnnnnnnnnnnnnnnnnnnnnnnnnnnnaagccaccagggtccagcctagagctggcaccatcgttggcccttagtagttatctgttccaggaagagatgactgacggactttaggatggtgccttcatcgctgcattctttccttggggcagccagtgcttctcagtttatatcaaagtccatagggaaaatgggtttgcattcaagaatatgctcacaagatgtttgtttctgaggtctcaccaattctcagtgttgaatagccccctcccattccaccccactgaagttccctcagaatcagcttgcacactcccggggatggagacttcactacattacagacactattcagtcactgatcaactctggctcatacatttttccttagatggagccgggccctgccaccctctagctctccaccatacagcagaggaaataactgctccatggcatctcatcccccagagtgctttctcctccaaggtgaacagctctgtttcctccctgaagcctcatgggatgaatgattcctcttttggctggaccctggatggcttgccccttcccatctgtggtgactgctgcgaacacagtagaagagtatggcgcccaggccacatcacccacggctgagttcaggtcatagatgaacatcggggtcttgatggtgtggtcccagatcttcactgtccagtcggagctgcaggacatgaagaccttggtgtggtatgggttccaggacacagtgtccactgacatgttgtgggcgtcataggtgtcgaggaattggctggagtaggatttagagcacttgtagatttttccctcctctgtgcccactaggaacatgtagtcaat

SEQ ID NO: 77593 - DNA, 912 bp, Homo Sapiens
attgactacatgttcctagtgggcacagaggagggaaaaatctacaagtgctctaaatcctactccagccaaatcctcgacacctatgacgcccacaacatgtcagtggacactgtgtcctggaacccataccacaccaaggtcttcatgtcctgcagctccgactggacagtgaagatctgggaccacaccatcaagtgaggggcctgttcctggctctgcctggggccctcccctgggctatggcactgtgagccctatgtgccatgggctttccaccctccacctctgcaggaccacgatgttcatctatgacctgaactcagccgtgggtgatgtggcctgggcgcccatactcttatactgtgttcgcagcagtcaccacagatgggaaggcccacatatttgacttagccatcaacaagtatgaggccatctgcaaccagcctgtggcggccaaaaagaacaggctcacccacgtgcagttcaatctcatccaccccatcatcattgtgggcgatgaccgtgggcacatcatcagcctcaagctctcacccaatttgcgcaagatgccaaaggaaaagaaggggcaggaggtgcagaagggtccagctgtggagattgcgaaactggacaaactgctgaacctggtgagggaagtgaaaatcaagacctgaggggctggcctcagtctctgtcccatcgcttgaatacagtactcctagggcttgaccctggtacccagcccagccttagcacccagcatgtgaccccactcctgatcaggtcccagcatcttcccttcttgttctgttccttaaggtcccagcaccttaccccaggacttggtcttcaaccaccattacccctctaactttgcacaaataaacctgtgtagaaacccaaaaaaaa

SEQ ID NO: 77594 - DNA, 1133 bp, Homo Sapiens
  misc_feature (200)..(208): n is a, c, g, or t
  misc_feature (703)..(798): n is a, c, g, or t
  misc_feature (800)..(821): n is a, c, g, or t
  misc_feature (936)..(963): n is a, c, g, or t
ttttagatgtaacaatctttttactctcttacagtcatattgcagtttcacagtggtataaactccaataaaattaagaattttttttcagtacatgagatcaaactgtatacagagctgccataacgtataagttaagccatgtatatacattaatacatacatatatgttccaataacatgttgaagatttcccaggnnnnnnnnnctttaagttattgctagacatatcaaaacacagtataaaactggtcatcacaacacccttctgcagtaatgatgagagtgggctaggaatgtgatgaaaggcacagaattcataagacttgagtaagtagatccaaatttgttatcactaatggctcaaacaatgtggagccactgattttctgaagtgaatataagaaacagtagttaatagtatttatccaggcttctagtataagacattgtactaggagtttctcaagtagaaaacttgtctcacaagggtaagttacataaaaactccaaagaagaaagggcaactgatagaagattagttctcctgtggctagacggtgcgttgtacagcctttccgtttagtgaggttctactaaagggaatgccaactttgtggttgacatgggtgatccttgggtttcgtcacgcatgaaattaacaaataaaaaatgttcaaggccaggtgtggtggctgatgcnnnnnnnnnnnnnnnnnnnnnnnnnnnnnnnnnnnnnnnnnnnnnnnnnnnnnnnnnnnnnnnnnnnnnnnnnnnnnnnnnnnnnnnnnnnnnnnncnnnnnnnnnnnnnnnnnnnnnncttagctgagtgtggtggtaccagcctgttgggaggctgcagtgagaggaccattcgagcccaggaatttgaggaagctatgctcataccacttgcactccaagaccccatctcnnnnnnnnnnnnnnnnnnnnnnnnnnnngttttcagtttatggaattaagcaattaagcatattaaaaagccagggcctaataagtactatgctgatcaagtgcaaaggagagttcttaatatgaataaatgggtcttacaagtcaattaattcaagaggttataaaatacattttttaaaagagttaagcttttttt

SEQ ID NO: 77595 - DNA, 786 bp, Homo Sapiens
ggtacgaacattcgtcatatcaggatgacctcgagagctgaggctctagccacctaaaaccacgtgcccaaacccaccagtttaaaacggtgtgtgttcggaggggtgaaagcattaagaagcccagtgccctcctggagtgagacaagggctcggccttaaggagctgaagagtctgggtagcttgtttagggtacaagaagcctgttctgtccagcttcagtgacacaagctgctttagctaaagtcccgcgggttccggcatggctaggctgagagcagggatctacctggcttctcagttctttggttggaaggagcaggaaatcagctcctattctccagtggagagatctggcctcagcttgggctagagatgccaaggcctgtgccaggttccctgtgccctcctcgaggtgggcagccatcaccagccacagttaagccaagccccccaacatgtattccatcgtgctggtagaagagtctttgctgttgctcccgaaagccgtgctctccagcctggctgccagggagggtgggcctcttggttccaggctcttgaaatagtgcagccttttcttcctatctctgtggctttcagctctgcttccttggttattaggagaatagatgggtgatgtctttccttatgttgctttttcaacatagcagaattaatgtagggagctaaatccagtggtgtgtgtgaatgcagaagggaatgcaccccacattcccatgatggaagtctgcgtaaccaataaattgtgcctttctcactca

SEQ ID NO: 77596 - DNA, 1655 bp, Homo Sapiens
cagagacagaggggccggaagttctcttcacggagccgcgcggctgcgggggcgcaaatagggtcactgggccgcttggcggtgtcgttgcggtaccaggtccgcgtgaggggttcgggggttctgggcaggcacaatggcgtctcgagcaggcccgcgagcggccggcaccgacggcagcgactttcagcaccgggagcgcgtcgccatgcactaccagatgagtgtgaccctcaagtatgaaatcaagaagctgatctacgtacatctggtcatatggctgctgctggttgctaagatgagcgtgggacacctgaggctcttgtcacatgatcaggtggccatgccctatcagtgggaatacccgtatttgctgagcatttgccctctctcttgggccttctctcctttccccgcaacaacattagctacctggtgctctccatgatcagcatgggactcttttccatcgctccactcatttatggcagcatggagatgttccctgctgcacagcagctctaccgccatggcaaggcctaccgtttcctctttggtttttctgccgtttccatcatgtacctggtgttggtgttggcagtgcaagtgcatgcctggcagttgtactacagcaagaagctcctagactcttggttcaccagcacacaggagaagaagcataaatgaagcctctttggggtgaagcctggacatcccatcgaatgaaaggacactagtacagcggttccaaaatcccttctggtgattttagcagctgtgatgttggtacctggtgcagaccaggccaaagttctggaaagctccttttgccatctgctgaggtggcaaaactataatttattcctggttggctagaactgggtgaccaacagctatgaaacaaatttcagctgtttgaagttgaactttgaggtttttctttaagaatgagcttcgtccttgcctctactcggtcattctccccatttccatccattaccccttagccattgagactaaaggaaatagggaataaatcaaattacttcatctctaggtcacgggtcaggaaacatttgggcagctgctcccttggcaggctgtggtctcctctgcaaagcattttaattaaaaacctcaataaagatggccctgcccacactgtgccttgtgtttggggcttgatagagtgtgaaaggtgtgttgcttgaaaggtgtggccttagacactaggagatgatgggtagaagctccttgagaaacctagcagtggccatagagaagtagactgggtatggggaacctaagtcatagttgtaacctacagctgattggtaagaactatgggccagacatttaatctctccatctatgaaatagtccattctcatttatctagcttaggttatgggctcttcttttagttggatattcacatttatctttcagtgttaactgggtatcagttatgagtctactactgtataatggcatccaaaagaattttaaagtacctcggtttatagggatttacaattcagtagaaacttgttattcatgtgaaacagtgaacataatatctaatgatgtggagcaagtacattaaaaacaggaaggaagagatctgtgattaaactaaaggccctttcacacct

SEQ ID NO: 77597 - DNA, 901 bp, Homo Sapiens
gggtctcttcacggagccgcgcggctgcgggggcgcaaatagggtcactgggccgcttggcggtgtcgttgcggtaccaggtccgcgtgaggggttcgggggttctgggcaggcacaatggcgtctcgagcaggcccgcgagcggccggcaccgacggcagcgactttcagcaccgggagcgcgtcgccatgcactaccagatgagtgtgaccctcaagtatgaaatcaagaagctgatctacgtacatctggtcatatggctgctgctggttgctaagatgagcgtgggacacctgaggctcttgtcacatgatcaggtggccatgccctatcagtgggaatacccgtatttgctgagcattttgccctctctcttgggccttctctcctttccccgcaacaacattagctacctggtgctctccatgatcagcatgggactcttttccatcgctccactcatttatggcagcatggagatgttccctgctgcacagcagctctaccgccatggcaaggcctaccgtttcctctttggtttttctgccgtttccatcatgtacctggtgttggtgttggcagtgcaagtgcatgcctggcagttgtactacagcaagaagctcctagactcttggttcaccagcacacaggagaagaagcataaatgaagcctctttggggtgaagcctggacatcccatcgaatgaaaggacactagtacagcggttccaaaatcccttctggtgattttagcagctgtgatgttggtacctggtgcagaccaggccaaagttctggaaagctccttttgccatctgctgaggtggcaaaaatataatttattcctggttggctaaaactgggtgaccaacagtatgaaaccaattcaggtgtttgaac

SEQ ID NO: 77598 - DNA, 1359 bp, Homo Sapiens
ggaccggtccggaattcccgggatatcgtcgacccacgcgtccgcagggacccagtgaccctacggacagagcggaggtggagaaggactcggggcatggcagcacttccgtggattctgaggggttcagcatcccagacacgggcagtcactgcagcagcgagtgtgtggccagcaccccaggggacaggggctcgcaggaacatgtggactctcaggagaaagcgcctgaaactgacgactctttttcagatgtggactgccattcaaaccaggaagataccggatgtaaatttcaggttttgcctcagccaactaatctcacatccccaaacacaaaagtgttttaagaaagaagaaattctttccaattctgacattcgtcaaaagttagtaaatactcagaacgtgtcagcctctcaggttgatgtagctgtgaaaattaataagaaagttgtgcccctgaacttttctgagttctttagctaaacgaataaagcagttacatcatgaagcacagcaaagtgaaggggaacagaattacaggaagtttagggcaaagatttgtcctgggagaaaatcaagcagccgaagatgaactaagaaaagagataagtaaaacgatgtttgcagaaatggaaatcattggtcagtttaacctgggatttataataaccaaactgaatgaggatatcttcatagtggaccagcatgccacggacgagaagtataacttcgagatgctgcagcagcacaccgtgctccaggggcagaggctcatagcacctcagactctcaacttaactgctgttaatgaagctgttctgatagaaaatctggaaatatttagaaagaatggctttgattttgttatcgatgaaaatgctccagtcactgaaagggctaaactgatttccttgccaactagtaaaaactggaccttcggaccccaggacgtcgatgaactgatcttcatgctgagcgacagccctggggtcatgtgccggccttcccgagtcaagcagatgtttgcctccagagcctgccggaagtcggtgatgattgggactgctctcaacacaagcgagatgaagaaactgatcacccacatgggggagatggaccacccctggaactgtccccatggaaggccaaccatgagacacatcgccaacctgggtgtcatttctcagaactgaccgtagtcactgtatggaataattggttttatcgcagatttttatgttttgaaagacagagtcttcactaaccttttttgttttaaaatgaaacctgctacttaaaaaaaatacacatcacacccatttaaaagtgatcttgagaaccttttcaaacccg

SEQ ID NO: 77599 - DNA, 703 bp, Homo Sapiens
  misc_feature (64)..(64): n is a, c, g, or t
acttatttaaatacttgagtttatttcacatgtatattttgtctcccctccatccagggggttntgggcatcacagctcctttttttcctttctcctcttccagatccagtttcagctggtttgcttcttccagcaggcacccttaggcccaggagcagctcccctgagagaatttgagtcactcatttccttgaacagcacccccctttatactagcagccatttgtgccattgcctgtgccctagggtttgtggggagagagcgagggatcactgagcagttttcccagagctccatgggaaggcaagctctccctcccaatgggagccccactgtcactaactgtaaactcaggctcaggcttcaactgcctacccccatcctcatatttctgtctgtcccagcacctcaggagcattctcattgtggccggctaactccgcctggatgtgaacaggcaagcacagtgggaaatgagtcacgtacttgtattgcacagtggacacctctagaggtccattggtttaaagggatagggaaggaggagggatgagaccatcaccccctcccagaagtaaatctagtatctgagttttctttatgcccttgagtcaaactaataactgtctagtacggaggtgtttgctggttttcttcggtgttttttctaatgcaataaactcatttctgcctgcaaaaaa

SEQ ID NO: 77600 - DNA, 1229 bp, Homo Sapiens
  misc_feature (60)..(100): n is a, c, g, or t
  misc_feature (104)..(138): n is a, c, g, or t
agagatagaataggcaaaagaaacccttgcatctcactatgggcgctagctcgcgtaatnnnnnnnnnnnnnnnnnnnnnnnnnnnnnnnnnnnnnnnnnccgnnnnnnnnnnnnnnnnnnnnnnnnnnnnnnnnnnncagtcgacggtaccggacatatgcccgggaattcggccatcaacaggagtccaagcgagctcgatatcaaattacgccccgcccttgacatttgtcgtgcatcagggagaaatgcatgggacacacagtcctccactccactcccatctctgctcatcctcccgttcgcttcaggcactcttagcattgtttgtttacccatttctgatactacatacatccatgctgaagatttgccatattactattttggaaacattgagtgatagaactcctagaaaatttgcaaagaaatgttgacatagcgtgtatatcaaaaatctcagattctagtgttgaaaaagtagacactatagctattgactattacttataacctgactgccatagaaaaaaataagtgtattcatgacaagatttacattctggatacataaataaaagaaaaaagggcaacattttacggagtaagtcatggtagtcattagatgatattacatgaacaagttcttaatatgaaaatacttcaacaggaagtaaaggtcatggcttagctgaaggaaatgctccagaaattggactgtgtaaaccatcagtacaataatacgctgtgtatgtatgtgtatataaaatgagaattatggcataattggagcatttgcattaatcaacaaactcacattgagacaaaacttagttttacagctgtcttgattaaagccaagtgttccatgttgctgtgaagaatagcctctttcaaatactttggaaagtagttacttggaaacttgtaaaggtattacatttttatatttaaacacctatagagatcttcaattccttgagtctgagcttgtgggtggaattctaaatttgtatcataatctgtcttttgtgaaacattttgaaaatatgtatatataatattgtatatgcaaattgtgttgtttcacttgtaaagggaaaaggcttatttttctttatatttctgataacttgttttgcatatgaccagcactgactgaaaggcatgtgtagctgcaaacactgttgctttttttgtgaaatgaaaataaaagtatttaaatacc

SEQ ID NO: 77601 - DNA, 970 bp, Homo Sapiens
  misc_feature (105)..(105): n is a, c, g, or t
  misc_feature (165)..(165): n is a, c, g, or t
  misc_feature (197)..(197): n is a, c, g, or t
  misc_feature (204)..(204): n is a, c, g, or t
  misc_feature (242)..(242): n is a, c, g, or t
cctcccgcccactgcgccgagtgtcagatgtgcaggggtgccctttcattattttctcctgcaagagaccctccagagctccgccacccctaggctccgtcgctntggagcccagatgccctagttgtcgccgcagtgcaccaagccggaaggcataatgcccgncgcgttcagagtgggtggggatctctgggccntcctccncatgttgccagaacatcctgccccacccgccactcctncggccctatgaagactgagctccagggtgagaagctcactctgccccggggcactgcgtccagcagcagaggggacagggggcaggtgtgtgactgggttcctgggtacccagccctgaccagagggagcgggagggcagaggtgaggagggggaagatgtttctgggcctaccaaggttcaacaagagaacggagctgggaatgtgactgctggagcctgagaggtggaggagttctgatcccccgttacttcctagcattttctcctcttgccttaaaagttccctgtatgtgaaacgggaagtcctgagagtgtgtgttggtggctgtgcgcacgcacacaagacgggagtcaccctgtgcttcctgcccaagatactgacccattgaacccccaaagcatctttctctccacaaagtccgtggtgccttcctggtgggctgcagacactaatggtgttggggggtcttggaacagcttctctatgtgtggattcgtgtaaatgcgaagagttcacatataaagaagtgactttgattctgtgattatattgatttggtacacagtaaatgggagtttaaaaaatccaaagactctaatgacttgtaaagactctaatgatttgtatcatgtaatgaactaaaccacctgtaattttgtaccgtatgtgtctttccatcaaatgaccaacagcttctcaataaaaccagaccatttctcacctga

SEQ ID NO: 77602 - DNA, 705 bp, Homo Sapiens
cacccctctgtttcccaactaccacctctgtttagctgtatcactgcctcagtcccactgccctccaatccatcctacatgatgccattggcatcagcaccctaaatcaaatcaaaccagatggcttcacatccagcctcaaaaacttcctgtggaatcacaagacgtgaaaattcctcatcttgattcaaagcccttcaccggtctattatttccaaccttatcttctaccacctcaggccccatactactgtccaaccccttcagtctacttgccattccaaacacagacctggcacacttagcccatggctttaccaaagacctccctttgcctatcatccttgtaaagacttacacttttgagagcatagactatttttaatttgtttttatattctcagagcacaacaaggagtctagcacttagcaaacagcaataaaatctttattgaatgaattattttctcaattttccttacatccccagagtacccaatacaatgctttgtagatactaaacgttaaaatgaaagtcacctcccacaaatgagagcataacatcatttcatttactacttttcttaaagcagcaaacggaaattctctatatagtctaggaagaaaattaacattaaaaccttacttctcctctcctgtcagcaccttttccaggtctcttctgggtgtctgacaccagtgctg

SEQ ID NO: 77603 - DNA, 1172 bp, Homo Sapiens
cagtcgacggtaccggacatatgcccgggaattcggccattacggccgggctgatcaaaagtatttttaaaattttgtttttagccattcaaaatgtatttgtattttcagaattgaatgcaagtcatacttagagctcaattaaaatactcttgcaagaaaaagcattaaattctctttgagaattccgtgaaatgcaaattaagggaaaaataggttttaagcagtagcaaaaacacaccgctaaaaatggcctttgaattctcagagctatggaaacaatgtgagaaactaaattgtctcgagatgtcaagatttttctatctccagttgctattggcctgtcctactgttgtctttgaatatttcctgtattccaccccaaaagatttcaacttttagtttttctatcactgggcaaggtcagactgggtttataaaacaatatattggcatattgtgattctttgtaattgactataaattggttttgaaatgtccaaacatacgttgtgtgtctttatattgtactgtgtgttttaagtaactggcagaaaaagaattggaaatgaaatttccaatcagacaatgtagtattaaagaaaactttgttttaaatatgcggtaccatgtaaaattactcgtgttaggaataaagtccactgttgaagttgaatgtcactaagcttattatgttaaaaggaaccagtgtgattaggaaaacctaccagaagccagatacagtgtggtacgtgcaacatttcatgcacattttgattttgtttgtcattcaaaattgtgcttgtaaaaatgtatacaatttctgagttttataatttctaggtacttgttttttcttgctggtaaatagcttttttttaaaaaaaaatctaatataaaagaaaccatgtttatattttgttagtgatcaatgactttgtttatatggaaatttgtatattgttggcacacattttgttgaggtttacgtgcatgaaggcctgcaataattagcacaatgaaaactgctttttcttacatgttcatttttttgaaagattgtggtgcaaaggcttactctaataagtaaccttctggactatggaatgaatataaatgaatggcactttgagtgttaataaagctaatatttatttccactgtgaaaaaaa

SEQ ID NO: 77604 - DNA, 1346 bp, Homo Sapiens
  misc_feature (43)..(43): n is a, c, g, or t
  misc_feature (1097)..(1152): n is a, c, g, or t
gtgaaacaaacgccgggtttaatgtagggcacaggcaccccgngagaagtcagctccgtgggaaccgtgggctcagagcacccaggtcatggtggggcagggccaggcctcacctggggaggcccagaaagggagggccacactcaaggtccagggcaagtccacgtgcagacggagccctgcagcccacactgctgttgccaggtgtggctgcgcgggacactcctcggggacaagggcagcagtccagagcacaggaaggaaatgtagcttctcagtgctggggtgcaaggctgaggggccgatgggggacaatggccaccaccaggaggcagcccgggctcacagaccatcttttgccagcctgtacacccgcttcaccctggcatagggccccagggagtcctcaaacacaaaatcccagagcaccttcacccaggagtggtgctgcggcaggtggtcgtagtactcgggcgcgatcttccgcaccagcggcaggttgtagcccgggatgctggggaagtcgtggtgctccacgtggtagcccacattgaaggtgatccagttgagaggcccatagtaggagtaggtctcgtggcccttgaggaacatgtagtgctcggccacgaagtggcccgagatggggtgcaggcccaggcccaggaaggagctggccagcaggtagaccacgggcttgagcccccaaagggcaaagatggccaggtcggccgccagctgcaccagcgtgttgagcacctccatgcgggtcacggccttggggtggacgcagagcggccgtagtgagtagaagaagggctgcagcaccagccagagcagcttgcgggcgggcgtgcagaagaaccagccctccagacgcgtgggcacgtccacgtccagcccgtcgccgcccaggtagcggtggtggtccacgtggtacttcttgaaggaggcggcgtagggcacacccacgggcaggttggcgaacacggccagccagcggttgcgtgccgcacggcccgtgccgaaggccgcgttgtgcgagatgtcgtggatggccagcgtcagcgagtggttcacgcagccaccaaaggcgtagnnnnnnnnnnnnnnnnnnnnnnnnnnnnnnnnnnnnnnnnnnnnnnnnnnnnnnnnctgcaccagcaccagcaccagcaccgcccacttgaggcgcgggtctggccgcatcagggccttgatggccgggtacttggccagtatctccttgcgccgctgcgtgtgcggctggtcggtgtagacccactcgaagtcgttgcggctcgcgctgttgcccatggtggggcgggaggcgccgttcggagcgcggc

SEQ ID NO: 77605 - DNA, 879 bp, Homo Sapiens
  misc_feature (781)..(793): n is a, c, g, or t
gggggcagaagtttgcaaataggcagaatggaatcgatttcctcccacctccgtgtgacgatcccatgttagctacacagtgcagaggctcttgatggtggactaagcaatttcctccctcgtgcgcatctcagaacccatcggtaggcaaaggaaaatacgctcaggtggttgtggtgtagactgtgtcaggcctacggagtcagccagtggctagcgcaagaccagtcactccctctgccttcaggcttctgtcaatttcattatcatcaagcaggaattatgtcgtaagtcactgaccctaactgcagaccatgaagtaaattatgtaactaggtttttgcttctccagtggtgaccacccccccccatccccgctcacaacttgggttcttctcagcggggcgagctgagaagcggtcatgagcacctggggattttagtaagtgtgtcttcctagaattcgaaggctctctctttctagaggtgctacatagttggtaatgcttggaatggcaatagggtagaatgattaatcaaaggcatatcttctatatctgaagagtatccttccttcagggtttaatagactgagtcagatgggtctgatattaatcaaaattgtctcttctgaggaccgctgataagcattgacttgctgtcccctaaggaaatccgagcggctacaaagcgtttctttacttttcacttcaattaatgctgcgcttcgcttggtgagtgcgtactttttctacctgtacacattcctgcattcatgtannnnnnnnnnnnngactaaagctatgttacatggaaaggattttgaagccttttgtttcccttgctttgttttaataaacagtatattctttggttgtg

SEQ ID NO: 77606 - DNA, 1760 bp, Homo Sapiens
  misc_feature (731)..(801): n is a, c, g, or t
cataggatataacagtgtcaaaaagcaggctggtacggtccggaattccgggatatgtcgaccacgcgtcgaaattcaaagccttcaatttgaagtgacctaggtgggaggtgataaaattgttccctttatagttacggaggtggcttaggtgaattgagtagagggttcattccaattcctactgtataggtgtctgtgtctcaaaatttattgtaatcatggtaccattggtggcctcaacagaggccaaggagttctgtgagccctggcagcaaaaaacaccttggggggtgaagctgtcaatgccaccagttggacctccatacattctgagctaacccagaatctttagtcggcagaattaagtgctggtgtctttcactggcagcatgaagttagccaccaagtcctcacaagccgtgctgcttagttgctcggtggttatggataaactttgcccagcatgatttttgggttcatcttatcggttcccctggtgggcagatacacagtgttctgcattccacatgtaagtgaattgcaaaaacaaaacaaaactcactctcttgtaggtttatttatgtgtgtgtgaatgtgtattttaattatgtgtatttaactctttaaaatctcttagattttaatttatcctgtaaatttctgtatatataatttaataacagaagcctccaccagcaacagcatgtggaagatacagatttgtcatnnnnnnnnnnnnnnnnnnnnnnnnnnnnnnnnnnnnnnnnnnnnnnnnnnnnnnnnnnnnnnnnnnnnnnnggtctgttccaaaaactctgaatcatctacattttaaggtattttacctcaaaaatgaatcattgtgttaggattctaattctttataaagaacttcatgggcttcaataatgtctagaaagtaaaataaagaggaatgttaccatccccagctgcccttatttccagagaaccagacgtttgtttcccagttggaaagaagacagttgagcacttcaggatggtttttaaatttggtatgagattctctgccaacaccaagctctgagttaacgtgctttcttctcctggccctgacagagcactacagcatcaaagtaaatctttggggacagtgtagcccatctgcatcctatttaatttcttcccttctccccaccagtgttgtcacagggcctatgttgcttaaaggtagtctggctgctgaatccctttctcagctcagagcagttttaagatttaattgggaatacagagaaacaggattgtttgagaaccaaaatcaagaggaacagaaatcttaacttgatttcatgtgttagaacattgtaccatgcctcttctgtatctgtggaagtttcctgtttgacacagggtatctaggaggggcggggaagacatggatagtataggaagacattaatcctagcattgtcatttatatacattaatgaaatcctgatgaggacctgctttttgtttgttttcctttgaaacccagccctattgtatttgtatttaaaatttgtacacatttgtataataatctgtaccttgtggtatttggtactattagaggaaaaactttggattcagaccttcttgcagtttttatatcattgttttattttgttttttaaataaattctagtggtttgatccaaatcccattacagttgtataaagaaataaaattttgtacttatattattaaaaatcacatttttaatatttgtaaa

SEQ ID NO: 77607 - DNA, 824 bp, Homo Sapiens
  misc_feature (651)..(699): n is a, c, g, or t
  misc_feature (736)..(759): n is a, c, g, or t
gggaccggctcctgaccctgactctgctgccgagcctggagctgtgtctactctgcgggccgagcccacccctcagccagttgtatccacagcttctggagcgctggtggcagccactgctggacccgttgcgggcctgtctgccgttgggaccccgggcgctgcccagtggcttcccccttcacacagacatcctcgggctgctgctcctccacctggaactgaagcgctgcctcttcaccgtggagcccttgggggataaagagccttcaccagaacagcgccggcgcctcctccgaaacttctataccctggtcacctccacgcacttcccaccagagccagggccaccagagaagacagaagatgaggtctaccaggcccagctgcccagagcttgctacctggtgttggggactgaggaaccaggcacaggagtgcgtctggtggccttgcagctggggcttcggcggctgctgctgctgctgtctccccagagtcccacccatgggctgcgaagcctggccacccacactctgcatgccctcaccccacttctttgactacctagcagtgggtgatggacacagacatggggctgttagcgtctctctgtttattcgctcacaataatacacagcccctggatgnnnnnnnnnnnnnnnnnnnnnnnnnnnnnnnnnnnnnnnnnnnnnnnnnacatccacttccctggcccctctcccctctgtgcttnnnnnnnnnnnnnnnnnnnnnnnnctccccctaaccccccagaatgtaaacagcagcagatgaacaaaaataaaaatacaaaaggccgg

SEQ ID NO: 77608 - DNA, 713 bp, Homo Sapiens
  misc_feature (267)..(267): n is a, c, g, or t
  misc_feature (580)..(661): n is a, c, g, or t
agagtatgaagtcgacggcgcgccgaattcggcacgagggcaatgccaagcagatcgtgtcggagatgctgcggtacctggagacggcagactacgccatccgcgaggagatcgtcctgaaggtggccatcctggccgagaagtacgccgtggactacagctggtacgtggacaccatcctcaacctcatccgcattgcgggcgactacgtgagtgaggaggtgtggtaccgtgtgctacagatcgtcaccaaccgtgatgacgtcncagggctatgccgccaagaccgtctttgaggcgctccaggcccctgcctgtcacgagaacatggtgaaggttggcggctacatccttggggagtttgggaacctgattgctggggaccccttctctctctccccaatgtttttctccctgcacctctcctagttccttttgtgttacataggccactctggctactctccttttctctttatatcaattctccaactttatcctttagatctatgatttcatctttgtgttctttctaaaaagttattatcgaagcatgtattaattttagattattttactnnnnnnnnnnnnnnnnnnnnnnnnnnnnnnnnnnnnnnnnnnnnnnnnnnnnnnnnnnnnnnnnnnnnnnnnnnnnnnnnnncataaattacttgtttaatgtatgattatttatattctctattttacttaag

SEQ ID NO: 77609 - DNA, 1684 bp, Homo Sapiens
  misc_feature (1527)..(1550): n is a, c, g, or t
  misc_feature (1586)..(1635): n is a, c, g, or t
cccgctccagccccccagtgcagttctccctgctccactccaagttccatctgtgcagcgtggccacgcgggcgctgctgctgtccacctacatcaagttcatcaacctcttccccgagaccaaggccaccatccagggcgtcctgcgggccggctcccagctgcgcaatgctgacgtggagctgcagcagcgagccgtggagtacctcaccctcagctcagtggccagcaccgacgtcctggccacggtgctggaggagatgccgcccttccccgagcgcgagtcgtccatcctggccaagctgaaacgcaagaaggggccaggggccggcagcgccctggacgatggccggagggaccccagcagcaacgacatcaacgggggcatggagcccacccccagcactgtgtcgacgccctcgccctccgccgacctcctggggctgcgggcagcccctcccccggcagcacccccggcttctgcaggagcagggaaccttctggtggacgtcttcgatggcccggccgcccagcccagcctggggcccacccccgaggaggccttcctcagcccaggtcctgaggacatcggccctcccattccggaagccgatgagttgctgaataagtttgtgtgtaagaacaacggggtcctgttcgagaaccagctgctgcagatcggagtcaagtcagagttccgacagaacctgggccgcatgtatctcttctatggcaacaagacctcggtgcagttccagaaatttctcacccactgttggttcaccccgggagacctccaaactcagcctggctgtgcagaccaagcgcgtggcggcgcaggtggacggcggcgcgcaggtgcagcaggtgctcaatatcgagtgcctgcgggacttcctgacgcccccgctgctgtccgtgcgcttccggtacggtggcgccccccaggccctcaccctgaagctcccagtgaccatcaacaagttcttccagcccaccgagatggcggcccaggatttcttccagcgctggaagcagctgagcctccctcaacaggaggcgcagaaaatcttcaaagccaaccaccccatggacgcagaagttactaaggccaagcttctggggtttggctctgctctcctggacaatgtggaccccaaccctgagaacttcgtgggggcggggatcatccagactaaagccctgcaggtgggctgtctgcttcggctggagcccaatgcccaggcccagaagtaccggctgaccctgcgcaccagcaaggagcccgtctcccgtcacctgtgtgagctgctggcacagcagttctgagccctggactctgccccgggggatgtggccggcactgggcagccccttggactgaggcagttttggtggatgggggacctccactggtgacagagaagacaccagggtttgggggatgcctgggactttcctccggccttttgtatttttatttttgttcatctgctgctgtttacattctggggggttagggggagnnnnnnnnnnnnnnnnnnnnnnnnaagcacagaggggagaggggccagggaagtggatgnnnnnnnnnnnnnnnnnnnnnnnnnnnnnnnnnnnnnnnnnnnnnnnnnnatccaggggctgtgtattattgtgagcgaataaacagagagacgctaac

SEQ ID NO: 77610 - DNA, 860 bp, Homo Sapiens
cagtcgacggtaccggacatatgcccgggaattcggccattacggccggggggccgcactcgcgcagacctagcgcgtccaggtgggaggttagtgtggcccgggcgtccgctcctcagcggatgtggcagccccgagccatggctctcgccgtccgagtcgtttattgtggcgcttgaggctacaagtccaagtatcttcagctcaagaagaagttagaagatgagttccccggccgcctggacatctgcggcgagggaactccccaggccaccgggttctttgaagtgatggtagccgggaagttgattcactctaagaagaaaggcgatggctacgtggacacagaaagcaagtttctgaagttggtggccgccatcaaagccgccttggctcagggctaatgcgccctgaaggcagagtccagggaccttgacccagcccctctcagcagacgcttcatgataggaaggactgaaaagtcttgtggacacctggtctttccctgatgttctcgtggctgctgttgggggcagagattgacgcccccggtctttgcctctgagcgggagagtctgtgtgtatgtgtcttccccggaatccacaccaccccaccctcctcctgtcccgtggtttcatcatatctctttgcataccccatgtcttccccagttgtcccctggagtttggggggacatcccgcctcaggcatccttctcaaggggaagccaagagaggcatcaggatgggtgggtttctgattgtggcaacgtttgcaaccgttcacgattcaataaatattggatgaatttaaccgaagataacaaatgttaataaaaaaaggggggcggcttaaagta

SEQ ID NO: 77611 - DNA, 933 bp, Homo Sapiens
  misc_feature (783)..(785): n is a, c, g, or t
  misc_feature (788)..(788): n is a, c, g, or t
  misc_feature (795)..(797): n is a, c, g, or t
  misc_feature (799)..(839): n is a, c, g, or t
  misc_feature (843)..(843): n is a, c, g, or t
gggactcgcgcagacctagcgcgtccaggtgggaggttagtgtggcccgggcgtccgctcctcagcggatgtggcagccccgagccatggctctcgccgtccgagtcgtttattgtggcgcttgaggctacaagtccaagtatcttcagctcaagaagaagttagaagatgagttccccggccgcctggacatctgcggcgagggaactccccaggccaccgggttctttgaagtgatggtagccgggaagttgattcactctaagaagaaaggcgatggctacgtggacacagaaagcaagtttctgaagttggtggccgccatcaaagccgccttggctcagggctaatgcgccctgaaggcagagtccagggaccttgacccagcccctctcagcagacgcttcatgataggaaggactgaaaagtcttgtggacacctggtctttccctgatgttctcgtggctgctgttgggggcagagattgacgcccccggtctttgcctctgagcgggagagtctgtgtgtatgtgtcttccccggaaatcacaccaccccacccctcctcctggcccgtggtttcatcatatctctttgcataccccatgtctttcccccagttgtccccctggagtttgggggggacatccccccctcaagcatcccttctcaagggggaagccaagaagaggcatcaggaatgggtggggttttctgatttgtggccaacgttgtgcaaccgttcacgatttcaataaatattgggatgaaatttacccggnnnaanaaaacannnannnnnnnnnnnnnnnnnnnnnnnnnnnnnnnnnnnnnnnnngcanaaaccacaagcgccaaaaacccagacaccacaacccagcaaaagcggcgagcaggacggcccagccacgcacccccggccgacatcccat

SEQ ID NO: 77612 - DNA, 481 bp, Homo Sapiens
cagatcccataaataccttaagtgtagaggggtctctgttgtagaatagctcttaattttagagaaaccttcctggagggaaaccatactcctataatgagcaaagtaacaacttcaagcatttttccagcgttaccatcaaactcacaaataggttgaaatcctttagttataactcagcctttaggaacaccggagaacccacaataatagaaatcttttcgtgttccccattgagaaatgctttagttagcatcttcatgcttggaaatctagacaagaagagaatccatggatggacatggtcgaggaattcggaaagcctgcagttgacattcagtcttcacttgaaactcaaaactgacactaggaacagcttcatgagttcagtagaagtaagctttatttgtagcttctgccttgtttgacggcgtatctattcagggaagcgcacagtaaaagaattccttagcatgaaaaa

SEQ ID NO: 77613 - DNA, 541 bp, Homo Sapiens
aaaagtactcaatttagattttagtaagttgactgttagatggttgctctttggcagaagtttaaatatatatattcatagatatttttacatctagcaatcagtaaatatttatctctttttcttgcactttgcatttaataatttaaaaggaaaaatttaacagatgataaatatcaaaccaaaaaagtcaacaaatcttaataatctcaaaatatacaagggcaaagtgatacataaaccaatacagaatacatttgtctgcacatttttgcataaattttaaaaagcatataattctgtaattttaattttatagagctttccctaaaatattttttattttatttaaaaatgagtttattttcaaataagaagattaagtctaaaaatcagtgcaaaagattgatggtgatgatgtatcaatgcaatttgatgcatccgtttcgctgtcttgcaaaaggtgtagtgaccaatgggctgtctgtactctcaatacagatgtagtattctgagaagagatcatttgttaagagcggat

SEQ ID NO: 77614 - DNA, 1362 bp, Homo Sapiens
  misc_feature (42)..(65): n is a, c, g, or t
ccctcaactaaagggaataagcttgcggccgcctgctcaggnnnnnnnnnnnnnnnnnnnnnnnnaaaattaaaaagtctttatccaagtcaccaatgaaacaggattctgattcattaatcatgtcttgcccacttttttcaacaaacctgacgtcctataatgagctatacagtgtgaggcatatttcatagcaacgttggttgattgccaaggagactctgccaccgttctggataagctcatgtttcccttttccttggctgctaatagaagggcaacttacagtgcagggtcaagagcaagaagctgggggagtagaggctatacatctagcctaataatagagatctgaggtggttaccaggagactacgttcttttgattccattcctcagcagcaaaagtacttgagttcaaatgataaaacttgaagttgtaggcttggaagagtatcagctcagtatatccttccttgcataaatacaagggaaaggccaaggaataatcagcattaacctgccaggtccaagggtcttctatccctgacttcatctgagtcacaagatttctctaataagagaaactttgctactctgaggaaaattatcccttatgggagcccccagttcagaggtaagaacagttctttcacgtggaggtccaaattctggacttctagaaacaagtgaagtgtgctaaagtctcctatttattgtttctcttccagtattgtgccatcgattcttgcataaaattctggaatgctggctcttcatggctttcctctgtaactctgtggtcaatgtcatcagtatcgctgtctgcttcctcatcctcttcatccaaggttcctcgagtcaggatcaaatcagaagggtgcagcacaggagataagctgtctttggcagtccctgcatccaaggctacagaacccatatcttttcgaaggcgttccagttgttctctctgctgttggctctctgcgttggccagtgattttttcagacgttcatattcaggacgatactccctttcatattcttcggcagcactggtaacttgcacaaagagttcatctaatccagtacccagaacagcagagacacccaccaccctgagtgagctgtaaaactcatctaacaccaggctcattgaacgagtcaggttactgacgtatgtagtctcttgattcaaggcatcttggaaagcctcaaaatcctgcatccattccactgcaaagctgtggtcaatgatgtcagttttattcatgaccacaatgaaaggcagcttggttttgtataagatgctgcaggcatagagcatgttggacatgaaggtcactcggttggtacttctcga

SEQ ID NO: 77615 - DNA, 1746 bp, Homo Sapiens
tcatcttaggaaaacacagagaagaaactccccactaaacaaaccattgcaaaactacagcaatctgatatttggaaaatggagaatgagttctatgaatttgcactagagcagttccaattcatcagagcccatgccgttcgagaaaaagatggagacctctacatcctcgcacaaaactttttctatgaaaagatttaccctaagtcgaactgagtataaggtgtgactattagattcttgaactaaaatttgaccctgtcttcacctttgttctcagctccacagtctggattgctgacagtaggtgtatatgacaatttgtattgagccaaattaggaaacagacagtaacgtcaaggaagtagatactggctggcattgtcagtgttctaagtttcaggcatttttatttttcctggctaaacgttggtgaaagttataacctcctgcctgggagaaaatatacatcacctaaaatgaacttatggcaggtctaatcaaaaggctaaatacaatttcagaaaaggttctgatactcttgtttttgataaagcattttttcaactaaccatgaattaagatgagtccatttgcctcttctgccttcactgagggtttgggttatacacctctactgaattgtgttaataactgtttggcagtgtgtactttggttttgtgagtcatgtctcatgaaatttattggaatgtttaatcatatttgctaagaaatgtttctgctgtagttggattttgcccatattttatgtaggtggctttaattttttaaatggtgattagtgttaaaaatcaatttaaatcatgactaatatggtaaaaagataaagcatcaaagcagtatttctcattcctgcctcctcaatatctaatactgggaagatacttcaaagaatattgagattgtctgaagttttagttaagattttcacacattaatatcaaaaaagtaagtttagtatttgtttctccatgggttatttgtaaagctgtaaactgagatatcggtgactccgtattatgactccattagtgagctgtggtatgggtaggattttcctacttcttctgtacttttacctgtagactatttttactaaggtgctttataatgtgttttaaagcattgcatttacaaaacaaggaaaatgctgtaaatattgcatattttatgtatttggaccaaaaggttacaagtaattagacaaaagtggttttgcaccaattttatgtcaagtaaaaccatcagacctactgttcttgtatttctcatttaactttactgttaagacatcactgaaatgaacttcagtaagctttcaattttgatacacagttcattattcataacttgaggcagtaattacagtggaatgagtactggacaaggagtcaaaaaacttgatttcaggtcctagctctagcacttacagctgtgtgatcttgggcaagtcacttaacctctctttgcctcaatttcctcatcttgaaatgaggataataatacctgctgtacctacctcacagggctgttgtgaggattaaatgagatggcatgtgaaagcactttgaaaattgtaaagcgctatgtaaatgtaaggtattatagaaacatctttaacatatagtttcataccattcattttttaacaaagaaagggaaaagtctgcttgtaagctggttgaaaaagttaatcttgatataaatttgtgtttgataaaaaa

SEQ ID NO: 77616 - DNA, 684 bp, Homo Sapiens
gagccaaacccagtaggaggctgggcctgggtttgtgccgctgggtctccatcaccgggacctggagagagaggggctgtgtagccttggaagaacttgggtcatggggaggaagcacagctgttggggaagggccaggacctcaggcccagccccaaccccagctggggtggggtcttccccacctgtctcttatgccttatgggaaggcccagccataactcgggggccatgctcgagctggggaccagcttaggcctcctccataggaacccagtgactggggggtgacgcctacacccccagctatttgcactctggtgtgtggtttgactctgcttttcttccggattggccctgtggtcacagcctcagggggccaggctgggggaacctcacctggcccgtactcctgggggtttccctttgccattgggccccctgagggactgtgggggctcaagggtaatgccagaggcccatggccccagcgaggggctgtggggcacctagagttctcggtgtgtctccttcattcattggcctctgctggggcctcctatgggtgtcttacgtctgtccatccatctgtccgtggtcagaagtggggtcagtgtgtgagtgagagcaggagtatttatgaaaataaaacgtcgtttacctggaacacaccagaacacaaac

SEQ ID NO: 77617 - DNA, 1049 bp, Homo Sapiens
  misc_feature (193)..(193): n is a, c, g, or t
gcgagcccttcccccgcggggggggctgccccctggggtttttttcttgggggaagggttaatttgggccctttatattgattaggaattccccctcgtttctggggttcctgtggcctgagggagggttgccaagcgaggattaaccccgggagacgttgggcgggcgctgcccttgctccccttcgttccncaaggtgccccgttcaccaccatttcacagcagtgggtgcccagcaggctctcgcctccaccgccacccaggcccaggccggacaccagtagcacaaaccctatctgtgtcaagtgggggtgcgggcttctggggagcaaggtcagcaaagcaatagtcctccaccagaaacttcccgtcgtctctcacggagccaaacacagccaggacagtccccgtaaccagctttgacacgtcaatggtgccttttagtttgatacgctgcagttcatcttccaagaccagctcgtcatctgggtgtatgtatttactccgaggaggctgggggagcaggttgtgctcctcgctgacctcccgcaggatggagggctgcagcggcatggccttgaacagagtgcccaccacacagcacttctcctcaggctgcagttcacacagcttcttcactcccactccactgccccagtgctgctgggcccggttctccaggaagggtctcatttggatgaggcgggtggcataaatgtgggcatactgccggctaaagctgcgctctcctagccggaagggttgtgaggagttggtgtaggttgccactggcacccgggcaaaggtggcattgttggctgatggtggggacagtagagtgtgggccctctgggcagcctgctcagaaaacatggccacactcctgacttgcttggtccacacagcttcgcccaggccaaggaggttcactgcgaaaacacaaggcattcctgctgcccctgtccatcccccaaagcagcagctctcctggtgtctcactgcacccaaaggatacgcgcggcgcgcccctcgtgccgattcacacccg

SEQ ID NO: 77618 - DNA, 1633 bp, Homo Sapiens
cggctaggtacgaggcctgggtggcgaattcggcacgaggggcgggatgcggcgcgccgcgcgtgaacctccttggcctgggcgaagctgtgtggaccaagcaagtcaggagtgtggccatgttttctgagcaggctgcccagagggcccacactctactgtccccaccatcagccaacaatgccacctttgcccgggtgccagtggcaacctacaccaactcctcacaacccttccggctaggagagcgcagctttagccggcagtatgcccacatttatgccacccgcctcatccaaatgagacccttcctggagaaccgggcccagcagcactggggcagtggagtgggagtgaagaagctgtgtgaactgcagcctgaggagaagtgctgtgtggtgggcactctgttcaaggccatgccgctgcagccctccatcctgcgggaggtcagcgaggagcacaacctgctcccccagcctcctcggagtaaatacatacacccagatgacgagctggtcttggaagatgaactgcagcgtatcaaactaaaaggcaccattgacgtgtcaaagctggttacggggactgtcctggctgtgtttggctccgtgagagacgacgggaagtttctggtggaggactattgctttgctgaccttgctccccagaagcccgcacccccacttgacacagataggtttgtgctactggtgtccggcctgggcctgggtggcggtggaggcgagagcctgctgggcacccagctgctggtggatgtggtgacggggcagcttggggacgaaggggagcagtgcagcgccgcccacgtctcccgggttatcctcgctggcaacctcctcagccacagcacccagagcagggattctatcaataaggccaaatacctcaccaagaaaacccaggcagccagcgtggaggctgttaagatgctggatgagatcctcctgcagctgagcgcctcagtgcccgtggacgtgatgccaggcgagtttgatcccaccaattacacgctcccccagcagcccctccacccctgcatgttcccgctggccactgcctactccacgctccagctggtcaccaacccctaccaggccaccattgatggagtcagatttttggggacatcaggacagaacgtgagtgacattttccgatacagcagcatggaggatcacttggagatcctggagtggaccctgcgggtccgtcacatcagccccacagcccctgacactctaggttgttaccccttctacaaaactgacccgttcatcttcccagagtgcccgcatgtctacttttgtggcaacacccccagctttggctccaaaatcatccgaggtcctgaggaccagacagtgctgttggtgactgtccctgacttcagtgccacgcagaccgcctgccttgtgaacctgcgcagcctggcctgccagcccatcagcttctcgggcttcggggcagaggacgatgacctgggaggcctggggctgggcccctgactcaaaaaagtggttttgaccagagaggcccagatggaggctgttcattccctgcagtgtcggcattgtaaataaagcctgagcacttgctgatgcgagccttg

SEQ ID NO: 77619 - DNA, 1158 bp, Homo Sapiens
cgattacggctaggtacgaggctgggtgataaatcggcaacgagggattggcgggatgctggcgcgccgcgcgggtgagacatcggtatccaggcacgataaatttccaagtggacacaatgtctggtgtcaactacagctgttctccttcttttcccagtatcctttgggtgcagtgagacaccaggagagctgctgctttgggggatggacaggggcagcaggaatgcctttgtgttttcgcagtgaacctccttggcctgggcgaagctgtgtggaccaagcaagtcaggagtgtggccatgttttctgagcaggctgcccagagggcccacactctactgtccccaccatcagccaacaatgccacctttgcccgggtgccagtggcaacctacaccaactcctcacaacccttccggctaggagagcgcagctttagccggcagtatgcccacatttatgccacccgcctcatccaaatgagacccttcctggagaaccgggcccagcagcactggggcagtggagtgggagtgaagaagctgtgtgaactgcagcctgaggagaagtgctgtgtggtgggcactctgttcaaggccatgccgctgcagccctccatcctgcgggaggtcagcgaggagcacaacctgctcccccagcctcctcggagtaaatacatacacccagatgacgagctggtcttggaagatgaactgcagcgtatcaaactaaaaggcaccattgacgtgtcaaagctggttacggggactgtcctggctgtgtttggctccgtgagagacgacgggaagtcttctggtggaggactattggctttgctgaccttgctccccagaagcccgacccccattgacacagataaggttgtgctactggtgtccggctggggcctgggtggccgtggacgccatgagcctggtggggaccccagttgctggtgactctcgctaaccgggcacgcttgggggaccaaggggaacctgcaagccgacacatttcccgagtaactcgcagggactcctcaggcaaggccagacagggttttatcaagggcagatctccagaaacagggcacgaggagctccaacctgggcacaccagatgagagcactacccgcatacagagttcccacacac

SEQ ID NO: 77620 - DNA, 613 bp, Homo Sapiens
acagcgttcatgacagtcaccaacagcactgtctggtcctcaggacctcgtgatgattttggagccaaagctgggggtgttgccacaaaagtagacacgcgggcactctgggaagatgaacgggtcagttttgtagaaggggtacaacctagagtgtcagggaagaggtgagtgagggtgctccagggaaggggtacaagcactgccaggagctgtgggtggcagcaaatgggttgcaagggaagtgaggctggatgagcagggtcacactgtcagattctagaggtttaggaaccaggcaggagatcagccctgacaggacaggacaccaagaagagttctgtagcaggaaaagggtgatgagagccatcatgaaggaagattagcctggctgtggtgtgcaaaggtctgaagtcagaggctagtgtgctgcagtctacaaagagaaggacagctctgactgggattctctctggctgctgggtggagaacaggttaaaaagagacagaggcaggggaccagttaacacaaccatccttgcgagagaacagcaggtggaaccagggtggtggcagcggggctggtgagaagtagtcacatcgctcagtagcg

SEQ ID NO: 77621 - DNA, 765 bp, Homo Sapiens
ggtattgaagaagaagtacagaaattaaaaagatacaagattgagaatatcagaaggaagcataattatctgcctttcattatggaattgttaaagactttagcagaacaccagcagttaataccactagtagaaaaggcaaaagaaaaacagaacgcaaagaaagctcaggaaaccaaatgaagatgttttcagatatgtacacatttctgcttctgcacatattttcatggaaaccattatgtataaagaacttagagcaacatcctaattggctcagtgcacgtttggcaatagtgccagcctgtcttgtctttaatgcatggattcataaacttcttccctacctgcatcatgtgcatgtagtgcatattaaatgaaagtgatattaagaatgctttcccaaattccattatttgacattgagtctgacaactgttagttttctggttgtctaactaccatatgaagctagaaaatgcacaaacgatattccttatctgtaatttaaatacttaaaatttgcaattgtcagatcttgattaaactggttgtcttatttcttctcatcattaacggaaaaaaaatcagtatttctatctttgatatctaagtgttttgaggattttaaaactgaattttatctgctataccagttatttgagaaagtatgattttaatgtaaatcatttaaaaaggacaaaagtataatttccagtgattttcactgctgtcagtagaaaagtaataaacatctcaatttta

SEQ ID NO: 77622 - DNA, 222 bp, Homo Sapiens
atattcaagtgaatatgttttattaaatgcatactaatatctttctatagtaggtgagtacacataataaattaaaatgtatatatttattaaatatagatagatataataccagaacatgattatttcagatgagaaatcaaaataaacccatttttaagtatcttttggtcactccaaattgatattgctcataaaaaaatacactagttttccctgggg

SEQ ID NO: 77623 - DNA, 1410 bp, Homo Sapiens
  misc_feature (913)..(1017): n is a, c, g, or t
  misc_feature (1027)..(1039): n is a, c, g, or t
  misc_feature (1262)..(1271): n is a, c, g, or t
aaggcctaggtacgaggcctgggtgtaaattggcacgaggagatgcttggagaactgggtgtgggagcaggagccgctgttgcggatgtcgcggcactaccgcacaggcagcgccgtgccccgggagctcctggagaagctcattgagtcccggcaggccaacacaggcctcttcaacctgcgccagatcgtcctcgccaaggtggaccaggccctgcaacacgcagacggacgcagaccccgccgaggagtatgcgcggctctgccaggagatcctcggggtcccggccacgccaggaaccaacatgcctgcaaccttcggccatctggcaggtggctacgacgcccagtactacgggtacctgtggagcgaggtgtattccatggacatgttccacacgcgcttcaagcaggagggtgtcctgaacagcaaggttggcatggattacagaagctgcatcctgagacccggcggttccgaggatgccagcgccatgctgaggcgcttcctgggccgtgaccccaagcaggacgccttcctcctgagcaaggggctgcaggtcgggggctgcgagcccgagccgcaggtctgctgaggcctggcactgcgactgcccagtctggcctgcgctcccgccgccctggtgccttagcccccggcacaggatggggcaggctctggcacagtgcctgggactggcagggtggctgagcggctgtcttgcctcttgtcattgtctgtccccacccggtcgtggcccacccggctagagacggcgtcctcaaggcatctggagggctttcgtggctgccagggcctggtctttgttgcactaacacgtctcctctctgggaaacgtcccttgtcaggagacggctcttctttgaaatgaggtcattaaaaggaaacagnnnnnnnnnnnnnnnnnnnnnnnnnnnnnnnnnnnnnnnnnnnnnnnnnnnnnnnnnnnnnnnnnnnnnnnnnnnnnnnnnnnnnnnnnnnnnnnnnnnnnnnnncccttgccgnnnnnnnnnnnnntcaaaaatttttcaaaacctttctttggggccgcggccccaaaaggaaagggaactgggccaaacctgtttccaaggaaaaccgggccatgacaagggctgggatccccccaaataaaaaacccccgggggaaccgaaggttttgaaaaaatccaaaagggattccggaggcctttactggattttttacggggagtccaagggaagttcaatttaaaattannnnnnnnnngtggcattttttggaagaagtggtggaatttccttaaaccttcccgcccgaacggggaaacctcttcaccaaacgggattagatgaaaccttgaattgccccagggggaaattcaaccccctttgtgcccccctgggcg

SEQ ID NO: 77624 - DNA, 552 bp, Homo Sapiens
agaacgtccctgcattcctgtctcaccctgcacatcccgctgagatggagggctgggcggcagtgcagggctgcagaggcctgtcgccctccggagtggtcttcctctggatggggctgctactgtggggctgcttctgcaccaggggcctccccaggtgtgcaccatgcctgcctcccacttggctgtccctgctgctgggcaggacccggccacatgttctgcggatgctgcagaagtgtggaccatggcgggaccccaaggacacttggcacaggcctggaagaggccgccctcgtcttgtctcggctccctttcatggacagactggccttcttagctgtactataaatttgtgagtgaagttagagcccagctcacttagccagctcactttgagggcatcctataaacacccaactgttcttttatcgtctcggttttagccaaaagtgaaattagcatgactgcatctttcaaacaaaaatattgatttctgcttttagggccccgtttccatccagaaataaagggaaatgctggcttcaaaaa

SEQ ID NO: 77625 - DNA, 510 bp, Homo Sapiens
  misc_feature (53)..(69): n is a, c, g, or t
  misc_feature (387)..(405): n is a, c, g, or t
ctccccaccaacttttataaaagttgaaaaaatatcatttgactttttatagnnnnnnnnnnnnnnnnntaattgagaaagtgttcatctgaggactgcatcggtggacactggtatttatttatgttagctccaagcggaccggtggttcaaaagtgcattatttagtttgagctctgtaggtaaaaaggaggtgggaaaaattttaaaacttgagggtaaaaatgtggaaaacaaaccctcccatcccttgtagattataaataaaagcaaaaccgccacagaactagaggtcttctctttaatgttactttaaaattgctatgattgtattgtacgttatttaatgtctgattgaaacacaaatttacatgcatgtttgttacnnnnnnnnnnnnnnnnnnngtcacaatttgtcagctctgatttcaaattgcaattatttttaaggtgtataccatcgaagagaatgggtatttttttgtatgtattctggaagaaaacaacaaa

SEQ ID NO: 77626 - DNA, 305 bp, Homo Sapiens
aaatgtgcagaaaaaatgaacaagaaaaccagtgaaacagaaaccgccactctcgtgcatttcagacgtgatgtaaaaagagaacttaaaaaatagtttaacatagagtatctcaaaattatggagatctctctctgtccacaaaaacaagaaaaaagtcagattgtgcactctttttgtatgtcatgaatagtactttaactgtcactgtaaatttgaaggaagaacactgaagggaaattagaattcttagaaattttataaacataagacataagatgcccctacgtgagagtataattttt

SEQ ID NO: 77627 - DNA, 644 bp, Homo Sapiens
  misc_feature (41)..(41): n is a, c, g, or t
gactaccccatcaaccttgctgccatcaagatgcagaccanagtcgtcgagaggatcgcaaaggagtcattgctgcagctccttgtcgacatcatcccaggcttgctgcagggttatgacacacccgaaataagtgtgcgtaaggccagcgtgttttgcttagtggcaatttattccgtaatcggagaagacctgaaacctcaccttgcacagctcacagggagcaagatgaagctactaaacttatacataaagagggcccagaccaccaacagcaacagcagctcctcctccgatgtctccacgcacagctaatggcagtacctgtctcttgtgtagacctagaagcaatcggtggtgcctctcagagacctttccccacccccttcatcggctgcccagtcagtacaaggaggcccacaaatatttattacaatcagtattttggtcccttccagcttttctgtagaatcttactggtattgaatgtaaaggaagcaaggcctgtattgcagtcttcatacaaaacaaaaggaataagaacagaaaagagccatactgaaacatgtcttgtacagcctgctgagatggcgaaaccctgtgtgtggggtgcagtttttaaaaatcagagcgctctagccact

SEQ ID NO: 77628 - DNA, 927 bp, Homo Sapiens
gggtcacattggtgactcatactaaactgtcaaccaaaacccctaaataatttttaacacattttgctgttaaaccatatcccttccatctttgagcttgtaaaattggttttcttgatccacatttgcctttaataaatttcaccttgctagattgtgtctcaagagatcctgtcattccatgcattcatttattcaagtcaacatattcttgagtccctactatctgccaggcattgtgccaaggtcagtgcttacaggcacataaataacggacacaaagtgattgctgctacaagagagaaacgtttaaaaaaaagaagctatttatgcagagaaggagcaacaggatggaaggctggaggaatcaggaaaaggtcaacagggaaggagacatctggctggttctttacggatgtctgccaattgcagagaggacaagggcagaggtgatggaaggaggaagggtcagaagacacatactatcttagaggaacagccagttgagggggtagcgtgtgggcggagcaggtgataatgttggagaaacaggtctgcccacgaccaccagcacttagactaaggcttaatgaccttcaacaggaagtgtgaagttgtgaaacaggagagtgaaactgtgtgactggcatcttggaatagaaagaacagcatacagattgaagaagccaacgaggagcccaggcaataattcaagcaagagaagataagcacctaaactgaagcagcaccagtgagcaaaggacaaactccagaaacaagccagagatgactgataggatgtagggagcgacaaaaagagggtccaaaatgttggacccgaatgactggctggctggtgatgctttaactgggatggagaagacatgaagaacaagcactgggaaaagtcaatggctcggttttgag

SEQ ID NO: 77629 - DNA, 660 bp, Homo Sapiens
gcccgcacccccatccccagtccctgttccccaagaggatacagagcacggtgctggctgactcaactgtgcgtcccaggttcagggtcttacagagctccaccccctggggtcttacctcactgggaatgtgttgtgaaaatgaatgtgaagacaagccaacaaaccctgcactccaaaaaagcaaaacagaccctaatttttttgtgccaaaaactgtggacatgctggctcagcatcctcaggaccaagttgttgcttaatttattgttttttaataactaatccagataaaaagttgtggggcttcagggtgacctgggcccaaaggttctgaagggcagttcctggcagccccaggcttgctgtgggaaggggccgtgccgtcactttctcatcattccatggggtgtgtctgcctgggccaactctgcatggagaggccagggctggggacagtccgcactctgccaccctcctgccccttccacccaccccagctctatgtctgtgtctgaattgtggatcgtgcagccatggttattgtggaactgtggaacctgcagccatagttatttgactatatcttgaccgagggcttgcagtgcaaagccaggccagtgttgcgcattacttacaataaaagggatcatttatatc

SEQ ID NO: 77630 - DNA, 634 bp, Homo Sapiens
  misc_feature (13)..(13): n is a, c, g, or t
  misc_feature (58)..(58): n is a, c, g, or t
gtcccaaagcatntgaggccggcatctggtggccacagaccaagttcgggcagccggntgcggtgccatgccctaagggatccgttggcaaagtgctggggagaaatccgatcgccttttccctaccaggaaatacacaaagcaggcagagggcgcaacagaaacatgaacagtgcagcgcgtgtggggacgcccgccagtcaggcccggccagtccctgctctgccgctcaggctggggcaccgggacaagtggcttcactgttcatagcatcgggttacctctgtgaaatggggacattgactgtgtccactctgtgaggggcgtctggaaaatccagtgaggcaaggaaaggcccagccgaaatggattcctggtgcatgggatcgtggctgccggcagatggtgttgctgatttctttcctcacggacttgctcggaagtgctggctcctgttggctgggctcccgaaacgcctggttgtcagtgtcagagcagcttcggccgtggccctgacatgaaagaggggcgctggtgtcgacctcctggcccccatggggttctaaccaccacgcagtgttctgggtttaagtatattcagattgtggattgaaatacacaagcattgatcaac

SEQ ID NO: 77631 - DNA, 1348 bp, Homo Sapiens
gttagatatcgaatacataatggggcctatacttcctcaagagggttgtgtgacacccggtctcaaatatgggtatccccccgtttcccacggggcccctctcggcggctccaccgctgttttcggcgcagggacccttcccttgggccttgcgcccgccccccaaacccccctagagggccggactaacgcgcaccccggtcccgggcggcctctctctgttctgccaccaatttccgactttggctgctttcttcacagcacgcaggggatcgccagtgagaaaatgggttcctgccacctgctatagcgggatctccaagcccagctcgccatgagagccgcatgacgtcatcacacttcccatgtagcttcaggcagcccagtcatcctttcggggtccactgcaggttcacgatgtaaagcttcgccgccggctagggggcttggtcatgcaccagaggcgtgggtacttctttagaaccttcaggctggaccctagacacaggatggtgtctgctctgctggcagcctcggtcgccgcttcccagttcagaggctgccccaacgtccccctctccccaaagtgcacaatggtgtcccgcagctgggtcccacacttgtggcaggtccggccatgtctggtgtctgtggaggccagtgcgctccgtcacatcgaacaacccgcacgtactccctgttgggaacgcaggaggtacagacttcaatgtacatgttcccgtggagctcggagatggccgtgcgcggcagcccactcctcaggtggagcccgtcacagttctgagacaccacatgctgcaccagcttctgctcatgcagacgggtgatgctcatgtgggtgagggttggctcggcctcgctcaggtcggcagcactaacgcttctccctttctgaagcagtgtccacactccattagggccccggtagtctgggatagacgctgccgtgctgattcccgcgcctgtgtagacgaccaagtatttggcgttccggacggcgctggccagctcccggaccttcccccgcagctcctccgggtcgtcgcacacctcctcctgccgccgcttcaggccctcgcgccgccggctccggccctgcagctccgttaccaggtccgcgctctcggccagcagccggccctcctcggcgctgcgctccgccgccgccttcctcaggatgcgcgacacctggcggaggcgctccctctgctgctcctcccgcaacctccggacccgctccgccgctttgcgctcggagcggctcagacccccggctgccatcgctacccctggagacctgctcttccgatcccgggaattccggacc

SEQ ID NO: 77632 - DNA, 1422 bp, Homo Sapiens
tgccagtgcagaaacgtttaatagaaataaaaaggtctgcatagagccgaggctcggagccacccctctgccgcacatccagtacagagaggattctataaagttcacactttttcattaagtagtagtagaaatacggtgaggccctgagactggcctggtgagcgaggaaaggccgctgggcgcttccactctgcaggccggggctgaaataacccgagttccgttctcacagaaaggtgcggctgccacctcttgacacagaggccggatgggcaggtgtcctcgatggccaggccgtatcagggtacaaccgcagcagtgcaaggggcttcctcaaggacaaatggctaaaaatgtcacggtgaaaatgtcatccccaaagagttcgttctccctagacccgtgggggcaaccccagccgttcaccgatgacactggccatctgcaaagtgccaacgtgttcttcatcgagcacgtgattacgtcactttcgttcctttttgtgcgttttgtgcagcccctgccaaaccagccccctaggatgggggccgagctaagcggtgcaccccggtccccaggcggggcctcctctctgcttctgcacagcgacttccgactgtggctgccttcttcaccagcacgcaggggagtcgccagtgagaaaatgggatcctgccacctgctataggcggggatctccaagcccagctcggccatgaggagccgcatgacgtcatcacacttcccatgtagcttcagggcagcccagtcatccttcggggtccactgcaggttcacgatgtaaagcttcggccgccggctagggggcttggtcatgcaccagaggcgtgggtacttctttagaaccttcaggctggaccctagacacaggatggtgtctgctctgctggcagcctcggtcgccgcttcccagttcagaggctgccccaacgtccccctctccccaaagtgcacaatggtgtcccgcagctgggtcccacacttgtggcaggtccggcctgtctggtgtctgtggagggcagtgcgctccgtcacatcgaacacccgcacgtactccctgttgggaacgcaggaggtacagacttcaatgtacatgttcccgtggagctcggagatgccgtgcgcggcagcccactcctcaggtggagcccgtcacagttctgagacaccacatgctgcaccagcttctgctcatgcagacgggtgatgctcatgtgggtgagggttggctcggcctcgctcaggtcggcagcactaacgcttctccctttctgaagcagtgtccacactccattagggccccggtagtctgggatagacgctgccgtgctgattcccgcgcctgtgtagacgacccaagtattgcccctcgtccgatttaaaacaccccctccgggg

SEQ ID NO: 77633 - DNA, 885 bp, Homo Sapiens
aaaaaagtcatcattgcctttggcttcatggttcctgatgtgaaatacaatgaagcttacatttcatttctgttcgtccaccctgaatggagaagagcagggattgcaactttcatgatctatcatctgattcagacctgcatgggcaaggacgtaaccgcttcacgtctcagcaagcaaccccgctatgctactgtaccagaagtttggattcaagactgaagaatatgtattagatttctatgataaatattacccattggagagtacagagtgtaaacacgcattctttctgaggctccggcgctgatgcgaatacagctcacagagaaacgcatgtgctattggagaacaggtctttgtggagatctaaaggcagtgattgatttcacagggagctctaatctctgtgattacatggtccttcaaactcccaaccaaagtgagaaaagcggcatgcagtgaaatgagcagtgagcagccctttagcaaaatcgccctccagtccttcctggagatgccttcagccagcatcccagactccacagttatttatgaacgatgtcgtgattctccctccacctgacagtttgtaagagtgaaagagcatctaacctgatgctcttggagagagataacctgtctgtcataacttaaaggatgagaaaatgtggtgtagctattaaagattcatgcagtcccaaaaggcactgtcctgggatgatgagagattataaggtgatttcataaaaggaatccaaccctgtgcccggccattgatgtgttgtcattgaatccaggaggatttctagggcactgaagttttgttgtttcttttgctgactttggttacagtcagaaaaaataaactagatgtttgtgtct

SEQ ID NO: 77634 - DNA, 2135 bp, Homo Sapiens
  misc_feature (1827)..(1828): n is a, c, g, or t
  misc_feature (1832)..(1835): n is a, c, g, or t
  misc_feature (1839)..(1850): n is a, c, g, or t
  misc_feature (1852)..(1853): n is a, c, g, or t
gctggtaccggtccggaattcccgggatatcgtcgacccacgcgtccgcgcacccagctcggagcccggagcgtgcctcggcggcctgtcggttttcaccatggagcagctgagctcagcaaacacccgcttcgccttggacctgttcctggcgttgagtgagaacaatccggctggaaacatcttcatctctcccttcagcatttcatctgctatggccatggtttttctggggaccagaggtaacacggcagcacagctgtccaagactttccatttcaacacggttgaagaggttcattcaagattccagagtctgaatgctgatatcaacaaacgtggagcgtcttatattctgaaacttgctaatagattatatggagagaaaacttacaatttccttcctgagttcttggtttcgactcagaaaacatatggtgctgacctggccagtgtggattttcagcatgcctctgaagatgcaaggaagaccataaaccagtgggtcaaaggacagacagaaggaaaaattccggaactgttggcttcgggcatggttgataacatgaccaaacttgtgctagtaaatgccatctatttcaagggaaactggaaggataaattcatgaaagaagccacgacgaatgcaccattcagattgaataagaaagacagaaaaactgtgaaaatgatgtatcagaagaaaaaatttgcatatggctacatcgaggaccttaagtgccgtgtgctggaactgccttaccaaggcgaggagctcagcatggtcatcctgctgccggatgacattgaggacgagtccacgggcctgaagaagattgaggaacagttgactttggaaaagttgcatgagtggactaaacctgagaatctcgatttcattgaagttaatgtcagcttgcccaggttcaaactggaagagagttacactctcaactccgacctcgcccgcctaggtgtgcaggatctctttaacagtagcaaggctgatctgtctggcatgtcaggagccagagatatttttatatcaaaaattgtccacaagtcatttgtggaagtgaatgaagagggaacagaggcggcagctgccacagcaggcatcgcaactttctgcatgttgatgcccgaagaaaatttcactgccgaccatccattccttttctttattcggcataattcctcaggtagcatcctattcttggggagattttcttccccttagaagaaagagactgtagcaatacaaaaatcaagcttagtgctttattacctgagtttttaatagagccaatatgtcttatatctttaccaataaaaccactgtccagaaacaagtctttcattttctttgtaagtttggctctgttggctgtttacacccatgaattttggcatgggtatctatttttacttttttacattgaaaaaaatccagtggttgcttttgaatgcatcaagtaaagaagaagaaaagaatacatccgatgcgtagattcttgaccatgtagtaatctataaaattgctatatcctcctgatagccatgggaaaacatgataagatggtcatttattttgcagttagaattttggaagccacaaaatagacagacaccctgactgttgaagggaggtttaaaaacagatattcaattgaaatgtaagagagcaccccaattgagagcccaggttacgaagacaagcttgcctcgcctgacttttctgtcccttgttctgcaggattagtattctgttacagacctctagtttttagactcttcaattaaagggccaatggttataacctggcnnaaannnngaannnnnnnnnnnnannaaaaaataaaaccttgtcgggccgccctcggcccctcgaaaaagctttctaaaaccatttccttttggcgccgcggggcccagtaaggtaaatggaacatgggcccataacctgttttccctaagaaaaaccctgggccaggaactaagggccttggaattcctccccaaattaaaaaaacgccccgggggggcaaccgaaggcgtttctggaaacaaattcccaaatggaaatttccttgaagggcctttaactgggattcttttccaaccggggaggccc

SEQ ID NO: 77635 - DNA, 836 bp, Homo Sapiens
  misc_feature (96)..(135): n is a, c, g, or t
  misc_feature (138)..(172): n is a, c, g, or t
tacacaacaaccacacacaaccacgccacccaacacaatggtaaaatagaaactcaactaattaggggggcggccatagccgctcgggcctaagannnnnnnnnnnnnnnnnnnnnnnnnnnnnnnnnnnnnnnncgnnnnnnnnnnnnnnnnnnnnnnnnnnnnnnnnnnncagtcgacggtaccggacatatgcccgggaattcggccattacggccgggggacctcgcacccagctcggagcccggagcgtgcctcggcggcctgtcggttttcaccatggagcagctgagctcagcaaacacccgcttcgccttggacctgttcctggcgttgagtgagaacaatccggctggaaacatcttcatctctcccttcagcatttcatctgctatggccatggtttttctggggaccagaggtaacacggcagcacagctgtccaagactttccatttcaacacggttgaagaggttcattcaagattccagagtctgaatgctgatatcaacaaacgtggagcgtcttatattctgaaacttgctaatagattcatatggagagaaaacttacaatttccttcctgagttcttggtttcgactcagaaaacatatggtgctgacctggccagtgtggattttcagcatgcctctgaacgatgccaaggaagaccataaaccagtgggtcaaaggacagaccagcaaggaaacaattccggaactgtctggcttcgggcatggtctgataacatgaccaaacttgtgctagtcacatgccatctattccaagggaaactggaaggataaattcatgaaagaagccaacgacgaat

SEQ ID NO: 77636 - DNA, 956 bp, Homo Sapiens
cagaggtgacacagaatgatatgataatggctgaaaggctctttggaatcctagcacatgtagcatcttctgagttaccccagtatcgtctgatttccattctgggtgatgccaggaaaaagcaatttcggtatctactagaatccaaaggaaaaaaacctggtattatcaacgaagaaaataatgacagcaaaagacttgtaggagaaaacacaaatcgtgctacattaaattatactacaagagacttttataatgaaaagctagaggaaataaaggaaaagaagaaattctgtaaaacatatatagaagaccttgtgaaggaagccacagaaatcaacatgaaaaatgaggctttgcagaagctttggccacagatgttcattgagcttgttagggatgcagtcatagaaattcgcaataaaaattcctatatgaagctctgcctacagcagataacagaccaaaaataaaaatggcctttagttacagttgattttggcagttttattttttgaaggttgaaaatatgcaggttatacatgttaaaacaacaacaacactatcctataaactagaaagactagtataaaagcattattgcccactgttctcatagctaaaagttaagaaggaaagaaggaaagcaggagaaaggaaggattaattgcctgtatgtgaggaccaaacaacctttgggaactaaacagttttcagagatggcgtggcactgcatccttggttcttgctttgattggtgccctgctatagcccaaagcacgtagtatttgctgatgattcagcatgagctgcatctacctacttttagctgataattttcagttatttccctttttattttatgtcatgatttcaaagccaaaaatatgttctttttatgagtgaagaataaacttactaacaaattagtcaaaataaagtatgtttgcctcctt

SEQ ID NO: 77637 - DNA, 729 bp, Homo Sapiens
tttttctttcattcttgatacttggaagtcgtctgaatcctttagcttcaaaccagcctgagtttgagtgcttgccgtagcagaaactatccttaccacaggtgggaaggaaaggaccagtttctagcagtgtcgggccactcctctttcgaacatccctaagggaggcattcacaaaagctgtcccaagcagctggaagaaaacagcttccgagatgaccaggaggactgggcggcgccgagcccagaacgctcctggcgcagcaccgttggcgttggccgattgctgctggtggggggcgggggtgcaggccccagtctctatgcaaatcagggatcagaagatcggaatttccaccaatcagcgggaagcctcggccctgtaactgctaatgggagacagcagcgccacgccacaggcttttcccctggtttcgggaggggtggggagccaggtggggctcccgcccagaccctttcccgaggtccgccctctccgccttttctctaaattcctcttttgagtgccctcccttccggttgagaggcgggggttggcccgtagttgtacactcagtcaccctgcactgtggaggcgggggcctcccttgtggactgatttgcgtgggatttggttgttttattaagagatttaaaaaattcagatgacttactagtatgactgttttgtcatatttgcttccaggttaataaatgacaaaaatgaaa

SEQ ID NO: 77638 - DNA, 983 bp, Homo Sapiens
  misc_feature (76)..(76): n is a, c, g, or t
  misc_feature (102)..(102): n is a, c, g, or t
  misc_feature (164)..(164): n is a, c, g, or t
  misc_feature (214)..(214): n is a, c, g, or t
gtagagatggggttcgctatgtgcccagctggtctcgattctgccctcaacgatgtctgtctcgcctcccaaagtncgggatgacagcatgaccaccgcgcntgcccttcttttgaatggcctcctgcgttccgttcaatgccccgtgcactttttgggagccnccaaggctgtactgttgatttgactccttttttcccctttcttttaaccntaaattaaagctgccactgcagagccccgccatggaagacacgccgttggtgatatcgaagcagaagacggaggtggtgtgcggggtccccacccaggtggtgtgtacggccttcagcagtcacatcctggtggtggtgacccagtttgggaagatgggcaccctggtctccctggagcccagcagcgtggccagtgacgtcagcaagcctgtgctcaccacaaaagtccttctggggcaggatgagcctctcatccatgtctttgcaaagaacctggtagcgtttgtgtctcaagaagctggaaacagagcagtcctcctcgccgtggccgtgaaggacaaaagcatggaggggctgaaggcgctgagggaggtgatccgggtgtgccaggtgtggtgacctggaggcagccgccccgcgctgctcagcaggacacgtgaacacccagacacccactcagggactcaagtctcacctccctccccggtggagggaggaactttggcactagcccttggagccaggaaaaaagactcgtgtctcaggcagactcttactctggttactaagatcatctgtgcatgacggggagggtggaacaggtcccggaggagtcgtgaatggttctcaccaggacctgaatcgttgcttgtgtttgagaattggaggaatgagtcagcaggcgtggctcatggcccccccgtgtgcaggatcaattgtaggaggaaatttcttttttattaaaagcgaatgtgtatcccaaaaaaa

SEQ ID NO: 77639 - DNA, 862 bp, Homo Sapiens
ggcacgaggagaaaaatattctcctgtgctttggttcagtatagatttctaaaccctgatcattgcttaagagatattcactgagggtcctacgtctctgcaatttgtgtatgaataacagaataatttccctcttttgtttcgcctttcctgttcctgaatctaaataaagatggctttttagtattaaaagtggaagaaaattacagttgctgagacaaaggaaaacccactcccttggaggagcatgaccttttcctgtaattcttcccactgctgttgttgagctccttggatcctggctcctggacaccatcatcaagaagactttatggatgggctgtccacccactgagagaagaggagcatcagctacagtttctctctagattgccttcttcattttgagtaatgactgtcagcagggtcagattaaacacaaaacaactggacaattgcttggaggactaaactataagggcactaacatgtcaatagtaggctaacacatccatggaaaatatatttaccagctcttctctcagggaggattctgtgtggggttggaagtaatgatttgttaaattccttaggggtagaaagtagggcataatcagaatatagaggaatatgctgtttgacttcagggtttctgtttttcttactaggatatataaaacagggactctagctagattgtttatgaccacagagggtaggctgagtgctcccatgatcttcctgcttggttcttgcccatacagaggtcagcctttcctctaataaagattgaacaagtagtggtctgagggagacaccaattcattaccctgcatgtctcttctctgcactccagggcttt

SEQ ID NO: 77640 - DNA, 1199 bp, Homo Sapiens
  misc_feature (1034)..(1065): n is a, c, g, or t
tatggcatggatcaggccgcgtgtgaatcggcacgaggctaggtttggagatacaaggtaaacctgagactttcccagtctccaggagacaaaaccctaatttctttcaatctgctgtcttcctcgtgccgaattcggacgaggctataagcctgcattctataaatggcgtatgaccatgggctgtttccccccagcaagttgtacaaagttctgtggtaccaggaaagggcttaaggttagcagggcctctgcggaaggacatatgaagtgacttgggttaggaaacaggaagggataggattcaagaacagctattgcttctgttctatataggaaactgcagcgtgaaaaatgctgggctgggaattttgagacctgggttttagttgtgttctaatactaacaagctatgtgactgtgggtaagtcatttcacattccatttggatgcctcttgagtgactccaggcctctccagctctaaaacattaagatcaggccctacgctacagctggccagtgtgtaattcttctgtttctatgctgttaggtcaaatagatcttcaatagttacttgattgttattacttttttctgaagtgggtgttttatcaatgttttaggatacagtgagtctgcttctcccctttggagttaggaaggttgtaggaatatacactgtagagcatatgggagctttatcccctccttttttccccgctacctttctccctctccttcccttcatcacatttctattgagcatatgccattgccgtgtaccaggtgtgtgctaggtttggagatacaaggtaaacctgagactttcccagtctccaggagacaaaaccctaatttctttcatctgctgtctttctctttggaaagaatcaacgatatcccaggggaatgtgcccatgtcccagggtaaccaactacagacagatgccccattctactcaagcaacttttagagtgccttgagatacacatcagataattatgcagggccaggcatggtgctgcacactnnnnnnnnnnnnnnnnnnnnnnnnnnnnnnnncagattgcttgagcccaggaattcaagtgtagcctagggaacatggcaaaaccccagctctacaaaaaaaatacacaaattagctgcgtgtggtggcctatgacaggaggctgagatgggaggattgcttgagc

SEQ ID NO: 77641 - DNA, 999 bp, Homo Sapiens
  misc_feature (54)..(114): n is a, c, g, or t
  misc_feature (574)..(592): n is a, c, g, or t
  misc_feature (720)..(720): n is a, c, g, or t
  misc_feature (771)..(771): n is a, c, g, or t
taggctaggtacgaggcctggggtgtgtaaattcggcaccgagggtgaacaaannnnnnnnnnnnnnnnnnnnnnnnnnnnnnnnnnnnnnnnnnnnnnnnnnnnnnnnnnnnncctttcagaactgtctccgttatgaggtacagcgcctctgcttttgggtttgcatttgatgccatcctggacgtcctgtcatcggcgattgtcctgtggcgttacagcaacgcggccgctgtgcactctgcccatagggagtacattgccttcagcctgcattagctgacaagtcagcagtttctactacagaaagcaacaaacaaaacgtaagagaagaagtctgagaagtcaaaagacttgcagattatctgactaggacactctgtggaggactttgatacaaatggattgatttttcagtactagtgatctctgttcaggtaaactggttatttttacttagactttgaggccattgtgttagagataaaaataatcctagatacttgacatttttatgttgagtgatttgagtatttttacactttattttataaatgatctttttaagagcttnnnnnnnnnnnnnnnnnnnctcgaggcttctatgtcgggtgcgggaaaaagaggtcttgaatgggcccttgtcatagctgtttcctgacccagtttttttgtacaagggggtaaatctgccggtccccctatagggaggtcgttatntaatttggaaaagccccggattaactgctgattatctctgtgcgacaaaanagagcgacacgagaacgagaatgacgcacctatcggatcgaccaggcagactgtgtcggatcgagaacgaagcaggaaccgcgcacggcagagggaacaccattggccacaaaagtggaagggcgagttcaagtgcgaaatgcatgtgagcagcaagacaacgtgttgaccgtgctggacaagaagaagacgaagagaaacgaagcagccaacatcaagaagacatca

SEQ ID NO: 77642 - DNA, 928 bp, Homo Sapiens
ataaggctaggtagcgaggcctgggtgttgaattcggcacgagggacaattgcttggaggactaaactataagggcactaacatgtcaatagtaggctaacacatccatggaaaatatatttaccagctcttctctcagggaggattctgtgtggggttggaagtaatgatttgttaaattccttaggggtagaaagtagggcataatcagaatatagaggaatatgctgtttgacttcaggggtttctgtttttcttactaggatatataaaacagggactctagctagattgtttatgaccacagagggtaggctgagtgctcccatgatcttcctgcttggttcttgcccatacagaggtcagcctttcctctaataaagattgaacaagtagtggtctgagggagacaccaattcattaccctacatgtctcttctctgcactccaggctttgataataaagacactggcagactatctatcttccatttctataatgtgagcccttagggagtcttcgttcacttgggggtgagggtcattgctcacagagtagttcaagtcaaatggaacttgaactctttgcctatgggcctggtggtcagactctgtgttgagttcattagattatcggagacacaaggtagagctggatgcttcaaaaatatttggctaaaggatgacatttgctggttatttgtagataaaggccatgatggaacctgcttggaatcatgaaaatatggaacctggtggtcatgtttaaaaatacaactaatagttaagtatctactggacactgtgagactttaggggtaaaacgaatgggttccctgccccgggggcttaaactgtgttcccttgtttgaaaaacaggtccaacaacaatggccaagtattttggccgctcctttagggaccattc

SEQ ID NO: 77643 - DNA, 1024 bp, Homo Sapiens
tgcacattgtaatatcgtgatttcatatttggagaatcagcaaccaaccagccaaccatgttgcttttataagacagagctgagaaagcaaagcttggctgtcgtcttggctctggtaccacccacgagatgcgggcgattctcagctcagggcgtggaggcgtggtgtgggggagtctatttgccatttttgtttgtcagcagggggcaggggttctcaaagattgcaaaatgctgctgcaggtcaggaaggttattttgggtgcctgtgggggaggtgaaacaaggtcccatgactgttttgcagaaccttgtctgtggagggtagaggttgcggcaggggcctgtgggccttacttggtgagaaggtaggtctagctggctccattcagtatttgagacatttggaatttgtctgcatttaaaaccaagagatcacacacacctgtctggatttggagtttctcttgaaaactcgccagtccggccgtctgagcctgcactgacgcctggtgaagctgtgcaggggccgcccctctccctttcaccacagtcctctccactccctttcgcctctccctggcctgctgcactcactgataggaaattctgaccccagactcggagcagccttcccgtggttcggtttttgcttccgcgaaaaagccaaaggccttggccagagagccagctgttcctacctctaccccacgcttccaaggcaaccttctccacttatcttaggccgagagacagctcttcaagaacgtacatggatcctgattttctcacgaagtcccgatggaaccctgtgctgttgagacatcagtgtgtaaaactctctgtgtccctgttgggctgtccagacagtctggactcttgtaaatttgagatttaattaaagggaaaccaacccaaataggacctgcggaaccattttaaactaaaatctcccccccatcccttggggaactcacgacaccaattctactatttccccaacccccgcactaccccaataccc

SEQ ID NO: 77644 - DNA, 692 bp, Homo Sapiens
  misc_feature (261)..(261): n is a, c, g, or t
tcaaacaaggactcagaggtctcctccacccacagcagttgcacttgctgaaaaatgttgtttgttcacccaaatggtagcttttctaacgctgagatgagtgaactgagtgtggcacagaaaccacgaaaaacttttggagcgctgcaagtactggcctgcttgtaaaaatggggatgagtgtcctaccatcaccccatctcaccctgcaaagccttccccaattgtaaatttgctgaaaaatgtttgtttgttcacccnaaattgtaaatatgatgcaaagtgtactaaaccagattgtcccttcactcatgtgagtagaagaattccagtactgtctccaaaaccagttgcaccaccagcaccaccttccagtagtcagctctgccgttacttccctgcttgtaagaagatggaatgtcccttctatcatccaaaacattgtaggtttaacactcaatgtacaagaccggactgcacattctaccatcccaccattaatgtcccaccacgacatgccttgaaatggattcgacctcaaaccagcgaatagcacccagtcctgcctggcagaagatcatgcagtttggaagttttcatgtactgatgaaagatactctacagaacttgtcaaatctttgaaacttggaatatattgctttcataatatgaagttttatagcctatctaaa

SEQ ID NO: 77645 - DNA, 1677 bp, Homo Sapiens
  misc_feature (78)..(112): n is a, c, g, or t
ctgatagacttcatataggggccccgcgtaatagtcgaacgacgagcgcagcgagtcatgtgagcgaggaagcggcgnnnnnnnnnnnnnnnnnnnnnnnnnnnnnnnnnnncagtcgacggtaccggacatatgcccgggaattcggccattacggccggggagccatgaaagacttaagtatttttctatataaacttcagaattcaataattgtcagtgtatatctttaaaagcaaagtttctcagtctaaaaccaaataggacataggtgatttactttaaacgtcaagcatctttcagatcaaactgtcatatgtcgtgtgccaggaacgggtaaaacgacatttatcagaatgcttgctggaagacttaaacctgatgaaggaggagaagtaccaggttctaaatgtcagttataagccagcagaaaattagtcccaaatcaactggaagtgttcgccagttactacatgaaaagataagagatgcttatactcacccacaattagtgaccgatgtaatgaagcctctgcaaattgaaaacatcattgatcaagaggtgcagacattatctggtggtgaactacagcgagtagctttagccctttgcttgggcaaacctgctgatgtctatttaattgatgaaccatctgcatatttggattctgagcaaagactgatggcagctcgagttgtcaaacgtttcatactccatgcaaaaaagacagcctttgttgtggaacatgacttcatcatggccacctatctagcggatcgcgtccatcgtttttgatggtgttccatctaagaacacagttgcaaacagtcctcaaacccttttggctggcatgaataaatttttgtctcagcttgaaattacattcagaagagatccaaacaactataggccacgaataaacaaacttaattcaattaaggatgtagaacaaaagaagagtggaaactactttttcttggatgattagactgactctgagaatattgataagccatttattaaaaggagtatttactagaattttttgtcatataaaacttgaatcaggattttatgccccacatactctggaacttgaagtataatatacttaatataacataaaaagccagttgggttctaaattgtagttgaaacacagaaaatgccacttttctgttcctgaagaggctcttttgtgcataatattctaaaatgaagacatttcaagctatacaaattacttccaagttttcatgatgtatgggaagattttcagtaggtgtattatattcacggtaccaaatgctgaccagtgttgctccattttttaaatcttgaaaagggtttctgtacttacctggtttgccaagtatgccagtgtaatgaaactgcccttattttaaaagccagtcaaagattccactgattgacatttgataaataaacatcaggattatgtttatcgtttgttttcagtcttggcactatattaccagtatatggtttccgaggaagattatctactgcaaaacaccactgttggcacaaataggtatttttaaactcgtttttaatcttttggggctttaaacatgtttagcaaaaaccaatcagttcattcccggaaaaaaccctaatttacctgaacttttggttgctcctgagtctggctc

SEQ ID NO: 77646 - DNA, 1534 bp, Homo Sapiens
  misc_feature (1442)..(1477): n is a, c, g, or t
cagtcgacggtaccggacatatgcccgggaattcggccattacggccggggacagcgcgcatagcgccctacgcacgcgcactggggtgtccgccgggcatcgctctgtccagttattccagtttctctgggagcagccgagttgaccccacggtctgagatgtccaagctgcccgcagacagcagtgtcccgcagacaggcgcggcgaatggtgacagagacgtcccgcaggcggaggtaggccgcgggaggcgggagccggccccggcacagcctgaggaggccggggaaggcgcgatggcggcggccagggaggcccggtgccggcggcaaggaaggtcggatggcggcggcagggcagccccggcggcggcagccaggggagcccctggtggcagcggcggcgttggccaggccagccgcggcggggcagggaaagcccggcggcggcggcggccaggaagcccggatggcggaggtcgcccgcttgctgggggagccagtggacgaagagggtcccgagggcaggcccaggtccagacacgggaacggaggcctggctgcgttgccctatctccgtctccgccacccacttagcgttttaggcatcaattaccagcagtttctccgccactatctggaaaattacccgattgctcccggcagaatacaagagcttgaagaacgccgcaggcgattcggggaagcctgcagagcaagggaagcagcgtttgatgccgaatatcagggaaatcctcacagggtggacctcgatattttaacctttacgatagctctgactgcctctgaagttatcaaccctctgatagaagaacttggttgcgataagtttatcaatagagaatagttatgtggtgacactacttcaagagaacctctgcattccagtcataccaatcctgcaacttgattttcagaagtcaagagtatatcgcgataagacagtgcacaggtggaggggaaaaaaagggggagggggaagcttatcttgaaaaagcatcacagaagtagaaaaaaatgtcgaaagcattataactgtaacgttctttgagtttgtgattgatccacatttttccccctgcattatggaaaatgtctctcagcattgctttattacaaagtaaaggatggttttataaaattgagactgatgaaacatcaatactagagcccatgaggatgaaagaaattatcaaatagtgctgaacagaataagatgttaacgctgagttattaggactggaaggctatgaaaagaacttgaaattgtcggaatatgtgctctcttcatgtcatattcaatagaagtttctagtttaagattgattttgtgttttcttaggcatttcaagtgacaagcaaagtaaatgtatatattatgtgataaatcatgttttcaagaacgtcaaatttctggacnnnnnnnnnnnnnnnnnnnnnnnnnnnnnnnnnnnnggtattaaaaaatccattcacaagccaaaaaatatataaaatatacagcgaaaagcc

SEQ ID NO: 77647 - DNA, 963 bp, Homo Sapiens
caacaacaacaaacaaacagaaactcccaagctccatgactgattttatggcaaagaggaagagaataaaacccagaggcagagccattccccggcagctgaggttctggccctaaaacaatgcctttttgttccctcctagggtaaaaaagaaactaaaatccccagctatcagcagtagtttgtttttctgatcatccttaacatccttacaacaaaacaggcacctggtcttcacaggtggcaacaatccaactccacctcaggaaaaagagaaaactgtccattctgctcagaggggcatccaaaacctggctcccttcctcgtggtgtagaccaacgttcctttttgctctgctggctgccatctagccaacttcaaaaagaagctgagcgcatcccctgtccaatggatgggcgtgggtgctgcccagtgggcacaatgttgcaaagtccagagagctgcagacggcacacgaggggctggagagtgtgggttctcttccttacactggttataccagcctgcactcaagatgcatctggcaaacaagcatgaggagatataaggaagatcacaagaaaaaaatgaacgggcaagcacttgccatggcacctggcagagcaagcactcaacaagtggtggctgctggttttcatcaggctcttactttctgaacagaggggaggagaaggcaacctcgacgtgttgtgagctgccctggaagtgtccgtcagaaacacaaagtgccgcttactgggagcggttccgtacccactggcacaggctccacacaaaatggagaaagatcaatgcttggctttgggcgggccatgtccagagctgatgctgaaactcaaccacccttgtttgtgtgttgagaccagctgttttcaccatggtttagggaacacggcccagaggctgcccatggacacgggacaggtattcagcggaaattc

SEQ ID NO: 77648 - DNA, 691 bp, Homo Sapiens
  misc_feature (608)..(617): n is a, c, g, or t
gaaaataaagccaacctatataattgctgtgctccttagatgttatttctttcttccctccatttctgaaatcccccttttctttctctttcacatttaaaccaatagagagaaagagagaaactgcctagcgctgcgaaccacaagacggtccttccagtggggaacattaactgcattgtcctctcatgaaatgacgctaaataatgttaaaggtttccagtatgatttcactgaaattggttgcttccttctgtacagatgtttttgtggtttagaacctcagccaaggcaaacattatgaatgagatgcagagaccaccatgtcctatgaagggctgagagttcctttgggagttattttacttgtgattctgacacctctgttttgacaaagcttcattctttcagtctcttctttccgtctccctctcctggtgctattggtttgttgtgggtggttttcctaattaagttaatctgcaacctagtttttctgggtccacagatgccagaatgctgaatttatttatcttgaatgtttttgttggctactgttgagacacattcttcctcttccccttttaccccaagtctgttttaaacannnnnnnnnngaggcttccagacgcacttcaataaagaaagaatttctctctggtgtccatttgtcaatttttttgtgggggag

SEQ ID NO: 77649 - DNA, 1062 bp, Homo Sapiens
  misc_feature (1006)..(1006): n is a, c, g, or t
  misc_feature (1018)..(1018): n is a, c, g, or t
gctggtaccggtccggaattcccgggatatcgtcgaccacacgggcagggcacgcactggccccggcgcccacccgcacccctccccagagcactgacacggctcccgggacctcggcaggatggaagagaagctgaagaaaaccaagatcatctttgtggtgggtgggcctggctcagggaagggcacccagtgtgagaagatcgtgcagaagtatggctacacccacctctccaccggggacctcctgcggtccgaggtcagctcaggctcggccaggggcaagaagctgtcggaaatcatggagaaggggcagctggttccactggagacagtgttggacatgctccgggatgccatggtggccaaagtcaatacttccaaaggcttcctgattgatggctacccgcgggaggtgcagcaaggagaagagtttgagcgacggattggacagcccacactgctgctgtatgtggacgcaggccctgagaccatgacccagcggctcttgaaacgtggagagaccagcgggcgtgtggacgacaatgaggagaccatcaaaaagcggctggagacctattacaaggccacagaacccgtcatcgccttctatgagaaacgtggcattgtgcgcaaggtcaacgctgagggctccgtggacagtgtcttctcccaggtctgcacccacctggacgccctaaagtagcaacgctggagccgcttccccagctcagagccccgccccaccccgtcctgattagaggtcctcctggcctgagcgcagcgcctccaccctgccctgctgagcacagacggaggaagccgcttatcctgttttcatggacagctgagcactaaaggaatttctaaggacatttgggtttactgctttttctctgcttccagttgggagttgattcatgtgcttgtgcctacctgggcgcaagtccccagcccctcaacccctcgttcctcctcaggctcccttttggcagccacccctccntctagcctctgngtggggagggcccgggggcccctttccttcgcacaggggccatg

SEQ ID NO: 77650 - DNA, 574 bp, Homo Sapiens
  misc_feature (193)..(283): n is a, c, g, or t
  misc_feature (341)..(341): n is a, c, g, or t
  misc_feature (471)..(471): n is a, c, g, or t
cccaaggttgaccttgctttagggatgacaagtggcctaggctgggctgtcgggggaaggacaaaaattctggctgaactttccaagggacgggacgcttgggatcctggctggtacaaggcctcccacactgtcaaatgtcaactccaccagcactgagacaatgagtaaatgaaaatgtagaaagagggannnnnnnnnnnnnnnnnnnnnnnnnnnnnnnnnnnnnnnnnnnnnnnnnnnnnnnnnnnnnnnnnnnnnnnnnnnnnnnnnnnnnnnnnnncatggcccggctagagacaaagccagaggtgatcaggtcagcagcaggagaggctcanaagggagcctctcgggaagtgcaggcagccatgagggctcgtttcatctgctcataggtgaccaaaatcaccacgttccaggaaccccatgcgggaaaggagggtatgaaccctttgtagaaggctcggngccccttacttctgagcatgtgaagggcacaatggccttcgctactgtactggctcaaggctgattcatgtagtctcgctataaccacttcaccgggggaggg

SEQ ID NO: 77651 - DNA, 1113 bp, Homo Sapiens
cacgttaggctaggtacgaggcctgggtggtgaattcggcacgaggcagctgcgcgcgccttgggattgactgtccacgctcgcccggctcgtccgacgcgccctccgccagccgacagacacagccgcacgcactgccgtgttctccctgcggctcggacacatagtatgaccattaggtgtttcgtctcccacccattttctatggaaaaccaaggggatcgggccatgatagccactggcagctttgaagaacgggacacctttagagaagcttgatcttggaggcctcaccgtgagaccttacaaagccggattccggcagagttcctctatctcgtcttgttgctgattaaaggtgcccctgtctccagtttttctccatctcctgggacgtagcaggaaatcagcatcatggttgggttcaaggccacagatgtgccccctactgccactgtgaagtttcttggggctggcacagctgcctgcatcgcagatctcatcacctttcctctggatactgctaaagtccggttacagatccaaggagaaagtcaggggccagtgcgcgctacagccagcgcccagtaccgcggtgtgatgggcaccattctgaccatggtgcgtactgagggcccccgaagcctctacaatgggctggttgccggcctgcagcgccaaatgagctttgcctctgtccgcatcggcctgtatgattctgtcaaacagttctacaccaagggctctgagcatgccagcattgggagccgctcctagcaggcagcaccacaggtgccctggctgtggctgtggccagccacggatgtggtaaagggccgattccagctcaggcccggctggagttgtcggaaaaccaaagaccggcatgccaaagacctggccgaaaagaaaggtcccggccctcggaagagggcctcccccaagtgtcgcaaggcctggcaaggtgcgacgggaaccaagaccacagaggcccgtgaagacacctgagaagaaaccggccaacatggcgagggacattcacagtctgccacaggaggcaagataatcgcagaagagaacacccgagaggacgacatatatccgcaggagaag

SEQ ID NO: 77652 - DNA, 1694 bp, Homo Sapiens
  misc_feature (1400)..(1463): n is a, c, g, or t
aacttaggctaggtacgaggccggggtggcgaatcggcacgagggctgcgcgcgccttgggattgactgtccacgctcgcccggctcgtccgacgcgccctccgccagccgacagacacagccgcacgcactgccgtgttctccctgcggctcggacacatagtatgaccattaggtgtttcgtctcccacccattttctatggaaaaccaaggggatcgggccatgatagccactggcagctttgaagaacgggacacctttagagaagcttgatcttggaggcctcaccgtgagaccttacaaagccggattccggcagagttcctctatctcgtcttgttgctgattaaaggtgcccctgtctccagtttttctccatctcctgggacgtagcaggaaatcagcatcatggttgggttcaaggccacagatgtgccccctactgccactgtgaagtttcttggggctggcacagctgcctgcatcgcagatctcatcacctttcctctggatactgctaaagtccggttacagatccaaggagaaagtcaggggccagtgcgcgctacagccagcgcccagtaccgcggtgtgatgggcaccattctgaccatggtgcgtactgagggcccccgaagcctctacaatgggctggttgccggcctgcagcgccaaatgagctttgcctctgtccgcatcggcctgtatgattctgtcaaacagttctacaccaagggctctgagcatgccagcattgggagccgcctcctagcaggcagcaccacaggtgccctggctgtggctgtggcccagcccacggatgtggtaaaggtccgattccaagctcaggcccgggctggaggtggtcggagataccaaagcaccgtcaatgcctacaagaccattgcccgagaggaagggttccggggcctctggaaagggacctctcccaatgttgctcgtaatgccattgtcaactgtgctgagctggtgacctatgacctcatcaaggatgccctcctgaaagccaacctcatgacagatgacctcccttgccacttcacttctgcctttggggcaggcttctgcaccactgtcatcgcctcccctgtagacgtggtcaagacgagatacatgaactctgccctgggccagtacagtagcgctggccactgtgcccttaccatgctccagaaggaggggccccgagccttctacaaagggttcatgccctcctttctccgcttgggttcctggaacgtggtgatgttcgtcacctatgagcagctgaaacgagccctcatggctgcctgcacttcccgagaggctcccttctgagcctctcctgctgctgacctgatcacctctggctttgtctctagccgggccatgctttcnnnnnnnnnnnnnnnnnnnnnnnnnnnnnnnnnnnnnnnnnnnnnnnnnnnnnnnnnnnnnnnntccgctcctttacctaccaccttccctctttctacattctcatctactcattgtctcagtgctggtggagttgacatttgacagtgtgggaggcctcgtaccagccaggatcccaagcgtcccgtcccttggaaagttcagccagaatcttcgtcctgcccccgacagcccagcctagcccacttgtcatccataaagcaagctcaaccttgaaaacacaaaacacacaac

SEQ ID NO: 77653 - DNA, 414 bp, Homo Sapiens
cgactcctagaggatcccaagctctggacaagggggaacggagagcaagggaaggagggaacgagaaagaaggaagaaaaggaaagcatggcccggctagagacaaagccagaggtgatcaggtcagcagcaggagaggctcagaagggagcctctcgggaagtgcaggcagccatgagggctcgtttcagctgctcataggtgacgaacatcaccacgttccaggaacccaagcggagaaaggagggcatgaaccctttgtagaaggctcggggcccctccttctggagcatggtaagggcacagtggccagcgctactgtactggcccagggcagagttcatgtatctcgtcttgaccacgtctacaggggaggcgatgacagtggtgcagaagcctgccccaaaggcagaa

SEQ ID NO: 77654 - DNA, 562 bp, Homo Sapiens
  misc_feature (103)..(182): n is a, c, g, or t
ggatctggctggtacgaggcctcccacactgtcaaatgtgaaatccagcatgcagtgagacaatgagtagatgagaatgtagaaagagggaaggtggtaggtnnnnnnnnnnnnnnnnnnnnnnnnnnnnnnnnnnnnnnnnnnnnnnnnnnnnnnnnnnnnnnnnnnnnnnnnnnnnnnnncatggcccggctagagacaaagccagaggtgatcaggtcagcagcaggagaggctcagaagggagcctctcgggaagtgcaggcagccatgagggctcgtttcagctgctcataggtgacgaacatcaccacgttccaggaacccaagcggagaaaggagggcatgaaccctttgtagaaggctcggggcccctccttctggagcatggtaagggcacagtggccagcgctactgtactggcccaggacagagttcatgcatctcgtcttgaccacgtctacaggggacgcgatgacagtggtgcagaagcctgacccaaaggcagaactgacgtggcaagggaggtcatctgtcatgaggttggctcacaagacggcat

SEQ ID NO: 77655 - DNA, 765 bp, Homo Sapiens
  misc_feature (44)..(44): n is a, c, g, or t
gtgacccagacatgcgaaaaggctgcaggagctgaagcaaaggngagctgtggatttgcaagggtcagcccagaaactgctgagctaactggaaaaggacgagttcaagtctggagcccacgtggacttctatgacaaataagcccatgtttttggcttcctgaacctttttgcccccacttttagacataccccagagccctgtggctccccacaccctgccataggggcagtcctgccttacacatagaagcattcatgcctgctgccctgccctcaggcacagccagctgtgagctcccaggtcattggccttaccagttgtcaggagtctgtgctgtgcaccctgggttataaggaggcttaggagagaggttatgggtattggtgtctctatccccaggaatagaacttaaggggtgggaagaacaggaaaagaagctggaacacagaagagaggaggttgtgtctcttgctcatagcaagcctgtgggtagaggaaagagtgatctggtgtcgaataggaggacccatgtagattcgcagatggcctggatgggaggaagggcagacggtacatgtcccagcccacatagatgccccttgctgagggtagcaggaccttctgttgaactttgtgtcctcactctgatgtctccttccttcagaatctaccacccctcccccaggctgggagaaggggctcctgggtgtctgtatacacgccaaaggcagatacaaataaaatacagattgtcctttacc

SEQ ID NO: 77656 - DNA, 744 bp, Homo Sapiens
  misc_feature (81)..(81): n is a, c, g, or t
  misc_feature (191)..(191): n is a, c, g, or t
  misc_feature (209)..(209): n is a, c, g, or t
cgaaaaaggtgcaaggagtgaagcaaaaggaagagttggtggatgcagggtgtcagccagaaacggctgaagctcgctgcnaaagggggtgtccaagcctggagcccacgtgaactctacctataaataagcccatgtctttggcttcctgaaccttctgccccccactttcagacacacccccagaagcnccgtggctccccacaccntgccatggtggcagtcctgccttacacagataaacactcatgtctactgtcctaccttcacacatagcctgctgtgatgagcttccaggtcgctggccttaccaattgtcgagagtctggatgtggcaccctggattatgaggaggcttaggagagaggttatgggtattcatgtctctatccccaggaatagaatttaagggatgggaagagcaggaaaagaagctgaaacacacaagagaagaggttgtgtctcctgctcatagctagtccatggggagagggaagagtgacctgagtcaaataggagaacgcatgcagattcgcagatggcctggtagggaggaagagcagagggtacaagtccccgctcacacagatgccccttgctgaggggagcagcagcttctgttgaactttgtgtcctcactctgatgtctacttcctccagaatccaccaccccttccccaggctgggagaaggggccgttgggtgtctatgtacatggccaaggcagatacaaataaaattaaa

SEQ ID NO: 77657 - DNA, 195 bp, Homo Sapiens
ctgtatcttccttgccctcaaataccctgaggtgataaactgttccagttgtagccaactaccactgctaggcctcaatgtaaattcagttgaaatttgcaattctatcagcaatttaatgtattgaattcagatcatcatttgtcattttaaccgacaaccacccaataaatttactctgcagttctgaaaaaa

SEQ ID NO: 77658 - DNA, 1103 bp, Homo Sapiens
gttggaccggtccggattcccgggatatcgtcgaccacgcgtccgggagtttctcgggcccagctgtggctgctgccggggagccccaagccttggcgggtccttgcggcgaataggagtctggtcaggcgtcaggctagtccgacgaagagtggagaatttcaagattgtggagttggactgaatgctgcacagttcaaacagctgcttatttcggctgtgaaggacctgtttggggaggttgatgccgccttacctttggacatcctaacctatgaagagaagaccttgtcagccatcttgagaatatgtagcagtggtcttgtcaaattgtggagctctttgaccctgttaggatcctataaaggcaaaaaatgtgctttccgggtgattcaggtttctccatttcttcttgcattatctggtaatagtagggaactagtattggattgaatgaatagtcttccattttggaaacgttcatccactctcatatttattttttggtgcctgcatgtttgaagactgaagcaggctaaaagctcttgatgaaatttgagggtgctgaagatgttcccactaatttccagccatcacctttggtggggtgggcttcggaggacagtctgtctgaacctgccagtgctgaccctgcagcactttcagcatatgcacatcaaagttggagaccgcgctgaacttaggagggccttcacacagactgatgtggctaccttctcagaattaacaggggatgtcaatcctttgcatttgaatgaagactttgcaaaacacaccaagtttggaaatacaattgtacatggagttttgatcaacggacttatctcagctctcctaggaactaaaatgccagggccaggctgtgtatttctttcccaggaaattagctttccagcccctttatatattggagaagttgttttagcttctgcagaagtgaaaaagctgaagcggttcattgctattattgcagtgtcatgttctgtaatagaaagtaaaaagactgttatggaaggctgggttaaagttatggttccagaagcttccaaatcctgaaatagatgttttaaagatgcaacctc

SEQ ID NO: 77659 - DNA, 419 bp, Homo Sapiens
gtattgttatttttattatttttaatttaaacctgatgacttgcacagcatctttcccaccgggaagagcgggcctgctgccttccctcctgcggggtgggggtgggacagaccccagtgggggccagggccacactcagcgcagtgtgggctggacccgcctctgtgctccaggggctggccggtcttcgggggcgccggcttccaccactcgccgccccacccctgcactccgtgacctctgagaacccagctggcccctcgttagccccagggtctgccgtctagagggagcccaccggcctccggacactgtcttcccgctagagccccgtcctcctctgcggggctctccggacccccttccccctcacctccaggcagggacagaataaatgtttgtatggattttaaaaaaa

SEQ ID NO: 77660 - DNA, 952 bp, Homo Sapiens
  misc_feature (556)..(604): n is a, c, g, or t
tcagttcacggagactctccaaggtcagatcacccaatcctgcccccacactcggggtcctccaatgaggttggggggcagagtcccagaagcagccctttaccccaggtccaggccctggaatcctgagactcgcgtttccttggccagtggtaacacaggacgtgtgtgcgcatgtgcaagtgtggatgtatgtgtgtgcgtttgttttgctcatttctttagggaacttgggagtcggggttggaggtgctgggcaatggaacttcaaattcaatgtcgcccagcagtgaggggagtcgggaggtgaggcctgtaggccaaccaattggtggagtctcagcgatagcccaggtgagaagtggttcacccagaggggcagggtgggggcctcgggcagatctgtccctcttggcacctctgtcctcaaatgtccaaaatgttggaggacctctgttcatatcccacgcctgggctcttgccagcagtggagttactgtagagggatgtcccaagcttgttttccaatcagtgttaagctgtttgaaactctccnnnnnnnnnnnnnnnnnnnnnnnnnnnnnnnnnnnnnnnnnnnnnnnnncaggctgtgtttccccatttctctcctcccttcagacccatcattgagaacaaatgtaagaaatcccttcccaccaccctccctgcctcccaggccctctgcgggggaaacaagatcacccagcatccttccccaccccagctgtgtatttatatagatggaaatatactttatattttgtatcatcgtgcctatagccgctgccaccgtgtataaatcctggtgtatgctccttatcctggacatgaatgtattgtacactgacgcgtccccactcctgtacagctgctttgtttctttgcaatgcattgtatggctttataaatgataaagttaaagaaaactctg

SEQ ID NO: 77661 - DNA, 569 bp, Homo Sapiens
ggggcagggtgggggcctcggacagatctgtccctcttggcccctctgtcctcaaatgtccaaaatgttggaggacctctgttcatatcccactgcctgggctcttgccagcagtggagttactgtagagggatgtcccaagcttgttttccaatcagtgttaagctgtttgaaactctcctgtgtctgtgttttgtttgtgcgtgtgtgtgagagcacatcagtgtgtgcaggctgtgtttccccatttctctcctcccttcagacccatcattgagaacaaatgtaagaaatcccttcccaccaccctccctgcctcccaggccctctgcgggggaaacaagatcacccagcatccttccccaccccagctgtgtatttatatagatggaaatatactttatattttgtatcatcgtgcctatagccgctgccaccgtgtataaatcctggtgtatgctccttatcctggacatgaatgtattgtacactgacgcgtccccactcctgtacagctgctttgtatctttgcaatgcattgtatggctttataaatgataaagttaaag

SEQ ID NO: 77662 - DNA, 304 bp, Homo Sapiens
  misc_feature (92)..(102): n is a, c, g, or t
aaggaagctctaagtttgccattgaaactttttgtaccagtaatccataaactggttgttctatttatagcagcatgttacaaatgactgcnnnnnnnnnnnaactgtctatactattaaatcctttaatttatcctgaatgctgtagtgttaaattagtggatgaaattggcagtctgtgggtgattaatttggtatggatttgtcagttttgtgtggagtttaagaaatagaacagccttaaactctacatttcaaaatacttgtatattttaaaataaagctgattagttcacaggttttg

SEQ ID NO: 77663 - DNA, 661 bp, Homo Sapiens
tcctcccaacacctgcttcccccttccccaacacctccttcccaaacatccccttcccaaacacctgcctctcttcaaccccacaggccagagtgctgagacagagtggccttttggattcaataagtatcttgttctcttaaagactcagcaacgattttagaagtcgcagcagttttacatcacatgcagccaagatcagcttgctctacaagcaataacagaactacttagcacttcaaggttgaaagttcttcactaatggatccattgactaattgatcctggaaggccaaaggaataaaattcttttatataaataggaaaacaaaggcagagagctaaagcactaatcaaatcggggggtgttagagcaaaaacaggcttcagaaagagtattttaccacgcttcacatggaaaaaatcgagccccggagcgacgaaaggcatattttctttgtttctccaagtttcataaccgttcagttgcagaaccaagaatctaaaaccagctctgggaaacaaatgtccagatgccagcctcatagttgaacttggatttgaaaataccttcagcacttagaagagacattcaaatacatttcatttcctgttacccagattgttcggaaagtattaaaaatttttcatttacctgctg

SEQ ID NO: 77664 - DNA, 779 bp, Homo Sapiens
  misc_feature (39)..(39): n is a, c, g, or t
  misc_feature (702)..(719): n is a, c, g, or t
cgccaactggaaatctcccagctagcccaaattgccttntgcacttcccccgtccctgtcacatttccccagccccaccttcccctcctgatgccctgaaagctcccggaattgactgtgaccacttggatgtcaccactgtcagcccctgccttgatgtccccatttagccatctccatggagctcctgctggagggccctgaaccctgcactgcgtggctgcccagccagctgcctcctgtcctgggaggaggcctcctgggtgtcctcatctggtgtgtctactggagggtcccacaggagaggcagcagaggggtcaggggaggtctcctgccgggggttggcctctcaagcctcaggggttctagcctgttgaatataccccacctggtggtggcccctccgatgtccccactgatggctctgacaccgtgttggtggcgatgtcccagacaatcccaccaggacggcccagacatccctactggcttcgctggtggctcatctcgaacatccacgccagcctttctggggccggccacccaggccgcctgtccgtctgtcctccctccagcagcaccccctggcccctggagtggtggggccatggcaagagacaccgtggcgtctcatgtgaactttcctgggcactgtggttttatttcctaattgatttaagaaataaacctgaagaccgtcnnnnnnnnnnnnnnnnnngaccgcgtatgcggccgcaagcttattccctttcagtgagggttaattttagcttggcac

SEQ ID NO: 77665 - DNA, 1237 bp, Homo Sapiens
  misc_feature (465)..(477): n is a, c, g, or t
  misc_feature (678)..(829): n is a, c, g, or t
  misc_feature (838)..(852): n is a, c, g, or t
  misc_feature (876)..(886): n is a, c, g, or t
  misc_feature (927)..(1056): n is a, c, g, or t
  misc_feature (1071)..(1080): n is a, c, g, or t
aatggtgagatccgagccctgtgcatggacttggtgagactgttgccttaatgacatcctgcaccgtgtataacttagtgtgtcattttgaaacttgaattcattcttatcaatttaagggatcttaaaaggatttggaaatggaacaagtagcttccagaccagatactacctgtggcaagaatgctgcctaccagttaactgctggtcctaccacagtcaaagtattcctcattaaagagagaatctcaggttctcactggaggcactgtgcatattttcaaccagatcaccaggagctgagatcttcttcagtccctagccaggaatacccatttgatttccagggtgccatctaatcctgggctgtacatgtggatatggacttgaggcccacctctgtgtccaagtggattgagcatatatgcctaggaggagatagactgttaatcgttggattttgannnnnnnnnnnnnatgcctgcaaataatcaaaagtaaaactggagtagcctaattttctgggagcaggtggagaactttccctcctacacagtgaggacagtcccagtctgctgggataagtgagaaagcccagggtgtaggaaggccctttttacatactcttttctcatgagagctcactattttaacaataaacaataaacgttgtttctnnnnnnnnnnnnnnnnnnnnnnnnnnnnnnnnnnnnnnnnnnnnnnnnnnnnnnnnnnnnnnnnnnnnnnnnnnnnnnnnnnnnnnnnnnnnnnnnnnnnnnnnnnnnnnnnnnnnnnnnnnnnnnnnnnnnnnnnnnnnnnnnnnnnnnnnctttgcggnnnnnnnnnnnnnnnaaaaatttttaaaaacattttttnnnnnnnnnnnccccaaaaggaaaggaaaaggggccaaagtttttcccaagnnnnnnnnnnnnnnnnnnnnnnnnnnnnnnnnnnnnnnnnnnnnnnnnnnnnnnnnnnnnnnnnnnnnnnnnnnnnnnnnnnnnnnnnnnnnnnnnnnnnnnnnnnnnnnnnnnnnnnnnnnnnnnnnnnctcaaataaaaatannnnnnnnnngggcaatttatggggaaagggggggaaatttctttagaatttcccgccgcagggggaaccccctccccaacggggttgggaagaaacctaaaattcccccgggggggattagagaaccccttggcggcccctgtggggaaataataattctcgcccc

SEQ ID NO: 77666 - DNA, 1058 bp, Homo Sapiens
  misc_feature (472)..(472): n is a, c, g, or t
ggcacgagaagattgtccagttccattgggagaaatatgcatgctcctggcatgaagaagatcaagttagacactccagaggaaattgcacggtggagggaagaacgaaggaaaaactatccaactctggccaatattgaaaggaagaagaagttaaaacttgaaaaggagaagagaggagcagtattgacaacaacacaatatggcaagatgaaggggatgtccagacattcacaaatggcaaagatcagaagtcctggcaagaatcacaaatggaaaaacgacaattctagacagagagcagtcactggatcaggcagtcacttgtgtgatttgaagctagaaggtccaccggaggcaaatgcagatcctcttggtgttttgataaacagtgattctgagtctgataaggaggagaaaccacaacattctgtgatacccaagggaagtgacaccagccctatgctcactnaatgagtagctatggcagtctttcagggtcagagagtgagccagaagaaactcccatcaagactgaagcagacgttttggcagaaaaccaggttcttgatagcagtgctcctaagagtccaagtcaagatgttaaagcaactgttagaaatttttcagaagccaagagtgagaaccgaaagaaaagctttgaaaaaacaaaccctaaaaggaaaaaagattatcacaactatcaaacgttattcgaaccaagaacacaccatccatatctcttggaaatgcttctagctccggacattcgacatgaaagaaatgtgattttgcagtgtgttcggtacatcatcaaaaaagacttttttggactggatactaattctgcgaaaagtaaagatgtataggcatctggtgtttcagcatacataactgaagcatgtgaaacagtatcatcctcgttagtagaggaaaaccaaaacccttttttccgtcaaaattggatttgtaattaaattgtaagcctcgtaggatgtatgttggaattttaagtctttcctttggttctatgcaaataaaaaaataactgatttttt

SEQ ID NO: 77667 - DNA, 828 bp, Homo Sapiens
  misc_feature (63)..(63): n is a, c, g, or t
gatcggactcaaggacaaaagaaagtgctagcatgatggaaagtaaagatgtacacaaaagantacttcagattgagtgggaacataagaaaatggagatggaaagggaagatctaaatcagaaggcttgggatattcagatgctatttttttcaagagatcgtcaaaagtacctaaatgaaccaaactatgaggctctgattagtattcagattggaataatggaacaaaccattgctgttttagataagatgcacaaaaagaatgtggaaaactgcaagaaactactcaaaaaacttggaaagttcagcaatcaaaaagatatagcaaattatgccctaagctgcaatctacgagaagagttggtagctgtctcagagagaaaagacatctgtaatgcaatggggtctaaactgacttgtgaaaagattgtcaaagaacggtatgaaaacatgatgcaacagcagaagttaacaaatatttcaaaacaacaagctgaacagatttcaatactacagactgaagttgaaagattaagaatgaaaacatttcctgctcttgttcaaatgtaaaaacgctggcaggaaaacacaaggccaaatcaatcatttaaaaaatcatttcatttgggtaaaatgatttccttttctttcttactgggaaattgaagtagcatgtcctctgagttgcatgttttagataaaaaattgtttaattttagccttaattgtatacaaatttttgtcctgcatgaataaatgtgtaaaataccatgaattgctgtttttattcaagaataaacaagacttgaagtcagaaagtaaaaaa

SEQ ID NO: 77668 - DNA, 1242 bp, Homo Sapiens
cttaatctgagactcccttcccttgttttttaaagataccgtgcttctccacatcctcatccttcaaggagcatattttgctcttaggatggtctttgggattcaagaatagaataataaatccaaacttggtcattcccattttgaagagatgcaagagggcccagtgaggacatccgcctccctgaaagtggtgctagacagagctgaggtcattgtatctgtgtatccacataggatttctcttaattcagcttgaattgatggggagggaggtaagagtagggtcagagttactcatcccttttcaaagaattgtgggtggaagtttgtaaaggccattcatttgattttcaaaatcaaagcgacagctctacttccacttggccttagatctctgctataccctgccatagccttgatgccactgggcacaagccacctgccaaatacaggagtggcctctcccagcctggcatgataggggggtctgtgccctcagatgtgttgacagctgctcttctgaattgccacacctgtgctacacttggaattctgtgctctgactctgcagggtaggaccacgtgccatctcacacagaggtcaaccgatgagcccactcactcgtacatgccttcttccacagtgggaagcatgatctggcaggggccgccctgtaggctggggatgggctgctgtgtgaatgttgacgttcgtttcatggagaaaggggaggtgaaagattgaagagcaggttcctgtcaatgttctgagttcgagctggaggtgtagattgaatagtctacatggtctgtgagtgtgtgagatgaacccttccatcctttgacacctggttgtatgtgtaggctaagaaggaaggaccctcctgtcagtgtgcaaagctgtaatctcatggactagaagagagggggccaaggggatggacaggagaagtcatgcagaatctaagcaggaatgcagatagaacacatctaggctcttttccccaggagagtgatgatggagcatatagatctggctcaaattcagcctccatcacttaccagtcaggaaccctggcgatatcactttaactttctgaacctcagagtcttcacctataagacggggaaaataataccaccctttcaagattgttgagataaataagtgatataaaacatgtaaagcttagttctggccacagtgtagctactcaataaatgataatactaccaaaa

SEQ ID NO: 77669 - DNA, 1112 bp, Homo Sapiens
  misc_feature (706)..(718): n is a, c, g, or t
tttaaatgcaccataaatttatatttgttaatcttgatattagaacatttttacatttcaaactacataaaaatataacaatataaaatagaaatttgttgacaacttacgtccaaaacatcactatttcttatattgcaactaagcaacaagacagcttacacagctctccagaaaacatagtgttttttgtgttatcaacaaaaatcagcacaatcccacacaataatgtcttcaatttattatcttttccacagtacacatttttcacaaaccgtaaatcctttgcagttattcaaagtgtgtaaacaattgcctgaatccccatatccccccacctcggcttaaggttgtgaatgttttaagtccttcaatcaagtttcaactcttccacttgcataaggaatcaagagccttctctctttaaattatgtgtgttttatcatacagcctgcaatgcagtaaatcacagtgaaagccctggggaaaacaaaacaacatgatctttacagcgggacttgaaacttcacaatagtaaatgcagttcaagaagcttcccataataaaagcgcgggttttcatttccagaaatcaagtcaattagaaaccctaggttctacttaaaaacccattttgatctaaaagtgaaaacagtcccctatccatagtcattttataaactctatacagtttcacttgcagagannnnnnnnnnnnnccagtctggaaaacagtagtgcaattacgttttacttcttttaagttatatagtccaggatgtaaatagctctgtggaaagataagaagatgctctggtaaacaagaaatttttgcaagcccatgctggcttacgagtccattaaagcttgtaagtccatcgtggctttcaacaaaatgttgcatatacatcactgagaacaaagcagaaataaataggcagaaatgactgtaaactgtctcatttcaatgatttttcagtaataactggcttgatgaattgattatatatagtcacttaaataagcagacagtagacagttgcccttctggatgttccactatggcatccggcctggaaagccccaatggagttacattcctaaaattaaacc

SEQ ID NO: 77670 - DNA, 729 bp, Homo Sapiens
  misc_feature (15)..(15): n is a, c, g, or t
aggctgtacacaccncagttccagccacaccatcagtattagtagaccgggaggtctgaagtacggcgccgtgtctccacatggagtttcctcttcaacttcaccaactcttgtggtttttattcttctaattccactgtttggtaaattacatatatgatgtttttgcctgaaattctgtgaacttcgttttgcagccaccacacttccatgtggattttgtttgtctattagctctcctgtccatttttcagggacacgctccagtaaaagaggccaatatttttgttgccaactccacactcagtcaaacaccccatcctttaccaatcagaatatctctgagaacaaaaacctaatgaccctagaagctctctgtgctgggaacagatgtccatcttctgtgtttattctacatgtctgtgctgaaaagcactgacacatttttgtaaccaacctcacgtagaagtgtgagagcatcaccattttttgtaagagccaatttcatctcactttcctacccttgattccttttttcctaattccctctcctttttaaattttagtttttcttgtattatttttatctttgcgagtcttcttagatcctttttggagtaagaatgagtataaatgaataagcacatcagtaaatgaattaatattctcaaggttattaaatgcccagttattcatactacagcatttaaaaagcaatccgcaagtgat

SEQ ID NO: 77671 - DNA, 750 bp, Homo Sapiens
  misc_feature (38)..(38): n is a, c, g, or t
  misc_feature (63)..(132): n is a, c, g, or t
aaagttttcaatgcatttgtttgagatcaattaatatntggatacctatcatgacccaggatnnnnnnnnnnnnnnnnnnnnnnnnnnnnnnnnnnnnnnnnnnnnnnnnnnnnnnnnnnnnnnnnnnnnnnctatcaaggcagatgtggtccctgttcccatgaggctcctacatttgagtggaggaagatgtacttgtctacgttgggtgatgattagtgccatgaagaacaaaacggatacagtgagtaatgtggacagggctatcttagctatcactctaataaggtgatatctgaggagagatctgaatgaagtgaggatacaatggatatccaaggaaaagagcattccagcaaaggaaaaaacacatgcagagaccctgaaggagaagcagggtcactttgtcaaagggacagcaaggaagccaatgaccgggtgaaatgagtgaagagagcgttcagagaggacagccaaaagctctgtgggccacggcaggactttgtcccttgctgagcaagatgggaagccactgaatgtttgcgggcagggtagtgacatgctgtgacttatgtttaaaaggattactccttcatagcgatgaagaaaagctctataacaaaagttccgttgtggtggttatacagcattgtgaatgtacttaatgccaatgaattgtgtactttaaaatggtaaattttatgttatatatgttttaccaccaataaaaataatttttttaaaggata

SEQ ID NO: 77672 - DNA, 748 bp, Homo Sapiens
  misc_feature (684)..(684): n is a, c, g, or t
cagccaagactggtttgaatctattacaatgtactaagaaatgatacaaaaagcctagaaaagggcgtgccatagaacaagctctgtgggtacaaaaagacatgccacatctgcctctgccctgcagacggggcacagattggagggatgggggaagggcacgcggcaggcacagcatgcagggaagacagcgtgactgccagagggatgagggcagactgtggaccaagaaggggacgtagcaacccgcatgggcgggcctcatcgctcacaggcgaatctggaagggccggggcgttagcgcgggcgcaggcacagctggaaaggccgcggcaaattgccaagacctgagctgagtggggtcaggtcgatgtcctcgggcgcacccagcggctgcagcgaaaagctctgcaggatggcggtgaggtacagaaagagctccatgcgcgccagcgactctcccaggcacagacggcgcccttgggtatcaggaagccgcgaaaggccgtgtccctagtgacgcggtgcggcaagttcatggggatgatgtctgcaaagcgctgcacctcgtggatcaccgcgtctgtgtaaggcatggccgcgcggtccttcagcgccggcagccgcgcgcgtcccaccacgaggtcgatctcctcctgcacgcgggcgtcttggtgccgccanagagcaggttatgtgtggtcatcagcagggtatccatgtggaagtggctcagtgggtcctcttc

SEQ ID NO: 77673 - DNA, 726 bp, Homo Sapiens
aaggagactcaggaggagctagcccgagccctcccagtctgcatgtggcagaagccaggcgtgaacccaagtctgccagattcccccagctctgcccactttccgcactgtctgggccctcaccagccgcagagctgccacccgggttccagggtgctcagcgacccaggcttcagccatttggctgctttggtcctcgtggggttcacatcccaggggagtggggaaggcctgtcccctaccaacaccaacacttctgtgctgtcttcccctgcagcagcaaccaagtccagaagaagaccaggtggtggaggagggagaggaagcagcgggggaagaaggggatgaagaagtggaagaagacttagcctagaagtcagccttcgactgcggcgctatccctgtgtgccttcctttcccacctcttgaccctcaaccagacttgcatggccatggcagggcctcgggaagaccttcaggagtggggaagggtttctcctccatgatcgaccctcctcgtccacctacaaatcaggaacagaaagtctgtccactttgaaaatacctttccaggcagctccctgaccatttggacacattgccacgacaggagcctccaagtatgtgggaggggacgggcgggacgagcttggctgttctgctgcacctgaatgctttctgttatcctaattcttgtaaaattaaatgaatcgtaacaatgccaaa

SEQ ID NO: 77674 - DNA, 767 bp, Homo Sapiens
gcaggatacttgcggtactgcaacagcagcaactgctggagttccatccgcaattctgttcaaactgctcactatgttgaagcatgccagaaaaactcctccagactttggaattctcaggcgcaaattgatcaaaaattagctaatcagattaatgatctccgccaaagtgtaacctggctgggagatagagttatgaacttgcaacaccgtatgcaattacagtgtgattggaatacttctgattattgcataacgccttatgcttataatcaagatcaacatagctgggaaaatgtctcaagacatttaaaagcctgggatgataacttaaccttggatatttcacaacttaaagagcaaatctttgaggcttcacaagcccatttatccacagttcctggctcacacatttttgaaggcataactaaacaattacctgattttaatcccttcaaatggctcaaacccgtcagaggatcattgttgttactggcattattaatattggtatgcttatgttgtctccttttagtctgcagatgcctccaaggagtccgaaaccaagtccgaagtcaacaacaagcaatgatggcgatggcgattctagttaataaaaaggggggagatgtgggcggcaagccacccaggcaccgaggcaagagacagaggacacgagctgttccagtataataaaatataaaacaagaatagttataccagatatagatcttagatatgattatatacgaatatcattaatcatg

SEQ ID NO: 77675 - DNA, 865 bp, Homo Sapiens
taggttcatagaggcaagggaaaggtgatcctagtccatgggacttccctgtggacagctgggctcacagtgggagacacccaggtcttggaagcaggaaaggggagtccgcggcaaagaagaggaagacgggtgtgggcccgccgggtcagcgccgcaaggaggagccggagaccaccctgctccagaagcagccggcgccacagagagggcttccggcagatgaagggcagggtcagcgcgcaggccactcggtcctcagggctcccagagagcagcaggtgcgtcagggccccaaccccaagggcgactcagcctgaaccgtcaggttctgcagtagcctctcccctgtgagtggaaagcttgtcaggctgggaactggggtctaagacaggtggggtgagtgagacagggctctgggcccgtgagatgaaggagggtgaaacctctgggtgagaaatcagggcactgaagagacagtgctgggctcgggacgctgggaacctgaggtccaggacaaggacagaaggtgggacagtcagggtgtaagtctgggcccctgaagtgtgggcggcaagccagcccaggcgccgaggcaagagacggaggacacgagctgttccagtataatacaatataaaacaagaatagttataccagatatagatcttagagatatatgaatatcattaatcattagtttgtagtaattactctttatcccaatattgtaataatcctcgctctataatcataacctgggaaaaaccaggccatacagagataggagctgaggggacatagtgaggtgtgaccagaagacagagtgcgagccttctgttatgcccggacagggccagcagaa

SEQ ID NO: 77676 - DNA, 837 bp, Homo Sapiens
  misc_feature (659)..(667): n is a, c, g, or t
gtgaaatacaacctagttttatcaccatatccaccagcaggcatggataattattttaacaatgctaatagttgagttgtgcagtatattatagaatatagtccagttaaatctttggtttcagtatgtctgaagagtacagtgagaggttaatttctgctcaagtggtaccacttaaaggcatgtattcttttagtatgtaaaatgaaatagtaccttgagtttaaatagaatgcatttaggcattgtagagatctgaaatagttttcttccactacattgttgaaatcaatgaagcaattagtttctcattcagaaatgtgcacactaatatttagttttgctttctcgtggataatattaagcacttactctgcagtttcctggaagttgtgtcaactgcagtgatactattcaggatggtgggaaatccccaaaaatatgtatgtgtgggcttgcttagattactatatttcatagttaatcttttgtctcttgcggtgctcatgatgtgtggggcacacggaaggcattgctgtagtcagtcattttggttttcttctatagccattttattattttagtgtattagttatgaagataatattatctatttgtaaattgctactttgtattttatgcatgctctgtaatttgannnnnnnnnagttattgatttggattatattcacattctaataaacagttatagggggattatttcttatgctgtcagattacatttttcctttgagtgctttgggtgcagccgtggaatcctgatgtaaaagcataggttcttgcattactgagtaaacattgaattgggagcaaaaa

SEQ ID NO: 77677 - DNA, 725 bp, Homo Sapiens
  misc_feature (493)..(633): n is a, c, g, or t
  misc_feature (641)..(679): n is a, c, g, or t
ccggaagtttgctgctagtcgcggacgcaatggcttcaaggttacttcgcggagctggaacgctggccgcgcaggccctgagggctcgcggccccagtggcgcggccgcgatgcgctccatggcatctggaggtggtgttcccactgatgaagagcaggcgactgggttggagagggagatcatgctggctgcaaagaagggactggacccatacaatgtactggccccaaagggagcttcaggcaccagggaagaccctaatttagtcccctccatctccaacaagagaatagtaggctgcatctgtgaagaggacaataccagcgtcgtctggttttggctgcacaaaggcgaggcccagcgatgcccccgctgtggagcccattacaagctggtgccccagcagctggcacactgagcacctgcactaaattactcaaaatgtgctgtaaagtttcttctttccagtaaagactagccattgcattggcnnnnnnnnnnnnnnnnnnnnnnnnnnnnnnnnnnnnnnnnnnnnnnnnnnnnnnnnnnnnnnnnnnnnnnnnnnnnnnnnnnnnnnnnnnnnnnnnnnnnnnnnnnnnnnnnnnnnnnnnnnnnnnnnnnnnnnnnnnnnnttgggggnnnnnnnnnnnnnnnnnnnnnnnnnnnnnnnnnnnnnnnggggcgggggccccaaagggaaaggaaaaggggcaaaagtgttccc

SEQ ID NO: 77678 - DNA, 624 bp, Homo Sapiens
  misc_feature (296)..(305): n is a, c, g, or t
aagacctaccatgtctggccagaaggggaatttagaatgattcttgtttatttcccaaacttcccataaactatgtaacttgtaatgtaaaccccctgttccccaaacaagtaattaatatctaccgtagaaaattgggaaaatacagagatgcataaagaataaaatcaaaattcccaagaatcccaacattaacattgaggtattttcttctcttctcaaaaatactcactttttaatgaatacgtacatttaaaactttggatcataagaaacaacctactgtacaacctgannnnnnnnnnaacactatagggtaaaccgtcaacacagggaagccagcgctcccaacactactctgaggctatgaagtcctctccagggcactgccccccaacaacacactctcactcacacacacaccccaccatcccagcaactccaaggcaagaggcagtccatgccaggccagagaggaaaaccgaggccccaggaaaaccagcagtcaatgtccacagagctgacatctggatggcccatctgctggggtgggtctggggaaggaggtatgtgcccttcactggccccacgcctggcgccctcttgctctccctatgagagctc

SEQ ID NO: 77679 - DNA, 1171 bp, Homo Sapiens
tggccatgattgtacatgctccctgtttcttgcgggacatcgtgctgggccatagtcctctgtaggcagtctctgtagcagtagaaattcggttgttatggagggtgccacactccctgggaccgatgactgtaccagcttcactaagtgccagctgctagctgctagattctggagcactttgtgtacataggtgatacagtacctactttagatacagactgtcagctaaccacaggtgccctacacttgtcaacacatctggaaagtaaaccaagaaggggaggaagacagattccaggcccactccaaactgggtaatcggaagctgctgtggcatggcaccaacatggccgtggtggccgccatcctcactagtgggctccgcatcatgccacattctggtgggcgtgttggcaagggcatctactttgcctcagagaacagcaagtcagctggatatgttattggcatgaagtgtggggcccaccatgtcggctacatgttcctgggtgaggtggccctgggcagagagcaccatatcaacacggacaaccccagcttgaagagcccacctcctggcttcgacagtgtcattgcccgaggccacaccgagcctgatccgacccaggacactgagttggagctggatggccagcaagtggtggtgccccagggccagcctgtgccctgcccagagttcagcagctccacattctcccagagcgagtacctcatctaccaggagagccagtgtcgcctgcgctacctgctggaggtccacctctgagtgcccgccctgtcccccggggtcctgcaaggctggactgtgatcttcaatcatcctgcccatctctggtacccctatatcactcctttttttcaagaatacaatacgttgttgttaactatagtcaccatgctgtacaagatccctgaacttatgcctcctaactgaaattttgtattctttgacacatctgcccagtccctctcctcccagcccatggtaaccagcatttgactctttacttgtataagggcagcttttataggttccacatgtaagtgagatcatgcagtgtttgtctttctgtgcctggcttatttcactcagcataatgtgcaccgggttcacccatgttttcataaatgacaagatttcctcctt

SEQ ID NO: 77680 - DNA, 623 bp, Homo Sapiens
agtaggtaggaagtaccaatagagcaagccaggaaaactgaggccaggaggcacagcctggggctagctgtgaatcacctgtggggcctagagcccaggaatcctgacgcccaggctactggacaaatcctttatcagggcattagggtgggtgctatgcttttgaaagcagtaccaacggctgtggtcgtgggttttgatgcttgccactcacagaggccccagctctcaccataacaaaccaaatgggggctggaaggcatcctttacaactttatggtctcgtatgcaagcaccctcagcattctctgcacccatggagtggagatgggtgggagtaatccaaggcctttattttcaggccatggtttgacagcaagggtattttcttccccaataaacgtagcttctgtctaccttccactggcagcaaaatgattttctgttctctgcatatactgaggggatctgcacagtgcagaaaggaagatgtccgagatccaagtgaggcctgttcagtgtgaaatgtctagggtagaagaaagaccatcctccattatggctggcatgtggcagtcatccttaagattatttttaaatttcctaataaatataggaaagta

SEQ ID NO: 77681 - DNA, 675 bp, Homo Sapiens
aaatgtgaaatacataaagcttcatttatccttatgattatagctatgttgatgttacccaagacctaaaagtcacactctctaattacacttccctcctgtgttctgggtcctcttggaccagtccttactctggctcccctcctggatgtctcccagacttctaattagaattactgtttcctatatcaagctaattatctttcccaccaacctcctccatccttgggtgaaagcatcacttggttgcaaaagtcagaaatctgggtttcattcttgcggtaggtagaataatgcccccaggccccaggttttgacatccgaatccctgggactttgcagatgtgattcagtttaggattttgagatggggagattatctgggagagcctgatgtcatcataaggttcttataagagggaggcaggagggttagagtgagtagtaagagatgcaacagtggaagcaagaggttggggtgatgtggccacaagcccaggagtgctgacagacatcagaagctggaagggacaaggaatggtttctcctctggagcctccagaaagaaccagccctgctgacaccttgattttagccttggaagactcattttggacttctgaccttgaacgttgtaagagaataaatttacatattttaaactggaagggaaaa

SEQ ID NO: 77682 - DNA, 1060 bp, Homo Sapiens
  misc_feature (926)..(957): n is a, c, g, or t
ccacgtctacaatggagtcgagtctagaattcacacagagccacctagtttgtctttgtcagcgccacgtgagacacctacaacgagatgccttaagccagctcatgaatggccccatcagaaagaagctcaaaattattcctgaggatcaatcctggggaggccaggctaccaacgtctttgtgaacatggaggaggacttcatgaagccagtcattagcattgtggacgagttgctggaggcagggatcaacgtgacggtgtataatggacagctggatctcatcgtagataccatgggtcaggaggcctgggtgcggaaactgaagtggccagaactgcctaaattcagtcagctgaagtggaaggccctgtacagtgaccctaaatctttggaaacatctgcttttgtcaagtcctacaagaaccttgctttctactggattctgaaagctggtcatatggttccttctgaccaaggggacatggctctgaagatgatgagactggtgactcagcaagaataggatggatggggctggagatgagctggtttggccttggggcacagagctgagctgaggccgctgaagctgtaggaagcgccattcttccctgtatctaactggggctgtgatcaagaaggttctgaccagcttctgcagaggataaaatcattgtctctggaggcaatttggaaattatttctgcttcttaaaaaaacctaagattttttaaaaaattgatttgttttgatcaaaataaaggatgataatagatattattttttcttatgacagaagcaaatggatgtgatttatagaaaaactgggaaatacagggtacccaaagagtaaatcaacatctgtatacccccttcccaggggtaagcactgttaccaatttagcatatgtccttgcagaannnnnnnnnnnnnnnnnnnnnnnnnnnnnnnnaccaaaatgaatcattactctatgttgttttactatttgtttgacatatcagtatatctgaaacaccttttcatgtcaataaatgttcttctctaacattttt

SEQ ID NO: 77683 - DNA, 732 bp, Homo Sapiens
  misc_feature (52)..(52): n is a, c, g, or t
  misc_feature (70)..(70): n is a, c, g, or t
  misc_feature (128)..(128): n is a, c, g, or t
cagagaacaagatgctcccttgctgagctcctgggagcgtggaaggagatgntaggccctggcacagtgntatgtggactgggccacgatagggtggagtgagctagtgaagaaggcagagggagacntggcttctggtctcagctatgcctgttttgtgaccttgattgagttgcttgggctttacttctgcctacaaatcaggggtaaaaatacctgttgggaggagaaatgagaacatagaggaaagcctcttggaggaaaggtgattggaccaagtctcaggtgtgtctccctgtggctgcacaggctctctaaccgaaacctcactttcagagagatgtgggtcctttgtctccaggatccacaccctagattttaacactgcattctcactataacatgccctataatggctgcatcccttttgagcaacctccaaaatctacatttacacagtaggtaaattagggatgactgcattatcaaaatactctcagggttcctataaatggcagctctcctgttgtattcaggtgttgtttacagactaacaaatgtgttggcaaatccctggttagatgcacttcctggtgttgagatgaacacgtcgatttttcaccaatcgatgaagccatgctctgcaatgacaatattaatgtgatccgaccctaacattttctctatggaagacgtatgttgcataaagcaaggcacacttaagaaaaaaaa

SEQ ID NO: 77684 - DNA, 1331 bp, Homo Sapiens
  misc_feature (1223)..(1235): n is a, c, g, or t
accaacatttgtctccttaatggatttaatttatctgtgtgtaccctgtttttctacctggaactccatagaatgatgtttgcaaaccaacatgtgctcttttcagtcattcactgttttaatatgacatggtagagaagataaggtttatggcaggtaattttttgtaatgtgtattaaacgaagttcaaagattagaaatacatctgtgtcctgaaaaccttagatacatagccgactgtatacagaggttcatctcaacctcaacactattgacttttggggctggatagttctctgttgtgggggtttgtcttgtgcactgtaggtttttagtagcatccacactttctcctcaccagatgccagttgcaccctcccccaagttgagacaaccaaaaatgtctccagatattgccagctaccccttgagggatggtacctctggttgagaaccattgctagagaatgatctttactgaatttgccctttataagaaacccagtgaatttctagagcaagtcccaaaaactaagggacagctaagaagttattatggttgacttcaaaggcctaaactgtgttttttatgtccactaaacaacttgattaaaagacggaattttgactcgtgtctgtatcatacaagtacaaatactaattttgccctatgtatccgtaaatgtcatttgtgattttgacttatttatttaatgccctttcttatgccgtgggttttcaagtttactcatttctatggttgcaaataactctaaaacttattatataaactttcatattataggcagaacacaatggctaaatatctgttgcatgtactttaaagtttattataaaatataaacagatatataaagatgttgactcttacctgtgattttgcatggtcagactcggtgtcaggtacggagaggattctcatgactgtcttacctctactgaatattctagtgagttatatgatttacggagtgattaacagaggtctatataaagttacttttcccctttacttaattatattgtagtgtgcagataacaaaactgctaccttctcatccaagtggtctgtagaattcatgtcccttacagtggtcatttaaagtcaatatttatttatgtatgtaataaaaaaagttggatttttgtgtatgtctgtcacattatttagagagaagtaatcttgtaaaaatgttttgtnnnnnnnnnnnnngtattgtaaatagtcttgatattctgtgactcattattttcatgttagagtttgtacatactggttcaataataaagtatccttaaacaagaaaaa

SEQ ID NO: 77685 - DNA, 1452 bp, Homo Sapiens
  misc_feature (670)..(683): n is a, c, g, or t
  misc_feature (701)..(702): n is a, c, g, or t
  misc_feature (1419)..(1419): n is a, c, g, or t
gcagaggaagagcacgcgctccacaggcgtcactcttatgggtccatctttaattatgttaaatattaataaaagtacagcgtaactgcgattcacttaacataccttacaggactaagggagtacaatttaacacggtcacaacttttgagaacaaaaaggaacttcaataccatgttgtgagaaatgctccaatttgctttggttttgaatggcaggctcgagaaccaccgcccagaacggaacctattctgtcagcaagagccgggcctcgaatgagaggaagcagaggcagccgaagtgccctctggagaaaggcccctggagggaaaaaccatgtctggatggcattgagtggcacagaagggatgggactgcatatataaaaaagatccgcataataaaccaaataatattggaaataataccttcagtaatacttctgtaagaagcagaattacaccacatgttattcacatgcataggagtgcataagaaaaatcccttgttgtaattatggttggtgtggaatagtaaaatatgtactgaaaatgacaagttaattggcagagaaattaatctataaaagggttgtgtccagagcggaggagcctcattagcaactgaacagaacccactcagaagacgcactcacccacacgtgcgcgtnnnnnnnnnnnnnngcgcgcactgtactgcannataatatacacacacactgaagtgatctctccctaaagcatccttgtgctcaggccagatttccctgctggcggctgctcccagtgccggctatagagaaggtggggactgtccctgcaagtgggagttcaagacacacgctccttcagtagcaaaaacagccctggccatcctggcgctcagagccctctgcacacctttgaacgggctgtgtgtcccttctctgatggcagaaagacaacaccagcagaaagacggctgaacaactgcagatcctcctacccccgaagcctggtctgtctcacacatacaagttagagctgggtggacgggtgcttgcactttctggctttggtgggcgagaccttggcctgagaactttggttcacaggaagcttcccttgacaatacttgagtgcaaagcttcatccaggtcccacctgggctgttgccaaggatgctcaagcgttctcttcaatcttccctgtgacttccaagaaacgacaagatctctagcccatccatcggtaaaccaagctgccaagtggcctggaaaacgcagtcagtacagataaaaagaacagggctcctcattactcttaaggactgctgagaacaaatcccccctctgcaatcagcaagttgctctctctttaacagaccttcttctggatgcagctatgcgagaggaagccttgtgctccaccatcctgtttnagatagccctattgaggacggcagccagaacca

SEQ ID NO: 77686 - DNA, 993 bp, Homo Sapiens
  misc_feature (41)..(41): n is a, c, g, or t
  misc_feature (100)..(578): n is a, c, g, or t
  misc_feature (611)..(635): n is a, c, g, or t
  misc_feature (637)..(756): n is a, c, g, or t
cagtttgttagcgcaggtcgaacagaggccacgaggagctncaggggaacgcctgttctttaagtctgtcggttcgcactctgacttgaggtcgattttnnnnnnnnnnnnnnnnnnnnnnnnnnnnnnnnnnnnnnnnnnnnnnnnnnnnnnnnnnnnnnnnnnnnnnnnnnnnnnnnnnnnnnnnnnnnnnnnnnnnnnnnnnnnnnnnnnnnnnnnnnnnnnnnnnnnnnnnnnnnnnnnnnnnnnnnnnnnnnnnnnnnnnnnnnnnnnnnnnnnnnnnnnnnnnnnnnnnnnnnnnnnnnnnnnnnnnnnnnnnnnnnnnnnnnnnnnnnnnnnnnnnnnnnnnnnnnnnnnnnnnnnnnnnnnnnnnnnnnnnnnnnnnnnnnnnnnnnnnnnnnnnnnnnnnnnnnnnnnnnnnnnnnnnnnnnnnnnnnnnnnnnnnnnnnnnnnnnnnnnnnnnnnnnnnnnnnnnnnnnnnnnnnnnnnnnnnnnnnnnnnnnnnnnnnnnnnnnnnnnnnnnnnnnnnnnnnnnnnnnnnnnnnnnnnnnnnnnnnnnnnnnnnnnnnnnnnnnnnnaagaattcggcacgagggccgcggctgtaggcnnnnnnnnnnnnnnnnnnnnnnnnnannnnnnnnnnnnnnnnnnnnnnnnnnnnnnnnnnnnnnnnnnnnnnnnnnnnnnnnnnnnnnnnnnnnnnnnnnnnnnnnnnnnnnnnnnnnnnnnnnnnnnnnnnnnnnnnnnnnnnnntgaatgatgaatttatgtgaacacaaagccctctgaaaaattaatgattttcaatttgttgtcttcttgaaaactgaatttaagtattatttaaacagaaaagtgtcagaaatcaaatgcagtatctccctctcccttttttaaatgttgaattagtagggtttttgtatagctttttgtattgtgtgtatttatgatatgtgaaatgtacataaaattaaacaatgtgaaaataaa

SEQ ID NO: 77687 - DNA, 1326 bp, Homo Sapiens
  misc_feature (82)..(82): n is a, c, g, or t
  misc_feature (226)..(285): n is a, c, g, or t
  misc_feature (1057)..(1124): n is a, c, g, or t
  misc_feature (1128)..(1132): n is a, c, g, or t
  misc_feature (1137)..(1140): n is a, c, g, or t
  misc_feature (1142)..(1144): n is a, c, g, or t
  misc_feature (1146)..(1168): n is a, c, g, or t
cgcgtttctatagaggtgacatgtctctccattcctctccaaccctgcccacctccctgtaccagagctgtgatctctcggntggggggcccatctctgctgacctgggtgtggcggagggagaggcgatgctgcaaagtgttttctgtgtcccactgtcttgaagctgggcctgccaaagcctgggcccacagctgcaccggcagcccaaggggaaggaccggtnnnnnnnnnnnnnnnnnnnnnnnnnnnnnnnnnnnnnnnnnnnnnnnnnnnnnnnnnnnnatgggcttcagaagtatctgcacaattagaaaagtcctcagaagctttttcttggagggtacactttcttcactgtccctattcctagacctggggcttgagctgaggatgggacgatgtgcccagggagggacccaccagagcacaagagaaggtggctacctgggggtgtcccagggactctgtcagtgccttcagcccaccagcaggagcttggagtttggggagtggggatgagtccgtcaagcacaactgttctctgagtggaaccaaagaagcaaggagctaggacccccagtcctgccccccaggagcacaagcagggtcccctcagtcaaggcagtgggatgggcggctgaggaacggggcaggcaaggtcactgctcagtcacgtccacgggggacgagccgtgggttctgctgagtaggtggagctcattgctttctccaagcttggaactgttttgaaagataacacagagggaaagggagagccacctggtacttgtccaccctgcctcctctgttctgaaattccatccccctcagcttaggggaatgcacctttttccctttccttctcacttttgcatgtttttactgatcattcgatatgctaaccgttctcagccctgagccttggagaggagggctgtaacgccttcagtcagtctctggggatgaaactcttaaatgctttgtatattttctcaattagatctcttttcagaagtgtctatagaacaataaaaatcttttacttctgaaaaannnnnnnnnnnnnnnnnnnnnnnnnnnnnnnnnnnnnnnnnnnnnnnnnnnnnnnnnnnnnnnnnnnngggnnnnnttttnnnnannnannnnnnnnnnnnnnnnnnnnnnnattggtgggggcggccttgggcccctccaaaaaaatttttttaaaaccactttcgttttggccggcgcggcccccccaagaggggaaaaaggaaacatggggcacaatcctggtttttcccaaagggaacaaccccggggcccaaggaaaataggggg

SEQ ID NO: 77688 - DNA, 725 bp, Homo Sapiens
  misc_feature (677)..(677): n is a, c, g, or t
  misc_feature (704)..(704): n is a, c, g, or t
gctcccacccacgatgttctagtcaccccacaagcatcgcacccccgccacgtagcgaggcctgggtggcgaattcggcacgaggaacccctgggcgggcgggggtaccgcctgggcaagggccggggcgccgggccgagccacctcttcccctcccccgcttccctgtcgcgctccgctggctggacgcgctggaggagtggagcagcacccggccggccctgggggctgacagtcggcaaagtttggcccgaagaggaagtggtctcaaaccccggcaggtggcgaccaggccagaccaggggcgctcgctgcctgcgggcgggctgtaggcgagggcgcgccccagtgccgagacccggggcttcaggagccggccccgggagagaagagtgcggcggcggacggagaaaacaactccaaagttggcgaaaggcaccgcccctactcccgggctgccgccgcctccccgcccccagccctggcatccagagtacgggtcgagcccgggccatggagcccccctggggaggcggcaccagggagcctgggcgcccggggctccgccgcgaccccatcgggtagaccacagaagctccgggacccttccggcacctctggacagcccaagatgctgttggccaccctcctcctcctcctccttggaggcgctctgngccatccagaccggattatttttccanatcatgcttgtgaggaccccc

SEQ ID NO: 77689 - DNA, 1043 bp, Homo Sapiens
gacatcccacagtgtctgacagcatgtcagcacgtgtgaccacgctgcacaggttcacatgcagctgcatgtgagtgtggatagcgtgtcggagttcggggcccaggcgtctacacagcatgcatctcaaagccaagtccaggctgtgagcgcacggcagccgcggccatcatggggtccagcagccaatgcaggactgggggtggagactgaggctaggtgtgtatatccaggagaggagaagaccccatagaagtcctccaaggtgacatgcaaggcaggaaggggacgggtcttgggtcaggccagggaaggggtctgagctgcaacctgcttcatcagagccatcgccacaggcatcaaccccatcacagcgctggacagcagatacacagcggtggttcaggcactgaaactcttcctgcaggcacatcagccaatcttggctgtaggagagcaggaagccctggcccatgggtgctctggccccagcatagctgtaagtgatggtgacgttgcccccgggcagctgcagagggctgggaggtgcctcacacagggagatcagtggctggagaggggagcgtagggttaagcgctctgagccacaggccaggtgtagcttctggaacctgatggtgacagtctgttccttgctgcccaggatgagccaggtgcagttggcaggggaggtgcggctgtcccggaccaggggcctctgtaaggtgccctgcacttctaagagcactgctggggggtcctcacaagcatgatttggaaaaataatccggtctggatgggccagagcgcctccaaggaggaggaggaggagggtggccaacagcatcctgggctgtccagaggtgccggaagggtcccggagcttctgtggtctacccgatggggtcgcggcggagccccgggcgcccaggctccctggtgccgcctccccaggggggctccatggcccgggctcgacccgtactctggatgcccctcgtgccgaattcggcgcgccgtcacttcatactcttcccccgtag

SEQ ID NO: 77690 - DNA, 2890 bp, Homo Sapiens
  misc_feature (2639)..(2763): n is a, c, g, or t
  misc_feature (2765)..(2765): n is a, c, g, or t
  misc_feature (2772)..(2788): n is a, c, g, or t
  misc_feature (2792)..(2822): n is a, c, g, or t
  misc_feature (2825)..(2825): n is a, c, g, or t
  misc_feature (2828)..(2844): n is a, c, g, or t
agagtatgaagtcgacggcgcgccgaattcggcacgagggcagtgctcttagaagtgcagggcaccttacagaggcccctggtccgggacagccgcacctcccctgccaactgcacctggctcatcctgggcagcaaggaacagactgtcaccatcaggttccagaagctacacctggcctgtggctcagagcgcttaaccctacgctcccctctccagccactgatctccctgtgtgaggcacctcccagccctctgcagctgcccgggggcaacgtcaccatcacttacagctatgctggggccagagcacccatgggccagggcttcctgctctcctacagccaagattggctgatgtgcctgcaggaagagtttcagtgcctgaaccaccgctgtgtatctgctgtccagcgctgtgatggggttgatgcctgtggcgatggctctgatgaagcaggttgcagctcagaccccttccctggcctgaccccaagacccgtcccctccctgccttgcaatgtcaccttggaggacttctatggggtcttctcctctcctggatatacacacctagcctcagtctcccacccccagtcctgccattggctgctggacccccatgatggccggcggctggccgtgcgcttcacagccctggacttgggctttggagatgcagtgcatgtgtatgacggccctgggccccctgagagctcccgactactgcgtagtctcacccacttcagcaatggcaaggctgtcactgtggagacactgtctggccaggctgttgtgtcctaccacacagttgcttggagcaatggtcgtggcttcaatgccacctaccatgtgcggggctattgcttgccttgggacagaccctgtggcttaggctctggcctgggagctggcgaaggcctaggtgagcgctgctacagtgaggcacagcgctgtgacggctcatgggactgtgctgacggcacagatgaggaggactgcccaggctgcccacctggacacttcccctgtggggctgctggcacctctggtgccacagcctgctacctgcctgctgaccgctgcaactaccagactttctgtgctgatggagcagatgagagacgctgtcggcattgccagcctggcaatttccgatgccgggacgagaagtgcgtgtatgagacgtgggtgtgcgatgggcagccagactgtgcggacggcagtgatgagtgggactgctcctatgttctgccccgcaaggtcattacagctgcagtcattggcagcctagtgtgcggcctgctcctggtcatcgccctgggctgcacctgcaagctctatgccattcgcacccaggagtacagcatctttgcccccctctcccggatggaggctgagattgtgcagcagcaggcacccccttcctacgggcagctcattgcccagggtgccatcccacctgtagaagactttcctacagagaatcctaatgataactcagtgctgggcaacctgcgttctctgctacagatcttacgccaggatatgactccaggaggtggcccaggtgcccgccgtcgtcagcggggccgcttgatgcgacgcctggtacgccgtctccgccgctggggcttgctccctcgaaccaacaccccggctcgggcctctgaggccagatcccaggtcacaccttctgctgctccccttgaggccctagatggtggcacaggtccagcccgtgagggcggggcagtgggtgggcaagatggggagcaggcacccccactgcccatcaaggctcccctcccatctgctagcacgtctccagcccccactactgtccctgaagccccagggccactgccctcactgcccctagagccatcactattgtctggagtggtgcaggccctgcgaggccgcctgttgcccagcctggggcccccaggaccaacccggagcccccctggaccccacacagcagtcctggccctggaagatgaggacgatgtgctactggtgccactggctgagccgggggtgtgggtagctgaggcagaggatgagccactgcttacctgaggggacctgggggctctactgaggcctctcccctgggggctctactcatagtggcacaaccttttagaggtgggtcagcctcccctccaccacttccttccctgtccctggatttcagggacttggtgggcctcccgttgaccctatgtagctgctataaagttaagtgtccctcaggcagggagagggctcacagagtctcctctgtacgtggccatggccagacaccccagtcccttcaccaccacctgctccccacgccaccaccatttgggtggctgtttttaaaaagtaaagttcttagaggatcataggtctggacactccatccttgccaaacctctacccaaaagtggccttaagcaccggaatgccaattaactagagaccctccagcccccaaggggaggatttgggcagaacctgaggttttgccatccacaatccctcctacagggcctggctcacaaaaagagtgcaacaaatgcttctattccatagctacggcattgctcagtaagttgaggtcaaaaataaaggaatcatacatctcnnnnnnnnnnnnnnnnnnnnnnnnnnnnnnnnnnnnnnnnnnnnnnnnnnnnnnnnnnnnnnnnnnnnnnnnnnnnnnnnnnnnnnnnnnnnnnnnnnnnnnnnnnnnnnnnnnnnnnnnnnnnnanaaaaaannnnnnnnnnnnnnnnntttnnnnnnnnnnnnnnnnnnnnnnnnnnnnnnntgnggnnnnnnnnnnnnnnnnnaaaaaatttttaaaaacctttttttggggcgcgggggcccccaaag

SEQ ID NO: 77691 - DNA, 972 bp, Homo Sapiens
tagggcgagagagtatgaagtcgacggcgcgccgaattcggcacgaggggaagtggtctcaaaccccggcaggtggcgaccaggccagaccaggggcgctcgctgcctgcgggcgggctgtaggcgagggcgcgccccagtgccgagacccggggcttcaggagccggccccgggagagaagagtgcggcggcggacggagaaaacaactccaaagttggcgaaaggcaccgcccctactcccgggctgccgccgcctccccgcccccagccctggcatccagagtacgggtcgagcccgggccatggagcccccctggggaggcggcaccagggagcctgggcgcccggggctccgccgcgaccccatcgggtagaccacagaagctccgggacccttccggcacctctggacagcccaggatgctgttggccaccctcctcctcctcctccttggaggcgctctggcccatccagaccggattatttttccaaatcatgcttgtgaggaccccccagcagtgctcttagaagtgcagggcaccttacagaggcccctggtccgggacagccgcacctcccctgccaactgcacctggctcatcctgggcagcaaggaacagactgtcaccatcaggttccagaagctacacctggcctgtggctcagagcgcttaaccctacgctcccctctccagccactgatctccctgtgtgaggcacctcccagccctctgcagctgcccgggggcaacgtcaccatcacttacagctatgctggggccagagcacccatggccagggcttctgctctctacagccagattgctgatgtgcctgcagagatttcatgctgaacacgctgtgtactgctgtcacctggatgggtgagctgtgcatgctctatgacagtgcactaaccctcctgctgaccagacctcctctgctgattgcctgagatcatggcttctc

SEQ ID NO: 77692 - DNA, 776 bp, Homo Sapiens
aaggggagactaccagaatcatggtgaaggagatagttaaccttgacacagccagggtagttcggaccgttgggacatttatcttgtgcccagatgaccaggtgcattgcaggaagggcagcttaccggaccagggcctttgaaggtgcctgcacttttaagagcactgctgggggtcctcacaagcaagatttgaaaaataatccggtctggaagggccagagcgcctccaaggaggaggagaggagggtggccaacagcatcctgggctgtccagaggtgccggaagggtcccggagcttctgtggtctacccgatggggtcgcggcggagccccgggcgcccaggctccctggtgccgcctccccaggggggctccatggcccgggctcgacccgtactctggatgccagggctgggggcggggaggcggcggcagcccgggagtaggggcggtgcctttcgccaactttggagttgttttctccgtccgccgccgcactcttctctcccggggccggctcctgaagccccgggtctcggcactggggcgcgccctcgcctacagcccgcccgcaggcagcgagcgcccctggtctggcctggtcgccacctgccggggtttgagaccacttcctcttcgggccaaactttgccgactgtcagcccccagggccggccgggtgctgctccactcctccagcgcgtccagccagcggagcgcctcgtgccgaattcggcgcgccgtcgacttcatactcttccccatttgagca

SEQ ID NO: 77693 - DNA, 857 bp, Homo Sapiens
  misc_feature (657)..(657): n is a, c, g, or t
ggggagagtatgaagtcacggcgcgccgaattcggcacgaggagcagcacccggccggccctgggggctgacagtcggcaaagtttggcccgaagaggaagtggtctcaaaccccggcaggtggcgaccaggccagaccaggggcgctcgctgcctgcgggcgggctgtaggcgagggcgcgccccagtgccgagacccggggcttcaggagccggccccgggagagaagagtgcggcggcggacggagaaaacaactccaaagttggcgaaaggcaccgcccctactcccgggctgccgccgcctccccgcccccagccctggcatccagagtacgggtcgagcccgggccatggagcccccctggggaggcggcaccagggagcctgggcgcccggggctccgccgcgaccccatcgggtagaccacagaagctccgggacccttccggcacctctggacagcccaggatgctgttggccaccctcctcctcctcctccttggaggcgctctggcccatccagaccggattatttttccaaatcatgcttgtgaggaccccccagcagtgctcttagaagtgcagggcaccttacagaggcccctggtccgggacagccgcacctcccctgccaactgcacctggctcatcctgngcagcaaggaacagactgtcaccatcaggtccagaagctacactggcctgggctcaaacgctaaccctacctccctctcagcacgatctcctgtgtgagactccagcctcgcacgccggggcacgcacatcatacagttgtgggccaacccagggcagctctgcttcacgcaatgcgaggcgctgagattctgctaccct

SEQ ID NO: 77694 - DNA, 779 bp, Homo Sapiens
gagagtatgaagtcgacggcgcgccgaattcggcacgaggccccgcttccctgtcgcgctccgctggctggacgcgctggaggagtggagcagcacccggccggccctgggggctgacagtcggcaaagtttggcccgaagaggaagtggtctcaaaccccggcaggtggcgaccaggccagaccaggggcgctcgctgcctgcgggcgggctgtaggcgagggcgcgccccagtgccgagacccggggcttcaggagccggccccgggagagaagagtgcggcggcggacggagaaaacaactccaaagttggcgaaaggcaccgcccctactcccgggctgccgccgcctccccgcccccagccctggcatccagagtacgggtcgagcccgggccatggagcccccctggggaagcggcaccagggagcctgggcgcccggggctccgccgcgaccccatcgggtaaaccacagaaactccgggaaccttccggcacctctggacaacccaggatgctgttggccaccctcctccttccttcctccttggaagccctctggcccatccagaacgggattatttttccaaatcatgcttgtgaggaccccccagcagtgctcttagaagtgcagggcacctttacagaggcctctggtccgggacagccgtccctcccctgccaatgcacttggctcatccgggcaacaaggaacaaactgtcactattctgttccaaagctacactggtctgtggctaaagcgcttatcctacccc

SEQ ID NO: 77695 - DNA, 968 bp, Homo Sapiens
tatggggagagagtatgaagtcacggcgcgccgaattcggcacgaggggccggggcgccgggccgagccacctcttcccctcccccgcttccctgtcgcgctccgctggctggacgcgctggaggagtggagcagcacccggccggccctgggggctgacagtcggcaaagtttggcccgaagaggaagtggtctcaaaccccggcaggtggcgaccaggccagaccaggggcgctcgctgcctgcgggcgggctgtaggcgagggcgcgccccagtgccgagacccggggcttcaggagccggccccgggagagaagagtgcggcggcggacggagaaaacaactccaaagttggcgaaaggcaccgcccctactcccgggctgccgccgcctccccgcccccagccctggcatccagagtacgggtcgagcccgggccatggagcccccctggggaggcggcaccagggagcctgggcgcccggggctccgccgcgaccccatcgggtagaccacagaagctccgggacccttccggcacctctggacagcccaggatgctgttggccaccctcctcctcctcctccttggaggcgctctggcccatccagaccggattatttttccaaatcatgcttgtgaggaccccccagcagtgctcttagaagtgcagggcaccttacagaggcccctggtccgggacagccgcacctcccctgccaactgcacctggctcatcctgggcagcaaggaacagacgtgtcaccatcaggttccagaaagctacacctggccttgtggctcaggagcgcttaaccctacgatcccctctccagacacgggatctccctgtgtgaggcacctccagcctctgcagctgaccgggggcaacgtcacaatcacttacagtatgctggggccagagcaccatgtgccagggcttcctggtctctacaggcaagattg

SEQ ID NO: 77696 - DNA, 1284 bp, Homo Sapiens
tcggcagtaactctaacggtcttaaggtagcgaggcctgggtggcgaattcggcacgaggcctcgtgccgctggacctggggaacaccaagttcaagctctatatacaacgaggacaaaaatgaaccaggctccctgaaagcagggaatctaacctgtgctacggcgccttcccagtccacgagggcgtgagagtacatacacatgcaagtgcactccagcgctcacccaagcaacacccttggagaaacacggactccaggcccaaatccagcctgagaccctcaaagggcagatccgctaacctcaagttttcagaagatctgaacccactgggggctcctgctcctctgcctgccccatgccagactaggattccagtgacataagcgccctctacagactcagaaggacagagaaggttctgctggaagtgggctcctcagcaaaccagcagataggggttcctttgatatttataccccaggttttttcactctcacgtgacatctatgtggggccaatgaagccaattcttcttttgtacatatgcagtcctgtaagaatgcattcaaacgggatccgctaattaggaattttctcctggaattctcaacagtctatggggccagaagctttccacaaaccagtgaaggtggcagcaaagaaagcctcttagacgaggagctggcagcagctgctatctagatagacagcaaaaaccaaccactaattcagcaaacacaacctcatacctaaccgcttccctttaaatggccttcggtgtgtgcgcacatgggcacgtgcggggagaaccatacttattcccctgttcccggcctaccacctctgctcccccttctcttctctaccatttaactgtctcctctgctttgtttcttatcactgctgctggtgtctagagccagccagcagtacctggcagacatcgcgaccctgcgggcagcgcttaggactgcacatttacatttcccaaatgatctgggtagatggggacaggtgaagacttggggaaacggaaatatacgaatgacatgagacatgcatatctagtgtcaatccattcgactgggcacaggacagcagactgctgacagtgctatgtaagattatgagtgatcctccctctattttgcaaacagtctgtaagtaactgataaaactttaaaatatgcaaattttaaaattatatagtttgatttactcatcaaattatcatgtatgctgttatttaagtatgaataaaggcttttttaaattggga

SEQ ID NO: 77697 - DNA, 1427 bp, Homo Sapiens
tctctccgcccctccagcggagctggtctccggccgggcaccgtcgcgggcccccctggcccggccacctgggaccgtgctggggagtctgccacttccctccctcccctggcccgcaaagttttggcggagccatcgctggggctgagcgcgcccccggggggagatcggggagcgcccgatgccgggcggccggagccattgacccgggacgccgccgtccgctgagcagccgaccaccccgccgcctccggtgcatggggactggctgaggagccagcatgggcaactgcgtggggagacagcgccgggagaggccggcagccccgggacacccccgcaagcgagcaggacgcaatgagcccctgaagaaagagcggcttaagtggaagagcgactaccccatctactgcctgtcaccgccggtgaacctgctgctggagcacacggaggaggagagcctggagccccccgagcctccacccagcgtgcgccgtgagttcccgctgaaggtgcgcctgtccacgggcaaggacgtgaggctcagcgccagcctgcccgacacagtggggcagctcaagaggcagctgcacgcccaggagggcatcgagccatcgtggcagcggtgggtcttctccgggaagctgctcacagaccgcacacggctccaggagaccaaaatccagaaagattttgtcatccagggcatcatcaaccagcccccaccaccccaggactgatgggcccacggacccctgggaagaggccccgcctggagcactaggcccccaccctgctgctgccttccagtgctgtcattttcttcaggggccctcccctcggtgtggctggtgggtgagccgtgaagggaccctgcctttcagggcactacgcgccaccagttcccggtacccagggagcaggcagccacacacgggccttgcaaccttgtcagagaaaaggcgaacagggccctcaccctgcctgtctcccgaagcaggttcgagccacaagggccaaccaggaggcccctggagcccagatctgtcatctggtgctgccagctgtgctcactctggttttctgctcagggtctgaagcagctgctgtctccctcctctgcccccatcccctggctctcccctgggcacagtgccactcccttggaagggagggaaccacccgtgagccccagggcttgggaagcctgaggcgggcctctgcctctccctgcccccagcacaattggcagagatgaggcgggtggtggacggctgggctgtcgtggcagggtctgcacagggccatgtcctggctgtaacccaggcagtgggaggtctgcagcctggtcatggcctccacagcaggtccctgtggacagacatatctgcatatttatcaataaagccttttgctccttctcgctt

SEQ ID NO: 77698 - DNA, 918 bp, Homo Sapiens
tggatgacaaatctttctggatcttggtctcctggacccgtgttgcggtctgttgagcagcttcccggagaagaaccaccgctgccacgatggctcgatgccctcctgggcgtgcagctgcctcttgagctgccccactgtgtcgggcaggctggcgctgagcctcacgtccttgcccgtggacaggcgcaccttcagcgggaactcacggcgcacgctgggtggaggctcggggggctccaggctctcctcctccgtgtgctccagcagcaggttcaccggcggtgacaggcagtagatgggcagctggtagcgattgcccagctcatcgtagcattcacagagggtgccatgaggcagggtgatgctggctccatccaggatggcctgggccagctcgtggtcgttggcttcagcagcataggcggcagccttgagggcatcccagatctccttgcggccctcgaaggcaggcgctgtgtcccagaactcatcccgtttgctccgcagctgcccgtcagtcatggggtagtcgctcttccacttaagccgctctttcttcaggggctcattgcgtcctgctcgcttgcgggggtgtcccggggctgccggcctctcccggcgctgtctccccacgcagttgcccatgctggctcctcagccagtccccatgcaccggaggcggcggggtggtcggctgctcagcggacggcggcgtcccgggtcaatggctccggccgcccggcatcgggcgctccccgatctccccccgggggcgcgctcagccccagcgatggctccgccaaaactttgcgggccaggggagagagggaagtggcagactccccagcacggtcccaggtggccgggccaggggggcccgcgacggtgcccggccggagaccagctccgctggag

SEQ ID NO: 77699 - DNA, 418 bp, Homo Sapiens
  misc_feature (114)..(114): n is a, c, g, or t
acctgctgtcctatatgtgatgctttgaaagaaagggcatcattccaagccaagaggccccagagagggcaccgtggggtgttcaggcttctgtgaggccccagtgagatcctngtgctgtgcccccatcacctccacccactctgccctcccactagctgcccaacggatgaatcaacgccttggcagagttttccagcagggccttgcagagagtgtgtgtgacctgtgtggccactgccttggggacgggtgaggagttagcctggaacattccagcgtgggcattattgtcctgttgcaagttcagggcaaaaccaggaatccagttttgtcgatccaattgagaaaacatttcatgaacaactacttgtggcatgcattggcactcggaataaagcgcactattgtcactaaa

SEQ ID NO: 77700 - DNA, 214 bp, Homo Sapiens
ttccatttctaggggctgttatcctgtactggtagtcgtgaattcaaaaatataactttcctactgtgggctgcagtattctcatcagaagtgtagatcacgatgctacttcctgggatttatctggaccaagacgtgtgacaaatggaagtttcccgttttctgaaggaagtgttgtctgcaaaaataaaaatagtcaagagctttctcagag

SEQ ID NO: 77701 - DNA, 988 bp, Homo Sapiens
  misc_feature (17)..(17): n is a, c, g, or t
  misc_feature (107)..(107): n is a, c, g, or t
  misc_feature (361)..(379): n is a, c, g, or t
  misc_feature (730)..(739): n is a, c, g, or t
  misc_feature (747)..(864): n is a, c, g, or t
  misc_feature (866)..(885): n is a, c, g, or t
cgagtagtatttatacntttagtgaacgtggactccagactctctgtgaaccctatgagagcgcgtctgggcccggccatgtccttagcacaggggggccgccggtntgagtgagggtttctgagctgctctgaattagtccttgcttggctgcttggccttgggcttcattcaagtctatgatgctgttgcccacgtttcccgggatatatattctctcccctccgttgggccccagccttctttgcttgcctctctgtttgtaaccttgtcgacaaagaggtagaaaagattgggtctaggatatggtgggtggacaggggccccgggacttggagggttggtcctcttgcctcctggnnnnnnnnnnnnnnnnnnnctgcagtgaaagacaagctgcaaatcagccatgtgctgcgtgcctgtggaatctggagtgaggggtaaaagctgatctggtttgactccgctggaggtggggcctggagcaggccttgcgctgttgcgtaactggctgtgttctggtgaggccttgctcccaaccccacacgctcctccctctgaggctgtaggactcgcagtcaggggcagctgaccatggaagattgagagcccaaggtttaaacttctctgaagggaggtggggatgagaagaggggtttttttgtactttgtacaaagaccacacatttgtgtaaacagtgttttggaataaaatatttttttcatnnnnnnnnnnaaacaacnnnnnnnnnnnnnnnnnnnnnnnnnnnnnnnnnnnnnnnnnnnnnnnnnnnnnnnnnnnnnnnnnnnnnnnnnnnnnnnnnnnnnnnnnnnnnnnnnnnnnnnnnnnnnnnnnnnnnncnnnnnnnnnnnnnnnnnnnngggggccgccgggccccaaaaaggaaagggggagcggggcccttaccccggccccaaaagtatttttcgggactttttcttggggcggcggggcccccccacc

SEQ ID NO: 77702 - DNA, 1165 bp, Homo Sapiens
gcactgtaactatgaaaacgttgtacaaaaagcaggctggtacggtccggaatttcccgggatatcgtcgacccacgcgtcgcaccgctgctccaacggagttccagagtgtgaggagatggtctctggccttttcaagcagtggatggagaaccccaataataacccgatccaccccaacctgcggtccactgtctactgcaacgctatcgcccagggcggggaggaggagtgggacttcgcctgggagcagttccgaaatgccacactggtcaatgaggctgacaagctccgggcagccctggcctgcagcaaagagttgtggatcctgaacaggtacctgagctacaccctgaacccggacttaatccggaagcaggacgccacctctaccatcatcagcattaccaacaacgtcatcgggcaaggtctggtctgggactttgtccagagcaactggaagaagctttttaacgataatggtggtgctcgttctccttctccaacctcatccaggcagtgacacgacgattctccaccgagtatgagctgcagcagctggagcagttcaagaaggacaacgaggaaacaggcttcggctcaggcacccgggccctggagcaagccctggagaagacgaaagccaacatcaagtgggtgaaggagaacaaggaggtggtgctccagtggttcacagaaaacagcaaatagtccccagcccttgaagtcacccggccccgatgcaaggtgcccacatgtgtccatcccagcggctggtgcagggcctccattcctggagcccgaggcaccagtgtcctcccctcaaggacaaagtctccagcccacgttctctctgcctgtgagccagtctagttcctgatgacccaggctgcctgagcacctcccagcccctgcccctcatgccaaccccgccctaggcctggcatggcacctgtcgcccagtgccctggggctgatctcagggaagcccagctccagggccagatgagcagaagctctcgatggacaatgaacggccttgctgggggccgccctgtaccctctttcacctttccctaaagaccctaaatctgaggaatcaacagggcagcagatctgtatatttttttctaagagaaaatgtaaataaaggatttctagatga

SEQ ID NO: 77703 - DNA, 800 bp, Homo Sapiens
  misc_feature (41)..(41): n is a, c, g, or t
  misc_feature (687)..(687): n is a, c, g, or t
ggtctcttaatacgcatgcccaggaagctgctcctccgtgngggcctgcagtcaattaacagtttgatgatgttaacaggtgtggaccatcaggaaatggcctctccctggtgctgccaaattatcatttttagacaggcaatgcaataattgctgaaccatcacccgacattctagttggtagaggagagccctctctcctgcccagctcatgcctaattacctgtaacaatcccactgggcccaatctgtttttcactgcaaatgccttgctactaagactatacaggcatcctccctctaagcccagggactgtcgcatgagagtgtaagggcgagttttgaaggatataattaggtcaaggtcagaccctccaaatcaaggatgggtacaaagatgcctgaacaactggtaaaagaagaaaataattactgacaggaggcttgtgacaaagcctcctgggtataatactcccagttatgagttgtacagatacatattttaaattttttcagaacgcgtatgttttgtatagctaattgccataagtctgtaaccaaaaccaagattacatactaaaactaaaaacaagattgagctatggctcaatgcgtagcatagaagttaaaaataagtcagttttgtaacctcacctttggctttttgtttgttcatcttctacttanaaaacaaaataaataataattataaggggtaatgaatgcctgtccatgtctattcctatctggcttaggatattaattggctataatcttgttactctaagtccttggccata

SEQ ID NO: 77704 - DNA, 1782 bp, Homo Sapiens
ggaattcccgggatagcgaagaaagcgctttaatgtgctcctcccgctcccgggtgcgagattcctgcccagctactaggccacgactgggagtggacactaagaacacgtgagacgacaggggcagagatggggtgtcccgggcaggtagcctgggtccagcacggcagccagaaagacgaggaaaacggagctggccctgggcagggcacgaggcctctgagcctagagagtgaagatgaaggagggagccctgccctaggacaggggaggggaggaggaaggcgacctcaacccaggacccctgttcaccctgggatcaggccctcacccaggtagctcctctgtttgaaagctctaagcccttccactgtcctcttcagggctaccccgccacacagcctctccttgtcttgtcttccctttggcggggtcacacccgcacctggggtcactgcccccttcctctggtcgagggttggggggagtgtcccctcctccctcggccggagtcacagttccacacgcaggggtccttcctgcccctctcacctggggtcacaacccccctccctcggaggagggaggtcaccggccacaggcgggggcctcagtttcccacgctacagggctcacacgtgtctggcctgcgacgcgctctcccttcgccggggtcccagtttcccgcccaggagacctcggtccctcctccgaggccgccgggccctcctccagagtcccgccagtcccccagagtccaggccagtccccgccgtcacccggtgcgaacccgcgagaggcctagtgcaactggcagccccgccccggcacccgcctgctcttctcgcggggccggaccgcgagcgcgggggccgacgggtcgccgctgcgccgggccgggatggcggccaccgcgctgctggaggccggcctggcgcgggtgctcttctacccgacgctgctctacaccctgttccgcgggaaggtgccgggtcgggcgcaccgggactggtaccaccgcatcgaccccaccgtgctgctgggcgcgctgccgttgcggagcttgacgcgccagctggtacaggacgagaacgtgcgcggggtgatcaccatgaacgaggagtacgagacgaggttcctgtgcaactcttcacaggagtggaagagactaggagtcgagcagctgcggctcagcacagtagacatgactgggatccccaccttggacaacctccagaagggagtccaatttgctctcaagtaccagtcgctgggccagtgtgtttacgtgcattgtaaggctgggcgctccaggagtgccactatggtggcagcatacctgattcaggtgcacaaatggagtccagaggaggctgtaagagccatcgccaagatccggtcatacatccacatcaggcctggccagctggatgttcttaaagagttccacaagcagattactgcacgggcaacaaaggatgggacttttgtcatttcaaagacatgatgtatggggattagaaagaactcaagacactcctgcttgatacagaacaaaaagagcttaacaggaccaacagggcttaagcccagacttgacgtaacagaaatgtgccaataggtaataggtaatttttctttctctgacttgttttgttttcttgaaataacactgttgtgtggctagaaaggaaaagatttagtgtggcttgtattcatgggatacaggacagggatggggctatcatcttttcttgaatagggctaaagaagtattttaac

SEQ ID NO: 77705 - DNA, 631 bp, Homo Sapiens
gaggaggcgctggagcagggccagagccttgggccggtggagcccctggacggtccagcaggtgctgtcctggagtgcctggtgttgtcctccggaatgctggtgccggaactcgctatccctgttgtctacctgctgggggcactgaccatgctgagtgaaacgcagcacaagctgctggcggaggcgctggagtcgcagaccctgttggggccgctcgagctggtgggcagcctcttggagcagagtgccccgtggcaggagcgcagcaccatgtccctgccccccgggctcctggggaacagctggggcgaaggagcaccggcctgggtcttgctggacgagtgtggcctagagatgggggaggacactccccacgtgtgctgggagccgcaggcccagggccgcatgtgtgcactttacgcctccctggcactgctatcaggactgagccaggagccccactagcctgtgcccgggcatggcctggcagctctccagcagggcagagtgtttgcccaccagctgctagccctaggaaggccaggagcccagtagccatgtggccagtctaccagtggggccccaggagttggggaaacacaataaaggtggcatacgaaggaaaaaa

SEQ ID NO: 77706 - DNA, 489 bp, Homo Sapiens
gcggccgctgggggcaggtggcgggtgggagggagggaggtgggctttcccggtgggcgttcagaaacccccttttacctgactctctcccagtgctgagtgaaacgcagcacaagctgctggcggaggcgctggagtcgcagaccctgttggggccgctcgagctggtgggcagcctcttggagcagagtgccccgtggcaggagcgcagcaccaatgtccctgccccccggcctcctggggaacagctggggcgaaggagcaccggcctgggtcttgctggacgagtgtggcctagagctgggggaggacactccccacgtgtgctgggagccgcaggcccagggccgcatgtgtgcactctacgcctccctggcactgctatcaggactgagccaggagccccactagcctgtgcccgggcatggcctggcagctctccagcatggcagagtgtttgcccaccagctgctagccctaggaaggcca

SEQ ID NO: 77707 - DNA, 1020 bp, Homo Sapiens
ggccatcattttgtattagtttattgctcaaaacaaatgaatctttttttcccctttggaagagagagcagtgttagatccttcaaagtcaagataaaagcagaggattgcaattagggcatgagtcaccagcgagcctcagaaaaccctactgggatgcttccgaaaggccagtgctgtgcagggggcgagacacttcagggagcgggaggctccaaggacagagcttttaaagcagcagcagaagcctgggatgtggaagatctctgtctactctcctattcctgatgggagcagtcgggcaaagcacaccgctcttgactctgctctacaggccattcacataacagcaaattgctgggtttccttcatgtccctattaggaaagcaaaacataccacaaagtataccctttctcactaaccccctgcagtggaccttaaaatgacctgaaggactgaaaaggtcatagaaaaaacatggtgcttctaggtaatttctgattccttgaagtcagtcagtcttgcaagtagcaatttgccttcaggttaaggagcccaagcacgtgtgaaggacatggcatatctgtgggtccccctgcaagactcttggtgaccaatgcctttgccccccacaatgggcaagagagaggaatagtggtggcttctttagcctaacttgcacctggcaccactctgaccctcctggccccagctgcgtaagaataacttcgtgggatccctcttctgctcctcctggagtcccctgagacacagtggcctcacaactactggagcaggtatctgatcctttccttgtccccatcctccccttccttgcagcccttcttactgccctggacagaggtggctgtgtatttttcttcatattcattcttaaggctaaggtggcaagataaggtgctcagtggagagccaaattgtagattccagggctgccatttcagtgctctcacagaaaacaaatacaaaagaaatggaaaaggggcagagaagcaaa

SEQ ID NO: 77708 - DNA, 1071 bp, Homo Sapiens
cggggcatgtactataaaccagtgtgtaaaaaaagcagctggtacggtccggaattcccgggatatcgtcgacccacgcgttcggcacatctccaaggtggcagagtcagggccgggcctggccttcatcgcctacccgcgggctgtcacgctgatgccagtggccccactctgggctgccctgttcttcttcatgctgttgctgcttggtctcgacagccagtttgtaggtgtggagggcttcatcaccggcctcctcgacctcctcccggcctcctactacttccgtttccaaagggagatctctgtggccctctgttgtgccctctgctttgtcatcgatctctccatggtgactgatggcgggatgtacgtcttccagctgtttgactactactcggccagcggcaccaccctgctctggcaggccttttgggagtgcgtggtggtggcctgggtgtacggagctgaccgcttcatggacgacattgcctgtatgatcgggtaccgaccttgcccctggatgaaatggtgctggtccttcttcaccccgctggtctgcatgggcatcttcatcttcaacgttgtgtactacgagccgctggtctacaacaacacctacgtgtacccgtggtggggtgaggccatgggctgggccttcgccctgtcctccatgctgtgcgtgccgctgcacctcctgggctgcctcctcagggccaagggcaccatggctgagcgctggcagcacctgacccagcccatctggggcctccaccacttggagtaccgagctcaggacgcagatgtcaggggcctgaccaccctgaccccagtgtccgagagcagcaaggtcgtcgtggtggagagtgtcatgtgacaactcagctcacatcaccagctcacctctggtagccatagcagcccctgcttcagccccaccgcacccctccaagggggcctgcctttccctgacacttttggggtctgcctgggggaggaggggagaaagcaccatgagtgctcactaaaacaactttttccatttttaataaaacgccaaaaatatcaaaa

SEQ ID NO: 77709 - DNA, 1501 bp, Homo Sapiens
  misc_feature (52)..(52): n is a, c, g, or t
ggcaagtggcagttgtgtcctctcagctgtttaacttatgtaatggatgttntgcacctgaaaaccctataaaaatccagtgggtgtttaaaaagtccatgtgtcactaattccattcaggttctccaaccttcttcttgaatatcattgtcaccatttttactgttagaataaagaggtgacaccataaagtcctgctgataatgagagtagttcaggacagctgtgattgaaatatggtcgctatttacagtttttcagggaaaagttatacttttctatgttaataaagagctgaagtggtctacagttaatgtgacatgtagggatgatgatatttttaaaatacattttgttgctaaaaagtttttaggccagtgcaaattatgcagtagaacttgtgttgcaaaaggaattataacccatactttaaaaatgcttaatccctcatattcaatttcatcaagccttgtatacttctgcttaaatgtaattcaatccttggttgttatggcaaacagaaacccaacaaaaagacagactctggtactatggtaacagagccactttatcatttggtcaaaatttggcattatgattagctttgtagaactgacctgtttatttggcaatgctgttaaaggatcatttcggtttcagacttcaaagttgattaataaatttaatcttaactttttattcactggaatcaaaacgatggttggtactgtgtttactgtttaaaatgaagtactaaagccctgagaactgcacctcattttctttatccagaaattgtgcttatatattttcctgtcaggtttaaaaagatgttttaattcataaattattgttttcattgacattaaaagactgtgatattgaaagatgaattacgaaatttgctgagattgtttagtaaaattttgctggtcaaaaaggtgtatttctacaatttaccttttcatttttataaattgcagtcatttttttaaattttatgtaaaatgtaaaatgaaatagctatcatgaagcagaatacaatgatgaatgtataggttgagtgaataaccaatttgcagtggtggattgagaagtccagtttgatttcattgggacagactgcaaagtgtagttgtttgagcaaacacaaagaaactttgtgtttttgaagacaatcagaatgattacctttctacctctaactaatcaggtattgattgacaactttttggcattataaataaagtaaaatagatctctgcattccaaaatatgttttttagtttatttatatcctgaagaaatggtaagttttcactggaactgattacagtaaacaataatatgtccccttagtctttctgacatttttatatagattgagattgaaaaaccgtgcatttggggcagtggtattatggtcatttcgttgctattttctgttttaataaaatcctagaactagtagcaaccgagtaaagattgagtttgcaagata

SEQ ID NO: 77710 - DNA, 922 bp, Homo Sapiens
  misc_feature (558)..(558): n is a, c, g, or t
  misc_feature (676)..(676): n is a, c, g, or t
  misc_feature (683)..(683): n is a, c, g, or t
  misc_feature (801)..(801): n is a, c, g, or t
  misc_feature (803)..(804): n is a, c, g, or t
  misc_feature (858)..(858): n is a, c, g, or t
  misc_feature (896)..(896): n is a, c, g, or t
  misc_feature (907)..(907): n is a, c, g, or t
tacatcatctacagttcctcatgtagatcacttttaaagtctttttctgtaaactacactctattttataaaacacagtaaaaatcaacatcttgggacgcatctggtcatgccccctggggatggcaccacgcggcccccgtagagccgggggaggctgccctgaggagtgcaggcggcacggcagcggagcgtccccagtgcatgggcggctaaggctccccgagctgagccaagtctgacgtccctcactggcatgacacacaacagactcattcattaagattttttaaacaaaatccacctttaaaaacatatttacagacattttttctgccataggctatacttggtattgcaaaaatctgctcctcccaaactaggaggggtggcccaagggcagcccccgcctccctccagcccctgcccgaccgcatgccccctgccagggctgcggggacaggaccaaaggacgcagcccacggcgttgcacagctcaatgtgcccggctctggcaagtctcctacaaaacacgggagcccacggggggtcgggtcncgcgagctggggcccaggctgtgttgctggagcatcttcttcggaacctgggggacactgtgcaggctgaggtgctggggccgccacggggtcagccaggcagtgtctttccccaganagggtangatgctccgtgtgtgaccaggcagtgcacagtcacacatctcatgtttgaatgcatgatgcctacattcaagacgggcaggggggcggggtgggtctggagggacaagacttgtatancnnacgacactacatatactgaaactgaacaagatcatgatggtacatgggtgactntggcaacaactccgagaacatttcacagcatgctgcangaacatctaancaatggaaatctacc

SEQ ID NO: 77711 - DNA, 688 bp, Homo Sapiens
caatataagctgtgtaagtttaaattaacataaagaaaacacaattgtttgtaaaaacaattatacacattgagagaaatgataactctctctaaatttgcattctcaatattgtctgtgcaaaattgcttgtagtgtcctcaaatggatgtctgtggccaggcgcacagagaacatccccttaaatggtacatattgaggcaaggcggccagctgtctcctttaactagatggagtctggccaggtcacggctgtgctttcaaacaactggtctggatatgtgagacctgcagaacaggcagcagcagctggaaggcatcctgtatgtacgttgtactgttgcagccctctaacaatacactactgatcatggggttaaggacctcggccttcttgttgctcccaacagtggttaaagaattcgtaaacttctttgataaagaggccacttcattgcacattgcagtagttaattttattagaacttttgcttggtcctgagctggtttttcctcttcttgtccatgaagaattaattctgctactttatgaagctgctcaatacagcgcgctgttacctccgccagactttcaatggacgacatgtatacttcctctatggtcttagttttcttttcctcctttttgtcttcttgagggtcttgagatttctcttccttttctccc

SEQ ID NO: 77712 - DNA, 682 bp, Homo Sapiens
caaggcctgaggggtgcaggggctcctggcagctactgggtgaggtttcctggcacagactcacccttctttctggcaccacctctttcccttttgaagagacagcaacagccgtagcaaaagcagctgctgctcctgctatgagggtgtatatattttttacccaaagctctggaattgtacatttattttttaaaactcaaagagggaaagagccttgtatcatatgtgaacattgtatcataggtaatgttgtacagacccttttatacagtgatctgtcttgttcctgcagcaaaaatcctctatggacataggaggtgctgtgtcccatgccctcttgccctgacagtgtcccatgggcccccttctgctccctgccccctccctgctactgctgatgcactctcctctccctgcagcccctggcttcccagccttcctcctgaccccttccaacagccttggaactccagctgccaccaccctctgggtcggacactgggacccactggcccagtcttggctgctgcttacccctagccttgatgcctgcccagggacccccagccccctcccgttgccctgcagctttaacagagtgaaccatgtgtattgtacaggcgcggttgtcattgcagaaaccgctgggtggagaagaagccgataaagtctatgaatc

SEQ ID NO: 77713 - DNA, 863 bp, Homo Sapiens
  misc_feature (51)..(51): n is a, c, g, or t
  misc_feature (63)..(63): n is a, c, g, or t
caaggtcagagggagagatgcctgcatagtctcctgtgatcacacccggcncacccctccctntaggtttacagtggacttcttctgcccctcctccttttctgtccttggccatctcagcctggcctctctgatccttccatcacagaaggatcttgaatctctgggaaatcaaacatcacagtagtgatcagaaagtgagtcctgtcttgtcaccccatttctcatcagaacaaagcacgagatggaatgaccaaccagcattcttcatggtggactgcttatcattgaggatctttgggagataaagcacgctaagagctctggacagagaaaaacaggccctagaatatgggagtgggtgtttgtagggctcataggctaacaagcactttagttgctggtttacattcaatgaaggaggattcatacccatggcattacaaggctaagcatgtgtatgactaaggaactatctgaaaaacatgcagcaaggtaagaaaatgtaccactcaacaagccagtgatgccaccttttgtgcgcggggaggagagtgactaccattgttttttgtgtgacaaagctatcatggactattttaatcttggttttattgcttaaaatatattatttttccctatgtgttgacaaggtatttctaatatcacactattaaatatatgcactaatctaaataaaggtgtctgtattttctgtaatgcttatttttagggggaaatttgttttctttatgcttcagggtagagggatttcccttgagtataggtcagcaaactgtgcctgcagcctgtgtgtgcacgccccatgagccgaaaagtgggtcttatgttttcaaatggtt

SEQ ID NO: 77714 - DNA, 829 bp, Homo Sapiens
cagtcgacggtaccggacatatgcccgggaattcggccattacggccgggggacccccagccagtccgtcgatccagctgccagcgcagccgccagcgccggcacatcccgctctgggctttaaacgtgacccctcgcctcgactcgccctgccctgtgaaaatgttggtgcttcttgctttcatcatcgccttccacatcacctctgcagccttgctgttcattgccaccgtcgacaatgcctggtgggtaggagatgagttttttgcagatgtctggagaatatgtaccaacaacacgaattgcacagtcatcaatgacagctttcaagagtactccacgctgcaggcggtccaggccaccatgatcctctccaccattctctgctgcatcgccttcttcatcttcgtgctccagctcttccgcctgaagcagggagagaggtttgtcctaacctccatcatccagctaatgtcatgtctgtgtgtcatgattgcggcctccatttatacagacaggcgtgaagacattcacgacaaaaacgcgaaattctatcccgtgaccagagaaggcagctacggctactcctacatcctggcgtgggtggccttcgcctgcaccttcatcagcggcatgatgtacctgatactgaggaagcgcaaatagagttccggagctgggttgcttctgctgcagtacagaatccacattcagataaccattttgtatataatcattattttttgaggtttttctagcaaacgtattgtttcctttaaaaaagcgatcacgacgaaagcaaaagcccgaaggaggacgacaacaagag

SEQ ID NO: 77715 - DNA, 934 bp, Homo Sapiens
  misc_feature (121)..(155): n is a, c, g, or t
caaggacctttgggataattaaggaaacctccaaccttaaattaagggaggggccagcctttaagggcggtttgcagagcgaacgacgagcgcagcgatcagtgagcgaggaagcggccgnnnnnnnnnnnnnnnnnnnnnnnnnnnnnnnnnnncagtcgacggtaccggacatatgcccgggaattcggccattacggccggggacccccagccagtccgtcgatccagctgccagcgcagccgccagcgccggcacatcccgctctgggctttaaacgtgacccctcgcctcgactcgccctgccctgtgaaaatgttggtgcttcttgctttcatcatcgccttccacatcacctctgcagccttgctgttcattgccaccgtcgacaatgcctggtgggtaggagatgagttttttgcagatgtctggagaatatgtaccaacaacacgaattgcacagtcatcaatgacagctttcaagagtactccacgctgcaggcggtccaggccaccatgatcctctccaccattctctgctgcatcgccttcttcatcttcgtgctccagctcttccgcctgaagcagggagagaggtttgtcctaacctccatcatccagctaatgtcatgtctgtgtgtcatgattgcggcctccatttatacagacaggcgtgaagacattcacgacaaaaacgcgaaattctatcccgtgaccagagaaggcagctacggctactcctacatcctggcgtgggtggccttcgcctgcaccttcatcagcggcatgatgtacctgatactgaggaagcgcaaatagagttccggagctgggttgcttctgctgcagtacagaatccacattcagataaccatttgtatataatcattatttggagggttatctaacaacgtattgtttcctttaaaagcc

SEQ ID NO: 77716 - DNA, 526 bp, Homo Sapiens
  misc_feature (14)..(14): n is a, c, g, or t
tccccaccacactntactccacattcctcataccgtaccataccgtacaccatgccatagcataccacttacagttttacttaattctataattatattgtttctattaatggttttaaatataatcaacacaattatactttataacaaatatcagaatccttgtcattattatatgcctctaaattattaagagatcataaataacaacatatcaattctgatgctaagaaatcctctgtctctgctagtttctgccaccttcaggtgtttgtattatataaacacagtagtcccacccctgggctgatgttttccaccctctgtgaaatcagcacaattaggttacatccttagtgattttattatggtgttattttaatatttattataacaaggaatgctgctattaaaacaaaaaattgtgctctctgtttacatttgtgaaataggacaatataagaagcacattagtacaatcatttgagttatattaagtttgtgcctataataaatgccaatcctg

SEQ ID NO: 77717 - DNA, 712 bp, Homo Sapiens
  misc_feature (71)..(71): n is a, c, g, or t
  misc_feature (329)..(329): n is a, c, g, or t
cgagtgacccacccaccgctgcccgtgacatcacccgctcgccagcccgcccgcgggctcgcccgccagcnccctgcccggccgaaccgggccaccctcccccggagacgcggagagcggcggcaggaggcgtagggccgggtcgcgcggggccaagtgtttggcacccgggtgtgacattgtgcagctcggacgctgtgtcggaatgagacaccggcttgtgtcattgtctgtgacatcatgtgtgactccggccgccggaacccgacgcggcagcgcgggtgctgttggcacaaacacaggcagagggggccctcctccccacgctntgcgtgcttccggcgagcaaagccccgcccaaggtgtctcctagctggggaaccagtaccggcccctggtgcactgtccagctctggagagataaaaggaagagctggtgccttccagtggactacttcatcctagaagccctcgggatgcacgtttcactggaagaaaggcctagcttgggtaggtccctagaaagaggggatacccctggaggagggggtatcctattacccccactctctaaaaggaaggatggaaatgtacatgctacccaaggacattcttctagaagaagcctggctctttatatatgttgtcattttatcctcacagcaactcccaagagatgttttacaaataaaacaggtctcagcaaggctaa

SEQ ID NO: 77718 - DNA, 560 bp, Homo Sapiens
gcacgaggctttttttatggtgtttaatttgtggttggctgcaactgtgtatcatgtatatggaacttgtaaaaaagttctcgacattcagatcttaagagatgaaatcacttttacctataaaaaccacttttattgcggtttgactgcattgagctctaggatattaaatgatatcactaatattttgcatgtaatttgctcatttgagtgagggcactttttttgtacatatgatggggccaatgcacaatacttttatcacaatcaactttttctttgtatccctatttcaatgagcagtcagtctcaagaggttactgcacttcagttctaactagacatttgtactaaggtatttcagttatgtaaactcagcctgggcactttctgataactgtaaaatgttttataagatcatgattattgaagatacattttggaaaattttaaatgttcgtgagcagcttaactacttttgtatctagccttttttaagtatcttgttacatttacttttttaaataaagaaattacagaagaaatgtcaagtaatattg

SEQ ID NO: 77719 - DNA, 778 bp, Homo Sapiens
tgcggccgcagcctggctcagatgctagacgaggacactgtggtgggtgtgtggcgcgtggccaagctcttccgcctggcgcggcttgaggaccagtgcactgagtacatggccaaggtcattgagaagctggtggagcgggaggacttcgtggaggcggtgaaggaggaggcagcggctgtggcagcccggcaggagacggactctatcccgctggtggacgacatccgcttccacgtggccagcacggtgcagacctacagcgccatagaggaggcgcagcagcgtctgcgggcactcgaggacctgctcgtgtccatcggtctggactgttgagcccctggctgggcagccccaggggccaggagctctcttggagacaagcatgtgtatgcgtttgtgtgcagctcttcttcctgctccctgcacattgagggcttcatggggggtgcgaggggctcagtggggcttctcttccctccatgagcctggagaccccaggggaggatccatttgggatgagccccctccccccaatgcacaagccagcccccaagaccctgggggtggacaccactcagggaaacctggggtgggggtgggctttggtcttagcactttccttctccagatcccccctacccaccccagtcccaaatccagtcctctggcccttgcctagccctgaattgcttctctaagctggtgttcccatgcacagggccattcaggaagggctgggggagtgtgtgtggcaataaagcttgaaggcaccgtg

SEQ ID NO: 77720 - DNA, 988 bp, Homo Sapiens
  misc_feature (158)..(158): n is a, c, g, or t
gcatctgagccgccagttgtatggacaccggtttcctcataccgtagaggaggagtcgacaatgccagacccagaagctcagacacacatctgtgttttcaggatctgcagcagcagccacagacctgtgtccacccacacacccagatcttctgagnctggctccttcccactctctcactccttgaaacatgtttttccctccagaccttttccttcaccttgtccccaccgcagacaggaccaggatttccatgatgttttccatgagtcccctgttgtttctgaaagggacgctacccgggaagggggctgggacatgggaaaggggaagttgtaggcataaagtcaggggttcccttttttggctgctgaaggctcgagcatgcctggatggggctgcaccggctggcctggcccctcagggtccctggtggcagctcacctctcccttggattgtccccgacccttgccgtctacctgaggggcctcttatgggctgggttctacccaggtgctaggaacactccttcacagatgggtgcttggaggaaggaaacccagctctggtccatagagagcaagacgctgtgctgccctgcccacctggcctctgcactcccctgctgggtgtggcgcagcatattcaggaagctcagggcctggctcaggtggggtcactctggcagctcagagagggtgggagtgggtccaatgcactttgttctggctcttccaggctgggagagcctttcaggggtgggacaccctgtgatggggccctgcctcctttgtgaggaagccgctggggccagttggtcccccttccatggactttgttagtttctccaagcaggacatggacaaggatgatctaggaagactttggaaagagtaggaagactttggaaagacttttccaaccctcatcaccaacgtctgtgccattttgtattttactaataaaatttaaaagtcttgtgaatc

SEQ ID NO: 77721 - DNA, 862 bp, Homo Sapiens
gagccccctcagttagacggcaaaggttcgggaacaattccaagggagaggtgagctgccaaccagggaccctgaggggccaggccagccggtgccagccccatccaggcatgcttcggagccttcagcagccaaaaaagggaacccctgactttatgcctacaacttcccctttcccatgtcccagcccccttcccgggtagcggtccctttcagaaacaaacaggggactcatggaaaacatcatggaaatccctggtcctgtctgcgagtggggacaaaggtgaaggagaaggtcttggagggcagagaacagtgttttcaaggagtgagagaggtgggaagggagcccagcctcaggaaagaatctggcgtgtgtggggtgggaccacaagggtcttgtggcctggctgcctgcaggagtctctgaagaagcatcaggaatgtggctgctcctggagcctttcctgggcttcttggacatgtgtctggagccctccctccctcttagcgggtgatgggaggcagagcccgggctgtctcagtgactaagcctgggcggggccttcagggatggtctctgctctgcccatttccatttgggggcccacagggcagggtctgtgctatcactcactcccttgcaggccctctgggcctcagggtccaaagacaagttagtccattggcagggactgtctaaggtgctctgctggtaaggactgtgaggctgcatccaggggctggagagaagggcctcaggtcaatgagtgttgtcagggggacaggtattccttacctccctctttcctttcacagatgggagtatgttggtggcttgatggtggaactaggatcagaa

SEQ ID NO: 77722 - DNA, 685 bp, Homo Sapiens
  misc_feature (73)..(73): n is a, c, g, or t
gctgaacatgatactctcctccagcaatggagtatacccacagaaagtccacccttgtgaatagatgtggggngaccctggatccagggaggagctctggtagggagggttggggtgaagccctggttcctgcctttctctgactgcccctgacttagctattgattccctgccatttctccttcctctggccctacctaccttatagggatggtgagatagcacagcagaaatattctgagctcacgaaaggaatgccgtcacttagatctgagaggtactatacccctttcaaagaagatcccacatgggaagacctccacttgggtaactgggaaattagaggtgactacttgccccactgaaatgattttccctcagcaaaaggacttcctgcagagttgttttaaacaataagcctcccttagagcattcaaaattactcaatgtatagttagttaaaactcccaacctatcagtctcattactggcctgttccaaaggcattggtgaaggtctgaggaagatgggtaagttggtgatttggggttatcttgcaagaaggacagtgatggggcctggtcttcttcaggggacctatttctcagttcagagagctgacctcatgattaatgcaacttggaaaggtgcacgagttctgtgcataaattctatatcctcaggc

SEQ ID NO: 77723 - DNA, 650 bp, Homo Sapiens
  misc_feature (71)..(84): n is a, c, g, or t
  misc_feature (544)..(544): n is a, c, g, or t
aacatgaagggtagtattaagtctaagcaagaacactgggcctgcaccaaaataaacaaacacacagtgannnnnnnnnnnnnncttagcacagaggcagccagtattacacagcccctctctgtgttgtgaccctagcttgctgcttctggctgtgccaaatgctaagcaggggtttcactcagggcagcccgggaggcaaggtctgagagtggaagctcctgggagcctgagctctctctgcctctcgttagctgtggctttggccatcaactggaactatgtcattatttataaaacaggagcaatcacagggctgtggtgagaatcacatgaggtgacacatgtgaaatggtcctttcccctaagacatatataattgtaacaaggaacaaaatttacatagaaaataattacagaacaacgtaggaccatgtcttcatttctccctggagcggatgtaaaataaggtgattgatttgagcaagcatgttatgaatatttagaaatgtcttctagggaagcaagctggcgctcaccgatnttggtttgccaggcatatcagaaggcactttgtgacaggtgcagtagggacgcggagtgatctcttcacgtgtaggcaatgcccagcccacacctaggccttgcct

SEQ ID NO: 77724 - DNA, 602 bp, Homo Sapiens
ggcacgaggcagctcttctccagatcttgcccacgtgtcctcccccgccagccttccacagccatggcagcctacggccagacgcagtacagtgcggggatccagcaggctaccccctatacagcttacccacctccagcacaagcctatggaatcccttcctacagcatcaagacagaagacagcttgaaccattcccctggccagagtggattcctcagctatggctccagcttcagcacctcacccactggacagagcccatacacctaccagatgcacggtgaatacaacacacacaatggaccttccacaccagcgaaagagggagacacagacaggccgcaccgggcctccgacgggaagctccgaggccggtctaagaggagcagtgacccgtccccggcaggggacaatgagattgagcgtgtgttcgtgtgggacttggatgagacaataattatttttcactccttactcacggggacatttgcatccagatacgggaaggacaccacgacgtccgtgcgcattggccttatgatggaagagatgatcttcaaccttgcagatacacatctgttcttcaatgacctggagga

SEQ ID NO: 77725 - DNA, 2433 bp, Homo Sapiens
  misc_feature (1581)..(1582): n is a, c, g, or t
ataaggctaggtacgaggctgggtgttgaattcggcacgaggggcagcggcaacggcagagacagcaacgtgcccgccgcagtcagcccggcctcgtcggacccgcaccggcccgcccgcccgcccgcaccgcgtcggggcgccctctccactgcgcgcggatacaaggaaatggtagaactagtgatctcacccagcctcactgtaaacagcgatggtctggataaactgaagtttaaccgtgctgacgctgctgtgtggactctgagtgacagacaaggcatcaccaaatcggaccccctgagagtgtcccagctctactcgcgagatcttgcccacgtgtcctcccccgacagccttccacagccatggcagactacggacagacgcagtacagtgcggggatccagcaggctaccccctatacagcttacccacctccagcacgaagcctatggaatcccttccttcagcacctcacccactggacagagcccatacacctaccagatgcacggcacaacagggttctatcaaggaggaaatggactgggcaacgcagccgggttcgggagtgtgcaccaggactatccttcctaccccggcttcccccagagccagtacccccagtattacggctcatcctacaaccctccctacgtcccggccagcagcatctgcccttcgcccctctccacgtccacctacgtcctccaggaggcatctcacaacgtccccaaccagagttccgagtcacttgctggtgaatacaacacacacaatggaccttccacaccagcgaaagagggagacacagacaggccgcaccgggcctccgacgggaagctccgaggccggtctaagaggagcagtgacccgtccccggcaggggacaatgagattgagcgtgtgttcgtgtgggacttggatgagacaataattatttttcactccttactcacggggacatttgcatccagatacgggaaggacaccacgacgtccgtgcgcattggccttatgatggaagagatgatcttcaaccttgcagatacacatctgttcttcaatgacctggaggattgtgaccagatccacgttgatgacgtctcatcagatgacaatggccaagatttaagcacatacaacttctccgctgacggcttccacagttcggccccaggagccaacctgtgcctgggctctggcgtgcacggacggcgtggactggatgaggaagctggccttccgctaccggcgggtgaaggagatgtacaatacctacaagaacaacgtaggtgggttgataggcactcccaaaagggagacctggctacagctccgagctgagctggaagctctcacagacctctggctgacccactccctgaaggcactaaacctcatcaactcccggccaaactgtgtcaatgtgctggtcaccaccactcaactaattcctgccctgcccaaagtcctgctatatggcctggggtctgtgtttcctattgagaacatctacagtgcaaccaagacagggaaggagagctgcttcgagaggataatgcagagattcggcanngaaaagctgtctacgtggtgatcggtgatggtgtggaagaggagcaaggagcgaaaaagcacaacatgcctttctggcggatatcctgccacgcagacctggaggcactgagcacgcccctggagctggagtatttatagcaggatcagcagcatctccacctgccatctcaccctcagaccccctcgccttccccacctccccaccgagaactccagagacccagatgttggacaccaggaaggggccccacagccgagacgacgtgtccagtgaccatctcagaagccgtccatcagtccaaatgggggttctgagaaggaaagtacccaacattggcttcggagtatttgactttggggaaaagggctggctcggagtctagactcttctgtaagactcacagaacaaaagcaaggaattgctgatttggggggtgcctggtgatgaggaggggatgggtttgtcttgtcttctttttaatttatggactagtctcattactccggaattatgctcttgtacctgtgtggctgggtttcttagtcgttggtttggtttggttttttgaactggtatgtagggtggttcacagttctaatgtaagcactctattctccaagttgtgctttgtggggacaatcattctttgaacattagagaggaaggcagttcaagctgttgaaaagactattgcttatttttgtttttaaagacctacttgacgtcatgtggacagtgcacgtgccttacgctacatcttgttttctaggaagagggggatgctgggaaggaatgggtgctttgtgatggataaaaggcattaaataaaaccacgtttacatttaaaa

SEQ ID NO: 77726 - DNA, 998 bp, Homo Sapiens
  misc_feature (94)..(94): n is a, c, g, or t
  misc_feature (132)..(132): n is a, c, g, or t
  misc_feature (139)..(139): n is a, c, g, or t
  misc_feature (146)..(146): n is a, c, g, or t
  misc_feature (176)..(176): n is a, c, g, or t
  misc_feature (256)..(256): n is a, c, g, or t
gtcagccccatcctcacaggcgaacggatgagcagatctcatgtgctgaagctgcccagcccgtagtgtgggcccccgcgtccggccctgcagnttccctaccgctgtctcagcccggagaccagtgccagnttgctgnctgggcnaccacgcccgccccggagagtgaagtacancaaaggcctgacctgctccagcatcactatcttgagccctaaagagtgtgagtcttctacccctggcgtggcaccaaacnaacatgatatgtgctggactggaccgggggccaggacccttgccagagtgactctggaggccccctggtctgtgacgagaccctccaaggcatcctctcgtggggtgtttacccctgtggctctgcccagcatccagctgtctacacccagatctgcaaatacatgtcctggatcaataaagtcatacgctccaactgatccagatgctacgctccagctgatccagatgttatgctcctgctgatccagatgcccagaggctccatcgtccatcctcttcctcccccagtcggctgaactctccccttgtctgcactgttcaaacctctgccgccctccacacctctaaacatctcccctctcacctcattcccccacctatccccattctctgcctgtactgaagctgaaatgcaggaagtggtggcaaaggtttattccagagaagccaggaagccggtcatcacccagcctctgagagcagttactggggtcacccaacctgacttcctctgccactccccgctgtgtgactttgggcaagccaagtgccctctctgaacctcagtttcctcatctgcaaaatgggaacaatgacgtgcctacctcttagacatgttgtgaggagactatgatataacatgtgtatgtaaatcttcatggtgattgtcatgtaaggcttaacacagtgggtggtgagttctgactaaaggttacctgttgtcgtgatctgaaaaaaaa

SEQ ID NO: 77727 - DNA, 714 bp, Homo Sapiens
taagaccacccagctgtccctggttctcatcctagggccttctttgcttccaggtcaggggacctgcttcaatgagaaagcaactgaattgaggctaggagaggtagggagagctgagttctgacttcacctgtgcagaactctctgcccccatgttacctggactggaacagactgtgaatatagcagaaggttccaagaactctggtgtctgacctagaagaggcacagttctctctactggaaagaaaacgatgtagccgattgcacaagggtgccaagggaagacccaggatggcccatcaaaggaacctgggggaggatgcaggaggctgaagggatgcacctggcatttctctcactgtgctcttaccgcatcagcaacccccaacttttgggcctactctgccccccatgcgtgaataccctgcttggatgctgtgcttttccggtttgtctctaagcccctttctccagggcatgttggtttccctggcctctcagtgtcctaactggagcccagagtgccttgttctgagccaggagacggctgagcactggccctccacacctaagcgtcctttacattaacttattggtcttgtataacacctggtgccattgccaagtggctgtgtcctcagctacagagctggaattgtgtggggtttagtgctaaatacttcaataaagtctgttttttgtgattggctg

SEQ ID NO: 77728 - DNA, 1392 bp, Homo Sapiens
  misc_feature (66)..(66): n is a, c, g, or t
  misc_feature (81)..(81): n is a, c, g, or t
  misc_feature (136)..(136): n is a, c, g, or t
  misc_feature (149)..(149): n is a, c, g, or t
  misc_feature (157)..(157): n is a, c, g, or t
  misc_feature (164)..(164): n is a, c, g, or t
  misc_feature (168)..(168): n is a, c, g, or t
  misc_feature (190)..(190): n is a, c, g, or t
  misc_feature (196)..(196): n is a, c, g, or t
  misc_feature (224)..(224): n is a, c, g, or t
  misc_feature (245)..(245): n is a, c, g, or t
  misc_feature (247)..(247): n is a, c, g, or t
  misc_feature (265)..(265): n is a, c, g, or t
  misc_feature (271)..(271): n is a, c, g, or t
  misc_feature (274)..(274): n is a, c, g, or t
cttgtgtgaactaggactcttgagacgggacccaagtagtatcccagaccccacctgctcatcccnacctgtccggtgtcnccatcagggacctccaggtgcatggatggtgctgcccctcatgctgcccagcttntactcagagctcntcacgctntacctgntgcntcatgagcgggaggacagcttntacagncagggcatgccaacttgagcctctttcntgatacccaattgctcgagtncntggatgtgcagaagcacntgtgcnccntcaaggacctcacgctgacgagcaatcagagtactccctggtcagggacaagtgttcctgtcagccaccgagtgcctgcagaagatcatgaccacggtggacccacgggagaagctggaggtgctggagaggacatacggggaaattgagggcacggtgtcgagggtattgggccgggagtacaagctgcccatggacgacctgctgccacttctcatctacgtggtgtcgcgcgcccgaattcagcacctgggagccgagatccacctgatccgtgacatgatggaccccaaccacacaggaggcctgtatgacttcctgctcacagccctggagtcctgttacgagcacatccagaaagaagacatgaggctgcaccgcttacctggccactggcactccagggagctctggtagcctggcctttcctggacagactgaagagctgagcagggcactgccagcctgtccctcattacccaaggcaaggggcaggacaggccctcagaagcagctcttggaggagatgagcattttgttttgcacaggaagatgctgctgctgccctgactgggatgagggtgaggggtgacgggtgtggccctggatgtggtggttttcccttggccactagcccatcttcaatgaccccttaatctgcagcagctcacaggctgggggtgaggagtccctggcttctcttagcctgagcctttctcccaagttccagagcctctccgggcctcagtgctgccatctgtacaatggtggagtgagtacgctgtaaaggaccttccattcattttgctgaattccagagtccttttggaaaactgactttagtctgctgggctgtattgacctctggcaggctcgaagcctcactgggtatgcagtcaacaggatgggcctggagatccgtgaactgcaggccacgtacccatgacgtaaacggcggcactggagcaagctggggcggggggtgggtaaaccctcactgccagcaggccccaagtggcttgtaaatcattttcctgtgatgtctgtgggcctgcgtggggacaacaggggcacatgacatctgcctgggccctgaccaataaaccctcagacccagg

SEQ ID NO: 77729 - DNA, 573 bp, Homo Sapiens
  misc_feature (178)..(178): n is a, c, g, or t
cttccccccagtcttagggggtggcctggctgttcccttcaacggcaacgctctgcctccattgttggcctcctctgcagggagggactgtctgagcacctgcccgtgtctgtgcagcatggcacactgacgtcaggcccacgtgcatgcccaggtggccagtcacacgccaggtgcntccctcagtgttggccaagtgagaggagcacaccttccgggcgttcagacacctccccgtggcagacaccgttcgttgctaccaaacagccacctccttcctaatgggctcccatttttcagtgctgggcaaaggtcccttgatcttggagttgcagcctctttctctccaaggagggcggtgaccagcctgagccagtcaatccagtgattggttcaggagtagcctgtgaccaggagtcctggtagtgaacgactggggcagccctgggggtgaggaccttgcgcagccgtcacaggccctgattggacactgggcagctgctaacccagtgtctccagctgcctacctggagagctccaagcgtaagaaaataaaccctgcctgttgaagcc

SEQ ID NO: 77730 - DNA, 453 bp, Homo Sapiens
  misc_feature (147)..(156): n is a, c, g, or t
  misc_feature (301)..(351): n is a, c, g, or t
taaagtgtcagtaattctgatttcggttttctcttttagaagttttgatttccacagacttacaaagctaaggaagttttatgtccttgctctggctacactgcagtgttactgaatatcacctgcacaacctttactgcttgcagnnnnnnnnnncctgttgctttgtacatgatccgttattcaaatggccttataggcattcaataaaggtgaaatgttaaatacaaaatcacttgtctattaaattttattcaaggttctatataagatctgataaatggaactttgtgatggaaannnnnnnnnnnnnnnnnnnnnnnnnnnnnnnnnnnnnnnnnnnnnnnnnnntggctagttttagagttttatattttaattttaattaaatagacgtgtctagtggcaccatattgtacaatgcagttctcattcaataaatcttaagtactt

SEQ ID NO: 77731 - DNA, 853 bp, Homo Sapiens
gggagactgagcccaggttgatttcaggcggacaccaatagactccacagcagctccaggagcccagacaccggcggccagaagcaaggctaggagctgctgcagccatgtcgcccctcagcctcctcattctgggcctgctcacggcagtgccacctgccagctgtcagcaaggcctggggaaccttcagccctggatgcagggccttatcgcggtggccgtgttcctggtcctcgttgcaatcgcctttgcagtcaaccacttctggtgccaggaggagccggagcctgcacacatgatcctgaccgtcggaaacaaggcagatggagtcctggtgggaacagatggaaggtactcttcgatggcggccagtttcaggtccagtgagcatgagaatgcctatgagaatgtgcccgaggaggaaggcaaggtccgcagcaccccgatgtaaccttctctgtggctccaaccccaagactcccaggcacatgggatggatgtccagtgctaccacccaagccccctccttctttgtgtggaatctgcaatagtgggctgactccctccagccccatgccggccctacccgcccttgaagtatagccagccaaggttggagctcagaccgtgtctaggttggggctcggctgtggccctggggtctcctgctcagctcagaagagccttctggagaggacagtcagctgagcacctcccatcctgctcacacgtccttccccataactatggaaatggccctaatttctgtgaaataaagactttttgtatttctggggctgaggctcagcaacagcccctcaggcttccagtgagtccccctcttgctttttg

SEQ ID NO: 77732 - DNA, 1380 bp, Homo Sapiens
  misc_feature (769)..(889): n is a, c, g, or t
  misc_feature (906)..(966): n is a, c, g, or t
  misc_feature (971)..(1122): n is a, c, g, or t
  misc_feature (1134)..(1145): n is a, c, g, or t
  misc_feature (1162)..(1286): n is a, c, g, or t
gaggccgatgaagttctgctgttcgaaagagctacattcttggttatttcccactaccagtgcaaagagcagcgcgacgtccaccggtttgagaagatcagcaacatcatcaaacagttcaagctgagctgcagtaaattggccgcttccttccagagcatggaagttaggaattccaacttcgctgctttcatcgacatcttcacctcaaatacgtacgtgatggtggtcatgtcagatccgtcgatcccttctgcggccactctgatcaacattcgcaatgcccggaaacactttgagaagctggagagagtggatggccccaagcacagtctccttatgcgttgaatattgccaaatgctctttctgaaaatgctgaattgccttttttgtttgcatcctttatttttaatattcataatgtcgtgtgcttaaaagtgggctttgaagtgtgtgctgcttactcctttcatctttctccccgcttccccagtctttaaacattggacgctatttactcagctacccagtagagcttgaagctgacctttctgagaagttggtatggtgtaacactaaagtaggtggttcgtgtgtgttctcattacctggttatgatagatatgcacatcaaagcctttaccagtatcttcctgtattccgtatcagattgcaaagacggaatgttactattttatcagcaaggtattaaaatgcatttataaattcttcttggcttcattcatgaataaacgtgttagcaatttnnnnnnnnnnnnnnnnnnnnnnnnnnnnnnnnnnnnnnnnnnnnnnnnnnnnnnnnnnnnnnnnnnnnnnnnnnnnnnnnnnnnnnnnnnnnnnnnnnnnnnnnnnnnnnnnnnnnnnnnnccttttggggccccccnnnnnnnnnnnnnnnnnnnnnnnnnnnnnnnnnnnnnnnnnnnnnnnnnnnnnnnnnnnnntgggnnnnnnnnnnnnnnnnnnnnnnnnnnnnnnnnnnnnnnnnnnnnnnnnnnnnnnnnnnnnnnnnnnnnnnnnnnnnnnnnnnnnnnnnnnnnnnnnnnnnnnnnnnnnnnnnnnnnnnnnnnnnnnnnnnnnnnnnnnnnnnnnnnnnnnnnaaatttaatttnnnnnnnnnnnngggcactttttgggaannnnnnnnnnnnnnnnnnnnnnnnnnnnnnnnnnnnnnnnnnnnnnnnnnnnnnnnnnnnnnnnnnnnnnnnnnnnnnnnnnnnnnnnnnnnnnnnnnnnnnnnnnnnnnnnnnnnnnnnnnnnngggggaaaacacggggggacaaaaaaagtttccctatttggcccccgttttaaaaacaacagggggggaacaccctcccccggggttgtggggg

SEQ ID NO: 77733 - DNA, 1288 bp, Homo Sapiens
  misc_feature (1116)..(1116): n is a, c, g, or t
  misc_feature (1272)..(1272): n is a, c, g, or t
ccagtaactataacggttctaaggtagcgaggcctgggtggcgaattcggcacgaggtggcggggacgcagcggctccctcccggaaagcgagcgtatctcccgagccgttgccactgacagccgcgggcgctcccatctgagtaagagccagcccgtccgcggcctctccagccccgggttcgcgctctcgactctcctgcctgcccagctgcgcggcggagcggagcgaggcgcggcctgcgagtccccggcagcccccgacccctccctcggcgctgcgtgtaggccgcgccctcaggcccagtccgcggtgccccggcgggtgatgccaaatacagccatgaagaaaaaggtgctgctgatggggaagagcgggtcggggaagaccagcatgaggtcgataatcttcgccaattacattgctcgcgacacccggcgcctgggggccaccattgacgtggaacactcccacgtccgattcctagggaacctggtgctgaacctgtgggactgtggcggtcaggacaccttcatggaaaattacttcaccagccagcgagacaatatcttccgtaacgtggaagtttgatttacgtgtttgacgtggagagccgcgaactggaaaaggacatgcattattaccagtcgtgtctggaggccatcctccagaactctcctgacgccaaaatcttctgcctggtgcacaaaatggatctggttcaggaggatcagcgtgacctgatttttaaagagcgagaggaagacctgaggcgtctgtctcgcccgtggagtgtgcttgttttcgaacgtccatctgggatgagacgctctacaaagcctggtccagcatcgtctaccagctgattcccaacgttcagcagctggagatgaacctcaggaattttgcccaaatcattgaggccgatgaagttctgctgttcgaaagagctacattcttggttatttcccactaccagtgcaaagagcagcgaacagtccaccggtttgagaagatcagcaacatcatcaaacagttcaagctgagctgcagtaaattggcccgcttccttccagagcatggaagttaggaattccaacttcgctgctttcatcngacatcttcacctcaaatacgtacgtgatggtggtcatgtcagatccgtcgatcccttctgcggccaatctgatcaacattcgcaatgccccggaaacactttgaagaaagctggaagagagttgaatgggccccaagcacagtcttccctaatgngttgaatattggccaa

SEQ ID NO: 77734 - DNA, 994 bp, Homo Sapiens
  misc_feature (50)..(50): n is a, c, g, or t
  misc_feature (55)..(55): n is a, c, g, or t
  misc_feature (91)..(92): n is a, c, g, or t
  misc_feature (97)..(178): n is a, c, g, or t
  misc_feature (180)..(180): n is a, c, g, or t
  misc_feature (182)..(182): n is a, c, g, or t
  misc_feature (205)..(207): n is a, c, g, or t
  misc_feature (213)..(213): n is a, c, g, or t
  misc_feature (344)..(344): n is a, c, g, or t
tcacacggaacagtatgacagatacgattaatcgactcatataggattgnccctngagccagaattcgcacgaggctgctgtagcagagcnntcagnnnnnnnnnnnnnnnnnnnnnnnnnnnnnnnnnnnnnnnnnnnnnnnnnnnnnnnnnnnnnnnnnnnnnnnnnnnnnnnnnngncncagggtaaaagccaacgtgtatnnntatccntagcctcagaattcacacgccgttgcctccaccatgctctgtttgatacagcccagctctgattggaaggggctggggctgcccgtgctgactcttcaaaggcatcccatcctgcagatggtgttcacagngagagtttgtgggggccggcactccctcatctactggggctcattctggaagaaggtccagaagaattggagacccctgcccctcacccaaactttggaggtggcagggtgaacagcaggccaagttcaggtcccaagacaggccaaggccagtgcggtttcccttccaatgcctcagtttacctgtattcagaagacagtctaggaagagttgagcagagttccctctaaaagagtagggagctgataacagtcccaagccctcctctttctctatgccaaaatcatttcccttatcctgagatgggggtgagtggatggatggtgtactgaggggcctctgccctgcccagagcccccaccatcgtagtgggggcaggggacttcctgcccacaaccccctccaaccctcacctggcgtgcccgggtcaccagcaacagcagcggcgttccatcgctcccaagatctgggtgaaggggagaacctgccatcttatccctacccccccggggccctcaagcttattttcttgttgaagaaacacaaaaccctcgagattcatgtactgtatgttggagaaaaaaaattacctaatgttcccccaaaaaagacagtatattttgtactttgtaaagtgttaattaaaatg

SEQ ID NO: 77735 - DNA, 1005 bp, Homo Sapiens
  misc_feature (203)..(203): n is a, c, g, or t
  misc_feature (236)..(236): n is a, c, g, or t
  misc_feature (245)..(245): n is a, c, g, or t
  misc_feature (931)..(939): n is a, c, g, or t
ttatagaccagcgatcccctttatcggaaggtttgaaagcagcacccagagtagtgacacagcctgcaaagtgcgccacctcagacccagtacgtgtcccacagtggacacactcacacctccaacacacccacgcgcagcatgtgtacacgcatgtacacacgcatgcatgcacagccagatgccactcagcacagatgtgncagagggattgtctgatcctgctgaaagccatnaaggagaancgaatttcccagtgcccggctgcaaagagagccttataggggccctgtttcctgggcatgcgcttcctttgccagccaacccccacttgcccaagtcactggtgcaataacttttctgccttcctcagagcagagaaattgggaattgtgttaggtgggtgtgggcagctctgctgagccaagcagacacggatgtcccctcttctgggaggagggtagtgctcccaggcctcaggagtccagacagagacccccaaagcctgactgccaacagaaaccctctcctagtgaggggcaggtgggtgtgccccaggtccccacacccacagggaggcttcacacactgcccagtaccggggatgccaggaggcaggcccctctgctgctgccactgctgccaacactgcccagcttgtgaggccaggaggagcccctgtcccactcggtgctgctgctcttctgacccctgctgtgaggaatgggattcttggtcgaaaaaattggttttccttttttgtataaatgaaaagaatccaggagaagctgccaccctcccctcccagcgtgatgcgctaccttgcttcggcgtcttgtcgccctttccgcctttggtccagggacagcccagcagatcctcctggttctgacctggggggtgtttgcatcacccccttttacttgtattnnnnnnnnntgatgggttgaaaatgtactgaggattaaaaatgtacttttttataaataaagtgtttaaaacaaa

SEQ ID NO: 77736 - DNA, 922 bp, Homo Sapiens
tgggacagggactcccttctcgtgtcctgtgcagcgtcggcccaggaggtagcagagcagtatatgcacatctgggtgtgccctcctgcatgtccccacacatctgtcattcctgtctttgcacacctatgtgactcccgcatgtttgtgtccttatgtgtcccatgcatgctccccatctgaccttgcgtgttctcgcgtgtctgtgtgcggccagtcctgccttcactctctcatgggtggccctggcagcatgtctgcctccccagcaggtgagctcaggagataagatggaagatgcaacagccaatggtcaagaagactccaaggccccagatgggtccacactgaaggccctgggcctgcctcagccagacttccacagcctcatcctggacctgggtgccctctcctttgtggacactgtgtgcctcaagagcctgaagaatattttccatgacttccgggacgattgacggtggaggtgtacatggcggcctgccacagccctgtggtcagccagcttgaggctgggcacttcttcgatgcatccatcaccaagaagcatctctttgcctctgtccatgatgctgtcacctttgccctccaacacccgaggcctgtccccgacagccctgtttcggtcaccagactctgaaacatgctacatcctgcccaagactgcacctctggaggtgcagggcacccttgagaaggcccctcacccctaggccgcctccaggtgctacccaggagtcccctccatgtacacacacacaactcagggaaggagcgccctgggactccaagttcagcgctccaggtctgggacagggcctgcatgcagtcaggctggcagtggcgcggtatagggagggaactggtgcatattttagcctcaggaataaagatttgtctgctc

SEQ ID NO: 77737 - DNA, 1142 bp, Homo Sapiens
  misc_feature (456)..(456): n is a, c, g, or t
ggaaggcaatcgggcggatctgcttatctggctggtgaccttcacggccaccatcttgctgaacctggaccttggcttggtggttgcggtcatcttctccctgctgctcgtggtggtccggacacagatgccccactactctgtcctggggcaggtgccagacacggatatttacagagatgtggcagagtactcagaggccaaggaagtccggggggtgaaggtcttccgctcctcggccaccgtgtactttgccaatgctgagttctacagtgatgcgctgaagcagaggtgtggtgtggatgtcgacttcctcatctcccagaagaagaaactgctcaagaagcaggagcagctgaagctgaagcaactgcagaaagaggagaagcttcggaaacaggctgcctcccccaagggcgcctcagtttccataaatgtcaacaccagccttgaagnacatgaggagcaacaacgttgaggactgcaagatgatgcaggtgagctcaggagataagatggaagatgcaacagccaatggtcaagaagactccaaggccccagatgggtccacactgaaggccctgggcctgcctcagccagacttccacagcctcatcctggacctgggtgccctctcctttgtggacactgtgtgcctcaagagcctgaagaatattttccatgacttccgggagattgaggtggaggtgtacatggcggcctgccacagccctgtggtcagccagcttgaggctgggcacttcttcgatgcatccatcaccaagaagcatctctttgcctctgtccatgatgctgtcacctttgccctccaacacccgaggcctgtccccgacagccctgtttcggtcaccagactctgaacatgctacatcctgcccaagactgcacctctggaggtgcagggcacccttgagaagcccctcacccctaggccgcctccaggtgctacccaggagtcccctccatgtacacacacacaactcagggaaggaggtcctgggactccaagttcagcgctccaggtctgggacagggcctgcatgcagtcaggctggcagtggcgcggtacagggagggaactggtgcatattttagcctcaggaataaagatttgtctgctc

SEQ ID NO: 77738 - DNA, 738 bp, Homo Sapiens
aagataatagcttgatttccccacacccacctttgcaatgttttgattttgcacaagtcttggtttctagtttgtgggaatatcatttttcattgcattgaaggaaaattctttaggccaggagggagtctaagacttcagacacagcacagatacgatcctgggcaagggtcattcagtgttcttaagaaaattctaaatcctaaggtgtgatggttaatattaggtgtcaacttgataggatcaaaggatgcctagaaagctaagtattgtttctgggtgtgtctgtgagggtgttgccagaggagattaacatttgagtcagtggaccaggagaggaagactcaccctcaatgtgggttggcaccatccagtcggctgccagggtagctacaacaaagcaggagagagaaggtgggctaagctggcttgcagagttctggctttcatccctctcctgtgctggatgcctccatccattcctcctgcctttggacatcagactccaggttgtttggcctttggactcttggacttaacaccagtggcttgcctggggcttttgggccttaggccacagactgaaggctgcactatgggcttccctactcttgaggcttttggactcagactgaaccactactggcttctttcttcctcagcttgcagacggcccaccgtaggactttgccttgtaatcatgtgagccaattctccttaataaactccttttaatat

SEQ ID NO: 77739 - DNA, 1065 bp, Homo Sapiens
ccttccgttcattctgaagttcggatttcagaaatagataacacactggcattggccacggtctctcaggaccagctcacgaagtctttcaggacaaaggttttgtcttaacgctcaaagatctgcaggaccctgtatggtagaagaaacatatcattgtatttagaaacttctctatacatacaggaatttgacaacagtttgtgccacttatggatttaaagaactggcaccttgaatgggattctgaatagaattcgtacagatggaatgtaaatatcaccctgaactgaattggccctcatcctgtccagccaatctggaaatgtctgacacatgcagagtcatgtgatcaaacacccagcagagataacagccaaatatggccagcctcacgataatgttggagaagcagtgcagactgtggcctggaaacccacaagatatccattaagtgtcaacatctattcaaaacgaggcatccaaaactgctccttgttcagcatcattacccaaaagtctgcctgtggtaggtagaattctaagatggcaggtggaattaagtttgctcatcagttgacagtaagaaaggaagattacccaggttagcctaacctagtcacacgggcctcttaaaaccagagagttttctcctgctggttgcagaagtcaaagagattcaaatcgagagagggatccactgaaaggactcttctccattgctgaaccggagggagccacatggcaaggacccaagagcgacctctctgagctgggagtagttccctgctgaaagccaacaagaaaaccagacctcagtcctacaaccacaagtcctacaactgccaacaaccaatggtacttggaaacaagatttctccctagctgaggctccaagagaggatgccaatatcttgattttaagccttatgagaccctcagtggaggacccagttaaaacgtgccaggctcccgagtcacagaaactgtgatgttttaagccactaaatatgtggtaatttgttatacaaatatagataatgaatatactgccccttctatttt

SEQ ID NO: 77740 - DNA, 1061 bp, Homo Sapiens
tgagtcttagccaatctgagcagctgagcttgggtcaaccacaggctgccaactgatgagaccgtgttcaatggagcctaagcttcagaaggatggtctggctgagcactatatccaaagtgcctcacacactgcctggcagagaatttgacaacagtttgtgccacttatggatttaaagaactggcaccttgaatgggattctgaatagaattcgtacagatggaatgtaaatatcaccctgaactgaattggccctcatcctgtccagccaatctggaaatgtctggtttgtctcctgggagcactccccaaagaaccttctacacacagttctccaactcaaagtctgttttcagggaatccaattcaagacagggatagttggaagtcacaaccgttccatggactttgatgttcttgatattcattcttggtattggcattatgagttgtgacactaggaggagtctccaagtgactttgaaatgagaagacaggaacaaagaggtgtcatacatccctcacagatggtcagaaatatctaaagagtttttgccaaagagatagggtcctgaatgggcagcagggttaagagaaaaatgtgtagttattaatgttaatgagacatcctttgctacaagatgatggtgaggtctcaaggagatctaggttatatttacaagggatcactccaattactacatgtccgtcttttctaaaattagactttattgtgctctattaaaatagctttatctttagaagagagtttctcaaaatgtgatttggggaccacctgcatcaggaacacctgagaatttgttaaagttgcagattctagagccccatctcatgcttactgaaccagaatctctgggaatctgcatgtttatttaacaagtttttcaaagcttgcatgtttagccagcttttaaagtaaaagttttcaactgctttagttggtaaagggtttcttttgcagatgatgaaaatcttctggaattggatagaggtgatggcttcacaacattgtgaatatattaaaaaccactgaaatg

SEQ ID NO: 77741 - DNA, 689 bp, Homo Sapiens
  misc_feature (190)..(283): n is a, c, g, or t
  misc_feature (398)..(398): n is a, c, g, or t
gggtgttaaaatgtttatcatgcctaagggagacatttatgattaaaccatttatgctacatataactggggaaaactatgatgctttcggtgctgggaatgcagtgaggtcccacgtgggcagagcttggctgggctgggcaactccgacacacgtctctgggggtgtggcggcgctctcagtcggcannnnnnnnnnnnnnnnnnnnnnnnnnnnnnnnnnnnnnnnnnnnnnnnnnnnnnnnnnnnnnnnnnnnnnnnnnnnnnnnnnnnnnnnnnnnnncggagaagaggctgcaaggaagtcgctgtccctgtctccactggaagtgagtggtgcagcatctctttggcaggtggggggcatcagtacctggccagaggggtcctcgtcgctnagctcctggatcaggggtcttggggacttggtgtcttgttttcggatttccaagtccctcttagcttcttttttaaagatgtctgtgaagggcacccgagccgcctttgaggtgtctttagagactgcaaatatatttgacagagtgtctgtggggaggttttccagcacagggagtgacgtgtagtccagttcagggtcactgtcatcactcaagctcgagatgacctcaatcttcggaaagcacatattctggtcttccagagatttgcctgtttcatcatcatcttcc

SEQ ID NO: 77742 - DNA, 1187 bp, Homo Sapiens
  misc_feature (75)..(75): n is a, c, g, or t
agtgccacccccaggcctaactttcagagtcctgtgttcccttgggcctttcttggatgtggcaacagaatactntgtgacattgggtgaaaaagcagaactggcatggtgcattgtagagcgattctgttgtgaaaacagaaactttcagacaccttttcttctgtaaatagaatatgtgctttccgaagatggaggtcatctcgagatgaagtaatgacagtcaccctgaactggactacacgtcactcccggtgctggaaaacctgcccacagacactctgtcaaatatatttgcagtctctaaagacacctcaaaggcggctcgggtgcccttcacagacatctttaaaaaagaagctaagagggactcggaaatccgaaaacaagacaccaagtccccaagacccctgatccaggagctcagcgacgaggacccctctggccagctactgatgccccccacctgccaaagagatgctgcaccactcacttccagtggagacagggacagcgacttccttgcagcctcttctccggtgccgactgagagcgccgccacacccccagagacgtgtgtcggagttgcccagcccagccaagctctgcccacgtgggacctcactgcattcccagcaccgaaagcatcatagttttccccagttatatgtagcataaatggtttaatcataaatgtctcccttaggcatgataaacattttaacacccacgcgagtcagtgtatgattgggctagctcctgtttgtgtgagtcacatgcaattcctttcaccagccaacctgaaaaaagacctttctcttactatgtcatcagaaaccagacagacccgggtccctgcaaaatctcaagtgagcattttccccacaggaaaacagaatcttccactgcagctagagaaactccgaggaagagggacttgatgctttagacatcaaaatgagaaggggagggaggaaagaaaggggggagtctgtgaggcacaacagagaattcccccaaactgacatgaccgtgaccctctgctcagagggcactatcgacagcccacaggtgccagacccatgtcccaagggagaaggaacatcagccatcatctctctgcatgagctcagtgtcaggtagtagctgtggcgggacgctgtccagcctaaaaaacgtgaccattc

SEQ ID NO: 77743 - DNA, 952 bp, Homo Sapiens
ggggcgggtatggcggccagcctgtggatgggcgacctggaaccctacatggatgagaacttcatctccagagcctttgccaccatgggggagaccgtaatgagcgtcaaaattatccgaaaccgcctcactgggatcccagctggctactgctttgtagaatttgcagatttggccacagctgagaagtgtttgcataaaattaatgggaaaccccttccaggagccacacctgcgaaacgttttaaactgaactatgccacttacgggaaacaaccagataacagccctgagtattccctctttgtgggggacctgaccccggacgtggatgatggcatgctgtatgaattcttcgtcaaagtctacccctcctgtcggggaggcaaggtggttttggaccagacaggcgtgtctaagggttatggttttgtgaaattcacagatgaactggaacagaagcgagccctgacggagtgccagggagcagtgggactggggtctaagcctgtgcggctgagcgtggcaatccctaaagcgagccgtgtaaagccagtggaatatagtcagatgtacagttatagctacaaccagtattatcagcagtaccagaactactatgctcagtggggctatgaccagaacacaggcagctacagctacagttacccccagtatggctatacccagagcaccatgcagacatatgaagaagttggagatgatgcattggaagaccccatgccacagctggatgtgactgaggccaacaaggagttcatggaacagagtgaggagctgtatgacgctctgatggactgtcactggcagcccctggacacagtgtcttcagagatccctgccatgatgtagccaggccaaaggacaagccaggttgcatgatgtgagggagatgagagactcctttttaaaaattgtgaaacctttttgg

SEQ ID NO: 77744 - DNA, 1135 bp, Homo Sapiens
  misc_feature (60)..(60): n is a, c, g, or t
  misc_feature (103)..(103): n is a, c, g, or t
  misc_feature (175)..(175): n is a, c, g, or t
  misc_feature (182)..(182): n is a, c, g, or t
  misc_feature (186)..(186): n is a, c, g, or t
  misc_feature (220)..(220): n is a, c, g, or t
  misc_feature (248)..(248): n is a, c, g, or t
  misc_feature (291)..(291): n is a, c, g, or t
  misc_feature (297)..(297): n is a, c, g, or t
  misc_feature (301)..(301): n is a, c, g, or t
  misc_feature (1042)..(1061): n is a, c, g, or t
ctgctgttctattcttttagaagacccgcagtggtagacactcgtacattgcacacctgntgcaattgccacatccaagcatggggtcagagccctgtacctntcggacacacctagatgctgccccatgccctccatgtgctgagcagtgggacccacccagtctgtgtctcgntgtcacntgcntgccaggtgggtggggcagtggctctgggagccntttctcactgtaccagggtggcagagcncacgggcctgagcgccctgcagccgagctgcccgtgctgaccntgaccntccntaggccatgcggaccctcagttggaagcacaccctgggcctggtgaccatggacgtggagctggccgaccgcacgctgtctgtggcggtcaccccagtacaggcggtgatcttgctgtattgtcaggaccaagccagctggaccctggaggaactgagcaaggcggtgaagatgcccgtggcgctgctgcggcggcggatgtccgtgtggctgcagcagggtgtgctgcgtgaggagccccccggcaccttctctgtcattgaggaggagcggcctcaggaccgggacaacatggtgctcattgacagtgacgacgagagcgactccggcatggcctcccaggccgaccagaaggaggaggagctgctgctcttctggacgtacatccaggccatgctgaccaacctggagagcctctcactggatcgtatctacaacatgctccgcatgtttgtggtgactgggcctgcactggccgagattgacctgcaggagctgcagggctacctgcagaagaaggtgcgggaccagcagctcgtctactcggccggcgtctaccgcctgcccaagaactgcagctgacacatcgcccgcccgcccgcccgcccgccaggcgctgccctgcaggtgctctcgtcctcccgtgccagcccccgcccgcccgtgtcccagaatgcactgctgaggagcatgcccacccccacccccgcagtgtgcagattaaagcaagtcagatcatcnnnnnnnnnnnnnnnnnnnncctgacaggcggccgcaagcttattccctcttagtgagggttaattttgagcatagcaagtgtgccgtgcgtgt

SEQ ID NO: 77745 - DNA, 1365 bp, Homo Sapiens
attcccgggatatcgtcgaccacgcgtccgggacggaccagaggcagcagctgctcgtgtccctcaaggctgccctggagactcggctcctgcatccaggcgtcaacacgtgtgacatcatcaccctctatatctctgccatcaaggcgctgcgcgtgctggacccttccatggtcatcctggaggtggcctgtgagcctatccgccgctacctgaggacgcgggaggacacagtgcggcagattgtggctgggctgacgggggactcggacgggacaggggacctggctgttgagctgtccaagaccgacccggcgagcctggagacaggccaggacagtgaggatgactcaggcgagccagaggactgggtcccggaccctgtggatgccgatccagggaagtcgagctccaagcggcgttcatcggacatcatcagcctgctggtcagcatctacggcagcaaggacctcttcatcaatgagtaccgctcgctgctggccgaccgcctgctgcaccagttcagcttcagccccgagcgggagatccgcaacgtggagctgctgaagctgcgctttggcgaggccccaatgcacttctgtgaagtcatgctgaaggacatggcggactcccgccgcatcaatgccaacatccgggaggaggatgagaaccggccagcagaggagcagccaccgttcggggtctacgctgtcatcctgtccagtgagttctggccgcccttcaaggacgagaagctggaggtccccgaggatatcagggcagccctggaggcttactgcaagaaatatgagcagctcaaggccatgcggaccctcagttggaagcacaccctgggcctggtgaccatggacctggagctgggccgaccgcacgctgtctgtggcggtcaccccagtacaggcggtgatctggctgtatttcaggaccagccaggctggaccctggagtgaactgagcaaggcggtgaaagattgccgtgggcggctgctggcggcgggcggatagtcgatgtggctgccagcaagtgtgtgcctgagtgaggagccccccgggcacgtcctcgtcaatggggaggagcggcctcaggaaccggggaacaacactgggtgatcaatgacgagtgacagacgagaagcagaaccgaggttggcttccaaggccgccagaaagggggaagaggttgagtatttttgggtaacctcaagcgaggtagcccaacgtggagaagacatctcgtgagctgctctacacacaggccgcagtttggggggcaggccgacatgcgtagatagcgccaaggtaggtacatcaagatagtgggcaccctttatggcgtccagcaga

SEQ ID NO: 77746 - DNA, 1185 bp, Homo Sapiens
gggagttgagtcgaagatctgctactgaactttttgaggcatatagcatggcagaaatgacattcaatcctcctgttgaatcttcaaaccccaaaataaagggtaaatttttacaaggggattcatttttgaatgaagatttaaatcagctaatcaaaagatactccagtgaagttgctactgaatcgcctctggatttcacgaaatatttgaaaacatcactacactagtagaggaatgaagtcagtggactttcttgtatatttgtgtgtgcagatgtacataaagatgagttgttaacttaggatcttttctttttatacaaggaaagcttcctaagaatgtctaggaagaagaggaagaatgaccctttgcatggcacagggttctgcccctattctgaatatgtcattccatcaaggagatcaaaagcctttttttctccccagtatttggaaattactttcttgatgatgctgccttttaaaagcttcacgtacattatagttttttaaaaaaatctttggactggatcttactgaagtgcagttgctatattaaaattagggcatagagcacagaaaaatcaagaccatgagaagacattttaccatttagctactttttataactaaatactctttaaatatttttatttcaatactgtggatggaaatgagaagcattctaaatttgagttaatatatttttatgaagatatttgagaaaagaaaaaaatagcttgtattcaggttcattggcttttgctggatgatccacctaaagaagttacctaatttggccttttaaaaaaggtgttagtgtttattatagctactttcaaggaaagtttgaatatgattctagtctctaaagttcttcacgttttctgacattccctggagggtgactggggaagaattgctccagggtagaagaaccaggcccaagactttaccattctgatctagagacaaaggatactcaatgaggagcttttttcccctcttggaacaggtaaaatgctttttcttattaatataattataaaacagtattttatgtaacagctattcccatattctaggagtggcctaagaaatgcgtgtttcagtgactagattataaatattctctattgtgaatagttgaataaaacagctgtttttttctgcttcaaaaaaa

SEQ ID NO: 77747 - DNA, 710 bp, Homo Sapiens
  misc_feature (419)..(466): n is a, c, g, or t
gaaataagccagccccctgccctgagccagctggtgaacctgtaccttgggaggtcacactttctctggaaagagcccgccaccatgagctggctggaggagaacgtccacgaggttctgcaagcagtggacgccggggacccagccgtggaagcctgtgagaaccggcggaaggtgctctaccagcgtgcacccaggaatatccaccgccatgtgatcctctctgagatcaaggaagccgtcgctgccctgcccccggacgtgaccacgcagtctgtgatggggtttgatcctctgcctccttcggacacaatctactcctacgtcaggccagagaggctaagtcctatcagccatggaaacaccattgctctcttcttccggtcactgttgccaaactataccatggagggggagannnnnnnnnnnnnnnnnnnnnnnnnnnnnnnnnnnnnnnnnnnnnnnnacaggctgatgctggctgtgcgcgacatgatggccaacttccacctcaacgacctggaggcgccgcacgaggacgacgctgagggggagggggagtgggactgagcgtccgcagaggtgaccgaaaagccgtatgatgatgttcccgatttctctgttggtcggagtcggccagttgcctgaagtagggaagctgagtgtgtcgctccctggtccactgtttctcctataaatgtaaatgggtc

SEQ ID NO: 77748 - DNA, 555 bp, Homo Sapiens
  misc_feature (425)..(425): n is a, c, g, or t
  misc_feature (440)..(440): n is a, c, g, or t
  misc_feature (458)..(458): n is a, c, g, or t
  misc_feature (482)..(482): n is a, c, g, or t
  misc_feature (523)..(523): n is a, c, g, or t
  misc_feature (532)..(532): n is a, c, g, or t
  misc_feature (539)..(539): n is a, c, g, or t
ggggcgcagggaaggagggcgtccgagtcaacaaccgcttcgagctggaaaaatggacattttcctctccccctaaaaaaagataaaactccttcctggttattaactgaaatgctgatcgagctttatcctaaagaagatcagtcgtggacaagaaccttgtgaaatgttccccatttgagaccctaaaactaatgaaaatcacagcttttggataaacattgacgatcttgaggatgaccctgtggtgaacggggagaggtctggctgtgcgctcacagacgctgtggcaccagggaacaaaggaaggggtcagcgtggaaacacagagagcaagacggatggagatgacaccgagacagtgccctcagagcagtctcatgcaagtggctgggggtctgaaccgcaaccagggcctgaacagnatgatgctggctgtngcgacatgatggccactncacctcaacgacctggaggcgccnacgaggacgacgctgagggggaggggagtggactgacgtcncagaggtgncgaaaancgtatgatgatgtccg

SEQ ID NO: 77749 - DNA, 419 bp, Homo Sapiens
  misc_feature (254)..(301): n is a, c, g, or t
  misc_feature (399)..(399): n is a, c, g, or t
tttgagcgtgacccatttacatttataggagaaacagtggaccagggagcgacacactcagcttccctacttcaggcaactggccgactccgaccaacagagaaatcgggaacatcatcatacggcttttcggtcacctctgcggacgctcagtcccactccccctccccctcagcgtcgtcctcgtgcggcgcctccaggtcgttgaggtggaagttggccatcatgtcgcgcacagccagcatcagcctgtnnnnnnnnnnnnnnnnnnnnnnnnnnnnnnnnnnnnnnnnnnnnnnnntctccccctccatggtatagtttggcaacagtgaccggaagaagagagcaatggtgtttccatggctgataggacttagcctctctggcctgacgtangagtagattgtgtccgaagg

SEQ ID NO: 77750 - DNA, 1161 bp, Homo Sapiens
gggccccgcccccgaccccgcgcgaagagtgcgcaggcgcgccgacagccgagttttctgcgcttccttctccctctctccagacgtcgtggtcgttcggtcctatgtcgcgccgggccctccggaggctgaggggggaacagcgcggccaggagcccctcgggcccggcgccttgcatttcgatctccgtgatgacgatgacgcggaagaagaagggcccaagcgggagcttggtgtccggcgtcccgggggcgcagggaaggagggcgtccgagtcaacaaccgcttcgagctgataaacattgacgatcttgaggatgaccctgtggtgaacggggagaggtctggctgtgcgctcacagacgctgtggcaccagggaacaaaggaaggggtcagcgtggaaacacagagagcaagacggatggagatgacaccgagacagtgccctcagagcagtctcatgcaagtggcaaactccggaagaagcaaaaacaaagcagaggaaacaagaaaagcagcacgggagaagcatcggaaaacggactagaagatatcgatcgcatcctagagaggattgaggacagcactgggttgaaccgtcccggcccagctcccctgagctccaggaagcacgttctctacgtggagcacagacacttgaatccagacacagaactgaaaaggtattttggtgcccgggcaatcctggggggagcaaaggccacggcagagacaacgtgtgtaccccaagtgcacatggctgaccacccctaaaagcacctggccccgctacagcaaaccaggtctgtccatgcggctgctggaatcaaaaaaaggcctctccttctttgcgtttgagcacagtgaggagtaccagcaggctcagcacaagttcctggtggccgtggagtctatggagccgaacaacatcgtggtgcgtggtccctgcagcccctgacaggagcaggggccatgtagccaccactgccctgggccgcctgcttccctggtggctgggggaggcatgctgcctcctgcccttcccaacaggaagggtgccagtctctgcagggcggtctggccctgtgaccagaaggaaatgtgttcggaggctctaggccaagcgagctccatccgaaacagttgccggggggccgag

SEQ ID NO: 77751 - DNA, 1976 bp, Homo Sapiens
  misc_feature (403)..(427): n is a, c, g, or t
  misc_feature (593)..(593): n is a, c, g, or t
gggtccggaattcccgggatgtcgcgccgggccctccggaggctgaggggggaacagcgcggccaggagcccctcgggcccggcgccttgcatttcgatctccgtgatgacgatgacgcggaagaagaagggcccaagcgggagcttggtgtccggcgtcccgggggcgcagggaaggagggcgtccgagtcaacaaccgcttcgagctgataaacattgacgatcttgaggatgaccctgtggtgaacggggagaggtctggctgtgcgctcacagacgctgtggcaccagggaacaaaggaaggggtcagcgtggaaacacagagagcaagacggatggagatgacaccgagacagtgccctcagagcagtctcatgcaagtggcaaactccggaagaagnnnnnnnnnnnnnnnnnnnnnnnnngcagcacgggagaagcatcggaaaacggactagaagatatcgatcgcatcctagagaggattgaggacagcactgggttgaaccgtcccggcccagctcccctgagctccaggaagcacgttctctacgtggagcacagacacttgaatccagacacagaactganaagtgaggagtaccagcaggctcagcacaagttcctggtggccgtggagtctatggagccgaacaacatcgtgctcagcgatgcctgccgctttcaagaggatcaggagatggctcgagacctcgtagagagagcgctgtacagcatggaatgtgcgttccaccccctgttcagcctcaccagtgggggcctgcccgctggattaccgcagaaccggaaaacaggagcttctacctggccctctacaagcagatgagcttcctggagaagcgaggctgcccgcgcacggcgctggagtactgcaagctcatcctgagtctcgagccggatgaggaccccctctgcatgctgctgctcatcgaccacctggccttgcgggcccggaactacgagtacctgatccgcctcttccaggagtgggaggctcatcggaacctgtcccagctccctaattttgccttctctgttccactggcgtatttcctgctgagccagcagacagacctccctgagtgtgagcagagctctgccaggcagaaggcctctctcctgatacagcaggcgctcaccatgttccctggagtcctcctgcccctgctcgagtcttgcagtgtgcggcccgacgccagcgtttccagtcaccgcttctttggacccaatgctgaaataagccagccccctgccctgagccagctggtgaacctgtaccttgggaggtcacactttctctggaaagagcccgccaccatgagctggctggaggagaacgtccacgaggttctgcaagcagtggacgccggggaaccagccgtggaagcctgtgagaaccggcggaaagtgctctaccagcgtgcacccaggaatatccaccgccatgtgatccctctctgagatcaaggaagccgtcgctgcccctgcccccggacgtgaccacgcagtctgtgatggggtttgatcctctgcctccttcggacacaatctactcctacgtcaggccagagaggctaagtcctatcagccatggaaacaccattgctctcttcttccggtcactgttgccaaactataccatggagggggagaggcccgaggaaggagtggctgggggtctgaaccgcaaccagggcctgaacaggctgatgctggctgtgcgcgacatgatggccaacttccacctcaacgacctggaggcgccgcacgaggacgacgctgagggggagggggagtgggactgagcgtccgcagaggtgaccgaaaagccgtatgatgatgttcccgatttctctgttggtcggagtcggccagttgcctgaagtagggaagctgagtgtgtcgctccctggtccactgtttctcctataaatgtaaatgggtcaaaaaaaa

SEQ ID NO: 77752 - DNA, 212 bp, Homo Sapiens
atgcgtgacccatttacatttataggagaaacagtggaccagggagcgacacactcagcttccctacttcaggcaactggccgactccgaccaacagagaaatcgggaacatcatcatacggcttttcggtcacctctgcggacgctcagtcccactccccctcccccttctgtcgtcttctcgcagccgtatagtagtagtgggcggccgc

SEQ ID NO: 77753 - DNA, 624 bp, Homo Sapiens
cacatgcaggcgtgcgtggtgcgggctccctcagcagcccagccccgccacggcaggggcagggtctagtgcagagggctcctcctttcctggcagcccgggttcggatgcttgttgttttgagagagaaatcctttggggctcagagcacaagctgagtcgtcaccgtggtgagctgctccatccgtggtcttgtgagcgcgtggtgcggctgctgggggattctctgtagtcgtggggtgtagtcctgctctgacgcctcctgtgctggaggtgccgtttctgtctcaaaacctaaggagtttgtactgttgttaagggataagatagaacgagtgagaaaaccagcaagtcagagggtcgcaggaccgtggaccgtccactggggacagcttaatgcctcctggtttaacttcagctgctctgcgggcccttatgaccggcatggctggctttgtctggggctgtgagcttctgactctcctcagtagagtggcagctgggaggtgggaactggaaggagggaggtacctctcttgcctgacgtaggagtagattgtgtccgaaggaggcagaggatcaaagcccatcacagactgcgtggtcacgtccttcagaacggga

SEQ ID NO: 77754 - DNA, 1664 bp, Homo Sapiens
  misc_feature (536)..(562): n is a, c, g, or t
  misc_feature (883)..(921): n is a, c, g, or t
  misc_feature (1163)..(1186): n is a, c, g, or t
  misc_feature (1645)..(1653): n is a, c, g, or t
agaagagcattagccctgtcttatcattacattgccatcctgttgcactgcagcttgtgtatagcatgctaaaataaatttttgtgtgtgtgtgcagaaattaagggtccaattgagattgggtgatgttagtaacataataacaagttgtctggcctgacacagcatcacatcacacacacagaaattagtatatccatgtatgtcaaatacaggttaaaatatcagggcatttatataaagagttgtagtcttctgataaaagtagactggatcccctggggtatttggggagaaagtaactactttggctctacccctagaaatgtccagttttgagtgactgtagtatggatgggtttttttgttttgttgattatttgaggcttttaaaacaagtagttcatgaaagaagctgttggactcaacatagagtagagtaactatctttttagtctggatttctgccctgcttagattttaaaagtataagcatggattgccaattccacttgatgtaaacaaaactttttttnnnnnnnnnnnnnnnnnnnnnnnnnnnaaataacttattgtatcagtccaggttcagaaacttgtggtaggccagttccagatagtttcatttcacctgtaaactgtatcactttgactgatattgtaattttcaaatgtataatatgtttacagatgtgccctgcatttagtctgccttgttcctattttgatttttgttgagtctcctgcctgcttgccaaaagctaggatgcttcaggcccatgtacaattgaaagcagaggcatccttgagctttaaagcattgaacaaactggaaaatgcaacataccacataactgaagtgaaaaaagtctgtgtttttgtnnnnnnnnnnnnnnnnnnnnnnnnnnnnnnnnnnnnnnngacatataaggttgattaaagggaaaaaaggctccagtttgttttacaggttttaaagttctgctgtgtgttcaatggccttgtgtaaccacttgtcgccttagggccagattcccctctctagtccccttttttaaatgtccattttgcttgcctggaattttaaagttcttccgtctcacaactcacaagaaactttctgggtttgtgacatacagaggttgaattgagtatatatttgnnnnnnnnnnnnnnnnnnnnnnnnccagaccccacctgaattgggctttttaacttagaagcaacacttgattaaacatctttagaaagctattgcttttctaatttccttccatatccctcaggcctcagtgttcagagaagccaaaaagaatgtatcacttctctgtctgtccaaaggtttttgagagtctcacttctaaatgaaacaatgcaacatttcactttgatttctccactgaaatttccttgattatatggttagaggtatgtagttaggaatgtctgttaactttctgagaaccctagtgccccatcatattaactgtcagtattttgggggcattaggttaatagacttaattgcctaggtacaagcaggactttgggacaaatctctttgtgctgtttggtaacacttaactctatttgttgcaatctttctccttaggtcctcacacaattccttacagagcacttattnnnnnnnnntcttaagagtt

SEQ ID NO: 77755 - DNA, 397 bp, Homo Sapiens
  misc_feature (74)..(98): n is a, c, g, or t
ttctgccctgcttagattttaaaagtataagcatggattgccaattccacttgatgtaaacaaaactttttttnnnnnnnnnnnnnnnnnnnnnnnnnaaataacttattgtatcagtccaggttcagaaacttgtggtaggccagttccagatagtttcatttcacctgtaaactgtatcactttgactgatattgtaattttcaaatgtataatatgtttacagatgtgccctgcatttagtctgccttgttcctattttgatttttgttgagtctcctgcctgcttgccaaaagctaggatgcttcaggcccatgtacaattgaaagcagaggcatccttgagctttaaagcattgaacaaactggaaaatgcaacataccacataactgaagt

SEQ ID NO: 77756 - DNA, 2788 bp, Homo Sapiens
  misc_feature (2702)..(2731): n is a, c, g, or t
ctactggagatgccagaagaacactgttgcgcttggtggacgggcccagaggaattcagagttaaaccttgagtgcctgcgtccgtgagaattcagcatggaatgtctctactatttcctgggatttctgctcctggctgcaagattgccacttgatgccgccaaacgatttcatgatgtgctgggcaatgaaagaccttctgcttacatgagggagcacaatcaattaaatggctggtcttctgatgaaaatgactggaatgaaaaactctacccagtgtggaagcggggagacatgaggtggaaaaactcctggaagggaggccgtgtgcaggcggtcctgaccagtgactcaccagccctcgtgggctcaaatataacatttgcggtgaacctgatattccctagatgccaaaaggaagatgccaatggcaacatagtctatgagaagaactgcagaaatgaggctggtttatctgctgatccgtatgtttacaactggacagcatggtcagaggacagtgacggggaaaatggcaccggccaaagccatcataacgtcttccctgatgggaaaccttttcctcaccaccccggatggagaagatggaatttcatctacgtcttccacacacttggtcagtatttccagaaattgggacgatgttcagtgagagtttctgtgaacacagccaatgtgacacttgggcctcaactcatggaagtgactgtctacagaagacatggacgggcatatgttcccatcgcacaagtgaaagatgtgtacgtggtaacagatcagattcctgtgtttgtgactatgttccagaagaacgatcgaaattcatccgacgaaaccttcctcaaagatctccccattatgtttgatgtcctgattcatgatcctagccacttcctcaattattctaccattaactacaagtggagcttcggggataatactggcctgtttgtttccaccaatcatactgtgaatcacacgtatgtgctcaatggaaccttcagccttaacctcactgtgaaagctgcagcaccaggaccttgtccgccaccgccaccaccacccagaccttcaaaacccaccccttctttagcaactactctaaaatcttatgattcaaacaccccaggacctgctggtgacaaccgccctggagcgtgagtaggattcctgattgaaaactgccagattaacagatatggccactttcaagccaccatcacaattgtagagggaatcttagaggttaacatcatccagatgacagacgtcctgatgccggtgccatggcctgaaagctccctaatagactttgtcgtgacctgccaagggagcattcccacggaggtctgtaccatcatttctgaccccacctgcgagatcacccagaacacagtctgcagccctgtggatgtggatgagatgtgtctgctgactgtgagacgaaccttcaatgggtctgggacgtactgtgtgaacctcaccctgggggatgacacaagcctggctctcacgagcaccctgatttctgttcctgacagagacccagcctcgcctttaaggatggcaaacagtgccctgatctccgttggctgcttggccatatttgtcactgtgatctccctcttggtgtacaaaaaacacaaggaatacaacccaatagaaaatagtcctgggaatgtggtcagaagcaaaggcctgagtgtctttctcaaccgtgcaaaagccgtgttcttcccgggaaaccaggaaaaggatccgctactcaaaaaccaagaatttaaaggagtttcttaaatttcgaccttgtttctgaagctcacttttcagtgccattgatgtgagatgtgctggagtggctattaacctttttttcctaaagattattgttaaatagatattgtggtttggggaagttgaattttttataggttaaatgtcattttagagatggggagagggattatactgcaggcagcttcagccatgttgtgaaactgataaaagcaacttagcaaggcttcttttcattattttttatgtttcacttataaagtcttaggtaactagtaggatagaaacactgtgtcccgagagtaaggagagaagctactattgattagagcctaacccaggttaactgcaagaagaggcgggatactttcagctttccatgtaactgtatgcataaagccaatgtagtccagtttctaagatcatgttccaagctaactgaatcccacttcaatacacactcatgaactcctgatggaacaataacaggcccaagcctgtggtatgatgtgcacacttgctagactcagaaaaaatactactctcataaatgggtgggagtattttggtgacaacctactttgcttggctgagtgaaggaatgatattcatatattcatttattccatggacatttagttagtgctttttatataccaggcatgatgctgagtgacactcttgtgtatatttccaaatttttgtacagtcgctgcacatatttgaaatcatatattaagactttccaaagatgaggtccctggtttttcatggcaacttgatcagtaaggatttcacctctgtttgtaactaaaaccatctactatatgttagacatgacattctttttctctccttcctgaaaaataaagtgtgggaagagacnnnnnnnnnnnnnnnnnnnnnnnnnnnnnncctgagcaggcggccgcaagcttattccctttagtgagggtaattttagcttggcac

SEQ ID NO: 77757 - DNA, 713 bp, Homo Sapiens
aacgatttcatgatgtgctgggcaatgaaagaccttctgcttacatgagggagcacaatcaattaaatggctggtcttctgatgaaaatgactggaatgaaaaactctacccagtgtggaagcggggagacatgaggtggaaaaactcctggaagggaggccgtgtgcaggcggtcctgaccagtgactcaccagccctcgtgggctcaaatataacatttgcggtgaacctgatattccctagatgccaaaaggaagatgccaatggcaacatagtctatgagaagaactgcagaaatgaggctggtttatctgctgatccgtatgtttacaactggacagcatggtcagaggacagtgacggggaaaatggcaccggccaaagccatcataacgtcttccctgatgggaaaccttttcctcaccaccccggatggagaagatggaatttcatctacgtcttccacacacttggttggcttttacaaacccctaagcttcttctttacctttccttaaaatttcaaccttctcttttcttactctataattgagaatgataacacagagagttaataacagtcaccctgctaactttccttagcatgagtgaacagtgagagataaaaatgaaatcttggttaaccttgccaaatctccaggacaccgaagagttaaaaagagagaaaaacaaaaagattaagctctttttc

SEQ ID NO: 77758 - DNA, 1015 bp, Homo Sapiens
  misc_feature (47)..(47): n is a, c, g, or t
  misc_feature (183)..(183): n is a, c, g, or t
  misc_feature (189)..(189): n is a, c, g, or t
ccaatgctgccctgttgtgacatacaggtcaggtcgtaaactgcgcntaggaacatcccaactaggcatgcgtcaacagtcgtatatgtcccctgtgctttattcaaggagctgggacagtatattcatcagaacagcacgtggtcaaggccctcaccccagaaaagcttaggagacactgtntatganggagagtgagattgaagaagccctgactccaggtctcttgatccttcgtacacaaagcgaagctgaaaaaaagtgcaggacactccatttcctcttggaccagacagggaagccagagccaccatggatgtcaaattccggcaaggaaacaccagtatagcaaaatctccacatcacattttaaagctcacacaatggctcaaagagaacccacatcaaaaaaccgaattcctagctcaggtgagatcaccaaagttgcctgtgaggcttcgtggaacctgcaggtagaaaggacatctttatttcgagctgcagcccagttgcttctgcgtcttggagccccttgaaaggaccctctcccttcaacagtacatagggaggccatttctggggagaaatgtagactgtccttagactcctgaggtttttacacttgcttgctgactctgtggactttgacttcatcattaaacatcttataatgatgtaatttgctttgactgtaagtgtagaacaggacgctgttcctgaatcaggaaacaagggactggtgacctgaactgccaccaccctccctggtgctcagatgcaatgaaatcgtgaggcaacaaatctatggctaggtaaagggtcaactccatttcagcaaatgtttcagatgttccttcctgcctagtaatgttccagctttaccccagccttaatcttttaaaatgtatattttccttagcgttgattttaaagtaattcgtatgtatttattacactgggtttgttgcagtaagccacctcgaatgttgctgtagaattaaagtaagcaaataaa

SEQ ID NO: 77759 - DNA, 1273 bp, Homo Sapiens
  misc_feature (1030)..(1039): n is a, c, g, or t
ggagggaatttaccaaagaagattataaaaagaagttactggatttggaacttgccccaagcgcttcggtggtactgttgccagcaggaagaccaactgcatccattgtacactcttccagcggagacatttggaccttgttgggaacagtgctttatccattccttgccatctggagattaattagcaatttcttgtttagtaatccgcctcccacacagacttcagtgagagtaacatcgtcagaacccccaaaccctgcatcatctagcaaatcagaaaaaagggaaccagtgagaaaaagagtgctggaaaaacgtggagacgactttaaaaaggaggggaaaatttatagattaaggactcaagatgatggtgaagatgaaaacaacacttggaatggaaattccactcaacagatgtagtgtgacaagtataatatgtgcaataatcattgtttctcttatgatttaattcaactaaaattctactggagaagtgggactgctttatattttccaactggtctataaaatgtctctttattcctgcttagtgggtgtgggttgaaggtgtttaactcagaaaagtaaagacaggaaataactctctgctaggtccttgcttatatggcaaccactgctagaaccctaaaagaaccaaaaatctgccacagcctgcctccatcagcttcttatttagtatttcatatgcccattagccctatgcttcagatgacacgttttgtttagagctactttgctccaagactcttaagcccaaagtaactggtatgtcactgagtaacttgactcggtgtcagagcattttaactagccactcagatgagaatttatgtttaacttctctttttactcatcagctgcaagcaaaatcttgtagtttttaatcttaaacactgaataaaaaaactttcccctaaattggaatgatcttagttttgctttgagttttgttatctagcatctttttgttgcacagggctctattgaggtcctatgtctctgannnnnnnnnnccccagtattgccctggagctgtctctggaaagtagctggcgaggttaccttaactatcactgaagaaagaaattttctgacacactgatggcatgtgacttgtctcctaagtcagtgaggcatcactttgtttgcataaagtatacggtttgttaaggcctttgttcttgtgagatgcaaaacagctgctagtctgcaacctagttttccctctcacctttaaccctcgtgcc

SEQ ID NO: 77760 - DNA, 907 bp, Homo Sapiens
  misc_feature (657)..(679): n is a, c, g, or t
tttccgaatcagggctgggcctctgtgccaggccatcccgtctttggagtgtatcctatttgaggtcaagaaatagcctgctgtccttcccaccttccctgagcagcacctacagaacagcaaccgtgatggtgtgtgaaagcaacagtcagagactgctatacatttctgtgggtgggggtagggaatactggctctgtggccctcctcagagctgggaggccaagggttcactgggcttgaatcctctctaagcacctaccccattatggcctaaacctcctcagtggaccacgggaaatcatgttggaccaagggtttccatgttcaaacagtcaacaaggccctcccctaggttgagatatttttgatactgaaggcccaggccccccagtatggcttgctgccagcaagcagcaaggattctctcgtgggtaacgctgtagccaggcaggaccagcctcttctgggagacccctctccccacgtagggtttgtgtagtgctcccacatcctgcttattgcctgccacccctgcttctcgcctggacctcttggtattccgtgtacaccatccttgctgtttcttgcctctgtgccttcaacctgctgctcctggcctgggataccttttattttcttttatttcttcttccnnnnnnnnnnnnnnnnnnnnnnnaccctaacaatagttctcagtcgggccggtttaagccccgggggggtttggtggtcttggattccattccccctcaatttttccttattccaacagtagagtattaagccgacacttggctgggttttccttcagaagtggtaggcctctgggaaggccgggtttatacacctgttgggtctaagggaaagctggccgggtgggttcaaagggtgtggttgatgcccg

SEQ ID NO: 77761 - DNA, 543 bp, Homo Sapiens
cagcagtgtccttgggaaaggcaatatttatgaagggcagaagaggcagccccaagaacctaaagactgcaggctgctaattgcaggaaatgactttggaagggcaggctcttgtccagtttcagggctgaaatgcctggcgaactccattcagccatcacatattgactgagtggctgcttagcatgggccaccgcgctaggctcgggacagctggtctttccggccatctttcttgctggcaagtcagcaaacattacctttttagtcacgtgcatatttttgccttcattcttaccacctggcctgcaaagtttgcaggagggccaggtatattcacttgtgtcttttgggtcctttcattgctgacaggctgtgatggccctcttgacccttgggcagggtgggtgaggtgcaaatgaccaggagtgtgtgaatgccttccaggaggtggctttgttccgtgcctccctgcccccatcgtcactaccaggtttggtacggagtcggtgctcagtgtttgcaaaacagagctgaaaacgg

SEQ ID NO: 77762 - DNA, 511 bp, Homo Sapiens
gcgtcgacagcctccggggttgggggtaagtagaagggggtgaggggccagcactagttgactcaaggcaccctggtggggacggagaggttttttcgctcagtggtgcaggccatcaggcagggcccgggtgcaagaaaacattctgtgtgcgctagtgcgagaggatcttctacagtcacctgccttcatgccattacagacagacgggaagtcactgggttctaggacataaaaagacctacatgttggctagcctaaatcgaacccttttgtagtaataaagattcatcaatgttttaaactgtcccctgtcagccccctgggactcaggtgaaccaactctctttgggaatctatcttagaagatgaaaccataaagccttcagtttcagtgtcagggatgcacactctatatctggtgaaattatggaggggtgaaaacttctgtacagcaaactgtacctccaaatctttaatgtcgaaataaagggctttttgccaaaaaaaa

SEQ ID NO: 77763 - DNA, 1164 bp, Homo Sapiens
aactataacggtttaaggtagcgaggcctgggtggcgaattcggcacgaggggcctttgctggctgtgtggcggctccgcggttcgcaggtcgttcgctgagcgtctctgcttagccgcggtcatgagccggcacagccggctgcagaggcaggttctgagcctgtaccgcgatctgctgcgcgccgggcgtgggaagccgggcgccgaggcgcgagtgcgggcagagttccggcagcatgcgggcctgccgcggtccgacgtgctgcgcatcgagtacctgtaccgccgcgggcggcgccagctgcagctgctacgctcgggccacgccaccgccatgggcgccttcgtacgcccgcgggccccgaccggggagcctggcggcgtgggttcccagcctgacgacggcgacagtccaaggaacccccacgacagcacgggggcaccggagacccgccccgacggacggtgacaggcgaagagccgaactcgctcgatggcgtggtggagccaggaggctcgcctgactgcatggggggactggggaacccgcctaaggtgagaggtcttaagagactagcttgacgaattggggatgtcagagactcctccttggcgacgcagggggcctagagagccccgtgatggacggcaagggaggcccgccttttccgatgcttggagacaggtcggtgctcctcccccatgagggcttggggcggcctgggacgctggcgggctggacagtgtcaagccaagagctacttgcccgaaggtacggggagccaggacgacccccggtggacagggagagcctgagacgcccttctcttgacccctgagaacatacccacttctggctcctcaaggagtctcccctctcctgtatttaactctgagaagtgcagactttttgctgagaacgttttgggaaggtgccctgatgagcggtgagaagcccggaatccccttctggaaaactttcccccattaattgtgacaagccaggaccatgaggaaggggtaggggtctatcaccctggttgatcaactgaagacccccaaaggcccctacttgatggttttgaggggcaacattgactcatttgccccttccctctcggaatgttggacaaagggaataaaattggggatatgtctaaag

SEQ ID NO: 77764 - DNA, 1052 bp, Homo Sapiens
  misc_feature (35)..(35): n is a, c, g, or t
  misc_feature (59)..(59): n is a, c, g, or t
  misc_feature (119)..(119): n is a, c, g, or t
  misc_feature (137)..(137): n is a, c, g, or t
  misc_feature (140)..(140): n is a, c, g, or t
  misc_feature (143)..(143): n is a, c, g, or t
gccaaggacacccaccccagcatccataggacgcncgcgccttggggtgcgcagacgcnggcccgagctcgggcgcgcgcgctcgcggcgcagagcatcccgcagtcgtcgttcccttntaccagcggtgcgcgacntgntanccgtgtgctgctggagatatgcgctccagcgagccttccactgggacgagcgcggcgcgccgccgcctactcgccctctgaggcgctgctctacgcgctcgtgcacgaccaccaagcgtacgcgcattacctgctggccacgttcccgcggcgcgcgctcgcaccgcccagtgccggcttccgctgctgcgcggctcccgggccgcacgtggcgctggcagtgcgctacaaccgcgtgggcattctgcgccgcatcctgcgcaccttgcgcgacttcccggccgaggagcgggcgcgcgtgctggaccggcgtggctgcagccgcgtggagggcggtggcacgtcgctgcacgtggcctgtgagctggcgcgccccgagtgcctcttcctgctgctgggccacggcgcctcgcccggtctgcgggacggcggcggcctcacgcctctcgagctgctgctgcgccagctgggccgcgacgccggggccactccctccgccgccggagcccccgcctcagctcccggggagccgcgccagcgccgcctgctgctgctggacctcctggcgctgtacacccccgtgggtgccgccggctcggcccgccaggagctgctgggcgaccggccgcgctggcagcggctgctgggtgaggacaagttccagtggctggcgggcctggcgccgccctcgctcttcgcgcgcgccatgcaggtgctggtcaccgccatctctccaggccgcttccccgaggccctggacgagctgccgctgcccccattcctgcagccgttggacctcactggcaaaggctaggcccggagcaccctaggcgctggattttgggacaaaactatttttcagagcgttgtaccggcactttatatatattgatctctgtacggcaaaaa

SEQ ID NO: 77765 - DNA, 1168 bp, Homo Sapiens
  misc_feature (92)..(117): n is a, c, g, or t
aagggtacaaagaagtttattgactatgatgcagtaaagataccaagagttacaatatttgtgcatatggcccaacagtgcctaccctcctnnnnnnnnnnnnnnnnnnnnnnnnnnggcaatgaggtgcagcagttaacagcccaacactggagtcaaaggaatggagctgcctcttctggcagcaaagtttcaagttgtgcaattaaataatagtcttggtccactccttgtgggtcttcttacagtttccctttagaaccataactgagtgacttagtagaacattcatattcaggatgtggcctccaaaagtgtcgttttgttttgttttgaacaaagacgtgctaccttctctcttgaagcaccagtgctgggttcaggagctacagaggactaagatgttccccaagtagcctgaagtaacaggtcacatggaaaacacaaagcaattggtgagtccacattttgtaatagaattaagagcgtaatgcataaaacttaaagtcatgtaaccacatgtaaaaacttcagcagctaaagaaaaattctggaaggcttttaaccccttctgaactaagttccctttctaaacgaggctggtttccatggctgtgacaagagctcatggggtagcaaaaagagagagagaatagcaccttagaagttactcaaacaagaggtgaaacaaataagtaaacaaaaaaagaccactttatcttcctttcatcattaaagaaggcaggtgtctgtacactgctttgtgatccttcgaagaataaaaagctgtaacccaaatctcagtataagggatgaagaaggaaaatgatagcagctgatgactgggatgcgaccacaaacccatatagtaaactaagttatcaacgtactcccttaccacgaaggacttcattcagtcatttaaaaagcaagggactaattcaaatcatgattaaggctataaaagaacacgactgagtattcacagagcaccaattacctcaagtttagactaggtgtcaatctacaaacatactaccctgcattaatcttcacaacacacctgcgaggacattacaagaaggcccagccaaaattagttcctcatttaatgggatatggctttcagtgggttcctgtaacaccatctctttcttggagcggccgc

SEQ ID NO: 77766 - DNA, 764 bp, Homo Sapiens
aacaaaaatgattataacatggtggtgtgtcaaatagaaggtcacttgtttgtagtgcaataaacactggaaccagtaccgggggtaggaattaatattgtttttaatatttcacatgaaaagaatcaaagtaattgtaatggctagaagagacctgccagaagattaaaaaaaagaatgagagaaaagcccagttagtggtgtgcaaacttacttcctttaaatgtcccatggatgtaggacagtgccatgtttcaagatgcctgtgagctaggtcttcaagatttatagaatgttacttatgaacaaaatataattatttatggtacaattcttgtactttagcaaatctggagttagttcatagtcaaagtcagttaatatttcttagaggaaagttttgctttttgtggcaacatttttatagcttgtgtgagttcttttttatttaatgatttgaaagcatttttgcacagtcgtgaccgtgtgtggtggcgtcactgtaaccaaagtatatgcaccagcccttgtgcatttattgtttctcctgattttgtggatttaaatgtccaaatgcaaacctttgtgacttcctttggaggacttggcagcacagcatgcccccgtgacctgcctgctgtggtatgagctatgaccaagagcaggcttcctgctccatggagtcctgagttgctctggggcaggggattacgttatgaaaactaaccatgtgtaacaataaatctaccttagcagaaaaagta

SEQ ID NO: 77767 - DNA, 782 bp, Homo Sapiens
tcctttctggcaatctctcctagctgggaaaccaggggacttggtcacacgtggtgaaggtaggagtgaagagatcatagagaagcctggggaaggtcctgggacactagactctgacagccccagcctctggtacacagggtggagtggtcagtgacaacagtccacaggctcaagtatgtcaccacgtgttatacttgaaagtgctttcttacacgttatcccgtatgatctacatacctgtgttgtgggggatacaggccaagtgtatctcaaggaggaatctgagcctccaggaagttaaatatttgtccaaaatctgaatctcaaaggtttgcctccagctactcttcccactgcacctcacagcgccatctagtgggtgagacccatgggccggctccatcattctttcatttcaggggatggacagagcaggcaatctcctaagcactccagattcggattcctttttatgagtgtccctgctgggggctttatcttctgagagtaatgggctctagaagctgacacagcctcagaggctgtggaccggggtcctcatgggaaaggagagattaagtttagaccttgagagttctgggctgaacaggcagaaccttctactattgactgaatgtttatatccccctagttcatgtgttgaaatcctaatccccggtccaacagtattaggaagcgaggcttttgggaggtgagtagattgtgggggaggagccttcatgagtggaattagtggcctaataaaagagacccctgag

SEQ ID NO: 77768 - DNA, 883 bp, Homo Sapiens
  misc_feature (27)..(27): n is a, c, g, or t
caaatgcggtcggagcgccagtgaccntgaggaagcccgtcccttatccctggtatccacggttccccagagctttggggaccacgcgaaaacctccaagatatttttcacaaaatagaaactcatatggaacaaaataagaaaccccagccatgaaatctaccatgaagtcttcaagttcatgtcactgagaagcttgtgcaaagcagccaccttggaccataattaaatcaaggacattttctttgagacattccttatagttggagactcaagatatttttgttgcatcaggtgtattcccttgcatgggcagtggcttttataggagcattagtcctcattcgctgaaccctgttgtttaggtctaatttaagttttacatagagacccatgtatgactgcagcccattggctgcaagaccagggaggaaagtggcaagctgtagaaaatgtttacacgcatggaggggcattgctccagccctcagagcgtccggagcagcaggatacatgggtgggaggttcattcagcacccaccagtcaggtatgttctgagtgaacccacagcagtcgcagaatgagcacctggcagggtgggtttcctaggaataatttattatttttaaaaataggcctaataaagcaataatgttctagacatctgtctaagtaatcagactcaggttccacacacaagcaacaactcgtgggcctcttttctatttcaatgtgctactaagaacccttggatgtaacatactagttagttaatgaattctgtgaattctgtgaagagtaatgtgattgaaaataagtctaaacagctgtaaaagtgaccacaatgacatgaaataaatttaataagtctagatcagcaac

SEQ ID NO: 77769 - DNA, 1166 bp, Homo Sapiens
  misc_feature (584)..(584): n is a, c, g, or t
agctgcgaagttgacaatgagtgctctggggtgaagaaatgttgttcgaatgggtgtggacacacctgtcaagtacccaagactctgtacaaaggtgtccccctgaagcccagaaaagagttacgatttacagaactgcagtctggacagctggaggttaagtggtcctcgaaattcaatatttctattgagcctgtgatctatgtggtacaaagaagatggaattatggaatccatcctagcgaagatgacgccactcactggcagacagtggcccagaccacagacgagcgagttcaactgactgacataagacccagccgatggtaccagtttcgagtggctgctgtgaatgtgcatggaactcgaggcttcactgcccccagcaaacacttccgttcttccaaagatccatctgccccaccagcaccggctaacctccggctggccaactccaccgtcaacagtgatgggagtgtgaccgtcactatagtttgggatctccccgaggagccggacatccctgtgcatcattacaaggtcttttggagctggatggtcagcagtaagtctcttgccccaancaaagaagaagcggagaaagactacggatgggtttcaaaattctgtgatcctggagaaactccagccagactgtgactatgttgtggaattgcaagccataacgtactggggacagacacggctgaagagtgcaaaggtgtcccttcacttcacatcgacacatgcaaccaacaacaacagaactacaggaaacagtggaagcagaaatgaccaacatggagttggggaatgagagtcacatcatccctcatgaagtcctgaagagtgagcgatctgcaggcccacaaggaatggacatcattccacacaaacgcagcagcgtggatgagtgtagagagttagagaagcgcattgcatgggcagagaactcagcgtgaggaaagaatgaaggtggatgggccactggtctctcccctggaggtctcattgagttgcaaggatttaaccaccatctgtgtgctaatgactccctgccctcccaccctgaccactctttgaactccagagtcctgcattcagccacccacttagcacctccccttggatggcttgcagatatttcaaataaaacgttcaaacac

SEQ ID NO: 77770 - DNA, 1142 bp, Homo Sapiens
tttaagtactgactgttcaaagctcaggcaaaccatgcagatccacgtgttgttggaggaggcgctcccttcaggagaccacagagggggagtgactgtggctgaccatgtgggcagaggggctggcgggctggcccctgcgagaggcggactcagggctgctggatgctccgtccttggccgctttgatctggagccacgtgtcacccagagctttggcaaagtggtcgtccacggagcccgtgatggacacggagttgggtgccggctcgggctccttgtaattcttgcccaggctcctgcggaaatgctcctccaccacggggtcacaggtggtggcagcgctcggtggcctccggtagctggcaggcccgggcgcggcacagccgctgtgcgcgatggggcagtgcgagaggttgcagttgcgggcgccagccgaggcacaggtgatcacggagggccggttctgctgccgctcccccggggtcagtgtgggcgagaggccggctggcctgctggcgtccaggctgttcttggtcagtgcgaggggctgctccaggccaaggctggggagggaggtgtacaggtggctgccgtgcaggctcatggtgggggccacagcgcgctcgatggggctgcggctccgctcccgggggtctctgcggcagtctccattggcagtcttgttcagatgggggttgaagatgcgactcattttggagacgtggtcgttgtcacagtctaggtcctcgtcacctggctccatgctgaacttcctcttgctggggctgattgggggagggccggtgcggtgactgctgagggcagaggccaccggcagggtctgcattctgggttctcccctgagagcagcttcgcgtttttcgtcatcagcatgcaccagagatgctgccctggacaaaacatccaatggcgtctccattcctggttggagcctgaagggacaggtcacaccggctgcgggaggggctgctcggcgccactgcgctcagaacgaccgcggcggtcccgggcgctccgacgccgctgggtttcctcccattacagcatgttgcactccacgcgctgcagcttcaccctcgtgccgattaacacccagcctcgtacctagccgtaacgtt

SEQ ID NO: 77771 - DNA, 1656 bp, Homo Sapiens
  misc_feature (1179)..(1216): n is a, c, g, or t
taacgatgtctcaaaatcacccatatagaaaagtttctcaacgatttttcctacagaaaatataggggcctgaatgccaaagcttggaagcccagtacagtgcgagtgaaatgtgtgcggggcaaggagaagggcttttctttcctccacttttcaaaggcctgcagccactctgtgactacaagagccagtcctccgaccttttcacccagtgccaatttccaaaattcaacagctaaaaactgtaaaaccgggggtcatacggtgtgcagagtccacaaagccttgcaggtgaggtgaccacgcccacgtcacctggtcaggtgccatcgtcgtgagcctctggtgggccaggtgggacacagcacaccccagggggaggggatagaaacgctcattgaccaaaaaggagcagctgtgacctccacagctgtgtctgtcatgcttgcttcatctaatttctagttagtagctattaatatagcaaataataaatgcagtaataacagtataaagtcagaggaatgtatactgccttggccccagcgtacgaggaagcgtataaaacaccatatcacagattgtctgtcagtaatctgctgttcagccaagagagttcaaagggagcagtttctgcatgtagggaagttggaagacacaaaccccacctcccctgggagcttgtaacaaagcagacagggatgcaaaaataaatgatgtcagcctgcagccaaactccagcatcccacaccgcagctgacccactgctcatcgcgagggcctgccaggagctggcctcccgcactacttgtgagtaaagtgaatatcaaataccaatcttagagtacaactgtaccagcagtaagtatatctaggactgtaactgacaaaaataaactaattctgaaaagaagatagtaagtattaaggtttttgtttactgtctatataattaatagaaaccagctattttttctccattaaaacatgcatcacgtttaaagcactatggaatcctccaacctcagctctagtctaacaaactgcagtgttcagagaagataaaatgcccgtgattggtagagtctgcagtccagttgcaagcacctgaaatctagagagagaaagacctataacctgtatgagacttccccttccaaagctgtattgtctacattnnnnnnnnnnnnnnnnnnnnnnnnnnnnnnnnnnnnnntggtcagaaatgtcatccttaaaccctttgtttttcaccagtttgccctcagagttctggcataacacataaagttgtcaggcaactttagtcctcccccaatagtgcaaatcagacacgacagttctcttcaagtatacacacgcacacacatggaccgaaccaaacacgccgtggaagctgagccacacacaccccggtctcaagaagcaaaggaaaaagcacaaagcgtctgagtcaccaattcatcatggcttgtgactgagaaagcgctgtggagtcctggccccgtcggggcagcagacctgcatcagaggtttctttggtaactgaggcaggaagtaaggatgctacattagacagatgttccacgcgtagttcctgctatcatgtttgagggcccccttgtacggataccaggcaagtacaaaaacagaaca

SEQ ID NO: 77772 - DNA, 636 bp, Homo Sapiens
  misc_feature (504)..(504): n is a, c, g, or t
tttaatggtttagcagtttcaagataaaaaagtattgctataagttatggtgaatatccgtatctccgacttcaaccctttcccaccagtgtgaaaagtgaataaagacagcaagagtttttagaaagttaacttatattaaaaaagtatataaacaatttcaatactacaaagtagtatttcaatacaaagcagttcaaatattaactgttctttaaactgttaaactttattataaattaaaatttctttacaaaaaaattgcacataatatttgaccactcttaggttctgatgcactggcatttgcaatagtttctttaatcttcaagttaaacagtctcggcaaggagtccagaacgtagaaagggtaataaacaaccctgatagagcattcaagtgcaactagcagacttgtggccatggcagttacactttccttaagatggactgctatagttttaaatcctgaaatgaagaatctcaaaaaaatttaaaaagganaaactaaaagggactgcctgctttttttactgtaaacacagccctggatattaaatcccaaacaggaatctctcaggcatcagagagtgtcaagtgagtcaggaataacacaaaataaaggaatggggggag

SEQ ID NO: 77773 - DNA, 536 bp, Homo Sapiens
aaaatacaatgtatttcatctatgtttttattaggtaaaaattaaccattccatataacaaaatagtaatttttaattacaatcttaaaacagaaggaagttaaacaactcaagtgaagttaataacagcagtttttgacaatattagtccttaaaagaaacagtaaaatatttggtttctataacagtcaaaacaattagactgattaaaccataaaaattaataacttataaaagaatccattatgattcatgcattgtatgtattataccactttaagttataccatattgaattcaaacgtatagttttgaattaagaaataaattctttgctcttatttacttgttatcataacaatttaaactgtgttacaactaaaatggtaaaggcagttgtaataaatacctgaggaagattttgaaagttttcctctctaagaattaacagaattattagagttatttcctaatgcagttggctcaccttatctgtaggttctacatccatggccaagaaattgccgactgaaact

SEQ ID NO: 77774 - DNA, 619 bp, Homo Sapiens
  misc_feature (395)..(560): n is a, c, g, or t
aaattataccatacttctttaatataccagtataatacatattacatcaatatgatttctagatatcctcttttgaaaagcaaaagagttaacataagaaacagacaaatgaattacaagaaaaggaaattacataccagtgtcactcatgaaaagacaaaattcttggcaaaatattagcaagtcaaatccaacaacatgtaaaaaggataatataccatgaccaagtaggtttatcccaaaaatgcaatatttggaacatcaacattcaaaaacaaaatcaacattcaaaatttgatagccaatgtaattcgccatattaatacattttgcaagaaaaaccttttgataatctctagatacagaaaaagcatcagataaaactcagcatttannnnnnnnnnnnnnnnnnnnnnnnnnnnnnnnnnnnnnnnnnnnnnnnnnnnnnnnnnnnnnnnnnnnnnnnnnnnnnnnnnnnnnnnnnnnnnnnnnnnnnnnnnnnnnnnnnnnnnnnnnnnnnnnnnnnnnnnnnnnnnnnnnnnnnnnnnnnnnnnnnnnnngaagactagagtccctagtcagtgcaataaggcaagaaaaagaaaaggcatacaaataa

SEQ ID NO: 77775 - DNA, 2593 bp, Homo Sapiens
  misc_feature (793)..(847): n is a, c, g, or t
  misc_feature (2049)..(2094): n is a, c, g, or t
  misc_feature (2340)..(2340): n is a, c, g, or t
atcatagcaggttgcttaatgatacagcaggatcctggcttccagaatccctggacctggggcatccccaactggtccaaccgtccgggtgagtttagtgattctggtttgcccttccctagttagagaaaaactgctctgacatgttcatatttatttatttgtatttccttggtctgggtgagtttcttcacccagtctttgagctaaagattaggtcgaaggtactggggctggccccagaagcctgcagtttttattattaccagcagagggagctacagggagcagtccggtgccttcctattgtttactttttaaacttttgagaagtagcaatggactcgtgagagtgggtatacagctgtgtgggctttgtcctagactgaggcttacagacaggaagggtaagagagacctaagccagctcctagacccttgcctgaggaaatcagtccaccagtgtagagggcctcccttcactccagcatggaccattctattgccagattcttctggtcacagcatgggccttactggatactcaggattgggctttaagcagacctctgggtgtgacacagcctctttcagcccccagcccaaacagcagaaataggcataatttctgctgtgacaccccctacccacaaattggagagtatatcttgctatactctataccaagcctctttctagaatttttccaacaggttttgttttgttttttggcttaactcagaaccatggtgagcgttctgctttgttttgttggagacagggtctctgtcannnnnnnnnnnnnnnnnnnnnnnnnnnnnnnnnnnnnnnnnnnnnnnnnnnnnnngcccaagcagtcctcccacatggtgagctttgaatgggcatagacagggttcccagcccaatagtcgggattggggtataggttctacatgggaaagtatccagtctcttgctttactcagtgtcctgtgaccaccagaggcatgagagggacaacacactcttttcgctctaccacaaggggtgactagaagatgagcaagtctaataaaaagatacggccttatttgttatttgtctgacaaccatccttacgatggtaatcctgtgagtgcctgatggacatctatctttgtgtttttctcaaaccatggaaggttgagaggaatatacagtatctgggggctgacttactctactagctaggagcatcacagcagagagataggacagagaccagagtcatgccagctgagggtcttgggaagagaaggcagatggttactctgttctggaatgggactctgcagctctatgcagtggccaaaattctggagcactttgtgcaaatgcttgtagagctcaagaacatctccatccagaaccccttccccatctgcagagaccatgtccaggcctttcttgtgtctgcagaggtgaagtgcacatgtggaaagggatcaaatgtagcacagtgtaaagaaagacagcaacacaggtagagggacccagtgtgtgctgggaggtggctgtggaaggtaagtatagacctacatctctgttggggaggtggtcagggcagaatggcctgggtgtttagcagcttctaggggtgagggtggcaggaccccaaaaccaaggccctctgcatcgttgttgtaataatcagctctggcatattcagctgcaactgtccctgaagaagaggtttctgagctggctgaccccatgtaggagggtgttaccttgtagaaaaagctggagggacctggtgggacagtgcagtgaggcagggtagaaatggtcagttgtttagggccagtggccacataccaaaataccaccaatgtgcccagggccaaactgccttaattctgagtgctgtgtgttctgcaggtgacagtttcctgaggagaggggtgtatccaggcttacctcccagcaggagtggtaccatatggtgtttatgtactactctatagaactcttggcttgcacttctacagctctgtacatttataagaataaatgcaatgcacactnnnnnnnnnnnnnnnnnnnnnnnnnnnnnnnnnnnnnnnnnnnnnncaaaggaggggggcgggggcgcctcccaaagaatctacccccggggggggccccacagttttagcgcgcgcgcccccgattttttggtcaaagggggggccccctaaagggggagagcgcgcgttatataaaagacggcagaggcccggaggcgcgcggcgttttaacaacaaccgggcgggcagaggggaaaaacacagctgtggatgagggtggggaatctcttggggaggaggagaacccccntctactgctagcgggagggggcgacaaattagtgtggggaacaacacatatcctagaggggagtttatataaggcgtactagaagggaatatattacagaaattggaggtggtataatgagggggtgtaaacacgaagggagaattttggatgcgcagtgggttagtagaagttgttggagctagagcgggggatgtttgatctgttaggaaaagtattattatacgaggggcttgtgctagtatataagatg

SEQ ID NO: 77776 - DNA, 751 bp, Homo Sapiens
  misc_feature (77)..(140): n is a, c, g, or t
aaactatagcctggcgtgtagcgcacgcctgtgtcccagctgctggggaggctgaagtaggaggatcatttatgctnnnnnnnnnnnnnnnnnnnnnnnnnnnnnnnnnnnnnnnnnnnnnnnnnnnnnnnnnnnnnnnnagaccctgtttcaaaaagaaaaaccctgggaaaagtgaagtatggctgtaagtctcatggttcagtcctagcaagaagcgagaattctgagatcctccagaaagtcgagcagcacccacctccaacctcgggccagtgtcttcaggctttactggggacctgcgagctggcctaatgtggtggcctgcaagccaggccatccctgggcgccacagacgagctccgagccaggtcaggcttcggaggccacaagctcagcctcaggcccaggcactgattgtggcagaggggccactacccaaggtctagctaggcccaagacctagttacccagacagtgagaagcccctggaaggcagaaaagttgggagcatggcagacagggaagggaaacattttcagggaaaagacatgtatcacatgtcttcagaagcaagtcaggtttcatgtaaccgagtgtcctcttgcgtgtccaaaagtagcccagggctgtagcacaggcttcacagtgattttgtgttcagccgtgagtcacactacatgcccccgtgaagctgggcattggtgacgtccaggttgtccttgagtaataaaaacgtatgttgcaaaaa

SEQ ID NO: 77777 - DNA, 542 bp, Homo Sapiens
cctcttgtagattcccgcgcgcaccaccacttctcgcagtagctcaagatcggcgagggtgctttggcgtgcgtgtacggccggctcatgaggaacacggtgtatgctgtaaagaggctgaaggagaacgctgacctggagtggactgcagtgaagcagagcttcctgaccgaggtggagcagctgtccaggtttcgtcacccaaacattgtggacttttctggctactgtgctcagaacggcttctactgcctggtgtacggcttcctgcccaacggctccctggaggaccgtctccactgccagacccaggcctgcccacctctctcctggcctcagcgactggacatccttctgggtacagcccgagcaagtcaggtttcatgtaaccgagtgtcctcttgcgtgtccaaaagtagcccagggctgtagcacaggcttcacagtgattttgtgttcagccgtgagtcacactacatgcccccgtgaagctgggcattggtgacgtccaggttgtccttgagtaataaaaacgtatgttg

SEQ ID NO: 77778 - DNA, 1386 bp, Homo Sapiens
tcggagatcggcaccatgagacttctgaccatgagaccttgaactccggattttggggacttcaccaggtgaacacatcagctcgtgaagtcaatcacctttttcgggcccgtgccgtgtcctgttaccagcccaaagcctgggagggagctggacgacagcagctccaggctgtccagggccccaatcctccgtacagggccagcttctggaccatcttctgtcgggcacgggttgatgataatctcggtggctctgacgacgatgatgcagagctgccaagggccagtccttccacggctgtgggccgggatcctgggccactcccccagctcgattctcctgccgtgtccccctgaggacagccggcctccctgaggggtgctgggtccagagggcagcttggagtcaagtgccaggagcgcagggcagcagagaggccgcctaggctctcgtcactctccacgggctggttggggcctctctgcagctgctctgctgcctgggcactggctcctgatggcgctgccaggggctgccatggagcagccccactgtgggctctgccagtgctggacacgtaggagttctcctgcggggaaggggggatgcagctggcggcctccgaatgcccgggcacccccgccaccactgcctgcagcttctctagcctctcgtacacctgggtcataggaggcctccttttggcccggcggtgcaggcagcagcaggccagctggcccaggcccaggcccagctcaggtgggcagggcccgggcctggggtccaggtgcttcttgtagatctgcatggcgatgggagcagcccaggcatctgcagccagacctgcttgcagtgtgctctgggtgcttctcaaagccactccagcctcctcagcctcctcttccaccaggtctttcagatacttggtcctggcaccgtgcgtcttcacagccctctgaccagccaaggtctctagcactaccaccccaaagctgaaggtgtccgtgtccacagccagccttcccgtcttgatgtactcctcgggcaggtaggccagggtgccccgcactgtctgtgtccgggccaccatgctgctctggctggggctggacccggcaaagcggctgaaccgggccaggccaaagtctcccagcttgggtgtcagcctctcatccagaaggacgttggaactcttgatgtctccatggatgaggctggggctgtcctgatgtagaaactgaattgcccgggctgtacccagaaggatgtccagtcgctgaggccaggagagaggtgggcaggcctgggtctggcagtggagacggtcctccaggaagccgttgggcaggaagccgtcctcgtgccgaaatcgccacccaggcc

SEQ ID NO: 77779 - DNA, 3126 bp, Homo Sapiens
  misc_feature (2506)..(2807): n is a, c, g, or t
ggagagagtatgaagtcgacggcgcgccgaattcggcacgaggaaagtgatggacgccctggagcccgccgactggtgccagttcgccgccctgatcgtgcgcgaccagaccgagctgcggctgtgcgagcgctccgggcagcgcacggccagcgtcctgtggccctggatcaaccgcaacgcccgtgtggccgacctcgtgcacatcctcacgcacctgcagctgctccgtgcgcgggacatcatcacagcctggcaccctcccgccccgcttccgtccccaggcaccactgccccgaggcccagcagcatccctgcacccgccgaggccgaggcctggagcccccggaagttgccatcctcagcctccaccttcctctccccagcttttccaggctcccagacccattcagggcctgagctcggcctggttccaagccctgcttccctgtggcctccaccgccatctccagccccttcttctaccaagccaggcccagagagctcagtgtccctcctgcagggagcccgcccctctccgttttgctggcccctctgtgagatttcccggggcacccacaacttctcggaggagctcaagatcggggagggtggctttgggtgcgtgtaccgggcggtgatgaggaacacggtgtatgctgtgaagaggctgaaggagaacgctgacctggagtggactgcagtgaagcagagcttcctgaccgaggtggagcagctgtccaggtttcgtcacccaaacattgtggactttgctggctactgtgctcagaacggcttctactgcctggtgtacggcttcctgcccaacggctccctggaggaccgtctccactgccagacccaggcctgcccacctctctcctggcctcagcgactggacatccttctgggtacagcccgggcaattcagtttctacatcaggacagccccagcctcatccatggagacatcaagagttccaacgtccttctggatgagaggctgacacccaagctgggagactttggcctggcccggttcagccgctttgccgggtccagccccagccagagcagcatggtggcccggacacagacagtgcggggcaccctggcctacctgcccgaggagtacatcaagacgggaaggctggctgtggacacggacaccttcagctttggggtggtagtgctagagaccttggctggtcagagggctgtgaagacgcacggtgccaggaccaagtatctgaaagacctggtggaagaggaggctgaggaggctggagtggctttgagaagcacccagagcacactgcaagcaggtctggctgcagatgcctgggctgctcccatcgccatgcagatctacaagaagcacctgggccagctggcctgctgctgcctgcaccgccgggccaaaaggaggcctcctatgacccaggtgtacgagaggctagagaagctgcaggcagtggtggcgggggtgcccgggcattcggaggccgccagctgcatccccccttccccgcaggagaactcctacgtgtccagcactggcagagcccacagtggggctgctccatggcagcccctggcagcgccatcaggagccagtgcccaggcagcagagcagctgcagagaggccccaaccagcccgtggagagtgacgagagcctaggcggcctctctgctgccctgcgctcctggcacttgactccaagctgccctctggacccagcacccctcagggaggccggctgtcctcagggggacacggcaggagaatcgagctgggggagtggcccaggatcccggcccacagccgtggaaggactggcccttggcagctctgcatcatcgtcgtcagagccaccgcagattatcatcaaccctgcccgacagaagatggtccagaagctggccctgtacgaggatggggccctggacagcctgcagctgctgtcgtccagctccctcccaggcttgggcctggaacaggacaggcaggggcccgaagaaagtgatgaatttcagagctgatgtgttcacctgggcagatcccccaaatccggaagtcaaagttctcatggtcagaagttctcatggtgcacgagtcctcagcactctgccggcagtgggggtgggggcccatgcccgcgggggagagaaggaggtggccctgctgttctaggctctgtgggcataggcaggcagagtggaaccctgcctccatgccagcatctgggggcaaggaaggctggcatcatccagtgaggaggctggcgcatgttgggaggctgctggctgcacagacccgtgaggggaggagaggggctgctgtgcaggggtgtggagtagggagctggctcccctgagagccatgcagggcgtctgcagcccaggcctctggcagcagctctttgcccatctctttggacagtggccaccctgcacaatggggccgacgaggcctagggccctcctacctgcttacaatttggnnnnnnnnnnnnnnnnnnnnnnnnnnnnnnnnnnnnnnnnnnnnnnnnnnnnnnnnnnnnnnnnnnnnnnnnnnnnnnnnnnnnnnnnnnnnnnnnnnnnnnnnnnnnnnnnnnnnnnnnnnnnnnnnnnnnnnnnnnnnnnnnnnnnnnnnnnnnnnnnnnnnnnnnnnnnnnnnnnnnnnnnnnnnnnnnnnnnnnnnnnnnnnnnnnnnnnnnnnnnnnnnnnnnnnnnnnnnnnnnnnnnnnnnnnnnnnnnnnnnnnnnnnnnnnnnnnnnnnnnnnnnnnnnnnnnnnnnnnnnnnaaaccctgggaaaagtgaagtatggctgtaagtctcatggttcagtcctagcaagaagcgagaattctgagatcctccagaaagtcgagcagaccacttcaactcgggccgtgtcttcggctttactgggactgggagctggctatgttggtggctgaagcagccctcctgggcgccggagagttcggccgtcggttcgagccagttcgctcggccgctgtggggggggcgccccggttttggcccctttccccggagccgcggatgggtgcgccgcaggcctgcggtttctttccccggtcgctctctctccgggcgg

SEQ ID NO: 77780 - DNA, 1540 bp, Homo Sapiens
agtaatataacggtttaaggtagcgaggctgggtggcgaattcggcacgaggcctgtggcctccaccgcaatctccagccccttcttctaccaagccaggcccagagagctcagtgtccctcctgcagggagcccgcccctctccgtttgctggccctctgtgagatttcccggggcacccacaacttctcggaggagctcaagatcggggagggtggctttgggtgcgtgtaccgggcggtgatgaggaacacggtgtatgctgtgaagaggctgaaggagaacgctgacctggagtggactgcagtgaagcagagcttcctgaccgaggtggagcagctgtccaggtttcgtcacccaaacattgtggactttgctggctactgtgctcagaacggcttctactgcctggtgtacggcttcctgcccaacggctccctggaggaccgtctccactgccagacccaggcctgcccacctctctcctggcctcagcgactggacatccttctgggtacagcccgggcaattcagtttctacatcaggacagccccagcctcatccatggagacatcaagagttccaacgtccttctggatgagaggctgacacccaagctgggagactttggcctggcccggttcagccgctttgccgggtccagccccagccagagcagcatggtggcccggacacagacagtgcggggcaccctggcctacctgcccgaggagtacatcaagacgggaaggctggctgtggacacggacaccttcagctttggggtggtagtgctagagaccttggctggtcagagggctgtgaagacgcacggtgccaggaccaagtatctgaaagacctggtggaagaggaggctgaggaggctggagtggctttgagaagcacccagagcacactgcaagcaggtctggctgcagatgcctgggctgctcccatcgccatgcagatctacaagaagcacctggaccccaggcccgggccctgcccacctgagctgggcctgggcctgggccagctggcctgctgctgcctgcaccgccgggccaaaaggaggcctcctatgacccaggagaactcctacgtgtccagcactggcagagcccacagtggggctgctccatggcagcccctggcagcgccatcaggagccagtgcccaggcagcagagcagctgcagagaggccccaaccagcccgtggagagtgacgagagcctaggcggcctctctgatgacctgcgctcctggcacttgactccaagctgccctctggacccagcaacccctcaggggaggccggctgtcctcacgggggacacggcaggagaatcgagcctggggggagggcccaggatcccggcccaccaacgtgggaaggactggcccctggcaactctgcatcatcggcgtccgacccaccgcaaatatcatcaaccctggcccgacagatgatggtccacaaaactgggcccttgtacaagggaaggggcccctggaacacccgcaaaggtgtggttgc

SEQ ID NO: 77781 - DNA, 714 bp, Homo Sapiens
  misc_feature (633)..(633): n is a, c, g, or t
tttgggagggaggcagccggcaggactggggaggggagggagggattggcctcccctgccagctgctcggccccggctttattgtgagcaggagcagccgcagcgactctccacatgctggccctcctgggggctcagtccccagtaggctcccccaggctgagccccagccctaacactgatgcttggcagcgaccacacctcagggggcccttctcaggacttgtgctggtggctcctggggccttctggctttttgggcggtggggccgctgtcctcggggcatccagggcctgcctccggatgagctcggcgtatagcccgcctttcttcaggagctcttcatgtgtcccagcctcccagacacggccatcggccatgacgacaatgcagtgggccccacggacagtgctgagccgctgggcaattaccagcaccgtgcggcctgcactggcccggtccagggcctcctgtacaacccgctcggactctgcatccagcgcgctggtagcttcatccagtatcagcaccgtgggctgcttgataagggctcgggcgatggccaggcgctgcttctggcccccagacagggtagtgccccgttcaccgacgaccgtgttgtagccctcggngaagctggtgatgaactcgtgagcattcgcttcccgggcggctgtgtacacctcttcatcggaaagcttcagcttcccaaa

SEQ ID NO: 77782 - DNA, 606 bp, Homo Sapiens
  misc_feature (65)..(114): n is a, c, g, or t
cgatggataaatctgcttcaccagtaattctatttagtaaaatccacagttaatggagaattccnnnnnnnnnnnnnnnnnnnnnnnnnnnnnnnnnnnnnnnnnnnnnnnnnnaaaaaacactcattcaagattgtaatttgcatggcgataaacaagggttccatgggttctaagtttcttaaaagtgtccacagcaacttaaaacaccacaagtcttctttccaatttgcagcacctgacttaaagtttaaattcatcaaatacatcattaaaactgtcattttctcttgtgagaagacatgtttcaattgctatttccaggactatatattgagcatgggtgtacagtacttttaactggttagcacaattttactcacataatttatagccagaataagaacctctagcctctctgaacggccttccactcagagcagatgatgacgataaatgtctaaaatgtatctggggtactccacttgacattaccaaacatgcttccaaataatcttagaaaatatgattctttaaacatatgcataatattctaccacacaatgcaccatcacttctttaaccatttcccaattgttcatttat

SEQ ID NO: 77783 - DNA, 997 bp, Homo Sapiens
  misc_feature (60)..(244): n is a, c, g, or t
  misc_feature (258)..(258): n is a, c, g, or t
  misc_feature (294)..(295): n is a, c, g, or t
  misc_feature (307)..(307): n is a, c, g, or t
ggagcggaggcgcccatacgcaaccgctgtcccgcgcgttgcggatcataatgcagtgcnnnnnnnnnnnnnnnnnnnnnnnnnnnnnnnnnnnnnnnnnnnnnnnnnnnnnnnnnnnnnnnnnnnnnnnnnnnnnnnnnnnnnnnnnnnnnnnnnnnnnnnnnnnnnnnnnnnnnnnnnnnnnnnnnnnnnnnnnnnnnnnnnnnnnnnnnnnnnnnnnnnnnnnnnnnnnnnnnnnnnnnnnttgggccctcgagnccaagaatcgggcacgaggatattttctaagatatnntggaagcatgtntggtaatgtcaagtggagtaccccagatacattttagacatttatcgtcatcatctgctctgagtggaaggcccgttcagagaggctagaggttcttattctggctataaattatgtgagtaaaattgtgctaaccagttaaaagtactgtacacccatgctcaatatatagtcctggaaatagcaattgaaacatgtcttctcacaagagaaaatgacagttttaatgatgtatttgatgaatttaaactttaagtcaggtgctgcaaattggaaagaagacttgtggtgttttaagttgctgtggacacttttaagaaacttagaacccatggaacccttgtttatcgccatgcaaattacaatcttgaatgagtgttttttaaaaataaagtattagaaaaatgtgtagtaaagatgtaaaattaaaaaatggaattctccattaactgtggattttactaaatagaattactggtgaagcagatttatccatcgagactatctggtatgcgttatgtatgtagtctgttgctgctgaaagatgtctgtgtgcctgtatcaacatgtgacttcatgtaaagtttctttgtgttcacagttcttagcaaatgcagttacaatccatagatagccagcagtggatgttactccaggaaaatgcaggattaaaattgtccttgtgtaaaa

SEQ ID NO: 77784 - DNA, 1526 bp, Homo Sapiens
  misc_feature (1330)..(1392): n is a, c, g, or t
aaaaacgtaggctaggtacgaggcctgggtggttaaattcggcacgaggggctgggtatggaggcgaaggcggcacccaagccagctgcaagcggcgcgtgctcggtgtcggcagaggagaccgaaaagtggatggaggaggcgatgcacatggccaaagaagccctcgaaaatactgaagttcctgttggctgtcttatggtctacaacaatgaagttgtagggaaggggagaaatgaagttaaccaaaccaaaaatgctactcgacatgcagaaatggtggccatcgatcaggtcctcgattggtgtcgtcaaagtggcaagagtccctctgaagtatttgaacacactgtgttgtatgtcactgtggagccgtgcattatgtgtgcagctgctctccgcctgatgaaaatcccgctggttgtatatggctgtcagaatgaacgatttggtggttgtggctctgttctaaatattgcctctgctgacctaccaaacactgggagaccatttcagtgtatccctggatatcgggctgaggaagcagtggaaatgttaaagaccttctacaaacaagaaaatccaaatgcaccaaaatcgaaagttcggaaaaaggaatgtcagaaatcttgaacatgttctgatgaaagaaccaagtgacccaaagtgacctggacaagattcatagactgaaagctgttgacatcgttgaatcatatgtttatatattgtttttaatctgcaggaaaatggtgtctctcatcatttgctctgttaagggaacaaattagcactttttagaagtctgacaattgtaaacagttattagcttttccagaagctgattcccattttaagatgggggaaaattaaggtttgaggttttagaaattagcaagtagtgcatacccttctagccacaagtgcccagtccaggaaagtgctgacttcttagagaatgtgtggccagacccagggacctggagtgtgtttggactgcagtttgccaccctgagaacaccttctccaggactggcatttcagaatcagattcttcattttttgcagctacgatgttcttccagggcactgggggctgtgacttctctctaaattgtatataagttgtgtatatagagaccataattatatggtccttagaaaagactttgcttttataaagcatttagaaaaaatgcatacttttaaaacaagtgcttgagttgtcacttaaaaattatagcatattgctataataaaaccttatttatgtcttatttgaagatgaatagtcttaaaagataaagacataaatgggacaattgttatnnnnnnnnnnnnnnnnnnnnnnnnnnnnnnnnnnnnnnnnnnnnnnnnnnnnnnnnnnnnnnntgatagattacacagtttattggaggacaataagagttatggcaaaaagcaaaaggaacacagggtaaaggggataggtgccatttggtggtgagaatgctgactgaaaaatagaatgatcaatttaatctgaa

SEQ ID NO: 77785 - DNA, 1110 bp, Homo Sapiens
  misc_feature (754)..(782): n is a, c, g, or t
  misc_feature (977)..(1012): n is a, c, g, or t
aggttccctaacagtcaggattccggttgcagtttttctcccccgccccaaagatacgtggttgcagacggagaaatggaggccagagacaaacaagtactccgctcacttcgcctggagctgggtgcagaggtattggtggagggactggttcttcagtacctctaccaggaaggaatcttgacggaaaaccatattcaagaaatcaatgctcaaaccacaggcctccggaaaacaatgctcctgctggatatcctaccttccaggggccctaaagcatttgatacattcctagattccctacaggagtttccctgggtcagggagaagctgaagaaggcaagggaagaggccatgaccgacctgcctgcaggtgacagattgactgggatcccctcgcacatcctcaacagctccccatcagaccggcagattaaccagctggcccagaggctgggccctgagtgggagcccatggtgctgtctctgggactgtcccagacggatatctaccgctgtaaggccaaccacccccacaacgtgcagtcgcaggtggtggaggccttcatccgttggcggcagcgcttcgggaagcaggccaccttccagagcctgcacaacgggctgcgggctgtggaggtggacccctcgctgctcctgcacatgttggagtgatggtgcctccagcaaccgctggggagtgtgtccctgagtcatgtgggctgaatcctgactttcactcagagcaggtggnnnnnnnnnnnnnnnnnnnnnnnnnnnnngatgatcttcagatggaaggagaaaacagggtttccactagacattacttgaaaggccagattactcagcagatctcccatgttggctcaacaattctttgtttttaattgcttgaagattgcattgttgtaattgttcagtttttaaatgtgtaatggcattttaatagactagtaaatcacagtggttcaaannnnnnnnnnnnnnnnnnnnnnnnnnnnnnnnnnnnctcatgtcatcacattacaggcaggtgtctcatatgtaaaacatttacctgaatgttgtctgaggactgaagtgtgaactttactattcacctcgtgc

SEQ ID NO: 77786 - DNA, 1388 bp, Homo Sapiens
tctctgcattctatatgttccaaaaggatttaccattgaaacaaatacaatatatggaactctatctgtataatttcactacaacaaagacaacatatgacttctacttcctacagaaggctaactgaaagcacaagtgcaaacatagattgcataagaaagcgtgtgtgtgtgcatgtgcggttaaaacctttagtaagcaactgcattaaaatatgctaagacactcaccttaccctagttcgtggcgagctctaataaaaagccacaagctgtcactagttttatttgatagaaaaatttggtgtgagctttgatgattcatttatggtttatcaacaagaaggtaatcttagaacaagcactaactttccgcttttacatgctcacagaatacaaatcagttacttttcatacataatgaacgtcttttattttcgggtttgcaaacaacggtagtcaattcacacaaaagggtacttttaaaactacctgtatttactctattttatgcctgtatatatgaaacaaacagcgtgaatgtgcataaatgtatgtctgtacatgtgggtatatatgtgtatacaagatggtacctgtacacctctttgtatgcatgtatgacctccatgatgacaggtgcagttgtacatttactgaggagggagagattctctaccatgatctgtgtccccattagaatcagtacgactgtggattcgggacacatacaaatgcaggttggtgcccatgaaagaaaatgtcagcccttttcttggcatttggtggtgaaattgcctgctctgctcctcacctccttggctcaggatcacggcatcagatggcagtgtaaattggttgtagtcctcgaactcaataaagagaaaggacttctttctctgctctccctctctgtggacctgcctggctggttgtggcagcattcagactgaacgggacagtggagaagtagcttcggagcaaaagtgacagctctgtggtctgtcctcatgctgaccttgatgcgggaggccctggagggttcaggtgtcttagtttccacccaccttgcttaaccttgcaaggaagaatggcatcaaaacgaggcttctccaggatagtctctctctataaataccgtgtatatatacatacagatactcatacatacaccaatactaacccacagacaaagctgggtgcctggagcactggctagcgacatgttaacacaccagaaaaagtagtcattgttcctgctcccagaagatcaagtcatatgtcatgatctttaaacattcagggaaaattcagaagattccattaattaaaggagggaggaagatgctgtcaaaatgatgaagtacagactaagtgaaattgtaaag

SEQ ID NO: 77787 - DNA, 676 bp, Homo Sapiens
aggatgacagtgtctgggggcatcacaaaacagttgtacaatccaatgcagccgtcctgctcatacagtaagatccattaggccagagcaggcctaacttgggtggagagcccagcctgagcaccagaattagttgcttccacttgtgcagcctgctgaagagccggactcaggttgaagcagctttcctcccagtcttcactgatctccacagggagaaaacagaagtccccacaagtaccaagctcttcctgagactgcagccaccacacctcggggaaggggaggctggcaggagaggagtacactgtcccggtgacccacaccaaggtggctccaagtgtaaacaaagcctggtgccagggacagaagaggatgcagcctgatgtgaggttttcagaaaagtgaaatgacctagcaccaggttgggattgcttgggtctgcacagcagtccctcacactgcccttacagagaggaacaggttatttgatgacttgggcccatgagatgttctccaagccattgacagctgagagaattcaggtgatccacctgaatatcagaagtttcagccctcttagagttcgtaacagaaacccagagatttactgtcagctagaacaaagatgtaaggtctcaagtaaaataaaggattgtccttcaaaacagcaaaa

SEQ ID NO: 77788 - DNA, 669 bp, Homo Sapiens
tccatcctggtggacagagtgagccctgtctcaaaataaataatccagtcccccccaagaaaggaatgaagtgctataatgagaaaaatcctagtacctaacatatagtagacagtggagagtggttctctttcgtttctcaggggcagacagatggggtgctggagtcctctatcaaagagtcagagctctatcccagatgtgtaatgaacgtggtcacagacatattgtcccattaccatttaccttccctataaccactgtgcctccagccttgtagaatagacacataggagcgcagcaatacgtctaaaaataggagtgagagagggcagggcatgcccgttcttgtggtagaagaaaagaatgtcaaagaaagcagctgggactaatgaactttacattagccatattccattatttcagcttaagtcaaatgtcggtcctcatgaggcaactggctttgacaggagctacgctaattaccacttaccaacctttaatttctgggtaaaagcaaaagagaaaaactaatggatttttcattttccagagagacaagaataaaataatagtagtctgtagaaaaaagaaaacctgcatcaattacaagaattattaatgtatctttaataaataaccacattatttagctgtttaatttcctaa

SEQ ID NO: 77789 - DNA, 1346 bp, Homo Sapiens
  misc_feature (1137)..(1224): n is a, c, g, or t
  misc_feature (1238)..(1238): n is a, c, g, or t
  misc_feature (1240)..(1240): n is a, c, g, or t
  misc_feature (1252)..(1278): n is a, c, g, or t
gtggaccggtccggaattcccgggatatcgtcgacccacgcgtccgctcgggagatggacggccgccgtgttttgggccggttctggagtggctggcggcggggcctgggtgtccgcccagtgcccgaggacgcaggctttggcaccgaagcccggcatcagaggcaaccccgcggctcctgccaacggtcggggcccctcggggaccagcccttcgcggggctgctgccaaaaaacctcagtcgggaggagctggttgatgcgctgcgggcagccgtggtggaccggaaaggacctctagtgacgttgaacaagccacagggtctaccagtgacaggaaaaccaggagagctgacgttgttctcagtgctgccagagctgagccagtccctagggctcagggagcaggagcttcaggttgtccgagcatctgggaaagaaagctctgggcttgtactcctctccagctgtccccagacagctagtcgcctccagaagtacttcacccatgcacggagagcccaaaggcccacagccacctactgtgctgtcactgatgggatcccagctgcttctgaggggaagatccaggctgccctgaaactggaacacattgatggggtcaatctcacagttccagtgaaggccccatcccgaaaggacatcctggaaggtgtcaagaagactctcagtcactttcgtgtggtagccacaggctctggctgtgccctggtccagctgcagccactgacagtgttctccagtcaactacaggtgcacatggtactacagctctgccctgtgcttggggaccacatgtactctgcccgtgtgggcactgtcctgggccagcgatttctgctgccagctgagaacaacaagccccaaagacaggtcctggatgaagccctcctcagacgcctccacctgaccccctcccaggctgcccagctgcccttgcacctccacctacatcggctccttctcccaggcaccagggccagggacacccctgttgagctcctggcaccactgcccccttatttctccaggaccctacagtgcctggggctccgcttacaatagtcctccctctgttcctgaccccctcacacacactggaaagtgagggtgggnnnnnnnnnnnnnnnnnnnnnnnnnnnnnnnnnnnnnnnnnnnnnnnnnnnnnnnnnnnnnnnnnnnnnnnnnnnnnnnnnnnnnnnngacttgtgataatnanagttcctccctnnnnnnnnnnnnnnnnnnnnnnnnnnnaacatgtccgggcgcccttcggccctccgagaagcttttctagaacccatttcgtttggccggcccgg

SEQ ID NO: 77790 - DNA, 685 bp, Homo Sapiens
gagagactgagcaaagagcttcccaagctcttctttcagtcccacgactacagtctgtattccttggatgtggaattcatcaatagaatcctcaacatacgtaccaagggccggacatggtacattctttcactgaccctctgccgtttcctggcctggaattattttgcacaccttcgtttggaggttttacagctgacccgccaccctgagaactggaccctgcaagcccggtggcggcttgtggggctgcccgtccacttgctctttttgcggttctacaagcgtgacaaagacgagcattaccggacctatgatgcctactccactttctacctgaattccagtggcctcatttgtcgccatcgtctagataaactgatgccttcacactcacctccaacgcctgtgaagaagctgctagtgggagccctggtggccctggggctgtcagagccagaacctgacttaaacctgtgttccaagccctgatccttgaccttggagtggaggcagcactgaagactgctacgcccaagagaaggaggtggaggcagccaagaatctcaggagccagcttcctctcctcgtttctctccttccttcctttccatctcatgctgtgtaaagctgctgtgtaatttaacttgtaaataataaagtttaactgactatatgagaaaaa

SEQ ID NO: 77791 - DNA, 697 bp, Homo Sapiens
  misc_feature (86)..(86): n is a, c, g, or t
ccaaagcccagatcaagtccgggaaactgagcccatccacagctgtgaaacaagttgtcaagaatctgaacgaacgatataaattntgcatcaccatgtgcaagaaacttacagaaaagctgaatcgattcttctctgacaaacagaggtttattgatgaaatcaacagtgtgactgcagagaaactcatctataattgtgctgtagaaatggttcagtctgcagccctggatgagatgtttcagcagaccgaagatattgtttatcgctatcataaggcagcccttcttttggaaggcctaagtaggattctacaggaccctgcagatattgaaaatgtgcataaatataaatgtagtattgagagaagactgtcggcgctctgccatagcaccgcaaccgtgtgagcagcaggctcatcccgtggaccggtggtgggaacgtgaggtgatgcctttgggattacagcttgagttctgtcaccccatccccaggaaactgtagcttcttaactggtgactaccaaagaacaagcagtgatttgaaaaaggaaaaacaatccaaaaactacatatttgtaggaaatctgccttattggagaaaatcaccctttccctttttctttgtagaagcaggagcaagagtgtttggctcccagtttggacttggtgaataaatgtaccttagaactaggaaa

SEQ ID NO: 77792 - DNA, 1208 bp, Homo Sapiens
  misc_feature (870)..(1055): n is a, c, g, or t
  misc_feature (1064)..(1138): n is a, c, g, or t
ttttttgccgtaggcaccattctgcatcttgaacccagactgaagtgtgcctctcacagatggaaggtgcacacgctcctgtctcctcctcactctgccacgttcacttggctttttcattggtacctaggaatttaagaatatcgaagcgagagcagtaacaaaccatagatgagcagactcccacaccgggttttcttgcccgtctttaaggcactgtttctaaattttgaacttagctctgaatccccaagaacttgagcacagcaagggttgctgagctgctgtcgccgcagccctggcccctggtgctggagctgcagcacctttgggagaggtcctgcgtcgtcctcagctgcgtcgctgtgaactcccgctctccactgtgttcctcagtgtctgcttttcaggaagtctgctgtgacctttgcccaacttctgagctcctcagggactaggaacaatttcagtagctttgccctgaaccaaacgagaaaacaaaagggaactcccgtatgacccacgtcacgtggtgcactcagagtgtgtgcggcatgatcctcggttgctcctcctctcactttagtagagtacgcggtggacagctgatctccttcagtcgtctacccacttccgtcattgtcctccgctagaataacagagtagttggtagtcatggccagaaggggggtgggggcagtgtgaggacttggggtttctgtgctgtgtgacacaaggagataagtgacaatcttgaagtcctaacttccactattctagaaagtatagtggtgatttgtgtgcaaagatttgaagttttaaaaaagtaccaagttcctgaaattcaataaaatatttttattaattttnnnnnnnnnnnnnnnnnnnnnnnnnnnnnnnnnnnnnnnnnnnnnnnnnnnnnnnnnnnnnnnnnnnnnnnnnnnnnnnnnnnnnnnnnnnnnnnnnnnnnnnnnnnnnnnnnnnnnnnnnnnnnnnnnnnnnnnnnnnnnnnnnnnnnnnnnnnnnnnnnnnnnnnnnnnnnnnnnnnnnnnnnngttttgggnnnnnnnnnnnnnnnnnnnnnnnnnnnnnnnnnnnnnnnnnnnnnnnnnnnnnnnnnnnnnnnnnnnnnnnnnnngggggtaaatctttttttctttgaaaaaacccccggaggaaaataagagggggtttttttccccccccac

SEQ ID NO: 77793 - DNA, 1805 bp, Homo Sapiens
  misc_feature (973)..(973): n is a, c, g, or t
  misc_feature (1741)..(1759): n is a, c, g, or t
gtcggttctggcaggtctgagcgctccgacttccagaggagcgctgtgcacgtggacgaagagcggggactcggcgaccctgccctcccgaccctcatgttcgaagagcctgagtgggccgaggcggccccagtagccgcgggccttgggcccgtaatctcacgacctccgcctgcggcctcctcgcaaaacaaggcctcatccattctctttaggcccactgtcatcccctgttttcctccagggctccaagcgccgccagctcttggccacattacgggccctagaggcagcatctctttcccagcatccccccagcctatgtataagtgactctgaggaggaggaggaggaaaggaagaagaaatgccccaaaaaggcatcatttgccagtgcctctgctgaagtagggaagaaagggaagaagaaatgtcaaaaacagggcccaccttgcagtgactctgaggaagaagtagaaaggaagaagaaatgccacaaacaggctcttgttggcagtgactctgctgaagatgagaaaagacagaggaaatgccagaaacatgcccctataaattcagcccagcacctggacaatgttgaccaaacaggtcccaaagcctggaagggtagtactacaaatgatccaccaaagcaaagccctgggtccacttcccctaaaacccctcatacattaagccgcaagcagtggcggaaccggcaaacagaacaagagaagatgtaagaacaagtttcagccacctcaggtgccagaccaggccccagctgaggcccccacagagaagacagaggtgtctcctgttcccaggacagacagccatgaggctcgggcaggggctttgcgagcccgcatggcacagcggctgcatggggcccgatttcgctacctcaatgaacagttgtactcagggcccagcagtcctgcacagcgtctcttccaggaagaccctgaggncttttcttctctaccaccgcggcttccagagccaagtgaagaagtggccactgcagccagtggaccgcatcgccagggatcttcgccagcggcctgcatccctagtggtggctgacttcggctgtggggattgccgcttggcttcaagtatccggaaccctgtgcattgctttgacttggcttctctggaccctagggtcactgtgtgtgacatggcccaggttcctctggaggatgagtctgtggatgtggctgtgttttgcctttcactgatgggaaccaacatcagggacttcctagaggaggcaaatagagtactgaagccagggggtctcctgaaagtggctgaggtcagcagccgctttgaggatgttcgaacctttctgcgggctgtgaccaagctaggcttcaagattgtctccaaggacctgaccaacagccatttcttcttgtttgatttccaaaagactgggccccctctggtagggcccaaggctcagctttcaggcctgcagcttcagccatgtctctacaagcgcaggtgacctctggatcttccttgaaaggggaggcagatctcaaactccaggctcagaactgtgaagactgtttccagcctggctgtgagccaagacctggttcctggtggaccctgaggacaaagtgtgataaaacctctggctcagacttgctctactgaaggcttcttggttataagatgcataaagtcactggggctagctaaacaataaagagtttattgtgagnnnnnnnnnnnnnnnnnnncctgagcaggcggccgcaagcttattccctttagttgagggttaat

SEQ ID NO: 77794 - DNA, 1787 bp, Homo Sapiens
  misc_feature (751)..(763): n is a, c, g, or t
  misc_feature (776)..(784): n is a, c, g, or t
  misc_feature (912)..(920): n is a, c, g, or t
  misc_feature (1501)..(1501): n is a, c, g, or t
  misc_feature (1519)..(1520): n is a, c, g, or t
  misc_feature (1563)..(1563): n is a, c, g, or t
  misc_feature (1606)..(1606): n is a, c, g, or t
  misc_feature (1756)..(1756): n is a, c, g, or t
acattgtccagggtattgaaagtgccgagatcctgcaggctgtgccgtccggtgagggggatgcatttgagctgactgtgtcctgccaaggcgggctgcccaaggaagcctgcatggagatctcatcgccagggtgccagccccctgcccagcggctgtgccagcctgtgctacccagcccagcctgccagctggttctgcaccagatactgaagggtggctcggggacatactgcctcaatgtgtctctggctgataccaacagcctggcagtggtcagcacccagcttatcatgcctgtgcctgggattcttctcacaggtcaagaagcaggccttgggcaggttccgctgatcgtgggcatcttgctggtgttgatggctgtggtccttgcatctctgatatataggcgcagacttatgaagcaagacttctccgtaccccagttgccacatagcagcagtcactggctgcgtctaccccgcatcttctgctcttgtcccattggtgagaatagccccctcctcagtgggcagcaggtctgagtactctcatatgatgctgtgattttcctggagttgacagaaacacctatatttcccccagtcttccctgggagactactattaactgaaataaatactcagagcctgaacagccgcaacaaagcaagccgagaacgccccctaacaacgccgcgcgggcccccaccgggcccgaacaacaacacgagcaaacacacgtcacgccnnnnnnnnnnnnngaaagagtggttnnnnnnnnncctgcccccaaaaaaattttttaaaacctttctttggggcgggggcccaaaaagaaaaggaaacccggccaacgacttgtcccaaaaggaaaacccggggggagaacaggggtttgggtttccccccnnnnnnnnnccccccggggcgaacccccggcgcgttgagaacaacaccgccgggggggagttttgtgagggccgttgttgggggtgttttcagaacgggggggcgtcagccgcgggggtcctcaaatccaaaattaacgccgcgccccgcgccgttgggcgcttctttcgccccaaagagaggggggtgggggataccttctttacacgcatgcttttctccgcccgccaagtggggggaaacgccccttctcgcgcagaacgcggcggtgattttgccgaatagcactcctcggagaacgccgcgcgcgcccgtgcgcgtggatcttactagcgctccacgcgcgtgggccgcgcgccgccttggcggcgtgcaataacaattaatactctgcgcgcccccgcgtggggctgaagacgacacgcgggcggcgcgcgtaaaaaaaacaagaacggcccgcgtccgcaccagactcgttgcgccgcgccccggtgttttcataagtctaccagagagatgtcggcgtggcgagagacacccctcaccccccgccccgaggcgtgttatatttggggtccctcgcgcgcgtncgtcgcgccgacaccacnnctctcgttctgctcgcgcggacaggaaaaccaccaccccgctncctcgcactataagtgagcgaccacaaactgaatgtgcgcgcnctctgctgttgacttctctctcacgaccgagatgtgagtacatgaataccggctcgcctatcatgtacgctgcgatgcacgtagtatatatattagtacgtcgtgagcgctacacatgaaacacacccgccgtttgccacgaacaaaganaatcccgccgctgctcgtgcgtggtcgtata

SEQ ID NO: 77795 - DNA, 854 bp, Homo Sapiens
  misc_feature (56)..(56): n is a, c, g, or t
  misc_feature (152)..(161): n is a, c, g, or t
  misc_feature (163)..(166): n is a, c, g, or t
  misc_feature (168)..(168): n is a, c, g, or t
  misc_feature (174)..(175): n is a, c, g, or t
  misc_feature (180)..(180): n is a, c, g, or t
  misc_feature (182)..(182): n is a, c, g, or t
  misc_feature (728)..(728): n is a, c, g, or t
ggtgccaggcccctggtcaatggcccagggttcttcctaggggaaccagcttatgnccccagttcccatttacctatatggggcccggggcccccaaaacgaatgggtttagaaaaagcttctcgaaggggccgagggcggcccaacaagannnnnnnnnnannnntntgtttnnttttngnccagggtcctgagtatttatttccagttaaatagtagtctcccagggaagactgggggaaatataggtgtttctgtcaactccaggaaaatcacagcatcatatgagagtactcagacctgctgcccactgaggagggggctattctcaccaaggggacaagagcagaagatgcggggtagacgcagcgccagtgactgctgctatgtggcaactggggtacggagaaggtcttgcttcataagtatgcgcctatatatcagagatgcaaggaccacagccatcaacaccagcaagatgcccacgatcagcggaacctggcccaaggcctgcttcttgaccaggcatgataagctgggtgctgaccactgccaggctgttggtatcagccagagacacattgaggcagtatgtccccgagccacccttcagtatctggtgcagaaccagctggcaggctgggctgggtagcacaggctggcacagccgctgggcagggggctggcaccctggcgatgagatctccatgcaggcttccttggccgcnaaaaccgtggcagggcacagttagctcaaatgcatccccctcaccggacggcacagcctgcaggatctcggcactttcaataccctggacaatgtccagggtgacggaaaaggaaccatatcgacc

SEQ ID NO: 77796 - DNA, 735 bp, Homo Sapiens; identical to SEQ ID NO: 5554
  misc_feature (55)..(91): n is a, c, g, or t

SEQ ID NO: 77797 - DNA, 1352 bp, Homo Sapiens
tctgagcagtgttttaccgtccccagcccccctcccacatggtcacatgttcacttgcttttccttccatctgttggttttgtgagctgagagcatctctggacacatggaagggagccagggattcctgtgatacagattttgaaccagcagagtactttggttttcttcatgtcctaagggtttgatccagaaaccctggtgcttcccctgcagaatactgtacttcatttaacagaatgattgatttttctttcaatcagcatgttcaccaaaaatagaaaagttcttctaaggttaaattttgtatttaaaagttagttggccatttgatcagggaattttctacacacattaggcaaatgtatgcttttcatcctctgggcttacccctctcctctgcaatcctggaagcatcgtgcatagttctttcattgtaagccgctatttaaattcccacaatgcaaaactgttagaccagtaattgtgctactgaaattgtcacaaaacgttattccttgattaggtttttaaattttgctttcgtgtgtgtgtctttaaacaggtaatgtgtatttaagtgttgtctaaacagttgatttttactttagaaaagatcatcttcaactgtttattgacttctgagttatatagttcatgccctgccaaggcattgttcgactccatgatactaaaacataatgaaagaaacaaactccagtatggagaagagaaagtttaattatttggttccatctagaaaagcaacaacttaaaggaatccttcactaggattgtcttatcacctttattagataaatcatgaagtgtccctgtgaaattgaagtgaaactatctctgtaggacttaagagaatagctaaaaggtgtgacttgccttattgaactgatactggcatatctgactgtaagcagtaggttgaagatatcattttatgaatgtggagaattctacattgaaacagaaaatacctgggaatgaagattaaaaatgtagctgctgttatttgcttggtgattcccctcttgctcttctttagtttgaaaaaacaaaaacgtggccttggaattttcattttgatgcagaaattttgaaattgaaaatgtgcatgttttggtgcacaaaatccttctgtgggcaaaactttgtttttgttttgcacagtaagaaacaataggcaagcgttatgtttttggtaagttaactatgaaagctttcttatttttattattaaaaatgtaacaatttaacccacaggaaaaaaaattactttgtatgcttgtttgaaccctatgggttcgttttattaataaaattattacactaatgct

SEQ ID NO: 77798 - DNA, 1251 bp, Homo Sapiens
  misc_feature (57)..(91): n is a, c, g, or t
cccggaaaaaccgaaacccggaagcgcagcgaagtcagtgagcgaggaagcggccgnnnnnnnnnnnnnnnnnnnnnnnnnnnnnnnnnnncagtcgacggtaccggacatatgcccgggaattcggccattacggccgggggaccccaacactgcctacgcctcctacccaggtgcatctgtggacaactaccaacagccacccttcacccagaacgcggagaccaccgagggctaccagccgccccctgtgtactgagcggcggttagcgtgggaagggggacagagagggccctcccctctgccctggactttcccatgagcctcctggaactgccagcccctctctttcacctgttccatcctgtgcagctgacacacagctaaggagcctcatagcctggcgggggctggcagagccacaccccaagtgcctgtgcccagagggcttcagtcagccgctcactcctccagggcacttttaggaaagggtttttagctagtgtttttcctcgcttttaatgacctcagccccgcctgcagtggctagaagccagcaggtgcccatgtgctactgacaagtgcctcagcttccccccggcccgggtcaggccgtgggagccgctattatctgcgttctctgccaaagactcgtgggggccatcacacctgccctgtgcagcggagccggaccaggctcttgtgtcctcactcaggtttgcttcccctgtgcccactgctgtatgatctgggggccaccaccctgtgccggtggcctctgggctgcctcccgtggtgtgagggcggggctggtgctcatggcacttcctccttgctcccacccctggcagcagggaagggctttgcctgacaacacccagctttatgtaaatattctgcagttgttacttaggaagcctggggagggcaggggtgccccatggctcccagactctgtctgtgccgagtgtattataaaatcgtgggggagatgcccggcctgggatgctgtttggagacggaataaatgttttctcattcagtctccagtcattggttgagccacagcctaggggttggaggaagactccactctgggtacacccttaggggctggctttatggaacttgtagtttgaacaaggcagtggcaatccgccccctccagcctgcctggctggcccccttccctctgtctggggtcgcattccacacaagcctttcatcaacatcttaaaatagtaactgtg

SEQ ID NO: 77799 - DNA, 1175 bp, Homo Sapiens
ccgatgatactataagcggtactaaggtagcgaggcctgggtggcgaatcggcacgaggggttcctctgcgttccgcggcggggcagcggggcgacggcgacatggagagcggggcctacggcgcggccaaggcgggcggctccttcgacctgcggcgcttcctgacgcagccgcaggtggtggcgcgcgccgtgtgcttggtcttcgccttgatcgtgttctcctgcatctatggtgagggctacagcaatgcccacgagtctaagcagatgtactgcgtgttcaaccgcaacgaggatgcctgccgctatggcagtgccatcggggtgctggccttcctggcctcggccttcttcttggtggtcgacgcgtatttcccccagatcagcaacgccactgaccgcaagtacctggtcattggtgacctgctcttctcagctctctggaccttcctgtggtttgttggtttctgcttcctcaccaaccagtgggcagtcaccaacccgaaggacgtgctggtgggggccgactctgtgagggcagccatcaccttcagcttcttttccatcttctcctggggtgtgctggcctccctggcctaccagcgctacaaggctggcgtggacgacttcatccagaattacgttgaccccactccggaccccaacactgcctacgcctcctacccaggtgcatctgtggacaactaccaacagccacccttcacccagaacgcggagaccaccgagggctaccagccgccccctgtgtactgagcggcggttagcgtgggaagggggacagagagggccctcccctctgccctggactttcccatgagcctcctggaactgccagcccctctctttcacctgttccatcctgtgcagctgacacacagctaaggagcctcatagcctggcggggggctggcaaagcccaacccccaagtgcctgtgcccagagggcttcagtcagccgctcactcctcaggccaccttttaagaaaaggtttttaagctaagggtttttcctcgcttttaatgaactcaacccccgcctggaatgggctaaaagccaccaggtgcccaatgggctactgaaaatggcctcaagtttccccccggcccggggtcaaggcccggggaaaccccctattatctgcggtctccgg

SEQ ID NO: 77800 - DNA, 1165 bp, Homo Sapiens
  misc_feature (80)..(81): n is a, c, g, or t
  misc_feature (86)..(87): n is a, c, g, or t
  misc_feature (90)..(90): n is a, c, g, or t
  misc_feature (93)..(93): n is a, c, g, or t
  misc_feature (95)..(96): n is a, c, g, or t
  misc_feature (98)..(98): n is a, c, g, or t
  misc_feature (105)..(105): n is a, c, g, or t
  misc_feature (107)..(107): n is a, c, g, or t
  misc_feature (112)..(112): n is a, c, g, or t
  misc_feature (156)..(156): n is a, c, g, or t
  misc_feature (158)..(159): n is a, c, g, or t
  misc_feature (175)..(175): n is a, c, g, or t
  misc_feature (185)..(185): n is a, c, g, or t
  misc_feature (187)..(187): n is a, c, g, or t
  misc_feature (198)..(198): n is a, c, g, or t
  misc_feature (207)..(207): n is a, c, g, or t
  misc_feature (213)..(213): n is a, c, g, or t
  misc_feature (221)..(221): n is a, c, g, or t
  misc_feature (228)..(228): n is a, c, g, or t
  misc_feature (230)..(232): n is a, c, g, or t
  misc_feature (248)..(248): n is a, c, g, or t
  misc_feature (250)..(252): n is a, c, g, or t
  misc_feature (284)..(284): n is a, c, g, or t
  misc_feature (288)..(288): n is a, c, g, or t
  misc_feature (291)..(291): n is a, c, g, or t
  misc_feature (294)..(295): n is a, c, g, or t
  misc_feature (298)..(306): n is a, c, g, or t
ttccaaagcgggcggctccttcgacctgcggcgcttcctgacgcagccgcagtttgtagaccgcaccgagtgtttgaacnncgtcnngancgngnncncctgtancnagggngagggcgacagcaaggcccacgaccccaagcagaaggacagcgngnncaaccgcaacgaggangccggccgcnanggcagggccancggggggcnggcccnccgggccncggcccncnnncgggcggcccacgcgnannncccccagatcagcaacgccactgaccgcaagnaccnggncannggnnnnnnnnncttcacagcacgcgggacctgcctgtggtttgaaggtatctgcttcctcaccaaccagtgggcagtcaccaacccgaaggacgtgctggtgggggccgactctgtgagggcagccatcaccttcagcttcttttccatcttctcctggggtgtgctggcctccctggcctaccagcgctacaaggctggcgtggacgacttcatccagaattacgttgaccccactccggaccccaacactgcctacgcctcctacccaggtgcatctgtggacaactaccaacagccacccttcacccagaacgcggagaccaccgagggctaccagccgccccctgtgtactgagcggcggttagcgtgggaagggggacagagagggccctcccctctgccctggactttcccatgagcctcctggaactgccagcccctctctttcacctgttccatcctgtgcagctgacacacagctaaggagcctcatagcctggcgggggctggcagagccacaccccaagtgcctgtgcccagagggcttcagtcagccgctcactcctccagggcacttttaggaaagggtttttagctagtgtttttcctcgcttttaatgacctcagccccgcctgcagtggctagaagccagcaggtgcccatgtgctactgacaagtgcctcagcttccccccggcccggggtcaggccgtggggagccgctattatctgcgttctctgccaaagactcgtggggggccatcacacctgccctgtgcagcggagccgggaccagggctcttgtgtccctcactcaagttttgcttccccctgtggcccactggctgtaatgaatctggggggcca

SEQ ID NO: 77801 - DNA, 1086 bp, Homo Sapiens
  misc_feature (620)..(663): n is a, c, g, or t
  misc_feature (686)..(697): n is a, c, g, or t
ctagctttgggtttcactcaccactgacttcagcataatatgatccttcatttgataacagttgactctttgggtggaatttgtttgactcatacatttttggaattaaagagaatctagcctggtagtttttaaactatcttaattgaagtcttcagaggaatctcagggccagttctccaacaactggaacaccctaagggctaaacccaagcccagatcccaggcccagatcccagtcccagatcccaggcccagctctttagattttccattccagcaatcctgctttgatcccttgtaaaggttaggttctgcgtaagacagcatttgaagagagggttctgcagctagcagagcttgaaaccactggtctggctagcatttgccctattcctttgacagattaggagcttgaggattagcaattatgactgaaggtcatacaccaagatggtagaattgatgatcacagcatgaagatccctaacctaaccccctgccagcatgcctctaccttatcacagcttctcctgtttttgttataactttacccattcctagttccaggaaacaggaggaggccgggtagagaggatcacttgagtccagaagctcannnnnnnnnnnnnnnnnnnnnnnnnnnnnnnnnnnnnnnnnnnntgacagagtgagaacctatcttnnnnnnnnnnnncaaagagcgttcatatttagttttctgtgactattcttccttcaataagaaaaaaattgaccttcaagtcagcctggttaacttcctcttctttcgcttctctgtaacattttagtggtgaaatttttccagaagaaaatacattgcttaaaccttgggagtttctgttttccctttttggctcagcattccctttgctctatttgagggcatacaagcaagagtcatggctcaggaactctgttttctggccctagaaaaatttgagacactgttattactccccagataattttagcgtcctccatcagctgcctgccccacagctgagcattagtgagctgttgcaagattaaattccttatgtaaagaaaaggaggctggaccgc

SEQ ID NO: 77802 - DNA, 2394 bp, Homo Sapiens
  misc_feature (2291)..(2308): n is a, c, g, or t
gatttccacagtgcatttccagtccagcaaatggaaatctggggagtctatactttgctcacaactcatctcaatgccatccttgtggagagccacagtgtagtgcaaggttccatccaattcactgtggacaaggtcttggagcaacatcaccaggctgccaaggctcagcagaaactacaggcctcactctcagtggctgtgaactccatcatgagtattctgactggaagcactaggagcagcttccgaaagatgtgtctccagacccttcaagcagctgacacacaagagttcaggaccaaactgcacaaagtatttcgtgagatcacccaacaccaatttcttcaccactgctcatgtgaggtgaagcagcagctaaccctagaaaaaaaggactcagcccagggcactgaggacgcacctgataacagcagcctggagctcctagcagataccagcgggcaagcagaaaacaagaggctcaagaggggcagcccccgcatagaggagatgcgagctctgcgctctgccagggccccgagcccgtcagaggccgccccgcgccgcccggaagccaccgcggcccccctcactcctagaggaagggagcaccgcgaggctcacggcagggccctggcgccgggcagggcgagcctcggaagccgcctggaggacgtgctgtggctgcaggaggtctccaacctgtcagagtggctgagtcccagccctgggccctgagccgggtccccttccgcaagcgcccaccgatccggaggctgcgggcagccgttatcccgtggtttaataaagctgccgcgcgctcaccaagtcctcttccgcgtctgcttccgcgtcgggcccgggcggggcggggcggggcgtggagccgcgccgcggcctgacgtcacccacacctccctgggactgcgtcactggtgcgcgccgcgggtcagggcgcaatggcggcgctgggcggggatgggctgcgactgctgtcggtgtcgcggccggagcggccgcccgagtcagcggcgctgggcggcctgggccccgggctgtgctgctgggtgtcagtgttctcctgcctcagcctcgcctgctcctacgtgggcagcctctacgtctggaagagcgaactgcccagggaccatcccgcggtcatcaagcgacgcttcaccagcgtcctggtggtgtccagtctctcacccctgtgcgtgctgctctggagggaactcacaggcatccagccaggcacatccctgctcaccctgatgggcttcaggctggagggcattttcccagcggcgctgctgcccctgttgctgaccatgattcttttcctgggcccactgatgcagctctctatggattgcccttgtgacctggcagatgggctgaaggttgtcctggccccccgctcctgggcccgctgcctcacagacatgcgttggctgcggaaccaagtgatcgccccgctgacagaggagctggtgttccgggcctgtatgctgcccatgttagcaccgtgcatgggcctgggccctgctgtgttcacctgcccgctcttttttggagttgcccattttcaccatattattgagcagctgcgtttcccgccagagcagcgtggggaacatcttcttgtctgctgcgttccagttctcctacacagctgtcttcggtgcctacactgctttcctcttcatccgcacaggacacctgattgggccggttctctgccattccttctgcaattacatgggtttcccagctgtgtgcgcggccttggagcacccacagaggcggcccctgctggcaggctatgccctgggtgtgggactcttcctgcttctgctccagcccctcacggaccccaagctctacggcagccttcccctttgtgtgcttttggagcgggcaggggactcagaggctcccctgtgctcctgacctatgctcctggatacgctatgaactctcaccggctccccagccctccccaccaaggggtactgcaggggaagggctggctggggtccccgagatctcaggaatttttgtaggggattgaagccagagctagttgcgtcccagggaccaagagaaagaagcagatatccaaagggtgcagccccttttgaaaggggtgtttacgagcagctgtgagtgaggggacaaggggcaggtcccaggagccacacactcccttcctcactttggactgctgcttctcttagctcctctgcctctgaaaagctgctcggggttttttatttataaaacctctnnnnnnnnnnnnnnnnnnaacttcctgggttttctacattgtctttttgcatcagtactttgtattgggatattaaagagatttaacttgggaaaaaatataaa

SEQ ID NO: 77803 - DNA, 444 bp, Homo Sapiens
cccggggcagtagctgcctgccccaccacctacagctgtcctgcaccccaacttcccacgggcagtggcctctccaatactgtggccctcagttcccaattccttctccaaagtggccattagcgacatcatcatacaccctaacccaggccagctagccaggactcaccagcagacaagaagatgttccccacgctgctctggcggaaacgcagctgctcaataatatggtgaaaatgggctgggaaaaaggtgacaatcacatcacaggcattcctcccagcctcccttctaggactgcccctcacctcaagcccccttctgagctctcatgctgaaaacacaccaggactaatctggccagactcaccaactccaaaaaagagcgggcaggtgaacacagaagggcccaagcccatgcacggtgctaacatgggcagaata

SEQ ID NO: 77804 - DNA, 738 bp, Homo Sapiens
  misc_feature (89)..(89): n is a, c, g, or t
cacagaaatacacgtgtgaagaagcagtaactcctccaggctcgaacagtagcaatcaggactctggatagaccccagcgcctccaggnacaaaaaggctcagtagcaggctctccacagagaatggagtgggacattatgtttcacttgtaaactgaggctaagatctggtacaatccgatctagaagggctgctgctcttcctcaagagtttaccttgcgccaaaccaagcccctgctccctaatgaaaactcaaggcagcaacaaggccaatgagaatacgatgagggccccacccaccccccctgccagtccctgcctttcttccgtgctgattgctgcccccaggacagaagactaagactcgaaactgccccgccttcctatcccaacttcccgccttcgtatcccaacttcccgccttcctatcccgacttgcagtctaaattttcttgccctccgtcctagacgtctatatacagggattccgaatgatttgagtttggaagtgccctgtttttctgaaaaagtgactgccaccaagaactgacttcttagttacccagcgcagaggcaactgatgaagtttccagacagaacacaagttgaatctcatttgtacacttaaactgggaattttaaggtcaaatcagcaaattactgggacctagatctctccacataaatatgtacttgttttatgctattcattatatatgtataaaacttttgccctt

SEQ ID NO: 77805 - DNA, 883 bp, Homo Sapiens
  misc_feature (122)..(122): n is a, c, g, or t
  misc_feature (138)..(138): n is a, c, g, or t
  misc_feature (160)..(160): n is a, c, g, or t
  misc_feature (184)..(184): n is a, c, g, or t
  misc_feature (247)..(310): n is a, c, g, or t
gtatatcatgccgcagtccgatgggcgcatggccaccatatgtggtgctcctcaagcccccagctaccctttgtccgctcttgtgttgatgtggcgatacattccccggaacgcttgcatgntcgatttatagactcnttagggattgcctgagcccagnacacgcacgaggtcacagaattgntagtctaggttatgttgcatctgtggagttctctgtgtggattctttttagagccagaaaaannnnnnnnnnnnnnnnnnnnnnnnnnnnnnnnnnnnnnnnnnnnnnnnnnnnnnnnnnnnnnnnttgataggattattattgacacacaaggagctccaaaagagatcgtatttttattagagacaagccagttgggattgaaacaaaaaatggaggggggtatagccctgtgttgttgcacagaaaaagtatctgaatgataaaggcctaagtgataactctggacaagggatttggattttgggagtagtgcagaggtagaggcatttttgtgatttattgttctattttttcttctagaaaaatgtaagtagtcatatataattttaaaatataaaggagaagaggcaaaatgttgaatggcacctgaggatcctatattcatattggatcagtattaacatccaggttttgattgttgtactatggttacctggtagattccctttgtatataggaaatagacactggaatagtaaggagtagtgggtcaagatgtctgcaacttattgttcagaatcactcacaaatgggaaatctgatataaggacaaaatgggagcactgtggcctatttttacaacttttgtgtacatctgaaattgtttcaaaataaaatgtttaaaagggtgctctt

SEQ ID NO: 77806 - DNA, 1196 bp, Homo Sapiens
  misc_feature (109)..(109): n is a, c, g, or t
  misc_feature (165)..(268): n is a, c, g, or t
  misc_feature (464)..(549): n is a, c, g, or t
tgcatcttaacgaggtccaggtgaggctggagtgtgcgccattcctctacgtaaatagatctaaacaaggtacaggtgaggctggagtgcgcgccattcctccagctgngacgccgtgaaatcagccaacagatgatctgtttcaaaagttcagccgtaagacannnnnnnnnnnnnnnnnnnnnnnnnnnnnnnnnnnnnnnnnnnnnnnnnnnnnnnnnnnnnnnnnnnnnnnnnnnnnnnnnnnnnnnnnnnnnnnnnnnnnnnnctgcgaatcctctttggccccctgctccgtcagcctcggcctcggcggctctgctcttggagcctgccttcctttcactccagcctggcagcacttctgcgggtgtaaaattctcacaccttgttggcttatgcagctcaccagtgccgaagccttcagacaggcgggtccgcagccctttcccggaggccccacnnnnnnnnnnnnnnnnnnnnnnnnnnnnnnnnnnnnnnnnnnnnnnnnnnnnnnnnnnnnnnnnnnnnnnnnnnnnnnnnnnnnnnccacgtctcagagctgcctggatagagcatttttcagatccccaagggctggtgcctttttgcttaatggtccctgcctcactgattgtttccctcttgcattctgctataagtagcaaggagaagccaggtggcaccttccacactgcttggaaatctcagcttgatgtccaggctcatcagctgcaggtcccacttcgcacccaacagcagagcagcagccagccaagctctctgctgcctcctccggttcccagtagcacggtcatttccatctgagacctcactggaagcacctgttgggtcggcattgctgccgacatccagtctgtgatgctgtgtgcattctccaagacggcggcagctctcctcttccagccatttccaggcttgtcttcatgcctttctaccagcagtcgtgcaggcctcaccagttcttccagacctatccccatcaaccagttccaaagctgctgccacagttctaggtgtaaggtataggcagcacccctcctggcccttcctggtaccaaaatctggtcgtttactgtggctgctgtaacaaagtgtcacaaactgggtggcttaaaaaacagagatagattgtcttagttttggaggctggaagtccaagatgatagtactgg

SEQ ID NO: 77807 - DNA, 742 bp, Homo Sapiens
  misc_feature (58)..(71): n is a, c, g, or t
gtggcaagctaaattaccctcactaaagggaataagcttgcggccgcatacgcggtcnnnnnnnnnnnnnnaacaccccagggagttacgtggtaacaaggttgtccataaagaggttgcttctatatactagaggccccagatggccaggccttgggctacgtctggcttgcatggtctcccaagggaatcagccccatcaacaaagttcaaatcggggcagaggctgcacttgtgcccccagatgtttctgaggagccagactagggctggcattgctgtagagtgacggctgctgcccagagcgtgtcccagacatcacagcggggctcagcagttcccacagcctctgcctgccttggctaagcatgagttaagcagcaaaacgctcctccatgtctggatggggccggcaggtcctgtgtcccctgcacctggaggagagcaggctagaggcacagcggccacatggtgctggctctgaacgttggttggtggctggaaaacagccctgcttctgagggccgctcagttctgcacacgaaaccacctcctgagggctcagctctgcccccgccctgggctgcagcctctgcacgcaagcaccaggcatcctttgtgttgtcaactccgtgtaaccagtaactacagccatttacaattgactccgtttccttttgtaggtttccctgtctgtctgtgttagtagaaaaataaaatcctatgaaatctgagtacgttg

SEQ ID NO: 77808 - DNA, 1714 bp, Homo Sapiens
  misc_feature (697)..(761): n is a, c, g, or t
  misc_feature (854)..(904): n is a, c, g, or t
  misc_feature (1170)..(1170): n is a, c, g, or t
  misc_feature (1224)..(1224): n is a, c, g, or t
  misc_feature (1441)..(1441): n is a, c, g, or t
  misc_feature (1617)..(1617): n is a, c, g, or t
acagagctcagatgaggtcaaagctgcccgcaggagtatgctgcagaaaacatggctgctgcagatgagggtctccggcagcacctcctgcactataagcttcccaattccacgctcccagagggctttgagctctattctcagttgccccctctgcgtcagcactacctccagagactgacttcaacagtgctccaaaatggggtatcagagacctaggatagttgatatagatggaaagatgggtacgttgtcctgtatccagcctttcaacagatgtctggccagacgaagaacattgtgtcctaatggtaggcaggagaccaaggagcagaaggcttgccttcctgggagcaggttgtttgagctgttttagagcagtgagccctaccattacatcctgatatctggggcttctgaaggtctgtgctgggagtgaagagtggcttagctatttacccgctctttggggacagggcaaactaaatgcatcccttcttacctaactcccaacccctgccctgggctgaggcatatgaatgctatagttgtgcattaaaataaatgttttttatctcctggaagccctatccccttcccctcccctgccgctgtgccggatcccccccgaccccaccttctaggaaacccgaatgtcgggtgtctcgtgctttgctatccctttttgccgcctttnnnnnnnnnnnnnnnnnnnnnnnnnnnnnnnnnnnnnnnnnnnnnnnnnnnnnnnnnnnnnnnnngccaagattgttgtgggccgccgtcccctgggggcagtggtgctttaggagcaaaggcgggaggccccttgtaccctttcgccttttggtttnnnnnnnnnnnnnnnnnnnnnnnnnnnnnnnnnnnnnnnnnnnnnnnnnnntgagaaagcagaccccccgcacggggtccgatttcgaagccgcttgccgccgtggccgagtattatcccgcactggcaccgccgggaaggtgtagcaggaacggcctgccgcccactataatgaatctcacgcggcgcccgcgctgagagcggcgccagtcaccgacgctcgtctcgcaccgcacagcctgcagattgttagctccccattggtagcgcaccgcgtcgaacgtgtgtgtccgcgcgcgctgaccatctacgtgtgntgcgcgaactagcaacgcccccgcgtctcttctgttttgtcggcacgcaagacntatacctacgggcggggcattgtaacggagatctgacgtgggcggaacggctacacgcggaattgtaggaggtggggtgtccaggtgcgcccgccggcggccttcccggcgcgggtcgtgagtgtgcaccatatatgtgttcttatgttccaccgccgccgccagtgtaacgccatgcgctgaaggtcccgcccggtgctgagtatttgtacccccncctccccacccatctgagcgtcggcggcgccgacgcgcgccccccgccgggccggtgtgataatgagattgggtgaaggacgccccccacggcgcgcatggttgaggcggcccagtgccaggaacggccgtctatggtgcggtgacccgcgtcactcgcggaggatgtgccgccgnctggactgacagtagacgcactggcggagatgtatgtaattgtttctgtcttgagtgttgctacagtctctcaatcgctcccgcccaccgagctttt

SEQ ID NO: 77809 - DNA, 596 bp, Homo Sapiens
  misc_feature (485)..(485): n is a, c, g, or t
gcggccgcctgctcgggaggatgtcgggttcgtcgctgcccagcgccctggccctctcgctgttgctggtctctggctccctcctcccagggccaggcgccgctcagaacgtgtaacctcacctccagctctcacacccttacatacagctactggacaaagaatggggtggaactgagtgccactcgtaagaatgccagcaacatggagtacaggatcaataagccgagagctgaggattcaggcgaataccactgcgtatatcactttgtcagcgctcctaaagcaaacgccaccattgaagtgaaagccgctcctgacatcactggccataaacggagtgagaacaagaatgaagggcaggatgccacttatgtattgcaagtcagttggctacccccacccagactggatatggcgcaagaaggagaacgggatgcccatggacattgtcaatacctctggccgcttcttcatcatcaacnaaggaaaattacactgagttgaacattgtgaacctgcagatcacggaagaccctggcgagtatgaatggtatgccaccaacgccattggctccgcctctgttgtcactgtc

SEQ ID NO: 77810 - DNA, 844 bp, Homo Sapiens
  misc_feature (636)..(636): n is a, c, g, or t
  misc_feature (801)..(802): n is a, c, g, or t
actctggccccggcccattcgctgttgggtcttctgctagggaggatgtcgggttcgtcgctgcccagcgccctggccctctcgctgttgctggtctctggctccctcctcccagggccaggcgccgctcagaacgagccaaggattgtcaccagtgaagaggtcattattcgagacagccctgttctccctgtcaccctgcagtgtaacctcacctccagctctcacacccttacatacagctactggacaaagaatggggtggaactgagtgccactcgtaagaatgccagcaacatggagtacaggatcaataagccgagagctgaggattcaggcgaataccactgcgtatatcactttgtcagcgctcctaaagcaaacgccaccattgaagtgaaagccgctcctgacatcactggccataaacggagtgagaacaagaatgaagggcaggatgccactatgtattgcaaggcagttggctacccccacccagactggatatggcgcaagaaggagaacgggatgcccatggacattgtcaatacctctggccgcttcttcatcatcaacaaggaaaattacactggaggttgaacattgggaacctgcagatcaccgaagaccctggcngagtatgaatggaatgccaccaacgccattggctccgcctctggtggcactggcctcagggggcggagccacctggccccactctgggctttctggggaatctgggctggaatatcatcccttggggggatcattggtggggtatgagaaaagggaagagggccnnatggagggtccctgacgatgatggacccagctgggacccatg

SEQ ID NO: 77811 - DNA, 667 bp, Homo Sapiens
aggagcgaggcctgaaaccggaggaggagcagcagagcccccacagaggacagcggaaaggagacctgagtggggaagagctcggctccttccagtcccccagggacccaggttggggcagaggggccatcgggcctgtaaccttgcagtgccatcatggccctgggtagagtttgggtcttattctaggaagcgtgggggcttggaatgtcctggatgccacctgtttcctgtgtggcaggcagagtgaagaccccaccattccaccaagatgcctccaccctagccctattcgccgtgagtgcatcatatcacatgcagaggggagttggggttgcaggtggaactggattggtgaacaccacccttaacctaaggaggagatcctgggggatcccgcaggcccagagtcctcacagtgttcttaaaagggaactagcagccagaagtgtggcagtgaggacctgatccaacgtcattggctttgaagagggaggaagggcccatgggcctagaaatgaggacagcccctggaagctgagaaaggcgaggaacagattctgccctggatcctccaggaggagccggccctaggtcttagcccagtgagacccgtcacagactcccgacctccagcaatgcattaaatatgctgttcatgctgctg

SEQ ID NO: 77812 - DNA, 658 bp, Homo Sapiens
  misc_feature (374)..(382): n is a, c, g, or t
tttgttcgaatgccttatagccttcctcacagcacccaggattgtgactgactctgcatttttaattcttgaaacttggctttccataacatggtacatgcttcaggactacatatgacccagagagcaaggtggctgaactatagtctggaagccctcaggtaaagaggcacatctcaccactcattggttaaacaatgcatcatagcgagcacttttcctttccctggagaatgggatgtgaagcagtagaccacagccacgccgatggttatacagtgaagaagacttcacctcttcctattgagtttgcttggaatgctgacagcatcaggcaactctgaactgaacatttgctttgtcagaaaatatcnnnnnnnnnactttgaagtttggcaaccttcatgttaccccaaagcaaaaccattgtgtcaggagtcaaacaaatgtttagaaagcaaacatgacgtctctattgtacaacctcctttctcttggctgtttaaaggatgtacttcgtgtattaaagggtactttatgttgaagtaacgaaaaaaccctaatgggtgttcctaaacctaaaccttttctttattccacatttgctacggtaaaatcctgttacaaaactaccctataaagaattattttctataaa

SEQ ID NO: 77813 - DNA, 1309 bp, Homo Sapiens
caaggtagcgaggcctgggtggcgaattcggcacgagggtttgctgtaagaagaatactttgattttgatcgtgagatcctccccttcacttctgagaattgggacagtttgctcctgggggagctttcagacacccccaaaggagaacgttcttccaagctcctctctgctcttaacagccacaaggaccgtttcatttcagggagagagattaagaagaggaaatgtttgtttggtctccatgctcggatgcctccccctgtggagccccctactggagatggagcactcaccagcttcccttcagggcagggccctgggggaggggtctcacgtcccctggggaagcgccggaggccggagccagagcccctgaggaggaggcagaaggggaaagtggaggagctggggccaccctcagcagtgcgcaatcagcccgagccccaggagcagagggagcgggctcatctgcagagggcactgcaggcctcagtgtctccaccatcccccagccctaaccagagttaccagggcagcagcggctacaacttccggcccacagatgcccgctgcctgcccagcagccccatccggatgtttgcttccttccacccttctgccagcaccgcagggacctctggggacagtggacccccagacaggtcacccctggaacttcacattggtttccccacagacatccctaaaagtgccccccactcgatgactgcctcatcttcctcagtttcatccccatccccaggtcttcctagacgctcagcacccccttctcccctgtgccgtagtttgtctcctgggactgggggaggagtccgaggtggggttggttacctgtcccgaggggaccctgtccgggtccttgctcggagagtacggcctgatggctctgtgcagtacctggttgagtggggaggagggggcatcttctgaacagcctgcctctgcccagctccccattcacacacaccggcactttcataccctgacctctgacctcacctacagctgggatgtacctggagagatagggggtagttctccctactgcccaggctggaatccaagagtggggagtggggaagaggccctcttctctaccctccttcatgattcctgacccctcccatccttcccatttcctttgatgttattttgttacagctttttaaatattttttaaaattatttaacccctgggggcagagactgaggagggaggatgataagggatcccggactctgtatgattgaaataaagagaaataaacaaatctagcaaatctgaaa

SEQ ID NO: 77814 - DNA, 1143 bp, Homo Sapiens
  misc_feature (837)..(876): n is a, c, g, or t
cgtgtggtggtcgacaatctgggcgatgggtctttccttgccttgggttcccgtggcgaggtgttccccctttcttcacttatctccttgtgagctggtccatggtccggattgacagtgccgtgtgtctgtatggggttcggagaggcagcctgtccaagttttcgcgctgtgcgccaattcaaccgggtttcttcgcagtgtccattccgtcccggtactctcctatcaaggccgcgtacaggtccccatcgggacagttacctactccctcctcggactctgtcccaagtcccaggagcatactacggcacagggagaaggggctctgagcgtctaggaagacctggggatggggatgaaactgagcaagatgaggcagtcatcgagtggggccacttttagggatgtctcgtggggaaaccaaatgtgaagttccacggggtgacctgttctgggggtccacttgtccccagaggtccctgcggtgctggcagaagggtggaaggaagctaacatccggatggggctgctgggcagacagcgggcatctgtgggccggaagttgtagccgctgctgccctggtaactctggttagggctgggggatggtggagacactgaggcctgcagtgccctctgcagatgagcccgctccctctgctcctggggctcgggctgattgcgcactgctgagggtggccccagctcctccactttccccttctgcctcctcctcaggggctctggctccggcctccggcgcttccccaggggacgtgagacccctcccccagggccctgccctgaagggaagctgtaagaggcctccttatnnnnnnnnnnnnnnnnnnnnnnnnnnnnnnnnnnnnnnnnctctatacatataccccccaggactaacaccctgagaatttcccccatcccccctggaccagtgacctggtgagtgctccatctccagtagggggctccacagggggaggcatccgagcatggagaccaaacaaacatttcctcttcttaatctctctccctgaaatgaaacggtccttgtggctgttaagagcagagaggagcttggaagaacgttctcctttgggggtgtctgaaagctcccccaggagcaactgtcccattctc

SEQ ID NO: 77815 - DNA, 332 bp, Homo Sapiens
ttcggatgcctccccctgtggagccccctactggagatggagcactcaccagggcagggccctgggggaggggtctcacgtcccctggggaagcgccggaggccggagccagagcccctgaggaggaggcaaaaggggaaagtggaggagctggggccaccctcagcagtgcgcaatcagcccgagccccaggagcagagggagcgggctcatctgcagagggcactgcaggcctcagtgtctccaccatcccccagccctaaccagagttaccagggcagcagcggctacaacttccggcccacagatgcccgctgcctgcccagcagccc

SEQ ID NO: 77816 - DNA, 746 bp, Homo Sapiens
  misc_feature (227)..(242): n is a, c, g, or t
tcatcgatggacttctagtgatgagaaagattgagaatgttcccacaggccccaacaataagcccaagctacctgtggtgatctcgcagtgtggggagatgtagtccagacaaagactgaatcagctgctgtgtccccaacacctggaagaactgagcttctggaatctaatagatgctaaataaatatttgttgcatgaatgatagtggtatgagaggaagagggnnnnnnnnnnnnnnnnggcttcttggaagaggtgacacttgaggatatatttccaattaaatatacctaagtgactgcccacctctgcaacccaatgtcacattcgagtcttactgaactacttgactgcatttcccgagatctcacctcttctcgcctgtaccctgtgcgcggaaagtcagccctccaccttctccctgcttccactcccaaaatacttcgtggttttgcagctctggagtatttaccgtgttggctgtttaaatttctgcctccatcagaaggcagaaactgactcgcgaactattccatccccagccgatagtagacgcttaaaaaagaacgaaagaaggtgggtggaggacttcagtaacatcaggtggcagcctcaattttatcgtttgtgaaacgtggatagtaatccctctatcacgtggctgttgcaggaataaagtgaaaaaacaaaacaggctagcttgttcaataaatgtgagttgaattaaatctgatttgtggtcag

SEQ ID NO: 77817 - DNA, 609 bp, Homo Sapiens
gttccaattggatacaaaggaagcaccttccacagggtaataaagattccatgaatcaaggttggagattttgttaatggagatggtactggagtcgccagtatttaccggggcccatttgcagatgaaaattttaaacttagacactcagctccaggcctgctttccatggcgaacagtggtccaagtacaaatggctgtcagttctttatcacctgctctaagtgcgattggctggatgggaagcatgtggtgtttggaaaaatcatcgatggacttctagtgatgagaaagattgagaatgttcccacaggccccaacaataagcccaagctacctgtggtgatctcgcagtgtggggagatgtagtccagacaaagactgaatcagcacttcccaggagcctgcccacagctgtggctaacatcaggccttcccttcttcttggtggtgttcttgagtaagataatctggactggcccccgtctttgcttccctgcctgctgctgccccatttgatcaagagaccatggaagtgtcagagattcagaatccaagattgtctttaagttttcaactgtaaataaagtttttttgtatgcgtaaaaa

SEQ ID NO: 77818 - DNA, 1010 bp, Homo Sapiens
gggccggacgaaatccgcggaccgggctttaggttcgccggaatcccacgctcccgacttctgcttccgggtcggagccatggcggtggcaaattcaagtcctgttaaccccgtggtgttctttgatgtcagtattggcggtcaggaagttggccgcatgaagatcgagctctttgcagacgttgtgcctaagacggccgagaactttaggcagttctgcaccggagaattcaggaaagatggggttccaataggatacaaaggaagcaccttccacagggtcataaaggatttcatgattcagggtggagattttgttaatggagatggtactggagtcgccagtatttaccgggggccatttgcagatgaaaattttaaacttagacactcagctccaggcctgctttccatggcgaacagtggtccaagtacaaatggctgtcagttctttatcacctgctctaagtgcgattggctggatgggaagcatgtggtgtttggaaaaatcatcgatggacttctagtgatgagaaagattgagaatgttcccacaggccccaacaataagcccaagctacctgtggtgatctcgcagtgtggggagatgtagtccagacaaagactgaatcaggccttcccttcttcttggtggtgttcttgagtaagataatctggactggcccccgtctttgcttccctgcctgctgctgccccatttgatcaagagaccatggaagtgtcagagattcagaatccaagattgtctttaagttttcaactgtaaataaagtttttttggaacggggtaccagaaaacagggataaatactccaaggcttttatggccgggggccggacaataaaggtcaggcaatgggcaccctggcccatagcgtgtttcctgggaccaattttccatggccagccgggggtgtgatacccggcggccttccgctgtattaggtgcgtcccgaccttgtgcgaagcgagcgcagtggcggttagtg

SEQ ID NO: 77819 - DNA, 349 bp, Homo Sapiens
tcttttactaaccaggggtttaatataaatacaaccagcatagaaagacccaaaactatacagaaaccaaaaccagaatgccatgtggtggaggcaaagggcagaatttctgacccctttggctcagctgcccttccccacaaataaaaaccaacaaacaggacaaatcaggacaataaagaagattcatgctaagctgtggcagaggggggaaggtatgatcgggtgggggtgggacaaggaatggccatggaagataactgggtcaggttggacctgggctgggagggggttgccaggtcccccaccacaacttaagccaaacctaagctgcccccaggtgccatag

SEQ ID NO: 77820 - DNA, 745 bp, Homo Sapiens
  misc_feature (39)..(39): n is a, c, g, or t
aaggccttgtcagctcatcaacaggcaggccggactcangttatcccaccattatgagaacttctaggcccctgcccggggttctgcccactgcccagttgagcagaggtttgagcccacacctcacctctgttcttcctatttctggctgcctcagccttctctgatttcccacctcccaaccttgttccaggtggccatagtcagtcaccatgtgtgggctcagggacccccaggaccaggatgtgtctcagcctggagaaatggtgggggggcagtgtctagggactagagtgagaagtaggggagctactgatttggggcaaagtgaaacctctgcttccagacttcagaaacaaatctcagaagacaagctgacctgacaagtactatgtgtgtgcatgtctgtatgtgtgttggggcggtgagtgtaaggatgcagtgggagcatggatgctggcatcttagaaccctccctactcccagacctcctcctcttctgggctccccactgtcagacgggctggcaaatgccttgcaggaggtagaggctggacccatggcaagccatttacagaaacccactcggcaccccagtctaacaccacaactaatttcacccaaggttttaagcacgttctttcatcagaccctggcccaatacctatgtatgcaatgctcctcagccctcttctccctgctccagtagtctcccttccaaataaatcacttttataccaaaaaa

SEQ ID NO: 77821 - DNA, 164 bp, Homo Sapiens
  misc_feature (153)..(153): n is a, c, g, or t
gtactttactggatgactgtgaagcgatgagtattgggttggggtaggtgtgttgattttgagagtgcatgttaagaactgaaggggaactacttgagatgacttaagaagcatcccatgcaaatatcttgttttgccctaataaaatattcnagaaagataaa

SEQ ID NO: 77822 - DNA, 948 bp, Homo Sapiens
taaacccccgaaaattttattgtggcaaacacaagattttcgcgggagggtctttaaactcctcaaatgtttcccctcagattttttaagtgcactctaatataaacacctatccccaaccccatattcttgtcgtttcaggcttcccgtgtagtgtacaatataaatataaaaaactcctcatctggcaaaaaagggaaacagggtaagagagagtgacattttaaacacattactaaaatgtttaagcttttatttacacatccccttctctcagtttcccaggttatatgaacattacagcaatagaaaggggttatcatcacagcatccccttgcaaattccagtttacaggtaacttggtcaggggaaaaatatgggtcaacgaagtaagatctcagctctcccataagctattgctctcttcttctctttcccccttctcttaatgttagctgcctgttacagagagggatcatcaagactgtgtggacatgctagctgaattgacagggtgggttccagtgtcctgtgaagaaccagcaaggatgctttttataattccaaccattggcttcacatcactgaggtaacaagacttaatgttaagggtaaagacaccacgccaccctagtcagtgacatgtactccactttccaggaagacctgggccaaatgaccaagctttgcaaaagaaacctgggaagagcgttggaaaaagcagactctgagttggcttgagtctcctcgtgcatagaagcattcactcatccatgcagatggcaacaaggcaggacactcagaaagcataagatcaaggtactgctcttatctgcacctttcattcaagctcccctcaagtgctccaaaagaacagagctttgggtattgcttcattaagaacacagtaactgcagtttaaaagccattgcattctttagggtccc

SEQ ID NO: 77823 - DNA, 172 bp, Homo Sapiens
cattacagcaatagaaaggggttatcatcacagcatccccttgcaaattccagtttacaggtaacttggtcaggggaaaaatatgctgcaaaattctatgggttcaggtaaaaaaagattactacaattaagcaaattaattaaatatgacattcaaattaatcatcttggc

SEQ ID NO: 77824 - DNA, 1020 bp, Homo Sapiens
gattgatgctgctgtgcagatatacgaacaggtgtttgcaaaactgaacagttctgttttcccagaaggctctggcgagggggacagtgccagctcccagagttggaccagtgttctcgaagccatcacactgatgcacacgagcctgctgagattccacatgaaagtgagtgtttacccgctggcccctctgcgagaggcactctcacaggctttaaagttgtatccaggcaaccaggttctttggaggtcctatgtacagattcagaataagtcccacagtgccagcaaaaccaggagattttttgacacaatcaccaggtctgccaaacccttggagccttggttgtttgcaattgaagctgagaaactgaggaagagactggtggaaactgtccagaggttagacggtagagagatccacgccacaattcctgagaccggcttaatgcatcggatccaagccctgtttgaaaatgccatgcgcagcgacagtggcagccagtgccccttgctgtggaggatgtatttgaactttctggtttccttaggaaataaagaaagaagcaaaggtgtattctacaaagcacttcagaattgcccttgggcaaaggtgttgtacctggacgccgtggagtatttccccgatgagatgcaggagatcctggacctgatgactgagaaggagctccgggtgcgcctgccgctggaggagctggagctgctgctggaggattagagagcagcgggaaaacgggctgtgcctgcgaggccaagttgcccaccctgcggagctaggaggcgcgagcagagaacgtgtgtgttaggagaactcggcttttgaaatgttctttctcgatagtaataatgtgggctgccagcctctcacatcttgcacactttttgggtgtgtaaatgacacaaaagttatttacatattatatatgtgaatatgtgtatatatgtacatagccagagagtcatgccacgtggtcattaaaccgatgatgattgaggaaa

SEQ ID NO: 77825 - DNA, 1158 bp, Homo Sapiens
  misc_feature (744)..(916): n is a, c, g, or t
ggctctgagctgctgagacccaccccactgcctgcagagagacctatcttcaattccatggccccagcctcacccgggctcttgaatcagacagaaaagctggctgcagaagatggctggaggtcttcctccctgttggaggagaagatgccaaggtgggcagcagaacacaggctggaggagaagaaaacctggctgacaaatggctttgacgttttcgaatgccccccaccaaagacagagaatgagttgctgcagatgttctaccggcaacaggaggagatccgaaggctccgggagctgttgacccagcgagaggtccaggccaaacagttggaactggagatcaaaaacttgcggatgggctcagagcagctctgagcagagacctctgccctcctcaccctcagggacaccactcggctccatggggaggtttagaaccaaaccacaagtcccctcaaggacaaccactatttctatattttttaccagaaaacaaaactctccatcgctgaaagagattccagtgggacatggtgccgtttttctgtttgccttcttgcaacaacagtttctgaattgactttgttttcagatgatgccttctgttgaattctgttattaagggcccatgatgagctgtaacttctcaagaggaaagaacacagtagaaaactagagctggaaggatctaggttgacctgtctgtgattttcaaactgtggtccagagaataggggnnnnnnnnnnnnnnnnnnnnnnnnnnnnnnnnnnnnnnnnnnnnnnnnnnnnnnnnnnnnnnnnnnnnnnnnnnnnnnnnnnnnnnnnnnnnnnnnnnnnnnnnnnnnnnnnnnnnnnnnnnnnnnnnnnnnnnnnnnnnnnnnnnnnnnnnnnnnnnnnnnnnnnnnnnnnncaggttcaagaccaagccctggaccaacatgggggaaaacccattctcttcctaaacaaacatggcccgggtaaatcctgtcatccttggtcgggccgcccttcgggcccttcgaaaaagacttttttagaaccctttcgcttttgggcgcccgcgggtcccccgtaagggtaaggtggaactgggtcactaaccggtgtttccctaaggaagaaccttgggcccaggcaataaggggctgg

SEQ ID NO: 77826 - DNA, 688 bp, Homo Sapiens
  misc_feature (36)..(36): n is a, c, g, or t
agcaccagccccgctcagcacaggtggcagcggacntaacaccctgcaaggcccgaagacacaacacagcatccacacggtgacctgtaaatcacctcggcagaaagaagacaggtccccaaagccaccccaggctcccaagcaccctgaggagcatggtcgccaatcccacagctcctcctcctttgccagtggcaccctccaggacacgtggaggttgctagacctgggatccagcccttctggtgtcacctcccagggtgactcaactccagagctcccagctcctccagcagccgacaggaggcccgtcaagatgcaggcaggcattgccaccccagggatgaagacagcagcccaggcaaaggccaagaccacaggagcctcccggtctcatcctgcaaaagctaaaggctgccaggggccccccaagatccgtaactacaacattatggactgacttcctccccccaccccgccccactaaggggtgctcggggcctccgcatggtgcctgtgctttcacctacgtgttgtgggggggtgtgggcacagcgtgcagggtggaggcagggagctgcagggcaggctcccaaatgctgctgaggcgaccctgctgactgaaggcctccctgagcacagggcccattaaaaccaggttcctcccctggggcgtctgcttggccgt

SEQ ID NO: 77827 - DNA, 524 bp, Homo Sapiens
gggagatgggctctggtcgggagccggcccaggaggaaggccatgcgtctctgggtctcttctcgcccaagtgaggcctgtgtgcccgccttccgtgatgcagcctccgagctcccagctcatacagcagccgacaggaggcccgtcaagatgcaggcaggcattgccaccccagggatgaagacagcagcccaggcaaaggccaagaccacaggagcctcccggtctcatcctgcaaaagctaaaggctgccagaggccccccaagatccgtaactacaacattatggactgacttcctccccccaccccgccccactaaggggtgctcggggcctccgcatggtgcctgtgctttcacctacgtgttgtgggggggtgtgggcacagcgtgcagggtggaggcagggagctgcagggcaggctcccaaatgctgctgaggcgaccctgctgactgaaggcctccctgagcacagggcccattaaaaccaggttcctccctggggcgtctgcttgcaaaaaaa

SEQ ID NO: 77828 - DNA, 997 bp, Homo Sapiens
cacaagaaaaacgcaagaggtggaagtcgatacttgccacgtgtccaatgaaagacataagaacgattattgattagtactaataaccccgggcacaccaatcacccaataggtgtgatgaatgtaacgaaacaattcaccaggaacagcatgagtgatacgatataatgcgcacatatagggatatgccctgagaccaagaatgggcacgaaggttccacaatagggtgccatagtctcatcagattattcccaaaatttgttaaacgacgtgtttaaaaagccacctcctcatgcctgtccaaaatgaaccacgcaactggttacctttctctgcctaccttttgggctggggaagaggggcacctttctcatcactctcagggaagtcctgaggaactgtgcaagccaggaagcatgagtcgctgaattggtgatggaggggtgtccacttttttctagttcctcagctgcttctggagcagtgttcacaacgggaatgtttttactgtccttggtaggctacaggttcacagcttcaaatcaaggcctccaaggattttattctcttacatcacagttttgacaagtatgcttttaaaaaacaacatttgcaaaactggtctttaagcgacgtgagtcagaggtaacaaaggcatatatataccgaacaaaggtgctccggtgcagtggagagaacagtattagtgtcgcaagcacaggagtgcagacagccccgccttcatcgtgatgcctgcagcacaccacgattatcatgagaggtcaagattttgatttactaatttataatcttatttccaagcaaaacaagtcaatttcatgttacaacttttttcttgtttctttttatcttgtttggcctgagggttgggggatttgggggagttgtcagctgcacaatctttgaagtgtaagttaatttttatgtgatatttcagtatatattttattgattaaatttattggaaaacttaaa

SEQ ID NO: 77829 - DNA, 715 bp, Homo Sapiens
  misc_feature (42)..(42): n is a, c, g, or t
  misc_feature (51)..(51): n is a, c, g, or t
aaatcggattcggaaatccttacggcttggcagctcctgttntaaagactntgggcggaaaccaagtggagctgggttcccgttcttgccaacgtaggcggaaggggctttctgtttagtttttctccaaccttgcctggggcgcctatgatggagaccctcagcccctagggactccatcttttgaccttgaagtctcgctcaaacattcccctaaaagaacgggggtgagggagaatggaaggcaaaaagagggaaaaaagcaaataaacttcggaatcggacaacttaaagtctcgatatgagcctcggattgtattcgaactcctgggttctagacccagctctgctactaacttgtctgaccttccccatttataaactgttgtgggtgagaggtgggactaggtgaactctgagagccctgcactcggcgcggacgagggatttaggggaaagtgtgctgtattccccgcgagccttccccagcggccccgcctccccgggtgaatccccggcggccagcgcagctcaggcagcgatcctggcggctgccggggccggcagcttcctggaaagttacttcttgttggagccggcaataggcaaagtgtgttctgtgaaatccgcagagccgagattgactacgttccgggaatgagagggctgtgtcattcccctcattgcctgctgcattgacggcgtaacaggaaaa

SEQ ID NO: 77830 - DNA, 1981 bp, Homo Sapiens
  misc_feature (1415)..(1509): n is a, c, g, or t
  misc_feature (1592)..(1655): n is a, c, g, or t
gcatgtgactataaaaccagtggtaaaaaaagcaggctggtacggtccggaattcccgggatatcgtcgaccacgcgtcgctgagctgtattccccagctcaggcaccctggcctggggaaaacagaagacaggaactccacgaggcagggttgcctgagctgtattccccagcacactccactcccgcagtccctccaggtgtggctgctaggcggtggtgcagccttccagactgctgcccagttgcctgatgtcagagcccctccacacgatgagcctgctccctactgccaacaccgtgggccagacaggagactgctttccgaggaagaggtacctgtgaggcgcaggacttgcagactggccagggctgcagggcctctcggctgatggtgcccagcgtggttcctgctgaggtccagcagtgcgtagggaggacagccccgctagagcctggtcctccagcagctcaatgctgttttcttgcatggtgaatgctcctgcagtcgctgaagtaaggagcacgcagatcgtgaggaacaaagggcgccgaggttgggggcatgtctctcttcttaccaagtctagactgggttgccttttctaactattccagacctacagggcgaggggccataactggagtatcccgcccctttagaccccaggcgctcaccggcaggtgcaagaaggtgaaaatccagcagccgcgccagctggttgcccgccaggtagagcacgcgcagctgggccaggcctacgaaggcgccgctgcgcaagccgcgcagccggttgctagtgagcgccagctccagcaggcgcggctgcgcgcggaaggcgccggcctccagggcgcgcaggctgttgttgtgcaggtagagccggcgcagagcggcgagtggcgccagggctcccggctctaggcgggcgatgttgttgtcctgcaggaacagtgtctgcaggccggggaaagaggaggcgcttaccccgctgcgggggtcttcctctccctgggggcaccccgtcctcccgcagctccacacggtgcccacctgcgtccctggcgggattcccagcgggacgacgcgcaaccgcagggcgccacactccaccgtggcgctgtagcagcggcaggctgctgggcagccggcggcgcggagcggcagtagtagcagcagcagcggcagcagtgcgggggccctcagggccatctcccgaggcccggttcctcaccggcccttccgcggttcagccgcagacgcgtgccctcctgaaacacaggttggcaggccagtctcggcagtcgagagccagccaatagatggaatggaggcctgcacctgcgtctaacttttgacgctataaataggttcaagaaactaataaaacgttctggttttctcctttgacaannnnnnnnnnnnnnnnnnnnnnnnnnnnnnnnnnnnnnnnnnnnnnnnnnnnnnnnnnnnnnnnnnnnnnnnnnnnnnnnnnnnnnnnnnnnnnncccttgtccgccccctccgccccccaaaaagtttttaaaacatttttttgggcccggggccccaaaaggaaaggaaactgggnnnnnnnnnnnnnnnnnnnnnnnnnnnnnnnnnnnnnnnnnnnnnnnnnnnnnnnnnnnnnnnnccccgggggaaacccaacggttttgaacaaaacccaaaggaagtttggaggggctttacgggatctatccaagggggggtccaaagcgaagccccaaataaaaatttaagcccccgcccctgggcctttttattggaaaaaaccgggtgggaacttcacttaaaagatatttctcgcccgcacttgggagaaccccttttcccaaaagggggatgggaagaaaacccttaaaaccccccccacgggggcttattccaaccccctttggtcgccccctttgggaaaataaaatttttccccccactgggggaaaaacacgggggggc

SEQ ID NO: 77831 - DNA, 818 bp, Homo Sapiens
gccgctcgccgcgggagcgtcaggagggcacgcgtctgcggctgaaccgcggaagggccggtgaggaaccgggcctcgggagatggccctgagggcccccgcactgctgccgctgctgctgctactactgccgctccgcgccgccggctgcccagcagcctgccgctgctacagcgccacggtggagtgtggcgccctgcggttgcgcgtcgtcccgctgggaatcccgccagggacgcagacactgttcctgcaggacaacaacatcgcccgcctagagccgggagccctggcgccactcgccgctctgcgccggctctacctgcacaacaacagcctgcgcgccctggaggccggcgccttccgcgcgcagccgcgcctgctggagctggcgctcactagcaaccggctgcgcggcttgcgcagcggcgccttcgtaggcctggcccagctgcgcgtgctctacctggcgggcaaccagctggcgcggctgctggatttcaccttcttgcacctgccgcgactgcaggagcttcacctgcaagaaaacagcattgagctgctggaggaccaggctctagcggggctgtcctccctagcactgctggacctcagcaggaaccagctgggcaccatcagccgagaggccctgcagcccctggccagtctgcaagtcctgcgcctcacagagaacccatggcgctgtgactgcgccctgcactggctgggtgcctggatcacggagggcgtgcagccggctgctcacctccagggaccaggacgatcatgtgtgcagagccccgcgcctggcgcctcag

SEQ ID NO: 77832 - DNA, 1091 bp, Homo Sapiens
cccttaattgctgcttttcaaattttagttatggctcgtctgctcaccccttctctacattagggtgtcaaagaaaatgttttgctttaaatataaatagccattcatttagtctcagattgtgaatttaaaatggtggataccgaaattgcttgtgtgtgttgctgtgggtttggtttgaaggcaaacacccctaaaacatgatattcccatctagtgcatttaaatagaaatcactgagtttgctgcttttttattgtcagcagataggagaattaataatgcattttagctgtgatgtccatttttatgaaattcctactaagagctatgttaaaagtaaaggatggtgggggttgtattaactatatacctgtttaggccattctggctgtggtatttttcaataggtcagcatctgtaaatctgtcagttttatacaggagtgcagagtgaactaggcaactagattaagaggtctaaatatgaaataccagttgaggctgaggacctcttcgtcttcctttaaatgtcttttgcctagggagtgtttaccatttgtgaggcagctttgtctgctcttacactgtacatcctattactccattgggaagtaggttcactttcctctggccttttgcctaagttaggctttgctgaatcaaccctacttttccttttagaaaaggttgttacaggagatttactggcaactgttcttttcccatcaaaaatcagtgaatgtttgctgagtataaatgctgcttccttaaaccacttgtcgctttaggatcaactttacctgtaccttttctcctttcctcccttgccacctcaggtgcaaatctgaactcagtgtctgcttcttccattttctcgtctctctcccctcttcccccattatccatatgacattattttacttcaaatgacagcatcaatcttaaaaagatatacattaaaactaaggagtttttttaaagaaagcctgaataagttcctttccctggtaactttgaaaagcagtcagagttgctatatagatatatgtggctcctttaaaatgctttgtgtatgtgtggtgtttaaaa

SEQ ID NO: 77833 - DNA, 707 bp, Homo Sapiens
cataaaagtactcatgttcatccttttggaaactattaatcatgctagccttagatcattttaagctcctttgctcaaaccaatcattgatgtgcagtatgaccagcagctagtaagtctgtggtgctaccagtatagcttggaagatggttctgaattaatacctcagaatgatatcaaaagtaaaagagtggttctattgctaaatatattgactagctttcttataacaattttactttgaaattcaaagttccaaagctaaatgtctaaaagaagtaactgcagcttgttctgctgattttggaaaatagtattaaccatgtaagatctttggggttggagtgaaggtcttatctgcattaattttgttaatgcacattgtagatgtggagaacatcttgacctgcataaggattgcgtctcattttattgtgtagtgctttttcgaaatatttacatttctttggttcccatgttcatgtattctggagaagtaaaatttcttgattactgggcagaccctaaaactactaagagaaacataacatgtagttagctgtctgctcatggtttgttcaaatctaagctaaccttaatggtgctgtgtccgctgtccacagaaaacgcccttaagtagccctaccttactccttagagcttattttgcttttgtatttaataaaagctgtcttaaatgttaaaaa

SEQ ID NO: 77834 - DNA, 1374 bp, Homo Sapiens
  misc_feature (697)..(792): n is a, c, g, or t
  misc_feature (803)..(887): n is a, c, g, or t
  misc_feature (1186)..(1236): n is a, c, g, or t
agcgcttccgtgaacacccccgtcttccgtagggggagggagcaggcgggatcctgggtccctcataagcactttggttttaccgccgtgcaacctcactgtgcccgccccgcaccatgccttagccccaggtctagccgggcccattgcagggggcagcacttgggggcatctccggcacttgggtgggaccaaggagatgccaccatagacctttccctcgccttcttcctccctagtccgggttccattcttttcaccagcacccatcgcccaaggggtaccgaggggggcaaggggtgtccagtccaagcccacccccgcctcgccttccgcaaaactgtgagcaaaaagcaatagaagcctcgcccccgcccttccccttcgcaggattcgccgagtctgtagcctccccgatccaagttcctagacctcatggctgtcccctcccaccagtcacctccactgcacaactcgggcgggggtgtgacacctctcccccacccccgactccgtggtttccgtatcgtcaacccttcagccgccgacccgggaggggtctggcctacactggtcttccccttcccatcaactctttctgcttgacaatgtagcaacccaggccccccacccacggtcctcccctttttcctctccctgacaataaagtctgaatttgttctgccctccgcccctnnnnnnnnnnnnnnnnnnnnnnnnnnnnnnnnnnnnnnnnnnnnnnnnnnnnnnnnnnnnnnnnnnnnnnnnnnnnnnnnnnnnnnnnnnnnnnnngacaaaaaaannnnnnnnnnnnnnnnnnnnnnnnnnnnnnnnnnnnnnnnnnnnnnnnnnnnnnnnnnnnnnnnnnnnnnnnnnnnnnnnnnnnnagggcgcggcagaccacgcgacgcgagggccggcgaaacgaagcgaagagagagaccgcagccgcgacgcagcagcggagacaaggagccagccgcacgagagcgacgggaacgacaggcgcacgaagcggagggagaagaaggcggccagggggccccacacgaccccaaccgcacgaagcgagccgaggaaggcgagaacggcaagcgggggagaggacacgaaaaacgcaacaaacagaaagaccacgaaaggcccccaaggaccacaaaggggcagggacgcgagcccaggcaannnnnnnnnnnnnnnnnnnnnnnnnnnnnnnnnnnnnnnnnnnnnnnnnnncaggacgaaaggagcgaaaacagggcaacggagcagcgagcgcgagggagagagaacggaaaaggaggagaaggcggacgacaagaagcagcaagcagagaaagagagtaggccaacgcagcgcctcctaccccccgg

SEQ ID NO: 77835 - DNA, 1153 bp, Homo Sapiens
ctgtccttccattgtactggtgaggatcccctggttccccacttccttcccacatcagcactcatcctgcagcagaggatggaggaaacccgcacctatgcctgcaggggagaagtggataggctcaggccagggtgtatccagccctgtaacctggtcccctctaccctagaatccctggaggcctcagctctcccgcccagcagtgggggactccggcagataccccctctaccagctgctgaactgtggccgtgggaatagctgtggggccatcccatccagacattgcccacatggagcggctcctgcagcaggccatggcggagagggagcggctgctcaaggcccgggaaggaacaagaaggggcacggaaggttcctcaggccctgctgttcctgccatcacggccccgcccaccccaccccaccctccaggcccgcgaatcttggatctccggcagcatctggagggatggggccacaacccggaaaactgcccacatgtgcaggtgtctgggtgctgctgccgtggacccctggtgaagatgggcggccgcatcaagacctggaggaagcgatggttctgctttgaccgccaagcccgccgcttggcctactatgcggacaaggaagagaccaagctcaaaggtgtcatctacttccaggccattgaggaagtctattatgaccacttacgctgtgccttcaagagccccaacccccgcctgaccttctgcgtcaaaacctacgaacgccttttctacatggtggctccgagccccgaagccatgcgcatttggatggacgtcatcgtgaccgccgctgacgaaaaccacgccccctgagtggccccgccctcttggggggaagtcccttcgaggctccgccggcgcggggcgcgggggcgttcctaggccccgcccactgccggaaaacttggacgcaccgctttggaactctcccgggaattccgcaggcgcggcagttcagctggcctgagctgctgcgttctgggttgcaggtgccttgcccccgacgggatcgccggcccctaaggccctgcccggggcaggaggaagattgcaggggcgggaagaaactatttattggtgctcctgtgataccgaattaaatacggaggaaaaacagg

SEQ ID NO: 77836 - DNA, 725 bp, Homo Sapiens
aaggaagaacatcacgtgctgtgacaccgacttgtgcaacgccagcggggcccatgccctgcagccggctgctgccatccttgcgctgctccctgcactcggcctgctgctctggggacccggccagctctaggctctggggggccccgctgcagcccacactgggtgtggtgccccaggcctctgtgccactcctcacacacccggcccagtgggagcctgtcctggttcctgaggcacatcctaacgcaagtctgaccatgtatgtctgcgcccctgtcccccaccctgaccctcccatggccctctccaggactcccacccggcagatcggctctattgacacagatccgcctgcagatggcccctccaaccctctctgctgctgtttccatggcccagcattctccacccttaaccctgtgctcaggcacctcttcccccaggaagccttccctgcccaccccatctatgacttgagccaggtctggtccgtggtgtcccccgcacccagcaggggacaggcactcaggagggcccggtaaaggctgagatgaagtggactgagtagaactggaggacaggagtcgacgtgagttcctgggagtctccagagatggggcctggaggcctggaggaaggggccaggcctcacattcgtggggctccctgaatggcagcctcagcacagcgtaggcccttaataaacacctgttggataaaaa

SEQ ID NO: 77837 - DNA, 1190 bp, Homo Sapiens
tggtaccggtccggagttaccgggatatcgtcgaccacgcgtcgggagcagagcctgccgcgaacccccggagcccacgatccctcgtgccatccctcgaatccaccagcacgagcgtcccacccgcgcctgggaccatggccactgactcatgggccctggcggtggacgagcaggaagctgcggctgagtcgttgagcaacttgcatcttaaggaagagaaaatcaaaccagataccaatggtgctgttgtcaagaccaatgccaatgcagagaagacagatgaagaagagaaagaggacagagctgcccagtccttactcaacaagctgatcagaagcaaccttgttgataacacaaaccaagtggaagtcctgcagcgggatccaaactcccctctgtactcggtgaagtcttttgaagagcttcggctgaaaccacagcttctccaaggagtctatgccatgggtttcaatcgtccatccaagatacaagagaacgcattgccactgatgcttgctgagcccccacagaacttaattgcccaatctcagtctggtactggtaaaacagctgccttcgtgctggccatgcttagccaagtagaacctgcaaacaaatacccccagtgtctatgtctctccccaacgtatgagctcgccctccaaacaggaaaagtgattgaacaaatgggcaaattttaccctgaactgaagctagcttatgctgttcgaggcaataaattggaaagaggccagaagatcagtgagcagattgtcattggcacccctgggactgtgctggactggtgctccaagctcaagttcattgatcccaagaaaatcaaggtgtttgttctggatgaggctgatgtcatgatagccactcacggccaccaagatcagagcatccgcatccagaaggatgctgcccaggaactgccagatgctgcttttctccgccacctttgaagactctgtgttggaaagttggcccagaaaggtggtcccggacccaacgttttcaactgaaagcgttgaagaagaaagaccctggaaaccatcaagccagtactatgtcctgggcggacgcgagaacggaaaattccaggcttggttaccctaggggccatcccatggtcaggcaggatcttgcgcttcgcaaacgtattgtgggaaaacctaagagcc

SEQ ID NO: 77838 - DNA, 665 bp, Homo Sapiens
gatattaatatctgctggccagacctaaaaaaaactgaaggcccaaggaaagtgactggactcactggaaagtatctaacaaatactttggattccaaagtatttccaataccttgaagattcctttgaaaacatcaaagcacaaactcaaatctgcacaagattacaaaagcacaattttggtgttatttttagaatgcaatacacaaagctatgttcatttctctcagcaagcattttcctgggtagtagtaatagcttaggaatcaaatgccacttttgtttttccttttttcactagtttgaaataccacaaatcacaggtgagtcagtcctcccagaggaaaagacagtcctagggagaatcacaggcctggcagacaagaccacactgagagcagtagaaggaacctgcatgcttaagggacagaggactgtgttgtgttctcataatagaccgctggatgaagaagtggttaaaaaccaaccctcgaaaaacaaaaatccctggctaatcctgaaatatatttaacttgaagtctttggatgatttttttaaggttaaaaaaaagtttaggattattataaatcaatatttataaataagcaacaatgtatttggaatttttgtttacctgattaaatatgtttttggtatgtgtaaa

SEQ ID NO: 77839 - DNA, 1197 bp, Homo Sapiens
tgagcaggcagggagagcaggtgggagtgtgaagccagcaccgaggaaggaagcagagctgggaaacggtgttaagggacatgcgtgcatgcgcgcggtccacggcctaggctctgcctttgggccctacccaccgactgtgtatgtgagcccccacatttgcatttaacaatttaacaccaggcacctgtctcctgcagtgatgcaggctcgggacctccagagcagcgggcaggatgacgccctgaacctgcacttcatctcctggctgctttattctgtcaattgacttctgtaatacaatttccatatggtgacactgccttccaaaacagttagagcttattctcagtattcttcattggcagtggaaaatgcttcagtactttattgaaagaaagcaataaataatactgtgataaaaatagttcaaaagtagactgtacatactttgttacataatcaggaagttgacaaaagattaatagaaaaacagaacagtaacaatgaattgtacaagtaaattaaaagcagaaaccaactgaaaagacaggctgcctctgtctctggatctgctgcacaataaataccacgccatggtctgacacactttgctggcttgttaatatgccatttaaaaagtaaaagccacatctgcaacttacacaatccaaaatggctagagcatcaaagtctaaaaatgtcccactaggttcgttctttaaacatgtttacaaacaaatgtaaaaagatgatttacataagaaaaataaggcctttattagagctgcactgcactgctttctgggtctcctgccttcatccactgtgtgcgccgacttgcaggatgagagcgtggtgcttggtgctggccctaaggggagccacatgggtgtctctccacccgctcccaaggagcagaggcagggaagagggtgcaggggctagactggtccccaggttaccccatcccgagtctctccagctgagagaactgctcccagctcacagtctcagccactgaagacaagctccccaaatccagagactaggctaggaaagcgttaaccagtgctaggggcttctcatagtgttgggatagtgttttccgtcccacatcttattaggagcttgatatttaaccccagcccattttaaaatctgttcatgctgcaaaaataaaacatcctcttggct

SEQ ID NO: 77840 - DNA, 1023 bp, Homo Sapiens
cttgtttctcactggctactaatatgtaatggctttcgctctgtgctgatgtgtgacagtcaccttgttggccttctatgtccgggaagaattatagtcactgccctaaagggctcagatcctcagtttgcagaaggcctgtagttgaacataaagtgaattttgaaccattgagaagacattccgcttctcttgagccagtggttgaactcatattcttggacaacctgctccagagggagaccctctggtaaatgctgacctaatgtggattgttgaagcagtggtgtttactactagcagtgaaaacttcattggaattgttctcagctctgaaatgcaccattgactggagcagtaataagcccaatggagacagggctgtaagtgtgttccttctgaatgttaacagctggaggtccatactatctccaaggatttgatggcctttaaaaactaaagaaaaaccaggttggtgggtaattttaggtttattgtatatagatttgcattgggcaagaacggaatgttagaaatctgtaatactgtatgctgatggtaaacttactgtaaggatctcatttgggtatctggaaggtgatagttctgtttctttgttatatacacagcatgttacagagatgtgatttttctccccattaaacagaactaaaagacagtatatttatttaaacgcaaagctttttccccttttatgtctcctcataaactccagagacagtctggaaggccctcttaaatttgtcaaagagcagtaaagtgtctcacgctcagtttttctagcagatcgtaatactctcagttgaccctgctgggatttgaacctgcagtttctattaagtttggtgtgtgaagtccaacaccttatcaactaggctttccctctgacatcttgaagcctccgtgtatatcctttggactctgcagcaaagtgcatcagttgttagtttactccgagcatggtattcttagattgaaaagaagtctctgaagatgtccaac

SEQ ID NO: 77841 - DNA, 685 bp, Homo Sapiens
cgtgcatgtggggacttctgctcggctccctcctgttccggggtccagcgggcgtctccccaggcaggctgtgcacttacccgcagcccagtgatgcagggtcggaggggtggtcggcagtgagaaagggcgtagggcagatgccgggctgactcttccttttgccagaggaaatcccctgtgccccctagtcctccccctaccaaggctcccatcactcatcacggcctctccatacagaccagaatctgagggagagcagattcggccttgagaacgcctacaacaacttccggcccaccctggagactgttgactctggcacagagctccacatccagaggccggagatggtagcatccactgtgtgagccaacgggggcctcccaccctcatctagctctgttcaggagagctgcaaacacagagcccaccacaagcctccggggcgggtcaagaggagaccgaagtcaggccctgaagccggtcctgctctgagctgacagacttggccagtcccctgcctgtgctcctgctggggaaggctgggggctgtaagcctctccatccgggagcttccagactcccagaagcctcggcacccctgtctcctcctgggtggctccccactctggaatttccctaccaataaaagcaaatctgaaagctcagaatgagaagtgaa

SEQ ID NO: 77842 - DNA, 1158 bp, Homo Sapiens
  misc_feature (91)..(91): n is a, c, g, or t
  misc_feature (110)..(110): n is a, c, g, or t
  misc_feature (117)..(117): n is a, c, g, or t
  misc_feature (122)..(122): n is a, c, g, or t
  misc_feature (195)..(195): n is a, c, g, or t
  misc_feature (208)..(208): n is a, c, g, or t
  misc_feature (220)..(220): n is a, c, g, or t
  misc_feature (246)..(246): n is a, c, g, or t
  misc_feature (260)..(260): n is a, c, g, or t
  misc_feature (294)..(294): n is a, c, g, or t
  misc_feature (353)..(353): n is a, c, g, or t
  misc_feature (493)..(503): n is a, c, g, or t
ttgcacccagctacctatgtccgctgttgtgtgtgatgtgacgatacattcacacagaacagttgacatgatccgaattatacgactcctntagggattgcccctcgagnccagaantcgcnacgagccgctttgaaggatgtttctctatatggtaaaatatatatgaagagtcttgatacgtgaaagatcacntgactcagatacntcaaatgtattntgtcaccattaccactaagcatatantcagtaaactatanactgactgcacattatgtaatacgttgtactttntgttgaattcaccgaagttcttccatttatatgctatttttaatggcattccggcttanacattctgtgagtcttacaaatttgactcttgaatggcaaaataatgttagtatgtagaaggttaactttcatttataatataagtggtgcaggggttcaacattttaagtaaaaatatttttacacactacctctctcnnnnnnnnnnnaaagttttaacatcagaacttttgggggaaaaactacttcagggcttgactttttgtacaaattttaactgtaaaatacagatttatcttgtacgcattcatggaaatggaaatcaaagctgctattgctttttattttaattatcctgttaagggtatctatcaatggtattttcaagtagatctctgtttcttaaattattggtgaaataattgattactagatatattgtaaaaccaatagatcctggttatacgataaaatatcagctcattggtaggctgaatcaattatttcaagtgcaccttattaacaaaagtatcagtggatccaacataaaattttatagtactaaatgtcaagcctaactgtgaattttgttctgtatcttaagtaaatttatgataatgttctcgagctatcaacaaaatatatgtacttttgtgagctatgaattttctaattaaattttacatgctataacatgatttttacatgaatgatactttgtttataactatcaaatgtcagtattttactacaattttattataaagtgtacattatcactaaatgaacttcgattttaaaaatcaaattagctttagttgtatattattttttacaaataaagatagacttgtataaaggcta

SEQ ID NO: 77843 - DNA, 666 bp, Homo Sapiens
acatgaggaaggaaacccctgttgggggctccatctgtacccaggcatgctccagggtcactgggtccgcgtgagatgtcccatcctgcctccatgcattgctggtggcttttgtttgtctgagtctggcttcatttcctggagcgaggccaccagtttccactgggcctgactgctccgtgagagctcgtcctgggatttggctcttgtgctgcagatcagcgggagtttacctggcaacttggatccagcaaccctggtcccacaggagctggagcggacttcccgccaggttgagaccacaggtgcaggggaaggggcgagagtgttcctcaggcacccacctcccagccacgcccactcccagcctgccttaaggatgagatctgtttcctcagtgaacttgccccagtgcatggcgtgagaagctaaatgacacacatcctacattcactgcttctggaataaccagagatcacgcgcctgtcaccacccccagatgaaaaccaggacgtcgcagccctggagaatctgagccactcttgggacactttcctggggtgtgggcatctcctcgtgctttatcttcccttccttgatgacaagtgctaatttgataacaggagatgtgcaaaattacttcttttttaaaattctctgaaagac

SEQ ID NO: 77844 - DNA, 1060 bp, Homo Sapiens
  misc_feature (53)..(83): n is a, c, g, or t
  misc_feature (867)..(883): n is a, c, g, or t
gtggaccggtccggaattcccgggatatcgtcgacccacgcgtccgggtggtnnnnnnnnnnnnnnnnnnnnnnnnnnnnnnngtggcagcgatccgcgggctggcgacgtagaggaggacgcctcacagctcatctttcctaaagagtttgaaacagctgagacacttctaaattcagaagttcatatgcttctggaacatcgaaagcagcagaatgagagtgcagaggacgaacaggagctctcagaagtcttcatgaaaacattaaactacacagccgtttcagtcgtttcaaaaacagagagaccattgccagtgttcgtagcttggagggacggtttgaagatgaggagctgcagcagattcttgatgatatccagacaaagcgcagctttcagtattaatctccaaacatcactgctgctcggagaaaccacatccccaggcataacaccaccttcccactgtctggggctgacttgcacagaaattctgttgaagacagttgagaattcctttggagaaaacagcccagcttggcgtggggttaggttgctgtttcaaataactcacaggcccaggtgacatggaatcttggagcagccttgtgcagtggcagccagtggcttcctgaacgtgcctctgcgaagtgtgagatgaggggtcacataaccacactgttgactacctcattcctgggttttggcctccacatcatcttttttcttaatatttcatgtttttaatttcagggtgtttatactttttgaaaactagaccagaagatagtagacttttatagaaaaaggaccagttttaccctagatactaaaggaagaattaaaccgctgttagtttgaaatgcnnnnnnnnnnnnnnnnncaaatgggagatagggtcttaactctggtccaggctgggacggagtgcagtcgtacagtcagggctcactgaagtcttgaccccgttgcctcagctcccaaataagtggggccacagttgttgcccacaagtctcagctaattttcaaaattttttatagagggggggttcactatg

SEQ ID NO: 77845 - DNA, 1941 bp, Homo Sapiens
  misc_feature (154)..(170): n is a, c, g, or t
  misc_feature (195)..(422): n is a, c, g, or t
  misc_feature (1146)..(1160): n is a, c, g, or t
  misc_feature (1530)..(1556): n is a, c, g, or t
  misc_feature (1570)..(1634): n is a, c, g, or t
ggcacgaggatcttttttcttaatatttcatgttttaatttcagggtgtttatactttttgaaactagaccagaagatagtagactttatagagaaagaccagttttacctagatactaaaggaagaattaaaccgctgttagtttgaaatgcnnnnnnnnnnnnnnnnnaaatggagatagggtcttaactctnnnnnnnnnnnnnnnnnnnnnnnnnnnnnnnnnnnnnnnnnnnnnnnnnnnnnnnnnnnnnnnnnnnnnnnnnnnnnnnnnnnnnnnnnnnnnnnnnnnnnnnnnnnnnnnnnnnnnnnnnnnnnnnnnnnnnnnnnnnnnnnnnnnnnnnnnnnnnnnnnnnnnnnnnnnnnnnnnnnnnnnnnnnnnnnnnnnnnnnnnnnnnnnnnnnnnnnnnnnnnnnnnnnnatgagccaccacaactggcctgaaattcttaaaggatgggagtgtcgatgacagcaccttggcatcgttgtgcctaacctgggagacggaagaagcacgccatgggaagtgtttacacttggggacaagtgctaagtattgtggagcccatagccccttgagatagatggctactttgcctttcttcttgaactgtcttgcagaatgtggatttggggtaagtggtcttgaaggattcatttagtcaccctcaaattaagatttttacttcatctttcttgggcctgcacctccaagataacaaagaagaagcaatggtcgtgccaaagaggtccacaaccaggtgtgcactgttcactgcagcccatttgctgtatgaactgtggttgttgtgtgcccaatgacaaggctactaagaaattcatcatttgaaacgtagaggccgcagcagtcagcgatgtttctgaaatgagcatccttgacgcctgtgtacttcccaggctggatgtgaagctacattaccatgtgagttgtgccattcacagcacagtggtgaggaattgagctcatgaagcaggcaaggaccgaacacctccaccccaacgtagacctgcaggtgctgccccatgacctccaccaaagcccatataaggagcggagttgttaaggactgaagaaaaacttctctggagaaaaataaaattgcaattctacttaaaaaaannnnnnnnnnnnnnnacttcataggccaggcttgaagttctgaacactttgaagtctccaattatgagagatccagtctaagcctctggcctgctaattagcaataagtgctttatttggaaggagggagtcatccactcttgagccactgcagtgaagtcacttgatctcagtctgggggaaaacacttcaatagctaaacattctagctttgatttttctgaagggaatacacttgttttcaattttggggtttttctttggggcacttgcttgactctgtatgaacttgtgatccaaggaaaaaggagaaagaacagtgttggcttttaaaatcaggatgggtttatgtttgctacgaaataaggcaagaataaaaaattcnnnnnnnnnnnnnnnnnnnnnnnnnnnggagataaagtccnnnnnnnnnnnnnnnnnnnnnnnnnnnnnnnnnnnnnnnnnnnnnnnnnnnnnnnnnnnnnnnnngaagaagggcgaggtgaaatttggcttaccccaatctacgggtaactttgcggtttttaagtgctggatgaattttgcatgggcattcttggcgagtggcccatgctgccttccctggtattgtcccaatttgggccaataagggctggcccaagggggtaccgggcccaattatttcccctaaaaaaaggccacttccatggggctggatgggcacctaaagccccgggaaatggggaaaaaagaaaacttgggaaagggggtccccgaaagaaacccacggggcgggggcccagagggggcaacc

SEQ ID NO: 77846 - DNA, 1031 bp, Homo Sapiens
  misc_feature (860)..(874): n is a, c, g, or t
  misc_feature (936)..(936): n is a, c, g, or t
  misc_feature (990)..(990): n is a, c, g, or t
tggcgacgtagaggaggacgcctcacagctcatctttcctaaagagtttgaaacagctgagacacttctaaattcagaagttcatatgcttctggaacatcgaaagcagcagaatgagagtgcagaggacgaacaggagctctcagaagtcttcatgaaaacattaaactacacagcccgtttcagtcgtttcaaaaacagagagaccattgccagtgttcgtagcttgctactccagaaaaagcttcataagtttgagttggcctgtttggccaacctttgcccagagactgctgaggagtccaaggctctaatcccaagcttggagggacggtttgaagatgaggagctgcagcagattcttgatgatatccagacaaagcgcagctttcagtattaatctccaaacatcactgctgctcggagaaaccacatccccaggcataacaccaccttcccactgtctggggctgacttgcacagaaattctgttgaagacagttgagaattcctttggagaaaacagcccagcttggcgtggggttaggttgctgtttcaaataactcacaggcccaggtgacatggaatcttggagcagccttgtgcagtggcagccagtggcttcctgaacgtgcctctgcgaagtgtgagatgaggggtcacataaccacactgttgactacctcattcctggtttttggcctccacatcatcttttttcttaatatttcatgttttaatttcagggtgtttatactttttgaaactagaccagaagatagtagactttatagagaaagaccagttttacctagatactaaaggaagaattaaaccgctgttagtttgaaatgctttnnnnnnnnnnnnnnnaaaatggagatagggtcttaactcttgtccaggctggaggagtgcagtcgtacagtcatggnctcactgaagtcttgaccccgctgcctcagcctccccaatactggggggccacnagtggtgcaccacaactctcagctaaatttttaattttttt

SEQ ID NO: 77847 - DNA, 1248 bp, Homo Sapiens
gcggcccacaccccacatacctggtcctttacagaagtttgcagatttctaacctagcccaatgattttcaggtcagaaatcctatgtgccagtcacactgagctacttaaaattccagcagcagtagggcccagaccatcacccttccccctgcttcccgcgactctccaactatgcagcgagcttttggggctcagatggcccttgcagctcatcacgggctgccctgtggtgacccacacaagcctgcctcccacttacaaaaggagccccaatccacctttgcaacccgggcacctagcatgggcacaaaatacgtattctacaactactggaagaatatactctaagatgatgattaaatataaatgcgggtctcacacatcaagaggtgagtcgtgcaatcgtaggcagactgcaggaggcaaggcacaggcggcgccacagctacctggacttgctcttctagaccagacagaacacaaagaaagagcgctggagccgagagtcagggcatctggggacactggccaacagtgagattctccgtcagcctgcagagtgtgggagagccagaaaaggggacggaattctgagagattttactgtgggttttaatttatatcatgttggtgctctttgatagatgccagtgaagagacaatcctgtttaatgtctttcggcactggaatttggtctcagaacagggctcgatggagaggttggccttcaggaggccctggtgcaggcgggtcacacgtgcagcccccctcgccccaccactgcctcgtaaagggcagcatgtgttacggtgctggttttctaagctcactgcgctccagaccctgtgaggaatgccttggtgttttagaacgtctccctgcccaccctggatcgccccactgcctctctccactaaccgtatttcaaacagtgtgtgaaaaaagcagctttagctggtcagcaccttgtctgggcctcctgggctctattccaagacaacagattgtcctgcccccaatcaaggcctcagcccccaggctccagagaacagtacagccctaggagggacccacagactctcaggtcctgctagtattggctccgggaggctaagtaatatgttgacacatacagatgctgttttaatcttactatattcatagtaattgtgtcattttccatcttttcaattcatacatactctcacacaattaccaccatgaaatgacgggccttaacattt

SEQ ID NO: 77848 - DNA, 2858 bp, Homo Sapiens
  misc_feature (93)..(93): n is a, c, g, or t
  misc_feature (129)..(187): n is a, c, g, or t
  misc_feature (241)..(241): n is a, c, g, or t
gcaaatgggacaattttaattcaaccacaagtcaaatagaaagaagttaaaagaatgtttatgcaaacacatgagaaaagaagggtgcagatnagaatgggggttggggagagaaagaggaggagtaannnnnnnnnnnnnnnnnnnnnnnnnnnnnnnnnnnnnnnnnnnnnnnnnnnnnnnnnnngcggatttggcccaaggtcctatcttggccgcatctctctgcttcttccccctnatgcttggtttgttgacaacacagcatcctgtgcctggactcccaattagcttgttcctggactgtgccccaggtccctccctcaggaggggcacatgctgtcagtccagaccaaacctcacattaaataaatttcaatatacactgtacaagaatgccaggcccatccctcatctcactggctgcctgacccccaaaacaaagctcctccccagcttctctgtgcatcaagggacatctgagggccgaagaggaagggaaaggaatagcttggttcccaaatcggcctgccatgtccatatataaagctaggggcaccatgtgacacctccccacccccaggagccccctgcatggaccaggctggcttagggagcagtggccaggcagcagcagtccccctctgagccatctttgtcaccgtcaccctgtgtccatagcccagagtcccctctgtccagctgcagcctgagcagtacagccaggggtaggggtggggagagggcctcgtgcaaagtggcaagggaaggtgactccccttggccttccccctggaagacccacatgaccaacagcaaggcaggggaggtacatggcaggcaggggcggaagacgcaggcaggtggcccccaccctccgtcactctgcaggtgggtgggccagattggccagaaccttggcctggtccacagcgtcgagcaggttcttggcgtccacagccagggtgtgtgaagccgtcagcatctgcctcttgcactcctcactcagggaggtcacggcgttctgctgcgccagccgcatcttgttgatgagctctgccaggtctttgttgagcagtttctgggtgccctcgatctctgtccgtgaagatgacggcaaggaaggcaggagatcatccacgctcccgatgagcttccgcagggtcagccccacattcttcaccaccaccacgtagccctcggggggcagctgacagagctcattcttgagctccagcacggcccgcaccagctccatgacattgaggtacaccaggtcatcggtccggtccaggttagctgtgggctggatggactgtgcgcccagcctcgggggcttctgtgggggccctgtgaactccaggtagccgacctccttctctggcgtcaatggggacgtatcattcatataaaccatggggtccagggacttctcctcctgcctgagccactggtagtcctccaccatctgcttctgctgtttgtccaggatttgccgcattttgaccttttcagcctcccacagctgctgggcctcttctcggctgctgggttggatgaagtcctcctcccgcatgctgtggcgtttgaagacattgtgccggtggagaggtggggtgtgcagtgagttaacgggagatggatactccatagggctggtgagcgtaggagagctggcacacagaccctcaggaacctggaactgcagctttggagccaggaggttggtttgcggagggggtctgtacttaggtcggctgggcttgggtgggggttcctggaaggctgtgggctccaagattttgggggttcggtagcgagcattcctctcttgctccatggcaatgtccttctccatctgataaacgtcactgaggctgcacaccagctcggtgaagcggggccggtcactggggtcgtagtcccagcagcgggtcatgagggtataaaggaccggtggacagagatcaggcttgggcagccggtctcctttctccagcaccccgatgacatccttgttctccagccagaagaagggctgcttcccaagctcaggatctcccacatgcacacggcgaacatccagacgtcactggctgtcgtgaagcgtcggaagttaatggactctggggacatccatttgatggggagacgagtcacagaggctttgtaatagtcctcgtcctcaatgtaccgggacaagaccaaagtcccccagcttcacacactcaggggaggccaccaggatgttccggacagccaatgtccctgtgcacgcagttgatgctctccaggtaggccatggctttgcatatctgcagtgagtacagcacgagggtgagcaccttcagggagttcttgttccgctccaggtagtggcccagctccccatagggatacaattccatgatgatccaggtgggctcctcttcaatgatgccgatcagcttcacgatgtgcgggtggtcgaggttcttcatgatcactgcctcgctcatgaacttctccttgttgtccagagtgcagtctttcttgcaggtcttgacagctacattgattttctcccctttgtgatttgtgtagacaccttcatagacctccccaaaaaagccttccccaagaatacgattcaggaccacatcttcacgggcaatgccatactgtggacctccgggccttcgcagggtttcgtcgggaatctctgcgtagatgtctgactctatgctgcagctctctgagaggtgggaccgccgggcctccaggtttagcatggggatctggggcaggctgttccgcttctcaccatctttccggacgcgtgggtcgacgatatcccgggaattccggaccggtaccag

SEQ ID NO: 77849 - DNA, 441 bp, Homo Sapiens
  misc_feature (382)..(390): n is a, c, g, or t
gtgatttgtgtagacaccttcatagacctccccaaaaaaagccttccccaagaatacgattcaggaccacatcttcacgggcaatgccatactgtggacctgcacagacagagaaaaaagtcgcagatcacagagatcggtggtatcccctagggaacctgagtgtctgcaggctctaaagccaggcgtcaccagatctataacacctcagccaagatccagggactgggctggggaaatgggggtctagaatgttccactgtctcagacccagggaagagccatcaccctgctccctatgaaggctaggtcccaggtccacgttactagaatccccgcacagctccatgggcacacaaaaggcaatcagtatagggagagnnnnnnnnntctcaatttcaaatccaaggcatctcaggtttgccactgtctaagtctagc

SEQ ID NO: 77850 - DNA, 843 bp, Homo Sapiens
  misc_feature (760)..(760): n is a, c, g, or t
  misc_feature (775)..(778): n is a, c, g, or t
ggagcatcagatctttcctccccagagctggaagttggcgctggtggctgccatgatgagtggcattgcagttgtcttggccatggcaccctttgatgtggcctgcacaaggctctacaaccagcccacagatgcacagggcaagggcctcatgtaccgggggatactggacgctctgctgcagacagctcggaccgagggcatttttggcatgtacaagggtataggtgcctcctacttccgcctcggcccccacaccatcctctccctcttcttctgggaccagctgcgctccctctactacacagacactaaataacagccgctttcccagtctccaccaaatgagcactccttggccacttgtgcctccaccactatgtcctggtgactactgattaggtgacctttcatccatccatgggggacagccaaccccactccccatctgttctcagggttgaatcactacaagagatgagtttcccttctttccttgggtgttgctttaaaccttccctacccattcccctgggtaactcacacccctctctcagggctgaacgagtcatcccaaagtgtatttcctcccactcaccactgccaccccttgagtccctcctggctcccatgcacaggtttaaactcctccctccaaaaccaaagggaattgagagacccaattcccaggcgtctgggaacccaggggtcctggtagattcaaaggcacagagattatattgattataaagcggaaaancccgacgggggagannnnacatggcggccgcctcgggcccccagaaacctttctagaccttccctttgggcccgcggggccca

SEQ ID NO: 77851 - DNA, 895 bp, Homo Sapiens
gcggccgcctgcagctatgagtttgccattcatctctgctgttcccagaccagatcgtgcgtactgcataggagacatgggcttttcgattagctcatcgggtggcatctcaaagcttaaactcttacttagttttggagtacttgttggtgagctctgtgggctgtttctcccatgaagaaaaatgacacagaatataccatccagcacagccaggcacaagtaagtgttatttgaagtcttttctgaagcaacgattttccactcatgcttagggctttgtactgtagcatttggagaagagagacatccagttgaactgctacttatctgcttatggccattctcacgtggtggctttttctgcacaaactgaatgtggtcatcatcactgccaaacacctcagcctgtccatctagtaggttcccatcaagcagcttgtgatcagctgagtagtacaaggtttgaacctcttccatcagctcttccagactgtctccattctcccagatgctacgctgcacccagttgattacctttgtatataatttgccattgctgggcaagcaaacattatcttcaagcattacctccaactttagccttggaagcttaagaaactcctcctcttcagaaatttgtaacaaatgctcctgaatataagcatcaaccttattcaacaaacgggagtctcccatacaacttgcaaaattttcggtaagagatgcagctggtaacatccattctagacagtaaataatcaccacaaacctgctttactcgatccatcttcagcttttttgctgcagaataaacatcttttaccaattccttatctgctttcaactgagcagtgtaggcataattcaacaagacttcaacagcttctggatt

SEQ ID NO: 77852 - DNA, 1078 bp, Homo Sapiens
  misc_feature (223)..(235): n is a, c, g, or t
tatccaggtgagctccacctttcatcgtcattgaattattttacaattctttaagttgtagaaaatagatagcaatgtaaatgattttgcccataggaatgcagtgaatacgactgactgttatccagtggatagtgaccagttttgtacctgctatggtttgtctctaccaaaaactcattttgaggcttggtccccaatgtaatggcattgagggattgtnnnnnnnnnnnnnactttaagaggcatttaggtcatgagggatcaactgtcaagaagagattaatgcagtgcttcggaggtgagttctcactatcatgagacagaattagttactgcaagagtggggttattacaaagagagatcaccccttgtgttttctttctcttttgcaagtacctgctcaacactctcacatgtgatcccaccatgttatgacacagcatgtggctcttgtcagatgcaactgcccaatcttgaatttcacagcttccagaactgtaagaaataaattccttttctctacaaattagccagtatgaagtattctgttacagcaacagaaaatagaccaagatagcatttatttataaattcatgtcaggactctcattctagatatatgtgtgccattttgagttctcctttgagccagttgtaacatcttaatagtcccctcatcaagcaatgagttaaataaatttgtaaatactcattcattttatttttgtatgaaagtcatcattttaccttttgggagaaaataatcctttaacaagggtacacttttagggttggttctctgtcaggaagtacagccagagaagaccccaggcagagacacaggaatcttttagtatttatgagcaacatctgcaagtgatcttttgaatatgccaaggggatatgagtgggaaccaacaatgtctgctatggagtcttagcaaaacttctcaagagagcacctcctccaccttcccagacccaaattcatacctgctgtgcacctcctctcaagtgtcacttttcagtaaagctaccttggattacgaaataaaatattatgatttttcagat

SEQ ID NO: 77853 - DNA, 2134 bp, Homo Sapiens
  misc_feature (1401)..(1546): n is a, c, g, or t
  misc_feature (1555)..(1555): n is a, c, g, or t
  misc_feature (1576)..(1589): n is a, c, g, or t
ggggctcgtccgcccgccagtcctctcaacgcgcgcttggccgcccgacgacgcgggagccgcacgcgccggacgaggctcgctgcgctccctgttgcccagcgcgggcccgttgaggcggagccctcagttcccggccaggacacggtctgggccgccgaatctccggccgaagagcggcggcggcagcggcgggaaaaaaatgaagaatgaaattgctgccgttgtcttctttttcacaaggctagttcgaaaacatgataagttgaaaaaagaggcagttgagaggtttgctgagaaattgaccctaatacttcaagaaaaatataaaaatcactggtatccagaaaaaccatcgaaaggacaggcctacagatgtattcgtgtcaataaatttcagagagttgatcctgatgtcctgaaagcctgtgaaaacagctgcatcttgtatagtgacctgggcttgccaaaggagctcactctctgggtggacccatgtgaggtgtgctgtcggtatggagagaaaaacaatgcattcattgttgccagctttgaaaataaagatgagaacaaggatgagatctccaggaaagttaccagggcccttgataaggttacctctgattatcattcaggatcctcttcttcagatgaagaaacaagtaaggaaatggaagtgaaacccagttcggtgactgcagccgcaagtcctgtgtaccagatttcagaacttatatttccacctcttccaatgtggcaccctttgcccagaaaaaagccaggaatgtatcgagggaatggccatcagaatcactatcctcctcctgttccatttggttatccaaatcagggaagaaaaaataaaccatatcgcccaattccagtgacatgggtacctcctcctggaatgcattgtgaccggaatcactggattaatcctcacatgttagcacctcactaacttcgtttttgattgtgttggtgtcatgttgagaaaaaggtagaataaaccttactacacattaaaagttaaaagttcttactaatagtagtgaagttagatgggccaaaccatcaaacttatttttatagaagttattgagaataatctttcttaaaaaatatatgcactttagatattgatatagtttgagaaattttattaaagttagtcaagtgcctaagtttttaatattggacttgagtatttatatattgtgcatcaactctgttggatacgagaacactgtagaagtggacgatttgttctagcacctttgagaatttactttatggagcgtatgtaagttatttatatacaaggaaatctattttatgtcgttgtttaagagaattgtgtgaaatcatgtagttgcaaataaaaaatagtttgaggcatgnnnnnnnnnnnnnnnnnnnnnnnnnnnnnnnnnnnnnnnnnnnnnnnnnnnnnnnnnnnnnnnnnnnnnnnnnnnnnnnnnnnnnnnnnnnnnnnnnnnnnnnnnnnnnnnnnnnnnnnnnnnnnnnnnnnnnnnnnnnnnnnnnncaacccaancatctgcgccgtggacccacnnnnnnnnnnnnnncgcgcggcttcgtccttcccgcgcagaaaccaaatccacaacacaacgctctggggtctctccccccgaaaaaaaatcccgggagggtccaaacggaaggcgccttgtcacccaatcacaaaaattggacttctgcgcccgccctcctccgcgggacctgtcctgacaaacaagaccgaaaccccctctgtgcccccagattttggtaatttccattctccacacacctgcggggcggcggtatcgcggaaacgatgtgtgcctgaataaatacccatccaacgccctggcttcgcccttctgtggggataaaaccacctgtgcacctacgggcacggtaataccttcccgtgccccaccgcactcgtgcgctatacactcaaatacccttggcgcccccttgggcgtaataaattaattctgcccccgccgccgccgataaacaaatccgggattggctcgacggaatctcgggcttacatttcctgtggctggcgcgttctgatacagaaacaaatggtgggccacaacattttgccccccgg

SEQ ID NO: 77854 - DNA, 1020 bp, Homo Sapiens
ggcacgaggggacgccattgaaggggtgctgtgctgcagcagcgaggaggtctcctcaggcattaccgctctggtgttcttggacaaaaggattgtggctgcacggctcaacggttcccttgatttcttctccttggagacccacactgccctcagccccctgcagtttagagggaccccagggcggggcagttcccctgcctctccagtgtacagcagcagcgacacagtggcctgtcacctgacccacacagtgccctgtgcacaccaaaaacccatcacagccctgaaagccgctgctgggcgcttggtgactgggagccaagaccacacactgagagtgttccgtctggaggactcgtgctgcctcttcacccttcagggccactcaggggccatcacgaccgtgtacattgaccagaccatggtgctggccagtggaggacaagatggggccatctgcctgtgggatgtactgactggcagccgggtcagccatgtgtttgctcaccgtggggatgtcacctcccttacctgtaccacctcctgtgtcatcagcagtggcctggatgacctcatcagcatctgggaccgcagcacaggcatcaagttctactccattcagcaggacctgggctgtggtgcaagcttgggtgtcatctcagacaacctgctggtgactggcggccagggctgtgtctccttttgggacctaaactacggggacctgttacagacagtctacctggggaagaacagtgaggcccagcctgcccgccagatcctggtgctggacaacgctgccattgtctgcaactttggcagtgagctcagcctggtgtatgtgccctctgtgctggagaagctggactgagcgcagggcctccttgcccaggcaggaggctggggtgctgtgtgggggccaatgcactgaacctggacttgggggaaagagccgagtatcttccagccgctgcctcctgactgtaataatattaaacttttttaaaaaaccataaa

SEQ ID NO: 77855 - DNA, 949 bp, Homo Sapiens
gcagaagggagcctcccttatcctggagttggtgggataggggaaggaggttggagccagagcctgcaaagcatgggcaggatgtgtggcccctccctggagttacccttgctccttgcccctccagtcagccccacatccttgcaggttaccgtgtgtaccaaatagatggaaactactccgggagctctcacgtggtcctggaccatgagacctacatcctgaatctgacccaggcaaacataccgggagccataccgcactggcagcttctctacagggctcgagaaacctatgggctgcccaacacactgcctaccgcctggcacaacctggtatatcgcatgcggggcgacatgcaacttttccagaccttctggtttctctaccataagggccacccaccctcggagccctgtggcacgccctgccgtctggctactctttgtgcccagctctctgcccgtgctgacagccctgctctgtgccgccacctgatgccagatgggagcctcccagaggcccagagcctgtggccaaggccactgttttgctagggccccagggcccacatttgggaaagttcttgatgtaggaaagggtgaaaaagcccaaatgctgctgtggttcaaccaggcaagatcatccggtgaaagaaccagtccctgggccccaaggatgccggggaaacaggaccttctcctttcctggagctggtttagctggatatgggagggggtttggctgcctgtgcccaggagctagactgccttgaggctgctgtcctttcacagccatggagtagaggcctaagttgacactgccctgggcagacaagacaggagctgtcgccccaggcctgtgctgcccagccaggaaccctgtactgctgctgcgacctgatgctgccagtctgttaaaataaagataagagacttggactccaaaa

SEQ ID NO: 77856 - DNA, 1354 bp, Homo Sapiens
  misc_feature (1297)..(1297): n is a, c, g, or t
aggctaggtacgaggctgggtgtcgaattcggcacgaggcactgtgctgccgccggggttctggcctgccgcccgcatcccggccaggtgccggatactggggcgaatacagcaagtgtgacctgcccctgaggaccctggagagcctgttgagtgggctgggcccagccggcccttttgatatggtgtactggacaggagacatccccgcacatgatgtctggcaccagactcgtcaggaccaactgcgggccctgaccaccgtcacagcacttgtgaggaagttcctggggccagtgccagtgtaccctgctgtgggtaaccatgaaagcacacctgtcaatagcttccctccccccttcattgagggcaaccactcctcccgctggctctatgaagcgatggccaaggcttgggagccctggctgcctgccgaagccctgcgcaccctcagaattggggggttctatgctctttccccataccccggtctccgcctcatctctctcaatatgaatttttgttcccgtgagaacttctggctcttgatcaactccacggatcccgcaggacagctccagtggctgctgggggagcttcaagctgctgaggatcgaggagacaaagtgcatataattggccacattcccccagggcactgtctgaagagctggagctggaattattaccgaattgtagccaggtatgagaacaccctggctgctcagttctttggccacactcatgtggatgaatttgaggtcttctatgatgaagagactctgagccgcccgctggctgtagccttcctggcacccagtgcaactacctacatcggccttaatcctggttaccgtgtgtaccaaatagatggaaactactccgggagctctcacgtggtcctggaccatgagacctacatcctgaatctgacccaggcaaacataccgggagccataccgcactggcagcttctctacagggctcgagaaacctatgggctgcccaacacactgcctaccgcctggcacaacctggtatatcgcatgcggggcgacatgcaacttttccagaccttctggtttctctaccataagggccacccaccctcggagccctgtggcacgccctgccgtctggctactctttgtgcccagctctctgcccgtgctgacagccctgctctgtgccgccacctgatgccagatgggagcctcccagaggcccagagcctgtggccaaggccactgttttgctagggccccagggcccacatttgggaaagttcttgatgtangaaagggtgaaaaagcccaaatgctgctgtggttcaaccaggcaagatcatccggtg

SEQ ID NO: 77857 - DNA, 905 bp, Homo Sapiens
  misc_feature (79)..(113): n is a, c, g, or t
aaacttgatactactatgggcgctccggcttataagcgaacgacgagcgcagcgagtcatgtgagcgaggaagcggcgnnnnnnnnnnnnnnnnnnnnnnnnnnnnnnnnnnncagtcgacggtaccggacatatgcccgggaattcggccattacggccgggggcggcggtcactgcgccggggtagtgggccccagtgttgcgctctctggccgttccttacactttgcttcaggctccagtgcaggggcgtagtgggatatggccaactcgggctgcaaggacgtcacgggtccagatgaggagagtttctctgtactttgcctacggcagcaacctgctgacagagaggatccacctccgaaacccctcggcggcgttcttctgtgtggcccgcctgcaggattttaagcttgactttggcaattcccaaggcaaaacaagtcaaacttggcatggagggatagccaccatttttcagagtcctggcgatgaagtgtggggagtagtatggaaaatgaacaaaagcaatttaaattctctggatgagcaagaaggggttaaaagtggaatgtatgttgtaatagaagttaaagttgcaactcaagaaggaaaagacataacctgtcgaagttatctgatgacaaattacgaaagtgctcccccatccccacagtataaaaaagattatttgcatggggtgcaacacagaaaaactggtttctgccgctggagtatcaagagaagttcacaagcaatagaagccaaatgactatacaggaaaggtctcagcaagaaagtggcagacatcatcaaaagggggaacacacactctttgaactaacagaatattcctagggtatctatgcgctaatcatacattttttacccctgcgacgcgatt

SEQ ID NO: 77858 - DNA, 1173 bp, Homo Sapiens
cttcccgccagtcccctaaccctagaggctgccgcgcggcggtcactgcgccggggtagtgggccccagtgttgcgctctctggccgttccttacactctgcttcaggctccagtgcaggggcgtagtgggatatggccaactcgggctgcaaggacgtcacgggtccagatgaggagagttttctgtactttgcctacggcagcaacctgctgacagagaggatccacctccgaaacccctcggcggcgttcttctgtgtggcccgcctgcaggattttaagcttgactttggcaattcccaaggcaaaacaagtcaaacttggcatggagggatagccaccatttttcagagtcctggcgatgaagtgtggggagtagtatggaaaatgaacaaaagcaatttaaattctctggatgagcaagaaggggttaaaagtggaatgtatgttgtaatagaagttaaagttgcaactcaagaaggaaaagaaataacctgtcgaagttatctgatgacaaattacgaaagtgctcccccatccccacagtataaaaagattatttgcatgggtgcaaaagaaaatggtttgccgctggagtatcaagagaagttaaaagcaatagaaccaaatgactatacaggaaaggtctcagaagaaattgaagacatcatcaaaaagggggaaacacaaactctttagaacataacagaatatatctaagggtattctatgtgctaatataaaatatttttaacacttgagaacagggatctgggggatctccacgtttgatccattttcagcagtgctctgaaggagtatcttacttgggtgattccttgtttttagactataaaaagaaactgggataggagttagacaatttaaaaggggtgtatgagggcctgaaatatgtgacaaatgaatgtgagtaccccttctgtgaacactgaaagctattctcttgaattgatcttaagtgtctccttgctctggtaaaagatagatttgtagctcacttgatgatggtgctggtgaattgctctgctctgtctgagatttttaaaaatcagcttaatgagagtaatctgcagacaattgataataacattttgaaaattggaaagatggtatactgtttttagaggaataaacgtatttgtggtttaaaa

SEQ ID NO: 77859 - DNA, 776 bp, Homo Sapiens
  misc_feature (21)..(21): n is a, c, g, or t
  misc_feature (49)..(49): n is a, c, g, or t
  misc_feature (117)..(222): n is a, c, g, or t
  misc_feature (258)..(458): n is a, c, g, or t
  misc_feature (481)..(571): n is a, c, g, or t
ggcacaaaaaatgtttaagtntgataaagcctcaattacctattttctntggttgcttgtgatttggtgtatatctaagaaaagatcatctaatccaaggtcaggaagatgtatacnnnnnnnnnnnnnnnnnnnnnnnnnnnnnnnnnnnnnnnnnnnnnnnnnnnnnnnnnnnnnnnnnnnnnnnnnnnnnnnnnnnnnnnnnnnnnnnnnnnnnnnnnnattcttttgcctgtagatgtctacttgtcccattannnnnnnnnnnnnnnnnnnnnnnnnnnnnnnnnnnnnnnnnnnnnnnnnnnnnnnnnnnnnnnnnnnnnnnnnnnnnnnnnnnnnnnnnnnnnnnnnnnnnnnnnnnnnnnnnnnnnnnnnnnnnnnnnnnnnnnnnnnnnnnnnnnnnnnnnnnnnnnnnnnnnnnnnnnnnnnnnnnnnnnnnnnnnnnnnnnnnnnnnaactattctggtgctctcaaatnnnnnnnnnnnnnnnnnnnnnnnnnnnnnnnnnnnnnnnnnnnnnnnnnnnnnnnnnnnnnnnnnnnnnnnnnnnnnnnnnnnnnnnnnnnggcaagtactgctatctaaacaatattaagtcctcctatccatgaacataggatgtcttcccatttataagatatgtctttaaaataaattgcttcatattgtacattttttaaaagtttgttggactttaattgtaaatgtaatacaggcttattgtaataaagccaaataaaagaaatgtgaataaagaaaatgttaatcttt

SEQ ID NO: 77860 - DNA, 519 bp, Homo Sapiens
ttatactgttgtcaggtacagtagagagaacatggagcctgctgagatcttctctgttattcctgatcctaagtcatgtatatcgaaggctttgatttagagtaatgcatgaggccagtgtagcggggtcgaggcctgcccatgagtcaggggagctcagtctccctggcctaggcagttgtcctgaccttgagaagacatagatgaagcattttatcatcattagacttaaattttaattcttcagaatgtcagaagttgataggttgttaaatacatttatataatacattaaatatgtgaaattaatacaccttcctacattttgaaggtgatgcatagatcccatagtgtgcatcatgttccttatatgaaaacgtttaaattactgggtcttttccattaaactacttttgtatggcttagataaatcttccattagtgttcatttttatagaattatgctgttaaaactactttaggtgaacaaataaacttgtctattatatattaaaaaaa

SEQ ID NO: 77861 - DNA, 887 bp, Homo Sapiens
cactccactgcttttctccctcttgaggggtcatgactgggagttctgtgtcatttgatttgttgtgtgagagagttttccactgcccgtgggagagtctacactttcataccccgcactgagttgatttacgtaaccactacctcctctgccagttctctcctctgagctgttggaggacttattaccattccctggagaagaaggaaagtcatcttcggttgtgttgccctccctgtgaaatccagacccagacgtcctctggcgggaggagctaccattacttggtccgtttgtcagacgactgcagtctttacttgtggcctctgactgttctacaggttcagaagctgtagtcctgctggtacttggggcagaggcctgagactgctgctgctggtactgagccaactgctggcgtgtctccttcagctgctgctgcagaactagaatggtactctgcataccctctacttcttcatcaagctggatgatgaagtcattcagttcatcctgactgcttttaaactcctcactgtatttcttctgtaaagccaactctgcttcaagttgtgcaatacgtccctgggacagctgccttccaagctcttgattctcctggataagcattcgacacttcgccattaactttttccctgtttggctgcaaaggaaagagccatccatcacaaaatgaagacaaaactctctgtctttgcttacaattattacagtgatagatgtaacacatacaaacataactatatcacagcagatgcttccccataattaccatcttcttttctgggacacatccatcttctgcatttcagtattttgccaacacagcagtaaaaataaaccctaaacaaaaagtgcccaaacag

SEQ ID NO: 77862 - DNA, 663 bp, Homo Sapiens
agccttcctgcggcgccagccacagccctggtgcctggtggcacacaatggtgaccgctacgacttccccctgctccaagcagagctggctatgctgggcctcaccagtgctctggatggtgccttctgtgtggatagcatcactgcgctgaaggccctggagcgagcaagcagcccctcagaacacggcccaaggaagagctatagcctaggcagcatctacactcgcctgtatgggcagtcccctccagactcgcacacggctgagggtgatgtcctggccctgctcagcatctgtcagtggagaccacaggccctgctgcggtgggtggatgctcacgccaggcctttcggcaccatcaggcccatgtatggggtcacagcctctgctaggaccaagccaagaccatctgctgtcacaaccactgcacacctggccacaaccaggaacactagtcccagccttggagagagcaggggtaccaaggatcttcctccagtgaaggaccctggagccctatccagggaggggctgctggccccactgggtctgctggccatcctgaccttggcagtagccacactgtatggactatccctggccacacctggggagtaggccaagaaggaaaatctgacgaataaagacccccgctgccccat

SEQ ID NO: 77863 - DNA, 1135 bp, Homo Sapiens
cccaccgactggtcagacgatgagtctaacaaccccttctcctccacggatgccaatggggactcgaatccattcgacgacgacgccacctcggggacggaagtgcgagtccgggccctgtatgactatgaggggcaggagcatgatgagctgagcttcaaggctggggatgagctgaccaagatggaggacgaggatgagcagggctggtgcaagggacgcttggacaacgggcaagttggcctatacccggcaaattatgtggaggcgatccagtgatgagtcggggacaggccagcggggggacggaggcggcgggcccaggagcctcagccagccacgtgggcatccactccttttcctgcaagagatgatggttccattgctcttggcttcatggtgttcctggaaggcagatgagctggtcatttcgcctgggactcggcacctttccgagtgcagctggagggatctgagcgcaggaagacgcagaacaacagaaatagccgcccctccccgcccactgtgcctgttggcctatcatagatctctatgttcttgactttgtctctcctttccgagtcaatggtgggttacactgatcttgttccactgattactctctctgacgagtccatcacctgcaacttaaatgaacaagcttacatcccattttgagtgaagattttgaggtttttaatttaaaggctgtgtacagttatacttttttatacacctgttcatttctacttaaattatggcacagattgatgcgcaccagtcttgaggaaacgatctccctattcccttaccctgttactcagccacgccgtgtgtaggcttagcctcaggtggcagatgtttgaggaaaggaattatgccaggaaggtgggaccgggttatggtcgggtttctattgggaatgctctttgtgcttttgggcatctgaatggaagctttacatagaaccttaggtagaactcccccaaatcgccatatttacacacttattttcactctattcttgcttaaaactgtactctttgcaaattaaccattttatcctgattcagagttaaaaagaagactaacttttcacgcaaatgcctctgtcaagatgctttagattagacgg

SEQ ID NO: 77864 - DNA, 1052 bp, Homo Sapiens
cacacgactgcaaggactcaaagacgcagcatgtgcagcatgtggcatgatgcctagagtctagggaatggtgaccttgggcatcctgggtcagccagctgctaaggcccccttgcatcccagacttgggtgtagctgaagactggggtgcccgtggctggtgaggttgtgtgagaagtctctagcaggactgaattttgtccttaaagaggccaagctgtgtctgggaaaatcacatcttggctgaataccaaaggatccactcatactgatcctaagccccgtgccaacttccccccaaatagaggagaaggtcaccgagatcccatggggcaggaggaggcgaagggattggataggaatgatcagccatgcagggtggaggtagagcagggctccaagccgggctacaggcttccagacaggctctttctcctcaacatgctgcctctcccgctggccaaatgccagggccccagagttggcaacaggcaagcccagagggatcttcaccttgtcacgtaccaggtgtgtgaccttgagcagctccctgacttctctgagcctctgttcactatctgggcatcatctcttgagtcttgagatggaatggtgtgtgtgggaacaggcgacaaattgtaaagaggccgattgatgtggagtccctgctattgccattgtcagcctgccaggttgcagaccttccaggtccaggctggctgcccacgccccaccagcctaggggtcaaacctgtcttccaagggctctcacttctgccttcctcagccttgctgagaattggggcagagaccagctgggcagcaccccctggtggtatcacactattgggactgcacacaacactgcggtctccccatgaggaacttttgcccattgtggtggccctgtaatgacagtaatgtggatttcatgaattcatagactttccaggataaaaagtctcccaaggctccatttggccctactcacacctttggatggtacaatgcagacgacaccctatgcccttcattaaaaacatcgcccactg

SEQ ID NO: 77865 - DNA, 1031 bp, Homo Sapiens
  misc_feature (69)..(69): n is a, c, g, or t
  misc_feature (91)..(91): n is a, c, g, or t
  misc_feature (207)..(207): n is a, c, g, or t
  misc_feature (209)..(209): n is a, c, g, or t
aaggtggcaagccaatgatattcttttcgttcgtctgaccacatatcagcggagagagttctgcgaagntggaagctcgctcatcatgatntagcagtgcatggagtgaccagcactggcatagagccaggcaccaccagagcagcagcagcaccactacacagagtttcagaccagagaagacgtccaagggccccagggcagcangncctggtggagcagccagagctgtcttgctcagcagccagtttcagagaccagcactcagcctcattcagcatgggtccttgatgccagagggccagcaggctcctggctgtgcccagcaggcccagcatgcaggtggtgggacactgggcagcaaggctgctgccggaatcacttctccaatcagtgtttggtgtattatcattttgtgaatttgggtaggggggagggtagggataatttatttttaaataaggttggagatgtcaagttgggttcacttgccatgcaggaagaggcccactagagggcccatcaggcagtgttacctgttagctccctgtggggcaggagtgccaggaccagcctgtaccttgctgtggggctacaggatggtgggcaggatctcaagccagccccctccagctcatgacactgtttggcctttcttggggagaaggcggggtattcccactcaccagccctagctgtcccatggggaaaccctggagccatcccttcggagccaacaagaccgccccagggctatagcagaaagaactttaaagctcaggagggtgacgcccagctccgcctgctgggaagagctcccctccacagctgcagctgatgcataggactaccgcaggcccggactcaccaacttgccacatgttctaggtttcagcaacaagactgccaggtggttgggttctgcctttagcctggaccaaagggaagtgaggcccaaggagcttacccaagctgtggcagccgtcccaggccacccccatggaagcaataaagctcttccaagaaaaaaa

SEQ ID NO: 77866 - DNA, 850 bp, Homo Sapiens
gagcatccaggccacttacagactccaagaagagtcctgtcagccacggctctgacttgttggccctcccggcatttatttagcacacatttaatgacagaagtctcaggctggaaacactctttttgtagaacatacaaatggacatttctaagcacattgatgcctataatgaaaaatcaaatatcccacaatgaaaactagagggaagctatctgtgataatgctttgtggtgtatggattcatctcactgactgaaacctgagttttgattcaccaggttggaaactctttctgcagaatctgcaaagaaatatttctgagcccattgaggcctacagtggaaaactgaatattctgtgataaaactagaaacaccctatctgtgaaaatgctttgtgatgtgtggatttttctcatcaaatggaacctctgttttgactcacaagggtgaaacactattttagtagaatctaggaagaaacatatctgagcccatttatgcctacagtgagaaactgaataccctgcaataaaaagtagacagaagctatttgtaaaaatgctttgtgatgtgtggattcagtgttaaacttttattttgattccacagttttgacaccctatttgtagaatatatgaatgaacatttctcagcccattgaggcctatcatgtgaaaccaaatattttataataaaaactggaaacaagtgatctgttaaaatgttttttagtgtgtgaatttgtttcacaaagataaatctttgcatggattcaacagtttggaaacattattgtagaacctatgaagggatgtttttagcctattaaggactatatatataaa

SEQ ID NO: 77867 - DNA, 566 bp, Homo Sapiens
acttcaaaaacggtttaataacaatcacgcccagagctcaagtgcacacaatgcatcacttaatttcatcacaaacctctgccggcttaaaaacagatatcgaaacgggggaatacatatttgacaatgttgttaaggcaagtttgctaacgctttttgaacaacctccaactgaggcctaaatgccggcaatatccataaacaactctagaatgcccaattagggagacagagacatagcgtcctgtcagggagatttgcatggctaagagtctgagatcacagagcgatgagcgatctctcagagtgatggggggttcgcagacagatgactatcattacgatattacggggactcacaccttcccaattactggcaggattcattaattaccaccgcatttccctaatagaatccgtgcactggcttatcagcaccttccctctgtctacctaagcccccgctcagcagtcgatcacctatgaaaaattagacagtgcagcttccagtggcctatttaaagggaaaaagaaaaatgaatatgggaagaggagggggaaagtgc

SEQ ID NO: 77868 - DNA, 2201 bp, Homo Sapiens
ccaaaggccagttcttgtgattgtaacggagatataccaaaaactttgtttttttaaagaggatccacctggttcatgaaccctccctcactgctctctgcacatcacggccacacagcacctgcagggaggctgtggggaggtgtggagcaggtgcaacaggcagctactctcctgggggccacacggcggagagaggattcgatgcagcatgacgatcccttcctcccaggcatgacctcttctcagaacacgggaactgacaacactgcgagtggcaactcagcaggtgggcagagaagcagaaaggggccctcagcaccactaggccagctctcagaatcagaagagcagcctccagggagggagcagggctacagggacagcctacgggcagtggagcttctggtttggcacatgggaaaggctggggcgcatgcgctgaaacatgacaccatcagggaagccagaaaggacaacatggacaaggccatcgatctgaacccccagccaaaatgggtgctctcggcttgctcaaaaagtgctgccagcaccgataggttggcaaattaaaagcaaacaaatagaggtcacggccacacataggcagtaactgcactcacaaggtggctcagcccaagaggtctgaatctgaatatgccgcactgtcctgccccgggggagaaggggaaggctggccctgggaactagagatgatggcattcctttcattccttcctgaggcgggcctggagggctgtgccctggtgactcctgtctcctaaaggagggcaggccggctgaaggatccaggcattgatgtctagttctgaggacacccaggacccgcaactacaagggccatgctaaaacgtggcctggaggggatgggggcaggcgggcacaaaaacttctgctcagctcactccagctccccacgtgctcatctgttccccagatctggggctgcctagtgagccgttaaacgcctgggttccgcccagggctgccttccaccgggacgccgggcctgctgtggctggaccctgccgctgtggtggtcttctcaccaaggagcctggtctggctgcctggaataacctgcaggtcggtgttctcaggggactgtggcaggttctgggctcgggtagccaggagtgcattgaggtactgcagtcgcgtaaccttgatgagctgcagatcagagagcgccctcacggtgtagtcgggacaatacgcagatgaatgcgtgccgtcacctgggtcgggctgcaggtcatggcggaatgggcctggaagcgaggacaccggggactggtgaaccgaggatggcacagttagggccgacactccatagtacgtgaaggccccattctcaaacttcagaccctctttcccgatctccacttcaaccctgccctgcaggatgagaatgaagtaatccaccggctggctgcgctggtacaggtagtggtgtgtggccagccggttgctctcgtcaaacctcacttcctggttgacactgggatgcttcaacagtgcagcaggaccttctcagagatgcgcagcgggctgaatacatccacttctcgggacaggaagcgctgggtggccaagagcagctgaggcgagattgttactttatattcatcatcagacaccttgaacaaggagaactcctccttccgcttcagaggggccatcagagaagcaggcttcctcttcaccacggtgtctcggtagtcttcagactcgtccaggatctcggacctgatgatctcctcgatcacgtcctccagggtgaccaggcccaggacctcgtagaaggggtcgccttcaccctcgttgttcaccttctgcacgatggccaggtgggacttccctcgcttgaattcctccaggacagcgtccagcttggtgtcgttgaagacgaagtggagcggatggttgtagaaacgagtgatggtgctgagcggcgtgcagtcttcgggatccacgaaggccaagtccttgaggtagagcatgtccacgatgttggagcgctcctcctcgtacaccgggatgcgcgtgtggccgctctgcatgatgctggccaggacgccgaagtccagcacggtgctggcgtccagcatgaagcagtcttcgaggggcgtgagcacgcctcgtgccgaattcggcgcgccgtcgacttcatactctct

SEQ ID NO: 77869 - DNA, 1167 bp, Homo Sapiens
  misc_feature (1050)..(1084): n is a, c, g, or t
  misc_feature (1087)..(1127): n is a, c, g, or t
gcacgaggttaaggagcatactgtgcccatttattatagaatgcagttaaaaaaaatattttgaggttagcctctccagtttaaaagcacttaacaagaaacacttggacagcgatgcaatggtctctcccaaaccggctccctcttaccaagtaccgtaaacagggtttgagaacgttcaatcaatttcttgatatgaacaatcaaagcatttaatgcaaacatatttgcttctcaaagaataaaaccatcttccaaatttccaaagcatgcattgttacttggcattaagtatttcaaaatgacaaacattgttacggtattgtaaggccaaaatataatacctatttaccagacatacacattacaactagaaaaaaattacaaatgttaacctagtataacaattccatcaggaatgaatggggaaaggcactgcatccctctcatatcgccacagatctactatccacttgacatgctttgaattcaagtcctgttagacatgggaacagcttttcctacaacatatgattcacaggtaggttaatacatcttagtctcccactgccatacttttcacccaagtgtacaacaggtatgaatatatgctatcagctttatttacaagtgtatcttgatgtcttcgtggggtaaaagaaccaactatctcaaccaacagtttccaaaaaagtttttggctatgattcatgtatagaaaccaccacataaaagaaacaacagaaactgaggtccgatcccaaacacctaaactaaaatttctcacccactaaaagttggcagtgaaactgctattctctgaattgtataagctaaattctacagaggaatttcagatcaacttcttttgcaaaagcacaagttacacgttgcacggttggggatgctgagtgaatgcattccaggaagagttccgcaagcaagtgctgttgcaaagagtcgagaatccgagaatctgggaaaggtgatacgttttcccccggccgtaatggccgaattcccgggcatatgtccggtaccgtcgactgnnnnnnnnnnnnnnnnnnnnnnnnnnnnnnnnnnncgnnnnnnnnnnnnnnnnnnnnnnnnnnnnnnnnnnnnnnnnnctaacgaccgacctagcgccctatagtgagtctatcatct

SEQ ID NO: 77870 - DNA, 1085 bp, Homo Sapiens
  misc_feature (776)..(776): n is a, c, g, or t
  misc_feature (796)..(796): n is a, c, g, or t
  misc_feature (833)..(833): n is a, c, g, or t
  misc_feature (899)..(899): n is a, c, g, or t
  misc_feature (914)..(914): n is a, c, g, or t
gcacgagggccacttcaggagctgagaggagcaggatggaactgcaggatccaaagatgaatggagccctcccttcggatgctgtgggctacaggcaagaacgtgagggcttcctgcccagtcgtggtcctgctcctgggagcaagccggtccagttcatggatttcgaggggaagacatcgtttggaatgtcagtgttcaacctcagcaacgccatcatgggcagcggcatcctggggctggcctatgccatggcccacacgggggtcatcttcttcctggccctgctgctgtgcattgcgcttctgtcgtcctactccatccacctcctgctgacctgtgctggtattgcaggcatccgagcctatgagcagctgggacagagggcattcgggcctgcggggaaggtagtggtggccacagtcatctgtctgcacaatgttggggccatgtccagttacctgttcatcatcaaatctgagctccccctggttatcggcaccttcctgtacatggaccccgagggggactggttcttgaagggaaacctcctcatcatcatcgtcagtgtgttaatcatcctgcccctcgccctcatgaaacacttgggctacctggggtacaccagtggtctctctctgacctgcatgctgtttttcctagtttcggtcatctacaagaagttccaacttggctgtgctataggccacaatgaaacagcaatggagagtgaagctctcgtgggactccccagccaagggactcacagcagctgntgagcccagatgttcacagntgactcacagatgtcctacacagtgccccattatggncttttgcttttgtctgcccaccctgaggtgctgcccatctatacggagctctgccggcccttcaancgccaggatgcaggnccgtggcaaacgtggcccattggggcatggtttcttgcatgtatggggctcccagccaaccttttggaaacttcaccttttataaaaaaatgttgaaaggcgggaaaattcctccccacttgtacaaccccgaagggaccccccttcattccttcttgggtgggccccgga

SEQ ID NO: 77871 - DNA, 521 bp, Homo Sapiens
acccccccgactagcccgacaggatctcagtccaggctgcctgctgagatcctgtctttagctcacatacattccacggtgggggacaccattagtccagacaccgctgtggagattagcattttagtttgtgtgcgcccgcctggcttgaggcagtagtttaggaatgacaaggctagaaacctggctggctgtgagtcagagagagagaggatggacgtgggagaaagcaagcaaaagctaccctagggaagagccggtgacgtgcacaggccgagcagcacggctggtgagctgcaggctgcggccttgcccggacacttggtaatgccaaacaagtacgtgtggctactcattggtctatgaggacgatgacaggcttcgactctgtggtttctaaagcatataatattctcacgtacttctttcagcaaacgccaaacagtagtaattcttgtaactaccttgaaccctttgtggaaagaacctgggtgtgagtgaataaaaagtaaagagcgaaa

SEQ ID NO: 77872 - DNA, 916 bp, Homo Sapiens
  misc_feature (256)..(298): n is a, c, g, or t
accaagtggaaaggcaagttgtcttatagaaagcactactgcacttagtagctatgtgattttgagcaaaccacataatctctctaggtccattttcctaaccacaagataaagatgttacattgtcaaagcttgccgtaggatttggggtgaatgaaaattattccttgctttcatcactacctttatagctctcatcactacctttatagctcatcactgtgcctttttttctttcctaagaaagacatcacannnnnnnnnnnnnnnnnnnnnnnnnnnnnnnnnnnnnnnnnnntagcaaggtccaggcaaagctggagatgaggctgagatccagagtttcctagaacgcaacttaggatggctaggaaagggaagcctgactgctcggtcaggagggtgcagtatctcttgctgggaacacagccagtttccacaatgcctagactgtgtatgtctatttgcacaagattgtcttttcctattttggagtggtcagacattttatttttgttcaagattatctggcgttttagacaaatttgcaaaactgtgcttttattgactttttgaataaactttggtattctggagcaaatgtatttatttattggtatgtgcaatgacaaacttggtattttcccatgttgacattatgtatgttgtagaatttagtgtttgtctaagtacacacatatatcaacaaattaaacttgaatcgtttcaacacttctgtgtactttttttcataaaggggaaaaaagccctgtttacttcctaatttttttctatacctttcattcattgtttcctaggagcctcaggtgggtaagtaggtgataatagcaaagagatcataacctcaccaatgacatgtgggtcaacactgtccttcctctggcctgtgcctttc

SEQ ID NO: 77873 - DNA, 1022 bp, Homo Sapiens
cggatccaacggagccaactgggccaacgtacccatgatgccgtgcccctatggacatgaatgtgaagagagaactttccttgtctcaccatcatttgagagagggcagttcatcattgaacttgacaacggattattttcacccaattcctaccctgagatgaggtgctctcgtactggtgtctgtggctgtaatactggtcgggtatgtcctgtaaagatttgacaaatgaaatgtgtgttctctgtaaaacatgtcagagtaatagaagtggtatctctgtaggtgcaggtccatttctgcccaccaggtagggtgtttttctttgaataagagattgacacttctgttgcctaggacctcccaactcaaccatttctaggtgaaggcagaaaaatccacattagttactcatcttcagacatttcagctgagataacaaatcttctggaattttttcacccatagaaagagtggtagatatttgaatttagcaggtggagtttcatagtaaaaacagcttttgactcagctttgatttatcctcatttgatttggccagaaagtaggtaatatgcattgattgccttctgattccaattcagtatagcaaggtgctaggttttttcctttccccacctgtctcttagcctggggaattaaatgagaagccttagaatgggtggcccttgtgacctgaaacacttcccacataagctacttaacaagattgtcatggagctgcagattccattgcccaccaaagactagaacacacacatatccatacaccaaaggaaagacaattctgaaatgctgtttctctggtggttccctctctggctgctgcctcacagtatgggaacctgtactctgcagaggtgacaggccagatttgcattatctcacaaccttagctcttggtgctaactgtcctacagtgaagtgcctggggggttgtcctatcccataagccacttggatgctgacagcagccaccatcagaatgacccacgcaaaa

SEQ ID NO: 77874 - DNA, 803 bp, Homo Sapiens
  misc_feature (77)..(91): n is a, c, g, or t
  misc_feature (687)..(687): n is a, c, g, or t
  misc_feature (765)..(765): n is a, c, g, or t
  misc_feature (786)..(786): n is a, c, g, or t
ctttatacaaggttttacttttacaaaagtatcccttttaaataagatgcatctgatgtacaaagtatcaaacgtgnnnnnnnnnnnnnnnctcagcttgaaaagaggctggaaatgggatgcaggttaggttcaaagcttaaactttgtaacaactggacacaaggttcctcagaattgtcaaaagtctcttgtgacacatcctacaaccttttctcaataaacaacaatatatgaaataattaccaaaacatctcctaattcatataatttacatgatataagcttgcttgatagcagctggtgttcagtcgtgaaaaaacacacaaagtaaaatggttgctgactacaatgtacagctattgctgggtgtgatggaatgtacaaacggaggtcgatgtagacgagttttttccaccagagatattgcctttccatgcagcacttgtgctctcagctttaacttggcttttggttcttcctttatcttcagtatctgttctgatgctcataatgccaccgattaaaatctatattaaaagctacaatgctaccagaagccatgccagtgatcagagacctctggtcatgggacaagtccattgctctaatgccagcatcacatccagggtaaatgtacagttgcttgaagtcacaggcctgccagacctctactaccccattgtnccctccggtgaccaggttctggccgtcactgctcaggagaatggcccgtgttgaatcattgatctccatttgagccanaagtttcccattaatgctganattactgaatcgccctc

SEQ ID NO: 77875 - DNA, 413 bp, Homo Sapiens
ggcaatatctctggtgaaaaaaactcgtctacatcgacctccgtttgtacattccatcacacccagcaatagctgtacattgtagtcagcaaccattttactttgtgtgttttttcacgactgaacaccagctgctatcaagcaagcttatatcatgtaaattatatgaattaggagatgttttggtttccgaagtcatcatcatctgatgtagagcctacagcatctaaaaacatgaaatcgagtcctaatgaggttctgcaatttgctgaaacctgagctcctctgccgagccatctggcagggatctggggcaacagcgaccatggggaaacggccctcattgtctattctgcataatccactttggggattgtctttattttatttaaaaggaactaagtagtgaaaaa

SEQ ID NO: 77876 - DNA, 1158 bp, Homo Sapiens
  misc_feature (103)..(140): n is a, c, g, or t
ttattctggtaccatcacaacttttcacaacgatggcaagccttatgtcttgggagcctgttttgctaggcaaagttacaagtgacctaatgggagctcaaannnnnnnnnnnnnnnnnnnnnnnnnnnnnnnnnnnnnncactcaagacctctaacagcctcgaagcctggggtggcatcccggccttgccattagcatgcctcatgcatcatcagatgacaaggacaaccctcatgacgaagcaacatgaattagggggcctcttggccttggtccaaaattgtcaatcagaaatgaacataaaggactccagagcagtgggactgtctgtcaaaagactctgtatatcttttgtggatgagttttgtgagagaacagagagaccattgtacctggcacaagggctcttcatgaaaagggagacttactgggaggtgcaagacagtggcatttctcctctcctcttgctgctcagcacagccctggattgcagccccgaggctgagaccagacaaagcccgggaggcagaaagatgctccaagaaccaacactatcaatgtctttgcaaatcctcacaggattcctgtgggtccagctttggaactgggaaacctttcttcggatccgcactcattccactgatgccagctgcccctgaaggatgccagtactgtggtgtgtgagtctcagcagccgcccacacgctcctaactctgctgcatggcagatgcctaggtggaaatagcaaaaacaaggcccaggctggggccagggccagaggggaaggccctggattctcactcatgtgagatcttgaatctctttctttgttctgtttgtttagttagtatcatctggtaaaatagttaaaaaacaacaaaaaactctgtatctgtttctagcatgtgctgcattgactctattaatcacatttcaaattcaccctacattcctctcctcttcactagcctctctgaaggtgtcctggccagccctggagaagcactggtgtctgcagcacccctcagttcctgtgcctcagcccacaggccactgtgataatggtctgtttagcacttctgtatttattgtaagaatgattataatgaagatacacactgtaactacaagaaattataaatgtttttcacatca

SEQ ID NO: 77877 - DNA, 3242 bp, Homo Sapiens
  misc_feature (2144)..(2154): n is a, c, g, or t
  misc_feature (2508)..(2600): n is a, c, g, or t
  misc_feature (2771)..(2780): n is a, c, g, or t
  misc_feature (2946)..(2958): n is a, c, g, or t
ggcagagtgatggggaggagagccctgctgctgaagagcagctcttgggagagcacattaaagaggaaaaagaagaatctgaatttctaccctcatctggaggaacatttaatatctctgtcagtggggacattgatggtttaattactcaggctttgctgacgggcaattttgagagtgctgttgacctttgtttacatgataaccgcatggccgatgccattatattggccatagcaggtggacaagaactcttggctcgaacccagaaaaaatacttcgcaaaatcccaaagcaaaattaccaggctcatcactgcagtggtgatgaagaactggaaagagattgttgagtcttgtgatcttaaaaattggagagaggctttagctgcagtattgacttatgcaaagccggatgaattttcagccctttgtgatcttttgggaaccaggcttgaaaatgaaggagatagcctcctgcagactcaagcatgtctctgctatatttgtgcagggaatgtagagaaattagttgcatgttggactaaagctcaagatggaagccaccctttgtcacttcaggatctgattgagaaagttgtcatcctgcgaaaagctgtgcaactcactcaagccatggacactagtactgtaggagttctcttggctgcgaagatgagtcagtatgccaatttgttggcagctcagggcagtattgctgcagccttggcttttcttcctgacaacaccaaccagccaaatatcatgcagcttcgtgacagactttgtagagcacaaggagagcctgtagcaggacatgaatcacctaaaattccgtacgagaaacagcagctccccaagggcaggcctggaccagttgctggccaccaccagatgccaagagttcaaactcaacaatattatccccatggagaaaatcctccacctccgggtttcataatgcatggaaatgttaatccaaatgctgctggtcagcttcccacatctccaggtcatatgcacacccaggtaccaccttatccacagccacagccttatcaaccagcccagccgtatcccttcggaacaggggggtcagcaatgtatcgacctcagcagcctgttgctcctcctacttcaaacgcttaccctaacacccccttacatatcttctgcttcttcctatactgggcagtctcagctgtacgcagcacagcaccaggcctcttcacctacctccagccctgctacttctttccctcctcccccttcctctggagcatccttccagcatggcggaccaggagctccaccatcatcttcagcttatgcactgcctcctggaacaacaggtacactgcctgctgccagtgagctgcctgcgtcccaaagaacaggtcctcagaatggttggaatgaccctccagctttgaacagagtacccaaaaagaagaagatgcctgaaaacttcatgcctcctgttcccatcacatcaccaatcatgaacccgttgggtgacccccagtcacaaatgctgcagcaacagccttcagctccagtaccactgtcaagccagtcttcattcccacagccacatcttccaggtggccagcccttccatggcgtacagcaacctcttggtcaaacaggcatgccaccatctttttcaaagcccaatattgaaggtgccccaggggctcctattggaaataccttccagcatgtgcagtctttgccaacaaaaaaaattaccaagaaacctattccagatgagcacctcattctaaagaccacatttgaggatcttattcagcgctgcctttcttcagcaacagaccctcaaaccaagaggaagctagatgatgccagcaaacgtttggagtttctgtatgataaacttagggaacagacactttcaccaacaatcaccagtggtttacacaacattgcaaggagcattgaaactcgaaactactcagaaggattgaccatgcatacccacatagttagcaccagcaacttcagtgagacctctgctttcatgccagttctcaaagttgttctcacccaggccaataagctgggtgtctaaaaggacagcttctcttccactcaatattgccatttttccaaagaaacatgttnnnnnnnnnnnttataagacatggactagtcctcattagcatgtttgcatagcaaccagtcaagagcatttacactatttctgctgatatactcaccttagaactgctcagaacctggtgctttatttttgttttaatcttttgttgccagtgatgattttcctatcctgcaaatagtgtatttcctggattacacatagtatggtttcctgaagtattctgataaatgtgttttttaaaacctcaatatactttttagaaaaggagcatctggttatgcataaagcagagctaaaactaaatttctttcatgtcctccctacttcctcagtgtcaatcagattaaagtgtgtaatcctaaaaannnnnnnnnnnnnnnnnnnnnnnnnnnnnnnnnnnnnnnnnnnnnnnnnnnnnnnnnnnnnnnnnnnnnnnnnnnnnnnnnnnnnnnnnnnnnaaccctgggcggcccccctcgggcctcttaaaaaaatttttcaaaaacctttccttttgggggccccggcccccccaaggggtaaaggggcccttgggccccaatcgtttctcccaagaaaaaaacctcgggctattggaacaacggcggttgggacttccccccccaatnnnnnnnnnnccgccccggggcgggtacacccagggcctgtttcttgataacaaaatccccccaaaaaggggggcctctcttcaggggcctccctttcccggggaagtcccccctcacacgcgggggggtgtttccctgcgggggcggcccttcctattattttaccatcattttnnnnnnnnnnnnntccctcggtgggtcccctatacccttcaccaaaaaaagtggcgtggggggaattcccttatttcgcaccactatatcttctcgcccccccctgttgtgggggaaaaacctttccccttcaaccaccaggcggtgtgtactgtataaagcacaccacatccatatcttcctctgcccccgccgtgcgtataataactacaaacacactggatcctcagggtagcttcatgcgtaaacgaataaataatattttccaccccccctgtgtcggctatgacacaaaca

SEQ ID NO: 77878 - DNA, 878 bp, Homo Sapiens
agagacaggatcttgctatgttgcccaggctagagagcagtggcttttcacagacaaagtcataatgccctgcagtcttgggctcaagcgattctctcttccttggcctctggagtagactaaatgtgttagtctttgaatggaaaacaactattttctcatcattgggtcaatattgactgatcagtagtaggtcttttaccattctggacataagtctaggtgtagaaatcctttcctttatcatagaggatatggtttacattaccgtttgttttcattgtgagtgcccctatgtaacaatcatgaatattagattttttaaattgtagaatatcctaatatttatagccagcagctgttactttgtttgtaaaatttgcaaaaaaacaaaacctgaagttggtttattgaaagaattataaggatagcttctagggatattagtaatagattgccatgatcctgaagcctcttctcagaacactgtgaagataatactgacagagtagaatcagtgaaaacagcctaacaaaacctctgacatcagtatatcaacttttaacagcccactcactggcttttctaaactaccaaaaaccacctgtaggatactgcattaagtcagcatctcagaaacagtggtgtgagtaactgagtcaaattgtcaagtactttggatatacatagtgtcgagctttagattggtatgaaattaaacagcaatgcaaatagatttaattcctatttactttaagaatgaaaaacaatgttcattttcctacctaaacagggtggttcaacataaaggctgatgttgtgtccgttttgtattttatcttttgttaaagatacataaatgacaatacttaactgtg

SEQ ID NO: 77879 - DNA, 1579 bp, Homo Sapiens
ccacgagggtccgacatgtagcttaaatgtctgcgttgtatctgtccctgcatggacagatacaaaagatatctccgttgtatctgtccctgcatgtaccacaaatgtctgcttcttcatgtaggtgtgcgatgactgtgtggtgttgcgtagtaacatcggaacagtgtatgagcgctggtggtacgagaagctcatcaacatgacctactgtcccaagacgaaggtgttgtgcttgtggcgtagaaatggctctgagacccagctcaacaagttctatactaaaaagtgtcgggagctgtactactgtgtgaaggacagcatggagcgcgctgcgcccgacagcaaagcatcaaacccggacctgaattgggtggcgagttccctgtgcaggacctgaagactggtgagggtggcctgctgcaggtgaccctggaagggatcaacctcaaattcatgcacaatcaggttttcatagagctgaatcacattaaaaagtgcaatacagttcgaggcgtctttgtcctggaggaatttgttcctgaaattaacagaagtggtgagccacaagtacaagacaccaatggcccacgaaatctgctactccgtattatgtctcttctcgtacgtggctgcagttcatagcagtgaggaagatctcagaaccccgccccggcctgtccctagctgatggagaggggctacgcagctgccccagcccagggcacgcccctggccccttgctgttcccaagtgcacgatgctgctgtgactgaggagtggatgatgctcgtgtgtcctctgcaagccccctgctgtggcttggttggttaccggttatgtgtccctctgagtgtgtcttgagcgtgtccaccttctccctctccactcccagaagaccaaactgccttcccctcagggctcaagaatgtgtacagtctgtggggccggtgtgaacccactattttgtgtccttgagacatttgtgttgtggttccttgtccttgtccctggcgttataactgtccactgcaagagtctggctctcccttctctgtgacccggcatgactgggcgcctggagcagtttcactctgtgaggagtgagggaaccctggggctcaccctctcagaggaagggcacagagaggaagggaagaattggggggcagccggagtgagtggcagcctccctgcttccttctgcattcccaagccggcagctactgcccagggcccgcagtgttggctgctgcctgccacagcctctgtgactgcagtggagcggcgaattccctgtggcctgccacgccttcggcatcagaggatggagtggtcgaggctagtggagtcccagggaccgctggctgctctgcctgagcatcagggagggggcaggaaagaccaagctgggtttgcacatctgtctgcaggctgtctctccaggcacggggtgtcaggagggagagacagcctgggtatgggcaagaaatgactgtaaatatttcagccccacattatttatagaaaatgtacagttgtgtgaatgtgaaataaatgtcctcaactcccaaaaaaa

SEQ ID NO: 77880 - DNA, 1188 bp, Homo Sapiens
  misc_feature (346)..(453): n is a, c, g, or t
  misc_feature (493)..(493): n is a, c, g, or t
gaaatatatacatgtctgtgtcagtctataacttgcctcctctgggcctgttaaagcatgaagactgcatgacacaagagaaatgcaagccctacggttcctttctcagcagcgaattcacttgagaggatgctcttgactcattctctctgctctttcctgctcagatttctgataaaaatagagagcataggggaacagataatgaaataggaaacccactcgtgggttccacagatacctaccaaaggcctactgtgtgctagaattgtagctcaggagttctcagtgtagctgctcactgaagttaccatggcaggtttcaactggcagaatccaggctccnnnnnnnnnnnnnnnnnnnnnnnnnnnnnnnnnnnnnnnnnnnnnnnnnnnnnnnnnnnnnnnnnnnnnnnnnnnnnnnnnnnnnnnnnnnnnnnnnnnnnnnnnnnnaccctagacacaaagtattggacagatagacctggtgccnagagatggccatgagctgtaagctaggacgtgccccacctgagctctgcactagctagttcaaacaggcgctttaaaggcagtgtgaaaggggacagcctgttctgccaggtctcagaatgtatatttattaagtgccattaaaagggacctgaacaaaattggatgtcttgtaggcataagggaggaaaataaaatatacttggaaccaagtctatgtcatgaagggaaaataaaaatgtattcagtagcacgtgggttatggtttctcatagaccaggggataagattaaaagtcactgaagagtgggaaaatgcatgttgagaagatgagaatggcctgtattttctccaggggaatctgtgtaatgtgccttttccctctccaaatgcctagaaccatggcactgtgtcttatttatttaaccgttgggctgtctcatactaaacttgcaaagatatttgcctatgaactgaacaagacttccaggagttgaagtctggttcacaagggtaccccttgcctcctgtgatggagtgagaactcttaaacccctcaggccccaactcagttgtggagatgaggacaagattacaatatcaaaagaaagatgaatgaattcttggttaatatgacgaaccccagctcaatgagtaactgatgtgaactgctgggaataaaggacttcaaagatg

SEQ ID NO: 77881 - DNA, 865 bp, Homo Sapiens
tctcagagccctaagggtctccagaaagccggggtgtctgtgtttttaaaagaaaacctatttatgttgctgtgggtctctgccgtccctgtgttatagtacataagaacctttattctcctgtggttcagagagcaccccgacatgtgcctgcagctgcatccccgtaccacagtgtgggtgcaagacgctgggtttgtcctttgtctggtgaagcctggctagaaggggtgggggtggtagcccctgccctctgcagtgtccgcatccactggtccctgagcagcatagctggccacaccctcatgacatgacaagactgtcactcagtcactattgggtctatgaagggcgtcaagtcagaggaaggtttttatttttaatcaaataccacatttagctctatgtcataaatattcagaaaactatttttttaaacaaggcagaccaaaaatgtctgctagctagttggtttctatacaaatacatattcgaatgtcttgctggatgaagaggccgctcagccggagcctcctgtttcatgcgcttctcttctgaggggcagtagaggagaaagggctgttgggaggggttcagcccgctccttggccaggggatcccagccaccttctctgcaccaggccctgccttgagggacctggacccccaggtggcttctggccaggtgtgggtgggtgggaggggccctgtctgtgctccgagtctccgtgcgtgcaatgatttctctacctcatctgtgtggcccgtcccagagggactgtggagaatgtatttatttaacagctttgtgtcacagaaccagaaacaaatggaaacattaaataaatgtattttaaattataaa

SEQ ID NO: 77882 - DNA, 981 bp, Homo Sapiens
  misc_feature (16)..(16): n is a, c, g, or t
  misc_feature (21)..(21): n is a, c, g, or t
  misc_feature (37)..(37): n is a, c, g, or t
  misc_feature (81)..(81): n is a, c, g, or t
  misc_feature (83)..(83): n is a, c, g, or t
  misc_feature (88)..(88): n is a, c, g, or t
  misc_feature (124)..(124): n is a, c, g, or t
  misc_feature (172)..(172): n is a, c, g, or t
  misc_feature (210)..(210): n is a, c, g, or t
  misc_feature (226)..(226): n is a, c, g, or t
  misc_feature (235)..(235): n is a, c, g, or t
  misc_feature (264)..(264): n is a, c, g, or t
  misc_feature (313)..(313): n is a, c, g, or t
taggtcggcagattgntatcntgcttatcttggcacntgagaccgcagagacgtgtgccgtatcagatcgtgtgacagacncntccgntggctttcccccgttgcgacccatggatccaagctnctgtgccaggagaaaacgcatgttgtgagctgtgccttgggagccacngacacgctgtgttgatgtccgcttgagtggacgaccangacagtgttggatacnttcgattangggacatgggcgctttgccatctgtgcanggaagccaaagcccccgaggccagtgcccaagccccgagtctcagccgngacatgcagggcctctctttggatgcagccagccagccaagtaagggcggcctcctggagcggacagcgtcaaggctgggctctcgggcatccactctgcggaggaatgactccatctacgaggcctccagcctctatggcatctcagccatggatggggttcccttcacactccacccacgatttgagggcaagagctgcagccccctggccttctctgcttttggggacctgaccatcaagtctctggcggacattgaggaggagtataactacggcttcgtggtggagaagaccgcggctgcccgcctgccccccagcgtctcatagtccctcacccttccgcggaaagagcccccttactccacctccccgccagcctggggccaccccccctcactgcatcctggggccacccccactcactgcatcctgggaaccttcgccctgcaaggcgtttgctatcttcagccactgggcggagctgcagccctggaggagggggcgggtcgaggctgcgtggtgatggggtctccgcccccacgccctgccgggcagggctggagctggacagaagccagtgcctttaagtcatttgtgtcaaaaccctctggggtccggaggctgtgcgggtgtcctcctggcaataaacactacccggttctcgc

SEQ ID NO: 77883 - DNA, 555 bp, Homo Sapiens
tcccctctgcggaggaatgactccatctacgaggcctccccgcctctatggcatctcaaccactggatggggttcccttcacactccacccacgatttgagggcaagagctgcagccccctggccttctctgcttttggggacctgacccatcaagtctctggcggacattgaggaggagtataactacggcttcgtggtggagaagaccgcggctgcccgcctgccccccagcgtctcatagtccctcacccttccgcggaaagagcccccttactccacctccccgccagcctggggccaccccccctcactgcatcctgggaaccttcgccctgcaaggcgtttgctatcttcagccactgggcggagctgcagccctggaggagggggcgggtcgaggctgcgtggtgatggggtctccgcccccacgcccgccgggcagggctggagctggacagaagccagtgcctttaagtcatttgtgtcaaaaccctctggggtccggaggctgtgcgggtgtcctcctggcaataaacactacccggttctcgcc

SEQ ID NO: 77884 - DNA, 931 bp, Homo Sapiens
  misc_feature (904)..(904): n is a, c, g, or t
ggcacgaggcgagcgctgccgtcgggaggcgctccgaggttcgaggctgtgccccgcgacccgccttcggcgctcggctcgcaggatggatcccgtacccgggacagactcggcgccgctggctggcctggcctggtcgtcggcctctgcacccccgccgcgggggttcagcgcgatctcctgcaccgtcgagggggcacccgccagctttggcaagagcttcgcgcagaaatctggctacttcctgtgccttagttctctgggcagcctagagaacccgcaggagaacgtggtggccgatatccagatcgtggtggacaagagccccctgccgctgggcttctcccccgtctgcgaccccatggattccaaggcctctgtgtccaagaagaaacgcatgtgtgtgaagctgttgcccctgggagccacggacacggctgtgtttgatgtccggctgagtgggaagaccaagacagtgcctggataccttcgaataggggacatgggcggctttgccatctggtgcaagaaggccaaggccccgaggccagtgcccaagccccgaggtctcagccgggacatgcagggcctctctctggatgcagccagccagccaagtaagggcggcctcctggagcggacagcgtcaaggctgggctctcgggcatccactctgcggaggaatgactccatctacgaggcctccagcctctatggcatctcagccatggatggggttcccttcacactccacccacgatttgagggcaagagctgcagccccctggccttctctgcttttggggacctgaacatcaagtctctggcggacattgaggaggagtataacctacggcttcgtgggtggagaaagaacgcgggctgcccggcctggccccccagncgtctcattagtcccctcaccccttta

SEQ ID NO: 77885 - DNA, 1900 bp, Homo Sapiens
  misc_feature (1414)..(1532): n is a, c, g, or t
  misc_feature (1729)..(1846): n is a, c, g, or t
caacaatcatttcaccttctctcccaatgctggttccaatgtcacacgcctgctgcttacatctcgctttgactatgctggtgggtttgataagatctgggactacaagctacttgtctacgtaactgatgacaacttgatgtctgacaggaagaaagcggaggctcttgttgagacaggaacagtgacactgagtattaaagtcattccccacccaaccactatcatcaccacgacccccaggcccagggtcacctatcaggtcctgaggaaaaacgtttactctccatctgcatggtacgtgccgtttgtcatcactttgggctccatattgcttctgggtctcctcgtgtacctggtcgtcctattggccaaagccatccacagacactgcccctgcaagactgggaagaacaaggaacctctgacaaagaaaggagaaacgaagactgcagagagagacgtcgtggtgaaactatccagatgaacactatctttgatggagaagccatagatccagtgaccggggaaacatatgaattcaactcaaaaactggagccagaaagtggaaagatccactaacccaaatgccaaaatggaaagagtccagccaccagggagctgccccacgcagagtcactgctggggaagggatggggtcactgagaagtgccaactgggaagaagatgagctgagtggcaaagcgtgggctgaggatgctggtctgggttccagaaatgagggtggcaagctgggcaacccaaagaacagaaatccagccttcatgaacagggcttaccccaaaccacacccaggaaagtaaacggggtctaaggaggggcctgtcaatcactgagatgctgcctcaccctaaattctatggggatggtgtgggcatggtgtaggggggaaaatgtgggctgaggggattcagacatccagggtcaaacatgggatgtttgacaaatttttaaacaaatagaaaggggtttgatcacatagttgcgtgttctgaaatgatacaggaacattttctatcagatttcagaactacctgtgcttctgataagcaagactgttaactttggggtgtggaattgttgtgtttcttctttgcattgactgctaggaagctctattctgttcaccatagaaagtttgtaggaattcctgacataaatagtgaagactatccttacatctggtttccaccttattttcctgccctcgttttaacatcacccagatttcttcagttataaatatgccatacacctttgtaagtcacctcaaatcttcttcaaaagaagcagaacagtgaaaaaaacagatgagtaagttaagagttggtcatctggaaagaagaaaactcagtaggcaccttcttttgttttttcttgtggtgtccggannnnnnnnnnnnnnnnnnnnnnnnnnnnnnnnnnnnnnnnnnnnnnnnnnnnnnnnnnnnnnnnnnnnnnnnnnnnnnnnnnnnnnnnnnnnnnnnnnnnnnnnnnnnnnnnnnnnnnnggtggcagctgcttcagattttttacttttaaaaaatatacttaaaagtgaactacaggcagggcatgatggctcatgcctgtaatgccagcactttgccaaggtgggcagatcacctaaggtcaggagttcaagatcagcctggcctagatggcaaaaccctgtctctactaaaaaatacaaaaattagcttggtnnnnnnnnnnnnnnnnnnnnnnnnnnnnnnnnnnnnnnnnnnnnnnnnnnnnnnnnnnnnnnnnnnnnnnnnnnnnnnnnnnnnnnnnnnnnnnnnnnnnnnnnnnnnnnnnnnnnnntgacaaagcaagactccatctcagaataaaaaaataaaagtgaattacaacact

SEQ ID NO: 77886 - DNA, 281 bp, Homo Sapiens
cagtagttcagttctcttcatggttatgtctggtttcattctatgattatatcacaatttatctattctacacttgggtggcagctgcttcagattttttacttttaaaaaatatacttaaaagtgaactacaggcagggcatgatggctcatgcctgtaatgccagcactttgccaaggtgggcagatcacctaaggtcaggagttcaagatcagcctggcctagatggcaaaaccctgtctctactaaaaaatacaaaaattagcctggggggggtggt

SEQ ID NO: 77887 - DNA, 1448 bp, Homo Sapiens
tctcaaccattcctgcccacaacaccccagctggctgccagcaaagcccctccacacccctcaaagctccagacccttcacatcaatgtactgtgtgcttcgacctcaccccaggcaattttctctgaatcaaccccctttcctcctctcctaagtctctgagtttctctctcctcctgccatcctgaggttctgccatccttaggggccgccaagacctctcttgtcgttcctcgtcccgcctcagaccagcagccttgttattttagatcatgtctggagggaagtcagcccagggtccagaggaagggggcgtctgcatcactgaagcccttatcactaagcggaacttgactttccctgaagatggggaactgtcagagaagatgtttcacactcttgatgaactgcagactgtccgcctggaccgggaggggattactactatcaggaacttagaaggcctccagaatcttcacagtctctatctgcaagggaataagatccagcaaattgagaacctggcttgcatcccctccttgcgcttcctgtctctggcaggaagaccaagatcaggcaggtggaaaacctcctcgacctcccatgcctccagtttctggacctttctgagaacctgatagaaacattgaagctggatgagttcccccagagccttctcatcctcaacctgtctggaaacagctgcaccaaccaggatggctaccgcgagctggtgacagaagccctgccacttctcctggacctggacgggcagcctgtggtggagcgctggatttcggatgaggaggatgaagcctcaagcgatgaggagttcccagagctgagtggcccattctgctcagaacgaggcttcctcaaggagctggagcaggagctgagcaggcacagggagcaccggcaacagacggccctgacagagcacctgctgaggatggagatgcagcccaccctcaccgacctgcccctgctacctggggtgcccatggctggggacagcagcccttctgccactcctgcgcaaggggaggagacagtccctgaggccgtctcctcaccccaggcctcctctcccaccaagaaaccatgcagtctgattcccaggggccaccaaagctctttctggggaaggaagggggcacgagcagccacagcccccaaggcctctgtggctgaggcccccagcacaaccaaaactacggccaagagaagcaagaaatgattctctgtcaacctttctctactagtggagaggagtggggcctgcccctcttctcagacctctgacctgtgacagaagcccatccccagtaaagtgtctctaggccctgagtatgcttttcatgtcacttggggtatctcaggggaagaaaccagtgaaagctccaggaaacaaaatacagagctcagtgagccacctgattctaaaa

SEQ ID NO: 77888 - DNA, 507 bp, Homo Sapiens
aagatatgtgcttaaaacattcctaacatcagaatttgcgcctgtgtttcttccccaagaaagctataaacagcgaaaattttgttgtaagcttccctgtgtcctctctccctctctcccttccccctcccctgaaactaaaaggaatgttaaaagcccacttttctgtgaccagcagaccttatctatggtcccaattccaattccttgtaaacacaatttgtaaaatcccgtgagatcctgtctcctttgccatcccgctgcaaggttataagtagagaaaacttaagttacaattccagttttcctcaagatctgagacatgttaattgtctttgtttctccctctggtaacatcttcccaccacacatatttcctgccttagagagtttaaaaggtgataaaaaaatctaacactggctaccccgctcgggaccccttccacgctgtgaaagctttgtactgtcactctgcttaataaagcctacagcttttttaaaaagaaa

SEQ ID NO: 77889 - DNA, 926 bp, Homo Sapiens
  misc_feature (644)..(683): n is a, c, g, or t
  misc_feature (826)..(826): n is a, c, g, or t
gtggtaccggtccggaattcccgggatatcgtcgaccccgcgtccgggaaaagaagaagaaatggcagtaaagagggcaaccatcattccacccagcccaaaaggaataagagaaaccctatctttcaggattctcaagatacagagttttcatggagtgataatgaaaggagcagcagccgcattaatatcccagagagagcaagtggaccagaaggcaacttaaaccagattgttactgaacccccgatgcaaactttccccagttcttgcatgagggattgtctaaacctgtttatgtcataaactggtttatgtcctttggtcctgaaataaaactcaatacttcacagcagggaaggaaccaagctgtttaaaactacttatctccgctatgaaggagaagtattttcaaggaatatcagaagaaagtagaaagtgagaggaggttccagctgggcttcctgggtcaagtaggggctcagaaagctgtgaaactcactcatttcctgcatgcggacttactttggtcctggatgaataatattgaagatatgtgcttaaaacattcctaacatcagaatttgcgcctgtgttttcttccccaagaaagctataaacagcgaaaattttgttgtaagctnnnnnnnnnnnnnnnnnnnnnnnnnnnnnnnnnnnnnnnngaaactaaaaggaatgttaaaagcccacttttctgtgaccagcagaccttatctatggtcccaattccaattccttgtaacacaatttgtaaaatcccgttgagatcctgtctcctttgccatcccgctgccaagggtataangtagagaaaaacttaagttaccaattccagtttttccctccagatctggagaacatgggtaatttgggcttttggtttctccccttctgggaaaacatcc

SEQ ID NO: 77890 - DNA, 580 bp, Homo Sapiens; identical to SEQ ID NO: 5048

SEQ ID NO: 77891 - DNA, 1123 bp, Homo Sapiens
  misc_feature (203)..(225): n is a, c, g, or t
  misc_feature (463)..(463): n is a, c, g, or t
ggaattcccgggatgtttcagccaaacttcgggcggcggctgaggcggcggccgaggagcggcggactcggggcgcggggagtcgaggcatttgcgctgggcttcggagcgtagcgccagggcctgagcctttgaagcaggaggaggggaggagagagtggggctcctctatcgggaccccctccccatgtggatctgcccannnnnnnnnnnnnnnnnnnnnnnaggaggcgaccgagaagatacccgccctgcgccccgctctgctgtgggcgctgctggcgctctggctgtgctgcgcgacccccgcgcatgcattgcagtgtcgagatggctatgaaccctgtgtaaatgaaggaatgtgtgttacctaccacaatggcacaggatactgcaaatgtccagaaggcttcttgggggaatattgtcaacatcgagacccctgtgagaagaaccgctgccnagaatggtgggacttgtgtggcccaggccatgctggggaaagccacgtgccgatgtgcctcagggtttacaggagaggactgccagtactcgacatctcatccatgctttgtgtctcgaccttgcctgaatggcggcacatgccatatgctcagccgggatacctatgagtgcacctgtcaagtcgggtttacaggtaaggagtgccaatggaccgatgcctgcctgtctcatccctgtgcaaatggaagtacctgtaccactgtggccaaccagttctcctgcaaatgcctcacaggcttcacagggcagaagtgtgagactgatgtcaatgagtgtgacattccaggacactgccagcatggtggcacctgcctcaacctgcctggttcctaccagtgccagtgccttcagggcttcacaggccagtactgtgacagcctgtatgtgccctgtgcaccctcgccttgtgtcaatggaggcacctgtcggcagactggtgacttcacttttgagtgcaactgccttccagaaacagtgagaagaggaacagagctctgggaaagagacagggaagtctggaatggaaaagaacacgatgagaattagacactggaaaatatgtatgtgtggttaataaagtgctttaaactgaattgac

SEQ ID NO: 77892 - DNA, 1001 bp, Homo Sapiens
ggagagagtatgaagtcgacggcgcgccgaattcggcacgagggcagacggtatcttctgtatgacgtcaaccccccggaaggcttcaacctgcgcagggatgtctatatccgaatcgcctctctcctgaagactctgctgaagacggaggagtgggtgcttgtcctgcctccatggggccgcctctatcactggcagagtcctgacatccaccaggtccggattccctggtctgagttttttgatcttccaagtctcaataaaaacatccccgtcatcgagtatgagcagttcatcgcagaatctggtgggccctttattgaccaggtttacgtcctgcaaagttacgcagaggggtggaaagaagggacctgggaagagaaggtggacgagcggccgtgtattgatcagctcctgtactcccaggacaagcacgagtactacagaggatggttttggggttatgaggagaccaggggtctaaacgtctcctgtctgtccgtccagggctcagcctccatcgtggcgcccctgctgctgagaaacacatcagcccggtccgtgatgttagacagagccgagaacctacttcacgaccactatggagggaaagaatactgggatacccgtcgcagcatggtgtttgccaggcacctgcgggaggtgggagacgagttcaggagcagacatctcaactccacggacgacgcagacaggatccccttccaagaggactggatgaagatgaaagtcaagctgggctccgcgctagggggcccctacctgggagtcacctgagaagaaagatttatctgggtccagacaggagtacccgtctggaagggcgtgaggagatcgcacctctgagaccacggctgacaaggttgtgcccaatgcgtcgaaggattgagacaaaagcgttccgatgtgagtgacccctgagagtgatcacggcgagctcatttgctgatgcccccgttttgccttccattttgatggaa

SEQ ID NO: 77893 - DNA, 2205 bp, Homo Sapiens
  misc_feature (2081)..(2081): n is a, c, g, or t
  misc_feature (2139)..(2139): n is a, c, g, or t
ggggagagagtatgaagtcgacggcgcgccgaattcggcacgagggcagttcatcgcagaatctggtgggccctttattgaccaggtttacgtcctgcaaagttacgcagaggggtggaaagaagggacctgggaagagaaggtggacgagcggccgtgtattgatcagctcctgtactcccaggacaagcacgagtactacagggatggaggtcttgtcagtcccaagtgtcgattgccattaaaggctctgacactaccaggcctcctgtggaaaagctgtcagttaacagcctccatgtgtccagtgccagggcagctggctctaaagcatggcagaggatggttttggggttatgaggagaccaggggtctaaacgtctcctgtctgtccgtccagggctcagcctccatcgtggcgcccctgctgctgagaaacacatcagcccggtccgtgatgttagacagagccgagaacctacttcacgaccactatggagggaaagaatactgggatacccgtcgcagcatggtgtttgccaggcacctgcgggaggtgggagacgagttcaggagcagacatctcaactccacggacgacgcagacaggatccccttccaggaggactggatgaagatgaaggtcaagctgggctccgcgctagggggcccctacctgggagtccacctgagaagaaaagatttcatctggggtcacagacaggatgtacccagtctggaaggggccgtgaggaagatccgcagcctcatgaagacccaccggctggacaaggtgtttgtggccacagatgccgtcagaaaggaatatgaagagctaaaaaagctgttacccgagatggtgaggtttgaacccacgtgggaggagctggagctctacaaggacggaggcgttgcgattattgaccagtggatctgcgcacacgccaggttttttattggcacctcagtctcaacattttcttttcggattcatgaggaaagagaaatcctggggttggaccccaagacgacgtacaacaggttctgcggtagaccaagagaaggcgtgtgagcaacccacccactggaagatcacctactgaggaggatcctccagggccgctccccggacccgacaggcgcgggtggatgcaggttctgtcgccgtggagtcaccgtctactgccagccgggagctgggcggacaggaccgtccctcgcagggtcccaggcccagaagaggccccacgcctctagagctgggctccgtcctcggcgttgccagccgccatggctgatgaagaggctccgctgctctcgggggtggcggttgttttcaggcagcgtctgtgaacccacagctcggttgccagcagtgcccgcgtggtgacccagaagcaggagtgtttgtcaggctcccgctctggcctttccagccacctttcatgtcttcatattttaagtgcattgaggatagatgcaggcgggtgagctgccctccgtcaggtggacccgggctgacatttccctgggagctggtgcaaggagaagcgtcattttaaatgtctgcagagcgaccaggggcctcatgaatctctccgttgccctccgcgcagcaggaggctgcctgtgtgtttcctcctgggatgcgtgcaaggcagacctggtgctgcaaaggaaagggcctgaggcctcagggagccccgtggagggatgacagttcaggccctactgctggcacgtcagagcactgggaagtttttcagtgacgtctctggggcactcagtggattgtctgtaggaaacttgcagctggagctctacaaggacaggaccgtccctcgcagggtcccaggcccagaagaggccccacgcctctagagctgggctccgtccctgccctcgccccggctggcaggtgcacatggggcctccaggtctgccattcgctattgagaactagaaatgaggaaggacagttacgctaactccaaaaggctgtctaggatgagctgctttatcagggagctccttgtacccattttacagaaatcatttttaggtctttgtgccaccaccancgagggcatctgcaaagagggcaacgctagacacaaaatccgtggaaggtgcaacagntgcctcagggggtccctcaggggtcaggggagccccccctcaccctcttgggccggttaacccttg

SEQ ID NO: 77894 - DNA, 1142 bp, Homo Sapiens
  misc_feature (349)..(436): n is a, c, g, or t
gttgtcattgttattaggagctggtgcaaggagaagcgtcattttaaatgtctgcagagcgaccaggggcctcatgaatctctccgttgccctccgcgcagcaggaggctgcctgtgtgtttcctcctgggatgcgtgcaaggcaaacctggtgctgcaaaggaaagggcctgaggcctcagggagccccgtggagggatgacagttcaggccctactgctggcacgtcagagcactgggaagtttttcagtgacgtctctggggcactcagtggattgtctgtaggaaacttgcagctctgctcctcacaccaggcccgggtggccacccaccctcgcccccactggnnnnnnnnnnnnnnnnnnnnnnnnnnnnnnnnnnnnnnnnnnnnnnnnnnnnnnnnnnnnnnnnnnnnnnnnnnnnnnnnnnnnnnnngctggcaggtgcacatggggcctccaggtctgccattcgctattgagaactagaaatgaggaaggacagttacgctaactccacaaggctgtctaggatgagctgctttatcagggagctccttgtgaccattttacagaaatcatttttaggtctttgtgccaccaccacgagggggcatctgcaaagagggcaacgctagacacagaatccgtggaaggtgcagcagtgcctcaggggtcctcagggtcagggagcccccctcaccctcttggcccgttaccctttgtgactttccaccatggtgtcgtgtgaccctcagtcaggttggtgggggctgagtcctcactgagcagccactttccacatctgctagaggaacagtgacatggacacctgtgacagagagaggacagttaggagggacagacagctcttcctttcggagcctggctagtctaggacatcaccttgctgtgtcttctcaagcttttaaaattgaccctgaacgtgtgacagggtcctatggtgttactcaaagctgtgcagggtaaatgatgacatatttattctttttccatttgttctagaaacagtgcctttttcatcagttgcattttccaggctgagagctgtataaaacattttggactgtgaccatgtaccttcctttttaagaaaaataaactgctttatggaagttggt

SEQ ID NO: 77895 - DNA, 1508 bp, Homo Sapiens
  misc_feature (197)..(403): n is a, c, g, or t
  misc_feature (436)..(453): n is a, c, g, or t
  misc_feature (489)..(513): n is a, c, g, or t
  misc_feature (549)..(573): n is a, c, g, or t
  misc_feature (703)..(723): n is a, c, g, or t
  misc_feature (937)..(996): n is a, c, g, or t
  misc_feature (1021)..(1041): n is a, c, g, or t
  misc_feature (1086)..(1099): n is a, c, g, or t
aacccacaaccgcagtttacatagtccattggtgcatttccacatgtcttcctgcattccctgagttcgggtaccgattacccttgagtgggtgtaccctccccacccaacgaccgacccacgatcagtggcgagaagcgaagaccccaatacacaaccgctgtccccgagggtgccagttcataatgcaggtgcannnnnnnnnnnnnnnnnnnnnnnnnnnnnnnnnnnnnnnnnnnnnnnnnnnnnnnnnnnnnnnnnnnnnnnnnnnnnnnnnnnnnnnnnnnnnnnnnnnnnnnnnnnnnnnnnnnnnnnnnnnnnnnnnnnnnnnnnnnnnnnnnnnnnnnnnnnnnnnnnnnnnnnnnnnnnnnnnnnnnnnnnnnnnnnnnnnnnnnnnnnnnnnaagaattcggcacgagggccgcggctgtaggcnnnnnnnnnnnnnnnnnnaagagtcgaagcatagcttgtttaatttttatacannnnnnnnnnnnnnnnnnnnnnnnngtttgtcttttattgaatcttttatggaatcccccnnnnnnnnnnnnnnnnnnnnnnnnngcatagggaacaaataaacaaaataatgacagccagagtcactttctgtaaatggtacttaggtaggcgcgtccgcgaaaaccaaaatgactgcgtaatatacaaggttatgattggagtatgatgtgannnnnnnnnnnnnnnnnnnnnaagagccggcgggtctgcccaggtgtccccttgtccccctcctgtcctcgctgtcaagaggagaagtaggaggaggaggggagggtgggggacctgctggaaccttctccggattgggttcatgagcatttttgtgggtgtgtatgtgtgtgttatccagtgtgcggtaagcagaaagctagaaggagagtaaactatcctggtgatatcagtnnnnnnnnnnnnnnnnnnnnnnnnnnnnnnnnnnnnnnnnnnnnnnnnnnnnnnnnnnnncaccacccaaagagtaaaggggagnnnnnnnnnnnnnnnnnnnnncccaaaggaaaatgttttgttttgtccctccctcctcccagctgnnnnnnnnnnnnnnactgtatgccctgccccatcctgtccccctggagcccttgcttgttctttctctgtgtgagaatgctcagggctgggtgggcaggaagctgggggcacaggctgggaccccaggacttgagggggctttggttttgggggggcctggctgggacccaagatgagaggatggggtgtggatgcagttgaggggccggggcagcctgtgtcccctttttggagggctctcttccagccaggagatgtgcgtggaaggctggggggtggtggcttgggggtgcatgacttcccctccggggcccatattcctattggatccccttcctccttcctgtctcaggtgtgagcaaagccttggggagggggctgccatggacgggggggtggggcaggagaatcccaaaagccac

SEQ ID NO: 77896 - DNA, 1978 bp, Homo Sapiens
  misc_feature (1918)..(1938): n is a, c, g, or t
cgcagccaggcgcgcactgcacagctctcttctctcgccgccgcccgagcgcacccttcagcccgcgcgccggccgtgagtcctcggtgctcgcccgccggccagacaaacagcccgcccgaccccgtcccgaccctggccgacccgagcggagcctggaggccaggtctctgcctcggaagtgagtgcttctgccatcgtcccctgcctgtcccctcctgggtcactggtgtttgaggattttgctaacctgacgccctttgtcaaggaagagctgaggtttgccatccagaacaagcacctctgccaccggatgtcctctgcgctggaatcagtcactgtcagcgacagacccctcggggtgtccatcacaaaagccgaggtagcccctgaagaagatgaccacggaaacacagaggcgacgagaaagaacatacacgattgcagctgcaaagtgccgaaacaagaagcaaggagaagacggagtgcctgcagaacacagtcggagaagctggaacagtgtgaatgctgaagctgaaggctcagattgaggagctcaagaacgagaagcagcatttgatatacatgctcaaccttcatcggcccacgtgtattgtccgggctcagaatgggaggactccagaagatgagagaaacctctttatccaacagataaacagaaggaacattgcagagctaagcagtcgtggtatgggggcgactggggagtcctcattgaatcctcattttatacccaaaaccctgaagccattggagagctgtcttcctgtgtacctctagaatcccagcagcagagaaccatcaaggcgggagggcctgcagtgattcagcaggcccttcccattctgccccagagtgggtcttggaccagggcaagtgcatctttgcctcaactccaggatttaggccttaacacactggccattctgatgttccagatggcccccagctggtgtcctgcccgcctttcatctggattctacaaaaaaccaggatgcccaccgttaggattcaggcagcagtgtctgtacctcgggtgggagggatggggccatctccttcaccgtggctaccattgtcactcgtaggggatgtggagtgagaacagcatttagtgaagttgtgcaacggccagggttgtgctttctagcaaatatgctgttatgtccagaaattgtgtgtgcaagaaaactaggcaatgtactcttccgatgtttgtgtcacacaacactgatgtgacttttatatgctttttctcagatctggtttctaagagttttggggggcggggctgtcaccacgtgcagtatctcaagatattcaggtggccagaagagcttgtcagcaagaggaggacagaattctcccagcgttaacacaaaatccatgggcagcatgatggcaggtcctctgttgcaaactcagttccaaagtcacaggaagaaagcagaaagttcaacttccaaagggttaggactctccactcaatgtcttaggtcaggagttgtgtctaggctggaagagccaaagaatattccattttcctttccttgtggttgaaaaccacagtcagtggagagatgtttggaaaccacagtcagtggagcctgggtggtacccaggctttagcattattggatgtcaatagcattgtttttgtcatgtagctgttttaagaaatctggcccagggtgtttgcagctgtgagaagtcactcacactggccacaaggacgctggctactgtctattaaaattctgatgtttctgtgaaattctcagagtgtttaattgtactcaatggtatcattacaattttctgtaagagaaaatattacttatttatcctagtattcctaacctgtcagaataataaatattggaaccaagacatggtnnnnnnnnnnnnnnnnnnnnncctgagcaggcggccgcaagcttattccctttagtgaggt

SEQ ID NO: 77897 - DNA, 400 bp, Homo Sapiens
catattgtatgctgatacagaagttgaaaccaatttagcttgtcatgagatattctcgttacagcctatcttttttcctgttgtaaaagtaatacaagtaaattgttaataaagatagaatcattttagttactggtttaggtataaaaggaaagtgtaaccatgtttagcaacattagtggaattatttctgattttgcacccaattctgattttcccatgattcgaatggcacatacattttagcacacattttgcaaaggaatattaggattcagtcatatttcttgctttgtaggtaacttagagcgtggcgtacacatttggcattgaatcatgatgaatggctccgttttatcttgtttatgttataaaacttgataataaatacttgatatac

SEQ ID NO: 77898 - DNA, 742 bp, Homo Sapiens
  misc_feature (38)..(38): n is a, c, g, or t
aagtgaacactcgttttgaaagcttgattttgtagctntggaagctggaagcgatggtgtttggtgccgagtcctgtgtcatcctcggggcctatgagctccgtaccagccactcaaaagtgtctgaacagaaccgctccgtgactggtagctgggtctgaggattcaggattgtggcgttattcaaagaggagactttgaaattccccgatggctggaatgtggagcccaggtgcctctggtggagggtcatctgcttttccagactgtggttgtgaaccggctccttctccaagaaaggttgcaagctagaacatccagaggtgagactcagacacattgaaagtgactgcatttagggaggtttaacgagttcttactgatcattccacttgttactggttaagataatttgcccacgggtttgtttccaagtcctcttctaggaccaggctcctggtatttcaggggctggttggctgcacagacagcccctcttctgctgtccttgaggacagacaccaaaccagaggtggaggaagaacggtaggaaggctgatggcaaaagcggctgtgtgtcgaggttattttaactttttactactttttgttactgtttctgcaaatgctaacacataaaccatgacctaacttttgtcaccttggatatctattgaatgttaaacatctctaataaagatggccaccacttaatgtgtggaaagtgatggccttctcgtgg

SEQ ID NO: 77899 - DNA, 165 bp, Homo Sapiens
gcggccgcctgctcaggttttattcaacagatgccataaattaactacattcagaaaaaaatttaaagaacaaagccaccctatccagcattctttcactcacaaagaagtaccaaagatatgtttatgttccattaaccgagtatgcagcaaattcattaaaat

SEQ ID NO: 77900 - DNA, 2543 bp, Homo Sapiens
  misc_feature (582)..(582): n is a, c, g, or t
  misc_feature (1193)..(1193): n is a, c, g, or t
tcccttcgtctaagaacaactggcattaatagtccatacaagcagactatggagcccaagaaggacaggaagcggatttcaggactgtgagcgggtggtaagaggacccagcctgggatggagagcgacccctacgaagcacaggactttgtgtgtgactaccacctggagatgctgagcctgtcccaggaccagcagaacccctcctgcatccagtttgatgactccaactggcagctgcacctcacctccctcaaacccctgggcctctaatgtgctgctgaacctgtgtgatgccagcgtcaccgagcgcctgtgccgattctccgaccacctgtgcaacattgccctgcaagagagccacagcgccgtgctgcccgtccatgtgccctggggcctctgcgagcttgcccgcctcattggcttcactcctggggccaaggagcttttcaagcaggagaaccatctggcgctgtaccgcctccccagtgccgagacaatgaaggagacatcgctggggcggctctcctgtgtcaccaagcggcggcctcccctcagccacatgatcagcctcttcattanagacaccaccaccagcacagagcagatgctgtcccatggcaccgctgatgtggtcttagaggcctgcacagacttctgggacggagctgacatctaccctctctcgggatctgacagaaagaaagtgctggacttctaccagcgagcctgcctgtctgggtaattgctctgccttcgcctacaagcccatgaactgcgccctgtcctctcagctcaatggcaagtgcatcgagctggtacaggtgcccggccaaagcagcatcttcaccatgtgcgagctgcccagcaccatccccatcaagcagaacgcccgccgcagcagctggagctctgacgtaccaggcccggctggacatcgtgcgcctcattgatgggcttgtcaacgcctgcatccgctttgtctacttctctttggaggatgagctcaaaagcaaggtgtttgcagaaaaaatgggcctggagacaggctggaactgccacatctccctcacacccaatggtgacatgcctggctccgagatccccccctccagccccagccacgcaggctccctgcatgatgacctgaatcaggtgtcccgagatgatgcagaagggctcctcctcatggnaggaggagggccactcggacctcatcagcttccagcctacggacagcgacatccccagcttcctggaggactccaaccgggccaagctgccccggggtatccaccaagtgcggccccacctgcagaacattgacaacgtgcccctgctagtgccccttttcaccgactgcaccccagagaccatgtgtgagatgataaagatcatgcaagagtacggggaggtgacctgctgcctgggcagctctgccaacctgcggaacagctgcctcttcctccagagcgacatcagcattgccctggatcccctgtacccatcccgttgctcctgggagacctttggctacgccaccagcatcagcatggcccaggcctcggatggcctttctcccctgcagctgtcagggcagctcaacagcctgccctgttccctgacctttcgccaggaggagaccatcagcatcatccggcttatcgaacaggctcggcatgccacctatggcatccgtaagtgcttcctcttcctgctgcagtgccagctgactcttgtggtcatccagttcctttcttgcctggtccagctgccgccactcctgagtaccaccgacatcctgtggctgtcctgcttttgctaccctctgctcagcatctctctgctcgggaagcccccccatagctccatcatgtctatggcaacggggaaaaacctccagtccattcccaagaagacccagcactacttcctgctctgctttcctgctcaagttcagcctcaccatcagctcctgcctcatctgctttggcttcacactgcagagcttctgtgacagctcccgggaccgcaacctcaccaactgctcctccgtcatgctgcccagcaacgacgacagggctccagcctggtttgaggactttgccaatggactgctgtcggctcagaagctcacggccgccctgattgtcctgcacactgtcttcatttccatcacccatgtgcatcgcaccaagcccctgtggagaaagagccccttgaccaacctctggtgggccgtgacagtgcctgtggtgctgctgggtcaggtggtccagacggctgtggacctgcagctgtggacacacagggacagccacgtccactttggcctggaggacgtgcccctgctgacatggctcctgggctgcctgtccctggtccttgtggtggtgaccaatgagatcgtgaagctacatgagattcgggtccgagtccgctaccagaagcgacagaagctgcagtttgaaactaagctgggcatgaactctcccttctgagccactggctgtggtggctgtagttgcccccgtccctggggg

SEQ ID NO: 77901 - DNA, 1007 bp, Homo Sapiens
  misc_feature (88)..(88): n is a, c, g, or t
acacggaggaccggagcgccctgtccgaggttgttgaggcatcttcattaagctggagtaccaggataaaaggcttcattgcgtgttntgctataggaattctctgctcactgctgggtactgttctgctgtgggtgcccaggaagggactacacctcttcgcagtgttttatacctttggtaatatcgcatcaattgggagtaccatcttcctcatgggaccagtgaaacagctgaagcgaatgtttgagcctactcgtttgattgcaactatcatggtgctgttgtgttttgcacttaccctgtgttctgccttttggtggcataacaagggacttgcacttatcttctgcattttgcagtctttggcattgacgtggtacagcctttccttcataccatttgcaagggatgctgtgaagaagtgttttgccgtgtgtcttgcataattcatggccagttttatgaagctttggaaggcactatggacagaagctggtggacagttttgtaactatcttcgaaacctctgtcttacagacatgtgccttttatcttgcagcaatgtgttgcttgtgattcgaacatttgagggttacttttggaagcaacaatacattctcgaacctgaatgtcagtagcacaggatgagaagtgggttctgtatcttgtggagtggaatcttcctcatgtacctgtttcctctctggatgttgtcccactgaattcccatgaatacaaacctattcagcaacagcacataagccttgggtgcaagtgattcccaggtggcaaaaggcagccccatcagagatcacgggagcaacagtaagggacagagttttggggtccacttgtccctcagcatggaagccatcaccgtggtcctgcatagagtgagtctacttctactctggcatctgagaacaagtgactctgctttagacaagcccctggagagcctggccatggagtgaggtagaaaagaagcactttttggtggtaaa

SEQ ID NO: 77902 - DNA, 1744 bp, Homo Sapiens
  misc_feature (139)..(148): n is a, c, g, or t
  misc_feature (1473)..(1555): n is a, c, g, or t
tgcactggaatattttcatttttttccttggcaaaaagtcaagtgctacatttttaaaaacagaaaatctcaaacaatcaaacgcattacccattacagaagagggtctagcaatagtacaaaacatcctactgaagannnnnnnnnnaaatatacaagtcagtttaaaatgatagaagttctgtgagaactaagaaatctacagcctgtagtttaataatagaaaaaaaattaagacgattaaaagatctatagcatccagcattttgcttaattccctgtttatagcacctatttctctaggttcgaagatgagaattccagaacctgtggtatgtgctgtgtaacaagttagggtggacttgctgtctctcctctccagtagccccccaccattaaaaggagaatatatatataattttttttccaatttcccttcttacacccagagaagagggggacaactgggagaacaagttaaaaaactggggtgcaggaataaatatgacttttcctttccccaaaatgggatgttgacagaaaagcagagtatgtgcttagaggaactggtgggtgggaacagctgttatctttgacatgatgtgtaaaaatcagggaacaagtggacatcacagtcagctgcctgcaagtttaaaaacctcagactaaacagacagttcaagggaggaacagacaaattactaatcacattgatgctgtcacatgcacaatgatgctgactgcaggccagcctgtcaccatctcagggctaagccaacagagtaggaggggtggcttcaaccccaagtcccactgcagtaagaaaatgaatattccacacatgaagcactcactacacacagataaaccccctgctcacccccaccttcttagacttaacccaatttagaaaataatagcaaaacccactggggagattggaagaatggcagagaggattctcctcaaagccatgggggctatggatgtgaatcttagcagacttgagactcccagctccaggccccttaaaaccagatcaggtcttgaggggaaggagagagaagctaggatggggattcaagtcccatgaagccttttgtagcctctggagctgcacctggatggtgagtctgatgttttaggggtgtggctactggctaagcagatgtgagggtgggaaggggaagtgacaccaacttcccacacgggggacacacaggtgggaagacaggtagggctggatcactttgcagtcctggcatgggaggccccaggaagcctacaatctaactaaaaagattttcccagtggtaatttcttttcctttctgtttttacttcctattatcagtgttgttagacttaaaaaacaagatacagactagtcccaaagctggactctgtgaataaagttgtttcttttataaatattttaattacaagtaatcctcactccaggtaatttcagtgnnnnnnnnnnnnnnnnnnnnnnnnnnnnnnnnnnnnnnnnnnnnnnnnnnnnnnnnnnnnnnnnnnnnnnnnnnnnnnnnnnnctcccaaactttcacagaaagtctgagagcaaccatgtaattataaaggagccctacctctcaagagtgaagtaagggtgagaaagactatgtcatttcagcctgaagaagccagagacaggagaatgtgtgtcacttaaagaaaaatagggattagcaacaatgtttggttgaaaagccagaaataat

SEQ ID NO: 77903 - DNA, 690 bp, Homo Sapiens
  misc_feature (604)..(604): n is a, c, g, or t
  misc_feature (613)..(629): n is a, c, g, or t
ggcagggaggtgggggcctcctcagcctctgcaactgcaagaaagggacccaggaaaccaagtctgccgcccacctcgctcccctctgaatcttccccaagggccaaacccacttctggcctccagcattggctccctccccgcttgccatttggcaaacagggtagatttctcttgggcaggcagagagtacagactgcagacattctcaaagcctcttatttttctagcgaacgtatttctccagacccagaggccctgaagcctccgtggaacattctggatctgaccctcccagtctcatctcctgaccctcccactcccatctccttacctctggaaccccccaggccctacaatgctcatgtccctgtccccaggcccagccctccttcaggggagttgaggtctttctcctcaggacaaggccttgctcactcactcactccaagaccaccagggtcccaggaagccggtgcctgggtggccatcctacccagcgtggcccaggccgggaagagccacctggcagggctcacactcctgggctctgaacacacacgccagctcctctctgaagcgactctcctgtttggaacggcanaaaaaaaannnnnnnnnnnnnnnnnggtggtggttaaaagggaacacaaaacatttaaataaaactttccaaatatttccgaggac

SEQ ID NO: 77904 - DNA, 1809 bp, Homo Sapiens
  misc_feature (897)..(897): n is a, c, g, or t
  misc_feature (1598)..(1606): n is a, c, g, or t
cgcgggctgcagacggctgcgaggcgctgggcacagcacccagaatgaatcctgtatttaattggctcatatggaaaattttagaaagagagagacagcagggctgagactatcttctgctcaggaaccaaaacgagctgggaggtgtcctgatggcaaatttcaagggccacgcgcttccagggagtttcttcctgatcattgggctgtgttggtcagtgaagtacccgctgaagtactttagccacacgcggaagaacagcccactacattactatcagcgtctcgagatcgtcgaagccgcaattaggactttgttttccgtcactgggatcctggcagagcagtttgttccggatgggccccacctgcacctctaccatgagaaccactggataaagttaatgaattggcagcacagcaccatgtacctattctttgcagtctcaggaattgttgacatgctcacctatctggtcagccacgttcccttgggggtggacagactggttatggctgtggcagtattcatggaaggtttcctcttctactaccacgtccacaaccggcctccgctggaccagcacatccactcactcctgctgtatgctctgttcggagggtgtgtaagtatctccctagaggtgatcttccgggaccacattgtgctggaactttttccgaaccaagtctcatcattcttcagggaacctggttctggcagattgggtttgtgctgttcccaacttttggaacacccgaattgggaccagaaggatgatgccaacctcatgttcatcaccatgtgcttctgctggcactacctggctgccctcagcattgtggccgtcaactattctcttgtttactgccttttgactcggatgaagagacacnggaaggggagaaatcattggaattcagaagctgaattcagatgacacttaccagaccgccctcttgagtggctcagatgaggaatgagccgagatgcggagggcgcagatgtcccactgcacagctggaatgaatggagttcatcccctccacctgaatgcctgctgtggtctgatcttaagggtctatatatttgcacctcctcattcaacacagggctggaggttctacaacaggaaatcaggcctacagcatcctgtgtatcttgcagttgggatttttaaacatactataaagtctgtgttggtatagtacccttcataaggaaaaatgaagtaatgcctataagtagcaggcctttgtgcctcagtgtgaagagaaatcaagagatgctaaaagctttacaatggaagtggcctcatggatgaatccggggtatgagcccaggagaacgtgctgcttttggtaacttatccctttttctcttaagaaagcaggtactttcttattagaaatatgttagaatgtgtaagcaaacgacagtgcctttagaattacaattctaacttacatattttttgaaagtaaaataattcacaagctttggtattttaaaattattgttaaacatatcataactaatcataccagggtactgcaataccactgtttataagtgacaaaattaggccaaaggtgannnnnnnnnaaatcaggaagctggttactggctctactgagagttggagccctgatgttctgattcttcaaagtcaccctaaaagaagatctgacaggaaagctgtataatgagatagaaaaacatcaggtatggaaggctttcagttttaatatggctgaaagcaaaggataacgaattcagaattagtaatgtaaaatcaaaatacccta

SEQ ID NO: 77905 - DNA, 829 bp, Homo Sapiens
agagagagagagtcagtggtcagtgtctgtggatttggggacaggatatattatgatacatggtcccctggttccttctttggagttccttcttcataggcacatcatcagcctatattgacaaacaggtaaagattgttagacaaaaatctacctattgggagaaaaaattttaaaaagatgtgaaagggaaagaataaaagagagtgaacaatcaggcaaagaggagaattaagagaaagacagcaaaagtcaaatgaagcaggctgcatctatcagtccattatactcatttaggggtgtatgtgtgcttctctgaatctgagagagtcagagtcttttaagaaaggaagaattcaagattttgcaatatctattaggtataagaatgtattttttaaaagttaagcaattccaggcaacaacacatatcagatgcatgttgtgggcagagccagggtagcaagcttagggaatcactgcaaagaaaattgtatgtggactttgggtttgtacttgaggcaggtagacaaatatgtatgaaactgtgtttgacatacctaacaaaaatccatcaatgggaatttctcctaccacagcattgcttcattgctgacataaatgggacagaaaggaaatctttttttaaaaaaaattaataactagttaaggctaggatggaataatgtgtggtgctctgccttgttccctgatgacatttccatttttctaaggaagaaatctctattgatttagttttgcctgattataaaagtaatacaaatttctttctcaaaatgcatacaacaaataaaaattgatgaaaatc

SEQ ID NO: 77906 - DNA, 2537 bp, Homo Sapiens
  misc_feature (654)..(664): n is a, c, g, or t
agtagccaggttttaaatgctttaacttttaaaaaatgtaaatttttgtatgtttatagcttctaaatatgaaagttaaagaatgtactgtgatgaaatgttcagtattatgttgcttctcagtatcatgttgcttctcagtattgtgttgcttctgattctatgaatgttcatcttaagaccccttgttgaaatgggacagttggcagcggctctgatgagcccgagaagaggcctgcccttgggtgcggagtctccctccgcacgatgctcccacgcgtccaacttgcacccaaggggcttttccctcttccaagtggactcctccaaggaagctgcagctcggtcagcagagaaggggcctgccgccagcgccctggaggaagaggaagaggaacccaagaggatggcttgtctcccagcagccacaccggctttgtgctcagccagttcatttgagtttgcatgtttctctgcactatggattttgagcatttagatttctttaatcaaaagcgttttagtgactccagtagacattttctttctgaggcatcgtgctttgcatgagagcaggccaaggttgaggggaaaagtaaagttaaagtcggttctctttcatagcaacacgtattgtctgacattcagccagcnnnnnnnnnnnctaataatttctgtgcctttctgtcctgtatttactgtatttagaaaaagcagctagaatatttctccattaactcttgagattcacaggactgtctagctctgagtcctagcaatagactccttagaggagtagtacgtttatctagattttctctagataatgcaggcggaagacctgggttcccgggtggggcattgcagttcttcctgtgtttggcttccaggaattacatgaacgacagccttcgcaccgacgtcttcgtgcggttccagccagagagcatcgcctgtgcctgcatttatcttgctgcccggacgctggagatccctttgcccaatcgtccccattggtttcttttgtttggagcaactgaagaagaaattcaggaaatctgcttaaagatcttgcagctttatgctcggaaaaaggttgatctcacacacctggagggtgaagtggaaaaaagaaagcacgctatcgaagaggcaaaggcccaagcccggggcctgttgcctgggggcacacaggtgctggatggtacctcggggttctctcctgcccccaagctggtggaatcccccaaagaaggtaaagggagcaagccttccccactgtctgtgaagaacaccaagaggaggctggagggcgccaagaaagccaaggcggacagccccgtgaacggcttgccaaaggggcgagagagtcggagtcggagccggagccgtgagcagagctactcgaggtccccatcccgatcagcgtctcctaagaggaggaaaagtgacagcggctccacatctggtgggtccaagtcgcagagccgctcccggagcaggagtgactccccaccgagacaggccccccgcagcgctccctacaaaggctctgagattcggggctcccggaagtccaaggactgcaagtacccccagaagccacacaagtctcggagccggagttcttcccgttctcgaagcaggtcacgggagcgggcggataatccgggaaaatacaagaagaaaagtcattactacagagatcagcgacgagagcgctcgaggtcgtatgaacgcacaggccgtcgctatgagcgggaccaccctgggcacagcaggcatcggaggtgaggcggggttgcagtgactggtggccgcaagcccttccctggggagtacctgatggctgccctttgacccccggtggctgccctttgacccccgggtgtgctctcagcgcaagtggtcctagaacaggattctttttggaaatgtctgtcgactggaccttggtggatttggaaatggaactgagggaccggtgacacgtgcttcagaccggtctggggtgcggcgcacacctgggcccgtgcagggctcagctcggcagcagctctgagggcagctcaatgaaaaagtgaatgcacacgcccttgttggcgtggcctggcatggcctggtgctatcggcagccgctctccactccccgactgatactcaattacgtgaagccaagaaagatgatttttagaacctttgcctatattaggttgtacttatgtacatattttgcagtgtttcacaggagaaagtggccttaactgccccttattctctctccacgttgtaaataaacatgtgtttaatacaagttaaagctatgtatgaaaactcagaacttgaatcccgtcagcttaaaacttgtgtagggaatcctgacttttaaaatgtgagggtatttggatctgtgttgaaagtcgtatatttttatctgtgcggtgctgagtgcaggccaccagctcctaaatagaggttccctatatgcgcgtatgacatggtgaataaacacaactctctccactcaggaaaaaaaa

SEQ ID NO: 77907 - DNA, 1424 bp, Homo Sapiens
  misc_feature (1280)..(1355): n is a, c, g, or t
ggcctgggtggcgaattcggacgagggagaaccctacaatgtggacatgtgggaagggcttcagtcggagctcagatcttaatgtacactgtagaatccacacaggagagaaaccctataaatgcgagaagtgtggtaaggccttcagtcagttctccagccttcaggtgcatcagagagttcacactggagagaaaccatatcagtgtgcagagtgtgggaagggcttcagtgtaggttcacagcttcaagcccatcagaggtgccacactggagagaaaccctatcaatgtgaggagtgtgggaagggcttctgtcgggcctccaattttctggcacatcgtggagtccacacaggagaaaaaccataccgatgtgatgtgtgtggtaagcgcttcagacagagatcctaccttcaagcccaccagagggtccacacaggagagagaccatacaaatgtgaggaatgtgggaaagtcttcagctggagctcataccttcaagcccatcaaagagttcacaccggagaaaaaccatacaaatgtgaggagtgtgggaagggcttcagttggagctcaagtcttatcattcatcagcgagtccatgctgatgatgagggtgacaaggacttcccttcatcagaggattcacacaggaaaactcgataaaatatgttttactatctcagatgggtgctgaaatattttaataatcagagctatcatagacaaaacatttgttttatagagtcagtagttcagccaagtgattgggagacacacagcagagaagcctcacaagagtggagacatatggactgcattcagaacattgaccattagctgatacatgcagacaagaagatcaaggaaggatgagtctgatctggagtaaatcagaagtactaagatggaaatgctgaaatctgtttccactagaatataagatccaagagggcagggactttgttgactgccaaatctactctgccttttcagtgcctaatacgttgtaatttttcagtagtatttgaaattactgtcatatttgaaattcagtaatatttgacatttttatttatctctagaagtttctctaaaattgtactcagaagaattctgcaaggcttggaggatatataagttagtcatatggcctgattttcccatttttgcagatctcgtggacaagtgtttatcaaactgaaggttgcagcttgttagtgggttcagaaatcagtttctggctagcaactagaagttttgtatgttaacagtacnnnnnnnnnnnnnnnnnnnnnnnnnnnnnnnnnnnnnnnnnnnnnnnnnnnnnnnnnnnnnnnnnnnnnnnnnnnnatcatcaccaagatcaatgtatacaatatgtcaattaaaccaaaaagttttcttgtgccaatttccagt

SEQ ID NO: 77908 - DNA, 1948 bp, Homo Sapiens
  misc_feature (1036)..(1037): n is a, c, g, or t
  misc_feature (1042)..(1042): n is a, c, g, or t
ccgcgctgtccagctcctgagaccttgctgtccgccggtctgccgtctgcgcgcctcacgctcctcagccctggaccggggacaagtaaccctcggtgacaagaccaaagtgcactgctgcccacacagttcctacctttctggcttcaattcttcagaagagtttgccgtccttaggggagaacgtgatttttgttatctcagcccactgacttcattgatctctaatcttttttaattccttgggccaactttgttcgtgcccccacactgtagccagaagcccgttggcgagctctggcacctgcaaaccaccccgtggaacgagtgtttcctctggctgagggttggagaggaggtgtggtctcagcaggcggcccgtagcctcacagccaggcctggtggtgaggtcaccatgtccaccaaggtgcccatctatctgaagcgtggcagtcgcaagggcaagaaggagaagcttcgggacctgctgtcctcggacatgatcagcccaccgctgggggacttccgccacaccattcatattggcagtggcggcggcagtgacatgtttggcgacatctccttcctgcagggcaagttccacctcctgccggggaccatggtggaggggcctgaagaagatggcaccttcgacctccccttccagttcacccgcaccgccaccgtgtgtgggcgggagctcccggacggcccatcccctctgctcaagaacgccatctccctcccggtatatcggtggacccccaggctctcacccgagccaacagcccaggctccacccaagccccctcgcctgcacctggagacccctcagccttccccacaggagggagggagtgtggacatctggaggattccagagactggctcccccaacagtggactgaccccggagtcaggggccgaggagcccttcctgtccaatgccagcctccctgctgtccctgcacgtgggacctgggggccttccatccctggatgatgtcctgcagatcatggatcaggacctggacannttttnatccccacataggacacgaggctgcctaggctggggtcccaggtggggcccagccaggaggtggggtgtggacccggccctggcggcggagtcagggtcccaagatcccacctgtatggtcgctggccagtgattctccttctgagccgtgtttcccctctccctccctctccacgtgggcagggcaggccccatcgctttcctctgataaccacatggacacatcctgaagtcagcccaggcgccctgagcatcttggggcacctggaccccatcacaatactccttcttccttcaggtccctgggtgaaggctttgctgaaaccgaccccccttttcacgtcccttctgcctctgccccgttggatgccctgactgggggcaggggaagagacagggcacagctggccacagggctcagccactgagcaggctgttccgggcctttggctttgcatcctggacggggagtgtcctgtcagggaccagatgtgtcctgcctcatccctagctccaatcccttccccacgtgaccggggattctggttgcaataaaacatgctgctgctggtggcggagctccctgtccctttgccccaggtttcctcccggaggcagacagtctcccagagctgagggcttgcctctggagaccccagccccagagggctttgtggaggacaggccttgccctcaagaacgtcgtacctgacgctgagcctgtcatgagaatgcaacaggagcaaaccaagtgttgctgtgacattgattcagatgtttggcaagaggtggctgagcactcgggtgggcttggcactgtgccaagcctggggccaatccctgcccagtcagctggggtctggtgggggacacccaagaataaaagaataaccacaaagtgtgaaa

SEQ ID NO: 77909 - DNA, 1071 bp, Homo Sapiens
ttttttggcagtacaccattgcagcatatactttattattatcatcattattattttccacaacatttaataccaagtttccttctctcacatagaatattacccaatagaagtctccaaaaggggccatagcacattcataacaaagatagaaaagaaaactttcaatgtctgctttccaatatgatgattcaactaaaacaaagctgaatttctcagctatgaaactgaaaaaatgaaaatcagcccatgtgtacatcacggccagccatgatcattaacacctccatgaaatgagggagaaaagagagaaacaactgcttcttcttaccaaacttctatataacttcaaattactttaaaaaaatttcctaaaaggcattctgctgcctttctgaggcatgaacatttgggtgtcttctcaagaccaaccccgggcaagcaggtggcgcctgtgaaatggaaaacattcggaaaacagcagcccctcttcagctccatgtacaggagactttctgatttccaatctgggctcaggtcagaagaaaaaaggggaaaggttacattcctggaagagaaaatcacagcctatttcgagggcatcgcctgactctatcagtccatcgcactagtcctctctggcctcgtagagtcttcagtgccctgaaaccatgatccctcatgcctccatggtcctctgagtgtagttattatgtctgcaaaccagtaatgtcacaagtcaaagggtctggggcttcccagggaaccactatgactgagtatattctgatgtgagaaacctgtgacaagtcttctcagcactcgccttctaatttttggagccgatgcctgggttcccagcatccaggtcacagtagctggaaatcatgcaggaagggcaaaaagccagcagcccagaatggactgtctctgcagctctggcacattctctacacatcgccacaccactcaaatgtcctataaaatatcaaaaccaataacctggacatggccgattaatctgtacaaaaaggctttataaaaatactcccggccgggcgcggtggctca

SEQ ID NO: 77910 - DNA, 978 bp, Homo Sapiens
  misc_feature (22)..(22): n is a, c, g, or t
  misc_feature (34)..(34): n is a, c, g, or t
  misc_feature (38)..(38): n is a, c, g, or t
  misc_feature (45)..(45): n is a, c, g, or t
  misc_feature (48)..(48): n is a, c, g, or t
  misc_feature (50)..(51): n is a, c, g, or t
  misc_feature (55)..(55): n is a, c, g, or t
  misc_feature (61)..(63): n is a, c, g, or t
  misc_feature (76)..(76): n is a, c, g, or t
  misc_feature (78)..(78): n is a, c, g, or t
  misc_feature (82)..(82): n is a, c, g, or t
  misc_feature (86)..(90): n is a, c, g, or t
  misc_feature (101)..(102): n is a, c, g, or t
  misc_feature (110)..(110): n is a, c, g, or t
  misc_feature (112)..(116): n is a, c, g, or t
  misc_feature (119)..(121): n is a, c, g, or t
  misc_feature (128)..(128): n is a, c, g, or t
  misc_feature (132)..(132): n is a, c, g, or t
  misc_feature (140)..(142): n is a, c, g, or t
  misc_feature (146)..(147): n is a, c, g, or t
  misc_feature (151)..(153): n is a, c, g, or t
  misc_feature (157)..(286): n is a, c, g, or t
  misc_feature (290)..(290): n is a, c, g, or t
  misc_feature (297)..(297): n is a, c, g, or t
  misc_feature (301)..(304): n is a, c, g, or t
  misc_feature (306)..(306): n is a, c, g, or t
  misc_feature (309)..(310): n is a, c, g, or t
  misc_feature (324)..(324): n is a, c, g, or t
  misc_feature (329)..(329): n is a, c, g, or t
  misc_feature (333)..(333): n is a, c, g, or t
  misc_feature (335)..(335): n is a, c, g, or t
  misc_feature (338)..(339): n is a, c, g, or t
  misc_feature (347)..(351): n is a, c, g, or t
  misc_feature (359)..(360): n is a, c, g, or t
  misc_feature (363)..(363): n is a, c, g, or t
  misc_feature (365)..(365): n is a, c, g, or t
  misc_feature (367)..(367): n is a, c, g, or t
  misc_feature (380)..(380): n is a, c, g, or t
  misc_feature (386)..(386): n is a, c, g, or t
  misc_feature (388)..(388): n is a, c, g, or t
  misc_feature (390)..(390): n is a, c, g, or t
  misc_feature (392)..(392): n is a, c, g, or t
  misc_feature (414)..(417): n is a, c, g, or t
  misc_feature (419)..(432): n is a, c, g, or t
  misc_feature (436)..(437): n is a, c, g, or t
  misc_feature (439)..(439): n is a, c, g, or t
  misc_feature (442)..(442): n is a, c, g, or t
  misc_feature (444)..(444): n is a, c, g, or t
  misc_feature (446)..(449): n is a, c, g, or t
  misc_feature (455)..(459): n is a, c, g, or t
  misc_feature (467)..(474): n is a, c, g, or t
  misc_feature (476)..(478): n is a, c, g, or t
  misc_feature (482)..(482): n is a, c, g, or t
  misc_feature (484)..(488): n is a, c, g, or t
  misc_feature (490)..(490): n is a, c, g, or t
  misc_feature (492)..(497): n is a, c, g, or t
  misc_feature (499)..(506): n is a, c, g, or t
  misc_feature (508)..(523): n is a, c, g, or t
  misc_feature (525)..(531): n is a, c, g, or t
  misc_feature (533)..(534): n is a, c, g, or t
  misc_feature (536)..(540): n is a, c, g, or t
  misc_feature (542)..(556): n is a, c, g, or t
  misc_feature (560)..(560): n is a, c, g, or t
cgcgggcccccggccgggggcngcgggcggcggngggncgcgggngcngnngggnggcggnnnggccgccgggggncngggncccnnnnnggcgcgccggnnggcccggncnnnnnggnnngcgggcngggngcccgggnnngggnnccgnnncccnnnnnnnnnnnnnnnnnnnnnnnnnnnnnnnnnnnnnnnnnnnnnnnnnnnnnnnnnnnnnnnnnnnnnnnnnnnnnnnnnnnnnnnnnnnnnnnnnnnnnnnnnnnnnnnnnnnnnnnnnnnnnnnnnncggncggggcngcgnnnncnggnngcgggcccggggcnccggnccgngnccnnggcgggcnnnnncgggcgcnnggncncnccgggcgcgggcncgcgcncngncnccccgggccccccgggccccgnnnngnnnnnnnnnnnnnngggnngnggngngnnnngggggnnnnngccgccgnnnnnnnngnnngggngnnnnngngnnnnnngnnnnnnnngnnnnnnnnnnnnnnnngnnnnnnngnngnnnnngnnnnnnnnnnnnnnncacncaccccaccccacccccacccagcctccagaagctggaaccatttctcccgcaggcctgagttcctaaggaaaccaccctaccggggtggaagggagggtcagggaagaaacccactcttgctctacgaggagcaagtgcctgccccctcccagcagccagccctgccaaagttgcattatctttggccaaggctgggcctgacggttatgatttcagccctgggcctgcaggagaggctgagaccagcccacccagccagtggtcgagcactgccccgccgccaaagtctgcagaatgtgagatgaggttctcaaggtcacaggccccagtcccagcctgggggctggcagaggcccccatatactctgctacagctcctatcatgaaaaataaaatgtttgtctttgcaaaacagt

SEQ ID NO: 77911 - DNA, 3097 bp, Homo Sapiens
  misc_feature (1259)..(1259): n is a, c, g, or t
  misc_feature (1349)..(1349): n is a, c, g, or t
  misc_feature (1404)..(1404): n is a, c, g, or t
tgcgcgggcactcagtgagcccgcgtgccattgtggtgctggtgcggccctagccctggctgcggagctgctgcgcgagcggtgggctggctgaccccgagggacccccatgcgcagcggtgtgcgtgcgatagatccttggagtgagacggcctggactggctgctgtggctgcctggctgatgggacgatgccctgcgtgcttgcagggcttgtgactccactgactgtagatcctagtgctgtgccatgctgcaggagcctgcagtggcccaggattcaccagcaggattgacaagtgagcttgcagattgcggacgtggctgctgagaacctctacagagccaccagctaacaaccgggtgagagagacggtcgccctggaggcttgagctacgtcaactccgaaccttgcagcttgctgacagtgaggagctggaggagctcagcggtggcgtggaccctggccggcatgggagcgaagctgtcactgtccccatgatccccctggtgccttgaaggagaccaaggagctggactggtctacaccgctgaaggagctgatctcagtgcactttggagaggacggcgcctcctacgaggcagaaatcagggagctggaggccctgcggcaggccatgcggacccccagccggaatgagtcgggcctggagctgctcacagcctattacaaccagctgtgcttcctggatgcgcgcttcctcacccctgccaggagcctcgggctcttcttccactggtacgactcgcttactggggtcccggcccagcagcgtgccctggccttcgagaagggcagcgttctcttcaacatcggtgccctccacacgcagattggggcgcgccaggaccgctcctgcaccgagggtgcccgccgcgctatggaggccttccagaaggccgctggggccttcagcctccctgagggagaacttctcccatgcgccgaagcccagacatgaacgctgcgtccctctgcgcactggagcagctcatgatggcccaggcccaagaatgtgtgtttgagggcctctcaccacctgcctccatggccccccaagactgcctggcccagctgcgcctggcgcaggaggccgcccaggtgagctcgggcacccgtgtcaggatgcagggggtggggccgagctggggtcagagcccaggtccaggcatgcgtgagctctcccgcctccttccttgtgtgtcagccccgagccagctgttgtcctgctccctgngggggctggtcaggaacctggggacccgagcctctgcctccaggggatggcacaaagcagcaggaactgaggtgccagggaggctgctgnggatggtggtcggagcaggtggaggctgggtagggagaagcaggcaccacctggnagagtgggagggccctcgcgtgcctgccacatccaccggcaggtggcagccgagtacaggctagtgcaccggaccatggcccagccacccgtccacgactacgtgcctgtctcctggactgccctggtgcatgtcaaggcccgagtacttcccgctccctgggcccactaccaccgtagccatggcccttctgcgacggctccccgaccgagggagagctcacccacgcacgagcaggtcttcctgcagccccccacctcctctaagccccgaggccctgtgctgccgcaggagctggaggagcgcaggcagcttggtaaggcgcccatgggtggagtgccctggggctcagatggtcaccaacggtggcagggtgtcccccaccaccctcatgctgtttgccacctgctgtccccgtgctgacgagttgggccacctacctatccctggatggcctgtgcctgatgggtgacggcccagcgcaggggccccaggagtgctgggcagcctctgagcaggtgggagaccactgggagcagctcatccctggcccctgctttgcacgtggcagagccctcctgcacagccagctcctcacccccgtggcgcgcacccccaaagaaagtggctgtgatgagccccacagccctggcgttgcccactccttctgccacgtcccaggcccacgggcccacattggtgtgtgacatcacagtgccccgcgttgcaggcaagggcacacctggaagcgtgccatcctggggcaggaggaggcgctgcggctgcacgccctgtgccgcgtcctgcgcgaggtggacctgcttcgggctgtgatctcccagacgctgcagcgctcactggccaagtatgcggagctcgaccgtgaggatgacttctgtgaggctgccgaggccccggacatccagcctaagacccaccagaagccagaggccaggatgccacgcctgtcccagggaaggggcctgacatcttccatcggctggggcccctgtctgtgtctcagccaagaaccggtggcggctggtggggcccgtccacctgacccgaggagagggcggctttggcctcacgcttcggggagactcgcctgtcctcatcgctgccgtcattccagggagccaggccgcggcggctggcctgaaggagggcgactacattgtgtcagtgaatgggcagccatgcaggtggtggagacacgcggaggtggtgacggagctgaaggctgcgggagaggcgggcgccagcctgcaggtggtgtcgctgctgcccagctctagactgcccagcttgggggaccgccggcccgtcctgctgggccccagggggcttctaaggagccagagggagcatggttgcaagaccccggcatccacgtgggccagtccccggcccctcctcaactggagccgaaaggcccagcagggcaagactggaggctgcccccagccctgtgccccagtgaagccagctccgccctcatccttgaagcacccagggtggccgtgagggccaggatccctgcacgcctcagccctggctccagctggcagcaagcaccgagcatgccctccccacccagaggacctccgggcaatgcctgtcccgcctcatgctggaggctgcctcgggcacctgcctgcccattaaagactggtcagacctgtctgagccc

SEQ ID NO: 77912 - DNA, 905 bp, Homo Sapiens
  misc_feature (808)..(838): n is a, c, g, or t
gaaacccgcttccagtagtaatcccatggatggcatggacaataggacagttggggaaagtatgagacaccctcctgaacagacaaatggtgtgcataccccacctcacgtggccagtgcccttgcaggggccgtctccccaggtgccctgcgtcggagtctggaagccatcaaagcgatgtcctccaaaggcccctcggcctctgcagcactaagtcctcctcttgggtcttctccaggctctcctgggagccagagtttgagcagtggagaaacagtgcccatccctcgcccagggcctgcccaaggagatggacattccttacctcccattgctcgccgcatgggccaccaccctccacagtccctaaatgttggcaaacccctataccagagtatgaactgcaagcccatgcagatgtacgtgctggacattaaagacaccaaggagaaggggcgggtcaaatggaaagtatttaatagcagttctgtggttggacctcctgaaaccagcctgcataccgtggtacaaggcaggggtgaactcatcatatttggaggactcatggacaagaaacagaatgtgaagtactatccaaaaacaaacgccttgtactttgtacgagcaaagagataatgtgttctaaacccctttccttttctgtggcttttaatttggaattttccagtgtgtaagcatttggactgagaattgggaaaacaaaattactcccagaagccaaaactctttaattcccaaccgaagtcactccaggctgggatcaaatctccattaagaaaaaaaatnnnnnnnnnnnnnnnnnnnnnnnnnnnnnnngccaactctgttgacaaaaaaagggagagatttccatcctggttcagataaagttgttgctgtgttt

SEQ ID NO: 77913 - DNA, 1882 bp, Homo Sapiens
  misc_feature (1390)..(1513): n is a, c, g, or t
  misc_feature (1522)..(1560): n is a, c, g, or t
  misc_feature (1573)..(1654): n is a, c, g, or t
  misc_feature (1661)..(1720): n is a, c, g, or t
  misc_feature (1755)..(1764): n is a, c, g, or t
cccccaacttttttgatgtaagagttcagtttgtcttcgggagtgggtctctgcaagggctctgggatgagtcttggcttccaagaggacaggctattaggttcttggacttttttctgtgctaccgctgctgcttggtggaagtaacaggacgtggattctgcctcataagtggcagtttcccttttctctctgacttgtcctaggccgatttctctatggcttccctgagaaaggtgaggcccaaaggagagaggccttcaaactgtcccaggtcctgcgcagctcagtgcgtatcttcttgcttccatgtgtcttttcccctgctgcctcactccccacccccacttgccaggtgtttgagccatttctacaccaaagcaaagtacggcctcaggagggagtaaaaagggtgccatctgtgtctggaggggcagctgtgttcatgccctgtgctactggacatttcacaattctggcaccttgcgattggtcagtcaacctcagaaagtaactatcttgaaggtttgaaaaacaaccaaagaaagggagtgaggactatggctgcatgtcctctgcttgcccggctgcagagcagagatgtgcagccctctggtcagctggtccaggctggtccccgccggtccccttccagtccagccaccaagagtccacttgtcccgggcttccacctggctgacaggaagaatttctgagagctggatgtgcatgccctgtggacgaaggtacagctcgcctgcctgccccaatcccagccccgacaatcacatgcagctgactcggacactggccttgggaacaatgttcgagagaacacttgccccttgactgtaggagccagaaggggacccaggtgtgcatagctctctgtagacatttttacccaaacctgttggtaaagtgcccatctggtgctcaagagagcctgggggtctaacagggagcccggctgcctcacctggccacagcctccacaccagatctccacattgtcttgatccagaccagctctgtgatcagaaggaaattgggtccagtgtaggagcgagctggtcctgggcctggcaggcaagagtgtgggcatcctttcctggcctttctccactctccctcaagcctgtgctcaggttgccttgaatgtggactctggaagagccaggggcccagaatgccgggggaggcttctgggtggcactcatggaacaccgtccctctgccagccataggccctgcctccagtgtcagggaatggaggctgggctgcgagagtgttgctgccccctgtgtcattcttctaatccaatgtagaaattgtacgtaatgtatttaaatcaacgcaaatgtatgaataacaaatacagttctgacnnnnnnnnnnnnnnnnnnnnnnnnnnnnnnnnnnnnnnnnnnnnnnnnnnnnnnnnnnnnnnnnnnnnnnnnnnnnnnnnnnnnnnnnnnnnnnnnnnnnnnnnnnnnnnnnnnnnnnnnnnnnttttgcggnnnnnnnnnnnnnnnnnnnnnnnnnnnnnnnnnnnnnnnggggccggggccnnnnnnnnnnnnnnnnnnnnnnnnnnnnnnnnnnnnnnnnnnnnnnnnnnnnnnnnnnnnnnnnnnnnnnnnnnnnnnnnnncccccgnnnnnnnnnnnnnnnnnnnnnnnnnnnnnnnnnnnnnnnnnnnnnnnnnnnnnnnnnnnncaaaggggatccaaggggattccaaattaaattannnnnnnnnntggccttttttgggaaagggggggaatttattaagacttcgggcgaagtggaaacccctccaaacgggtgtgaaaaacctgaatacccccggggattacaacccctgggccgccttgg

SEQ ID NO: 77914 - DNA, 968 bp, Homo Sapiens
catggaagcaactcacggagaacctgcagcttgtgcggcagaggaatccgcaggagctgggggtattcgcgccgacccctgattctgtggatgtggagaaaatcaaagtcaagttcatgaccatgcagaagatgtattcgccagaaaagaaggtcatgctgctcctgcgggtctgcaagctcatttacacggtcatggagaacaactcagggaggatgtatggcgctgatgacttcttgccagtcctgacctatgtcatagcccagtgtgacatgcttgaattggacactgaaatcgagtacatgatggagctcctagacccatcgctgttacatggagaaggaggctattacttgacaagcgcatatggagcactttctctgataaagaatttccaagaagaacaagcagcgcgactgctcagctcagaaaccagagacaccctgaggcagtggcacaaacggagaaccaccaaccggaccatcccctctgtggacgacttccagaattacctccgagttgcatttcaggaggtcaacagtggttgcacaggaaagaccctccttgtgagaccttacatcaccactgaggatgtgtgtcagatctgcgctgagaagttcaaggtgggggaccctgaggagtacagcctctttctcttcgttgacgagacatggcagcagctggcagaggacacttaccctcaaaaaatcaaggcggacctgcacagccgaccacagccccacatcttccactttgtctacaaacgcatcaagaacgatccttatggcatcattttccagaacggggaagaagacctcaccacctcctagaagacaggcgggacttcccagtggtgcatccaaaggggagctgaagccttgccttcccgcttctacatgcttgagcttgaaaagcagtcacctcctcgggacccctcagtgtagtacgttcctcatccaaggatcctc

SEQ ID NO: 77915 - DNA, 1501 bp, Homo Sapiens
atttgctcgacttggacgaggagcttcgctgcagcttggctacctccgtgaggaccaattcgggggccttgggggccaggatttggcgggtggggaggagcgaccccgccggccccgacttctctgaggcgactcagggcggcaggcctcgcgccgcgccgggtgaggcccagaaggaggcagcctcaccgccccgcccccaggccactgtgggctccgccgctgctggcctggggtttgctttctttaaaatcctcagaaagtagaaaacaccctgtccccgccggcgtctaggaccgtgggaaatttccgagcctttctccgttttctagagccccgagtgcgaacttccccagaacagatcgatcacagggtgatagggaagccccggccggggtcgcactcgctcccatcctagagtttttcctttgggacacctcgtcgcagaagttcctgcaaaagccgcactgttttatgcatggaagggaggcaggcagggacggcctttcttcccgagggccaagatgggtcgccgagctcaacaggagtcagcgcaggccgagaatcacctcaatggcaagaattcctctttgactctgactggagagacttcctctgctaaattacctcgctgccgacagggaggctgggcaggtgattccgtgaaggcttcgaagtttaggaggaaggcttctgaagaaatagaagatttccgcctcagaccacagagcctgaatggatcagattatggaggagatattcctatcattccggatctggaggaagtacaggaagaagactttgttttgcaggtggcagcccctcccaggtaggttaaatcagatatgattggggagacaaagaacacgtgaattaatacactccagatatcatctatagtggaccttgatgtcaatctggatctttctggtgttgggctccatccagggttcccattttgttattcccattctggtcatcccctgctgtatacaaggttctggggacggtggcccggcagcactcctggaacaggtcctgcctggggttcccgcctctcgctctctctttccttcagcatccagataaagcgggtgatgacctaccgtgacctggacaatgacctcatgaagtactcagccattcagacactggatggggagatcgacctgaaactcctcaccaaagtgctcgcgccggagcacgaagtccgggaggatgatgtcggctgggactgggaccatctgttcactgaggtgtcctcagaggtcctcactgagtgggacccactgcagacggagaaggaggaccctgcggggcaggccaggcacacctgagcccgtcacccatgctctagacatgaagaaatgcaatgagcttaaagctaaagaagcttgtaagcagctccgaatttttacctggaatattttgtaataaaaatatttatattcagtcaaccacattggataattcaattgcaataaattgcttattctgtgcc

SEQ ID NO: 77916 - DNA, 1197 bp, Homo Sapiens
  misc_feature (101)..(101): n is a, c, g, or t
  misc_feature (135)..(135): n is a, c, g, or t
  misc_feature (143)..(143): n is a, c, g, or t
  misc_feature (158)..(158): n is a, c, g, or t
ggtccgatggagcgcgtggccaccatattgatgccattcttgcccccgcttcattttctcgctgttgttgttgatttggcgatacattcacccaggacagnttgacagatacgatttatacgctcatttaggatnttgccctngagccaagaatcgcnacgaggcgagatggaggattgctcgacttggacgaggagcttcgctacagcttggctacctccagggccaagatgggtcgccgagctcaacaggagtcagcgcaggccgagaatcacctcaatggcaagaattcctctttgactctgactggagagacttcctctgctaaattacctcgctgccgacagggaggctgggcaggtgattccgtgaaggcttcgaagtttaggaggaaggcttctgaagaaatagaagatttccgcctcagaccacagagcctgaatggatcagattatggaggagatattcctatcattccggatctggaggaagtacaggaagaagactttgttttgcaggtggcagcccctcccagcatccagataaagcgggtgatgacctaccgtgacctggacaatgacctcatgaagtactcagccattcagacactggatggggagatcgacctgaaactcctcaccaaagtgctcgcgccggagcacgaagtccgggaggatgatgtcggctgggactgggaccatctgttcactgaggtgtcctcagaggtcctcactgagtgggacccactgcagacggagaaggaggaccctgcggggcaggccaggcacacctgagcccgtcacccatgctctagacatgaagaaatgcaatgagcttaaagctaaagaagcttgtaagcagctccgaatttttacctggaatattttgtaataaaaatatttatattcagtcaaccacattggataattcaattgcaataaattgcttattctgtgccatcactgagtgggacccactgcagacggagaaggaggaccctgcggggcaggccaggcacacctgagcccgtcacccatgctctagacatgaagaaatgcaatgagcttaaagctaaagaagcttgtaagcagctccgaatttttacctggaatattttgtaataaaaatatttatattcagtcaaccacattggataattcaattgcaataaattgcttattctgtgccatctcctcc

SEQ ID NO: 77917 - DNA, 737 bp, Homo Sapiens
  misc_feature (20)..(20): n is a, c, g, or t
  misc_feature (43)..(43): n is a, c, g, or t
  misc_feature (81)..(81): n is a, c, g, or t
ggaagcctgctgtggaggcntatggagagtttctctgcatgtntgaggaaaatatcccgaaacactgaagcgtctttttgntgtaaagccccccaaactgtttcctgtggcctataacctcatcaaacccttcctgagtgaggacactcgtaagaagatcatggtcctgggagcaaattggaaggaggttttactgaaacatatcagccctgaccaggtgcctgtggagtatgggggcaccatgactgaccctgatggaaaccccaagtgcaaatccaagatcaactacgggggtgacatccccaggaagtattatgtgcgagaccaggtgaaacagcagtatgaacacagcgtgcagatttcccgtggctcctcccaccaagtggagtatgagatcctcttccctggctgtgtcctcaggtggcagtttatgtcagatggagcggatgttggttttgggattttcctgaagaccaagatgggagagaggcagcgggcaggggagatgacaaaggtgctgcccaaccagaggtacaactcccacctggtccctgaagatgggaccctcacctgcagtgatcctggcatctatgtcctgcggtttgacaacacctacagcttcattcatgccaagaaggtcaatttcactgtggaggtcctgcttccagacaaagcctcagaaaagaagatgaaacagctgggggcaggcaccccgaaataacaccttctcctatagc

SEQ ID NO: 77918 - DNA, 1073 bp, Homo Sapiens
  misc_feature (18)..(18): n is a, c, g, or t
  misc_feature (517)..(567): n is a, c, g, or t
  misc_feature (593)..(640): n is a, c, g, or t
  misc_feature (811)..(964): n is a, c, g, or t
aaaaatataaggtgttcntgagagagcataacaaaggatcctggttttaactggggcctaatggaagacctctattaggaaataacatttaaactaagaccagacagacctgtagaaattagcaaagcaaagggagggaggaaaaagcagctttcctggcaaaggaacaatttgtgtgaaggccctgagacagggaagggctggggttctgaccaccctccaagtggtgcaatggaatatagtgagagagggagaagacatgagaacttggatactatgcaaaggatttggtattttaattcaagagcagtatgatgctactgaggagcagctggacaattgtgtgatccaattaaaattttaggaagatgaacctcgctattgtggagaatgcatacacaagggttctgttggttcatgaagaggtcttaagaaaactatgagctgggtgcagtagctcaggcctgtagtcccatctacttagaagtctgaggcgggaggatcccttgagcccaannnnnnnnnnnnnnnnnnnnnnnnnnnnnnnnnnnnnnnnnnnnnnnnnnnatgacagagcgagatcctgcctcagnnnnnnnnnnnnnnnnnnnnnnnnnnnnnnnnnnnnnnnnnnnnnnnntctcagaaaactacaggccttattatcaagaaaatgacaggccttattattgagaaaactacttacatttttaaaagctgattttcaaaaaccagattgtgaattaagtgatgctgaataggggaaaaaaagactgataaaccagtgtatctctgaataacccactagatnnnnnnnnnnnnnnnnnnnnnnnnnnnnnnnnnnnnnnnnnnnnnnnnnnnnnnnnnnnnnnnnnnnnnnnnnnnnnnnnnnnnnnnnnnnnnnnnnnnnnnnnnnnnnnnnnnnnnnnnnnnnnnnnnnnnnnnnnnnnnnnnnnnnnnnnnnagtgattgggctatactctttattctaaattctaaatgtattctatcttctaatgcctatcagccctcttgctggtctggctaattatcaaacctgagcaggcggccgc

SEQ ID NO: 77919 - DNA, 715 bp, Homo Sapiens
cggcaactgcttcggatggtgggggatgcagctgctggcatggagtacctggagagcaagtgctgcatccaccgggacctggccgctcggaactgcctggtgacagagaagaatgtcctgaagatcagtgactttgggatgtcccgagaggaagccgatggggtctatgcagcctcagggggcctcagacaagtccccgtgaagtggaccgcacctgaggcccttaactacggccgctactcctccgaaagcgacgtgtggagctttggcatcttgctctgggagaccttcagcctgggggcctccccctatcccaacctcagcaatcagcagacacgggagtttgtggagaaggggggccgtctgccctgcccagagctgtgtcctgatgccgtgttcaggctcatggagcagtgctgggcctatgagcctgggcagcggcccagcttcagcaccatctaccaggagctgcagagcatccgaaagcggcatcggtgaggctgggacccccttctcaagctggtggcctctgcaggcctaggtgcagctcctcagcggctccagctcatatgctgacagctcttcacagtcctggactcctgccaccagcatccacactgccggcaggatgcagcgccgtgtcctctctgtgtccctgctgctgccagggcttcctcttccgggcagaaacaataaaaccacttgtgcccacgtg

SEQ ID NO: 77920 - DNA, 1205 bp, Homo Sapiens
  misc_feature (1131)..(1141): n is a, c, g, or t
cagtcgacggtaccggacatatgcccgggaattcggccattacggccgggggttggagaaaggagagaaaggaaagcgcgaggagccgccgccaccaccagcgcagcagtcctggagctgtgaggagattcgggccgtcaccctgcctcccctgcgtcccgccaccggccgcttctgtcctcggacccattccaacaatctcgtaaaacatggtggattactatgaagttctaggcgtgcagagacatgcctcacccgaggatattaaaaaggcatatcggaaactggcactgaagtggcatccagataaaaatcctgagaataaagaagaagcagagagaaaattcaagcaagtagcggaggcatatgaagtgctgtcggatgctaagaaacgggacatctatgacaaatatggcaaagaaggattaaatggtggaggaggaggtggaagtcattttgacagtccatttgaatttggcttcacattccgtaacccagatgatgtcttcagggaattttttggtggaagggacccattttcatttgacttctttgaagacccttttgaggacttctttgggaatcgaaggggtccccgaggaagcagaagccgagggacggggtcgtttttctctgcgttcagtggatttccgtcttttggaagtggattttcttcttttgatacaggatttacttcatttgggtcactaggtcacgggggcctcacttcattctcttccacgtcatttggtggtagtggcatgggcaacttcaaatcgatatcaacttcaactaaaatggttaatggcagaaaaatcactacaaagagaattgtcgagaacggtcaagaaagagtagaagttgaagaagatggccagttaaagtccttaacaataaatggtaaggagcagctgctgcgcttggataacaagtaattcaacgcacgcacttaacagaaatgttaaactataacaagcaccatttgaggattaacaggaacatttttttgaagatttcaaacgaactcgactttcagtataattgtacctaaagtatttataaacagctcatcggagcctctatttgtcatagacttttgagttgattgttgggaccacataataggaccannnnnnnnnnngtctttaaaattgttgtaaatctctgtatgcactttgcttttttattaaacgtactccaaggtg

SEQ ID NO: 77921 - DNA, 551 bp, Homo Sapiens
taaaaagcgtcttggatggaggtggtgcaggtgctcaccaagcccgcaggtaacccaagttgcatgtatccccagggcacttttgtgattcccctgcttgtgactgcacaccgggaccccactcaattcaaagacccagactgcttcaaccctaccaacttcctggacaagggcaagttccaggacaatgatgctttcatgccctttgcctcaggtgcaggcagaggaggaaggggaccagcctggactggctctggggtacctggtgctcactgtgcacctgtgtacccggcaaagcagatgtgcctgggcacaggcctggcccactcgggtatcttcctattccttacggccaccttacagaggttctgcctgctccctgtggtacgccctggcaccatcaacctcacctgcagtgcactggcctgggcagtgtccccccagacttccagctccagccagtggcctgctgaggtcaggctccactatggtgggctcactggccctcaaacctccataccctcctcggtcaataaaggccctaaattgca

SEQ ID NO: 77922 - DNA, 278 bp, Homo Sapiens
gaaatgttccaggtctgtgaaatgtcaaatctgacaacagcttgacaaaaattaatcaagagaacaacttgacttaatggagagtgcacagtgttttttggctcagaacagtggctctccaagtgtggtactctaaaccaatagcatcagcactaactgggaacttgttagaatgcaaattctcaggctctatctcaggtctactgaactagacactggggggtacagcccagcaatccgtatttttaaaaagcccagccaggcatggtggctcacac

SEQ ID NO: 77923 - DNA, 1090 bp, Homo Sapiens
  misc_feature (917)..(995): n is a, c, g, or t
ttggctagtcgaggctggtgtgaatcggcgaggggcgcgagctgcgtggggggcgcgagggggaggcccccgctgagatgggggcgctgctgctggagaaggaaaccagaggagccaccgagagagttcatggctctttgggggacacccctcgtagtgaagaaaccctgcccaaggccaaccccgactccctggagcctgctggcccctcatctccagcctctgtcactgtcactgttggtgatgagggggctgacacccctgtaggggctacaccactcattggggatgaatctgagaatcttgagggagatggggacctccgtgggggccggatcctgctgggccatgccacaaagtcattcccctcttcccccagcaaggggggttcctgtcctagccgggccaagatgtcaatgacaggggcgggaaaatcacctccatctgtccagagtttggctatgaggctactgagtatgccaggagcccagggagctgcagcagcagggtctgaaccccctccagccaccacgagcccagagggacagcccaaggtccaccgagcccgcaaaaccatgtccaaaccaggaaatggacagcccccggtccctgagaagcggccccctgaaatacagcatttccgcatgagtgatgatgtccactcactgggaaaggtgacctcagatctggccaaaaggaggaagctgaactcaggaggtggcctgtcggaggagttaggttctgcccggcgttcaggagaagtgaccctgacgaaaggggaccccgggtccctggaggagtgggagacggtggtgggtgatgacttcagtctctactatgattcctactctgtggatgagcgcgtggactccgacagcaagtctgaagttgaagctctaactgaacaactaagtgannnnnnnnnnnnnnnnnnnnnnnnnnnnnnnnnnnnnnnnnnnnnnnnnnnnnnnnnnnnnnnnnnnnnnnnnnnnnnntcagggaatcagtcagataggagtggttccagtggccggcgcaaggccaagaagaaatggcgaaaagacagaccatgggtgaagccgtctcggaa

SEQ ID NO: 77924 - DNA, 3191 bp, Homo Sapiens
  misc_feature (126)..(206): n is a, c, g, or t
tcggcacgagggggagaccggtggtgggtgatgacttcagtctctactatgattcctactctgtggatgagcgcgtggactccgacagcaagtctgaagttgaagctctaactgaacaactaagtnnnnnnnnnnnnnnnnnnnnnnnnnnnnnnnnnnnnnnnnnnnnnnnnnnnnnnnnnnnnnnnnnnnnnnnnnnnnnnnnntcagggaatcagtcagataggagtggttccagtggccggcgcaaggccaagaagaaatggcgaaaagacagcccatgggtgaagccgtctcggaaacggcgcaagcgggagcctccgcgggccaaggagccacgaggagtgaatggtgtgggctcctcaggccccagtgagtacatggaggtccctctggggtccctggagctgcccagcgaggggaccctctcccccaaccacgctggggtgtccaatgacacatcttcgctggagacagagcgagggtttgaggagttgcccctgtgcagctgccgcatggaggcacccaagattgaccgcatcagcgagagggcggggcacaagtgcatggccactgagagtgtggacggagagctgtcaggctgcaatgccgccatcctcaagcgggagaccatgaggccatccagccgtgtggccctgatggtgctctgtgagacccaccgcgcccgcatggtcaaacaccactgctgcccgggctgcggctacttctgcacggcgggcaccttcctggagtgccaccctgacttccgtgtggcccaccgcttccacaaggcctgtgtgtctcagctgaatgggatggtcttctgtccccactgtggggaggatgcttctgaagctcaagaggtgaccatcccccggggtgacggggtgaccccaccggccggcactgcagctcctgcacccccagccctgtaccaggatgtccccgggagagcagacacttctcagccagtgcccggatgcgagggcatggggaaccccggcgcccgccctgcgatcccctggctgacaccattgacagctcagggccctccctgaccctgcccaatgggggctgcctttcagccgtggggctgccactggggccaggccgggaggccctggaaaaggccctggtcatccaggagtcagagaggcggaagaagctccgtttccaccctcggcagttgtacctgtccgtgaagcagggcgagctgcagaaggtgatcctgatgctgttggacaacctggaccccaacttccagagcgaccagcagagcaagcgcacgcccctgcatgcagccgcccagaagggctccgtggagatctgccatgtgctgctgcaggctggagccaacataaatgcagtggacaaacagcagcggacgccactgatggaggccgtggtgaacaaccacctggaggtagcccgttacatggtgcagcgtggtggctgtgtctatagcaaggaggaggacggttccacctgcctccaccacgcagccaaaatcgggaacttggagatggtcagcctgctgctgagcacaggacaggtggacgtcaacgcccaggacagtggggggtggacgcccatcatctgggctgcagagcacaagcacatcgaggtgatccgcatgctactgacgcggggcgccgacgtcaccctcactgacaacgaggagaacatctgcctgcactgggcctccttcacgggcagcgccgccatcgccgaagtcccttctgaatgcgcgctgtgacctcccatgctgtcaactaccatgggggacacccccctgcacatcgcagctcgggagagctaccatgactgcgtgctgttattcctgtcacgtggggccaaccctgagctgcggaacaaagagggggacacagcatgggacctgactcccgagcgctccgacgtgtggtttgcgcttcaactcaaccgcaagctccgacttggggtgggaaatcgggccatccgcacagagaagatcatctgcccgggacgtggctcggggctatgagaacgtgcccattccctgtgtcaacggtgtggatggggagccctgccctgaggattacaagtacatctcagagaactgcgagacgtccaccatgaacatcgatcgcaacatcacccacctgcagcactgcacgtgtgtggacgactgctctagctccaactgcctgtgcggccagctcagcatccggtgctggtatgacaaggatgggcgattgctccaggaatttaacaagattgagcctccgctgattttcgagtgtaaccaggcgtgctcatgctggagaaactgcaagaaccgggtcgtacagagtggcatcaaggtgcggctacagctctaccgaacagccaagatgggctggggggtccgcgccctgcagaccatcccacaggggaccttcatctgcgagtatgtcggggagctgatctctgatgctgaggctgatgtgagagaggatgattcttacctcttcgacttagacaacaaggatggagaggtgtactgcatagatgcccgttactatggcaacatcagccgcttcatcaaccacctgtgtgaccccaacatcattcccgtccgggtcttcatgctgcaccaagacctgcgatttccacgcatcgccttcttcagttcccgagacatccggactggggaggagctagggtttgactatggcgaccgcttctgggacatcaaaagcaaatatttcacctgccaatgtggctctgagaagtgcaagcactcagccgaagccattgccctggagcagagccgtctggcccgcctggacccacaccctgagctgctgcccgagctcggctccctgccccctgtcaacacatgagaacggaccacaccctctctccccagcatggatggccacagctcagccgcctcctctgccaccagctgctcgcagcccatgcctgggggtgctgccatcttctctccccaccaccctttcacacattcctgaccagagatcccagccaggccctggaggtctgacagcccctccctcccagagctggttcctccctgggagggcaacttcagggctggccaccccccgtgttccccatcctcagttgaagtttgatgaattgaagtcgggcctctatgccaactggttccttttgttctcaataaatgttgggtttggtaataaaaa

SEQ ID NO: 77925 - DNA, 837 bp, Homo Sapiens
  misc_feature (721)..(730): n is a, c, g, or t
tactcaggaaatgaaaacaaatgatggtcatgttgcagttttttccttgaaggacaaccgaaccatagcctctaaagttcaagtgcactgaggtgtcggaacgctgaaagcatgaggaaacgaggacgtagggtgtgactgaatggtggctagattagtgggagcagttcacctggatgaagattgagagcatcgtctttgagaagtgaaagactagcaagaataaaataaattaagtccagtgtttgagccaaggttgccacctgtctcttaacatctcactgaacataagtcctgaggtattaggacgaccatactgcctctgagctgaaaacattcaaaagttcacatccctgtttgggggataccattcaccgccttcagcccagatgatactttcctttaaatctgtgtctctgtgtgtataacaaagaggaagatggaaacaatgttcatggaaactgatgttgagccccttgtcccaccactcccgccatctgctgcaggcaggaaggcatgtgagtgtacgttttcttccaggagacatcaggtccccctggattcaaattaagtgcaatattttgcaaacagctcttcttagggaaatctcctgaaggaaaaaaatgtgacagaatgttccatagtctgagagaatggaatcgttgagcatttagtacaagtccagtgtgtgtgagcgggacttaggcagctcaagcttgcnnnnnnnnnnaagcgtacaattgagtggttttaggaaattcacaaacttttttaaccatccccaccttctaaatcccggactcacgcttttttaaacaataaatgtcatttcatgaa

SEQ ID NO: 77926 - DNA, 704 bp, Homo Sapiens
aaaaccttcatgctcaggaacaataaaaagcatctgagaatcatactcaggagtcttcctatgtatgtgatgagtgtgaaaaccttgactagcaaaagaaatcttcatcagcatcaaagaatccatactggagagaaaacccaatgagtgtagcaagtatgagaaggcctttgggacttcttcccagctaggtcaccttgagcatgtctactctggagagaagcctgtgctggacatttgtcgttttggcctcccagaattttttacccccttttactggtaatagtacactccagtgaaatgtactgagtggattccgtcttctactcaggaatggaatgtgtgacacaggcctgactcagcctctgatccatccctcaagccacagttaatgattcagatgtcagtagatgaccaaagatggttcaattagagtcccaggattgcaagagctaataggaacaaatactctccccccgcccacccccattggttttaatgctgagaagaagaactagactcttacagaggtgagaatgaagtccacacagcaaaaatgcatctgagaattggagagcagtaaaagactgaagataatgtttgaacagccacatacaccatgcctgaagctaaaaatatatacgggtttttgaattgcagcagccaataaattccatttttgtttggttggttttggctttggc

SEQ ID NO: 77927 - DNA, 776 bp, Homo Sapiens
  misc_feature (26)..(26): n is a, c, g, or t
cgaggtggagttcaagatctgaaagngaaagtcacgtacccagggccacataactgttaggttagaaaccctgttacccattctctcagcatctcatgcttttcttctctagcacttataattgcaattaaatgtgtacatgtgaaattaatctacatctgccttactaacctgactataaattacatcagtgcccaaatcgggtctgttttattcactgctctatcccaccacagactaagacccaatgctgagtgagaacaactgcaaatcctgactacgtgccagacaccgttctgacctatgtattcacagacggtccccgatttaccatggttcaacttgcaatattttcagcttatgatgcacttatcaggatgtggctccatcgtatatcaaggagcacctgtatgtattttcatctaaacctcaacaaccccactgagtctatagttaccattcccacttttctgagaggttaagtaatattggatctcagaaaacaataccccaaagtatggtggtttggcacgctgagggctttgaaccaaggtctctctgaccatgtcctgccctcctgtctcttgcccctctttctctaagggcaggtcatctgaaaggaacatcatgaatccccttcctgggaatctcaaccagggaaaatgaactggtctcacaagagagaagactagatgccagtctttgtcacagactgtcatgcattatttatctaaggtctgctctgagacaacttttattacctgacaggcggccgc

SEQ ID NO: 77928 - DNA, 1202 bp, Homo Sapiens
  misc_feature (117)..(215): n is a, c, g, or t
  misc_feature (219)..(219): n is a, c, g, or t
  misc_feature (232)..(232): n is a, c, g, or t
  misc_feature (240)..(240): n is a, c, g, or t
  misc_feature (260)..(260): n is a, c, g, or t
  misc_feature (284)..(284): n is a, c, g, or t
  misc_feature (289)..(289): n is a, c, g, or t
  misc_feature (320)..(320): n is a, c, g, or t
cagccaaccctttcccgcggtgccggtcatatgccgtgcacgcaggtcccaatggaagcggcgtggccaacgcattatgtgagtagtcaccgattagccccccaggcttacaatttnnnnnnnnnnnnnnnnnnnnnnnnnnnnnnnnnnnnnnnnnnnnnnnnnnnnnnnnnnnnnnnnnnnnnnnnnnnnnnnnnnnnnnnnnnnnnnnnnnnttgnccctcgagcccangaatcgcnacgagggccggctgacctgnccatctgtcgtggacagcttgccntgctntctggacaggtgaacactctgaacaaggtcntgaagcatgaaaaaacaccgctgttccgtaaccaggtcatcattcctctggtgttgtctccagaccgagatgaagatctcatgcggcagactgaaggacgggtgcctgttttcagccatgaggtagtccctgaccatctgagaaccaagcctgaccctgaagtggaagaacaggagaagcaactgacgacagatgctgcccgcattggtgcagatgcagcccagaagcagatccagagcttgaataaaatgtgttcaaaccttctggagaaaatcagcaaagaggagcgagaatcagagagtggaggtctccggccgaacaagcagacctttaaccctacagacactaatgccttggtggcagctgttgcctttgggaaaggactatctaattggagaccttcaggcagcagtggtcctggccaggcaggccagccaggagctgggacgatccttgcaggaacctcaggattacagcaggtgcagatggcaggagctccaagccagcagcagccaatgctcagtggggtacaaatggctcaggcaggtcaaccagggaaaatgccaagtggaataaaaaccaacatcaagtcggcttccatgcatccctaccagcggtgagtgtggctggcaacctcgactccctggtgctctttgcagagttgggcagtgaaattaccttttgctcaaggctcacctagatgggtacaataaaaagaacatgggctttcagcagcagacaaatcccacttccaccactgactagctgtgtgaccttggacaagtgacctaatttttctgagcctgtttctcatttgtaaatggtgataatacctacctcatagggttgttgtgaggattaaaatgaggaaatgaatgtaaa

SEQ ID NO: 77929 - DNA, 1070 bp, Homo Sapiens
  misc_feature (125)..(244): n is a, c, g, or t
  misc_feature (496)..(505): n is a, c, g, or t
gggggaagtgaaatcgtggcagccgcctcggccgccgcaatgcagagagaggagaagcagcttgaggcatcattagatgcactgctgagtcaagtggctgatctgaagaactctctggggagttnnnnnnnnnnnnnnnnnnnnnnnnnnnnnnnnnnnnnnnnnnnnnnnnnnnnnnnnnnnnnnnnnnnnnnnnnnnnnnnnnnnnnnnnnnnnnnnnnnnnnnnnnnnnnnnnnnnnnnnntctacagatccttctccccaccaccctccacagtccttgatccagaacttaccctaatctgatactgcctcacgtcaatggtgagctgatggacacaagatcaaataaggctatgcttattttgtgctgccagaaactgtagcaacctctgtgttcttagaggcacactgtttttgcaggccctcctgcctgggtttcattctggctatccctctaaggcgcaaggtgaagaagcttctgggccaggaaggnnnnnnnnnntgcccacctgcagctctggtgaagcttgggcctgctctcctttccatcctctaaggagccaacttggcttttacctgtcaaatagtcataaagtcccctatcctttaccccaccttatacacacgaggctttctcaggaagtggctctgccaggcaggactatgtgggaaagggtttttccttagcacacgaaaaagccccttcccctggattcatgtttcttattttggagggagaagggaattgcacttcacactgccatcagggtttagttgacctcataatggtgcccactttctcgactttggccaggatttccttcaaagaaaacgactttccttcatttccctaagcctgtggcccaaatggtggaccagaatgatggtgggagggggcaacccccagtagctttgcctgcttttataaagttgaacaaattgaatttagacattcaggctaacctgcctttcttagtactcctttgttggcatgggcaggggttgagtcagcagaagtggaccaaaggattcctctgaataaagttatttaaattgatgttcaaaaa

SEQ ID NO: 77930 - DNA, 883 bp, Homo Sapiens
  misc_feature (598)..(598): n is a, c, g, or t
cggaattcgaacttgccagccaacactcaccgctggttagggaatgcatggaaacccgacttgaatgttggtttttaattccaacttggcattttccctgggttgacctgccctgagccagtttgtacccccactgagcattggctgctgctggcttggagctcctgccatctgcacctgctgtaatcctgaggttcctgcaaggatcgtcccagctcctggctggcctgcctggccaggaccactgctgcctgaaggtctccaattagatagtcctttcccaaaggcaacagctgccaccaaggcattagtgtctgtagggttaaaggtctgcttgttcggccggagacctccactctctgattctcgctcctctttgctgattttctccagaaggtttgaacacattttattcaagctctggatctgcttctgggctgcatctgcaccaatgcgggcagcatctgtcgtcagttgcttctcctgttcttccacttcagggtcaggcttggttctcagatggtcagggactacctcatggctgaaaacaggcacccgtccttcagtctgccgcatgagatcttcatctcggtctggnagacaaacaccagaggaatgatgacctggttacggaacagcggtgttttttcatgcttcaagaccttgttcagagtgttcagctgtccagaaagcaaggcaaagctgtccaggacagatggccaggtcagccggccatactcgttctccaacttgcaaatgaaactccccagagagttcttcagatcagccacttgactcagcagtgcatctaatgatgcctcaagctgcttctcctctctctgcattgcggcggccgaggcggctgccacgatttcacttccgg

SEQ ID NO: 77931 - DNA, 2558 bp, Homo Sapiens
  misc_feature (73)..(111): n is a, c, g, or t
  misc_feature (889)..(901): n is a, c, g, or t
tgatcgatcctatagggcgctactcggccgttagcgaacgacgagcgcagcagagtagtgagcgaggaagcgnnnnnnnnnnnnnnnnnnnnnnnnnnnnnnnnnnnnnnncagtcgacggtaccggacatatgcccgggaattcggccattacggccggggggtctagcgctgcgtgggccatggtgcagctccgaccgcgagcgtctcgcgccccggcgtcggcggaggcgatggtggacgagggccagctggcctcggaggaggaggaggcggagcacgggctgttgctcgggcagcccagcagcggcgcggccgccgagcccctggaggaagacgaggaaggggacgatgagtttgacgatgaggccccggaggagctgactttcgccagcgcccaggcggaagcgagagaagaggagcggcgagtgcgggagaccgtgcgcagggataaaacgctcctgaaggagaagaggaagcgacgcgaggagctgttcatcgaacagaagaaaagaaaactccttccagacactattttggagaagttaaccacagcttcacagactaacatcaagaaatcgccaggaaaggtgaaagaagttaatttgcaaaagaaaaatgaagactgtgaaaaaggaaatgactccaagaaagttaaagtacaaaaagtacagtctgtcagccagaataaaagctacttggccgtaaggctaaaagaccaagatctgagagattcaaggcaacaagcagcacaagccttcatacataattcattatatgggccaggaaccaacaggactactgtaaataagttcctgtctcttgccaacaagaggttaccagtgaaaagagctgctgtccagtttttgaataatgcttggggaatccnnnnnnnnnnnnntgccaagaggtttaaaagacggtggatggtcagaaagatgaaaactaagaagtaaatcaatgctaaatgaagaatctgtactttgtatgtatagaatttatctaataaatcattcatagatcattttaaaggatcattataaaaatcataaacctatttgaggaagtgctcaaccacatttcattcttctggagtagaactgtgccttgcaatcctagaggaaaaagtggtttaagaaggaattgttttctttttaatatatttaactgaattcaagccatacccacatcagcaacagcacctcttctactctccccgggttagaggggtggcaaaaatggcacggactaaaaggagaaatggatattccagcaaagtctctaactgcagcctgtagacaatttgctattaaagattcagtgcacaaaatatagctaacagcttttaaatttttacttttaaccagtctggggatttgcttgcctggtgagtctcatatgccatattatgaatatgaaaataatgaagttaatttcctgttgcctttctgtgtcagccacaatatcaggtctaaccctaatccagggatgccagtaaactgaaggcaattttaggttgtagaactcagattaattgtagaaaccattaattttaattgctctaattttcatagtaatcataaaaagtatgcaagtacctaatatataaactcaattgacactgtatctgtagaagtaaatttttaatggctggttaattatatcactacattttattgcaatatagtactcatttaagcacttaaaaatggaaggtgtacaaagattaaattaagacacggtaaattgactaaatatttggtttttatataaataaaggtcataaccacaccgttgacatgtaatactgttataatacaacagttaaacttgtgagtctacaacagaagtcatctgtagttaaacaggaaacaaagttgaaaaagaccatgttaaaacaaaactactgggactaacaggtcgggattgtaagtagcaacaaacatattcactcagctcctgagtatttcaagttttacagtacacattaaaaatgatttcttccatcaacactataaattcaaactgtcggatgtttatgcattttgcaagttacactgattgaatgcttatatgggagtgggggtcggaacatctcccaatttgaagtttacatcacccacatgctaacacaaacacaacttgttccatttccttccccatcgtctccccccatcccccgacaacagaaggcaggattatatggttactttaaggctaagtaatatttaaaggattatgtgatgatcaagtttgaacggtctgaaattcagtactactctaactcttagacaacctaaagaggttacagatggacaaagtacattgactcctaacactaagttagaaagatcatttgacatcatgctgataaactaggaagcaatgctaaagcgacaaaaagctgtccccagtacataatatagcagaatctaaagtatcaaatcagcagagcatggtctactaccatgttgactatatgccagcaatataggtgtgagctcttgaaatgcatagctaaagtaggtaggtcttccaatgatggcaatgcgcaggac

SEQ ID NO: 77932 - DNA, 674 bp, Homo Sapiens
gcaacagcccgtgctccgcctcctcctcctccgaggccagctggccctcgtccaccatcgcctccgccgacgccggggcgcgagacgctcgcggtcggagctgcaccatggcccacgcagcgctagaccgtctgacctctgacccggaagcagctacaagcggagcgcaagcctactttcatcgccccctgcaggttcggaggtcctcaggacgggtggggcgcatgcgcgaagggaggaagggcgtggcctgtaggcagtgggcgtgtttctttccacgtggccagcgcaggccgccttggagccggatggaccccacggaaaatgctctgccggcgaaagcggctggcaatggggttgatttcaaggcagggaagagccatcgcgctgccctcctcggctgggatggcgagacagggctggcacggctcacgctgtccggtgctcagaaaaccggtaatcgcgggcccgaggcgctgctcgccgccgttttttggccctgggttccgtcgagtggatccagcttgtcagtctttgtgtagatttggctgcgttcgctccgcacttcggaggaggtggcgtttcatgggaagaaatgcgctctagcagatggccgccgtggccagtcagccctgctgccaccgacgaagacgcgggcgacagacctggactct

SEQ ID NO: 77933 - DNA, 1022 bp, Homo Sapiens
  misc_feature (133)..(333): n is a, c, g, or t
  misc_feature (545)..(545): n is a, c, g, or t
ctgatcttgatacgtatacgccttgaggagtgaccgtccccgcagccgacgccgagccagcgatcattagcgagaagcggagagcgcccatacgcaacgccttccccgcgcgttgccgatcataatgcagctnnnnnnnnnnnnnnnnnnnnnnnnnnnnnnnnnnnnnnnnnnnnnnnnnnnnnnnnnnnnnnnnnnnnnnnnnnnnnnnnnnnnnnnnnnnnnnnnnnnnnnnnnnnnnnnnnnnnnnnnnnnnnnnnnnnnnnnnnnnnnnnnnnnnnnnnnnnnnnnnnnnnnnnnnnnnnnnnnnnnnnnnnnnnnnnnnnnnnnnnnccaaggaattcggcacgaggatcactgcggccccagagagagagggcacaggccacggcggccccaagctatgctgcacactgagctccctcagctccgctgctgagactggccgggacccgctggacagcgaggaggaggcaaccagcggcgcccaggatgaacgtggcctgaagccgccttcccgggggccagtttccttccctctcagnccagggatgcctcgagcagccacaggggcaggaacgtcctgactgccattcctgctgctgctgcgggagctggatgcagaggggctggaggccgtgcagcagactgtgggcagccggctgcaggccctgcgtggggaagaggtgcaggagcacgccgagtgaccgcaggacctgaacgccgctccagcctccacggggaccccagcgtcttccccagcccccgggagctggagggtggctgccatggccgcagccccggccccacacaaaagcctccccggtttgccacatcggccgagggcaggagtgggtgttaggtactggctaaccggggcggtggagatgcctgtctacaccagtcctgtccccaggactccccttctgtggtctggaggttctaggctggcctgggctcttaaagggaggattttgcaggctgtcctccctaataaaagattttcccaaggttgatctgga

SEQ ID NO: 77934 - DNA, 1027 bp, Homo Sapiens
  misc_feature (751)..(751): n is a, c, g, or t
  misc_feature (859)..(859): n is a, c, g, or t
  misc_feature (883)..(883): n is a, c, g, or t
  misc_feature (978)..(978): n is a, c, g, or t
acgcggaagatggttctgacccgggccaaggcctcggagctgcacagcgtgcgcaagctcaactgctggggcagccgcctcacagatatctccatttgccaggagatgcccagcctggaggtgatcacgctcagtgtcaacagcatctccaccctggagcctgtgagccggtgccagcgcctgagtgagctgtacctgcggaggaaccgcatccccagcctggctgagctcttctacctgaaggggctgccgcgtctgcgggtgctgtggatggccgagaacccgtgctgcggcaccagcccccaccgctaccgcatgaccgtgctgcgcaccctgccgcgcctacagaagctggacaaccaggctgtgacggaggaggagctgtcccgtgcactgagtgagggagaggagatcactgcggccccagagagagagggcacaggccacggcggccccaagctatgctgcacactgagctccctcagctccgctgctgagactggccgggacccgctggacagcgaggaggaggcaaccagcggcgctccagatgaacgtggcctgaagccgccttcccggggccagtttccttccctctcagccagggatgcctcgagcagccacaggggcaggaacgtcctgactgccatccctgctgctgctgcggagctgcatgcagaggggctggagccgtgcagcagactgtgggcagccggctgcaggccctgcttgggggagagtgcaggagcancgcgagtgacccgcagacctgaacgccgcttcagccttcacggggaccccagcgtctttcccaagcccccgggagatttggagtggctgccatggccggagccccggncccacaccaaagcctttccgtttngcacatcggcccggggggcaggaatggttgtagtctgctaaaccggggcgggagaatgcttgttacacagtctggcccaagaattccctttgtgngtggcagtctaggtgggctggctttttaaaagagatttgagctggcctc

SEQ ID NO: 77935 - DNA, 624 bp, Homo Sapiens
gcggccgccatgaagctgacgcggaagatggttctgacccgggccaaggcctcggagctgcacagcgtgcgcaagctcaactgctggggcagccgcctcacagatatctccatttgccaggagatgcccagcctggaggtgatcacgctcagtgtcaacagcatctccaccctggagcctgtgagccggtgccagcgcctgagtgagctgtacctgcggaggaaccgcatccccagcctggctgagctcttctacctgaaggggctgccgcgtctgcgggtgctgtggctggccgagaacccgtgctgcggcaccagcccccaccgctaccgcatgaccgtgctgcgcaccctgccgcgcctacagaagctggacaaccaggctgtgacggaggaggagctgtcccgtgcactgagtgagggagaggagatcactgcggccccagagagagagggcacaggccacggcggccccaagctatgctgcacactgagctccctcagctccgctgctgagactggccgggacccgctggacagcgaggaggaggcaaccagcggcgcccaagaaggaccttggcctgaagcccccttcccggggcagtttccttccctctatcccagg

SEQ ID NO: 77936 - DNA, 667 bp, Homo Sapiens
  misc_feature (84)..(118): n is a, c, g, or t
aagtgtatagactcactatagggcgctagctcggcttagccgaacgaccgagcgcagcggagtagtgagcgaggaagcggccgnnnnnnnnnnnnnnnnnnnnnnnnnnnnnnnnnnncagtcgacggtaccggacatatgcccgggaattcggccattacggccgggggtacctgtctataaggagtcctgcttatcacaatgaatgttctcctgggcagcgttgtgatctttgccaccttcgtgactttatgcaatgcatcatgctatttcatacctaatgagggagttccaggagattcaaccaggaaatgcatggatctcaaaggaaacaaacacccaataaactcggagtggcagactgacaactgtgagacatgcacttgctacgaaacagaaatttcatgttgcacccttgtttctacacctgtgggttatgacaaagacaactgccaaagaatcttcaagaaggaggactgcaagtatatcgtggtggagaagaaggacccaaaaaagacctgttctgtcagtgaatggataatctaatgtgcttctagtaggcacagggctcccaggccaggcctcattctcctctggcctctaatagtcaatgattgtgtagccatgcctatcagtaaaaagatttttgagcaaacacttgaaaaaa

SEQ ID NO: 77937 - DNA, 934 bp, Homo Sapiens
  misc_feature (58)..(58): n is a, c, g, or t
  misc_feature (83)..(117): n is a, c, g, or t
aatgtatagactcactatagggcgctagctcggtatagccgaacgaccgagcgcagcngagtagtgagcgaggaagcggccgnnnnnnnnnnnnnnnnnnnnnnnnnnnnnnnnnnncagtcgacggtaccggacatatgcccgggaattcggccattacggccgggggattgtgcggccgccgccgccgctgcgggagggttgggggaggagttgggagtttagcgcagtcgccggagtgcgaggacaacgaccatccggccctagcctggccgggcgggtgccgggagcttccctttctcagcgcggcgcgaaggtggctcgccgtcagcgcctgcttccctcgacctcgtcctcctccccgctccggaggagctgcgagatgtggcgcctctgactccacttctccccgcccctgtcaccgagagggggaacgagctctcgcccactcgccggaggagacggccctggactcccaaccccgccggcgaaaccatgagctccgtccagcagcagccgccagcgccgcggagggtcaccaacgtggggtctctgttgctcaccccgcaggagaacgagtccctcttcactttcctcggcaagaaatgtgtgactatgtcttcagcagtggtgcagttatatgcagcagatcggaactgtatgtggtcaaagaagtgcagtggtgtagcttgtcttgttaaggacaagccacagagatcttgattgtgaagaatatctgacattaaggatgggaaactatcgtgggaacaagagctatacaataaccttgtatataatagtcctagaggatatttcatacctttgctggggaatattggtcaagtggctcttattttgccaatgaagaagaaggcaaaaaatttcgaaaagcagttacagacctttggggcgtcgaaaaggaaatctgagaaat

SEQ ID NO: 77938 - DNA, 2106 bp, Homo Sapiens
ctgccggctcgtactcggctcccccacctcgccgcagagctagcccgggaagcccacactggcggccacggagcagagtccctcacccccaccagctgtagctgaacgtctggatggtggagaagagcagggttccgagtctgaggaagacataaccttgtgcctgcctgcccacctctctctctggtcctgttcatctctcaggctctgagacactgaccttcactgctcagttaaaggttccagggattccactttgtctggacccatccagctgagtgaacccagggtggtggtgtatctggggagagtgaggagtgggttgtccaaacaccagggaaagagccctttggggcctcagacagaggagtgaagctggaaccatcagggaacatgagtgaattttggcacaaactgggctgctgtgtggtagagaaaccccagccgaagaagaagagaagacggattgaccggaccatgattggggaaccaatgaattttgttcacctgactcacattggctcaggggagatgggggccggagatggacttgccatgacaggtgcagttcaggagcagatgagatccaagggaaaccgagataggccatggagcaattctaggggcttatagctccaataatggaatggttctgccatcttgaaacccccattctgtttccagcccagaagaaatgctgcccctaccagatccctccttgaaccagtgatctaaggacccctcttttccctatctgcctaacagtgcctcacaaggcttgggggctggactccctctactccctctggccatagcccctcctggagatggggtcaaggcagcaggactgatcaagtgactactggttagccagaggagctcagctgaagccctggaaaccctcaggtctgagataggagttctctaggaacctggaatgagttcctgtctcctgaatgatggtctgggtgccacctgtttttaaactcttaaacctggaactccttaaatggggtaggtgggtgagattatcaaagctgaagctggctttgctgagaagctccctacctccctgcccttctcctccttcctgctggaatgaactaaagcagatgtcaagcaggggctggtgggggtgcctactcccttttccactctatctttagatttcaaaccttaggcttacagcccctcaatatctctctgctaacaccagtgtctctttctagttaggcctctaatcttctgtttctgtttaccagcttcccagcaactttccttttttaaaatattaaaaatttaattcaggttctcttaattatcctcatcctgctgttgcctccgcccttaactctatccctattaggaaccttgtttcccaccgaataagagttaaggtaagaggtagctcttcacctgatgacattccatttaagttttggggcatctttcctgccctctgccaacctccctgctggcccaggtgagaggaggaagaggggtctggaaagaaacccagaatgcggcagaactaggagtaagtccatctcaaggtggacttctgatcattgaggatggtgagataaataggttgaaaacaatcatctgtgagtttaggagtcttaagatcctcacagcacgggagcagggagaggctctagaacaaggtttcacaaccgagatgcctttgacattttgggctgaagtgttctttgtaaggaaaactgtttcctattttgtgcattacaggatatttagcagcacccctggcccactctaagtatgacacccaaaaatgtctctattcattggcccgattcctcctaggggggaaaatccgccctccttttgaaaaccccaactcctaaaggcaaaataatttttccccgaaagggatttcgggcttggggaggcttaccccccaacatccttaacccactcttaaagcccccagccctggggttcccctttgggggcccccctattaaatgggggggccacaaaaggggcgtgccaaaaaaacctcccaaaacaaatttcttttattttcccgggggttttcccttggggggttccccaagggggcccataaaaggagaaaagggg

SEQ ID NO: 77939 - DNA, 823 bp, Homo Sapiens
  misc_feature (28)..(28): n is a, c, g, or t
  misc_feature (53)..(53): n is a, c, g, or t
cagatctcccaaagatgctctctgctcntggaagtctctgtacacaggaatgngatatcagtgccacttccagcaagttcctgcatgggacaggtagccataaaggctgagtgtctggagttcagagtaataggttttgtcttcttgagtcacagcctctttaatatgttgatgagaagcccagggaacgttgatgtacaaagttggacatataattcaggggattcatggatctctgaaaaccagccctggatcccagtttagccatctctgatctaaaggcacgtgacttctctaatgttcatggcagacctattctgtaagcccattgtgcagccaagtcagcatgccattccagtgcagtgtgagagggcagagatgggggccaagagtacaaatagagtgggacagttgtcattgcccagcctgtgagttgaagtctgtgcagtcagccagtgggtctgacaaagagggcagtgctggcactgcctcatgcttccgcagaggtgatgaggttcaggctgaggtggagaccacgctgcactcgccatgcattcaatggtgccccatctcttgttctctaggaagcattcccgctacctgtgtgatgcagttggttccacctattcccagagactccaccctggccctccttgccctggcccccagcactgagcccctagggccatttagctggccagcatgatctaagacagctttctgcaggcattcctcttgtaggagtcatgaagcagcaatgtgtattttgcttctttttgttgttgttatattaaaaaatatttttatattctagtccaaaaaa

SEQ ID NO: 77940 - DNA, 1307 bp, Homo Sapiens
tggcattaggtggatactggagtggactagttgaattggaaaacttgaaagcagtgacaactgaagatagagaaatgaggaaaaagaaggaagaatatttaacttttagtcctcttacagttgtaatatttgtggtcatctgctgtgttatgatggtcttactttatttcttctacaaatggttggtttatgttatgatagcaattttctgcatagcatcagcaatgagtctgtacaactgtcttgctgcactaattcataagataccatatggacaatgcacgattgcatgtcgtggcaaaaacatggaagtgagacttatttttctctctggactgtgcatagcagtagctgttgtttgggctgtgtttcgaaatgaagacaggtgggcttggattttacaggatatcttggggattgctttctgtctgaatttaattaaaacactgaagttgcccaacttcaagtcatgtgtgatacttctaggccttctcctcctctatgatgtattttttgttttcataacaccattcatcacaaagaatggtgagagtatcatggttgaactcgcagctggaccttttggaaataatgaaaagaatgatggaaacttggtggaagccactggtcaaccctcagctccccatgagaaattgccagtagtcatcagagtaccaaaactgatctatttctcagtaatgagtgtgtgcctcatgcctgtttcaatattgggttttggagacattattgtaccaggcctgttgattgcatactgtagaagatttgatgttcagactggttcttcttacatatactatgtttcgtctacagttgcctatgctattggcatgatacttacatttgttgttctggtgctgatgaaaaaggggcaacctgctctcctctatttagtaccttgcacacttattactgcctcagttgttgcctggagacgtaaggaaatgaaaaagttctggaaaggtaacagctatcagatgatggaccatttggattgtgcaacaaatgaagaaaaccctgtgatatctggtgaacagattgtccagcaataatattatgtggaactgctataatgtgtcattgattttctacaaatagacttcgactttttaaattgacttttgaattgacaatctgaaagagtcttcaatgatatgcttgcaaaaatatatttttatgagctggtactgacagttacatcataaataactaaaacgctttgcttttaatgttaaagttgtgccttcacattaaataaaacatatggtctgtgtagtttccgaaaaaaa

SEQ ID NO: 77941 - DNA, 747 bp, Homo Sapiens
  misc_feature (708)..(708): n is a, c, g, or t
tttgaaactactcttaccatatgttttatttaatgtgaaggcacaactttaacattaaaagcaaagcgttttagttatttatgatgtaactgtcagtaccagctcataaaaatatatttttgcaagcatatcattgaagactctttcagattgtcaattcaaaagtcaatttaaaaagtcgaagtctatttgtagaaaatcaatgacacattatagcaggtccacataatattattgctggacaatctgttcaccagatatcacagggttttcttcatttgttgcacaatccaaatggtccatcatctgatagctgttacctttccagaactttttcatttccttacgtctccaggcaacaactgaggcagtaataagtgtgcaaggtactaaatagaggagagcaggttgcccctttttcatcagcaccagaacaacaaatgtaagtatcatgccaatagcataggcaactgtagacgaaacatagtatatgtaagaagaaccagtctgaacatcaaatcttctacagtatgcaatcaacaggcctggtacaataatgtctccaaaacccaatattgaaacaggcatgaggcacacactcattactgagaaatagatcagttttggtactctgatgactactggcacacttttcattatttccaaaaggtccagctgcgagttcaccatgatactctcaccattctntgtgatgaatggtgtatgaaaacaaaaactcgtgccgaa

SEQ ID NO: 77942 - DNA, 1033 bp, Homo Sapiens
caggcgggaaagaagaaagatgaaaacgaacaagtgaggcacgcaggtcaaggatagccaaagagcgcaataacgggcaggaagacggcgtgcaccaacaaaagtgcccacagcaggagaatgaacgcgccgacacaaacagggccgtgacaaacgggctacaagacacggtgaacaaacgaaccatacaggcgggccagcccggagaaagaaatagagcaaaggcgtcatatgaagaggcatacacggacaagaagaccaaacccaacaaagcaccgagagacaacagggccggcagcgggccccaagaaccgcagccccgcaaccgccagcgcacgccatgggcggcatggacgccgaactcatcgacgaggaggcgctgacatcgctggagctggagctcgggctgcaccgcgtgcgcgagctgcccgagctcttcctgggccagagcgagttcgactgcttctcggacttggggtccgcgccgcccgccggctccgtgagctgctgagggcggccggcgcccgcccggcgtgccggagaggagaaagggcccgactgcccgccggaccctgcacccagcgactgggccccgcgcgcgccctccgcgagggtggaggcggcggctgtgtgcgcagggcccggcaccggactgggaccctggcgtccctccaggccttgcctcctgcgggaggacagtttggcttcacttctctgaccccagcctcggccgtaaagtgaaagagaccggaccagcttcagctttcggactctggttcttggatcgtgtcctctccccctcgccgccctcttcccccaatctgagccattgcaggcctctgcctgctgccccctctctcctcgggatcgggtccccagagccaccatctcctgagcctcccaccccgctgcctgggccctgtggttgctgggcctcccacctcaaggaggggaaggttgtacagcccgaacccgtggagcaatgccctgtctggcctccaaaaccaaaataaaactgggtcactttaaaaaa

SEQ ID NO: 77943 - DNA, 828 bp, Homo Sapiens
  misc_feature (691)..(691): n is a, c, g, or t
gggcagctgtgatccaccagaaagaaacgagtcccaacctggattaaagggaaagagaaatcacatggaatttaatccaatctcatctagaaaagcttcccatttaggtcacttgtacgtaactccaattccttctccaagagcccttccaggagaggcccaaggcgccccccacagagtggaatgagtggaacttgcgtcagtagcccttggcctgggcagtcctggcgtggtgcagaactctgagctgggcacagaaggcctccacctggttctcactctacagagcccactgcctgatgctgtccctcaggcaggagcctccttcaacacaacggcccctcccagaaggctctgtggtagtaactgctgtggccagcaagcactagacacattgaatgcctctgcaaaacaaaagaaaactctgttcttgggaatcggcctctggcacattccttcttaaaaactcccaagattgaagacctgccacaaccgttttggccatggttttctccaaccaccagtgaaatatgggtttggttcattttagtttcagatagatggcttcaccaaagaactcttgaaagaatactgattagggaggggcagggaagtaggagcttatggtatattataaggctgggaaaaatctatgatgcaaaccctttccacatagtactagataaagacnaaagacaattataataggataaaaataactgtttatatgtatatcatttaagaaaaaaaagagtgactgtctctttctcttaaatgtatccgagggccaatagcaagtaatcgtagacgtcgtggtgttgatgtgtt

SEQ ID NO: 77944 - DNA, 1339 bp, Homo Sapiens
  misc_feature (740)..(740): n is a, c, g, or t
agagtactttggtcagggattctcactagcagcgtcatggccaggatgctttacttatttgcaataccacctagtggatatggcaactgcagagcataaaaggggctcggaaaagcagtttttacaaagtatttaaaaggagagtatttaaatcataggtacctaagttggagcctgaggttgaaatatttggggtggagatttctagctttcctgagagctgctgcttggtggtagtgttttctctggaagtacagattcctgacattctgggtggaggggagcccaagtgagcctgaaggagttctgattatagagtcccgagcctcagtttctgactgcagaagagccagagatgttcatttcattgttgaccaccctagtgcttggtggactgtgcccttagctatcccactgtggctgccattgccagaaacattttggagaaccttttcttcccattgctctcagagcctgttcgagccattcaggtaaattggtctccattattacctggtcacaccagattttcccccagactcagcaccatccagtctgattctccgtttctgggctcagtttgactctaaatctgttttgctatttaacaaagtcaaacctggtccccagcagagcttgccacccggagactttcaggagaccgtgcaggctctgaagggagctcccagtcacagcagccgcctacttggagcaagggaaggctcccaagatgcctcctntgaaagccggtgctcaccaagatcagttcaggatcaatcattatccttgtagtcatgccttgatcagttctgagatgaagcagggaatgcaggcctgggttagcatcctgaggacacagggcccctggccttgatggcactgggccgtgctcaggtgaagcccacccgtgtctgggagagccttggcttttcagtgggcagcatgctcaactttacttgaagctcccaggtgccaaaccatattagtgccttggctgtttatcccactgccttggaagatggactcctctcatctctgagcctttacctagctgcttcctcatctacctgtggtgttgggaccaagcctccaatatctctgaatagcccactcctagcttggaaacagctataagggctgccctgccccttgtcaaatgatcaccaattcttggtggcttggctgcggacaatgaacagagtctgctggggtctgtgacacactgtgtctggaacaaggaagggatggaaggctctacccctccgtggcagaccagcatctggccaactctgtatctgaacttgagctttctatggaacaaacaatggtcttagttttt

SEQ ID NO: 77945 - DNA, 1202 bp, Homo Sapiens
  misc_feature (557)..(557): n is a, c, g, or t
gcctctaatggtttcacctcacacttagaaaacaagccagactctttaaccaaggtgctcaggctccacatggcctcactcctgccaacccctccacttcattactactctgtccccctttcacttgcttaaacagctccagcagacttatttctgtcttaagacaggaatatctctctgtgtaatatttctctgtgacctccacctggaatgttcttccttgagatacttttaggtggctgtctgcttcttttcattcacatcttagctgaaatttcactttttcagaaagcccttccccaattattcaactaaagaaggtctccagtaactctctaaaacatcacccttactacatgatggtttcttgtttatttctttattgtctgtatctcagtgtaagctccaaagagtagggatcatgtctgatttgattaatgctataaccctagcaccaagaactggcacataattcatctaaccaacaggtattgggcactcagcactccaaagagcaccaacagtagagaagcgaacaaagcacacacttatccctnggagattatactgttgcaggccacacagacatttagctaccattgtaataagggatctgagggaaaccatggtcttcgatggaggaaacatctgatggaatcaaggaactcacagagggacttgagaactcagctctgaaggatgagcaggaattaacaagaggagaggtgagagtggggagagagtaattccagataaatggagtccggcaagttgggagaactgaatgtcaaccagggagactgaagcacagagacagaaagggtgagaatacagagatgaggctggtgaggctgagtcagatcgtgtggggtcttaagccatattaaagttctggaatttatcttgaaggcaatggaatgccactgggttttaagcaggagagcaaaagtcaaatttccattaaaaacaatctcactcagctgaagcatacagaatgaatgagaacagagcttcccaaaaacgtcctatgagtcatgaatgggtaacagatgtgcccaggatattgatccctcagtccctggagtggctgggtggtccagggcagccaaaacccccctgagcagttgcctccagctttgagcacctttgtccggttaccccagtgaattgtgcaaatacaattttctgagagctgtactgtt

SEQ ID NO: 77946 - DNA, 813 bp, Homo Sapiens
  misc_feature (72)..(72): n is a, c, g, or t
aaaaaatgaagaggggttcatttgattacaaagtcgatgagagtgaggagatcatcgtgtgccgctggcagnatagcagcgtggtcaacatttgctccaatgctgtgggcatagagccagtgaggctgaccagtcgtcactctggagcagctaaaacgcggactcaggtccaccagccatcactggtgaagctgtatcaggagaaggtgggtggcgttggtaggatggatcagaatattgccaagtacaaggtgaagatccgaggcatgaagtggtactcaagctttatttggctatgtcattgatgctgccctcaacaatgcatggcagctgcatagaatctgctgccaagatgcccaggtggacctccttgccttccggagatacattgcctgtgtgtatctggagagcaatgctgacacaacatctcaagggaggcgaagcaggcggttggagactgagagccgcttcgatatgattgggcactggattatccatcaggacaagaggacccggtgtgccctctgccactcacagaccaacacccggtgtgagaagtgccagaagggtgtccatgccaaatgcttcagggagtaccacatccggtgacatcatgagacatgcttctttggtttataatgagatgtttacagttaaatacagatggcagttgagcacttctgttttgtgttggaaaaaagacctgaatttctaatgacttgattttctattttctccctacccaccaatacagttatcttttttattgtgttgtgttatgcctacatgtgatataaattaatatttatattc

SEQ ID NO: 77947 - DNA, 625 bp, Homo Sapiens
ccaaaatggtcaccctcaacttccctaaatcccctgcagcatctgagacacatgggtgaatgtatgtaaggtacctggggctaaccaaagttaaatacatatgacaagtacctgaatctagataatctaatggtaagatatcgtttgctctctggacttcatgggctcaccccagcaatggggtgccttggaaatgaagagatctttcttgtgtctcatcctatgggctcccagcctccctcaacatcatgacctccatctgtaacacccaccatcctgggagcagcatcctgggatattggaactctgaagtcttaacctaagagaacaaggacaagcctctctatggaaaggtttgcccttccagatccagttgagctctgctctggagccagactctctgaagcatagcccagctctagctcttaccagttatgtgatcaggacaagcctctctatgaaaggtttgcccttccagatccagttgagctctgctctggagccagactctctgaagcatagcccagctctagctcttaccagttatgtgatcaggaatgagagttaatgtttctatgtttctgattcttcatttgtaaaatgaggataataaaaatttaacttc

SEQ ID NO: 77948 - DNA, 1805 bp, Homo Sapiens
  misc_feature (579)..(587): n is a, c, g, or t
  misc_feature (846)..(855): n is a, c, g, or t
  misc_feature (1424)..(1459): n is a, c, g, or t
tcgggagtttgaagcttttttcttagtatcactaggtcatccacatgcaagtgttccccagcatgaggctcagacactatctccaaatccttggcatctttggccatttcacagattattttacctggaagttcaaaatttatcacatcaggctaaatatgaagcttttcgaccataacagccgctgtattagataacgaccaatgatttggtcattgttctaaacatgatgctctcggtctttaagctgtcccgttatatttttatagattggatgctatggtcagttacaagattcataccacagcatactagcttttatttgagccatgttagaaaatagggtcaatcacctaagggcaatgcatggcatgttatcaagaatctggcgagatgaattgcctgaaattcataactgagtgtgttaacggaaatcacgtgttgctgacagtgatttactcattgtcctttcgctcaattacctctctcgatatcattaacaacattaaccaatgagaggaaattagattggaaaattcactatacagcattagccactaagaggaaatcggctggagnnnnnnnnnctaatctgaacaaaggtacacagatgcaaatcttaagcagattaagtaagaccatccattctgatctctagggtatatacacccacaggcatagagctcttccacgtggtggaatctatgcaatgatagatattcacactctaaatatgaggtggtgtgtatgtgtatgggtggccacagccatgcttacctatgccatttagttggtcttacttaatctgcttaagatttgcatctgtgtacctttgttcagattagnnnnnnnnnnccagccgatttcctcttagtggctaatgctgttagtgaattttccaactaatttcctctcattggttaatgttgttaatgaattgagagaggtaattgaggaaaggaaatgagtaaatcactgttcagcaacactgatttccgttaacacatcagttatgaatttcagggaattcatctcgccagattcttgataacatgccattcattgcccttaggtgattgaccctattttcttacatgggctcaaataaactagtatgctggtgtatgaatcttgtactgaccacaccatccaactataaaaatataacgggacagctttaaaacaaagatcatggcttagaacaatgaaaaattatttgttgtatataatacacgcctgtattgtgaaaagcttcatttagcaatgatgtaataatttttaacttccaggaaataatctgtgaatggaaagattttttaagattttgagatagtgtttagtctcatgttgggaacacatgaatgtgatgaacatagtgaatactaaagaaaacgcttcagactttcagaatgatggttcagaannnnnnnnnnnnnnnnnnnnnnnnnnnnnnnnnnnnagtgtgaaaatagcactttaccaaaagattagccatgaaatggttattttgccagttacatttgatttcttttgtatctgcaatgtaatgagttattttatttcttctgtatttgcagtgtaatgagtttttgtggcaaagtgtattaagcaatttttcattatcttgaagttccacaaagtggagaatatttatattctcacatgcattttaggcacttttgatatgtgaaaatagatgtattttctgatgcatttggttaataaatattaatctgaacattttcatgttctttgctattttgaattccattatagattcatgaataaagtcattactagagaaa

SEQ ID NO: 77949 - DNA, 1009 bp, Homo Sapiens
  misc_feature (114)..(114): n is a, c, g, or t
aagtgaatgaagaggggtgtgacctgcttcttcaggtagttcttcatggggccatagacctcggagcggtcaaacatgagcttgaagtagctcaggctgctcagggcggcctcncagggcatgtactgtctctcttcaatcaggaagagggtgttgttcagcgccagagtgacagggaccttatgggcactggccaggttgaaggcgtcattaatgatctgtgcccgattgatgacagggatggccgagtggtctctctgcagctgagtctgaatcttcctccagttctcttcgtcgtagttcacccggtaatagcccgtcacattgaggttcagcagaacccactcattgcctgatgtgctgaagagatcgttctgggctcttacatccatcagccagtagtcctgctgctgtctgccatctctgatggatgtgatgggcacaatccacacgtagttgaattctgaggggcgggtaacattggaatcggggtcaaggaggaagtgctcctgggaaagggtccccgtgctggtatccaccgtgatgaccgggaagcccatctgcagggtccagcggttcatgatgtcccgcacggtggtggggagttggatggaccggttgttcacagcctcctgcaggtggtcccacaggttcaggtagatggtgttctggtaggcaaaggtgtggaggtaggacgccaggccctgcttgaatacgtcctcggacaggaagctggagagcatcctgaggactgaggcgcccttgctgtaggagatggcgtcaaacagctcactgatctgggccggcgtgttgatctccgaggcgggtgtggacagcgggtgggaggaggccagtgcatccactgccatcacgcggtacacatcattcagcaccatgaggtctttcaagttccaggtgggctccgcatagtcgacgcgtggtcgacgatatcccgggaattccgaccgtaccagcctgcttttttaacacctgttcaagttacaatgct

SEQ ID NO: 77950 - DNA, 816 bp, Homo Sapiens
tctggtaggttcccaattcccatcaggcaggacatcctccccactgctgggtctcgtggctcaaagataccccatcctgacgccaggtcagtgtgatattccggggatagaagctggaagccctgcatgtcacggttgatgttgcccttctgaggcctcgctgcgggtgacaattcaccatggggggcactgttctcctcaggactacgctggattctagatatcgccgtagttcctgcaggcagtctgcatgcatagcgtgatagtgtgtcttggtcttcatggcatcttccttcaagaaattcctgacgttcatggccaaggtctgagctctggaggactggggcactgtccattcctcagtctccacgttttgggagaggaagagctccccatcgtagtagaaatgctgggagctcctggtgctgttgtcttcatggatctcacagaccctaatctcctggagggaatgcaagccttctttctggtccttgatatgagccagggtcatcctgaggtcctttccgttccctgtcaagtccctggtctctctgtcccatgtcttatttcccaggacatcttctgcccactgtccctggggctttgccctgcatttctgcctgtcatagcgcaggaagggctgaccatccagatgtaccctcagcaagaaaccctgactgcacagatccatcccaggacagcaccgtgaggttataacgaagactgtggggctcttataccccatgcactcacgagcacagaggcgacttccctctctcagactttaggcgccactgcagggtccggaaaagaaag

SEQ ID NO: 77951 - DNA, 1347 bp, Homo Sapiens
gtggcgacgtcggggccatggggctgggcccggtcttcctgcttctggctggcatcttcccttttgcacctccgggagctgctgctgagccccacagtcttcgttataacctcacggtgctgtcctgggatggatctgtgcagtcagggtttcttgctgaggtacatctggatggtcagcccttcctgcgctatgacaggcagaaatgcagggcaaagccccagggacagtgggcagaagatgtcctgggaaataagacatgggacagagagaccagggacttgacagggaacggaaaggacctcaggatgaccctggctcatatcaaggaccagaaagaaggcttgcattccctccaggagattagggtctgtgagatccatgaagacaacagcaccaggagctcccagcatttctactacgatggggagctcttcctctcccaaaacctggagactgaggaatggacagtgccccagtcctccagagctcagaccttggccatgaacgtcaggaatttcttgaaggaagatgccatgaagaccaagacacactatcacgctatgcatgcagactgcctgcaggaactacggcgatatctaaaatccggcgtagtcctgaggagaacagtgccccccatggtgaatgtcacccgcagcgaggcctcagagggcaacatcaccgtgacatgcagggcttccagcttctatccccggaatatcacactgacctggcgtcaggatggggtatctttgagccacgacacccagcagtggggggatgtcctgcctgatgggaatggaacctaccagacctgggtggccaccaggatttgccaaggagaggagcagaggttcacctgctacatggaacacagcgggaatcacagcactcaccctgtgccctctgggaaagtgctggtgcttcagagtcattggcagacattccatgttttctgctgacgctgctgctgctgctatttttgttattattattttctatgtccgttgttgtaagaagaaaacatcagctgcagagggtccagagctcgtgagcctgcaggtcctggatcaacacccagttgggacgagtgaccacagggatgccacacagctcggatttcagcctctgatgtcagctcttgggtccactggctccactgagggcgcctagactctacagccaggcggctggaattgaattccctgcctggatctcacgagcactttccctcttggtgcctcagtttcctgacctatgaaacagagaaaataaaagcacttatttattgttgttggaggctgcaaaatgttagtagatatgaggcatttgcagctgtgccatatt

SEQ ID NO: 77952 - DNA, 1075 bp, Homo Sapiens
  misc_feature (551)..(947): n is a, c, g, or t
  misc_feature (1003)..(1033): n is a, c, g, or t
gtagcgaggcctgggtggcgaattcggcacgaggccaggattcgccaaggagaggagcagaggttcacctgctacatggaacacagcgggaatcacggcactcaccctgtgccctctgggaaggcgctggtgcttcagagtcaacggacagactttccatatgtttctgctgctatgccatgttttgttattattattattctctgtgtcccttgttgcaagaagaaaacatcagcggcagagggtccagagcttgtgagcctgcaggtcctggatcaacacccagttgggacaggagaccacagggatgcagcacagctgggatttcagcctctgatgtcagctactgggtccactggttccactgagggcgcctagactctacagccaggcggccaggattcaactccctgcctggatctcaccagcactttccctctgtttcctgacctatgaaacagaaaataacatcacttatttattgttgttggatgctgcaaagtgttagtaggtatgaggtgtttgctgctctgccacgtagagagccagcnnnnnnnnnnnnnnnnnnnnnnnnnnnnnnnnnnnnnnnnnnnnnnnnnnnnnnnnnnnnnnnnnnnnnnnnnnnnnnnnnnnnnnnnnnnnnnnnnnnnnnnnnnnnnnnnnnnnnnnnnnnnnnnnnnnnnnnnnnnnnnnnnnnnnnnnnnnnnnnnnnnnnnnnnnnnnnnnnnnnnnnnnnnnnnnnnnnnnnnnnnnnnnnnnnnnnnnnnnnnnnnnnnnnnnnnnnnnnnnnnnnnnnnnnnnnnnnnnnnnnnnnnnnnnnnnnnnnnnnnnnnnnnnnnnnnnnnnnnnnnnnnnnnnnnnnnnnnnnnnnnnnnnnnnnnnnnnnnnnnnnnnnnnnnnnnnnnnnnnnnnnnnnnnnnnnnnnnnnnnnnnnnnnnnnnnnnnnnagggttgtgggggcccttaacagtgccatattaattggtatcattatttcctgttnnnnnnnnnnnnnnnnnnnnnnnnnnnnnnngaggacagagtctcactcctgccacccaggcctgcagtttcc

SEQ ID NO: 77953 - DNA, 999 bp, Homo Sapiens
  misc_feature (62)..(62): n is a, c, g, or t
  misc_feature (135)..(135): n is a, c, g, or t
  misc_feature (142)..(142): n is a, c, g, or t
  misc_feature (167)..(167): n is a, c, g, or t
  misc_feature (198)..(199): n is a, c, g, or t
  misc_feature (201)..(202): n is a, c, g, or t
  misc_feature (217)..(217): n is a, c, g, or t
cacccagctacactatctcggctctatgtgttgatttgacgtaacattcacacagaacagtntgactgatacgatttatcgactcatataggaattgccctcgagccaagattcgcacgagatagtgggcagtgntactgtnattcacagaagtaaaatgatcctcntatcatccatccttcgttctctccatctctnntnntacctcaaagaccanttgtgaagggtcattttaatctctgtggtgagggattccgagaatcattgtcatgtacatgcaaaacgcactgaaagaacagcagcatggtgcattgtccaggtacctgttccgatgctgctactgctgtttctggtgtcttgacaaatacctgctccatctcaaccagaatgcatatactacaactgctattaatgggacagatttctgtacatcagcaaaagatgcattcaaaatcttgtccaagaactcaagtcactttacatctattaactgctttggagacttcataatttttctaggaaaggtgttagtggtgtgtttcactgtttttggaggactcatggcttttaactacaatcgggcattccaggtgtgggcagtccctctgttattggtagctttttttgcctacttagtagcccatagttttttatctgtgtttgaaactgtgctggatgcacttttcctgtgttttgctgttgatctggaaacaaatgatggatcgtcagaaaagccctactttatggatcaagaatttctgagtttcgtaaaaaggagcaacaaattaaacaatgcaagggcacagcaggacaagcactcattaaggaatgaggagggaacagaactccaggccattgtgagatagatacccatttaggtatctgtacctggaaaacatttccttctaagagccatttacagaatagaagatgagaccactagagaaaagttagtgaattttttttaaaagacctaataaccctattcttcctcaaaaa

SEQ ID NO: 77954 - DNA, 1004 bp, Homo Sapiens
ctatcagtacgtcaaaggatctgatgtcacatccaaaagctttccagatgatctgcctcggatgcgattcaagtgcccgtactgcacacatgtggtgaagcggaaggcagacctaaagcgccaccttcgttgtcatacaggagaaaggccctatccatgtcaagcttgtggaaaaagatttagcaggctagaccatctaagtagccattttcgaacaatggagataaggattccagatggcacttgagtgaagatgagaatagatcctatgtggagattgtagaagatgggtctgctgatctggtcatccaacaggttgatgatagtgaagaagaagaagaaaaagaaattaagcccaacattaggtagctgtaatgtgaaccaacagagctggcatgtctgcaatttacattgacttcctgtatctctctctttctatggtcggagtctagttaacaaatttatcacactgactttaaagaaatgatctgatataacttgcatgctttctgaacaggccattgtatccattctgaactttgttgccctaaaatgtgttgctgcactggaaagaaagaactagcttgagttggcttgatggatgaacaattatcctcttactttcattacaatcctcttactttattccagagatacctttttcttttaatattggaggatctacttagcaaacttttttcaaagaaaatactttaaataaattcaccacaaccaaactttatgtaagacaatttcaaggtgtttcaaaaacacataactaccaatgtttaatttcacagggaaccagttaagagcacatttaaggatctggcaacccaccttactaaacaaattagtctttctattaatttgagatctgaaacaacctgtcattactctgatatcctgaacgtttaaggattatggaagaagactaaagtgtttgaaatcattcatatttgaaatttttatcattagcttaaaaattactctccagtattgtt

SEQ ID NO: 77955 - DNA, 1250 bp, Homo Sapiens
cccagaaaatttatcactttttttgtgaaatcttggctgttctcaaacttgcctgtgcagatacccacatcaatgagaacatggtcttggccggagcaatttctgggctggtgggacccttgtccacaattgtagtttcatatatgtgcatcctctgtgctatccttcagatccaatcaagggaagttcagaggaaagccttctgcacctgcttctcccacctctgtgtgattggactcttttatggcacagccattataatgtatgttggacccagatatgggaaccccaaggagcagaagaaatatctcctgctgtttcacagcctcttaaatcccatgctcaatccccttatctgtagtcttaggaactcagaagtgaagaatactttgaagagagtgctgggagtagaaagggctttatgaaaaggattatggcattgtgactgacagtgacctaggaagttacatcattgagcggttcttaacccatctctgcactggtgggacctctgccctcaatggacatgagaattatctgagacatttatttaaaatggagctatctcctgccctacctttaaatgactgatttcagcagatgtgcgatgaaactctagaaattgatctcttcaagttgtgctgcagccactccacaccaggacaataccccttacaatatcctcattagcttttgatccagtcccatacctcccataatgttttcctcaaaacactggtcccttcagaggactttaaaaataagttctatagtcaaataagtttgagacttacttcacatcagatgcctctgtctagggatcacaattcatattagcatagtgaatgctgtaaatatttctctaggaaagaataattctataccagctttaagccagtgttttctaaacttacgtgagcacataaaatttcctttgtaatacttagtaacagtttcctggaacaggagatcttgatattaattgactcattgtgaatacttcctacagcccccttctagggcagaatgatttcttttttccttgcaaagtgagcctctaaagagatgtagttctgagcattacgcctcgatcagtctgtaaaaatccgggttctgtttggatacagaccgtgagggaccctgtctctactgttcaatggtagatcatctaaagaaaataaatgcaatcctgtccttcatcatggatcggcattcctgctatagaagcttcaggagatgacctcattcaa

SEQ ID NO: 77956 - DNA, 256 bp, Homo Sapiens
  misc_feature (157)..(157): n is a, c, g, or t
ggtatgatgccccccaaaaaactaagcaagattaacttgggacaggcagttctaactgggaagcctgagctcacaggctgtttggattactttccaattgtgtttcaaagatgtttagacttttcccaaggccagctgaatccttataatcagcccnaaaagttcctttctgtttctgtctgtcccctttgagggtgttgactcagagaacctggggcaatatgagatgttaaaataaaaatagcgtccaacgtcc

SEQ ID NO: 77957 - DNA, 1132 bp, Homo Sapiens
  misc_feature (636)..(645): n is a, c, g, or t
gccagtaatagcatttactattttcacagttgctgtttcctagcatgagttcaaggctgcctcctctctgtcttcattatgtgaattgaatgtggtcacacatctgtgttggagcagaggcaggggctgcagctttcagctgatttcccaaggggtctgtacttggacactgatccagtccacccaatgtgtttccagaaagtggagctgattcctggagagcagaagggatatatgtggggctttttgtaaagggcagcgacctatgtggtgggcttgtccactgcccgagtctgcggctcccacaggcacttgcccggctcatatccttcccctttggaattggcttggagcagggtctctcctccccgccccctatgtgcccaccatctctggggtcagtggcccactcatgactctcagggcggggagggggcttggagttcagtaacagcaccctgggtcattcttgcacctgtcaccctgagagccactgaccagttttctgtgcctagaatcgctgcttgcggcctttctcaggggctcaatggattgtaattgatgtttgtattttgcacttgcccggaggtgtttcacgggaagtgagcattttttaaaacaaaaatagaatttagnnnnnnnnnnggcagacacgatggatttctagtgttgtacgtgctgtagaaagcacttgaaaatgcgttttgccaggggccgcaaccagaagctacatgacttctggaatctgttccttacacagtaaattcctgggccagttggtaaacagcaaggagccacaagaaatcactcataggcaaaagccgagtgagcccaggccaagctccactttgtccactttgccctatttttggaattcagggggaaacatcttgggagcaggcccattgcacccctctgcctcctctcgatgccttacagttggtggggtttgacacatggaaaattgtgaaagttagaacacggaacaaaaatgaagcctcaacatagagttaatagaggcaaggggctacagagaatttagatcctaatcaagcacgtcttatgtactagcgcttccctggaaggccaggataactttatgactacaaagaaaacatgttttcctgcttgg

SEQ ID NO: 77958 - DNA, 736 bp, Homo Sapiens
  misc_feature (29)..(30): n is a, c, g, or t
aagccagccacggcagtcgcttggtttcnncaggtggaatgggctaacacaggagatgatgggaacctgtcccgcagtccctgcatgaccattggccctgctggcctggcggtgtggccatcctggggttcttagggtcccagaacaagccccaggcaagctggaacttgggtggggaggggacatgaggaggataaacagctgactgtggcttcaaggacatcagggccaccccaagtcctcagtgtcctactcctggcaaggagttgggtttggatcaaaagtgtttaaaattaatatgttgtcagtgattagaacaacactgtttacataaaaaccatttttctaattctaacaagttagaatgtgaggaaggaatgaacatgagtgtttaggaacctgccctttggtgctgggctggcgtcccgcactggggtgtcctcgctgtctgggggctgctctgctgccccggcccaggtccccttgtggtgttgccagacgggcctcatggtctgctgtgcagagagaggcaggaaggatccctgaagagtcttggagaaaaggttctgtgccctcaggtggggcttaccccctcgtatttataatcttaatttatatagtgaccaccgtggaaacaaacgcctcttgtattgtcatgtacatagtccatacctgagtgctgtacataagttgttctgtgtataaataaaacaagcctgtttttgatcttcaaaaa

SEQ ID NO: 77959 - DNA, 773 bp, Homo Sapiens
  misc_feature (535)..(567): n is a, c, g, or t
  misc_feature (712)..(732): n is a, c, g, or t
cagaaacctccagcagtctatgaaacatctcacatgactctagttattgaatgcttttaatggttttatggtactggtgatagtcatagtggctgcctatagaacaatcttcaaactgagccatgctttaggggagggaaaggggctaaagtctcttctgttggtaatttattagttactcttgaaacaataaaatccaacagaaaggaagagatagctactgtatattacagtaaagaaagctgcatagttattttaaatttaatggagatgaatatggttaaaatatataactactgctgcttgagaatagcaagagtattgttttaaaacatattccacccaacttgagagttcttttaaaatgattggccatatgaacatttgtaatcttgccattaggtttggacctgccatattttgttttattctgtgatcctaactagttccttttaataggctaaaatatttatcaatactgatcagactttaaagaaattactttgtaaacctgctgactacctgtatgtattgnnnnnnnnnnnnnnnnnnnnnnnnnnnnnnnnngagattataaaagatgaaaatattgaatccttataatattttaagttgcagaatgtatgttaaaaagtgacttgaatgagatgtatttgtatctagaaattttatttctttttggaatgagattaaaatacattttgaaagttcnnnnnnnnnnnnnnnnnnnnngcctacagccgcggccgcaagcttattccctttagtgaggg

SEQ ID NO: 77960 - DNA, 185 bp, Homo Sapiens
  misc_feature (11)..(11): n is a, c, g, or t
gcggccgcctngggtcttccctgtaaccctaggacagcagggcccctcagcctggcactatagcttcgcatggccacatgtggcctgtggcttctgaggtcctccgggagcccccgtgaccctcagcgctctggaatgtccctagtcctgactacctcctgggcctggggtttccacctcgtgcc

SEQ ID NO: 77961 - DNA, 727 bp, Homo Sapiens
  misc_feature (712)..(712): n is a, c, g, or t
aaaaaacaatccccaatacatgcagttcagggttaagtatcacatttgtagcacattgttgagtctcaaaacaaaaatatgcatcacctgtataatcccatcacatctttttccagcctctacaatacctagttgggggtgttttcatttatacatccacatagctcagaagcatgttattaacggttgatctggcccgatgcttctccgccacctcccctgccctggtctccacctcggggttatttttttctaaaggcaggatgttactcagtcttaatttattaagatcactgacaaactttggcttcttgtgtgctcatgtggtccctgcttttgctttcggaagggtttatattgaaacgactgtgactctgatcggttattatcccctcattttttgtaggaaataagtttgcttgtttctgtgggtgctcacacagtaacacaggttcctaaagtaaccatttaatctgaactggtattaaaggaaactgttaaccaggctctcttagatctatttcagttcatataaaaaaactcttccaattgttgcttgtgtctcaaagtagttctgcttccatccttatcaacagagcacctgggagaaactaagtcatttccctgagtaggcacagaccacgagccccgcggcacccagctctctctgggactaagcgcctgactcgagagcacacctttcagtccactngggacaatccagtgg

SEQ ID NO: 77962 - DNA, 1188 bp, Homo Sapiens
  misc_feature (1110)..(1131): n is a, c, g, or t
taggctagtacgaggctgggtgttaatcggccgaggcggctgaagcgcaagtccctcctgaggccctgtcagggtcttacccccagccaccacctgccccgctcgtccacgcctgcgcccactatcatccctgctccagctgcccccgggaagccagcctccgcagccaccgtgaagaggaagcggaagagccggtgggggcctgaagaggataaggtagagctcccacctgctgaactggtgcagagggacgtggatgcctctccctcgcctctgtcagttcaggacctcaaggggctcggctatgagaaggggaagcctgtgggtctagtgggcgtcacagagctttcagacgcccagaagaagcagctgaaggagcagcaggagatgcagcagatgtacgacatgatcatgcagcacaagcgggccatgcaggacatgcagctgctgtgggagaaggcagtccaacagcaccagcacggctatgacagtgatgaggaggtggacagcgagctgggcacctgggagcaccagctgcggcgcatggagatggataagaccagggaatgggccgagcagctgacaaagatgggccggggcaagcacttcatcggagacttcctgcctccagacgagctggaaaagtttatggagaccttcaaggccctgaaggagggccgtgagcctgactactcagagtacaaggagttcaagctgactgtggagaacatcggctaccagatgctgatgaagatgggctggaaggagggcgaggggctgggctcagagggccagggcatcaagaacccagtgaacaagggcaccaccacagtggacggcgctggcttcggcattgaccggccggcggagctctccaaggaggacgacgagtatgaggcgttccgcaagaggatgatgctggcctaccgcttccggcccaaccccctgaacaatcccagacggccttactactgagtgttctggaaatacatactttctgaatgaccaaccgtccctggactgtggaatgttccggcctgcatttctgcccaccccttccgttgtcacgagtgccgtgccgtgtaataaagtcccagtgctcatccaccnnnnnnnnnnnnnnnnnnnnnngaccgcgtatgcggccgcaagcttattccctttagttgaggctaatttcagcctccc

SEQ ID NO: 77963 - DNA, 1502 bp, Homo Sapiens
aattaagtctaggtacgaggcctggtttgaattcggcacgaggcgccgctgggcgggctagtgactccaggctggccctgacacagccctgcgccctcacggccctcgaccaggcccatctccttctctaagagatgcctgcagcctgccatgggacgtggggtccaccggtacagctccaccgggggacggctacgtgcaggcggacgcccgtgtggccccccgtgaccacgaggagcacctgtatgtcaacacccaggtctggactgcccccgagccggaggacagccccaaaaaggatctgtttgacatgcgaccctttgaggatgccctgaagttgcatgagtgctcagtggcggcaggcgtgacagcagcccctcttcccttggaggaccagtggcccagcccccctacccgccgggcccctgtggcccccacggaggaacagctgcgtcaggagccctggtaccacggccggatgagccgccgggcggcagagaggatgcttcgagctgacggggacttccttgtgcgagacagcgtcaccaaccccgggcagtatgtcctcaccggcatgcacgccgggcagcccaagcacctgctgctcgtggaccccgagggcgtggtacggacgaaggacgtgctgtttgagagcatcagccacctgatcgaccaccacctgcgagaacgggcagcccatcgtggccgccgagagtgagcttgcaccctgcgttggcgtggtctcacgggagccctgagccaggtgacctgttctaagccctggctcctgcctgtttctcagccccagctcctgcctgtcatggccttggggctctcagccctcctcctggatcctgggtcaggccgaaccaccgctgcctctccttcctccgcatgagcctctggcatggtccttcctccagctggccccgggctgggcagagcctcctcctgccggggcccctgcccaccccctcctttgcctggagtgagggtgttcataccaaagacggaaacatttcgcctttaaagaaaatatatccagaagcagccgctgcctcggagccctggcccgtgggtccccctctcgcctggctggttcggtctaacgccccggagagtcagagctcccaggaccctggggaggaggcggattccgggcctggctgggcttcctcttcccacctgaggactgggtgcacagttgtctttgaggggggacgcttaaggtgctttggggttctcaggccaggatacatgctggcgctgaagtgcaggcagccttgaggtcacctgggatctcggggtagccaggctgctccaagacagtggatatcgaggcagtcgtgaggcccctactccacctgggagcaggggaaggacgtggttgcctggcctgggctgcgcccagcagcttccccccaatcctgccctcccagctgtcgacccagatgggatgttcggatcggtttgtaattaaacctgggaatggccacaagaaa

SEQ ID NO: 77964 - DNA, 1371 bp, Homo Sapiens
tgtaggaacataaacttttattgtcatccagcacctgtgatagtttcatgtctctctaaaggagacaggaaattggagcattgtgggcccttttaaaagaaaagaggagtaggtaggcacacccaggtgcttctaaaacaaccaagcccaaacctgacatgctcctccccacagtcaccttcattgtcccctttaaaagtctggaacagtatgtagcaaaacaaataaattacttttcatttcaaaaagtaagttcaaaggttgaagctgcctaggccaggcttctggacaggtgcctccaaagaagtgagctttccttttcaacttccttagctctagccagtagaccagaaacccctgctttccacatcaggattccagatggtgtttagttagacttgggatcccgttgcttgggcatctctcctccatcttccaaatccatttctgcagcaactgacatacacaggacctggaggtaccttgtggcagaccccacgatccttcggaggtaaagcggtcgcttatgttctggcactctgatgatgaggaagtaaaagggcaggcctgagagggcaatggcaatgccgatgagggagttgatagtatcactgtaaagtggaacagccaccaggaagatggtgcagaggcagaagacaatcgggaagaaaacgctgagcttgaggggacgaggtcgatcaggctccttccagcgcagataaagctgacccacaatagaaagccccacaaagaaccagtagctgaagctgtagtagttaatgagctggaagatgtcttccacgcacaagtagatcaatgccatgataccattgaagagcagagaaggcactggtgtgaaccgctcaacatggatcatgcagatggcatcagagagatggccttctcttgagcccacaaagaaaagcctagaagcagccacaatggaggcattgaggccaccaaaacaggataatgcaactgacagtggaattatccagttaaatattccaaatatctgatctgcaaaagtcacagcaacagcatcactggccaagatgtctctcatgtctagcacagtataataggccacattggtcaagatatagatgatggtgacaatgggcatggagatgccaatggagaggggcaggttcctctcaggattcttgatctcttcagtgacatagttgagggtgtcccagcctgagtaggagaacagagctgagtacagtgccagggcaatgtcacccactgcaaatgatgaaccctcaaaggaattctcaaaatgagtagaggctccctggccaagtctaacaatgcctgcaacgatgaccgcgatcagtgccaatactttagcataggtgaaaatcc

SEQ ID NO: 77965 - DNA, 1258 bp, Homo Sapiens
  misc_feature (58)..(77): n is a, c, g, or t
agtgccaagctaaaattaccctcactaaagggaataagcttgcggccgcctgctcagnnnnnnnnnnnnnnnnnnnnaatttgggggaggatatattccaacttgggggaagggtgaaggcattttagctctgaagctcaatcatgacatttctagagagttctgcagtgcccccgcattggacaggacaggatggaagagtgtgctggactggctggattccccagtgtcaagctggcagcgctcctgaggttcttgagtgtttatcaactcagcaggtcaaaagtctgcagacactgggtggagcagcagtaagccacaaaactaacagttgtcttccactggtgcagccctgccattggcgtctctctcaagggaaagagcttggggtagacgatggtaaacataggctcactacaccgatgacagtgccccagagggcagtgcagcagctctaggagacttctgggtaatgagattggagacagaaagttcaaatctttcagcaagctgtggtaggtatgatacagccctctcatagccaattcctgcagagggaggacgtgatcatgctccgtccctatggccttcacctcagctgggaggaaaacggttcgctgccctgatgaaaaggaaagcagcttcacctcggaaacttgaatgggagcaccacagccactgcacccgatgactttattgtacagataagatggcaagcctttcaggtgaatgttgttatccacgtatacatactgtagttctcgagatcgacctaaatcaagtggcaaaaatgcaagacggtttccagccatggagagctcattgaggctgggcagctggcagagatggcgcggcacataccatagacgatttcggtccacagtgaggtactgcagagaaaggcacatgtgaagcctctcgggtaaagttagcaaacgattggtagaaatgtctagtgtctgcagctccttcaaatcgccaacctctggaggtaggaattgcagttggttattagctaatcgaagatgacgtaaagctctcagacgaccaatttctgggcaaacaatttctaaggcattgtcactaagatccagacattggagttttacaagagacccaatggcttccggaaccacaactatgttatttgagtgcaggtatagttccacaaggtttggaagcttctgagcaaggttttctggcaaggatgtcagggagttccttttcatatagagtctctccaagtactgcagtcccc

SEQ ID NO: 77966 - DNA, 2020 bp, Homo Sapiens
  misc_feature (79)..(113): n is a, c, g, or t
cttgtcatcactataggggctagctcttcgtagccgaacgacgagcgcagcgacgtatatgagcgaggaagcggccggnnnnnnnnnnnnnnnnnnnnnnnnnnnnnnnnnnncagtcgacggtaccggacatatgcccgggaattcggccattacggccggggagttccgcggggggctgtcggggaaccatggctgccccgagagacaatgtcactttattattcaagttatactgcttggcagtgatgaccctgatggctgcagtctataccatagctttaagatacacaaggacatcagacaaagaactctacttttcaaccacagccgtgtgtatcacagaagttataaagttattgctaagtgtgggaattttagctaaagaaactggtagtctgggtagattcaaagcatctttaagagaaaatgtcttggggagccccaaggaactgttgaagttaagtgtgccatcgttagtgtatgctgttcagaacaacatggctttcctagctcttagcaatctggatgcagcagtgtaccaggtgacctaccagttgaagattccgtgtactgctttatgcactgttttaatgttaaaccggacactcagcaaattacagtgggtttcagtttttatgctgtgtgctggagttacgcttgtacagtggaaaccagcccaagctacaaaagtggtggtggaacaaaatccattattagggtttggcgctatagctattgctgtattgtgctcaggatttgcaggagtatattttgaaaaagttttaaagagttcagatacttctctttgggtgagaaacattcaaatgtatctatcagggattattgtgacattagctggcgtctacttgtcagatggagctgaaattaaagaaaaaggatttttctatggttacacatattatgtctggtttgtcatctttcttgcaagtgttggtggcctctacacttctgttgtggttaagtacacagacaacatcatgaaaggcttttctgcagcagcggccattgtcctttccaccattgcttcagtaatgctgtttggattacagataacactcacctttgccctgggtactcttcttgtatgtgtttccatatatctctatggattacccagacaagacactacatccatccaacaaggagaaacagcttcaaaggagagagttattggtgtgtgattttagcctcacgtgagactccttttaagactaaaccatttgcattaaactagagccttaagtcaatctcagaaggtagcataaacaaataaaaattaactgtatggcatgatcagtgcggttatgtggaaacaacaacaaacaaacgaagctatctgagtgaactgctaatacagaaacttaatgtagacctgtttggggtctactattgttttagaatgaaggaattgtattattgtgtgtatatataatttgtaaataaaaagtatggagatgatacggtgttaaaaaaaatcatggtaaggctacaatactcaagtaacaaggtttgggacaatgtctaagggttaaagtgccaaagccatttctgtactaactgttctcttgttccggtaccggggagaaggatgacccctccttattctccaattcatgtacagtattttgtcctagcagcataaagacctagctcttttcttacaagaggcagaaacaagacaggctagttcataaacaaactgaatgtgtaacttctcaaaatgaatctatttcataactcggacaatttctgggtggtgactgagtacccctttagtgagtacccctttagtgctatatttgtgccattcattatctggttcatatttcttttctgttagatgatacacatttcttcaaaaaaatttctaatgtcacttttgtacttttttaaataaagtatgtttaactgttgggctctcaataatttgtgaaatttcagtgttttctataatgttaatggggaaattcagcaataaactttatttgtaagaaag

SEQ ID NO: 77967 - DNA, 997 bp, Homo Sapiens
  misc_feature (156)..(156): n is a, c, g, or t
  misc_feature (783)..(792): n is a, c, g, or t
caacataccgcactgatcatccaacagtaatttttatttgtttatgctaccttcctgagattgacttaaggctctagtttaatgcaaatgttttagtcttaaaaggagtctcacgtgaggctaaaatcacacaccaataactctctcctttgaagnctgtttctcctttgttggatggatgtagtgtcttgtctggggtaatccatagagatatatggaaacacatacaagaagagtacccagggcaaaggtgagtgttatctgtaatccaaacagcattactgaagcaatggtggaaaggacaatggccgctgctgcagaaaagcctttcatgatgttgtctgtgtacttaaccacaacagaagtgtagaggccaccaacacttgcaagaacttgtatacagagagaaataaaatcttatcactcaaataaatgaaacattacataatggtgaggcaattttcatccccagagatgccatactttacctaggaaaaggaaaatactgttttccttagaaggagccatctgagagtttgtactaaaattggtagttcctatataacactgtttttccaaaacaatgcccagagggctatgtggtctattaaattttacacattttttgctaatgttagatattttggggcattgctatcccaaagcaattttgccttcacaatcaaaactaagtcaacaaaatgaaaattatattcaaactggtacagtatcaaaggattaatttcaaaatgttataacagcttaaaatggacatctaacttnnnnnnnnnntaaaggatctactaagaacctttaattcctggatacttacagatgacaaaccagacataatatgtgtaaccatagaaaaatcctttttctttaatttcagctccatctgacaagtagacgccagctaatgtcacaataatccctgatagatacatttgaatgtttctcacccaaagagaagtatctgaactctttaaaacttttt

SEQ ID NO: 77968 - DNA, 1063 bp, Homo Sapiens
cacggtagtggtccccatgctgaccctcatctgggcctgggccctctgccaagtgcccctgtgggatgggaggagtgaggcagtgggagaagaggtggtggtcgtttctatgcattcaggctgcctttggggctgcctcccttcttattcttccttgctgcacgtccatctcttttcctgtctttgagattgacctgactgctctggcaagaagaagaggtgtccttacagaggcctctttactgaccaactgaagtatagacttactgctggacaatctgcatgggcatcacccctccccgcatgtaacccaaaagaggtgtccagagccaaggcttctaccttcattgtccctctctgtgctcaaggagttccattccaggaggaagagatctataccctaagcagatagcaaagaagataatggaggagcaattggtcatggccttggtttccctcaaaacaacgctgcagatttatctgcacaaacatctccacttttgggggaaaggtgggtagattccagttccctggactaccttcaggaggcacgagagctgggagaagaggcaaagctacaggtttacttgggagccagctgagaagagagcagactcacaggtgctggtgcttggatttagccaggctcctccgagcacctcatgcatgtcccagcccctgggccctagccctttcctgccctgcagtctgcagtgccagcacgcaaatcccttcaccacagggtttcgttttgctggcttgaagacaaatggtcttagaattcattgagacccatagcttcatatggctgctccagccccacttcttagcattcttactcctcttctggggctaatgtcagcatctatagacaatagactattaaaaaatcaccttttaaacaagaaacggaaggcatttgatgcagaatttttgcatgacaacatagaaataatttaaaaatagtgtttgttctgaatgttggtagacccttcatagctttgttacaatgaaaccttgaactgaaaatatttaataaaataacctttaaacagtcaaaaaa

SEQ ID NO: 77969 - DNA, 736 bp, Homo Sapiens
aacttcggctaggtacgaggctgggtgtgaatcggccgaggggaggtgccgtgtgtcggactcggcggccccgatgtggagctgcatcgtgtgggaacttcactcgggcgccaacctgctcacctaccgcggcggccaggcgggaccccgcggcctggcgctgctcaatggcgagtatctgctggcggcgcagctgggcaagaattacatcagcgcctgggagctccagcggaaggaccagctccagcagaagatcatgtgccccgggcctgtcacctgtctgactgcatcacccaatggtctctacgtcctggcaggagttgcagaaagcatccacctgtgggaggtctccaccgggaaccttctggtcatcctgagtcgacactaccaggacgtctcctgccttcagttcacaggggacagcagccacttcatctcagggggcaaggactgcctggtgctggtttggagcctctgcagcgtgctgcaggccgacccctccaggattccggcgcccaggcacgtctggtctcaccacacgctccccatcacggacctgcactgcggctttgggggccccctggcccgggtggccacctcctcactggaccagacggtgaagctctgggaggtctcctcgggggagctgctgctctccgtcctctttgacgtgtccatcatgggagtgaccatggacctggttgacaccgtatgtctgcggggcggagggtcccta

SEQ ID NO: 77970 - DNA, 1088 bp, Homo Sapiens
ggaacggcagtactcctaacggtttaaggtagcgaggcctgggtggcgaattcggcacgagggcaagatggcggcgcccatggaggtggccgtgtgtacggactcggcggccccgatgtggagctgcatcgtgtgggaacttcactcgggcgccaacctgctcacctaccgcggcggccaggcgggaccccgcggcctggcgctgctcaatggcgagtatctgctggcggcgcagctgggcaagaattacatcagcgcctgggagctccagcggaaggaccagctccagcagaagatcatgtgccccgggcctgtcacctgtctgactgcatcacccaatggtctctacgtcctggcaggagttgcagaaagcatccacctgtgggaggtctccaccgggaaccttctggtcatcctgagtcgacactaccaggacgtctcctgccttcagttcacaggggacagcagccacttcatctcagggggcaaggactgcctggtgctggtttggagcctctgcagcgtgctgcaggccgacccctccaggattccggcgcccaggcacgtctggtctcaccacacgctccccatcacggacctgcactgcggctttgggggccccctggcccgggtggccacctcctcactggaccagacggtgaagctatgggaggtctcctcgggggagctgctgctctccgtcctctttgacgtgtccatcatggcagtgaccatggacctggctgagcaccatatgttctgcgggggcagtgagggctccatcttccaggtcgacctcttcacctggcccggacagagggagaggagcttccacccagagcaggacgccgggaaggtcttcaaagggcacaggaaccaggtgacttgcctgtagtgtcccctgacggcagcgtggcggctctcagggctccccggacgagacgtgcgccccttgggacggtccgaggcacaggcggggcgctccggaggtggcccccaaggccaggtaccaagcggcatcctgtgtggccggtcacttgtgtggcaggattggccccctgcgcggcccctttaaaagcctgtgggcc

SEQ ID NO: 77971 - DNA, 936 bp, Homo Sapiens
cggcagtaactacctacggttttaggtagcgaggcctgggtggcgaattcggcacgaggcctcgtgccgggcggcgcccatggaggtggccgtgtgtacggactcggcggccccgatgtggagctgcatcgtgtgggaacttcactcgggcgccaacctgctcacctaccgcggcggccaggcgggaccccgcggcctggcgctgctcaatggcgagtatctgctggcggcgcagctgggcaagaattacatcagcgcctgggagctccagcggaaggaccagctccagcagaagatcatgtgccccgggcctgtcacctgtctgactgcatcacccaatggtctctacgtcctggcaggagttgcagaaagcatccacctgtgggaggtctccaccgggaaccttctggtcatcctgagtcgacactaccaggacgtctcctgccttcagttcacaggggacagcagccacttcatctcagggggcaaggactgcctggtgctggtttggagcctctgcagcgtgctgcaggccgacccctccaggattccggcgcccaggcacgtctggtctcaccacacgctccccatcacggacctgcactgcggcttcgggggcccctggccgggtggccacctcctcactggaccagacggtgaagctatgggaggtctcctcgggggagctgctgctctcgtcctctttgacgtgtccatcatggcagtgaccatggacctgggtgagcaccatatgttctgcggggcagtgagggcctcatacttccaggtcgaacctcttcacctgtgccggacacaagggagaggagctttcaccagaacaggacgccgggaaggtcttcaacgggcaaggaaccacgttaattgcctgtcacgtccctgacccccgccgtgctgctcctcaggtccagacaagac

SEQ ID NO: 77972 - DNA, 1199 bp, Homo Sapiens
  misc_feature (49)..(50): n is a, c, g, or t
aaaccctaagggggtcaagttgtacaaaacccgcacggttttaattaannaacggaacggggccagtactatacggtcctaaggtagcgaggcctgggtggcgaattcggcacgaggcaagatggcggcgcccatggagctgttctgctggtcagggggctgggggctgccgtcagtggacctggacagcctggccgtgctgacctatgccagatttactggtgctccactgaaggtacacaagatcagcaacccctggcagagcccttcaggaactctgcctgcccttcggaccagtcatggagaggtcatctcagttccacacaagatcatcacccaccttcgaaaagagaagtacaatgctgattatgatctgtcagctcggcaaggggcagacaccctggccttcatgtctctcctggaggagaagttgctcccggtgctggtacatactttttggatagacaccaagaactacgtggaagtgacccggaagtggtatgcagaggctatgccctttcccctcaacttcttcctgcctggccgcatgcagcggcagtacatggaacggctacagctgctgactggggagcacaggcctgaggacgaggaagagctggagaaggagctgtaccgagaggctcgggagtgtctgaccctgctctctcagcgcctgggctctcaaaagttcttctttggagatgcccctgcctccttggacgccttcgtcttcagctacttggccctgctgctgcaggcaaagctgcccagtgggaagctgcaggtccacctgcgtgggctgcacaacctctgtgcctattgtacccacattctcagtctctacttcccctgggatggagctgaggtaccaccgcaacgccagacaccagcaggcccagagactgaggaggagccataccggcgccggaaccagatcctatctgtgctggcaggactggcagccatggtgggctacgccttgctcagcggcattgtctccatccagcgggcaacgcctgctcgggccccaggcacccggaccctgggcatggctgaggaggatgaagaggaatgatttgtcctcacgctcccaagactggtttttctactctcatgcattccagaggcccccgtgcctcctcgttgttggtacagccggacacggggtgctgccacccagaataaagccactcacactg

SEQ ID NO: 77973 - DNA, 1010 bp, Homo Sapiens
  misc_feature (952)..(952): n is a, c, g, or t
gcaagatggcggcgcccatggagctgttctgctggtcagtggggctgggggctgccgtcagtggacctggacagcctggccgtgctgacctatgccagatttactggtgctccactgaaggtacacaagatcagcaacccctggcagagcccttcaggaactctgcctgcccttcggaccagtcatggagaggtcatctcagttccacacaagatcatcacccaccttcgaaaagaggtaggtgacttggatagagggggctgccagtgagagaagttcagtcaattctatacaatacacatttattgagcaccagatatatgccatgctagatgcaggtgacccagagcatcaaggagcaacagtcttgtggcagagacacacacaatgtcactgtgatgtattaaagcagtcggcaagagatgaaacttagggcactgtgaggcagggagggagaggagcacaggctgaaggagagtggaagacagcagttggcctctgatggtgggactggagagagatttctaagggccacttcctgttttcagggactaggttgggctagatatggggctcaggatggacaaggcttagagccaggttggagaagatgaaagagcattactagaggagtggggaggcctaggctatgctctgtactccggccatagacaatgtgatctcgggcaggccatgtaaccctctcagaggctgtgcactcccttatttgtaaaaactagagggctgggccagcatgttttccaagggttcttctagcattgaacggtcaggttccaagagggaacagtgtcagaagtaggacactcttcctcatttctaacttcccaaaggttgaggacctggggaattaattgagaggcctggaaagagaggatccagataaacgccaaagttcctggcagagccgaggccactgccctgattgctaagngtgtgaacagagcttttccagtttccaaagtattctaaattatttcctaacacagggg

SEQ ID NO: 77974 - DNA, 989 bp, Homo Sapiens
  misc_feature (165)..(165): n is a, c, g, or t
  misc_feature (297)..(366): n is a, c, g, or t
gtaagaatctctttctctgaatgcccctgtgttaggaaataatttagaatacttcggaaacaaaaagctctgttcacacataagcaatcagggcagtggccctggccttgccaggaacttaggcttttatctggatcctctttccaggcctctcaattaattccncaggtccttaacctttgggaaattagaaattaggaagagtgtcccacttctgacactgtgttccctcttggaacctgaccgtcaatgctagaagaacccttggaaaacatgctggcccagccctctagtttnnnnnnnnnnnnnnnnnnnnnnnnnnnnnnnnnnnnnnnnnnnnnnnnnnnnnnnnnnnnnnnnnnnnnntaaagagcatagcctaggcctccccactcctctagtaatgctctttcatcttctccaacctggctctaagccttgtccatcctgagccccatatctagcccaacctagtccctgaaaacaagaagtggcccttagaaatctctctccagtcccactatcagaggccaactgctgtcttccagtctccttcagcctgtgctcctctccctccctgactgacaggcagaaggtactgtgcctctggatatccccacagtgccctgagctgcatctcttgccgactgctttaatacatcacagtgacattgtgtgtgtctctgccaccagactattgctccttgatgctctgggtcacctgcatctagcatggcatatatctagtgctcaataaatgtgtattgtacggaattgactgaacttctctcactggcagccccctctatccaaatcacccacctcttttttaaggtgggtgatgatcttgtgtggtactgaggtgacctctccatgactggtccaaagggcaggcagggttcctgatactgagagaaaagtataccaaccaggaccttagctgcctatccatacgtagttgcaacacattcctgcctatctcctgcttc

SEQ ID NO: 77975 - DNA, 2069 bp, Homo Sapiens
  misc_feature (399)..(408): n is a, c, g, or t
  misc_feature (1289)..(1318): n is a, c, g, or t
  misc_feature (1378)..(1427): n is a, c, g, or t
  misc_feature (1605)..(1613): n is a, c, g, or t
  misc_feature (1636)..(1645): n is a, c, g, or t
  misc_feature (1895)..(1895): n is a, c, g, or t
  misc_feature (1915)..(1916): n is a, c, g, or t
  misc_feature (1918)..(1918): n is a, c, g, or t
  misc_feature (1921)..(1921): n is a, c, g, or t
  misc_feature (1988)..(1988): n is a, c, g, or t
gggtttcatccttccccagcgtggtctctacgtccctgtttcccttgtatcaagacaccttcctcagcttccatgcctttggatcttccatgttcctccccatattcctggacttcggagatggcctctcccaagccaggtcaaggaggtttgggggagggttgcccctctgcccctctgttctgtggctgagcactttcccagtccagggcagggaaatattggccctatcttgacccccaaatccagtgagctccagattcttccaaggcaaaagaggtaagcagatcacacctctttctgcctctacatatggcctattctgggctagaccagatttgggggccaggagggaagaactccatatgggatggagaagggaatctactttttccctgnnnnnnnnnncctgatggtttctcccagactagaccaaatagccagaaaaatgataggggtcggatgggtgggtaagcccaggatttgcacatgaccttccatccttacctgtattcccatctccccagtgtcactcccctcaccaatcactccagatggttttgggggaaccattctactcttctggtgggctttggggtatccccaccaactttcccttcaaaatagcaccttacaccccatctttgactcagttccccacacccaaagatcccagcctagggatggggtacagggactttaaatagtccctaatccctaatttgcactagttaaccctggtcagggtccctgtatttccttccagtgggggagataaatgtttgctcctaattctctttgaaaactgggcctccctgctctgtgattggataaatatttcccatcccacccacctccccccaaaaaatagctcacaaggggagagccagtatgggggagcaaatttgacaaatgggaattagaggagtgcagttttaaaaggaaaagttgctgtcatcaaaatggcagccttttccccagctactgtttttggggccaagatggctgccctagcagcaatcactgccaagggcaagatcatggcttttggagggaggtgagtttagggagggccaggaccatcctcctacccctcataccctcccagcatatacaaaaggggaggttttagacaggctccctgaatgttaaccacagaggagtcactccttcattcctcctctgtctctttgcacttttcttggtcttggccacagcctgagtgacgaatttcctactgaatgtaccaagttccaatttttaagggggggaaaggtttcaaatggggnnnnnnnnnnnnnnnnnnnnnnnnnnnnnnttcccacaaatcttgtttctggcactttagaaaaactgcaaaaaaatacgtaataaagannnnnnnnnnnnnnnnnnnnnnnnnnnnnnnnnnnnnnnnnnnnnnnnnngcggaaccacaagagagactgaggaaggcctggaggcaggggcagaggtgacgacagtgcccctatatccttaacccatactcctctgaggcaaacaggcatgggaaaatggaagggttgaggatggaccggagaattggaacttcagaataggtcaaaattccaaaaccatggacannnnnnnnngggagaattgagattgtagacannnnnnnnnncttaaatatgatcaaggaaaatagcttccagaatgtggtggttctgggcaacaaatgagattgtggcgacgtggagattaaaatatatgtatttgagctggggaatttgaatattgtgagtttcagatgttggaaatttgggattttgcagttttgtcttttgaaaatgatcaagtcttgtcagttcgtgccctctttccccatgttccctgggaagacgggtggtggacagaaagtgagaaggcccacntggttctgtgccgcagcacnngncanaaatttagaatttctacagactagctctaaatacgtaagtgagggacccagatttaagaagaaactngaccacatatttatttctcccgcatttgtgtgggtgtggtccaaactcttgtaggccccaataaaccccaacaagacttga

SEQ ID NO: 77976 - DNA, 750 bp, Homo Sapiens
  misc_feature (76)..(119): n is a, c, g, or t
  misc_feature (307)..(307): n is a, c, g, or t
  misc_feature (330)..(339): n is a, c, g, or t
cagtcgacggtaccggacatatgcccgggaattcggccattacggccgggcaaaaaaatacgtaataaagaatacnnnnnnnnnnnnnnnnnnnnnnnnnnnnnnnnnnnnnnnnnnnncagcggaaccacaagagagactgaggaaggcctggaggcaggggcagaggtgacgacagtgcccctatatccttaacccatactcctctgaggcaaacaggcatgggaaaatggaagggttgaggatggaccggagaattggaacttcagaataggtcaaaattccaaaaccatggacattttttttngggagaattgagattgtagacannnnnnnnnncttaaatatgatcaaggaaaatagcttccagaatgtggtggttctgggcaacaaatgagattgtggcgacgtggagattaaaatatatgtatttgagctggggaatttgaatattgtgagtttcagatgttggaaatttgggattttgcagttttgtcttttgaaaatgatcaagtcttgtcagttcgtgccctctttccccatgttccctgggaagacgggtggtggcagagtgagaaggccactggttctgtgccgcagcacgcaaaatttagaattctacagactagctctatacgtagtgaggacccagatttagagaaactgaccaatatttatctccgcatttgtgtgtgtgtccaactctgtaggccaataaaccaacaagacaaatgaactgtgctccacaaa

SEQ ID NO: 77977 - DNA, 1306 bp, Homo Sapiens
  misc_feature (1198)..(1198): n is a, c, g, or t
ggagttgagaaacacagcattaggagaatttattcaaacatccatgcagagatagtctaatattttaaaaactgatttccaggatcattcgctccattttaaaggaaatgcagttctattttgaatataattcaggacagggccccagctctctgatttatgcaaaaggacataaattcacaaacctgcctgggctatttttatatttcagcaagaggttgtgtgcagctgctgtttctggcaaaataaaaaaatagtgcaagtgaaaagtgaacgggaacgggaaggagcgtcattttttcttgatcaaatccatgagatcgtcttctattcctttctcactcagctcatctagactgtagtatcggtgaacaattttctcggcggtgaccaccacgactcggagcccgtgggggtctctgcccagctggcatccaatggcagatgacaccaccatgtcgaggttctggtaggtacccccggcattcctgtggtagtggcctgagaacacgactctgacacctgcgtggatgaacttgtctgccaacttcttccgagtggacttgctgaggttgaagtagtagtcgtcgtcctcgtcgatgctctccaggaacagcgggatgtgctggaagacgatggcatgctggcagtgccgctgcctcgcgatgctcagctgctcgtccagccactggtcctgagcctgcttcaggctggggcatttggaggggttctcgtagaactggggagttgaggaccaggaacaggacgcccccgacccagaagctgaagtagtcatctccccaagtccggcagaactcctcgacggtctcgcccgtgggggtgttgccaatgtcatggttgccgctgacaaggaccagtgggatggccctgtccactgccctaagcactcgcttcaggtcctccgtctgctccgtccgccacggcttccctggcatggcgtggatgaggtcgccgcacagaacgaagaatttgggtttggggttcagcttgttgatggcctggacggcttgctcagttagacggatctcctgttcccattcgtcaccgccattgtcacagtccccagtggaccaggccttgatcagcccaaactgtgggtctgcgcccaggatgaagtagaatgggcctttccattcgctttccttttctgcgggaaacgcggccagggtcctgcccntggctctgtggaaaacaccccccgcctctgcagccgacatggcgagcgagtttctggccttcacttagaacactgcgtgggtggaagccgcgcgacttcacacagaac

SEQ ID NO: 77978 - DNA, 1645 bp, Homo Sapiens
  misc_feature (1362)..(1427): n is a, c, g, or t
ggggcggcgtcactgagccgcgccagctgagccaggtagggccctaccctcttctgttgctttctccctgtggctcgcgccgtcccccgccgccgtcgaccccgcttccatgtccctggcggacacagctcccaggaacctccacgcccatggccactaggcagagggaatcctctatcacctcctgctgttccacctcgagctgcgacgcagacgacgagggcgtgcgcggcacctgcgaagatgcttccctgtgcaagaggtttgcagtaagcattggctactggcatgacccttacatacagcactttgtgagactgtctaaagagaggaaagcccctgaaatcaacagaggatattttgctcgagtccatggtgtcagtcagcttataaaggcatttctacggaagacagaatgtcattgtcaaattgtcaaccttggggcaggcatggataccaccttctggagattaaaggatgaagatcttctcccaagtaaatattttgaggttgactttccaatgattgtcacgagaaagctgcacagtatcaaatgcaagcctcccctatccagccccattctagaactgcattcagaggacacacttcagatggatggacacatactggattcaaagagatatgccgttattggagcagatctccgagacctgtctgaactggaagagaagctaaagaaatgtaacatgaatacacaattgccaacactcctgatagctgaatgtgtgctggtttacatgactccagagcagtccgcaaacctcctgaagtgggcagccaacagttttgagagagccatgttcataaactacgaacaggtgaacatgggtgatcggtttgggcagatcatgattgaaaacctgcggagacgccagtgtgacctggcgggagtggagacctgcaagtcattagagtcacagaaagaacggctcctgtcgaatgggtgggaaacagcatcggccgtcgacatgatggagttgtacaacaggttacctcgagctgaagtgagcaggatagaatcacttgaattcctggatgaaatggagctgctggagcagctcatgcggcattactgcctttgctgggcaaccaaaggaggaaatgagcttgggctgaaggagataacttattaatctgtcgaaggcttatgccgagccagaagccgaagccacttgccctcctggaggagacctgcaagctccctgagcggtgggcgggcctcgtccgcaggtctcatcccacactcttgagaagccttggtcactacagtggtcgcacatgttcctcttcctgttcctgttgacatgtcgttgtttaaataaatctcacttgccaccagtnnnnnnnnnnnnnnnnnnnnnnnnnnnnnnnnnnnnnnnnnnnnnnnnnnnnnnnnnnnnnnnnnngaaaagagaggcgggggcggccgagcgcgcgaacaagaaggactcctcccgacgagggagcgggcagcaagactagcgagcgcgacgccacgccgagttgtttatgaagataaaagagggcgccgccccaatatagaggaggaggcgtgataattataacaagggagcggacggcgggccgccagtttatataacaacgagcaggagagagaggcggg

SEQ ID NO: 77979 - DNA, 930 bp, Homo Sapiens
acccatctaccattcttaacactggtagctcctgtcccattccaagactcactctctcagaccttcccatctccctggctttccatgctcctctccctccacctcctggcttcaactgggtgagggccgtattcctgccactctgctccgcctcagccttgagaactccacgtgggctgggtgggaaggtgctgacgattttcacactgtgtttaccactccatcacctctccatcacctctcaacctttgcttcgacaggtcttcactcacgatttattcctccaggtctttgattggagagagtaactttttaattctgttgttttgcagtttggctctgtaggagtgagtggcgattcaaagatgccggcgtcccgcagtgtgcggttcgtgcccttaaccacccgcttctttgtttcccgcccctctgctttcgcaggagctcttgtgcttgagttcagtgttagtggtagcgtggctcactccacttggaggtggcggccgtctgaccgtgtgttactgctttgccgacggggcctcccggccctgatgcgtgtacactctgcgggctgcaccgggtggctctggttgggggcgaagctgtgttgactgggagagcgttggaaattgagacatggagagatgacgggagtgcgtttctctgggtttgatctccatcctgttttctcccagacacaccacacctaccttgggggaatgccgttgcctgttccacccctttgttcacttcgcgttaactgctgtggtaactttttcaggatctgtgtgaagaatggtaatgacgtagttgaaaggaaaatgtactgttgtgtgtttcatttgtgtgatttcgtaccaaaaaaatgtgtttgaactatattgtatgtaatttggaagtcgtgttaataaaaccctgcagtttccaaaa

SEQ ID NO: 77980 - DNA, 450 bp, Homo Sapiens
tggaaactgcagggttttattaacacgacttccaaattacatacaatatagttcaaacacatttttttggtacgaaatcacacaaatgaaacacacaacagtacattttcctttcaactacgtcattaccattcttcacacagatcctgaaaaagttaccacagcagttaacgcgaagtgaacaaaggggtggaacatattaaaataaaaaactacatgctgtttctttttaaaggcctacatttttctatataccttttaaaatcagtaaaataaaaccaagcaaaatatcaacatgaagacctccttctcttttagttggttagaagtcaaaggaaaaagcaagtactcagaagtgtctcactaaaatacctgttccgtccgccaatcttaaagatttcctaccaaaacatgacacagaaaagagagagttgagacattaaaagcatt

SEQ ID NO: 77981 - DNA, 693 bp, Homo Sapiens
  misc_feature (20)..(20): n is a, c, g, or t
gcatgttgggggccagcaanaggttcttgtcacctcctcatgcaaagccagccatcaccctccggccagagctcaaggtggccccttggccagcccctccttgggtcctccaggaggactgagcacccctcctagcggcatcccttgccctccacagtgctgccaggggcacgtcgctctgtgccgtggactgagaccatcccctggtgacagaatgacccgtttgttggaaatgcctcgttgccagagaaactccccaggcatctcgggaacgaaactatttagttccattgtgaactggccacgggacagctttttatcaacttattaagttggagcactgtaatcgcgcttgctgagttagcagtggtggtaagcgtgtgttaaacacataatgttacgttttaggagagagaggtcgtaaggaagtgtcgtgtcgctcatgactctcttctattagttgggtaacagtggcctcatgtttgtgtctgtgtgtacacagagcccttaggttctgctctgtttctttgccaggtgaatgtttgtggcatgcgctgctgtccgcgcccctctgtcctgcgcagggttcagctgtgcggcgccctgatttcctccatgcacacagaacctccttgtgtctgtttctctgttcctctgtggctgactcaataaacttttccctctgacatgaaa

SEQ ID NO: 77982 - DNA, 895 bp, Homo Sapiens
gctagtacgaggcctgggtggtgaatcggcccgaggggaatcgaagatttggatgagattgttgctcgctatgtccagcccatggcatcctttgcccgggaccttctgaatcacaagtattatcaggactgcagcggtggggaccgcaagaaattagaggagctgctcatcaaaactaagaaggagaagcccaccttcatcccttatttcatctgtgcctgcaaggaactgcccggcaagttcctactgggataccagccccggggtaaacccaggatagaatatgtaacggtgactccagagggattccggtaccggggccagatcttcccaaccgtgaatggactgtttagatggtttaaggatcactaccaggatcctgtaccaggcatcacccctagcagcagcagcaggacccggacacctgcctctatcaatgctaccccagccaacatcaaccttgcagatctgacacgggctgtgaatgccctgcctcagaacatgacttcacagatgttcagtgccattgctgcggtgacaggccaaggacagaaccctaatgccaccccagcccagtgggcctccagccagtacggctatggcggcagtggaggcggcagcagtgcttaccacgtattcccaacgccagcccagcagccagtggccacaccactaatgacccctagctactcctacacgaccccaagccagcccatcaccacccctcagtaccacagctccaggccagcaccacccacagtcggccaaggccagcccagcctcttccagctccggcaacggcagagcagcaaagtccaacagcatgcagcatcgacggggaaaaggcggggcgggcggaaaggagcacgggggaaagaacgggtgacgggccaga

SEQ ID NO: 77983 - DNA, 1873 bp, Homo Sapiens
agagtatgaaagtcgacggcgcgccgaattcggcacgagggcagctgtcatctattggggtagagctggttgacaacgagttggccattctctatatgaacagcaagaagtcagaggcagagttccgggattatcctccagtgctgagacaggccgtctccctggcccgggcgcatccaggaccctctgattgaagtttgcccaggtgtgcagttccgatgaagacatcctgtgtctcaagtttcaccccttggcaggagctatgtggtgaacagaggagctgctcaacgccttgtactgtgtagatttatcaaccgagtcaatgaggtcggggtcgatgtcaaccgtgccattgcccacccttacagccaggccttgatccagtatgtttgtggcctgggacctcggaaagggacccacctcctgaagatcctgaagcagaacaacacccggctcgagagccggacccagctggtcaccatgtgccacatgggtcccaaagtcttcatgaattgtgctggcttcctcaagatcgacacggcctccctgggggacagcactgactcatatattgaagtccttgatggttcccgtgtccaccctgagacttatgagtgggctaggaagatggcagtggatgccctggaatacgatgaatcagccgaggatgccaatcctgcaggagcccttgaagaaatcttggaaaacccagagcgactgaaagacctggaccttgatgcctttgcagaagagctggagaggcagggctatggtgacaaacacatcacactctatgacatccgggcagagctgagctgtcgatataaggacctccggacagcctaccgctctcccaacacagaggagatcttcaatatgttaaccaaagaaacaccagagaccttctacattggaaagctcatcatctgcaatgtcactggcattgcccacaggcgtccccagggtgagagctatgaccaggcgatccgcaatgatgagacagggctgtggcagtgccccttctgtcagcaggacaatttccctgaactaagcgaggtgtggaaccactttgacagcggttcgtgcccaggccaggccatcggtgtcaaaacacggctagacaatggtgtcaccggcttcatccccaccaaattcctcagtgacaaagtggtaaagcggccagaagaacgagtgaaggtgggaatgactgttcactgccgcatcatgaagattgacattgagaagttcagtgcagacctgacctgccgcacctcagacctcatggacaggaacaatgagtggaagctgcccaaagacacctactatgactttgatgctgaagctgcagaccacaagcaggaggaggacatgaagcggaagcagcagcggaccacatacatcaagagagtgatcgcacacccatccttccataatatcaatttcaagcaagcagaaaagatgatggagaccatggaccagggtgatgtgattatccgaccaagcagcaagggcgagaaccacctgacagtgacctggaaagtcagtgatggcatctaccagcatgtggatgtgccgggaggagggcaaggaaaatgccttcagcctgggagccactctgtggatcaacagtgagcgaattcgaagatttggatgagattgttgctcgctatgtccagccatgggcatcctttgacccgggaactttctgaatccaccagtattatcagactgccgcgtgggacccaaaaattgaagagctgccattcaaactagagggcaagccaccttcaaccctattattgtgctgcaggagtgcggcatccacggaatcacccggaacccgaaaattaacgaccacgaaggacggcaactc

SEQ ID NO: 77984 - DNA, 1588 bp, Homo Sapiens
tcgagccggtaccgaacgggtgatgcggttgcagcagcggaccacatacatcaagagagtgatcgcacacccatccttccataatatcaatttcaagcaagcagaaaagatgatggagaccatggaccagggtgatgtgattatccgaccaagcagcaagggcgagaaccacctgacagtgacctggaaagtcagtgatggcatctaccagcatgtggatgtgcgggaggagggcaaggaaaatgccttcagcctgggagccactctgtggatcaacagtgaggaattcgaagatttggatgagattgttgctcgctatgtccagcccatggcatcctttgcccgggaccttctgaatcacaagtattatcaggactgcagcggtggggaccgcaagaaattagaggagctgctcatcaaaactaagaaggagaagcccaccttcatcccttatttcatctgtgcctgcaaggaactgcccggcaagttcctactgggataccagccccggggtaaacccaggatagaatatgtaacggtgactccagagggattccggtaccggggccagatcttcccaaccgtgaatggactgtttagatggtttaaggatcactaccaggatcctgtaccaggcatcacccctagcagcagcagcaggacccggacacctgcctctatcaatgctaccccagccaacatcaaccttgcagatctgacacgggctgtgaatgccctgcctcagaacatgacttcacagatgttcagtgccattgctgcggtgacaggccaaggacagaaccctaatgccaccccagcccagtgggcctccagccagtacggctatggcggcagtggaggcggcagcagtgcttaccacgtattcccaacgccagcccagcagccagtggccacaccactaatgacccctagctactcctacacgaccccaagccagcccatcaccacccctcagtaccaccagctccaggccagcaccaccccacagtcggcccagggcccagccccagccctcttccagctcccggcaacggcagcagcagccaaagtccaacagccatgcagccatcgactggggaaaaatggcggagcagtggctgcaggaaaaggaggcagaacggcggaaacagaagcagcggctgacacctcggccctcccccagccccatgatcgaaagcacccccatgtccattgctggcgatgccaccccactcctggacgagatggatcggtagggggcctgctcctcggactctggttacctctgaggctgggaaaggcctggctgcccactgcctccctccctgcccctcctattatgtcaaaaaagtggcgtgaaaggagacgtttccctttggtggtcaacacggatgggtgaaagggctgaagggcatgagaacctgaactcaaggtatgctaagcaacaaatctccgctccaaacccttaccgacatcagctctgggaacattctggaagggagtgtggcaggtagaataaaagaaagtgaaatgatttaaaaatttttaatccaacccaaaagccatttaacttcggccttaaagatca

SEQ ID NO: 77985 - DNA, 528 bp, Homo Sapiens
tgacgagtcctggaccttgatgcctttgcagaagagctggagaggcagggctatggtgacaaacacatcacactctatgacatccgggcagagctgagctgtcgatataaggacctccggacagcctaccgctctcccaacacagaggagatcttcaatggtgaaggagaagtgacagacttccttcgactgccccattttaccaaacggcgaactgcatggagagaggaagagcgggaaaagaaggctcaagacattgaaacgctaaagaaatttctcctgaataagaagcctcatgtagtgacagttgcaggagagaacagggacgcccagatgttgattgaagatgtgaagcgcattgtacatgagctggaccagggccagcagctgtcatctattggggtagagctggttgacaacgagttggccattctctatatgaacagcaagaagtcagaggcagagttccgggattatcctccagtgctgagacagccgtctcctggcccggcgcatccaggactggtg

SEQ ID NO: 77986 - DNA, 681 bp, Homo Sapiens
attgaacatgctctaactggcctgtgctacttattaccgggcttgtaatagcggttcttgtctccatagcctgttgagtgttcccagatgtgactcacctttctgctgccctcttcatgcaggcctactgactcataattcacttgtcccaaaagccaccccacaagcctgagccaacctgctgcctgacgccacagtcattggcagaggtctgggcattattaatttataaaaatccatgctttacacctggacagtagacagggacttcagagattgcacgtttgaatacattctcccaagactgaggttgttcggttttaattcctgtagtccaatcacacaatttcttatggaaaaccttttgtgtttctggtatttaataacttgaagggatagcaaaatatactgtgtattcagagggcctctctgcagctgctagctcagacaccaaaggggtaaggcccaggacattcatatctttaaaagctgcaaacctggtaacctttaaacttttaaaacaaatgtcatatggggtaacactgaccttttataatttgatgtctcaaatgtagagattatctaaaaatcgtaacttgaataccttgtaatttttctcttaaaaaagaagacttgtgtaagtctctgcatcaacgccaataaacatgttgcttaataaaa

SEQ ID NO: 77987 - DNA, 1176 bp, Homo Sapiens
aaacttccccaaaagtgtcacggctctccaatcgatggtgatgtccttcattctccgacgaccggggaatgtacccgccatgaatctaaatttgctttccattcgaaatcggtgctgtaaccggtccgcaagccgagtacacgcgagctcttgtggtggaagccatcaatggttgaacgctgctctcggacacggagatgaccagcatcgtgggcatcatccacgtggaccagatcgtgcagatgcccagtcagctgttcttgcagggaccaggtgtcaattgtgcccatggacacccctggagaaagacccaagccacaggaatctgccacttcttttatgacagcgctccgagtggggcttatgggacgatgacctacctaacaagagcagtggcttcttatttgcaggaattgttgcccaattcgggctgccagatgcaatagggtctcacctggaaacatgatcacactctcaatctgtcacgtgccccctagccttactgggaaccttctgtcccccaagatcccctgtgctatcaggaaagcatgtcccatcagaaacactctcggggggcaatggtagcactcaccctgaaactgatgtatgttaaagccacagagatagagctgaggagtcctgtgttcccccgcaaggagcaccccgggatcattttctaggttcatttctctggaacatttgctgtagcatctggtctcacggactctgaggaggaattggaaattggtctcttttgagtgcagagggaactgagacgccagcttaaattggctcttgcagagagttacagaaatagtttcgatgagctagtgacacatcctaaagatgcaaagatcctcctggcggcagtagccttgacaagggccacctcttcacaggatgcagtctgtctgtgcaccaaactcttcaccaaatagaacacttgtgtctctctgtggaatgggggttttcttgtgccttgcttgctttcatagccttccattttattggcatggctgccttgatgtaacataattctctgtccccaagatttagaaaattcctcttcgttcaccttggctcatggtcttccagggtttttatcctggctgtctatgaactagggttttctcctgccttaggaaaaatactgcatcttctggaatctaaaaaaaa

SEQ ID NO: 77988 - DNA, 1043 bp, Homo Sapiens
tttctttcactgataccactgaatggaactggtgctgtgactcctgctgctggggatttatgtcccgagaccttagcctggctgagtggagcctgagacctgcacaacagctcatggtcatgcatgagagagaagtggctggccacagccagagggaacagtaacagcccaggggcctttattttgggaaaggctgtccggggctgttactgtctcttctggttataaagcagacatgtggccatcttttccgcagggttagagtgggctcctttctttttggaatccttttcttctcctttggtagcagctccctgcctccagggcttccgccaccagcgtctctgctgtgttgcgcagtgcagtggggtgcaagggctttgtttctgcctgcctgaaagagagggctctggggatggagatgagaaacaacacgctctccttcagacaatgaggcattctgtcctcctgctgccattcttcatctccactgagagccagagctggtaggagccgagtgccacaggcattctgcattgctctactcttaggtttgtgtgtgtgatccttcccctccctgtcgcccactcctccctcctctggctatcctaccctgtctgtgggctcttttactaccagcctatgctgtgggactgtcatggcatttagttcagagtggaggggctttggcctgaaataaaatgcaagtatttaagattgttgttgcaatttgtgtctaacaagctgtagcagagaaggagggagtgagcgctggcagtatttcctttcataaatcatgaatttatcagtgtggaaataatgcttcagaactgtgctctgtagccctcctgcattgtgtgtgcagctcaagttcaccactggaggaaggattgtcttccaaagagctgggatccaactcttctcacagttctgggcgtgaaccttgttaggtatactttacctgatgctgcttccatcctcgcagtctgtctgaggtgccaggtgctgaaagagaaataaagtttgtcaacaggcagatgcaa

SEQ ID NO: 77989 - DNA, 657 bp, Homo Sapiens
  misc_feature (15)..(15): n is a, c, g, or t
gcacctccacccccntacaccagcctcaggaggcctcactgaagagctgctttcgagacccggctctccgaaccgtgcccctgattcataccggattccggaagccgctaggcctcatagacgccgaagctggacttggagtggggaatggtgggagtaggggtcatccggcccgaggcctgccctggcacacgcgtttccgccgcgtatggatatacacatgttttcggcaacgtgttcccgtgtcctggcccctcacgggcccccacactctcctgaccgtgagggcactggtcagttccgcccccgtggtaggcagacgcgcggggaaattcggacccaggagcccagccccggctgtgccatcttgtgtatgggcagatatgacctgacagccccctccagtgccacagggtacgcacacgcagagccccgcctgtgcacacgcgtgtcttcgtgcactccccgtgcggtacaggggcacttcgtaacccagggaaagggcggggggcatatttgcaagcgcgctcggtgcgggcaggctcgcattgcacccagggagctggagttgagctgttcccctaaataaaaacccttcggaaaggagaccaaaaaaagcacaaataatgcaaaaaataataatgaaatgaactgcga

SEQ ID NO: 77990 - DNA, 1373 bp, Homo Sapiens
aggctggaccggtccggattcccgggatgcgggactgaggcgactgtggggacatcagtgatcgtaagtctcctgggcccgttattctcagattaggtgacggagctaagacttcgagaccatctcgtcctttttgtatcgcggaaacctgaggaacgagccggcggcggtgacctgcacgagaagccaggctaactgggtgaagtaccatgcaagcatttcttaaaggtacatccatcagtactaaacccccgctgaccaaggatcgaggagtagctgccagtgcgggaagtagcggagagaacaagaaagccaaacccgttccctgggtggaaaaatatcgcccaaaatgtgtggatgaagttgctttccaggaagaagtggttgcagtgctgaaaaaatctttagaaggagcagatcttcctaatctcttgttttacggaccacctggaactggaaaaacatccactattttggcagcagctagagaactctttgggcctgaacttttccgattaagagttcttgagttaaatgcatctgatgaacgtggaatacaagtagttcgagagaaagtgaaaaattttgctcaattaactgtgtcaggaagtcgctcagatgggaagccgtgtccgccttttaagattgtgattctggatgaagcagattctatgacctcagctgctcaggcagctttaagacgtaccatggagaaggagtcgaaaaccacccgattctgtcttatctgtaactatgtcagtcgaataattgaacccctgacctctagatgttcaaaattccgcttcaagcctctgtcagataaaattcaacagcagcgattactagacattgccaagaaggaaaatgtcaaaattagtgatgagggaatagcttatcttgttaaagtgtcagaaggagacttaagaaaagccattacatttcttcaaagcgctactcgattaacaggtggaaaggagatcacagagaaagtgattacagacattgctggggtaataccagctgagaaaattgatggagtatttgctgcctgtcagagtggctcttttgacaaactagaagctgtggtcaaggatttaatagatgagggtcatgcagcaactcagctcgtcaatcaactccatgatgtggttgtagaaaataacttatctgataaacagaagtctattatcacagaaaaacttgccgaagttgacaaatgcctagcagatggtgctgatgaacatttgcaactcatcagcctttgtgcaactgtgatgcagcagttatctcagaattgttaacgtgaatatatctggatggggggttttgtaaataatgaagttgtaataaaaataaaatgaccaaaagcaaaa

SEQ ID NO: 77991 - DNA, 1411 bp, Homo Sapiens
  misc_feature (1225)..(1272): n is a, c, g, or t
  misc_feature (1276)..(1304): n is a, c, g, or t
  misc_feature (1314)..(1327): n is a, c, g, or t
tccgacaatgtggatcacattgattcccttattggctttcctgagcagattgctgaaaagctgttctctgctgctgaagccagacagaaattcactgagccaggtgcagggctgagggctttacagaaattcactgaggcctatggaagtttggtgctttgctccctgtgtttgcgaaacaggtatctcgtgatttcagaaaagcttgaggagattaagtcttcccgggagctgacctgcctggatctttcctgttgcaagcttggagatgagcatgaacttctagaacatctcaccaatgaacccctgtctagtgtaactcagctccacctgaaaggataattgttaatctgatgctggggtgcggaagatgacagcaccagttcgagtgatgaaaagaggccttgagaatctaacataattagacttatcatgtaaccctgagatcacagatgcaggcattggatacctcttttcttttaggaaactaaactgcttagatatctctgggacagggctcaaggacatcaaaaccgtcaagcacaagctccagacccacataggccttgttcactccaaagtgcctttgaaggaatttgatcatagtaactgcaagacagagggctgggctgaccagatcgttctgcagtgggagcgtgtgactgcggaagctgtgaagccacgggagacctcggagcctagagcagcagctcagcgcttctatgggaagcggtctcgagcagaagccccactgaagtgtcccctggcagacacccacatgaactcttccgagaaactccagttctataaagagaaagccccagattgccatgggccagtgttgaaacacgaagctatctcaagccaggagtcaaagaagagcaagaagagaccttttgaggagtcagagacagaacagaataactcttcacaaccttcaaagcagaaatatgtatgtcttgctgtggaagactgggacttgttaaattcctattgattagtagatacaagttgacctttctctggcccccagctctagtgtttgagtaaaggagactgaggatgatttactttttgtttgaatttacctatggcattagcatagtaagcagatatttctacttttgtggtgtgggaggggaatgctatggaagtatgtaataatttctaatgtatattttcaatacatagtaattttttcaaataaacatttttgctgtccttnnnnnnnnnnnnnnnnnnnnnnnnnnnnnnnnnnnnnnnnnnnnnnnngggnnnnnnnnnnnnnnnnnnnnnnnnnnnnncctggcgggnnnnnnnnnnnnnnaaaaactttccaaacccttcctttgggccgcgggccccagaaggaagggaacctgggcctaactggttcccaaggaaacccggg

SEQ ID NO: 77992 - DNA, 701 bp, Homo Sapiens
acgaggagaacgcagaagtagaccaccattaacatatgcatctttaattaggcaggccattctcgaatctccagaaaagcagctaacactaaatgagatctataactggttcacacgaatgtttgcttacttccgacgcaacgcggccacgtggaagaatgcagtgcgtcataatcttagtcttcacaagtgttttgtgcgagtagaaaacgttaaaggggcagtatggacagtggatgaagtagaattccaaaaacgaaggccacaaaagatcagtggtaacccttcccttattaaaaacatgcagagcagccacgcctactgcacacctctcaatgcagctttacaggcttcaatggctgagaatagtatacctctatacactaccgcttccatgggaaatcccactctgggcaacttagccagcgcaatacgggaagagctgaacggggcaatggagcataccaacagcaacgagagtgacagcagtccaggcagatctcctatgcaagccgtgcatcctgtacacgtcaaagaagagcccctcgatccagaggaagctgaagggcccctgtccttagtgacaacagccaaccacagtccagattttgaccatgacagagattacgaagatgaaccagtaaacgaggacatggagtgactatcggggcgggccaaccccgagaatgaaaaaatggaaa

SEQ ID NO: 77993 - DNA, 595 bp, Homo Sapiens
  misc_feature (56)..(56): n is a, c, g, or t
gccattcgcaccaacctctcactgcataagtgctttatcagagtagaggatgagtntgggtccttttggccagttgatgttggagcttttaaacgtggccgccatattcaacgaggccgtcctcgcaaatactgccccgatgaaaactttgacgagcttgtcgcacataacccttcccttattaaaaacatgcagagcagccacgcctactgcacacctctcaatgcagctttacaggcttcaatggctgagaatagtatacctctatacactaccgcttccatgggaaatcccactctgggcaacttagccagcgcaatacgggaagagctgaacggggcaatggagcataccaacagcaacgagagtgacagcagtccaggcagatctcctatgcaagccgtgcatcctgtacacgtcaaagaagagcccctcgatccagaggaagctgaagggcccctgtccttagtgacaacagccaactacagtccagattttgaccatgacagagattacgaagatgaaccagtaaacgaggacatggagtgactatcggggcgggccaaccccgagaatgaagattggaaaaaggaaa

SEQ ID NO: 77994 - DNA, 616 bp, Homo Sapiens
aaaaattcatgcttcagggaaatgcccgattccagcccaacaaacctttatatactcaagacagatgtaccacccgtcggtgtagagagcgttgtccccaccctccaagaggaaacgtgtcggagtaatgcgagtccattttctttcagctagtgtaccgatgcacagcaaccagccaatcctgctgtctcaagggtatccgtacctcaatgtcagttacattcagcagaaaaagtgacatttaatggaaagcaaaacaaatcaggtcctgatttaaaattttaacacgtttagatagcttatttaaattctaagactgtttttacagactgtattatttgtatataaatatgaactatagtttttactagtatcaccaaattgagtgatacaaatttcatctattttattaccctatttttaagggaattttatgttttgtttaaccttgatgaattgtataaagagagaatttaaaaaattacattctttattttctattagctgtattcatactttggttgcttcagactttatatattgttcttaaaagttaggaaagaatttcatgtgttttaaattgtcacttctattctttacagaaccttgtagtgcc

SEQ ID NO: 77995 - DNA, 503 bp, Homo Sapiens
gtcggcctctggccagggtgagaagagcttggggaacgcttggcatatggcgggctggaaggggctcaaccccgatttggagagaagtttgggatggagtgggcgagagattgagagagcgagcaggaaaagaggtcttggagcctgggactgatggtggataaggcctggaaagaagatgacgaggaggaggagagagggaagtggggtggatgaggagcaggctgacacctgggctgccctcaatccccaaggccagggagggcggggctggcccctgggaagaactgggtctctgggctccctaggcactgcccaaactggctgagccaggagtggggcaggaagtgagagtcaaggcccagcaaaaggagggggaggagctgcaaattagaacctgaaggaggaccgggttggggatcatccctttcctcaaggtcacacagcctagaagctagagcagtgcagagtctgcaaataaaaccttaagtctgtgaaaaaaa

SEQ ID NO: 77996 - DNA, 921 bp, Homo Sapiens
ccaaatcttggtagtctccttatagttgaagataaaatgttgagtgcacttattttagaatatcctagacataactgtctaagtaaaagcgctctattaatctaaaacactacaagagaatttaacaccatctctcaaatgcttttttggagagcttaatgggattctgaatatttgcaatgtggagtttccgccccgatctcacgtcagtgagggtctcctgtctctcaagtgtgtttcctttggctgttccctaatacaaaacacggacatatttttactcgtagcactcaatttagtaacttctagatgctaccgttgacctgagttaaattcatttagtcgtgtacgtaaaaactctccttttagtgtgttattttcttggccttcccttttaaaggttaaagtttctaacctaagaattaagtacgcgttcaggaagctgttgtctaggccttccccttgtgaatctgggttcattccaatacggcaagtaagagttggaaactttgagaacacagactataaaggcagcagcccgaacactgtcagactctaattggcgaccctgggaaacagttgccctgctattctttaaagaaagacgtttattctgatgataaaaacagttagccagactgtttttaaagcacctggcgggaagcagaaggttggatccaagcccttgttcagatttggtgcctgataagacaggggtttctctttttgtgacctttattattattattttgttaactgttgtaaccagttagctgttgtgttttaagatagaaaggaacaagactaaaattgtaaatactttgtaaacatcagcatttgtacttgaatagtaggattttaaagggcattgatagcataccaaacaaaaggcaaaataaagtgacctttttatataaaaaa

SEQ ID NO: 77997 - DNA, 649 bp, Homo Sapiens
ctcgcccatctgtgactttatgtctagtggtgggcacttcctctgtggtgtacccagtcaggccatgtttgccccccaggtggctgccaggggcgtgccagtggctgaatttaacacggagaccaccccagctacgaacagattcaggtttcatttccagggaccctgtggaacgactcttcctgaagcccttgcctgtcatgaaaatgaaactgtttcttaagtgtcctggggaagaaagaaattacagtatatctaagaactaggccacacgcagaggagaaatggtcttatgggtggtgagctgagtactgaacaatctaaaaatagcctctgattccctcgctggaatccaacctgttgataagtgatgggggtttagaagtagcaaagagcacccacattcaaaagtcacagaactggaaagttaattcatattatttggtttgaactgaaacgtgaggtatctttgatgtgtatggttggttattgggagggaaaaattttgtaaattagattgtctaaaaaaaatagttattctgattatatttttgttatctgggcaaagtagaagtcaaggggtaaaaaccctactattctgatttttgcacaagttttagtggaaaataaaatcacactctacagtaaa

SEQ ID NO: 77998 - DNA, 751 bp, Homo Sapiens
acatccctatggtcatcacccactgctgcattcagtaaaactaagtgcccagcagagagcctgtcatagggaactgcatggatagaattctccaggacaagcagtggagctgccggatcacaaatgggctcgggtacccagcacgcccctccgtccatgagcaccacaggccccgggccctccagagacaccacacgatccagaacagcgacgatgcttatgtacagctggataacttgccaggaatgagtctcgtggctgggaaagcacttagctctgcccggatgtcggatgcagttctcagtcagtcttcgctcatgggcagccagcagtttcaggatggggaaaatgaggaatgtggggcaagcctgggaggtcatgagcacccagacctgagtgatggcagccagcatttaaactcctcttgctatccatctacgtgtattacagacattctgctcagctacaagcaccccgaagtctccttcagcatggagcaggcaggcgtgtaacaagaaacagagagttttgtgtacagcttgggaatgaaaaggttgattgtaaacccacagtatctagcagcgttgtgccaaattgcccttgtgtttctctccacccaaaatatcacagctgctttcctcacatttggttcatccgtgtgctgttcttttgggttctgatacggttttgccatgtttgcttgtatgaccaagtcaccaaggaaataaacaggaaggaaatccatgttctc

SEQ ID NO: 77999 - DNA, 412 bp, Homo Sapiens
tcaaaaccgtatcagaacccaaaagaacagcacacggatgaaccaaatgtgaggaaagcagctgtgatattttgggtggagagaaacacaagggcaatttggcacaacgctgctagatactgtgggtttacaatcaaccttttcattcccaagctgtacacaaaactctctgtttcttgttacacgcctgcctgctccatgcctgaaggagacttcggggtgcttgtagctgagcagaatgtcctcattttccccatcctgaaactgctggctgcccatgagcgaagactgactgagaactgcatccgacatccgggcagagctaagtgctttcccagccacgagactcattcctggcacgtatccagctgtacataagcatcgtcgctcgttctacacgtttacgccccct

SEQ ID NO: 78000 - DNA, 1153 bp, Homo Sapiens
  misc_feature (749)..(769): n is a, c, g, or t
accaccaaatggaaaagtcatttaattcaaaaatcatacgtccactcatttcatagggattgtcacataaaccaaccacatgtaagaaagccaagtttcagaggcctctgaacagaaattttgttttctttatagatatatttggtgacacaaaagcattttttaaaagcctgaacatggcaacagggctactaacagggacaaaggtctattctagtcacagattactttctaattacagcattggattctatgcacgagtcaatagtcaatactgaagtttagaacagtgcgttattttaaaagaaaacattaaagtgccatttaataagtactttattgatattatatcacacagcactttacagtatactcaaagatagcctaaattatgaattaaacatgcaaatattttcttttccaaaatgtggacaaaatgtcttttagagtgcttttgaacactagccttagctactaagcattcatgggtttgatctttcttgcgacatgactttaagtaagttaacaaaaaatgtagctgtagacagtaattgtttgataaatatgaacagttttaaaatggcactgaatttacatctttaatcattttaataggccatccacagcctctcttgtgtctctaattctcaacctccgagtcttaaaggctgtaaaggctcagaaagtgccagctcatgtgggtctctgtaagtgtctatgtcttcatagatgtaaatatgtgctgtatnnnnnnnnnnnnnnnnnnnnntaaatatactttagaatcaacagatgtgcattgtcagatacaaggttgattctggcatctggataaccaagaaagctgcttttaggtgtctggacaactttgtagaaatggttgacgtagaacagtatagaatgtcttaacctctccaggactgctccaggtaactgacattttgtttatcaatactctggttctgactaaagtgaattttgacatggacatgtcatgtcatgtcatacccacacaagggtctaggtctatgctaagcctttgctctctaaagcattccaccttgagagacgcggacgcgtgggtcgacgatatcccgggataccggaccggtaccagcctgctttttgtaacacctgttatagttccaatgct

SEQ ID NO: 78001 - DNA, 673 bp, Homo Sapiens
atatgaaaataaggttttgggacttggcttacccagaaaggtcctatgttgttgcaggaagtactagttccccatctgtgtcctactacaggaaaataattgaaggcactgaagttgtccaggaaattcagaataagcagaaagtaggaccaagtgatgacacccctcgaaggggcccagagtccctgcccgtgggacatcatgacatcatcactgatgtcgccacattccagaccacacagggcttcatcgtaactgcttctagagatgggattgtgaaggtgtggaaataaaacctactgatttgtataaattttaatagttataaatataatactataactcgagaaaaggcatttctagagaacagattcatttgcttaattttcaaaattatgtctccatattactgtttcatgactgactgactaaatgacacccaaaatggttaagatgtacttgactagtttacttatgcatctctttgcaagaatcagccagccaacaatgtctgggatttttattgtatatgttatagaggtgagaaatgtaaaatatgaaaatgaatatgtttattttgtattgaaaaagatggttgaaaagatggttgtaagctattatagtataaacacatttttgctattaaaaatgctattcaaagcagttaaactgt

SEQ ID NO: 78002 - DNA, 773 bp, Homo Sapiens
  misc_feature (16)..(16): n is a, c, g, or t
agtacaagaggtcatnaggtacaatcggctgctgcaggtgatcacacagacactgcaagacctactcaaggcactcaaggggctggtagtgatgtcctctcagctggagctgatggctgccagcctgtacaacaatactgtgcctgagctctggagtgccaaggcctacccatcgctcaagcctctgtcatcatgggtcatggacctgctgcaacgcctggactttctgcaggcctggatccaagatgccatcccagctgtcttctggatcagtggattcttcttcccccaggctttcttaacaggcactctgcagaattttgcccgcaaatttgtcatctccattgacaccatctcctttgatttcaagggtgatgtttgaggcaccatcagagttaacacaaagaccccaagtagggtgctatatccatggattattcctggaaggtgcccgctgggatccagaggccttccagctggctgagtctcagcccaaggagctgtacacagagatggccgttatctggctcttgccaacacccaaccgcaaggcccaggaccaggacttttacctgtgccccatctacaagacactgactcgtgctggaacactatcaaccacaggacactctaccaactatgtcattgctgtggagatccccacccatcagccccagcgacactggataaagcgtggtgtggccctcatctgtgccctggactactagactcagacagaagggctggggccattaaagctgaattttctaagc

SEQ ID NO: 78003 - DNA, 579 bp, Homo Sapiens
tggactgcttagaaaattcagctttaatggccccagcccttctgtctgagtctagtagtccagggcacagatgagggccacaccacgctttatccagtgtcgctggggctgatgggtggggatctccacagcaatgacatagttggtagagtgtcctgtggttgatagtgttccagcacgagtcagtgtcttgtagatggggcacaggtaaaagtcctggtcctgggccttgcggttgggtgttggcaagagccagataacggccatctctgtgtacagctccttgggctgagactcagccagctggaaggcctctggatcccagcgggcaccttccaggaataatccatggatatagcaccctacttggggtctttgtgttaactctgatggtgcctcaaacatcacctgtgggtagacacagacacaccccacacacataacaatacccagaatctgggttaggaggcacaaaactcccttctgagagagctgcctaatgctgcctgcctgcccatcatcacgtacctaccactttagcccatggcctgtgtctgtgccctgcccctgtgatttctg

SEQ ID NO: 78004 - DNA, 1510 bp, Homo Sapiens
gagctcgtacgtggcgcgcgcactaccctggttgccctgcaagatggcactggatgtctacaatggtgaacaagccccctacgcctcctgccacatatttgaactgtaccaggaagattctgggaatttctcagtggagatgtactggcggaacgagagtgacaaggccccctggccgctcagcctgcctggctgccctcaccgctgcccactgcaggacttccttcgcctcacagagcccgtcgtgcccaaggattggcagcaggagtgccagctggcaagcggtcctgcagacacagaggtgattgtggccttggctgtatgtggctccatcctcttcctcctcatagtgctgctcctcaccgtcctcttccggatgcaggcccagcctcctggctaccgccacgtcgcagatggggaggaccacgcctgacaaccactcagcccccttccctccacctcctaggggaggtgcgcgggccctcgctcctgactgttgctgctccccagcccatggacaggagatcctgggttgggcctccctctgatgaccccagccagatgagcgagtggggctcagcgtggcccatggtgcctgtcactcagcattcccatgcctgatgtttaccaagtgctgtgttggacactggctttctccaaacaggatttgcctcctccacgctccctacacacctgagatgtaaactggcagtcagtgttcactcaggacctaggattagaaaatggcagagttggtgctggatccaccttgcacttctatcaagccctgttctttttcctccagcctgaagtcttcggcaaatagctcagagggacacggtcttgcctctcagtgcttattttagtgggaaaaacagctaataccaggggtacaaacattggctcccaaggaactggatcacccaacagccagccagccacatttccctgtgtctggctagagccaccattagactcagacagaatgcttcaggaatcgttgtcaccccttcaactggagcaggacggaaggttgtctgtacttgggagggagtggggagtggtgggaagggagttgcttgtcacacgaatcaggaaactgctctccctcagctgggctggggtctccagggacctgagctacatgcaggttgtgagctggaaaagaaagttctagactgtggcccagaatagggctggggcagctcccagagaatgaatagtgctgtttcctattggactgatagtgctgtttcctgtgctttttcttcatttctgagacgcaagaagctctctgaccaggtcacttctggaagatccacgcagaagctcagtcggtatggttttattggccatatcaaaagtgagcacaaatcaaatactgcttgatccctctgctaccaccactgagaggagaaagtcatttagttccagatagcttggttccaggctgatacagaggggcttgggacactgtgtcacactctggagcatctcgggagcagtcaga

SEQ ID NO: 78005 - DNA, 227 bp, Homo Sapiens
ttttttcaacattgaagtaattatttaatgacacaggaaaataacatgttatgaaacaagctggttacaagtagtaggtagatgacttaatttttgataaaaaaattaaaaagcatgaacatgcatataaaaattagattatgtacaaaataccaacagtatttacttctgctcagtaattaaatattcttccctttgtttttgtcttttaaaaaacattatttctg

SEQ ID NO: 78006 - DNA, 1093 bp, Homo Sapiens
tgaagtgttagtgaatatttattctttaacatatttcaagctgctattagcttatcagacatctgctttattgaaatactggacaatattgttttattgattgtgtacctactgacagtaacaatatgcaagcatgcattattctcataccactacagctttaatagtctgaatgtaatactgaaaataatttactgctgtatacgtatggcagtttagatgctgcaatagttagagctgccaggttggaaatgtacacaaatgagtcatctataacctttgcaaaactaagctgctgtatcaagatgctaagagagcccaagcttctaaaaagcatcaataatctgattactcttcgcagctaaagtaaacggaaacagttttctaaaattaaaaactagagttttttacatttcttagtatagttaatgaaaaggaatggattaggttttgctaacaagttgacttattgcaatgtctagaccttgcatccttcaggtgatgtaagatgtaaacatgaactgaatggtttataggtattcagatacagaaaatatttatgccaatagctttttgaatgaagttatctaatattttatattatgcaggaagtagtctttgaacaatagagaattttcaagaaacattttacatatgtagtttattttatttattcattttggctgctagggagcattccatttaattgataaaatggttttatttatattaacccatgtcggggtgattaccttttttataaacttttacactcttatatgccatgctgtggtaaaaattcttgtatacatcttgggaacaactagtttctctagcatggacaccaagaaaacctcagaaatgaagtttaaaaaaataggtacagtagaacacaattgaaataaatttttatattcactaaattttttatagttatagtttttattgaagagagttagcaaagtgcatgggaatgatttattctagcttcaggatggcagtcacctttgggagtgaaggagggcaaaggaattagggtaaagcttagctgtattcttatcttttcttctttaaaactaataaaacaaacaag

SEQ ID NO: 78007 - DNA, 507 bp, Homo Sapiens
  misc_feature (199)..(208): n is a, c, g, or t
ggcattacccataaagtatttgtccatgggataaactgagatgccttcccccaacaattacatttgcttaaaggaaaacacagctgccttccttgaatattaagatgcaactgggactagtgagaccaaagatttcaaagggaaggaaagtttttatagcataaaagatactctattatatcaaagtgcattgagattnnnnnnnnnntgaggcaaagtgatgactattctccttagggacaaaaggtccaattgagaaagaagctctaggtgccactttccagaagagccacctgccactacttggagctattgcagatattcaggagtcagaatttcagactcctgccacctctggggttcatgggggagactgtgcacacatgtctcccctgaggcaaagccaacaggtaattactcgatcactgacaccttgggataactgaacatgaaatcaatttcttaatggttctctcttaaagaaccagcatcacactgctagctact

SEQ ID NO: 78008 - DNA, 571 bp, Homo Sapiens
actaagctttttttattaatactcttcactgcatgctctgtctatatgcatgcgtttgaataataaatattaaatatgggggacgcacagaaccataaaattaaaaatgaaaccaaactgaacattaaacaatagtacatggtagctggagaaatgaataagggcaaaaaataaatttgaggtaacaatagtggcccaacaccactgatctgaaatatctgtaaaaattcaactaagtgtttggagattcaagtaacaaaccatctgctccaacttggtcagacttcccagagtccctgctgagtttcagtccatgagccggcactcacatagctccttgtaaatcctcttccgcactcggggcatgtcttcttgtgaaaactggaaaggctgctctaaggcgaggcacttgcagtactggagcacaaagactccacagtcactgtcgtttttctgttgtggaatacactgaagggaaaaacacaatagtcattaaaacaagatccattacttctcttcagataacaaaaactcctttatggaaaaatgcgcacaagataggaaacttttc

SEQ ID NO: 78009 - DNA, 704 bp, Homo Sapiens
  misc_feature (164)..(336): n is a, c, g, or t
agtattctgtgatcttgcatggatccttctgtgcaagaaattttgcataacctctaaaagggatcccttttgcttcagttcttgactatgtgccttggttgactgccttttccttaatgcaggacacactttgctcatgagtacagttaatgaactattagaannnnnnnnnnnnnnnnnnnnnnnnnnnnnnnnnnnnnnnnnnnnnnnnnnnnnnnnnnnnnnnnnnnnnnnnnnnnnnnnnnnnnnnnnnnnnnnnnnnnnnnnnnnnnnnnnnnnnnnnnnnnnnnnnnnnnnnnnnnnnnnnnnnnnnnnnnnnnnnnnnnnnnnnnnnnntctgtctaaaacattactgaacctagagttagtagatctccaatcatctatggatagatttcagggagagtataaaaaagaaaaagatggtttaaacaattgcatttatattttactaaactactatgaatgtaggcaacaaaccacagaaatattagttgtacctgactttgtcccaatataaataagacatattttcatatcatcctacaatggtttcagatatcttgaaatatggtttatgcacatcaccactctgacataatattggctatttatctgtcactagatttgattatgagttattaaaaaggccatttcttattatgtctcaataaaacatgttagtaacttattttaatataaaa

SEQ ID NO: 78010 - DNA, 1093 bp, Homo Sapiens
  misc_feature (1021)..(1021): n is a, c, g, or t
tggctcaaacgattcttccacctcaacttcctgagtagctgggactacacgcacgtgccaccgcgcctggctaattttgtttaattttgtgtagaggtggagtctctctatgttgcctaaactggtcttgaactcctggccttaagtgagcctcccacctcacccttggccttccaaagcactgggattataggcatgagccactgtgcctggccagggccttcacttttaaagacttgtggttaattgggcccacctggacaattcaatatgatttccccatctcagtgttcatgaccttaattacagatacaaagtcccttttccatataacgtaacatattcataggttctaggacatctttgggggagcccttattctgcctaccaaagaaatggatattcacaatacaatgaattgataaagaaatggtgtatgtataactaatacataacatgtataatgtatttatatatgtgtgtgtataaccaataaaatcactaatagaaactaaaataacgaatcaataaatatacaaattatcagacagaaaaatggccaaagacaaagacttgttctgcccttcatggtcgaggaacacatgtggccagtgagtatgtgaaggcaccatttacagaaaccatttacaccactccattggcataaaccacagtctgaccattgggagcggtggcagggatgtagggcccagggtctctcctacattgctgatgggagtgtacagtgggactaccactttaaaagggtggcatcacctccaaggtggtgaattcacatacctgttgacccagcagtcccatatctgggcatacaccaaaagggaactctggtgtgtggacgagtgagaatgaacaggagtgtgtgttgcaacgctgttcacaagctccacgtgcaaccagccacttgcctcccagcaggagggagagtgagtaaacatggaatgcccatacaaaagagaattttaaactaattaaagcaaacaagccagagtgacagacnaaccatgtgggaaggcttggcaatataataccaaggaaaagcccactgcattcttatcaagtttaaattact

SEQ ID NO: 78011 - DNA, 1269 bp, Homo Sapiens
  misc_feature (655)..(746): n is a, c, g, or t
  misc_feature (891)..(952): n is a, c, g, or t
  misc_feature (1028)..(1039): n is a, c, g, or t
cctcagtaggccacagccagagatagagccagaagcagcagtgcaggaaatgaggcctcccacagatctcacacattttaaagaaacccaaacccatgaaaacatgtctcaacttagcgaggaagaacagaataaagattatcaagactgtagcaaaaccacttcattgtgcgcaggaccctcagcatcaaagaatgaatatgagaaaagcagaggtgaattgaagaaaaagaaaacacctggtccaggcaaacttccaccaacactttcttccaaatatcctgaagatgacccagactactgtgtgtgggtcccacctgaaggtcaaagtggagatggcagaacccatcttaatgacaagtatggctattgattgcttcagaatcccaaaagaaaaccttgtggaccatgtgacatggaatatttgggataatgtatcaaattgaatggccagagaagtttagatgattatttgtaagatctggtgactggcttttcgttctgtgttcttggcttcctaaatttatctgcccatatgattctcatgcatttgatatttatgtttaaaagtgtttatatatgtatgtaaaaagggaaccatatgttttgagaatttgtaaagtgagagacatgatcctattaaaataagaaggcnnnnnnnnnnnnnnnnnnnnnnnnnnnnnnnnnnnnnnnnnnnnnnnnnnnnnnnnnnnnnnnnnnnnnnnnnnnnnnnnnnnnnnnnnnnnttccttgtccggccgcctccggcccctcaaaaactttttaaaaccatttctttgggcgcgcgggccccagaaaggaaaagggaactgtggccaataccgtgttccccaaaggaaaacccgtggccatgacataggggctgggaannnnnnnnnnnnnnnnnnnnnnnnnnnnnnnnnnnnnnnnnnnnnnnnnnnnnnnnnnnnnnagggagtctctgagggcctttacctgggatctttcaaacgggaagtcccaaagcgagccccaaaattcaaattaannnnnnnnnnnntggccacttctttcgaaaaaaccggggtggaaattcccttaaagccctccctcccccaaatgtggaaacccccttccccaaacgggggtttgataggaaccccttgaaatcccccagggcgggatttcagcaccccttggtccccccctttggcgtttataaatattttcccccctcggggggaaaaacccggggcggccagaaaaaaaggttgcgccctaatttgtggg

SEQ ID NO: 78012 - DNA, 1634 bp, Homo Sapiens
ggggggggaattcccagggccgttagttcatggcccccgggattttccttgggaagccggcttatggcccatgtttcacttttcccttgccgggggcccggccggcccaaagcaaattgttttgaaaaaggttcttcgaaggacccgaaggggggccgacaagggtctctccccccggtctgttctgggtcctttgaaaaggacccacgtcaatcctttaattggtacagaaactacttttctttcaagagagcccttgcgctctggttggattttgtgcacaacgtatacaaaatctatggctattgagttaagttaggatcagagttaaaactacctgccaaggtagttttgggatcaaacgactacgtttaccatctgagagctatttgctatctagaggtgagaggagtctgtacaatgtcgccgctgggtgggcgggtgcagctggctgtccgaggaggggcggccgtcccctttgcacactaggtgcaggcagcgcggcactacctggagatcatggagctggagtgggactggctggaggaggtggtggcggcactcagctgggagaagccgctgtggctggactccaggctcgtcatggaacctctgaaatcctccgagccgatcacctcggtgtagtacatcactttacacttgtgcgaagagacctgcagggacgcaagcacgtcgtccacccggggaaggctgctggcggcgcacgcaggcatgctgtggaatttccactgcaggatgtagaagcccggccacctggtcacatgggaaccctgcacgctttctccttctttgcagatcagaggcgactccaccatgctgtagtcgcggcccagctgccagactttgtctatgagctgcacattgttcccacccggagaggtgatgctgtgggctcccagggagtcctttttgggtggttgtggcgacctcttggagtgatagatgttaaacacaatgtcccctttgcacacgtcgaaatcccaagtgatgactgacgaggcatccacaatctgaatgagaatctcatgtggggctcctttgaagacgcttgcagactggtagatggtctcagtccagagcttcaggtcttcgttctccagctcctctgcagtccggtacagagatttggggaccagtccaccctctggcacttcgcacatgcactccccactcaggaaatctggaataatctctttgtcgatgtaatccagcaggcctccaggaccctggtagtcatttcctgcataaatgaggaacttccttctggtgttgtcatcaatgaacggactaaccagcgtccagagcacaggaaataccctgggcgcccgcaggatgagaaggcggcccagtgtctcagggtagttggcctccaccacctcgatgatccgcagcagcgctttcacaccaggtctccacaagtggcgcatgttcagcccttccaagtccaccaggcaggtccatgagctgataggccgaccaaagacttttgtattctcttcgcatcgccttagcccttcttcatttatggagagaacgtatctcagcagggcttcctccccgagcgctctcacctcgtgccgaattaaaacacgccagcctcgtacctagcctta

SEQ ID NO: 78013 - DNA, 743 bp, Homo Sapiens
caaattaattattagaatcgtttcttctgagggacgtctttagtaaagtactgattcttttacagtaaaaggctgtaaaaactactcctattctacagtaaaacgttcagttcttaaggatatattgaagtggcgggtagacgttattgtatacacaccatatatgtgaaagttgaaactccagtttttttcagagcccagctaaattgacagcataactaacttttgtggacaaagtgtggattttgaagccagccaggcctaagtcaaatcctggttccaccacttactacgtatgggcaagttacttctctgaacctggttgttcattcatgtggaaaaggaagattagagataataaatgtaaagcatttggcttaggcagtaagtggcagctataatcagagggatgaggaaacatcgttgcttgttggtgtttgataacataaagcgtgtctggtgaggtcttttctaatgttactcaggtgatagtgtgcaggaaatgacaagactgttaatgggaaactgattcatcaaccaaatgtattgataacccatcaacaaaatgtccaccactgtgctaaatgaattgggggaggaggcagaaaacagttctgctcttgaataaattaagcattatgacatgtgcactttgaattaagaaatgtttgctttcgctttaaactctagtaaaacttggaatgatttgcttgaaaagatgtgttgaaatggcttctggtcag

SEQ ID NO: 78014 - DNA, 673 bp, Homo Sapiens
  misc_feature (163)..(183): n is a, c, g, or t
aatagacaaatcacattttgcaaggcctttaattaaataagattcttctttccttcattttatgctttatttcctgtttgaaggcttactgtagaagtggcttactgtagaagcagcttgctgagcccctccgagcggtccccagaattagctggttcacaannnnnnnnnnnnnnnnnnnnngcatgtgtcaggtgtggatgaggtcgtcacactcagaaggacaggcttgtctgccagctcacaaggggaggctgcagtgggtttgggagctgggtttaggcccctggtgtctgagggcccaggccttgccagcctctgctgctcctgctcctgggtttgaagatgcaggccgatcgccagctccgtggcagcggtcactaaggacagcctgactgtgccatcttggagcctcaggcggggctccggagatagaagacaggtcgccggaggctccccctcctctcctttcccctctgcagatgctccctgggcgctaccctgcagggtgccaggcaggagtggtctcagaacgtgcgcttctgattattttactggggtccattgtccagatttttctttgattgtaaaatatatttttactttttagtcttctaatttaataaatgatccatataaaaatagagaaataaagtcctttaagggaaggttt

SEQ ID NO: 78015 - DNA, 750 bp, Homo Sapiens
gcttgagaggagtgtgtggtcattacacggcctcctggcccagctgctgtcacagccccccagtgcgagtgcccacggggctcggggtgtctacacctctagccccgccacctccgtcagcccaaggtgaaaagggccccgccggccactgggcggctgcaccctaggtctccaggtactggtagagctcctccgctgggggcacgaggctcaggtggaccagagcacgagccaggagggcggtcagccgcatggccaaggtctccagcctgagcgccacttcaaacttgagcatctcccagacgaccttggcgtggcgcaggaggctggtgccgtaaacaccccgatacgtggcgcccgccaggcggctccagccccggacagcccttttagccataaggaagtagcggtccacgggggcgccgagggccacgttgatagcgcgcacggtgttgatgttgcgcagcaccagcagcatgggccgcggcaagctccctgagcaccgccatgacggcctcgaagcgctcgcgggccatgtccaccatgtaggccgcctcttcgcggctcagtaggtgcgagccccacagctgccccaggcgcacggggcgctgcatgagcatctcggcgaacaggaggtagtcttgcacccccagtgcggctgcgctgcgccctcatggcggcgtcgtcccgcaggatgatggcccgccacagctggcagaggatcccataatcccggccggaccagctgtt

SEQ ID NO: 78016 - DNA, 508 bp, Homo Sapiens
  misc_feature (411)..(411): n is a, c, g, or t
cacctcctggaacaccggcgcatccacacaggcgagcggccctaccactgcgccgagtgcggcaagcgcttcacgcagaagcatcacctgctggagcaccagcgcgcgcacacgggcgagcggccctacccctgcacgcactgcgccaagtgcttccgctacaagcagtcgctcaagtaccacctgcggacccacacgagcgagtgagcgcgcgccccgcagccaccgcccggccaggtgcgcgggccgtgccccccctcggacaccgccaggcccgagcccagcgggcgggggcggggcgccccccagcccctttgccgtgagctccccctctcctctcgtccctcctcccaaggacatgggggcagtgagaccaggtcccttgctgccgcgtttcacccgggggccccnaggggggagggcgcggacctggggaaccctttcgggctgttaatttccttgacaataaaatggatgaaaccaatcagcacggggggcgtgatttggc

SEQ ID NO: 78017 - DNA, 513 bp, Homo Sapiens
  misc_feature (257)..(308): n is a, c, g, or t
  misc_feature (349)..(349): n is a, c, g, or t
  misc_feature (355)..(356): n is a, c, g, or t
  misc_feature (358)..(358): n is a, c, g, or t
  misc_feature (363)..(363): n is a, c, g, or t
  misc_feature (372)..(372): n is a, c, g, or t
tgcggccgcacgcctgccccgagtgcggcaagagcttcatccgcaagcaccacctcctggaacaccggcgcatccacacaggcgagcggccctaccactgcgccgagtgcggcaagcgcttcacgcagaagcatcacctgctggagcaccagcgcgcgcacacgggcgagcggccctacccctgcacgcactgcgccaagtgcttccgctacaagcagtcgctcaagtaccacctgcggacccacacgggcgagtgnnnnnnnnnnnnnnnnnnnnnnnnnnnnnnnnnnnnnnnnnnnnnnnnnnnnttgggacaccgccaggcccgagcccagcgggcgggggcggngcgccnncncaccnctttgccgngagctccccctctcctctcgtccctcctcccaaggacatgggggcagtgagaccaggtcccttgctgccgcgtttccccgggggccccaagggggagggcgcggacctggggaaccctttcgggctgttaatttccttgac

SEQ ID NO: 78018 - DNA, 993 bp, Homo Sapiens
  misc_feature (800)..(800): n is a, c, g, or t
tgtgaagctcgtctcgtggcccctctgctcactgcgccgctatggccgggatgccacacgctttaccttcgaggctggccggatgtgtgatgctggggaaggactctataccttccagacacaagagggggagcagatttaccagcgcgtccacagtgccaccctggccatcgcagagcagcacaagcgggtcctgctggaaatggagaagaacgtgaggctgctgaacaagggcacggaacattactcgtatccctgcacacccacgaccatgctgccgcgcagtgcctactggcaccacatcactggttcccagaacatcgccgaagcctccagctatgctggtgaggggtatggggcagcccaggccagctcggaaacagacctcctcaacagattcatcctgctaaagccaaagcccagccagggggacagcagtgaggccaagaccccatcccagtgaccacagtgctggcgagcaccgatgactgctgggggctgcctgctgcggggctggctgcagtgtaccgtggacagcctcagggggctgtcggccaagagcctggagaaagggagcaagctgccccctccttgcccccaaggatgaggctggactgaggcaaagggctggccacaccacctgagcatgtgtgaggggttggagctaccgtgggactatatactgttaatgattttaatatatatggcttatgacatactctgtatcaatgagatcccctcaccctcaccccatccttccccaccaatacacacacaattttttaatcccatgaccaggnccacggtcaagggctggtttttgagtattgagtgcaattcgtatccatccttccatggcacagcccctcctgctgccaggacctgcttgaactaccagggccacaggagggggataatcagagcttgaggctggcactctgactgctggcttttcccagacagcccaagggccggaacagcaggtggcttctc

SEQ ID NO: 78019 - DNA, 746 bp, Homo Sapiens
ctatcacagatgaattgctagatgaatgatttgggtgtatctgatcatggttcacaaaaattatgttagtgtgttttcagtatgctaaaaagtcagagtgatacaaaagtgatatttaaaaatatacacacatgtatgtacacatgcttcagaaatattgttgcttagggtgatttgggcagctaaatagtaagtactttttaaaatttttgcatcatcatcttcctatttaatgaattgtgatttaaaacaaaatgaaaataagccaggtattctaaaagatcctggatacaaattaagaattttgctttattttaaaccaaattgagattaaattgaagaaaagcaagcaaattaatttcagcttgattatcaacctgtatcaagaacaaaaatgggaggaggtgtccacatttatggtgtgtataggtaacatggggaaaatgctattctgtgttttggaaaagaagaaatagtgccgtcctatttatttctatatttagaaatttttctcaaagaaatttcaattgtatctatgagatgggtttctaagtatcttattgtgtgttataagtgccttttaatatcatactaagtgtgagcttctggacattttcaagagcttacaaaaactaagtggcattgtatttttataaccccattgagaagactaagtaagaaatgaaatgtcctatcaattttattttgtcatgcttcaaacaataaagacatttctgctttaaaag

SEQ ID NO: 78020 - DNA, 787 bp, Homo Sapiens
  misc_feature (26)..(26): n is a, c, g, or t
ggcagcccagcgggagaaccagcgcnagcagttcccagtggagcacgtgcagctactctgcatcaactgcatggtggctgtgggccatggcagcgacctgcggaaggtggagggcacccaccatgtcaatgtgaaccccaacttctcgaactactataaatgtctccagggatcctgtggtcatcaacaaagtcttcaaggactggaagcctgggggtgtcatcagctgcaggaactgtggggaggtctggggtctgcagatgatctacaagtcagtgaagctgccagtgctcaaagtccgcagcatgctgctggagacccctcaggggcggatccaggccaaaaagtggtcccgcgtgcccttctccgtgcctgactttgacttcctgcagcattgtgccgagaacttgtcggacctctccctggactgaccacctcattgctgcagtgcccggtttgggctgtagggggcgggagagtctgcagcagactccaggcccctccttcctgaatcatcagctgtgggcatcaggcccaccagccacacaggagtcctgggcaccctggcttaggctcccgcaatgggaaaacaaccggagggccagagcttagtccagacctaccttgtacgcacatagacattttcatatgcactggatggagttagggaaactgaggcaaaagaatttgccatactgtactcagaatcacgacattccttccctaccaaggccacttctattttttgaggctcctcataaaaataaatgaaaaaatgggatagaaa

SEQ ID NO: 78021 - DNA, 1605 bp, Homo Sapiens
  misc_feature (18)..(18): n is a, c, g, or t
  misc_feature (279)..(279): n is a, c, g, or t
cgcgggacagccgcaacncgtctgacagtcttgaccagctgaggagtgctagcgacatgagccggactgaccgcctgccaccacgcttcccgataccccccacgcagccgccttcagatgtccgagcgcagcatcctcagccggctggccagcaagggcacggagcctcaccccacaccggcctacccgccgggtccctacgctacacctccggggtacggggcgcccttcagcgccgcacccgtaggggccctggccgccgcaggcgccaattacagnccagatgcctgcagggtccttcatcacagccgccaccaacggccctccagtgcttgtgaagaaggagaaggaaatggtgggggcattggtgtcagacgggctggatcggaaggagccccgagccggggaggtgatctgtatagacgactgactggatcccaggcctgcccttcacccaggccccgtccccgaggccgacccccagctcaagcgctggggcctgctgccagccctccaccttccccaccccttgggccatcactgggctaggaacccctttgcccctctctgcagctcctctcttcaagaagggccctttgtctttctccactcccacacacctttcccaccaagccttgaagactgtgctggtgagaagaagtctgggtgggagatggctggcagggtcttccaagtaccttcctcccacactgccaagtatacacaacttcccagtaaatggttgtggggaggaaagaggtggagcctccccagccgtttccctgcagaatcagctctgtctcatgtggaagtggagaatcagccttgcctggcctttaggaacttttgtggggaagagagctttgaagagaggagggggactttagagagggatgaaaatgagccctgggagggaggaagggacgaggaggggtggctgcatgttaccgtcccctacctctccccacgtggagggtggagcagttatgagggaggaagtcaactgctgttcagcctcagaataaaggtgccgttcactggctcagttacctcctgtgtaccggcatcttgtgttgggaatgttcccccctccctagggaccaaggaccacccctacaaaaagagtaatggttgggtgatactccctcaagccaaagaggagctccccaacctgttctagggacccaggtaacctagaagggtgggagagaatacaatgggccagatgtggtggaagcccagctctggggctcaggttcctggaagacttctactaccctccctcctcaaggcctggatacagactaaatttgtataagtcaggcaggggacctagtcagggtcttgggagctaccttgtcgttgggaccagagcaaaatagtggagggcaggctagggaaatgtgggcacatcccccctcccaggaggggccggggagagtggcagtttgcatggcgaaccccccacttcctctttgctgccccttcactttcttgctgcccctttcccagtctctcttcacacccactcctggtctgtcctgatcccctcttctgtatcaggtttattggttgtacatataaattatactttcctttcaaaaa

SEQ ID NO: 78022 - DNA, 1196 bp, Homo Sapiens
caaaacacatcaaccaaccaactacaaaacatatcaggctaaggtagcgaggctggcgtgttaatcggcacgaggcatgacacaagatgtaaacaggtgaccgggagcttcgaccaggcctcgagatgagccacggtccaatgggcgacgagaggaaaagacagagaagccccggttcatgttcaatatcgccgatggtggcttcacagagcttcacacactgtggcagaatgaggaacgggcagctatttcctcggggaaactcaatgagatctggcacagaagacatgactattggcttctggctgggattgtcctccatggctatgcacggtggcaggacatccagaatgatgctcaatttgccattatcaacgagccatttaaaactgaagccaataaggggaactttctggagatgaaaaataagttcctggcccggaggttcaagctcctggagcaggcgctggtgattgaggagcagctgcggcgggcggcctacctgaacctgtcgcaggagccggcgcaccccgccatggccctccacgcccgcttcgccgaggccgagtgcctggccgagagccaccagcacctctccaaggagtcgctggcggggaacaagccggccaacgccgtcctgcacaaggttctgaaccagctggaggagttgctgagcgacatgaaggcggacgtgacccgcctgccagccacgctgtcccgaataccccccatcgcagcccgccttcagatgtccgagcgcagcatcctcagccggctggccagcaagggcacggagcctcaccccacaccggccctaaccgccgggtccctacgctacactccggggttacggggcggcttcagcgcgacccgtaggggcctggcgcgaagcgcaattacagccagatgcctggaggtccttcatcaagcggcaccaaaggctccagtgctgtgaagaaggcaaaggactcggggggggcgatggggtcaacacgggcggatccgaaagagccccgagccggaagtgactctcttttaacacgcggtggatcacaggggaccctaacaaggagcgacacgcagaggacgcccaccaaaggggggaacagaagcacacaataccaccacggtgagacggggagaacactcgacccaagcacattagtagagagaggagtcatcaacaatcatcaata

SEQ ID NO: 78023 - DNA, 1115 bp, Homo Sapiens
  misc_feature (25)..(25): n is a, c, g, or t
  misc_feature (66)..(66): n is a, c, g, or t
  misc_feature (136)..(136): n is a, c, g, or t
  misc_feature (158)..(159): n is a, c, g, or t
  misc_feature (161)..(161): n is a, c, g, or t
  misc_feature (178)..(178): n is a, c, g, or t
  misc_feature (201)..(201): n is a, c, g, or t
  misc_feature (265)..(265): n is a, c, g, or t
  misc_feature (1034)..(1058): n is a, c, g, or t
aagcatgagtttgcctgatcgatanacatgattgaggagatgacaatatcagtcatagatgcttcntaccgaggagagtcatgattgatgcagagtagaggagagaacccactgatacatcgatcgaaaaattctncccgtgatgacagaatactctnngnaagaaatacagaccatnccagagatgtccttttcgagctntgaggtttagatcagctaaacgtggtttcttactaaggacgagctgatcaagtatatgactgangaaggataccttgagatttcccaaggtaaaatccaaatagagacttgatgtgccactggctcggccgtgcatgctagaatcaccagccagagatgaggatgaaccgcgtgccttcaggacagggcggagacggaggaggaaaggagtgtggtgatcctcggaacatcagcagacaggctgttgatgataggaacacattgcagcggggaaggaggatggctgagatatgaaatacccttcaaggtggacgcatacccaggggcatgtcattcggtggcaggggccagcacggacatgcagcactgaggcgtgtgctagcgcccaatgcgtcgacccaggcacggacttgtttggagcatacaggacagctctgcgttaagacctgtaagccattaaagaagtacagtctggtgaatgaaccctaatctcttgatgatcaagtgatgacatcatattctgtctccgaggagacaccctcttgcacagaaggcagtagaggaagcttgcgtcgagattgcctacctccccagccccaccttcgagggttctttcaaaagttcggactgatgttcaacttcacatcttgtctcaaggcaatcctctctgtttagtctcatagagttggctttgtggaatgtaattcatttttatctttagcacaaatttgtctgtttcttttaaggccaccagaaagcacaacatagactccccacagaaatctcattttatctcctaagttgcagaataaacgtaccttgtttgcaaaggnnnnnnnnnnnnnnnnnnnnnnnnncctgagcaggcggccgcaagcttattccctttagtgagggtaattttagcttggcac

SEQ ID NO: 78024 - DNA, 1048 bp, Homo Sapiens
  misc_feature (872)..(912): n is a, c, g, or t
  misc_feature (945)..(946): n is a, c, g, or t
  misc_feature (948)..(948): n is a, c, g, or t
  misc_feature (950)..(950): n is a, c, g, or t
aagcttttggaaaagctccaggtcctcatgtattgtgcaataacaatgacttccttggcggttttggtacgttcattgccggcaatgggcgttgtaacaggaaaagttttcattaactcctgccattcaatgattaatgcatgatagggcctatgaaatgaacttactggttatagtgggaatataaataaagtgagggatccaacattactttaaaagtcaccccaactgtttatatttggattctatgcactgtgatcctaaggttaacagcatgaattaacatgcgtctttaaaggactgtaatgaaagatcattgcatatttattgaattgtttatatctactgtcaagttgttttgacatggaagattttcaagtaacattggcagagaggtacagtatgttatccctatggtgaaaataaattaatttgttgtatatagttcctcaatctctgaagtaaaggtatgagtaatatagggtatgaatggtttaatcaaggctttattttggaagtaagaaaaatggcagtgatgattaaattgctgcagtccataatttgggcttgttatttgtacattaaagattttttccaagtaagttacactctgttaacttcctgctagccatcagcatgagccctactgcctaaacactatttcatttatttatgtttggaaaccccgtaaacatttttgtttgcaatcttgtttcttttgttataagtcaagtttgaatgttacaatacttttattgaaacttttgttaagttttttcttgtaaattttctttacttgtgagtatcatcttgtcctttaatcctgtaccctaaaataagaaatacatttttgacagagggctactgtttannnnnnnnnnnnnnnnnnnnnnnnnnnnnnnnnnnnnnnnncctcgtgccgattctggctcgagggcaattccnnangngagtctattaatcgaaccagtcaactgttctgtgtgattgtatcgccacatcacaaaatagagcggagatatggtagctgggggcatgatggcaccaa

SEQ ID NO: 78025 - DNA, 1207 bp, Homo Sapiens
  misc_feature (218)..(267): n is a, c, g, or t
  misc_feature (290)..(341): n is a, c, g, or t
  misc_feature (408)..(531): n is a, c, g, or t
aaagaagtaagcctttatttcctttttaaaaatgcattgaaaatttgaaaggtaaaaatcttattttaatagcgtattttgtgttggctattagagagtaaacatattggttttggccatttgtaattatttctgaaatatccatctttttcttatggactttaagacctttatatttttaaagatattgattttttgcccatgcttgtggcagaagnnnnnnnnnnnnnnnnnnnnnnnnnnnnnnnnnnnnnnnnnnnnnnnnnngagacagggtctggctctgtcannnnnnnnnnnnnnnnnnnnnnnnnnnnnnnnnnnnnnnnnnnnnnnnnnnntgggctcaagcaatcctcccacttcaacctcccaagtagctgggactataggcatgcgccaccatgnnnnnnnnnnnnnnnnnnnnnnnnnnnnnnnnnnnnnnnnnnnnnnnnnnnnnnnnnnnnnnnnnnnnnnnnnnnnnnnnnnnnnnnnnnnnnnnnnnnnnnnnnnnnnnnnnnnnnnnnnnnntgagcaaccatgtttggcctttcttttaaatttgttgatgttttttgaagcattaagtcattacttattagcaagttactattttgtttttttgtcattggtggtaggactaagaaggaaacagatattttaaatactcacaacatgtgattcattttctgataaaatatttgtctaataaaacagaggcaagataatttaatcaaaagaaattaagaaaattttccaaaaatgttagtttactagtaatttttctaagtctacttattaaataacttaagggaaactgtaaatatattttgcaaattgttgttcaaaagataattggaaaaaattgaatatattgtaggatttgaatatacagcctacttttatgtcacctctaccttcaaaactacatataatttattttaggagttggatttgttatgtctgttgcagtgaggacttgtgattcactggtatgaagaattttttgatgtttatattagtaacaaaattatacaaggatagaatctcatctagaaaaatgcaaactattgttggaaaaagcagttagcattttcacacaacggtgtcccagagataatgctgtttcattttaatgttattcttttagaccttttctctatttacaaaaatgttacgtgtttctatgggtaaattagttgggggt

SEQ ID NO: 78026 - DNA, 1353 bp, Homo Sapiens
ggggtacgcgggcttcctggcgctggccgtgggctgcgtcttcctgctggagccagagctgccaggctcggcgctgcgctctctctggagctcgctgtgtctggggcccgcgcctgcgcccccgggacccgtctcccccgagggccggttggcggcagcctgggacgcgcttatcgtgcggccagtccggcgctggcgccgcgtggcagtggggttcttctttgcggtccagttggtccaaagctacatgagcttcttgatgacaatgtctttgttccaccagagtcattgcaggaagtggatgagttccacctcattttagagtatcaagcaggggaggagtggggccagttaaaagctccccatgccaaccgattcatcttctctcacgacctctccaacggggccatgaatatgctggaggtgtttgtgtctagcctggaggagtttcagccagacctggtggtcctctctggattgcacatgatggagggacaaagcaaggagctccagaggaagagactcttggaggttgtaacctccatttctgacatccccactggtattccagttcacctagagctggccagtatgactaacagggagctcatgagcagcattgtccatcagcaggtctttcccgcggtgacttcccttgggctgaatgaacaggagctgttatttctcacccagtcagcctctggacctcactcttctctctcttcctggaacggtgttcctgatgtgggcatggtcagtgacatcctcttctggatcttgaaagaacatgggaggagtaaaagcagagcctcggatctcaccaggatccatttccacacgctggtctaccacatcctggcaactgtggatggacactgggccaaccagctggcagccgtggctgcaggagctcgtgtggctggggacacaggcctgcgccacagaaaccatagacaccagccgagtgtctctgagggcaccccaagagttcatgacttcccattcggaggcaggctccaggattgtattaaacccaaacaagccagtagtagaatggcacagagagggaatatccttccacttcacaccagtattggtgtgtaaagaccccattcgaactgtaggccttggagatgccatttcagccgaaggactcttctattcggaagtacaccctcactattaggaagattcttaggggtaatttttctgaggaaggagaactagccaacttaagaattacaggaagaaagtggtttggaagacagccaaagaaataaaagcagattaaattgtatcaggtacattccagcctgttggcaactccataaaaacatttcagattttaatccg

SEQ ID NO: 78027 - DNA, 981 bp, Homo Sapiens
gggcccggaagaggcgcgggctaggaaaggagttggttcgcgcaggtgcggcgcctgggtccccatggcgctgtggcgcggctccgcgtacgcgggcttcctggcgctggccgtgggctgcgtcttcctgctggagccagagctgccaggctcggcgctgcgctctctctggagctcgctgtgtctggggcccgcgcctgcgcccccgggacccgtctcccccgagggccggttggcggcagcctgggacgcgcttatcgtgcggccagtccggcgctggcgccgcgtggcagtgggagtcaatgcatgtgttgatgtggtgctctcaggggtgaagctcttgcaggcacttggccttagtcctgggaatgggaaagatcacagcattctgcattcaaggaatgatctggaagaagccttcattcacttcatggggaagggagcagctgctgagcgcttcttcagtgataaggaaacttttcacgacattgcccaggttgcgtcagagttcccaggagcccagcactatgtaggaggaaatgcagctttaattggacagaaatttgcagccaactcagatttacagggtcttctttgcggtccagttggtccaaagctacatgagcttctggatgacaatgtctttgtccaccaagagtcattgcaggacagtggatgagttccacctcattttagaagtatcaagcaggggacggagtgggccagtaaaagtcccatgcaaacgattcatctttttaagacctctccaggtgacatgaatatctgaggtgttgggtcaaactgaagggttcagcagactgtggtcttctgatgaatatggggacagatgagccaagaaaattggagttgactaatatagatccagtattcgtactaagtggataaagggcagagtgaatgtacagtaccgggaaagagttcacaggaatttgggtgggggactgaagaaggcaaaacgcg

SEQ ID NO: 78028 - DNA, 708 bp, Homo Sapiens
gctatgtatattaaaataaaaaatacatcagcccatccctcagcgagtcagccgaagttagcacctacgcaatgagccatgctggtggtgtgtgctttcgcatgggtgtgaaaagctatgctctcagcagacccaaaaccccatctaatcacgagaaaaacagcagacacatgccagctgagaggatagcgggccaggcctcctcaaaactgatgggctcatcagcaacaaggaaagtgtgaggaactcttagcttgggaggagcctgcggagagtaactacaaccaccaccggcaacggggcatcctgggccggctcccagaccagaaaatgacatcaggtaaaaactaaaggaagctgaataaatggtgggctttagttataacagtggatcagcatgagttcattaattgtgacaaatttgccattctaatgtaagatgttaagaggagaaaccgggtgtggggcatataggaactctgtgttagcttggcaattgttctataaatctacgacgaatctaaaatgtaacaattattggaaaggaggactgaaaagattcaagagaaagtgataatattgaagacaggggaagaaactgacatacagataataggagtccctgaagaagaaatccaaagtgaatagaacagtgaaatttgtaaatcaagaaaagtttcctgaaataaaatttgaaactacatactg

SEQ ID NO: 78029 - DNA, 454 bp, Homo Sapiens
ggggtgttgggtgtcctgccactgttgctcctagtgctcaatctcgtttattccctcctaatcaagtgtacaacgttggacactgtgcaggatgatgccacttcatcttggatgctaatctgccatgttgacttctgattaaccccaggcccaggaatgcctcaagatttctactttacttactgttgcttgtgtaagccaagacaaccttgatgttatcataaacatgtacttacctaagtcctgtcctttggcaaattatgggctatgagacacagcattcttgcctttccctgaggggtcaatttcagcgatcctacacattccttctgaagcacttatgctctttctatatggtatgtaagctctccgtctggggagtaacagtgcagagatctacctgtcttgttgccacatgtttctaaactttccaataaatcaccttctactgaca

SEQ ID NO: 78030 - DNA, 443 bp, Homo Sapiens
cctacttcagtgtggtttcaaccctacttctgcatcttaaagacactgtgtacaacgttggacactgtgcaggatgatgccacttcatcttggatgctaatctgccatgttgacttctgattaaccccaggcccaggaatgcctcaagatttctactttacttactgttgcttgtgtaagccaagacaaccttgatgttatcataaacatgtacttacctaagtcctgtcctttggcaaattatgggctatgagacacagcattcttgcctttccctgaggggtcaatttcagcgatcctacacattccttctgaagcacttatgctctttctatatggtatgtaagctctcggtctggggagtaacagtgcagagatctacctgtcttgttgccacatgtttctaaactttccaataaatcaccttctactgacaaaaaaaa

SEQ ID NO: 78031 - DNA, 639 bp, Homo Sapiens
ataaagcaatcaacaaatcaattagaatactgtcagccacataactttagagttgcctgaacccaatatgaatttctcttctatcattcctaccctgaagcttactgatgccaaaattagaggtcagtgaagatggtcataattaaggaagctagtattttttaattgatataacacgatcccccagtatacatttctagccatatctcctccacctcccccatgtgaatctttcacaactaccagattggtctgtttgctctctctgtaacatgccttataccctcctacctttaaaattatgccatccctctattttgcccttagtcttttttaatcagtggttctcagagtgcttctcgggggcccacaatgtcaatggtacgctcataataatactaagatgctatttgcctttttactctcattctgttacaggtgtacagtagagttttccagaggctacatgacatgcagtatcacaacggaagcaaatataagaacccacctgtctcctgttaaaatgcaaaatgtaaaacaataccactttgctaactgtttttgtttggggaaatatagttcataaaaatatttatgttaacatgtaatttaggttaaaataaattaataaatatttgt

SEQ ID NO: 78032 - DNA, 331 bp, Homo Sapiens
gcggccgctgcgccggcggcggttcccgatgtggaggtccgtcttgggtggggaggcacccaggtcgctggttcgatgcagaggaagaaaccacacctagcacgtaaagccctgaaaaaatagaggtgtacagtagagttttccagaggctacatgacatgcagtatcacaacggaagcaaatataagaacccacctgtctcctgttaaaatgcaaaatgtaaaacaataccactttgctaactgtttttgtttggggaaatatagttcataaaaatatttatgttaacatgtaatttaggttaaaataaattaataaatatttgtaaatt

SEQ ID NO: 78033 - DNA, 1922 bp, Homo Sapiens
cgggaaagggaaactggtccgtagttcgtggtccttcgccggtgtccccggagcccagcggctgtggatggcagaagcccagagtgggactggtcagctgcaggagcagaagaaaggtcttctgatagccgtcagcgtctccgttgataaaatcatctcgcatttcggggccgcccggaacttggtgcagaaggcccagttgggtgatagccggctgagcccggatgtggggcacctggtgctgaccaccctctgcccggccctccacgccctggtggcggacgggctgaagcctttccggaaggacctcatcaccgggcagcgcaggagcagcccctggagcgtggtggaggcgtcggtgaagccaggctccagcacccgctcccttggaaccctgtatagccaggtcagccgtctagccccgctgagcagcagccgtagccgcttccatgcctttatcctgggcctcctcaacaccaagcagttggagctgtggttttccagtctccaggaagatgcaggcctgctctccctcctgtacctgccaacaggatttttctccctggcccgcggtggttgtccctccctgtccacagagctgctgctcctgctgcagccattgtcggtgctcactttccacctggacctgctctttgagcaccaccaccacctgcccctgggcccacctcaggcccctgcccctccaggcccacctccagctctgcagcagactatgcaagccatgctgcactttgggggccggctggcccagagccttcgggggacttccaaggaagctgcttcagacccctctgactctccaaaccttcccacaccagggagctggtgggagcagttgacccaggcctcccgggtctatgcctctgggggcactgagggctttcctctttcccgatgggcaccggggcgtcatgggactgcagctgaagaaggtgcacaggagagacccctgcccacagatgagatggcaccaggcaggggcctctggttgggaagactatttggagtgcctgggggccccgcagaaaatgagaatggagccctaaagtccaggagaccatctagctggctgcccccgacagtgagtgtgttggctcttgtgaagcggggggcacctcccgagatgccttctcctcaggagcttgaggcctcagcacccaggatggtgcaaacccatagggcagtgcgggctctctgtgatcacactgctgcaagacctgaccagttgagcttccggcgtggggaagtgctgcgtgtcatcaccacagtggatgaggactggctccgctgtgggcgggatggcatggagggtctggtgcctgtggggtatacctcccttgttctgtagccctgggaccctttcctgcgtatgtgtctccttcctgtcacctgggaatggaatggccagtgaacaccatcccagaagcattttccctctgcaaaatgacgtttcttcccacgtctgtttctgctaatatttaaaataaactttccttcttccctcctatacccacctgtaaggtgaaatctgctcttcttccaaatatataaaaaaggaattgccctccaggtaatccctttcctttttcccgtctatataagggaatgtcttccttcctatctatctgcaaaatggaaatctagacctccttcttcatccataagtggactgtgccagtacaatacatgcctcagcccccaagcctagaaggacctctagtctccttcctgtgtggaatcttccccactccatccctcccaagttgcctgtattgataatgtactcactcatgctgtactaggtgctgaagcctggacacccttggtgggtgggcctgtggtgatggtttgcatccttcctcctttgtcccaataaagtatgggagttgaatgtgaaaaaa

SEQ ID NO: 78034 - DNA, 1470 bp, Homo Sapiens
caacgataaacgacaggcagtaactataacggtcctaaggtagcgaggcctgggtggcgaattcggcacgagggccggactccaagcaagtttgtcggccttggggagtctggccccgttcctagtgctggagggggaagttgttgcctttcctgctccgtgggccggccccctctccctccagacccacctgggcatagtggacgcgggcttacccagcctccatgccaagtctagggggtcccagcgagtctgttgttaggggctttgggtcacaccctctgtggaattccttggcctgtgcagctcgggcctgccccccgaccttgctagggaggggtggagggtgaagctcccgggagctcattggcactagaggttctggccacgccctctccgcgagtccagtcccacgcgggatgaagagggcaccctccgccaagaggctgctgcgggacccgggtttcccctttccggcgccttccagcctcccaatcctcgggtctcgcctccctccgtctcctccctttcccctgtctgtctttccattggtccatgccgccacgtgctccccggggctccgcaggcaggactgggccccggggcggtgcgctgggctgcaactccctccccgcccccgtcctctcccgccctacaggccctagcagggcaggcgggagtcccgtcagttccgtggtccttcgccggtgtccccggagcccagcggctgtggatggcagaagcccagagtgggactggtcagctgcaggagcagaagaaaggtcttctgatagccggcagcgtctccgttgataaaatcatctcgcatttcggggccgcccggaacttggtgcagaaggtgaaggtggctggggggaggctgttgggatgaggagagtaatggagctccgcggggggtgcgggaatggttggcgggaggtggctgggaggtgtctggacgggatctctggagccatcggcatcgcgccacctccaggcccagttgggtgatagccggctgagcccggatgtggggcacctggtgctgaccaccctctgcccggccctccacgccctggtggcggacgggctgaagcctttccggaaggacctcatcaccgggcagcgcaggagcagcccctggagcgtggtggaggcgtcggtgaagccaggctccagcacccgctcccttggaacctgtatagccaggtcagccgtctagccccgctgagcagcagccgtagccgcttccatgcctttatcctgggcctcctcaacaccaagcagttggagctgtggtttccagtctccaggaagatgcaggcctgctctccctcctgtacctgccaacaggattttcctcctggccgcggcggttagtcctcctgtcccagagctgctgtcctgctgcagccattgtcggggtcacttccacctggactgctctttgagcaccacaccaaactgccc

SEQ ID NO: 78035 - DNA, 1075 bp, Homo Sapiens
  misc_feature (889)..(933): n is a, c, g, or t
tttcgggatccgccctacaggccctagcagggcaggcgggaggtgagcgcggccatcccgctcccggagttccgggatcctggagtccgtagttcgtggtccttcgccggtgtccccggagcccagcggctgtggatggcagaagcccagagtgggactggtcagctgcaggagcagaagaaaggtcttctgatagccgtcagcgtctccgttgataaaatcatctcgcatttcggggccgcccggaacttggtgcagaaggtgaaggtggctggggggaggctgttgggatgaggagagtaatggagctccgcggggggtgcgggaatggttggcgggaggtggctgggaggtgtctggagggatctctggagccatcggcatcgcgccacctccaggcccagttgggtgatagccggctgagcccggatgtggggcacctggtgctgaccaccctctgcccggccctccacgccctggtggcggacgggctgaagcctttccggaaggacctcatcaccgggcagcgcaggagcagcccctggagcgtggtggaggcgtcggtgaagccaggctccagcacccgctcccttggaaccctgtatagccaggtcagccgtctagccccgctgagcagcagccgtagccgcttccatgcctttatcctgggcctcctcaacaccaagcagttgggagctgtggttttccagtctccaggaagatgcaggcctgctctccctcctgtacctgccaacaggatttttctccctggccccccggtgggttgtcccctccctgtccacaagagctgctgcctcctgctgcaggccattggtcggggctcactttccacctggaccctgctcttttgagcaccacccaccacttnnnnnnnnnnnnnnnnnnnnnnnnnnnnnnnnnnnnnnnnnnnnnttccagttttggcagaaaatttatcaagccttggcgtgcccttttgggggggccggttggcccccaaaccttctgggggactttcaagggaaactggtttcgaaccccccttgaactttctaaaacttcccccacgaggggg

SEQ ID NO: 78036 - DNA, 580 bp, Homo Sapiens
actccaccctccacactcccaaaggcaggcaaagaatttaagccactaaagagaacactcccaacatgaaagggaatggatgctgtaaaaaataagtcaaatgaatattctcagacactatcacttcatttttttcagtcctccagcaaatcaagagccttaaaaatattcaaacttaaatacttagtaatcatacatctaagaagatatacagctttatgcacaaaaatattcctcaatgtcctatttatagcagtgaaagaaagaaagaataaatgtcccaagtgatggtacaatcatgtaatgacacatttatgcaaccattaacaaaatggtatttaccaggcaggtaaatcataacagctataacaataaactgttataacaataaaatgttatatataaccttgattatatatacacaatgttaattttaaaaggctggaaaatgctgacagtggtaatttctctctggacaatgtaaatgcttttctgttttccagcatttaaacaaaaatgttaattactagtttattaacactattggtaataacaataaattcatattcaaattcaaaaa

SEQ ID NO: 78037 - DNA, 1131 bp, Homo Sapiens
atttacaatatgcaatttactgtaatgacacacataagaattcctttatcacaaagctgtttccctgtagaaatttgtgtcttcctatcaatatgaaaaacagcgttcaagtgtaagcatattgttagcaacacatttcaactgaaaaaataatctacccaaagctgtcagttcctacaaaaggataattaatttaatctcaaagatatcatgtaagtatatatgaaattcatttattacatttagttgttgaacatgaacaattttatatttggacaaaatttcacccaaggagtcaatgtcaatattcggaagcattaagcttcccttacgttggagcccttcatagctgtaactccagggtgccaagaagctgtttcagatagatttctttgcattgcctctccaagtgatttcagtgctcatgaaaaccatcatagaaaaagtaaaaggcaatgatgaaagttccttaaaaagaagtttttcctgccttcagacaggagctaaagtcatttctaaaggaacccagcatattgactgtgcatgattcctcaccacttcaaaaaaagagaaaaatagcaatacatacatgctataatacatcaaatcaaaaagaggaatgtgggttctatgcatattaatactgataaaaatcactagccaatattacagtcttcacacatcttaaaaatgagtggtgattaattaatgatatttctggaattgtacataatcagacctgtatttgtttttggacatcaaaattcatagtatttaatgagtcatagatgatacttataggaagacctaactcttaatcaattatatcatttgagtaaatttcctaacagtgtttcttaattgtgttctgctttagaatgcctaaacattctgtaaacactgcctaatgccatacaagtgtccacaataaacaagcagcatttctctaggtttctgaaattcatccacaagcagtgggtccaagtgtccacgttattattcccttgaagactccatttgaagactacatgcctggaggaagataaagttaacaagcaagcaaatattcctgctgcagtcacttccctgagaatgaaacattttgcttttaaaaagcaaattaaggtttca

SEQ ID NO: 78038 - DNA, 529 bp, Homo Sapiens
cgtgtgttcactttgccctcctgattcttagcgtctgaggcacgaggctccaaggtctgaaaggtatccacaagctcaatgttgtcaaagtccaagttgtaagtcccactgctggctatcggcttgtcttcatcgaagacggcagagaaggagtgtgacgggggacggaagggacttccttccaccgagtcgctccgtgggccatcagggacagggactgtctcagaaccacatcctggttcttccgggggtggctgtgtgctgaccttcgggttctgggatgactttcggggggtggtgggggtggaagctggcggagctttgacaggggtcgttgactccggggtctcaaaagcctcttcagaatcggaactcattgcctcggaagcctccaggttcaggtcgctggctggggctggctgcagggactgcgaccctcccatcctcgctgtgccctggcgtgcaagctagccgcgagcggggccagcgtcctggcgcgattcctgcagccgggagccggggcggccgc

SEQ ID NO: 78039 - DNA, 452 bp, Homo Sapiens
gaggggataaaccacttatcaccaccaagtgtacttgaaaataaagtttttaacttaaattacaagcatattgcttataatacaatagtgatcattttttgaaagtcttgccatttataacatgggcagtatttggagcttcatttaaaaaccaacaacaaccgataatgactttgcacgattcactttgggatctcaaagtgcttccaaagcattcagatttacaaacaattcacaagacaggtcatctttgtaatacccatacttacaacgaattaacaaaaggagtgacttaagattctccaggaacacagtggcagctattgatgatctgttttctatctgtttgatagagcatcatgagaaatcacaaaatacaatgctatttttctgatgtgtgctaataaagtcaaagaaaacaaatacatcttgacacttttgtccattttcat

SEQ ID NO: 78040 - DNA, 1124 bp, Homo Sapiens
  misc_feature (608)..(616): n is a, c, g, or t
  misc_feature (1044)..(1065): n is a, c, g, or t
ctcctccctgtttgtccgttcccgcggctttattggaggtcataaaaccaaaagaagtgtcagttgaaatactgtgtcttttcacgtcttacgtgcccctacgggttacggttttgcaatactgtgaccgtaagattgaaatgtgacgcaacaggttacgatagaggctcttaaaagatagtgaaagacaatactgctgttatatagcaagacataaacagatgataaacatcagagccatgtgcttatcagtttacatgtctgatacatgcagatagcagatgtcttaaaatgaaatacatgtatattgtgtatggacttaagtatgcacatgctcagatgtgtagacatcctccgtatatttacataacatatagaggtaatagataggtgatatacatgatacattctcaagagttgcttgaccgaaagttacaaggaccccaacccctttgtcctctctacccacagatggccctgggaatcaattcctcaggaattgccctcaagaactctgcttcttgctttgcagagtgccatggtcatgtcattctgaggtcacataacacataaaattagtttctatgagtgtataccatttaaagaannnnnnnnncagtaaaagggaatattacaatgttggaggagagataagttatagggagctggatttcaaaacgtggtccaagattcaaaaatcctattgatagtggccattttaatcattgccatcgtgtgcttgtttcatccagtgttatgcactttccacagttggacatggtgttagtatagccagacgggtttcattattatttctctttgctttctcaatgttaatttattgcatggtttattctttttctttacagctgaaattgctttaaatgatggttaaaattacaaattaaattgttaatttttatcaatgtgattgtaattaaaaatattttgatttaaataacaaaaataataccagattttaagccgtggaaaatgttcttgatcatttgcagttaaggactttaaataaatcaaatgttaacnnnnnnnnnnnnnnnnnnnnnncctgagcaggcggccgcaagcttattccctttagttgagggttaattttagcttggcac

SEQ ID NO: 78041 - DNA, 999 bp, Homo Sapiens
gaagcggctgacggaactgctgcttcgaacggccacagagaagccagggccggcggaagctgcccgccaggcatcggcctcccgtgcctggggcctccgctttttccgaagcccccagcaggtgctgccctcaccagatgggcggcgggcagcaggtgtccgcctagcagtcactagactggagggtgtcgatgagcccacccgtgcagtgcccacgggagacatggaagacctcccttgtgggctggtgctcagcagcattgggtataagagccgccctgtcgacccaagcgtgccctttgactccaagcttggggtcatccccaatgtggagggccgggttatggatgtgccaggcctctactgcagcggctgggtgaagagaggacctacaggtgtcatagccacaaccatgactgacagcttcctcaccggccagatgctgctgcaggacctgaaggctgggttgctcccctctggccccaggcctggctacgcagccatccaggccctgctcagcagccgaggggtccggccagtctctttctcagactgggagaagctggatgccgaggaggtggcccggggccagggcacggggaagcccagggagaagctggtggatcctcaggagatgctgcgcctcctgggccactgagcccagccccagccccggcccccagcagggaagggatgagtgttgggaggggaagggctgggtccgtctgagtgggactttgcacctctgctgatcccggccggccctggcttggaggcttggctgctcttccagcgtctctcctccctcctggggaaggtcgcccttgcgcgcaaggttttagctttcagcaactgaggtaaccttagggacaggtggaggtgtgggccgatctaaccccttacccatctctctactgctggactgtggagggtcaccaggttgggaacatgctggaaataaaacagctgcaaccaagagagaaaatgtaaaatagatag

SEQ ID NO: 78042 - DNA, 2555 bp, Homo Sapiens
  misc_feature (1544)..(1544): n is a, c, g, or t
  misc_feature (2498)..(2514): n is a, c, g, or t
ggcggtgctacgggtagctgggtgctgtccaaaggcgacagggcgtcgttaggggagcgagtcgtgaccggttgggccacactcaacgtgggacgaagcttcgcctactgtttgactacgtgcgtgcagcctcccctcgatgtcggccctcgaaaagagcatgcacctcggccgccttccctctcgcccacctctacccggcagcgggggcagtcagagcggagccaagatgcgaatgggccctggaagaaagcgggacttttcccctgttccttggagtcagtattttgagtccatggaagatgtagaagtagagaatgaaactggcaaggatacttttcgagtctacaagagtggttcagagggtccagtcctgctccttctgcatggaggaggtcattctgccctttcttgggctgtgttcacggcagcgattattagtagagttcagtgtaggattgtagctttggatctgcgaagtcatggtgaaacaaaggtcaagaatcctgaagatctgtctgcagaaacaatggcaaaagacgttggcaatgtggttgaagccatgtatggggaccttcctcctccaattatgctgattggacatagcatgggtggtgctattgcagtccacacagcatcatccaacctggtaccaagcctcttgggtctgtgcatgattgatgttgtagaaggtacagctatggatgcacttaatagcatgcagaatttcttacggggtcgtcctaaaaccttcaagtctctggagaatgctattgaatggagtgtgaagagtggccagattcgaaatctggagtctgcccgtgtctcaatggttggccaagtcaaacagtgtgaaggaattacaagtccagaaggctcaaaatctatagtggaaggaatcatagaggaagaagaagaagatgaggaaggaagtgagtctataagcaacgaggaaaaaggaaagatgacatggagaccaagaaagaccatccatacacctggagaattgaactggcaaaaacagaaaaatactgggacggctggttccgaggcttatccaatctctttcttagttgtcccattcctaaattgctgctcttggctggtgttgatagattggataaagatctgaccattggccagatgcaagggaagttccagatgcaggtcctaccccagtgtggccatgcagtccatgaggatgcccctgacaaggtagctgaagctgttgccactttcctgatccggcacaggtttgcagaacccatcggtggattccagtgtgtgtttcctggctgttagtgacctgctgtccacccctcctcaacatcgagctctgttgtaaatacgtcgcaccagaggccactgtgatgccactgtctcctctccatcccgcccagccatgtgacactggcttcccggtagacgggcaccccgagatgtaccaaccttttcatgtattctgccaaaagcattgttttccagggcccttgaccaacatcggcttccccagtccagggctcccctgctcctttcccttcccntgtactggggtagctcctgcctgctctccctgcgtggcctagggtaaagcccccagatttgccatactgagcccctcttcctagcatcaggcggatacatctgagttcaaatgtcttcccaggctcagggacttccattccttgagattgtcttggcatggcccagccctgcctcatgggatggacaatgcatggggtggtctttatttttccctttcaaataaaacactagtcaggtaccgttttatcccagtcgtactcttccaggtttggaagacccagagaggccaagatcccatccttagccatagcgagcggtggtggtggatagcatcacaagaaacgagcctgaaaatcaggtccagccggtccaagcacatggcctcccatctgggagagcccactgtcccactcccacatgtctgggcacctgccctgggctgaggccaggctgctccaggggcctcctgcgccctcacctgccacagagcaacccaggttaaatacagcccatgcacaaagccacaggccaaagcctatggaattgtttttaatcatcaaatttaaccattttcataactggttcctggaggtgtgcagtgcccccttgcctcttcaaacctacagcttctctttgccatttgtggatttcacatcactccacacagaaacattacagcctggcatccccagtctttgccttcttccagctgcctcgacacagcactgtggcctgtccctattgcccaggcacgccatttccaagggcaggaaggggcagtgtcctgaagcccatcttttctgtgactgtcttaggtgatgtgtagccccctccacctttccactcaacaacctcccacccctgtcctgctgcatggtccggagtctgggacctactttgttttttgttatttatgaccttgtttaaagaaaataaatatctcccaacctttnnnnnnnnnnnnnnnnnctcgcctcgtgccgaattcgccacccaggcctcgctacctt

SEQ ID NO: 78043 - DNA, 824 bp, Homo Sapiens
ggttcaggacctttgtaggagaggctaatatgtttaagtagaagatattactgatagcattttccccatgctcctacataaaaaataaatatttccattttatagctttttcaatatacagaagagggttacttcttcatcaagtatattgttgcctttgaggacacagcaaaacccttctatatgtatcttcattgatagtggcagttaaaaactaagttatccagttaagacttaaaaggtgacccatattaattgcatggccttaaaaggcagaaatgcaggagtgtagcaagcatcattttagatggctatggttcctcttccgcatctgtcagtagttcacttatgttcagtcttagaacctactggaggagtgaagtaatttctctgtctcgtgcagaggcactaaggagctgagttacctcttaatctgggggaatggataataagtggagtacagttatgttaaaggatgttccccccgctcaaaaaaaagtttcaatgtttgttttgcccagtcaaaaatataggtcttttctacatataagaacagtcaccagaaattttcccttttgctaaatgcttaggtatttgctatagctgtttctgatgtcatggattctgaggaagtgtcatttacgtgatgatcttcctttattgatgtcttcatcatgttcagtgttttaaaaatataaattacaaacactctacaaccatacccagatttacttattttatcagaaaaaaaacttgagaaatttgtagatcaaattgagagacaataagtgtacattgttgaataaaaaattttaaagttaaaa

SEQ ID NO: 78044 - DNA, 520 bp, Homo Sapiens
  misc_feature (83)..(102): n is a, c, g, or t
  misc_feature (114)..(179): n is a, c, g, or t
  misc_feature (196)..(305): n is a, c, g, or t
aaaggagatttgagaaacataaaaacacaacagagcacttcatagaccattttagacaataaaacaggaaataataacatacnnnnnnnnnnnnnnnnnnnnattgagacaggnnnnnnnnnnnnnnnnnnnnnnnnnnnnnnnnnnnnnnnnnnnnnnnnnnnnnnnnnnnnnnnnnntgggctcaagtgttaannnnnnnnnnnnnnnnnnnnnnnnnnnnnnnnnnnnnnnnnnnnnnnnnnnnnnnnnnnnnnnnnnnnnnnnnnnnnnnnnnnnnnnnnnnnnnnnnnnnnnnnnnnnnngtgtgagccactgtgcccggcctcctcagtccatttttaatactgaaggtataaattgtataaagatgtttagaaagttctaattcattttatgcatttttgcaaatttgactccatgaaagtgcattatcacgaagctgaatttgtgtaagcattgtgcatgtatgtaaaaacattgcaacttcctcaataaaatatcttctttttgtacatcc

SEQ ID NO: 78045 - DNA, 1320 bp, Homo Sapiens
gcggccgcgcccagccagaagatgcatgatttcttaggatcatatgctgtttgtagccataaggtaaatcatgtctcttccaatcatgactttggaactccctgaataataaaaatgagagttgagataaataggggaaaaaaaatttttttcaagccagagctatgcatatgttaggtgatgggtagtatccctttaaggtctcaaacattacaacatcaattatgaaatactgataacgaaaggtagtaatgaaatatatatgatgaaaagaattgagaagttctaaattaagacatttcagttaagctcataaaatttcattgttttcatttaaaaggagattaacgttattgatacttggataactggctaatcatattaaaggactatgtggttccagctcaacttttaatatattgtctcctttaaaactatcatgattataattctattgggaaagacttttagataacaaagatttcaaatgttaaaagagataaaagtcaggttaatactatcttaaacactgagtcagaaaatcattactgtatagaagtgctttcctgatcaagtctgaacttcagctagtgctagagaactattttctatgacttaactctaaccaagttttattttaagctgtttctttgatagaagggccatgaaaatagagtaatgatatagtaggagataagggattggtttggtctttttcaataaagatagaagttgctgaagttttctgaattaataatgacttagattgtgaccttttagattcggtgttgagctctgtgttgtattacttcctaaaagataatgcttaaacattaagcattagtgtgctcttcatgttaatatggcagagttttgtaaactaaattaaaacttactgatatattggactttgagccaagggaaagaatgagtactatctttccagatatcttaagggtaaaagcttattctaagacagtctgtccattgagaatattagatttctgacttgcaaatatgtttgtactccagaagaattagaggaaaagcagatactagaattctaatttaattacatatacagccgtctttgtttatagtgtagaattctttatattttgtacaaaaactaattcttttggtaaaatgaaccatttacagttcggttttggactctgagtcaaaggattttcctttaaatgcttgtctcaattttagtctggtcttttgtacttttcttcagaagaaatgaattaaagggtacagttgcataaagtgggtttttatcctaatgtattggaaataaatgatgggctttag

SEQ ID NO: 78046 - DNA, 885 bp, Homo Sapiens
  misc_feature (67)..(67): n is a, c, g, or t
  misc_feature (115)..(115): n is a, c, g, or t
  misc_feature (697)..(697): n is a, c, g, or t
gagccccccaagaagcgaacatccctcagtccagcggagatactggaggagaaggaggtggaagtgnccaagctgcaagatgagatctcgctgcagcaggcagagctgcagtccntgcgggaagagctgcagaggcagaaggagctgcgggcgcaggaagaccctggggaggccctgcacagtgccctctcagaccgggacgaggccgtgaacaaggccctggagctgtccctgcagctcaaaccgcgtctcgctggagcgagactccctgtctcgggagctgctgcgcgccatccgccagaaggtggcgctcacgcaggagctggaggcctggcaggacgacatgcaggtggtgatcgggcagcagctgcgctcacagcgccagaaggagctgagcgcctccgcgtcgtcgtcgaccccgcgccgtgccgcgccccgcttctcgctgcgcctgggccccgggcccgccggtggctttctcagtaacctcttccgaaggacctgacggctgggcccagagggctgcccttgcccacttaggggctcactttcctcttcaggccaatggagcgacagggcccagattgtcttccaaaagaagctgatgccctccccgccccaggatgctgggcaagggctcatcgggagcaggggctcatccggagcaggggccagctttgtggggcaggagctccanggtgggtggcaggggcaggtgaacagagctattttccgaattaatataggtctatcttttctagggcagggatggggctgggtatttatgtatcaagatcggacagagtaatatataaatcactcccccgatttggcccccattcatatatacatagagcatggtatcaaagcctggttttcttcttc

SEQ ID NO: 78047 - DNA, 672 bp, Homo Sapiens
gaggctcaaaaaatgctggggagaaatgaaaatgctgtgggatagggctcctgttgcctttcagaggaagtctgacactacagcgttggcacagtgccgtgaacagtggaactgtgcccaagggactctgactatccaagcatcttccgaagagtgttgtggtcaccttaaagagacttccccttctggaaatgtggtgacttggcttagtcttcaaactggattcatggatttgaagtaactgtaaaccctaaatcttcattttcatcccagatctggttgagtataaacctcagaattgtaggggctggcctgagctgtttatttcaaaagatactattcaatttaaagctatttttcctcagagtttttgttttctatatattaagtctaaattaagttttctactcattaagactaacatctccccactccatccccactgaaatttgtggaagaaaatttagtacttggctctgaggttgccagttatacaataatctattttgcatatgaaagtttgtatttaacttttttgttcattaaaaaccttactgatatggttataacttcagacagtttagagttggtcagaacatattttgcaagatctagtgcctagtgttgcttttctgatgtaataaaaggtggtctggcagaacctaaaaaaaa

SEQ ID NO: 78048 - DNA, 700 bp, Homo Sapiens
  misc_feature (23)..(23): n is a, c, g, or t
  misc_feature (645)..(645): n is a, c, g, or t
tgggggcagaccggtgatcctanccagtggaagcgagccatcgagccattggcagaaatcctgctgaatgtcattcagaaacctcagcccatggtcgccctcctgtgcccctctcctgccggaaagccctgcaacattctagggttgggggcagggccatccacggtttctgggcagagccatggtggcaggagagagatggctgaagcctgagcagcccagagtcccgctggtctaggctggtggtcggggcccctgggagaggagacagggcattcctccccactctgtctccaggctgcctctgggtagcctctagtctgctgttcttcaggaggcctgccataaactcttcggagtttacgtgttgcaccttttcacagacggttccccacagcatcctcagacagctctgtgatgtagcttttaggaggcactcaggtgtcacggctagactgcagctatgagacagatctggcttcaaatccaagagttgccatgcacttgctgtgtgaccttgggcaagtcacttcacttctctgagccccgtgttcctcatctgtacaatggggcttacgatactactacctcagtagggttgtcctggggatcccagtatgatgaagtgcgcccaggggcttggcnatggtgcccggcacgcccagaaagtgctcaagtaaatgtttttgtcataacgaaa

SEQ ID NO: 78049 - DNA, 504 bp, Homo Sapiens
gatttttttctggactcatactcctttcagagctgctgcctcttccattgcccatgcaaacaactcaggtatcacttccatataacatgcatcttataaatgactgcagtaacactttttaaaaagccagtgattttgttaaaaaacaaaaaccctcatctcccttcctcccaaaaagacataaaataaccggatgagggggagataaaactgaaacaagttggtcattgaggaaataggggggtaacattttaaataaatttttgttaaagtgagttttattttgctgttatgtatgtttggacttacatttttctgttattttaaatcctttcccccacaccttaccatgtgttagaatttgccaataactagattgcttcaccaatggactctgctcaactaactgctaacctgagaacaataagattttttagactcattgaattcaagcaaatgtttaactgtataatagaaaattaaatgttttaagcatgcagtaaa

SEQ ID NO: 78050 - DNA, 1021 bp, Homo Sapiens
gatcgaggccgggggtgaatcggcacgaggaagtaaagaagtctttcttcaatctgaaggtcctgaaggatttttttctggactcatactcctttcagagctgctgcctcttccattgcccatgcaaacaactcaggttattgagccacatgatatatcagtggcactcaacacccgaaaattgtggagcatgcaccttcatgttcaagcaaagttgctccaagaaatagttcgctctttctctggcacaacctgccagcccattcaacatatgttacggcgtattgtgttcaattgtgtgaccttgcctcaccaactgcacttctgattatgagaactgtgttggattgatgtagaagacttgcaaagcacttcagaagataaagaaaaacagtatactagccaaaccaccaggttgcttgctcttcttgatgctctggcttcacacaaagcttgtaaattagctattttgcatctaattaatggaactattaaaggtgatgaaagatatgcagagatattccaggatcttttagctttggtgcggtctcctggagacagtgttattcgccaacagtgtgttgaatatgtcacatccattttgcagtctctctgtgatcaggacattgcacttatcttaccaagctcttctgaaggttctatttctgaactggagcagctctccaattctctaccaaataaagaattgatgacctcaatctgtgactgtctgttggctacgctagctaactctgaagcagtacactgttaccggctgtgtccgaacatggtggtctctgcggagcctggtttgggttcttcccttaaagtccttaggaaacagggggccgcgtggttcaggaacgtggtccgcttttagggccggatggctcctctaattgacacttcactcacaggttggggcaactctcaaagtagcacccagatatgggaatcaaaacaattttaatggtacacaacttggacaaaccccgctcacttgtcgtgcatatatatctca

SEQ ID NO: 78051 - DNA, 933 bp, Homo Sapiens
tgagccacagcgcctgtccacccttggcattttgtagacagcagcaatttccctcaaccccagaatatttggaatgttccagaagtcctcatttacagtcgatcccacctgtaccctataagtggtggtcctgggcttgaacttggacctgtctgaactctgagctcttaacccctgaggtgagaacctggggtgagctcttaacccatgggaccaacccctctagagtgaggagacacgtcatcatttttccttgcactattacatctggaaaccgtgccgtgatgatctctctgcacccctcacaggcggctaacaacatcacaaacaaatcagccagaaccatcactcccgggtggggccccaagtaagccagttccccagggcccagggccctccagggtgaggtccccagcaggtgagattcagtgtggcaaggtctctgggagcaggtcccagcaggtaaagtccccgaccgccgacatcctcagtaggtgcagcctccagcagccaaggtccccagcaggtgaggtccccagcaggtgaggtccccaacaggcgaggtccccagcaggcgaggtccccagcaggcaagtcttctggaggggagaggctcctggcagccgtgaagcccagcgtgtgaggtcccaggtaagagagagggttggccacaaaggactccagcaggtgaggccccaggcagatgaggttcccggcagcccaggcaccatgccggcctctcaggtgaaccaagccgctatgctgcgcaccgtctggtacctggattcctgctgcagtttccagcaggccttgcagaaatccagtgcccagctgaaggagcgaggccgcagcgtctcccgccagcgaaagtagctcaggtagcgggcgtggtccttgtccagctcctgcaggtacccctcgtgccgaattctt

SEQ ID NO: 78052 - DNA, 760 bp, Homo Sapiens
  misc_feature (114)..(157): n is a, c, g, or t
ggtgccacaggtctaacaatcaagtctttagatggaaggaatccaggcaacattcttcaccacaacgaagaaacagataaaagatacccaattttgacttgatttcatgcatcnnnnnnnnnnnnnnnnnnnnnnnnnnnnnnnnnnnnnnnnnnnnacttaggtgtgaaagatggttctttgttgaaataatatagtggtttagtgttttcaaatcatgtttctcatacccagatagtagattattcacttaggacagaggtaatcaaattatgtgtgaaatgtaggaaaatgcttgcccctgtaaactagtgagttgatggagcatttgcttcatcatcctcatcaagagaatcatataaattaagctttataatgacatttcaaccatcaacataatatagtgaggagtagcataatattttttaataatgcagaaaacatcactgaaatgagagtcacaaatttttcttcagtgtttcagcctgagtaagttacataaacctcgcttagcctcccttcctgctaatgtgtaaaatacatacttgccctggctacctcaccgggctgttattgctggaatcagaggagataacatatatggaagataaagtgaataaaagtactttgaaaaactataaagcattccacaaatatgagatgatggtattatccatccataaataggtagatatatctctattttataggtttcagattaaacaaaactgatatcaatagtaaaagtgattttaattat

SEQ ID NO: 78053 - DNA, 950 bp, Homo Sapiens
cgacgtgcagcttaggtgggttgcaggtctatggcaggaaagggagggcgccttggaagaattcttcccttccatttggtgataaagtgggagaggcggcatttacaacatttaatagaaagcacgggctctgggctcccctcgggcagcggagggcatttcccggatgctttgcccacctggggcagaagctcgggacctgcagcgaagtaaacgtgtggctgtgagcagggccctctcccagccacggtggcttcttctaccccacgaaggtcaagaatacctggcctgcccacctcgcggggcccttagcgggtcgcacaggagaaaggcggtgggaatgccggtgtcagccacggtgtgaccggctcggctcacaggtctgagggtcagttggctcaggcatcgcccggtacgaccagagatagtgactgaggaagagcagcctcacatctggcagtttgcctctgggagaattccagcgtgacatctgcagctctgtggttccagaaaggatggttcccacattgaagaagacatctgtgggactgagttccaccgaaatgcagaggaaccaaaaatgaaaatgaaaaatgtaaccagagttgtgtgccactagttttaagctttggtttttctaaattattttctggcttctccttctgggctttgctgtaaacttgccaagcatgagaacaactcttcatctattgagtggcattttaagccatcctgtcaaagtatctcctgtcatttttattattattactctatattgcctgcaagacacgactggagaattcttagtgtaagaattgtttgtttcctctctccttctttcccacgttttcccagggaagtcagtcttgcattttaatgcatactatatacatatctcgtttagcttactgaaccacttgttttaacagaataaaactgtgcaaaatttt

SEQ ID NO: 78054 - DNA, 348 bp, Homo Sapiens
  misc_feature (335)..(335): n is a, c, g, or t
gcacgagggcggccgcttaggcagcaacatccgcaacaagtgtagacaaggtcccgcctgactccgctctggaaagtccttttgaagaaatggccctggtgaggggcggctggctgtggagacagagctccatcctccgccgctggaagcggaactggtttgccctgtggctggacgggaccctgggatactaccacgatgagacagcgcaggacgaggaggaccgtgtgctcatccacttcaatgtccgtgacataaagatcggcccagagtgccatgatgtgcagcccccagagggccggagccgagatggcctgctgactgtgaacctacgnggaaggcggccgc

SEQ ID NO: 78055 - DNA, 465 bp, Homo Sapiens
  misc_feature (48)..(48): n is a, c, g, or t
  misc_feature (73)..(73): n is a, c, g, or t
tcgagccaagattcggcagaggtagtcgcctcaggacaagggcactancctggatccagtgcaagctacatcnatgtacatggatgagtcatttgctaaccctcagtttgtccatctgtaaaacaggagtaaagattcccttcctaacagggttagagtggggacaaggtcccgcctgactccgctctggaaagtccttttgaagaaatggccctggtgaggggcggctggctgtggagacagagctccatcctccgccgctggaagcggaactggtttgccctgtggctggacgggaccctgggatactaccacgatgagacagcgcaggacgaggaggaccgtgtgctcatccacttcaatgtccgtgacataaagatcggcccagagtgccatgatgtgcagcccccagagggccggagccgagatggcctgctgactgtgaacctacgggaaggcggccgc

SEQ ID NO: 78056 - DNA, 800 bp, Homo Sapiens
ataagcttgcggcttgaaatgtaaatcacatcaaggcactctcctacaaaagtgcattccaagtcttgggattgtggataggacaaatttcattcccttcactgtgccctatgaacccctacatgatcctcctccattcctgccttagaactttttcatttactgttccttcctctggaatgtcctccccctcaatccctgtatggctcccttcttcccaattcaactctatctcctcaacaaagaccacccctcacttttccaaggaggaatttgtgaaccaaaggaggttcacaaattcaccacctcactttctctccattacctgttttctttatagcgcacactcctgtctaaaattatctatgtgatcttaagtgttcttactttttaatggtgtcttatctgtttcccccctggaatgtcaactccccgagtccagaaattcctcagtgtttgttatcattgcagcagggagcactacctgggaaatattgtcattattcatgtagtaaataagactgggaggaaggatgcgtggatgttgctccctgccacctgtgctctaagcccgccaccatggggcacaggtgatggcttcattacacagccaagattaccccaggtcaaagggaaaggacaggaggcagccctgagggtacaatagaactcagcccctactatgtcatccgctgctctcctggagccagggtcacctgtgtggctccttctgcatgaggcaggtacagctccgttggtctgtgcaatttacagacaacgcagaggaataccctgattat

SEQ ID NO: 78057 - DNA, 743 bp, Homo Sapiens
ctttagagggctattgctactggactttctgcaatgtctttgggtgtgccctcagagcctgcaacaaagtgtatctggatatactctatttgtaaagtttaggcctctaagaaggccacaatgaagcaactaaaaatctgatgattaagggagtcaatcaagctgatgccatttttagtttaaaaatgaagcagagctctaaactcatagatgggttttcttactgggaagaagattggctctctgaagacagcttccaatgaggaatgtattgaacaatggcagcactgtctggccacccacaaactgttacagatgatccagttacactgttgcataggaacccaagtggaaagaagacagagtccatgtctgtccatggctccagctacagaaaggatagtatgggaacattacaagggggatacattactgtggaaagttctgctagagttagtcttgagagtatctgtaaaatacaaatagatgagcaatccctgtggaatgctgcctggatattttcagaaaagctctgaacttgatgtcataataccaacaccgtgaatatcgtgtgtggccttaaccaaggaacagaagccctttagaacttagcttcctcacttgggagctgggactgactgcatttgccctttgtataaacccacccaccccatagggttcactgggagcataaagcaagatgtggtgaaagtacttctaatataaattgcaacatcagtatg

SEQ ID NO: 78058 - DNA, 1253 bp, Homo Sapiens
  misc_feature (85)..(119): n is a, c, g, or t
  misc_feature (1227)..(1227): n is a, c, g, or t
taactcgtatagactcactatagggcgctacgtcgtatagccgaacgacgagcgcagcgaagtatgtgagcgaggaagcggccgnnnnnnnnnnnnnnnnnnnnnnnnnnnnnnnnnnncagtcgacggtaccggacatatgcccgggaattcggccattacggccgggggactgagacctaactcactggactcagaggaggaatcgtggaaaacaagagcaaaactaccccacacccctatttcatgtctgaaataaccctgtttcataccagttgcaaagcttgtggggagcggtcccacaaagcactttcttaaaccttgagaatctccaagagaaaaatatttggggaaggagggaggaaatatgtcccttgcacaccacccctgaagcacatggcagtaggaaacagcataggattgtatgtgggaggtggataggtcggtgatgtgtggagcggaaaagcaggttggtaaagttcccttcttgggacttattcctggagtcagtggatacaagtagtgcagaaggttcacactgcaaatagtgttctcatctcaaagcaaactatcattccagaaggaaaagtgtgtcagggcaagcagacaacacaatttcctatcagaatatgtccctcaacccccgaaacaaggcttctctcagcctccccaccagtgatggataacagctcctattctcagctgacctgactgagccaacccatgaactcttcactccttggggaagccacctcccatcacacccctgagcagagttagggaggaattctacttcccataaaaggacctctcctgagaggcaaaacctgttgcctccaccacggcttccctcttggctcattccaagcttggccaaattggggaagtgggatggaggttgccctgcatcccccctcctctgcctgagtgtgtctttgtaatgtcagctggcatcatacaaagagcaggagaagcaaacacccagaactcttttgctggtcagagattccctgagtgtctgtcctcacccaagcctgctctgtgtctgtgttgtgaagcttgagactctggaaagaaatggggagggggggcaggggaaatgttgccctaagaatgcttctcattcctctgttcttattgggtcctgtttttcgggagggtgggggttgggggaagcttgaccttgtgtcttcgtcaataaactcacatttacaccaaacaccatcntataaccaaaaaaacaattcttgtcg

SEQ ID NO: 78059 - DNA, 1181 bp, Homo Sapiens
  misc_feature (66)..(128): n is a, c, g, or t
  misc_feature (1101)..(1120): n is a, c, g, or t
caaaacccacgagcgcacacacatcgaagatggcgggtggggccggcgccggaattttcgggatgnnnnnnnnnnnnnnnnnnnnnnnnnnnnnnnnnnnnnnnnnnnnnnnnnnnnnnnnnnnnnnngcttccgcccttgagctgcgtggcttccaacgggacctgagcagcctgaggcggctggcacagagcttccggcccgccatgcggagggtgttcctacatgaggccacggcccggctgatggcgggggccagccccacacggacacaccagctcctcgaccgcagtctgaggcggcgggcaggccccggtggcaaaggaggcgcggtggcggagctggagccgcggcccacgcggcgggagcacgcggaggccttgctgctggcctcctgctacctgccccccggcttcctgtcggcgcccgggcagcgcgtgggcatgctggctgaggcggcgcgcacactcgagaagcttggcgatcgccggctgctgcacgactgtcagcagatgctcatgcgcctgggcggtgggaccactgtcacttccagctagaccccgtgtccccggcctcagcacccctgtctctagccactttggtcccgtgcagcttctgtcctgcgtcgaagctttgaaggccgaaggcagtgcaagagactctggcctccacagttcgacctgcggctgctgtgtgccttcgcggtggaaggcccgaggggcgcgatcttgaccctaagaccggcggccatgatggtgctgacctctggtggccgatcggggcactgcaggggccgagccattttggggggcccccctccttgctctgcaggcaccttagtggcttttttcctcctgtgtacagggaagagaggggtacatttccctgtgctgacggaagccaacttggctttcccggactgcaagcagggctctgccccagaggcctctctctccgtcgtgggagagagacgtgtacatagtgtaggtcagcgtgcttagcctcctgacctgaggctcctgtgctactttgccttttgcaaactttattttcatagattgagaagttttgtacagagaattaaaaatgaaattatttatnnnnnnnnnnnnnnnnnnnncctgagcaggcggccgcaagcttattcccttgtagtgagggttaattttagcattggcacc

SEQ ID NO: 78060 - DNA, 2231 bp, Homo Sapiens
  misc_feature (2024)..(2051): n is a, c, g, or t
ggatcgatgcaccgatgaagtaaacgccttagtgcttcagacccagcaagaaattattgaaaatttgaagccattacttccagctggtatacaggataaactacatacactgatcccttgcaagaaatttgatctcagttataatctaaattaccacaagttatgttcagattttcaagaggatattgtatttcgtttttccctgggctggtcttcccttgtacatcgatttttgggccctagaaatgctcaaagggtgctcctaggattatcagagcctatctttcagctccctagatctttagcttctactcccactgctcctaccactccagcaacgccagataatgcatcacaggaagaactcatgattacattagtaacaggattggcgtccgttacatctagaacttctatgggcatcattattgttggaggagtgatttggaaaactataggctggaaactcctatctgtttcattaactatgtatggagctttgtatctttatgaaagactgagctggaccacccatgccaaggagcgagcctttaaacagcagtttgtaaactatgcaactgaaaaactgacgatgattgctagctccacgagtgcaaactgcagtcaccaagtaaaacaacaaatagctaccacttttgctcgcctgtgccaacaagttgatattactcaaaaacagctggaagaagaaattgctagattacccaaagaaatagatcagttggagaaaatacaaaacaattcaaagctcttaagaaataaagctgttcaacttgaaaatgagctggagaattttactaagcagtttctaccttcaagcaatgaagaatcctaacaatagagattgctttggtgaccatgataggaggaaacgaaacttgtaagattggaacagttgttatttttatgaaattactttaaatatgaattgtactaactgtacctaaatagcaaagccctgtgtagattctggtaatgatctgtctcagggtatgtgtatttttgaagagtgttatgtccttagttttaattttgagtaaagaaaaggctaaaatcatgaattagttacaagcaacagtaccaacttatgtgacccctgaggggtggggctgtgagctcttaatttgtttttgattctgaaaaactctgcttcctggcatccaggagttagagattgagcctttcatcttctttctcaaaactagtttttgatgctttctttcatgggaatagtcacttttttatttagtaaatcgcattgctggaaccaccaaggagtgtggaatgtccttgagtgtattatttatgcaagtcacagtcacgttgccatcatggcagctatgtgaaacactaataaatgtgtttttactttttattcccgttaaaactgatgtaaaacaggataaaggcttgttatagtcacttataagtatctgggtctaagtaatttccttagatgtttctaaagaaacattttcagctttgctcccattatgattccaataaggaacgctttcctagtgcaattttaggagtaaagtttgaagagataaaaatagccaaagataggagacgtctgaattttgaatgataaacagtgatgttttaaaaaagctgttgttcttcaggaggcatttgcctaggatattgctggattataccccattggaggcttttaattttatttgtatgaattttccaggatttcattaaaaattattattgtattttttaccttaatgaaagattttgggttcaaatatctttctatattaaaagctgattgagtctgtacatatgtaaattatgcctagtggaggttctgttgactttcttccccactgtggaagaggccagttttgcctccatttgcacattcatttcagttatttctgatccataaatataacatttacaaaattcttccttgagctggtggaaaatggcctcaccagtttccctcttttaatgaaatcaaaataaaatcttttaactggatgcaaaannnnnnnnnnnnnnnnnnnnnnnnnnnncttgtgtgggccggccctcgggcccccgaagaagcctttcctaaaaccatttccttttgggcggcccggggcgccccctaaggggaaaggggaaaattgggccaaaagactgggtttccccaaaggagaaaaccggggccccaggaacataggggcgttgggaattctccccccacaaac

SEQ ID NO: 78061 - DNA, 1578 bp, Homo Sapiens
tctggagctaatcgatgggagcacgctgagcatgcccgtccgctgggtcacagggctcctgaaggagctgcatgtccgactggagagacggtcaaggctggtggttctgtcaaccgtcggggtgccaggcacgggcaagtccacactcctcaacaccatgtttgggctgcggtttgccacagggaagagctgcggtcctcgaggggccttcatgcagctcatcacagtggctgagggcttcagccaggacctgggctgtgaccacatcctggtgatagactccgggggcttgataggtggggccttgacgtcagctggggacagatttgagctggaggcttccttggccactctgctcctgggactgagcaatgtcaccgtgatcagtctagctgaaaccaaggacattccagcagctattctgcatgcatttctgaggttagaaaaaacggggcacatgcccaactaccagtgggtataccagaaccttcatgatgtatctgttcccggccctaggcccagagacaagagacagctcctggatccacctggtgacctgagcagggctgcagcccagatggagaaacagggcgacggcttccgggcactggcaggcctggccttctgcgaccctgagaagcagcacatctggcacatcccaggcctgtggcacggagcacctcccatggccgcagtgagcttggcctacagtgaagccatatttgaattgaagagatgcctactcgaaaacatcaggaacggcttgtcgaaccaaaacaaaaacatccagcagctcattgagctggtgagacggctgtgagtgtgcagagaaacccagttcaggtgtaggaggctgctgtgggcagccctgtctgatggggcacccgtgtggggctgtgctctggtgcctgagaatggctggtgcccaatcgacatgagaagacgaggcaaaagacagagggtttggagtctcctcaacagtgttaaaagaggaagtgacctcacagaccagctcagagatgttaccaagaatatcacagcccccagggtagggagacaagcagcagtttgttctgtctcagctcctgtcaaggatcctgcggggtgggccctctgtatagctgctctctgtcactggcccctggagtgggagcagcgtccttagtcactgcaggcccaggcgggcaggtggtcccaggacagaggtggggaagttgtcctgaggaagcagaagtaggccttgctcccgcccaacccaagggcctccagtggaccagcattcaagatgtgagtgcccgtggtgtgcaaggcactcccatggcaccgtatttattgactgatctgtgaaggcttccctgacccctgcccaggaagagttcactggtcgctctgttgtgccccacagcactttgttatacctctgccacacacttcacgcagcgcgttgtaactcatgtgtttacatgtctgtccccccagactgtgagctccttgagggcagggactgtacattctccagctctgtgtccccagggcctggcacattgtagacgcttaataaatgtctgttaaatgaaa

SEQ ID NO: 78062 - DNA, 457 bp, Homo Sapiens
ttaataggtaattagctctcctagcgttatggtggggaatatagagggatggttgcctgccgcaccctcccctcactattcttcgccttcttcagcctcagcttccacggaatccatgcccacatcttcataatcctccagagctgccagatcctcgcgggcctcggagaattcccccactgccatgccctcccccacgtaccagtgcactaaggcgcacttggccgaacttatggtccaggcaggcccaggcctccgtgatggccgtggtgttgctcagcatgcacaccgcccgctgcactttggccaggtctcccacagggaccaccgtggggggctggtagttaatgcccacctgtcagagatgggcagcatagaatgaagtttatattggcctcagaaatgggagctcattaaaaatcagagctgtggaccagttccaacactatgttttaaa

SEQ ID NO: 78063 - DNA, 1279 bp, Homo Sapiens
  misc_feature (48)..(48): n is a, c, g, or t
  misc_feature (136)..(136): n is a, c, g, or t
  misc_feature (162)..(426): n is a, c, g, or t
gctatggaaacccagaaccggctttaaacgtcctgcttttgctgcctntgtcacatgtcttcctgcgtatccctgatctgtgataccgtataccgctttggtgactgtaccgctgccgcagccgaacgaccagcgnagcggtcatgagcgagaagcgaagannnnnnnnnnnnnnnnnnnnnnnnnnnnnnnnnnnnnnnnnnnnnnnnnnnnnnnnnnnnnnnnnnnnnnnnnnnnnnnnnnnnnnnnnnnnnnnnnnnnnnnnnnnnnnnnnnnnnnnnnnnnnnnnnnnnnnnnnnnnnnnnnnnnnnnnnnnnnnnnnnnnnnnnnnnnnnnnnnnnnnnnnnnnnnnnnnnnnnnnnnnnnnnnnnnnnnnnnnnnnnnnnnnnnnnnnnnnnnnnnnnnnnnnnnnnnnnnnnnnnnnnnaagaattcggcacgaggactgagtgagcctccactgaatgtctgcagagaccggccagatgaggggatgatggagttgcctgcttgactcgttcctgtacttttatcccaacaaaacatgacacacaccgagatgtgaaagctgtcgacttttctttgtaaatgtttctacccaggaagacatgatttcacccaccatgaagccttctggaagcacattcctctgacgctgcagcagcgaaggaaagatggaaaagagaagttatcatttctttctcaagatcctggccccatgagcctcagtgtagccctagttcctgggatcagcaccaacaggcagggaggagaggctctggcgccctgcagacagcaccaggttcttggcatcaggagctggatacagagtccctgataatcccagccacagaatatttcaaactcaccgacatgtcctctaaatatcagatatgaaaaggcttccactcttgcacctgtcttgctattattttacagatgtgttctaaaagctataaagacggaaatcactattagtgtgtcacttatgtgatattcagacacctgagctctgtgatgattttaatgccccacaggtctttcagaaatccacctcatatacctcagaacgcccctccatctgcaagggaacgcatgtggaacaggtggagaaggaattcttttaggcccatgggtagaattgtaaggactcttgtaaatgcttcttctgtagtagagaagctggacggtatgtgtgtgtgcttatgcgtgtttgaatggacgcaggaaaaatcaataatctgcttgcatcaacacctaaataaaaccaaaataatccc

SEQ ID NO: 78064 - DNA, 707 bp, Homo Sapiens
  misc_feature (106)..(106): n is a, c, g, or t
tgatagataaatgcacaaccactttggaacagtttggcagttttttaaaaagttaaacatacatctgccttatgccccagccatacaatttttagacatttctcanaggaaaatgaaagcatatgttcattcagagatacacatgcatattcattgcagctttatttgtaacagccaaaaactggaaacagcccaaatgtccagcaacaaaagaatggataaacaaattgtggtatatttactacctagcagttgaaagaaataaacctctgacacacacaagctggattaaaaaagaagaggaaatgaattattgatacatataataaagattactctcaaaataattatggtaagtcaaagaagtcagaccatgctccctaagagtatatacttcatgattcaatttctgtacaattctataaaatgcaaattaatatatgataacaaaaagtgattgcctggaaatggtgagaggacagaggggccagaatcagccaggattacaaagatgcacaaggaaacttttgagggtggtggatatcttgagtgtggtgatagttttacagttgtatgcctatgttagaagctatcaaattgtacactttaagtatgtacactttgttgtatattaattatgccttaataaagttattataaaaagtagttccaggcaatactagacactcaataaacatttgtaaact

SEQ ID NO: 78065 - DNA, 2566 bp, Homo Sapiens
ccagcagcacggccgaagtgagactgaggagtactcctccgagagcgagagcgagagtgaggatgaggaggagctgcagatcattctggaagacttacagagacagaacgaagagctggaaataaagaacaatcatttgaatcaagcaattcatgaggagcgcgaggccatcatcgagctgcgcgtgcagctgcggctgctccagatgcagcgagccaaggccgagcagcaggcgcaggaggacgaggagcctgagtggcgcgggggtgccgtccagccgcccagagacggcgtccttgagccaaaagcagctaaagagcagccaaaggcaggcaaggagccggcaaagccatcgcccagcagggataggaaggagacgtccatctgagcagcctgcgtggccgtctggagtccgtgagactgaaaggacccgtgcatcttactgtaacccgggggccaggccggctctctcgctgtacattctgtaaaggtgtcttctcttctcagactcttcctctgtcacacgtctgactccttcacgtcaggctcaggttccatgggaggacgaagcagtggacgcattgtgggctttagggacagatgagttttccagatagtgtcagcttatttgaagattaattttctttgttaacttaaaataactattttaacccttgagtggcttctttttaaaccaaaaatcgtctttctttgcttttttatcacagcagaatcaggatctctttctcattcaaggggggaaccacaccaggtcagcgctgcgcctgctgtggccgccgcgagccacgccctctgggatctctggtaccgtcactcttgcttgtgccttccacaccttctcggtgcagatccctatgggggagctgcctcacgttctctgactggtcagagcagcgcctggtgggtgttccctggcccactctcctctctccttctgcagttctaaaccacagtctataagcccgagtcaccaggacggcctgtctggccacagacaggggctgcctgtggagcctgcccaccggcccccggcagtgcagtccagcgcggaggaggctgcccgttcctgccagttcctcactgcggggaccagcaaaggccttctcactgggttggtcaaagatagtcaccttggcctggtgcatccacagaggatgttgttcaaaccagaaatcttttaaacgactgaccttccttaaaaacagaatgactccgattgcttgcttgggctagaatgtacacgtctccttgcctgaataagccatatatatgctcttaaacaaaagtttgaaattatccatatcatctcagtgaacctactggtggactcccaattgacaagattgagcaatagaaaaaaattcctttcctttgaatgatagctgtgattcaccccaccccattttcttgtttctggtccatccgatgagacggatgctctgatgctctgaggcttctgggaggctgggccctggaggcaacgtgctgcaggcgcactctgtcagagtgaacagcaccgcgagacaggccaggctcgtggctcggaagacaaaccccacacacactcaaggggtcgaaaacaaaccccacacgagggctctcacctccttttcctaggtagtatttattttcagcacctgtttgatgcagtttttaatcctctacctattgcactgttgtgactcgttggccattatttgatttttgtacgaaaaaaagctttgttatagaaatcagcatactatttttttaaatctggagagaagatattttggtgactgaaagtatggtcgggtgtcagatataaatgtgcaaatgccttcttgctgtcctgtcggtctcagtacgttcactttatagctgctggcaatatcgaaggttccttttttgtttgtgtaaactctaatttctatcaaggtgtcatggatttttaaaattagtatttcattacaaatgtctcagcattggttaactaatttttgccaggaccattattgatcaagcaaataaattcaacagccatttgggaaaaagaaaagcttctagtttttttgtacacattctttctgtgaggagattgagtactctgcagctggcgaggagttggttgaggcacttcttcaaggccaagggggaacacagtgttttgtttccagctcactttgtacccctcacctctgcagacacggggagaaccccggacccctggcatgcatgctggcggcggcatgcctcccttccacaagcccatgctgctgcagagggagcctgtgtttgcaaaacccagtggactgggctgggtctgctgtctgagcagctcctggctccggtgggaactgcacacaagtccactggcctggcttggccccaggcattgcaattgacagacatttgcatttcatacggtaaatgaggactcagcacagccaaccataatcagcatgtctgggatagactggtctagaataaaaatgaagtttccattgctttgtttgctttaaaaattccacaattaaaatatctgtcattgaaagcttagacaaaa

SEQ ID NO: 78066 - DNA, 632 bp, Homo Sapiens
aaagcattcactggctaataatccataggtcgacctatgtcctaagttaggtgtaaggtccgatgccttggcccacactcgagctctctttacattgttagttgtcaaccttggctgatggaaatcccgtaaccactatttgttgcactgtgccttgaagggcagcaggcccaagtgctgctctgactgaaaactgagttaacaagacgaaatctaaaggatattcacagtgacttcaattcaggaagaatgcttccaaaagagcccagtggggaaatctgacatcacagaagacattaattcagtcactttcaaagagtttgtctacaggcggtttctctgttatcaaaggcatttgaaataggattttacttaaacaataatggaacacaggagtatttaaagtgaagaacactttgcctgaatgtgatcagggcacataagtgacattggcgtgcttcatatggcgtgcttggagccagaaaaacggagcggtttattttgttgatatttaagcacagctttaaaaaattcattatcgtttattcagtgtccgaattgaggccatttgggaagaaaattctagcactggtggagaattatagaataaagattataaatggttggataag

SEQ ID NO: 78067 - DNA, 1290 bp, Homo Sapiens
  misc_feature (71)..(71): n is a, c, g, or t
  misc_feature (454)..(518): n is a, c, g, or t
  misc_feature (574)..(677): n is a, c, g, or t
  misc_feature (764)..(812): n is a, c, g, or t
tgcactcggaccggcggcccgcccttcccgcccctggccctgaagggacttggcacccggccagcggctgncagagagttgctactgggtcccccagcagtgccggcccacctgctgttttgcttgagtctcttcgcctggcctcagtctgccgttccccgcggggcatgcgtctctgggacctgcagcccgccgtgcctgagcctcccacccgcgtccatgggcttcctgtggggctcgatgcctccccgacgagtaccagccccctgctccagggcgcccagtcccatcgaccacccaagggctgacggagtgcgagcgcatcggccgcgtggactggcagcgccagctccacctgcagaccccggtgcgggatcccctaggtgaagccagctgggctcctgagtctgatggggacgtggatgagtccttatgtcctgctcagggattgtcnnnnnnnnnnnnnnnnnnnnnnnnnnnnnnnnnnnnnnnnnnnnnnnnnnnnnnnnnnnnnnnnnatctagctgctctgctggggcctcggagaacctttatatctagctcagggattgtnnnnnnnnnnnnnnnnnnnnnnnnnnnnnnnnnnnnnnnnnnnnnnnnnnnnnnnnnnnnnnnnnnnnnnnnnnnnnnnnnnnnnnnnnnnnnnnnnnnnnnnntgtatctagtctgctcatggtggggccttggagaacctgtgtgtcgacactctgtatctaactaatctgatcgggacgtggagaacnnnnnnnnnnnnnnnnnnnnnnnnnnnnnnnnnnnnnnnnnnnnnnnnnccaatacaggccactcggctctaccaatcagcaggatgtgggtggggccagataagagaataaaagcaggctgccccagccagcagtggcaacccgctcgggtcccctcccacactgtggaagctttgttctttcgctctttgcaataaatcttgctactgctcactctttgggtccacgctgcttttatgagctgtaacactcaccgccaaggtctgcagcttcactcctgagccagcgagaccacgaacccaccagaaggaagaaactccaaacacatccgaacatcagaaggaacaaactccagacgcgccaccttaagagctgtaacactcaccgcgagggtccacggcttcattcttgaagtcagtgagaccaagaacccaccaattccggacacactttggctattacctgtaaagagtgaaaggcccttgcttttcttggaatcatgtgacattaaaagaaatttccctct

SEQ ID NO: 78068 - DNA, 967 bp, Homo Sapiens
aacacagaaaaacaggtttaatggactcacagttccacatggctggggaagcctcacaatcatggtggaaggcagaggaggagcaaaggcatgtcatacagggcgccaggcaagagagcttgtgcaggggaactgcccttgataaaaccatcagatctcattggacgtattcagtaccaggtgaacactatgtgggaaaccgcccccatgattcaattatccccacctggcttggcccttgacccatggagattattacacttcaaggtgagatttaggtagggacacagccaaactgtgtccagaattggtgggttcttggtctcactgacttcaagaatgaagccgcggaccctcgcggtgagtgttacagttcttaaaggtggtgtgtccagagtttgttccttctgatgttcggatgtattcggagtttcttccttctggtgggttcgtggtctcgctggctcaggagtgaagctgcagaccttcgcggtgagtgttacagctcttaaggcagcgcatctggagttgctcgttcctcctggtgggttcctggtctcgctggcttcaggagtgaagctgcagaccttcgcagtaagtgttacagctcataaaggcagtgtggacccaaagagtgagcagcagcaagatttattgcaaagagcgaaagaacaaagcttccacagcgtggaaggggacccaagcgggttgcccccattccatctttccaaccatccacccacatttaccaacttctactctgacctttagctattcactaaagaagcagaagaatcaaactcagcccctaaccttgtgaggctctccatcttgtagaggagacccacagaaaacagataaattatgaaccttcctagtaaggactattgaagaggccaaaacaataggtttgggggatttagggaaaggcaggccaaataggggtaggtcaaacacaatcgctgtc

SEQ ID NO: 78069 - DNA, 690 bp, Homo Sapiens
accaatcagcactctgtaaaatggaccaatcagcaggaagtgggcagggcgaaataagggaataaaagctggccacctgtgccagcaggggcatgggttctattctatgctgtggaatgtttgttgttttgctctttgcagtaaatcctgctgctgctcactctttgggtctgcactgcctttatgagctgtaacactcaccggaaggtctgcagcttcactcctgaagccagcgagaccatgaacccaccgggagaagagaacagtgctgtctttatgagctgtaacactgtaacactcactgcaaaggtcgaaggtctgcggcttcactcctgaagtcagcgagaacatgaacccaccagaaggaagaaactccggatacacctgaacatcagaaagaataaactccggacacaccatctttaaaaactgtaacactcaccgcgagggtccgtggcttcattcttgaagtcaacgagaccaagaacccaccggaaggaacaaatttcggacacaataggaaatctctaaggtggaatactatatcaaaagagagaagccaaaatgatatcatacgctgaaaatgttaatggaattccacaaccttgcctattaaaaactccacagtttgagcacagcatggaatcaaaatttaaaaaataaacatgacatagtatttttatcattaaa

SEQ ID NO: 78070 - DNA, 601 bp, Homo Sapiens
  misc_feature (510)..(510): n is a, c, g, or t
tgagccaccaaccccagcccacttgtaggtcctatgcacaacagccagagttctctctgtgtatgtcaccttgctctccacaaagaaggacagcagaagctggaagaaagtcctctgggcgcctgggctctggcgttgctctcttccacccatcgttcttatctcgcactcagggtagaaaagtctggtggaatggacacaaggaaagggctcagcacaggaggaaacaaggaggtgtaatcatgaccacagacggaggagatggcccaaggagatgataaaggaaaaggaggtgcagagctaaggaaagccccaaggagctgagagaggaaaagagacaccagagagacttccacggagatggggaggccttaagtagggcagcagcacatgtgggagagaaaccgagagggtggtgttaaagaaacgtaaaaggagccccactcacttccagtacagaaattcacccacagcagaggccaggcctcaattagaggcctacacaatggnggtagacgctctcacagtccacgtccatcagcaccccttccatgttcctgcccacagaaaagcagaaagagtgtgtgaatagggacattgt

SEQ ID NO: 78071 - DNA, 986 bp, Homo Sapiens
  misc_feature (39)..(39): n is a, c, g, or t
  misc_feature (78)..(78): n is a, c, g, or t
  misc_feature (106)..(106): n is a, c, g, or t
tgctgcccaagcggtctcaaactcccgggctcaaaggancctcccacctcagccccccaaagcgccgggctacagggnaaccaccaaccccagcccacttgtaggnctatgcacaacagccagagttatctctgtgtatgtcaccttgctctccacaaagaaggacagcagaagctggaagaaagtcctctgggcacctgggctctggcgttgctctcttccacccatcgttcttatctcgcactcagggtagaaaagtttccagtacagaaattcacccacagcagaggccaggcctcaattagaggcctacacaatggggtagacgctctcacagtccacgtccatcagcaccccttccatgttcttaaggataagtatcagtaatctgacggcctccactgccacactgtactctctgtccacgatcatggaaaccatccagtccttgaagcggccagtgaagagctccaggcgtgcggtcaggtcccggttaccgtacagccctttcagagccttcacgcacttcacgcggacttctcggtgctgcatgtcacttttggcagctttcgcagcattgaaaagatcattggctggtggctctgactgtttccggctatgacgatgtaccgcttgggaccctttctttggatattttgccaccggcgttgttttcagtggtcgttttgctgctttcttcttcacaccgcgattgaagctgtcctcaaatcattttcttgtcttcttgtctggtacatcggcatggcgcaaccaaagcaagagagggtggcgcgtgccagacaccaacggtcggaaaccgccagacaccaacggtcggaaaccgccaagacaccaacgctcggaaaccgccagacaccaacgctcggaaaccgccagacaccaaggctcggaatacacgccagaccacgacggagggccctcgtgccgaatacgccacccaggcctcgctacttaggacctataaa

SEQ ID NO: 78072 - DNA, 939 bp, Homo Sapiens
  misc_feature (820)..(831): n is a, c, g, or t
tcttctggcacaatcaaggctagaaagaaaaagaggcaaaagcaacaaggacataactcacaaaaaactcctaaatggagagtggaagacaagggagtatggggagttagagaagacagaaatattaccctctcaacatactgcaactcaggaatgacctcagtcaacctgcacagatggaagagtcagctgtgacaggtggagggagatgaccctggaagggcaaaggtctgagacactggcctcccctcttcccaggactcacttaaggataagtatcagtaatctgacggcctccactgccacactgtactctctgtccacgatcatggaaaccatccagtcctgcagaaaggagaaagtcactcaatatctcattacgcccattccaaatattctgttctcttagaatcagagcctcctaaagagagtgcctacgtagaggcagatgctgggatagccaagacatcttagagcatgaagggtagaaagatacaaggtggggaaacgggaaccacgacaaagagccaagccaaggagcaccacccgtctcaccttgaagcggccagtgaagagctccaggcgtgcggtcaggtcccggttaccgtacagccctttcagagccttcacgcacttcacgcggacttctcggtgctggtgaggagggaaaaccaagagaatggaaataagaccaaccacactctactcgcccctactgagcgtccagactcccctctccgatccctcattctagcttgggtgtcccctctactgaggactctgagatgtcagaaacaatgaacagctgtcttcatacttnnnnnnnnnnnnggatcacagcagtactcatgatgagaaggatcctttggctgccccttagcacctgcattaccatccatcaataaatctcttccattggaaagtctctctccccgtaaa

SEQ ID NO: 78073 - DNA, 898 bp, Homo Sapiens
gggaacgcccgcagcagggtcagaagggaggtggtcgccctccgtcgtggtctggcgtgtattccgagcgttggtgtctggcggtttccgagcgttggtgtctggcggtttccgaccgttggtgtctggcggtttccgaccgttggtgtctggcacgcgccaccctctcttgctttggttgcgccatgccgatgtaccagacaagaagacaagaaaatgatttgaggacagcttcaatcgcggtgtgaagaagaaagcagcaaaacgaccactgaaaacaacgccggtggcaaaatatccaaagaaagggtcccaagcggtacatcgtcatagccggaaacagtcagagccaccagccaatgatattttcaatgctgcgaaagctgccaaaagtgacatgcagggatgtccttcctgagatccgtgctatctgcattgaggaaattgggtgttggatgcaaagctacagcacgtctttcctcaccgacagctatttaaaatatattggttggactctgcatgataagcaccgagaagtccgcgtgaagtgcgtgaaggctctgaaagggctgtacggtaacccgggacctgaccgcacgcctggagctcttcacctggcccgcttcaaggactggatggtttcccatgatcggcggacagagagtacagtgtggccaatggaaggcccgtcacattacctgatactttatcccttaaacgtttttcctacccctgaggtgggaagaataacaaaccatgggggtgggaaagaagaacaaaccgcccggagccccacggcgcccccaggaggaacttttcctttccagccttttctgactggtcccttcctcttggggggggagcccacggctgtcctctacccccggcaaggagagct

SEQ ID NO: 78074 - DNA, 621 bp, Homo Sapiens
atgtatggagtgtgggtgactctgagcctcactgctgctgcaaggtggggaaactgtaagtgaacccctgtgggtgcggggaagggtatccggtgcgcagggaggtggccagcgcccccgggcactgctgctcataggtacctttccactgcctcctccctgctctcctgtgcaggaatgtctctgagctgttcacgttgatgcttcttggttggcaagacttgggtgtagacatgaaaccatcttactaaaagcgtcttaaaatgaccaattccagaatcaagcgtattccgttttcttcctgcatgatccctgggccctcccgcaggctgagcaagtctgtaaactgattctgggagaaaccaagctgctggccgtagggtgtccttgggtacatccaggagtcttcattgcttctgttattaccccgtctcctctgccattttctacagcttgctgagttgtcattcctttgcaacattaaaatacatgctgaactcatatttttccttccttcactgttgtagtaaagagacatatttcatgaatggcattgatgctaataaatcctttgcacaaaaatttgaataaacttccagtggtttcgataatgtaaaaaaa

SEQ ID NO: 78075 - DNA, 700 bp, Homo Sapiens
gaggttttttgtttctttgattttctgagtgggagaggatttgtgagaatcttttccagggaaatgggttccttcacgaggtaaggatgtgttccctgtatcgatctgcagaccaccccgaaggtgggtgccaccctgcatgcttgggggtgcccagggattcgagacctcccacagtactctgtctgaaggtggtgattctggccctggcccctctgcccagcctgtgtgcgatgcccctggtgctttagtgccagaagcctaggctcagaagcaccgccgcgccatctttccgtttcaggggttgtgatgaaggcccaggaaacaccgtttaatctgttactattttacctacgtataaagttttagttcaacttgggtgtgcgaaacaccccttttatcactctttaaatttgcacctttattttttttcttccaacagcttgttctctggacatttggggatgtgagtgttagagctggtgagagaggagtcaggcggccttcccaccgatggtcctggcctccacctgccctctcttccctgcctgatcaccgctttccaatttgcccttcagagaacttaagtcaaggagagttgaaattcacaggccagggcacatcttttatttatttcattatgttggccaacagaacttgattgtaaataataataaagaaatctgttatatacttttca

SEQ ID NO: 78076 - DNA, 1159 bp, Homo Sapiens
  misc_feature (975)..(985): n is a, c, g, or t
gagtataccctgcagtgcactgtagaacaggagataagaacttttctcctgaatttgggtcttctagacttaggtgcagcatatctctttgttattactaagaacaccaatcagggtcttcaggcctggaagacttgaagacacttccagctcaacacacaagtgtccagttgcgtggcagcctacccacaatatgcctctggttacagctgggtgaggtcatgttctctgtcacaggtctttgagttttcttattctcaggctccctctagcatgtaaatctgtgctccaggcagcttggctattgacaattgcagttgggaatatcatcgtgcttgttgtggcacagttcacgtggcctggtacagtgggccgaattcattttgttttcctgcctcctgctggtgatctgcctgatctatctccatcatgggctactactatgttcctgtaaagacagaggatactgcggggttccagcagataagcacattcccgtcacatgccaggggcaacatgatcaaatctacgagaccaagaagacaaaactctgatgactccctagattctgtgcctgacccctaattcctggccctgtcttgaagcattttttttcttctactggattagacaagagagatagcagcatatcagagctgatctcctccacctttctccaatgacagaagttccaggactggttttccagtacatctttaaacaaggccccagagactctatgtctgcccgtccatcagtgaactcattaaaacttgtgcagtgttgctggagctggcctggtgtctccaaatgaccatgaaaatacacacgtataatggagatcattctctgtgggtatgcaaagttatgggaattcctttataggtaactgccatttaggactgatggccctaatttttgaggtgctgatttagaggcaaaattgcagaataacaaagaaatggtatttcaagnnnnnnnnnnnataagcaatgtaattatgctattcacaggggcctcaagaattggtatgtatgatgtgatctggtccagccagggcctggcttgtcagctctctaggtttgatatgactttagtaaatttgtcaatatagatggtaggaagcagaatgccattttattaaaacacaggagaagtt

SEQ ID NO: 78077 - DNA, 687 bp, Homo Sapiens
gcacgaggtgacccatcatctgctaccattcgttgtggataattcatgtaatctctaacctgtgggcaagtatttacccttcagtagtcaagattacgttagagacttcgtccacgaatccacaccacctttcccatcagttctcaccggaaatatgctgccaaaaagaaaatcagcttttctaagatcaagccagagttgcttctcttacaaccttacggcgctaatgcattaagttgaagtcgactgccaaagaggcccagcagagggcagcacccccatcatttttttgaatttctcccttaggaattttgccttcctttgtcttctgtccaccaggccttctctccagctggacacaaacctcctttgaagggaaataattgccgttaggcttcacagtagtgctttttcctttcacttggatttgcattttaacctgcatttcgaagatttttatacatgttttctatttccgacaatgccaggaggcttcattgacgttgtagtctgtgttaataaacttgtgtatcactctgctctgatcttttaggaattaacttgcaaatgaaatgaatatgttgggactttggcataatttgaatatagcattgtgtgagttgtgattgtctcttcctaattgtgctgtaataacctgtgtatgagaataaaatgatttccaccaaa

SEQ ID NO: 78078 - DNA, 1205 bp, Homo Sapiens
  misc_feature (958)..(1008): n is a, c, g, or t
acacacataatatttacaaaaaaatatttaattaaaaatatcttataattacagtatctattaaagcatatactttctcacacttatagaacatctctatatatacatggtatgaaatgtcactcatttatctatacaatatgtaacattcttgcagagaaaagaaagttctctgccccgttataatcatctattttaaacaatagatgtaaaacaaaaatatctacaatgctctggtagattagtaaagcttcaaaacaaaaattgagctccttggtcacaaagtaggcttctaaagtcggatctactcttgatcttctatttatcagtcctgtcacacttaagcttaaaagtttaactgcacctccaaaaaacacagaaatgtacaattcacagcagttataaatgaagagacaaaagagaatacgtatgtagaatgtttatgaacgtgcaaagaaagaatgaaagttgtatttttctttcctctctctctcttggaatgacgaatgaaaacgtttctaggttggccgatgttttttcctttcctccggtggctttttttctctaacttctgctcttccccctccctctctagtgctcctggctcgggctcaggcggccgcacacctggacagcgcggctcagcggcacagaatgctgtcgccctgcttgttcaccgcgccggccgggtcggtgttgagcgcagtgagcggggtccgcggcggcgcggctggacaggtcccggccgggtggtgtggcggcgcgggcggtggtggctgcctcagcagggccgggtgcgtctccagcgccagctgcaggtccaggatgtagtcgataacgtgctgcaggatctccactttgctgactttcttgttgggcgggatggtgggcaccagcctccgcaggcggctatagcagtcgttcatatcgcactgcaggcacagcgccggctcgtcgnnnnnnnnnnnnnnnnnnnnnnnnnnnnnnnnnnnnnnnnnnnnnnnnnnngctgcggagccacccaggctgtggccgtgctcggccaggcagcgcagcgccagctccccgccgccgcagcccgacggcgccttgcggcccgaggggcgcaccgggctcaccgccttcatcgcgcgcgccctgcgctctacgcgagcgaacccgctggggcgagcgagggaggcaggcaagctccgggccccgtccgc

SEQ ID NO: 78079 - DNA, 489 bp, Homo Sapiens
atgaaggtggtgagctgggtgtgtatctagggtagtaaggagttgttgggctgcgatggcggggagctggtgatgagatgattggctgagtatggacatagtttgggtggctccgcagccgcggcggcggcggaggcgacagcgcgatgtaagacggccgagacggcggccgacgagcaggcgctgtgcctgcagtgcgatatgaacgactgctatagccgcctgcggaggctggtgcccaccatcccgcccaacaagaaagtcagcaaagtggagatcctgcagcacgttatcgactacatcctggacctgcagctggcgctggagacgcacccggccctgctgaggcagccaccaccgcccgagccgccacaccacccggccgggacctgtccagccgcgccgccgcggaccccgctcactgcgctcaacaccgacccggccggcgcgagagaacaagcagggcgacagcattctgtgccgctgaaa

SEQ ID NO: 78080 - DNA, 1233 bp, Homo Sapiens
gaatagtggagtgaagtacaaaggtccagagagttggtaatagaagtgaagacaggaaggcagaaatggaaggctgctaatatttgcatagttcattctatgtacctgtgtctatgcacctgttttaatctgcatcccatttaattgtgacagctctgagaggaagttattcttgttttacagatgagacaaaagatgtaagagatacctttaatcacaatttatacacttcagagtcagaggaaacctggatttaactccagggctgtgctccctctctttacctaccctctggcctatatgattactgccattcaaaaaactgtccatcttagaaaagctatggtgacccacattcaatattctcagttggtcagccctccataattttcactgggataggagccatttggctgggtgccttccaaaaaaataataaataatgggatgggggaattttctaaagtacaaattggttttcacatacaagatgtgatatgaataatagctgctaattagtgagcactaccatgtgcttgtctttgttctaaacaaccttgaatgaaataatcttcacaaaaaccctatgaggaagttactgttgtctatttatacccattatatagctagaggctgagtcacagagtataagtaattgaccaaggtcacagactagaaagtgaaataatatccaagcattttatatccccataaatatcctcatagtagtaatggggagagggggcacatttatctcaatgaacctgccattgcactaattttttttggaactctgcttttggaaaaagttctaaacttttttgtgtaatcgtaccctttggcagtctggtgaggcctatgggctctttctcaacatagtttgttgttaaatgcataaaatacataggattataaaggaaaccaattaaattgaaatagttatcaaaatgtttaaaacaagatttgtgataaagtaatatgtgcttctctattaagatctaccgggggctattagtttcaatgcagtgatgaacacaaactatattttgagttctctgcagcaagtggaatgtggtatgaaaatatctgatatttacaaagatgatactgctaagtcagagtcacgtttattgctaatatgatggtggagtgttgtcttcattcataatgaaaggaaatgttatttttaatagaggttagtgaaaataaaaataaaactattttctaatcaaa

SEQ ID NO: 78081 - DNA, 963 bp, Homo Sapiens
  misc_feature (372)..(372): n is a, c, g, or t
gaaacctacttgatcatcaccgaatccatactgggagaaaagccctatcaatgtaaggaatgtgggaaagccttcagtatcaatgccaaactaactaggcatcagaggatacatactggggagaaacctttcaaatgtatggaatgtgagaaagcattcagctgtagttctaactatattgtgcaccagagaatccatacaggagagaaaccctttcagtgtaaggagtgtggaaaagccttccatgttaatgcccatttaattcggcatcagagaagccacactggggagaaacccttcagatgtgtggaatgtggcaaaggcttcagctttagttctgactacattatacatcagacagtccacacttgngaagaaaccctatatgtgtagtgtgtgtgggaaagcattcaggtttagcttccagctcagtcagcatcagagtgtccatagtgaaggaaaatcctaataatgagaaagatatagaaaactcttaaggttaatgccaaaatggatcaagtatcatcagattcatccattgaaaaacctccaagagggcatgaatatggcagagtcttcatatggaaacagtttttattctattcagtttaaatcaggaaaggatgaccagttaaagagaaacatccaaaaatagctttgttttgtaccaacaggaattagaaaatataatgaaaagatttcgttcccagcagcatcaagaaaagtagattttctagaaataaacagttatggaggacttgtatggagaaatttaagtcttcactgagggccactttacaaaggaaatttgaataaatggagagagagagaagccttgttgttggataggaaaacccgtactaaagatactctacctacattaatttatttgtttaatttttgacaacaagcatgtattacttttgaaaagatgaaaaataaagatttatttaaaaaaggaaa

SEQ ID NO: 78082 - DNA, 888 bp, Homo Sapiens
cgcaacctctcctatggagacaacagcgaccctgccctagaggcgtcctcgctgcccccacccgacccctggctcgagacctcctccagctccccagcagagccggcacagccaggggcctgccgccgagacggctactggttcctaaagctactgcaggcagaaacagagcggctggaaggctggtgctgccagatggacaaggagaccaaagagaacaacctctctgaagaagtcttaggaaaagtcctcagtgctgtgggcagtgcccagctactgatgtcccagaaattccagcagttccggggcctctgtgagcaaaacttgaaccctgatgccaacccacgccccacagcccaggacctggcagggttctgggacctgctacagctgtccatcgaggatatcagcatgaagttcgatgaactctaccacctcaaggccaacagctggcagctggtggagacccccgagaagaggaaggaagagaagaaaccaccccctccggtcccaaagaagccagccaaatccaagccggcagtgagccgcgacaaggcctcagacgccagcgacaagcagcgccaggaggcccgcaagagactcctggcggccaagcgggcagcttctgtgcggcagaactcagccaccgagagcgcagacagcatcgagatttatgtcccggaggcccagaccaggctctgagaccatgcaggaggaaagaaacgattctaaatcattaaaaacacaaaaactaagtgcgaacggaacagagttttctcaacctttgctatggttattctgtctagagaccctgagccaactttcaaattgacgcatacaagggctcacaatttggcttttttgggtccctcccagctttaggttatg

SEQ ID NO: 78083 - DNA, 964 bp, Homo Sapiens
taggagtcagctatggacttccataggagttggcagctaaaaccagactgtgagcttctgtctccgttctgatttttgctgcacctcccaggggacagtccccacatgattacaaaagccaggtgccctcatcacccgttacccctgacctgtccacttgttttgaataaaccttcattctccaagcagatccccaaacttccttgtccttgttacacgtctacctcacaacctcacaattcaacaacaagtaaatacctcgattcactgattcttaactgtcctcctctgagggtgggaaggtgggggctagaaaaggctcataatttttaaactcttgggaattaaacttgggaatttctattcctacagtgttttctctgggatttttagctcactgatcgccctagaatagtgtgaactctccagataggtcctgctgtgataggccaggggagtaggctgtgcagtgacggcttagggtaataagtaatggttggaggacaccagcataggagcagagtttagaacttaagaggacaagaaagctgctcagtggctggcgtatagctgtgaaggtaaccaaacaccaaagagggagtctgtcatttttataaggctggaagcgaatgttccttttctaccttaacatacagtttagggggttgcaccaagacaaagtttccaggctggagggtaatacatatccagcgcgagtgaagtccccactccaacatataccctttttgggtgggtaaacacctctttgcatgtggacagaaaatgtttatacttaaacagacatattttgcatatttttatctggagacttcttctagttttatactcttcccacatctatgccaatgccaccattctaaaacttacactccttttctacccctggtcttttccttgtccttccctacaacttggtagaggtccattttgtcttacttcacac

SEQ ID NO: 78084 - DNA, 822 bp, Homo Sapiens
actcagactggagaaaattaacactcagtgattcctgaaagggtgcccagtgcaatagatattttcaaagtgagttcatcgggggatttaatagccagggcaatgtccattaaaacagcgacaaacatggggagaaaaggaatagttccaactggaaactcatgctggcttgacagttgttctcagggagcagaacagaagtgggcattttcattctggttacaccatcagcgatacctccacggagcctctcagctggttcctcctgggtctgggccacaggcctcccagtattgccggtctcggaagacatctgtgggcaggttctgtagagggaatctgaggctgtgtgggatgagctgcaggaccccatgtggggaaaggcaggaggcagcaccagctccttcaccaggacctgagggtactgtggctcatcaggggccatcgaggacatggagaccctgcacagtgtttgaggagtcctgctacatcagtttattctggtttaggtggttgaggggagactcagtgaagtcttgggggttcagagctacactgccagcctctgggacagcagccccagtgtcccccgacccaggcctttctcctccctgctgatgaacgcccactctgctcccagatgcacacctgtcctgaagacacccggttctcatgctcttctctgcagcacctgaattgggcattcctgggtaaagctgtttaagttactttcacttttatccacttgtttccgttatttcaaccatgcatgtcccttgtgtatgtaggataaaggtgtctaagaataaaggtccatgattt

SEQ ID NO: 78085 - DNA, 664 bp, Homo Sapiens
  misc_feature (38)..(38): n is a, c, g, or t
  misc_feature (70)..(70): n is a, c, g, or t
  misc_feature (81)..(81): n is a, c, g, or t
  misc_feature (139)..(139): n is a, c, g, or t
  misc_feature (198)..(198): n is a, c, g, or t
cttggaaccctccctttgtgccaataatactgaatttnttcaaagattttgagatgctccagtgtttcantgctacttatntttaatcatatggggattgatgctgtcacagctactgcccgggcagctggagttgctntgcatttcacagtacaacagccagactatgtaaataattggcagaaaaattctactctngctggtggaattaccaaaataatatagaccagaaactagctaatcaaatcaatgatctccaacaaactgtaatgtggctaggagatcaaatagttagtctagaatatagaatgcagttacaatgtgattgaaatacctctgatttttgcattactcctcatctgtataatgaaacacagcatgagtgggaaaaagttaagaaacatttaaaaggtcatactagaaatttatctttagatattacaaaactaaaggaacaaatatttcaagcctctcagacacatctgacactaatgccaggaactgaagtgcttgaaggagctacagacggattagcagctattaacccactaaaatggatcaagacacttggaggctctgtgatttcaatgattgtgcttttaatctgtgttgtttgtctttatatagtctgtagatgcggaagccacctctggagagaaagcca

SEQ ID NO: 78086 - DNA, 775 bp, Homo Sapiens
  misc_feature (63)..(63): n is a, c, g, or t
  misc_feature (124)..(124): n is a, c, g, or t
gggctcctttcaactcagatgcttcagttcagtaagtcaatatgtattcctaaaaataaagtntgtcactaagaaggactgaacaaaattattcccctcccgccaaacacaaccagaacagttntaatcaggcccccttctccccacgaaaacagggaagtagctgggctgaagactttattaagtgtgacatttcagttcctaaaacatcactgctatatgctcaaagttgtaggtctatgtatttccttctccaacacgtccccatttatgtttatttccacacatacaaacgtgcacatgtgtgcacgcacacacgcacacactcactctcaagtaagacacttctttgtgtttgttgataaattatgaggattatgaactaggtgtgtacagggtttcataggtgctttctaaacatcagagtcacttgggtcctttcctccataagcctcagatcaaattatgcaaccaatgaccaccactttcccagacgctgttcacaggctgcataatgacgaagggcagagaaaaagtccccataactgatgtttacatgggaaggcaaagagacaatctcagtcaatctgatgtgccagagaagaaagcctcgtgtgctgtccacaggaccgaacttcagtactaaatcaggatcaggacaaccatttgaactgagtaaactaacatatctacatccaaatctgtgggtctcctttgcttctgggctactcactggcaaaagtcctgagcggctctcacaatatctgcttttcca

SEQ ID NO: 78087 - DNA, 773 bp, Homo Sapiens
cttcatccaaggcaattcaaatttccacggataccaagtcttcaatggccggtgtcaaccattcaatagaagcataccagaaaatgttgcgattgccttcttcaccacaagagtctaagtgacacaaatttgggcagaagtaattatttggccaagccgggaggcaggaagcttaaataccgcctctgtaggaagtgcgggggatccgaagcaaacaccccaaagtttgtttgtgagtggaggcgcggaggcgcccggagccacgccgaagctcacctggtcagcagcacagagcccggtaggagtcgggtctagccctagtttgctcctgagcgcttcgttcctctcaggctactgcgtttaaatcaatactgggtggcaaacgatacccattctttgggctctgaagtttggaattcatgggttctgcggcacaagaaagtttcttcacaggttatttccctgtccgaggctgtcgcttagctcatctcctcccggtgcggccctggggtgtccaccaagccgccgggcagatcgctgccccgtgctgcggcatcttgatgcccaggaccccgaggctgtggggcagcccctcctacctgggacaagcggccagaactccttttcccacagggaagaacactccgagcccccggaagagtgcgcatcctaaggagatgtctcccaacgcctgctgatgtatccgtccccgtcgccgtcgcacgtctggaagaggcgccgcatcctttcctcctcgccggtgctggacgtgt

SEQ ID NO: 78088 - DNA, 1336 bp, Homo Sapiens
cggctgaccgaagaaactgtagactaggaaacaattgggcatgtattaaagatggtgataggggtctgaggacagcctgagtatcccgatcaatttccttatattgattcatggttaaatatagcacagacaagactaacctggatcaagccctgtttagcagcttattgcaaaacacttgtagcccgagccaaaaataaaagtaagagcagcttcaccgactgacacgaagttaaaagaaaaaccccagaaagagcaagagaagccagttttgcaacagctgccagaggaaacagaaattcctcctccatatgtcccagcctacccccctttactgaggccaacagccctccaggaaccaaattcaggagctagcatgccctgagtctgaccccgaagggaaggactggagcctcaaaaggccagggaaggaagtcaaaatagtcaagcaggctgtctcagatctggccgtgcttgagctatgcaaatgcctgctcgagctatgcaaatgcctgtcagggagatgtgaggacccacttattgtaataaccaaggccaggttcggaggtggggggcaaccaccttcatctatcagccctttctgactactgagctactgatctactgaactggaaacaccatactccctcctacatggagaagcctcaagctcttatagatctgacgcaatccgtctttctgacacacagtccaacctggccagattgcaggcagcttttcctaacgttatttaacactaaaaagcgcaggagagtaacataggcagctctcccctggctaaaaccccatgcaccagcagatgcagtgaatgctcaggcatacactcaaggtcagttctcataccaagatcccaactggaacccagaggatgcaactcagcttcagcatttgcaaaggtaccaagagacacttctgcaagggataaaagctggtggaaagaaagcaattaatatacgaaaaatttcaaaagtgcttcagagagctgacgagagcccaagtcagttttataaaaaactttgtgaagcattccggccttacaccctatttgaccctgaggctgctgaaaatcagcgcatggtaaacacagcatttgtagggcaagcccagggtgacgtcaagcggcagctgcaggcatgaatgccacccagcttataaaagtgaccaccaagatgtacatgaaccatgaccagagaacaaaacgggaaagagcgaaagcaacaagcgaggcaccaagcagctaggcacaccaagggtttagtccctctcctcagcctggctctatctggaaaaagagcggggcggggactggccccag

SEQ ID NO: 78089 - DNA, 925 bp, Homo Sapiens
gtctcccaccgaggatttctggaggacgtgtgggcctgcccaagccctcgggtcctgggaggtcgagcagtaagctgtaaactaggagtgtgggggacggagatggctgaggcgtcacaggctggtgggggtgctcgtggcccaggacctctgtggcttccgggaccggcctgagccgcgtggctcctgtccctgtggaagaggagccttctctgctttgggatccgctgttcttattttccgtcagaagaagctgtaacacgtttattttcaggaatgcatttttttctagaatgcatttttaaaaaaaggttcttcatagagctttgcattaaggaatactggctgcaaggcaggagacacggtttgcagaaaacacacctgctgtcgagagggagaacaggtctcccggaggggcctcaccaaccctgagctcatggtgcctgggtagcagccgatgtctccttgagtttctcctactatagatgggtggatcagagcttgtaggtggagccgtcggcgcagcgcagcaccccgtgtccctgacgccggtcccggacccagtcgccgtcgtacttgtcaccgttctgaaagagcatctgcccagggccgtgcctcttgttgtcatggaaggagccctggtacacttgtccatcccggtccaccagaaacccgtgtccttcccgcatgccgtgggagacctccccttcataacatccgccggctttgtactccatgacgccgtagccttgaggctctcccagaacaaactgtccagagaaggtgtctcctgaccaggcccagtgccggcggccttctcccgtgatctctccgtccacaaacgccccttcgtaataactgccatctttaaataacaacttcccgtgaccgtgcttcctccctgctttccattctccttcatatc

SEQ ID NO: 78090 - DNA, 419 bp, Homo Sapiens
tgcggccgccccggaacggttatggtgtctacgtatacccaaattccttctttcgatatgaaggagaatggaaagcagggaggaagcacggtcacgggaagttgttatttaaagatggcagttattacgaaggggcgtttgtggacggagagatcacgggagaaggccgccggcactgggcctggtcaggtgagctctagctgggatggcacattcactcctttctcataacccatcgggctcagttggtccgccgagtctagatgcagaaggcgtgacgtgtagacgggaagctttgtgccgtgagaggcctggcctaccgagaagccctggggacctgactgaggctctgtggtcaccgctgagagcaactcaggcttccggagacacttttctagaataaagatttaatctgtccc

SEQ ID NO: 78091 - DNA, 1016 bp, Homo Sapiens
  misc_feature (963)..(963): n is a, c, g, or t
aagatatatcaactctccctaaaggctgacagtgaactcttggggccgttttattctctgaggttagcaaggagtcatctactagccattcaggaggccagctgggaagacaaaataggcaccccaaactcagcaacttcataacaccttcctctccccgcctgaagccttaaactgcatcaagtcaaagaaacctggggcaaatccttaacatgtttttgactgcagtaaatccacagccactctctactccgagctggcagattgagaccaagtattcaacgaaagtgctcactggaaattggatggaagagaggagaaagttcaccagagacactgacaagacaccccaatccatttacagaaaagaatacatccccttcccagaccacagaccagaccagatctccaggtggtatgggaagaggaaagttgaggggctaccttacaaacacctgatcacccaccaccaggagcccccacatcgctacctgatcagcacctatgacgaccattacaaccggcatggttacaacccggggctgcctccactccgcacttggaatggacagaagttgctgtggctgccagagaagtctgactttccccttcttgctccccctacaaactatggactctatgagcagctcaagcagagacagctcacacccaaggctggcctgaagcagagcacttatacttcatcctaccccagaccaccgttgtgcgctatgtcctggagggagcatgcggtcccggtccctccccatcgcctgcatcctctcccacacttctgagagctgccaccccaggagcagctcagatagaatcagctggagaccacagcatcactggacttgccagacaacaagtggcgcagataaactcagagtacgagatctggcccgtcaaaggtgctctcagaatcatcatctgcatttggcggtacctgtcccccctcanaaacccaccaggttcctttcttttccatccaacaattaaagatctttgaccct

SEQ ID NO: 78092 - DNA, 889 bp, Homo Sapiens
  misc_feature (42)..(42): n is a, c, g, or t
  misc_feature (105)..(105): n is a, c, g, or t
  misc_feature (122)..(122): n is a, c, g, or t
  misc_feature (185)..(185): n is a, c, g, or t
  misc_feature (236)..(236): n is a, c, g, or t
  misc_feature (284)..(284): n is a, c, g, or t
  misc_feature (289)..(289): n is a, c, g, or t
  misc_feature (374)..(374): n is a, c, g, or t
  misc_feature (392)..(392): n is a, c, g, or t
cgggcaccatattgatagtcacatagccccagcttcatttgntcgatgtattgttgatttggcgatacatcacacagaacagttgactgtacgattatcgactcnttaggattgccctgagnccagatcgcacgaggagatccagatgatcactctcctaaagctgacatgactctggggccgtntatctctgaggtagcaagagtcattactagccatcaggaggccagctggangacaaaatagcaccccaaactcagcaacttcataacaccttcctctcnccgcntgaagccttaaactgcatcaagtcaaagaaacctggggcaaatccttaacatgtttttgactgcagtaaatccacagccactctntactccgagctggcaganttgagaccaagtattcaacgaaagtgctcactggaaattggatggaagagaggagaaagacataaaatccatcctaaaattcatataaaatctcaagagactccaaatggccaaaacaatcttgaaaaaaagaacaaaattggaagactcacatgtctcagtttcaaaacttactaaaagctacagtaatcaagacagtgtgatactggcatacagatagatacatagacctatagaacaaaagagagagcctagaaataaacatttgtatatacggtcaaatgactcttgacgaggatgctaaacctgttcaatgggggaaaggacaatttcttcaataaatggtgttcagtaaagtggatatctaggtgcgaaaaaataaagttagacccttccctaattccatatacaaaactgaactcaaagtggatcagagacctggatgagacctaaaactacaaaactcttagaagaaaacatagggggctgggtgtggt

SEQ ID NO: 78093 - DNA, 1132 bp, Homo Sapiens
  misc_feature (444)..(482): n is a, c, g, or t
tgaaaactccccacatttgctgaaagatataaaccttttgattaaagaagaggagaagattccaaataggataaacccaaagaaaacaacactaagttaattataattaaacttctgaaatcgagcagccaaagaaaaactatgcatttcttgtaggaaaacatcgactcaagtgacagtgtctttcttatttgaaactatagaagccaggtggaagtggcatgtttttcaagtgctgaaagaaaagaactgtcaaccacaagtatctggtgaaaccattcttcagcaatgaagaagacaaataaagcccttctcaggtaaaggaaaactaaacaacttacagttagcaggcctatcctaacagattggctaaagaatgttcttcaaacagaaagaaaatggtgaaagaatctggaaggattaggaagaaagaggaatgccacnnnnnnnnnnnnnnnnnnnnnnnnnnnnnnnnnnnnnnncctccatgcagtagactatccatttcctcatgagtattttaagtcacatttgatgattgaaacaaaatgtataacatcttatactcaagacaatgatattttaaagtaaaggaagtaaagacacctgaaaggaggtgaggcttccatactttacttgaagcagtaaaatgtggataccagtacactgtgataagccatatttgtacattgtaatatctactgtaaccactaaaaaacctatacaaaaagctatgctcaaaaagccataaataagtcaagatggaatcctaaaaacaatgttcaagtaacacacaagaaggcaagaaaagaagagcagaggaataaaaaccaattgaaagacagattggcagagtggataagaagttatgatccgactgtatgctgtttaaataaactaacttcaaattcatttgacataggtaggctgaaagtaaaaggatggacaaaaataccatgtaaacattaactttttatggagcaggagtgggttttaaaatatcttataaattagactacagagcaaagaaaattactagaaataaagagggacattacattagtgatcaaatgaattaacttatgaggaagacataatgatctaatgtgtgtgaaccaaacaacaaagcctc

SEQ ID NO: 78094 - DNA, 615 bp, Homo Sapiens
  misc_feature (34)..(34): n is a, c, g, or t
aaaaataaattacccagcctcgggtattcctttntaagaacacaaaatggactaagacaccatatgatcacctcaatagatgcagaaaaattattgataaaattcaacatcccttcatgatcaaaaactttcaacaaattagtcatagaaggatcatacctcaacataataaagaccacatgagagaaactcacagctatcatcacactgaatggggaaaggtgaaagcctttcctctaagaactagaacaatatggtcactttcaccagtctcattcaacatagcatgggaagtcctagcctgagcaatcaagcaaaagaaggaaataaacagcatccaaattggaaaagaggaagtcagatttttcctctttgcagataacatgctcttatatatagaaaatcctaaagacttcactaaaaaactcacagaactgattaacaaattcagggaagttgcaggatacgaaaatcaacatacatgagacaagaacttaggtggttaaaaaagtttaaaaatcagtgcacaaaaatcagtagtttacacaaaatatataccaacaacaaactagctgaaaaataatcaagaaaacaatcccatttacaattgctacc

SEQ ID NO: 78095 - DNA, 1976 bp, Homo Sapiens
  misc_feature (46)..(80): n is a, c, g, or t
  misc_feature (1493)..(1612): n is a, c, g, or t
  misc_feature (1739)..(1790): n is a, c, g, or t
  misc_feature (1874)..(1886): n is a, c, g, or t
  misc_feature (1936)..(1936): n is a, c, g, or t
gtaacacgaccgagcgcagcgagtgtttgagcgaggaagcggccgnnnnnnnnnnnnnnnnnnnnnnnnnnnnnnnnnnncagtcgacggtaccggacatatgcccgggaattcggccattacggccgggggggaggagtgactgagccccgggctgtgcagtccgacgccgactgaggcacgagcgggtgacgctgggcctgcagcgcggagcagaaagcagaacccgcagagtcctccctgctgctgtgtggacgacacgtgggcacaggcagaagtgggccctgtgaccagctgcactggtttcgtggaaggaagctccaggactggcgggatgggctcagcctgtatcaaagtcaccaaatactttctcttcctcttcaacttgatcttctttatcctgggcgcagtgatcctgggcttcggggtgtggatcctggccgacaagagcagtttcatctctgtcctgcaaacctcctccagctcgcttaggatgggggcctatgtcttcatcggcgtgggggcagtcactatgctcatgggcttcctgggctgcatcggcgccgtcaacgaggtccgctgcctgctggggctgtactttgctttcctgctcctgatcctcattgcccaggtgacggccggggccctcttctacttcaacatgggcaagctgaagcaggagatgggcggcatcgtgactgagctcattcgagactacaacagcagtcgcgaggacagcctgcaggatgcctgggactacgtgcaggctcaggtgaagtgctgcggctgggtcagcttctacaactggacagacaacgctgagctcatgaatcgccctgaggtcacctacccctgttcctgcgaagtcaagggggaagaggacaacagcctttctgtgaggaagggcttctgcgaggcccccggcaacaggacccagagtggcaaccaccctgaggactggcctgtgtaccaggagggctgcatggagaaggtgcaggcgtggctgcaggagaacctgggcatcatcctcggcgtgggcgtgggtgtggccatcgtcgagctcctggggatggtcctgtccatctgcttgtgccggcacgtccattccgaagactacagcaaggtccccaagtactgaggcagctgctatccccatctccctgcctggcccccaacctcagggctcccaggggtctccctggctccctcctccaggcctgcctcccacttcactgcgaagaccctcttgcccaccctgactgaaagtagggggctttctggggcctagcgatctctcctggcctatccgctgccagccttgagccctggctgttctgtggttcctctgctcaccgcccatcagggttctcttagcaactcagagaaaaatgctccccacagcgtccctggcgcaggtgggctggacttctacctgccctcaagggtgtgtatattgtataggggcaactgtatgaaaaattggggaggagggnnnnnnnnnnnnnnnnnnnnnnnnnnnnnnnnnnnnnnnnnnnnnnnnnnnnnnnnnnnnnnnnnnnnnnnnnnnnnnnnnnnnnnnnnnnnnnnnnnnnnnnnnnnnnnnnnnnnnnnntttaggcctccggacgaccgccgcgaccctgtcggccgccctcgcccctcgagaaactttctcaaccctctcgttgcgggcgcgcggcccactaagttacgccgcagttgggccacaccccggctannnnnnnnnnnnnnnnnnnnnnnnnnnnnnnnnnnnnnnnnnnnnnnnnnnnaaaaccaagagacccgcgcccggcacacggaccgcggactcgaatcccaacccccgcgtactcgctgtccgtggtgcaacaagnnnnnnnnnnnnngccttgtgaatgttcccgcgccctcgcgtcgcgtatgcgccgttgtctcncacttcttcgccgcgccccgcgatctcgcctcccgccact

SEQ ID NO: 78096 - DNA, 1047 bp, Homo Sapiens
atgttgggtccatgtctcattcattcaccagtatagacccagcatctagcccgggacaactattattggtgttgctaaatggccaacaagagccatctggtcctcagccttcccaaactcatacaacccatggaaggatgagtggaaccatgggggcaagtatgtagtcaagcttaactctgccagcaagaatggccaataaaagctggaaggggcagaggatgtgtggcaagcacggcttcctagaagaaatactatctgaatgggtacttgagaaataatcagaagttctctatctgatacacttttaggaatttcagttttttggggggtgtcctagaccccagtgaaaaagctaggagtttttcttcaactctacaatgggagcaagtttcttaactccttggtgcctcagagcctcacctgtacactgtaatatttagtcatatccaccttcaagtgactgggaagattaaatgaggatgtagtaaacagatgagaagagttcctggctagattaagtattaaatacaacatgtagataaaagctagtcttacgtgtaccttgtaaaaagctgtctatacaggatttttttccagtcatggcaccatcatcagggttttgcctgaaacatcaagaactaagaggggctagtgcatccctgagtttcaaatcagtgacaagaagtctcactttcagagtctgcttaactcccaacttcattcaacttttacattttatagtaaaacacagaggtacaccatcagtgctagatgtgaaaaatgcttggcaagacaatgtattagcttctagtttctgaagatatgaacagagtgacagcttagccgcatgccaaagctgactcaaacaaatgcaggatggtcttcagaacacgtggctctcaaatgctaatcttacaccacctgttgaggttaataagcaagatgtgttaaacgttttgtgacctgccagagtttgaatgagacaagtcttgagcttacaaccagtagcagtttgcactttaaatcactcatacaggcggccgc

SEQ ID NO: 78097 - DNA, 1011 bp, Homo Sapiens
aaacctttataaacaggcatgatcttttagaaactactcaaacgttttaaaaggaagagcaagagcaagtgtcagttatgacacttgaagagtcataactggttacctttgttacagtttaaaaaaggtagcactttctgtgtttcacagggtgaatgccttcatccattggaacctgaaccatgagtatttccttctgagactttcatcaaactaagtctgcatgaagcctgagtcctgtggtaactggaacctcataatagcatttacatttggtgttaaaatgcacccaacaggaaaaaggattcagttattttcaagcttccaaattccaaatgtgctgaatagacatttcctttaaaaaataaatatacaaaatggatttgtgtgacttgaagtttaaaagaaatgttcttgcatgccatagttaagaattgtaacaatatcacattctcaagtttacttattttaaaagtagactgtcatggtttggctcagctactaaattaaattattgctggcttgaacattcctgttggttacactgtaatctttacctcccttggaaaatatgtccgattttgagtgtttatttcagacttggcttgaaacacctctgtttagcagtgaagtatggatatatatgtgtgatctgtgttacgtatgtagaaaggaaagaaatagaaaaaagttttacattgtgtgttacaaatacacactaacaggaatacatatatacatacatatatgcaactagaaccatgcttatcaaggatcaagataatataactatactgaattaatagacatgcatacatacatacatgtgtatccattaacatgttattacaggttgaattgtgtctccctttcccccaaaatcagatgttgacattttcacctctgggagctcatttggagatagggcttttgcggcggtaatcaagttaaagcaagatcattaggttgggttctaatctaatatgactggtattcttattaacaaggggt

SEQ ID NO: 78098 - DNA, 792 bp, Homo Sapiens
attgcaaaataaacacacatatagaaccacatgaacaaatatatagtgtaataaattatttcaaggccaatatccctgtaactaccacctaggtcaagaaatagaactctgccatcccagaagcccctcacatgtcccacatcccaattacaactccctccctccacccaaaattaaccactatccaaatttttatagtaattaataccttgcatttctttatagataaaaattcatgcatccatccctagaactaataagtcgtcttgccattttataaatttttaaacttttggtgtatcttttaagtctcccattcctttttctttccttacaatttatctgttaaagaacctggggagtttgacttgtaaaatctcccagtctggattttgctgagtgcacgctcatggtacagttcagcatatccctctggcctccatatttcctgatctctttggcaagattagaggtgctgttcttttatagacggcacataatttctggttgtctctcttttcattgatgctcagtgcctagatcaataacttctttgggcattgaaaaactgtgatattctatcatttctttttcatttattaagggggacacatctataaaaagatgtttccccctcacctactatatgcttactcagtattgcagttcacataaggtcagtaatgcttgactctttcccttaatttactaattatcaagataaaggattagctccttatcatcctccaaaagtggacagtttgttttggggtatcattaaaacctcataga

SEQ ID NO: 78099 - DNA, 165 bp, Homo Sapiens
ccgccccgccaaaagccgagggggtgctggcaggcgggcctcaggggctgtctttcctgcacggctgttgtgtgcttcgctgagtgtgggtggtcctgcttgtgtcatggtcatggccttccagccccctccagttttccccaaaccaataaagaaagatacagc

SEQ ID NO: 78100 - DNA, 647 bp, Homo Sapiens
gctgatttacagaacaaacacaatacaagtgttttttcttgctaattgtttgaattccttgtaaattctggatattagtccattgtcagatacacagcttgcaaatattttctcccaccctgcgggttgcctgtttgctctgctgattatttcctttgctatgcaaaagcttttcagcttaattaggtcccatctatttatcttcctttttattgcatttgcttttgggttcttggtcatgaactttttgcctaaaccaatgtctaaaaaagtttttccaatgttattttctaaaattgttatggcctcaggtcttaaagttaagactttgacccattttgagttgatttttgtataaagtgagagacgaggatccagcttcatttttctacatgtggcttgccaattatccctgcaccatttgtggaatagggcgtcctttccccactttatgtttttgtttgctttgtcagagatcagttggctgtaaatatttggcttcgctcctgggttctctattctgttccattggaacagaacacatgcctattttaataccagtaccatgctttattggtaactatagctgggcgcttgtctcccttttcttttttgcaaaaccgccacagctatcattgcttgctctc

SEQ ID NO: 78101 - DNA, 696 bp, Homo Sapiens
agatggaaggagtaccactagtcaaggattgcaagcagtctctagaacagggattccaacactccggacacagaccagtagtggtccatggcctattaggaagtggggtgcacagcaggttaggggccggcaagccagcgaagcttcatctgtatttatagccactccccgtcgctggcgttaccacccgagctccgcctcctgtcacatcagcggtgggcattagattctcatagcagcacgagccctattgtgaactgcacacacgagggatgtaggttgcacgctccttatgagaatctgatgcctgatgatctgtcactgtctcccgtcacccccagatggggctgtctagttgcaggaaaacaagctcagggctcccactgagtctctgtgatggtgagttgtagaattatttaattatatgttacaatgtaataatagtagaaataaagtgcacaataaatgcaatgcacttgaatcgtcctgaaaccatccctccccgaccccaatccatggaaaaattgtgttccgcgaaaccggtctctggtgccaaaaaggttggggaccgcttctggaaaagctggaaaaggcaagaaaacgcattctctccctcagcctctggaaggaaccagcactgtgggactaatttacatactgtagggtaataaatttgtgttgcttcgaaccactaaa

SEQ ID NO: 78102 - DNA, 489 bp, Homo Sapiens
  misc_feature (159)..(167): n is a, c, g, or t
tgtccgtctctccatcagttcctagaactcaagcacagctcccgccgatcctggggcggcgccacctctccacccgcagcctgcggaggcggggacttgggtgtcggcttttctgagggtgatcttttgttttccgagtttgggattcggctgttgggnnnnnnnnntcgcgtttgtaccttttccccccacagatgagaagtgtttgtaatggatttgtatttttcttaattttatgctctttagacgtttaaaagaaccaaaaaagaaacttttgcttcttcgttttcggttgggatttgcagtttaatggcctcagatccttctccagatccccagggtttctttgtcttatttatggagaaaaaccggtcactttgtccagcgcactgtgaggcccccactcaggccagccctggcccccccttggtacttggaaccgaagttacagattatattaaaataataatgccaaacaaaaaacaaaaa

SEQ ID NO: 78103 - DNA, 769 bp, Homo Sapiens
  misc_feature (31)..(32): n is a, c, g, or t
  misc_feature (58)..(58): n is a, c, g, or t
  misc_feature (97)..(97): n is a, c, g, or t
gcacagaatacgctagtcttctgctgactanngcaagcctgtaacaggatagagcttntaatcaaacatgatagaaaaagcagtcacggtagatatntacaagcgtgccaccagggctgaagtctacatgtgcccattcttgccccactgagcaactgacactgaagttaccaccagggcaatgtggaactcaagaatgtgaaagagctgtccctctcaaccctccccatccccaagcctgcgagccaaaagctcacaggtacccagtgaaaggccaaagaatggatcaggagcctgaggctgcaggctgagatccagaatgaccctgaccacctgtgggccctctggccttcctgagcctcagtgtgctcacctgtaaaatggagacgattgtacctgttctttatttttagggctgtgacaatgaaaggagatgccaaagatctttgtaaactggagaatggttctacaaagtcttatgctcacaactgcttttagatttgatatttttgatctctctcttcccactttagctaaattaagcaaagactttcaggggaaggccctgctagaaagactctactgtttgaaagcaaattgtttccctcacccaggtctccatggattatgtacagaaaagcagtggactctgcctcctatttatctgggttttctctgctctattttgtttttattttcttctatttattgtattgtgtgtatcattgcaaactattgtaaatccattgtagaatgatgtggaataaac

SEQ ID NO: 78104 - DNA, 1154 bp, Homo Sapiens
ttacggctaggtacgaggcctgggtgttgaattcggcacgaggttgaccatgacccatgcagggcgcggcgctgcagaactacaacaacgagctggtcaagtgtgagcggcgcagccgggacggggaggtcgggagggccgcagggccgggttcccggctcgcagcggggtgcccctggacccgcctcgctgcgggcatcgcgcggctgagcagagccctccgtgccggaggccgggtgtccgtggcccgagccctcgcctggctcgcaggccccgcgccgggcgctcgggggtggtgcctgactctggcttcctcgggtggaaggaggcccgccctccgccgccgcgctcctgccctgggcccacagcgccgcccctcccggcccccaggcatagaggagcggtgccagaagcgggaggagctgtgccggcagatccaggaggaggaggacgagaagcagcggctgcagaatgaggtgaggcagctgacagagaagctggcccgcgtcaacgagaacctggcacgcaagattgcctctcgcaacgagttcgaccggaccatcgcggagacggaggccgcctacctcaagatcctggagagctcccagactttgctcagcgttctcaagagggaagctgggaacctgaccaaggctacagccccagaccagaaaagtagcggcggcagggacagctgaccagaccacgggcagggcctgcctccgtgtgcccctcagctcagccccagcaagtgtgtgctcagagcatctttgttcttcacggcagcagctaccttccctcactgtctcaggtgccaagaggggcaggtgccagcctccactggcatcagtgacaagcccagggcacagcccacccgggggtcctcgcttcatgctcacacaggctatggggatggtgggctccaggtcagctctgcaaggggcttgtctctgtggcacccacactcctgccctgccagggaggctctggttgtctgagcaccatgggggccccctcaccttgtccctcctcagccagcagaggcccagggcaagggacaggaggacaggggttctccttcaccacagaacccaaacctcaggtctcacccctgtggcctgtgattatgaataaagattatctttgtaaagatc

SEQ ID NO: 78105 - DNA, 972 bp, Homo Sapiens
ggggcttccgcggcggttggggtggtggggccccgggcggcgttgaccatgacccagcagggcgcggcgctgcagaactacaacaacgagctggtcaagtgcatagaggagctgtgccagaagcgggaggagctgtgccggcagatccaggaggaggaggacgagaagcagcggctgcagaatgaggtgaggcagctgacagagaagctggcccgcgtcaacgagaacctggcacgcaagattgcctctcgcaacgagttcgaccggaccatcgcggagacggaggccgcctacctcaagatcctggagagctcccagactttgctcagcgttctcaagagggaagctgggaacctgaccaaggctacagccccagaccagaaaagtagcggcggcagggacagctgaccagaccacggggcagggcctgcctccgtgtgcccctcagctcagccccagcaagtgtgtgctcagagcatctttgttcttcacggcagcagctacccttccctcactgtctcaggtgccgagaggggcaggtgccagcctccactggcatcagtgacaaagcccagggccacagccccacccgggggtcctcccctttcatgctcaccacaggctatgggggatggggggctccaggtcagctctgcaaggggcttgtctctgtggcacccacactcctgccctgccagggagggctctggttgtctgagcaccatgggggccccctcaacttgtccctcctcagccagcagagggcccgggcaagggacaggaagggacgggggttctcctctccccaccgaacccaaacgttcagggctcccccccggggggcgcgcggtttatgcggaccgccgttccgccttggcgcccccgccgctcaccgagcggccccgccgggcagggatctccgtctgcgacacagggctctcgcggacgcgggttgcccgtgtgcgcacctgt

SEQ ID NO: 78106 - DNA, 843 bp, Homo Sapiens
  misc_feature (537)..(537): n is a, c, g, or t
  misc_feature (644)..(644): n is a, c, g, or t
gggaggcgcggacagcgctgcttccgcggcggttggggtggtggggccccgggcggcgttgaccatgacccagcagggcgcggcgctgcagaactacaacaacgagctggtcaagtgcatagaggagctgtgccagaagcgggaggagctgtgccggcagatccaggaggaggaggacgagaagcagcggctgcagaatgaggtgaggcagctgacagagaagctggcccgcgtcaacgagaacctggcacgcaagattgcctctcgcaacgagttcgaccggaccatcgcggagacggaggccgcctacctcaagatcctggagagctcccagactttgctcagcgttctcaagagggaagctgggaacctgaccaaggctacagccccagaccagaaaagtagcggcggcagggacagctgaccagaccacgggcagggcctgcctccgtgtgcccctcagctcagccccagcaagtgtgtgctcagagcatctttgttcttcacggcagcagctaccttccctcactgtctcangtgccgagaggggcaggtgccagcctccactggcatcagtgacaagccccaggcacagcccacccggggggtctcgcctcatgctcacacaggctatggggatggtngggctccaggtcagctctgcaaggggccttgtctctgtgggaaccacactcctgccctgccagggaaggctctggttgcctgaaccaccatggggcccccctccacctggtcccttttccgccagcaaaggccccagggcaaggggaccggaggaacgggggttcttccttcacgccagaaccccaaccttaaggcctt

SEQ ID NO: 78107 - DNA, 698 bp, Homo Sapiens
  misc_feature (611)..(611): n is a, c, g, or t
agaaaggcaaaaagagacaaatcctttaatgaagttcaagaaaatatacattataaccatttaagttaaattgcaaaatatttcctggggcacttgctctcaaactaataaccaaatagcaaatattttccattttcaatcatcttaggtcaatttgaaaacagctttttagtttttattggagaaactcatattgtcttcacttgttcaatgtgaagttgagttgccaaaattgccttcagtacacatttgtcttttatatttcaaacagaggaaagtttccatttccccatttcattctgaaagctttcaaaaagtttgggcagtgcccagtgctgtccccatccctcacttcatcatttcagctctagttcttgcacttggcagacttcggacgccaagtttctgcttcagtgctggtcaaaatcccacagaggactttggtaccaatacccactgacaattctctgagctgagagttgttaacttttcaacacagtgacagaatgaaaagagcaggttgtattatcatttataatcaaccaggacttaaaaaattcacacacacacgagaagtaccccaagagattattaaaaaggaaattttcagngtggttttcatagagattccaattctgtgtatcttggatggggtctgggaatatgtttttaacacaaattaggttaattctgacaca

SEQ ID NO: 78108 - DNA, 530 bp, Homo Sapiens
  misc_feature (19)..(19): n is a, c, g, or t
cgtaaagaaaagcagaagnctgattatcattttagtcagagaaacatcaggcttcagctggctgggtggttcatctgaagagcaaatagccatgtataatgctcttgttcaggatggaattaaagttgtcctgcttgagctggagaaaatccaagactatgagaaaatgccagaatcgattaaattcattaagcagaaacatggggctatccgctggtcaggggactttacacagggaccccagtttgcaaagacaaggttttggaagaatgtcaggtaccacatgccagtccagcgacggtccccttcatttaaacaccagttactgtcaccagcccccacgccccgcctaaaatccatattcaaagaagcaatttcagttcctttctaagctttgtcagtcaaggggctccactgacttcctaggccctgtaatttaaccagtctttaaggttttgcaggaaagtcccttcttccaagtggtttttccaaatcgcacaatggcaaagccaaacagaggaagaaacatt

SEQ ID NO: 78109 - DNA, 976 bp, Homo Sapiens
ctggaccggtccggaattcccgggatatcgtcgaccacgcgtccgggaaggctgagcgcgggctctcaaggaaagtagtcgcggaatctcagttagcggtggagaggcagtatgtccggttcaatggcgactgcggaagctagcggcagcgatgggaaagggcaggaagtcgagacctcagtcacctattaccggttggaggaggtggcaaagcgcaactccttgaaggaactgtggcttgtgatccatgggcgagtctacgatgtcacccgcttcctcaacgagcaccctggaggagaagaggttctgctggaacaagctggtgtagatgcaagtgaaagctttgaagatgtaggacactcttctgatgccagagaaatgctaaagcagtactacattggtgatatccatccgagtgaccttaaacctgaaagtggtagcaaggacccttcaaaaaatgatacatgcaaaagttgctgggcatattggattttacccatcataggcgctgttctcttaggtttcctgtaccgctactacacatcggaaagcaaatcctcctgaggaggccttgctgaagttagaaagtgcatccactttggggcgaaaactagagacttgcttgggggctgcagaagtgccctctcctcgaatcctgccagttgcattcttcccccttggagccaagacgattggccagacatcacctcagatctgagaccagcgtcttccatctctcagagccttactcccaaagtacctgctcactgttccgtgttgaacaattgccgggggtttcctctcttcactgggtttccatgagtacccttatatttcacaactttctgttcataagttatagtgacattgctctttggtaaaaatgcctggctttccaataacttggattgcataattaaacattcttaaacaagggggggcagtctagtgtttgaaaagttttattttttcccat

SEQ ID NO: 78110 - DNA, 1801 bp, Homo Sapiens
  misc_feature (896)..(935): n is a, c, g, or t
  misc_feature (953)..(1083): n is a, c, g, or t
gctggtaccgggtccggaattcccgggatatcgtcgacccacgcgtccgaggcagtatgtccggttcaatggcgactgcggaagctagcggcagcgatgggaaagggcaggaagtcgagacctcagtcacctattaccggttggaggaggtggcaaagcgcaactccttgaaggaactgtggcttgtgatccatgggcgagtctacgatgtcacccgcttcctcaacgagcaccctggaggagaagaggttctgctggaacaagctggtgtagatgcaagtgaaagctttgaagatgtaggacactcttctgatgccagagaaatgctaaagcagtactacattggtgatatccatccgagtgaccttaaacctgaaagtggtagcaaggacccttcaaaaaatgatacatgcaaaagttgctgggcatattggattttacccatcataggcgctgttctcttaggtttcctgtaccgctactacacatcggaaagcaaatcctcctgaggaggccttgctgaagttagaaagtgcatccactttggggcgaaaactagagacttgcttgggggctgcagaagtgccctctcctcgaatcctgccagttgcattcttcccccttggagccaagacgattggccagacatcacctcagatctgagaccagcgtcttccatctctcagagccttactcccaaagtacctgctcactgttccgtgttgaacaattgccggtgtttcctctcttcactggtttccatgagtacccttatatttcacaactttctgttcataagttatagtgacattgctctttggtaaaaatgcctgctttccaatactttgattgcatattagacattcttaacagggcggcagtctagtgttgacaannnnnnnnnnnnnnnnnnnnnnnnnnnnnnnnnnnnnnnnaaaaaattctgatttagnnnnnnnnnnnnnnnnnnnnnnnnnnnnnnnnnnnnnnnnnnnnnnnnnnnnnnnnnnnnnnnnnnnnnnnnnnnnnnnnnnnnnnnnnnnnnnnnnnnnnnnnnnnnnnnnnnnnnnnnnnnnnnnnnnntctgatttaattcttttatttatcataaggggtttaattcctgaagtaaaggtttgcacctattaaacttaaaactgccaaatgatttttgttcttttatgtgcgtgataaaaatacaaagaatggtgtggccacctcctccctttcaagctagggcagcaggtagctcttcccagcccctgagcccagccccttcccaagtggtgccggacaaaaaactacatggccctttcgtgtcttgggggtggaaagggagggatgaattggggtgatagaaccctggtgaattcagagtaatctttctttagaaaactggtgttttctaaagaaacaggataggagtttagagaaggcaccaaagctttcactttggtttggcaccagtttctaaccatctgttttttctaccctagctatcttttattggtaaaatataaatgtataattatgtttgtagagctttaccaaggagtttccctccttttttgtttgttgattagcaaatttttgattctccattttccaaaagtaagagactccagcatggccttctgtttgccccgcagtaaagtaacttccatataaaatggtatttgaaagtgagagttcatgacaacagaccgttttccatttcatctgtattttatctccgtgactccaacttgtgggtttgttctgtttttccatgagaataaaatactggcggtttttttaaaaa

SEQ ID NO: 78111 - DNA, 921 bp, Homo Sapiens
acggctggaccggtccggattcccgggatatcgtcgacccacgcgtccgtggagaggcagtatgtccggttcaatggcgactgcggaagctagcggcagcgatgggaaagggcaggaagtcgagacctcagtcacctattaccggttggaggaggtggcaaagcgcaactccttgaaggaactgtggcttgtgatccatgggcgagtctacgatgtcacccgcttcctcaacgagcaccctggaggagaagaggttctgctggaacaagctggtgtagatgcaagtgaaagctttgaagatgtaggacactcttctgatgccagagaaatgctaaagcagtactacattggtgatatccatccgagtgaccttaaacctgaaagtggtaccaaggacccttcaaaaaatgatacatgcaaaagttgctgggcatattggattttacccatcataggcgctgttctcttaggtttcctgtaccgctactacacatcggaaagcaaatcctcctgaggaggccttgctgaagttagaaagtgcatccactttggggcgaaaactagagacttgcttgggggctgcagaagtgccctctcctcgaatcctgccagttgcattcttcccccttggagccaagacgaattggccagacatcacctcagatctgagaccagcgtcttccatctctcagagccttactcccaaagtaactggctcactgtttccgtggtgaacaattgccggtggtttcctctccttcactggtttccactgagtaccctttatattttcacaactttctggtccataagttatagggacatttgcctctttggtaaaaattgcctgcttttccaatactttgattgcataattagacatttcctaaacaagggcgggcaattctaagtgtgtgaaag

SEQ ID NO: 78112 - DNA, 578 bp, Homo Sapiens
aaattttggttctgtttttattaattcataacagctctcattgtatcattgcttttagattagaaccacatttttccaatctaagagtctacttgcttccaaaggcctctagtttccaacagttacttatttcccaactttgccatagggaaaacagtctaacaattatgtaacaattaaaaagtgtaaccacttctcctcttgtctaatccacttttcatgaaaagcaatgcctgaagggtggtcattttccctacaatgagcaggtaattcctaatgttcattgtactggggaagaagaaaaggcgtgtgtagggggagaagtatatgtgtcctcaatggcaaggtcaccaggagcctcagaaacctccctcatttcttccaaacatctgattcaagcctcactaggttaacacatatgtcttccctaacaatttcatcttcctttgagtttctgcatatttaatttccattctaattaacactccctaacttatgtattgttagtccattttgcattgctataaaggaatatctgagactgggtaatttataaagaaaagcctcgtgccgaattc

SEQ ID NO: 78113 - DNA, 1213 bp, Homo Sapiens
  misc_feature (677)..(695): n is a, c, g, or t
  misc_feature (709)..(709): n is a, c, g, or t
tgctgaggattagagaccaagccaacagtggattctgaagcagaaaaggcagagaatgaggacagaacagctctgccagtttaggaatgaaattacacatgaatatatttttaaatttacttgttgggtttttgaactgattatgggcagtttgactgtccttaattaagcctaacagacaagtggaccaaagttaagctgtttcctgttgtgctgaactgttttccgttgaaacacattgattcccctccccctacttattgccacagaggagggatcttttccataactgaaggggagttttgagaagtatatttctggaaacttaaatggattatattcttattatatagttgggtacgaatgtatctattttcattgtggtaaaagttcttccttttctctttcccaggtcatgttcttcctcaaattttttccatattgtaaaatcaaacttaaatcattagaatacaagtttatgtattctaatgcatgttagaaaattgaataatataggaaacacaaggctgcatgatgaaaagtgcattgttactgtgcagttaaattttggcttctggctttctttagtttgaacaaacgttcttgtctaccccagtagtcacagatgccatctttgcaacagaaagagtggtggtggcaaaatttctagaatgttnnnnnnnnnnnnnnnnnnntccacacccatgtngccttctcaaaaccaactgaacttctataaagcatctctggttctttcaaagtttgtgttgtaaggagcaatgtagatgatgctataatactttatatttttgcttataatgacaaccacccagttctttttcacttaagttaggttgagaaattttatttaatggccactgaagggccattttcaattgggaaaatttatttacatctgtggtaaactttattttgatgaaaagttgcactagtattttaccaccagatgagaaaaagatgagcagcatttaaaaattaatgtatttaaaataaagtacagagaaagacatgtatataattatcaggctttgttttgaatggaatcttttcccccaattcttaatgtaaagatcttgtgctataacttttaaagccatacaaataagagtgctaaactgtggacttaaaagtaggtgtgtaaatatttttaatcagtattacttggaaaataaaatataacaaacccataaaa

SEQ ID NO: 78114 - DNA, 918 bp, Homo Sapiens
ctcagcaacatggtataagaccagtgaaagttaatgtcattgatttttcaccatttggagaaccaatatttttggccggctgtgcggacggaagcatcaggcatgcaccagctgagctccgcgtgtgccgcttcctgcagcgggacagcagcacgggacagccatgcggtcaccggcctgcagtggtccccaaccaggcctgccgtgttcctggcgcaggacgacacatccgaacatcgacatcgtgggacctcctccagagcgatctgggtcctgtcgccaaacagcaggtctcccccatacaggctggtggccatggctgcggtgggtgagcctgagaaggctggtggcagcttcctggcctctggtgctggccagaggcgtctggcgtctcatcgacatccagcacctgaagaggcggtgggcggccccggaggtggacgagtgcaacaggctgcgtctgcttttgcaggaagccctgtggccagagggaaaactgcacaagtagcgggtgtggctgagaggaccgcgtttctgtaatgacccagatttaaaagacataaggtggataattctacatttgtgtgcaagtatatttatgtatatagactatgtatattctgtatataatttattttacatgaatatttctttggtattcccagtaaatacatgactacttttgagtggaaacaaagaacattctagcatttacaaaacttccaggggaatgtagagccacgtccagggtgctcttttctgagagtatttcgagttatttttagaacagtttaaatattgtcacattactgctagattttaaacagcctaccatgaaaatgtatcttaatgaactattttcttatgcataaagtatgtgaacacacgtctaaattaaaaggaattactccaccgaaa

SEQ ID NO: 78115 - DNA, 966 bp, Homo Sapiens
  misc_feature (584)..(584): n is a, c, g, or t
tttatactgatgaaacaactttaatataagcaagaaaatacattgcagcaataacaggagaaagagacgcattggaaaggtccaaagatctgaggctcacagttctttgtccttccacttgctgggtcacacagaacaagcttttattcatactggtggtctggaaactccaccagtacatgtgctaagacctcagtcctaggaagattaagctctgcttccggcagggtgtctgcaagtgagctggtcacataggcacattccagctacctaaccagcctcagccctcaaaatcgtcagctccaccaaaaccgagtgctaggcaaaaatctgattattttgttaaacaacgctgactggctggtacattctgccctgaaacaactcacagagttttactttggtagaagcatttatctttaataggtacattttagagtttcggccaagggtcagcagagctctaggaacctcgtagataagcatttggtcaattcagacctgctcagattaactcatactgtgcactatttcacataaaagcaaaatgtcaccaaactactttgctttacatttgagttganactaaaatggctcttttctacaagtctagagtcaatgttttcagaatagattctccaagcccaatttaaacaaaatggaagggatgtactgctgcaggcagctctttctcccgctgggatggctccttctcagccctcaccttccacttcatctccaggatgggcctttccactcgtccagggctcgctccctttttttcacagccctctcccggcatccactgccctttcctcctaacactccttttcctttgggtggccaccaagcatggtgccactgctcaggagctacccagttactcatgcctgtgggactgggccgtgggctggtccgggcgccagtgacaggcatctccagtctccgggagcttcacagtcaagg

SEQ ID NO: 78116 - DNA, 715 bp, Homo Sapiens
  misc_feature (107)..(107): n is a, c, g, or t
  misc_feature (112)..(112): n is a, c, g, or t
tagcctgtccactcacctgtgagggaacctctcctgtgtccacagccttctgcaggagttggcaacatggctcatagagctcccagcgagtcaggtcatgagtgctntgggngagaaaggggaatgttatactggaaaagaacagagggaaccaactccacagacaccagtaaaaacgggatggggaagaggaggaaagccactcacttgtagaaggcagagaggcgtttcagagtggctgcccagattatatacctcatcctcatctaggaaggacgactgagaaggaaagaagatccacaatagcatttcccccagaactcatcagtccacatcccccgtcttgcagcccctcccacccttgtttggggtgtcccattgtccagccccagctcctacctgtaacagctcttcaagctcctgctggaagcggtcagtcagcaaatctactagctggctgcgggcaaagtccgcccggctgaagaaagtgaattcgggattacagagcaggtagagggcatgcgccccagcctcaagcaccgctggctctgcatgcttcaccaccacctcctggagttgctgcaggaacagctccaggtgctgagaagaaaaggcagaagatggtgtgctgtggggatgggaggaggacactcttctggcgggaagtggaacggggttaaaagcattaaacttcaaggataagatgcctaaaaaa

SEQ ID NO: 78117 - DNA, 706 bp, Homo Sapiens
  misc_feature (15)..(15): n is a, c, g, or t
  misc_feature (32)..(32): n is a, c, g, or t
  misc_feature (93)..(93): n is a, c, g, or t
gaatgggcctgttancaggaatggtaaattgngattggaaggaatatagcttccagcttcataggctagggtgaccacggcttaggaaacagngaaagaaagcaaggcccttttcctgcctttcccgggatctgtctactccacctccacgggggaggccagtggggaagggctgtcacctcttccccatctgcatgagttctggaactctgtcctgttggctgcttgcttccagctccccccaatctccatcgcagcgggttcctcctgtcttttctacagtgtcataaaacatcctgcccctaccctctcccaaaggtcaattttaattctcaccaagttttgcacatctctgtatgtcgcttgatgtcttagacgcgagccctttcctaaactgttcagcgctctcttttcctttgggtggttgttgcaagggtgatgacatgactgtccccaggcctgtctccctgaagcgtctgtgctgtcaggacagccctgggcagagatgaggcaggggtgaggcgtgcgtgtgcttttcctccttgttggatgtcttccatatcatctgtttccatagctacaatccatcccttggccttaactttggaatttggagattatatgcaaacatgtgtaaaggctcatgaatatggatgacactggaattttataaattctaaaataaaacccgaaaccaggaaaaaaa

SEQ ID NO: 78118 - DNA, 495 bp, Homo Sapiens
gcttggtcatcttcagactcgaattcttgagtagacccagacggcttagccaagtctagttgcagctgccctcggcaagtccccatttgctcaggcaaccctgaatggccctgtttacaggaatggtaaattgggattggaaggaatatagcttccagcttccataggcttagggtgaccacggcttaggaaacagggaaagaaagcaaggcccttttcctgcctttcccgggatctgtctactccacctccacgggggaggccagtggggaagggctgtcacctcttccccatctgcagagatgaggcaggggtgaggcgtgcgtgtgcttttcctccttgttggatgtcttccatatcatctgtttccatagctacaatccatcccttggccttaactttggaatttggagattatatgcaaacatgtgtaaaggctcatgaatatggatgacactggaattttataaattctaaaataaaacccgaaaccag

SEQ ID NO: 78119 - DNA, 363 bp, Homo Sapiens
tttgaaggctttcttcaagttctttgtgtaataaatattgcaaagcgcacttggtttctttcttttcaagtcaaatataacgactaatgtcccagaccctgttttctgcattcaaaatagggaagctgttgatatcagcagaacacctgcagccaaagaaaaaaaccgtttcccattaaccagccaatcacagaccctttccagtttaagcagccaatcagacctcttcacatttctaaaaaaatgacctaactaaagcaccagagctcggagagcttccagggaagccagataccgaggcgcaaattttttaaaaaataagagtcagaaataaaaataaaaggtttctgttggtcaagattt

SEQ ID NO: 78120 - DNA, 641 bp, Homo Sapiens
  misc_feature (22)..(22): n is a, c, g, or t
cgtctcttcctactccggtgantaccctccactctcccagctccgcttgggataattttaggctcgtggaagtttgtctcgcagggcgccccggcccacttcctgctcccttagttggtgaatcttggaaatgtctgcagatccggcgaggagcaagagggctggttctgtaaaagcccccgtgattactgcttgtaaacttgttaaaaggacaattttctgtcacagtcataaactctttgtaaaacccctggcactaaatccagagcgcgcatattccagatgtgtttaataagaaattgcacaatgtgcctccttccgccatcctcggctcagtctgggtaaaaggggcgagcaggaggaggcgagaaagctggatattgctttgagtttttttggcaatcatttcagagagatcattaggggaaactaaccatatttttttcttccctcgaggaaatcttcgagaaccagctgttaagggacctccagtttaccttctgggcgtcgcagtttaactgaatctaaagccacttttcgtttctcctctacagatgtcataacggtagccaaaagtaatgaacaacggcttataaatagtttgtaggacgaaaccatacagcattgtgccaagtgaaatg

SEQ ID NO: 78121 - DNA, 752 bp, Homo Sapiens
  misc_feature (667)..(667): n is a, c, g, or t
  misc_feature (710)..(710): n is a, c, g, or t
  misc_feature (717)..(717): n is a, c, g, or t
aaagggtcgttaaatggtcatttaatctggtttcctagattaatccaattaatcagggtctaatggaagaatttcaggtaggaagatattcctgatgcttttcaagtcccacagaaaaggcaggtggctgtgggggtggggtgaacatgggtacaaaccaaaggggctagacaatgctgcttcccccaacccccacatgggctctgggaccaccttagaaatgaagcccagacaatccaagagcaaccaggagggatggccatcttcagctcacctcctcacaagaaattttcatcccacagaccacccaaaagtctgcaaatgggctggaactagggaagctggttggaaagtgaagccagtctaactttcctattaaaaactaataataacccccatcactttggccttgccggcagtttacccagagacatgtgccaacagatgaatgaagacatctttgtaccactatgacaagggactgttacttcagaagccattttccagctcctctgaccacttagaaaccccagccgtcactgctgcatgggagagtgacacaaaaagcccagctcccacaggcagcctgagtgagtgtctcccagggatgtttcaaggcccacttgccccacttaggtgacttatactaggagtgccagacaattcncactaaataaccatctcttggcagtgaccggtatgacctgcanatggtangaactctatttggtatcaagaacttgtgacatcat

SEQ ID NO: 78122 - DNA, 1129 bp, Homo Sapiens
  misc_feature (127)..(127): n is a, c, g, or t
  misc_feature (156)..(157): n is a, c, g, or t
  misc_feature (185)..(185): n is a, c, g, or t
  misc_feature (207)..(207): n is a, c, g, or t
  misc_feature (217)..(217): n is a, c, g, or t
  misc_feature (246)..(246): n is a, c, g, or t
  misc_feature (292)..(292): n is a, c, g, or t
  misc_feature (341)..(341): n is a, c, g, or t
ccgcgacacacagctgagatcccggaagcatgagtcagttctggagcatcttggattccaggactgtaccgagagaggcatgtattggacactagaggagtgtggactgttgaccagctgtggagcntacgagtgagtggatgagatgtgaccgtnntgaaatatccaaagcatcactgacaccntgtgtgtaagcagaacctccanttccctccgntgccatgaagctcatttctcccagagatntgtggacttggtgctagtcaagagatatgaggatggaccatcagtnccaacgccacccatgtggagcatccgttatgtcccccgaagccaggttntgtgagaggatttaaccatccttgtggtgcttctgtgacctcttccagggaacccaccaagaccaacctggtcacattcttccataccgacctcagcggttacctcccacagaacgtggtggactccttcttcccccgcagcatgacccggttttatgccaaccttcagaaagcagtgaagcaattccatgagtaatgctatcgttacttcttggcaaagaactcccgtgactcatcgaggagctccagctgttgggacaccaaggagcctgggagcacgcagaggcctgtgttcactctttggaacaagctgatggactgcgcatctctgagaatgccaaccagaggcggcagcccacccttcctgcctcctgccccactcagggttggcgtgtgatgagccattcatgtgttccaaactccatctgcctgttacccaaacacgcctctcctggcagggtagacccaggcctctaaccatctgacagagactcggcctggacaccatgcgatgcactctggcaccaaggctttatgtgcccatcactctcagagaccacgtttccctgactgtcatagagaatcatcatcgccactgaaaaccaggccctgttgccttttaagcatgtaccgctccctcagtcctgtgctgcagccccccaaatatatttttctgatatagaccttgtatatggctttaatgccgcaaaatatttatttttccttaaaaaaggtgtcaacttggaaataatggtttaaaaacaggataagcattaaggaaaaacaaa

SEQ ID NO: 78123 - DNA, 473 bp, Homo Sapiens
  misc_feature (37)..(37): n is a, c, g, or t
ggatgaatgtgtagggcagtgcttccttggcactggngatatttcattgagcaaaactaaaaatatcttccctcatggagtttatgttatagtaagacatacgtgtacctctataataactattacgttagaaggtataaagtattgtgaaaaatatatagagcagtagtggagtgggaagaaatgttttgaaatagagcttgagattcttgattgtcttgccctctacttgaacagtgtcttctaggaagcccagacacatggagaagttctgagtgttttggccgatagtcccagatgaggttccagcaacagctgggatcacccatgagatgtgagtgaggaaggctttgagatggtttcagccctagccaccactgacctcataagagaccacaagaatgagaatcacctggccaagcccagcagaccttcagaattcagaaataaaataattcatcttattttaaaaa

SEQ ID NO: 78124 - DNA, 1535 bp, Homo Sapiens
aaggtagcgaggcctgggtggcgaattcggcacgaggcactgtcgtgagcagcctgcctcagactggccagaagctgtctgtctcttgattggacgtcaggatctttccaagcaggcctgcgaaggaaacttacccaaagggaagtctgtgctctcatcagatgttccttcaggaacagaaactgaggaggaagatgacggcatgaatgacatgaatcacgaggtcatgtcattaatatggagtgaagatttaagggtgcaggatgtgcgaaggcttcttcagagtgcgcatcctgtccgtgtcaacgtagtgcagtacccagagctcagtgaccacgagttcatcgaggaaaaggaaaacagattgctccaattgtgtcagcgaactatggctcttcctgtaggacgaggaatgtttaccttgttttcgtaccatcctgttccaacagagccattgcctattcctaaattgaatctgactgggcgtgcccctcctcggaacacaacagtagaccttaatagtggaaacatcgatgtgcctcccaacatgacaagctgggccagctttcataatggtgtggctgctggcctgaagatagcgcctgcctcccagatcgactcagcttggattgtttacaataagcccaagcatgctgagttggccaatgagtatgctggctttctcatggctctgggtttgaatgggcaccttaccaagctggcgactctcaatatccatgactacttgaccaagggccatgaaatgacaagcattggactgctacttggtgtttctgctgcaaaactaggcaccatggatatgtctattactcggcttcttagcattcgcattcctgctctcttacccccaacgtccacagagctggatgttcctcacaatgtccaagtggctgcagtggttggcattggccttgtatatcaagggacagctcacagacatactgcagaagtcctgttggctgagataggacggcctcctggtcctgaaatggaatactgcactgacagaaagtcatactccttagctgctggcttggccctgggcatggtctgcttggggcacggcagcaatttgataggtatgtctgatctcaatgtgcctgagcagctctatcagtacatggttggaggacataggcgctttcaaacaggaatgcatagggagaaacataaatcaccaagttatcaaatcaaagaaggagataccataaatgtggatgtgacttgtccaggtgctactctagctttggctatgatctacttaaaaaccaataacagtgtcttctaggaagcccagacacatggagaagttctgagtgttttggccgatagtcccagatgaggttccagcaacagctgggatcacccatgagatgtgagtgaggaaggctttgagatggtttcagccctagccaccactgacctcataagagaccacaagaatgagaatcacctggccaagcccagcagaccttcagaattcagaaataaaataattcatcttattttaaaag

SEQ ID NO: 78125 - DNA, 532 bp, Homo Sapiens
ggcacgagggagaaacataaatcaccaagttatcaaatcaaagtaagtacacagcaaagtaatagatcaaaagtctggaagctgggaagttaattggaaaatactagtgttcatcctgacattggtaaatatgttaattttaagcatacttatcagaggaattttataaaaatttagaactcttttacatgcataaactcttctttcaataggaaggagataccataaatgtggatgtgacttgtccaggtgctactctagctttggctatgatctacttaaaaaccaataacagtgtcttctaggaagcccagacacatggagaagttctgagtgttttggccgatagtcccagatgaggttccagcaacagctgggatcacccatgagatgtgagtgaggaaggctttgagatggtttcagccctagccaccactgacctcataagagaccacaagaatgagaatcacctggccaagcctagcagaccttcagaattcagaaataaaataattcatcttattttaaaaaa

SEQ ID NO: 78126 - DNA, 666 bp, Homo Sapiens
gcacgaggttggatacagctcagaccatctgtgacgtggcatcgcggggccatgagcagaaggggctgacgggcgccgtggggggcgtgatccgccagctgcccccgactgtggtgaagccgctcatcctggccacggaggccacgtccagcctgctcgggggcatgcgcaaccagattgtccccgacgcccacaaggaccacgccctcaagtggcgctcggacagtgcccaagactgagcctggggtgcccggcaccacagagggtgctgcccaccatgctcctgagcctcccaagagctgcagcccacgggcccggcccggcctggcccttcaggggatggccactgtgaaggacgccttcccagcctgcccgttgccaatctgctgtgagaggggggcctccctgccttggggccttagccctggctctgcacttttcctccggggagaaaggacactgcccctcccccgacctgggcccacactgctgccttctcccaggacggaggcttttggaccctcggaccccatcccactcagccaagtgtctttctgtgtctggggggaggaggggatgatacccgtgtggttcgatgtattatttttaagctccgtgagtgcgtgggtcagtgtctgcatgaagtggaataaactgcccaccgcc

SEQ ID NO: 78127 - DNA, 1234 bp, Homo Sapiens
  misc_feature (434)..(434): n is a, c, g, or t
  misc_feature (476)..(524): n is a, c, g, or t
gcaatgaaaggcaggaacgtggttttagacgccgattgaaaaccagtgtctttgtgcactgagaacaggaaacattctgctctgagaacaaactgcagagtcgacaggagacacacatgcgacagaaagcccccagcaggagagaccgtgcaccctggtgggtgatgggatgcccgggcagtggcttggacacagctgtcacgccacgatgcctgctgggtcctgcagggacaggggacacaggccacacacagagcccagccacgcactgtggagcgtggcacaggccacacaaactggctcctaccacctaacagagacgagtcgcacactgaaaaaagtcccctagaaggatggctcacgtccatcctaccgggggggatggacgcagggacctggccctggctctggtctggcggcacccctgctggtanaggcaggaggtgtgcggctggagtcagaaactgaggtgctgnnnnnnnnnnnnnnnnnnnnnnnnnnnnnnnnnnnnnnnnnnnnnnnnnatctttctccttctgcacctcctccctcttctatcctttgcccaggccccctttattttcccaaaaaatatcctaaaattccaaaatgccaattacctctaaagatctatgctttcaagagccaagtatgtaggcaactgtcagatgtaaaccttggacccaggatgaattaacagctgcaactaaagatttctctaaacccaaataagactagcatgtgttcatagagaaatttcgaattctttcatatgcatatgacccagagttatgtgacttacaccatgttatggtttaaacctttgtcttctccaaactcatgctgaaatctaattgccactgtaacaatattaagaggtggaacctttaagaggcttcagatcatgagggctccaccctcataggtggactaatgctatcatcgcaagaatgggttcttattccctcttgctgtctctttgctcttctaccatttgatggcttctgtcatgttatgatgcagcgagaaggccctcaccagatgctagtatcttggtattggacttcccagcctccaaactacgagccaataaatgtctcttctttgtaaattacccagcctgtggtattctgttatagaagcacaaaacagactaagacatgccacttgtatacatgttggtgcccggccgtaatggccgaattcccgggcatatgtccggtaccgtcgactg

SEQ ID NO: 78128 - DNA, 1324 bp, Homo Sapiens
aaggctaggtacgaggccggggggtgaatcggcacgaggctggtcaatatcttaaaaatgtatattagtaagaagttcttcctggaatttttctttcgattctggcagaataaacaggtgtttttagttttcccactagaaaagagccaagcaggaccctgtcccagagcaagagatgtccccttccatctctgacccttgcctgggacaagctttgatggggggccccagcttcaaggctgtggtgggaacagcacccccaaatgccagcctctcctttcttcccatccaccagtatactgcggggccatttctggtctttgtccaacaggaaacccatttctggtgggatatgccttccagtgccacaggaccactcaccccatgcatctctgtcctgcccgtcagtgctgggacggacagcaagggcaagcccagtgtctggcagataggtgggtgggaacagagaggggagaatgccgtcctaagcttctgcttggggatcccccacacgacctgggtactgcctgggaaacctgtcctaagtaaaactatggacctcgcctcgcccaccggcctgcgaagccagcatctccgtgaaggtggatggaagcgcctttgtcctcactttgagctgcaagctgggtcagcggctctgaagccctcgagtgactttctaacccaagacccagcccctggcaggaggaggggtgggtgcaaggctggtgggacaaaaaaaggcctcagcaggcctggaagacccttccagtacatcccacaacgtgtcgagcagctgggagaacctgtgtcaagctcgagccgtcataggtccccatgaggtgtctgaagccccttcttggtgatgggaggcagaggtgctgacgttctggagcatggacgtgagtcctcagctggctccgcgtgggcccttggagggtgccaggtgtgtggtgaccttctggatgcctttaacttcatggctgcgtcattcctgatttagaactttaaccggagcttcatctagtgattgcaaaactggaccaatgggaggacggcggcgcagcccgctccctccgtggaatggagctcagctcttcggaggcatcaaagcacctgtcgcctccgtggtccccctgccgagggagtgcggcctctgcaaggttcgggggtggcttcgtttgcctggagtggccggccctgcttgtgccatgtggatgtttgtgagcctcggtcctacagcactgtgtaggctgcatctgtttcgtgctggtcctgttgacttgtatgatatccacaaataaatattttcatggcggtcgtgttg

SEQ ID NO: 78129 - DNA, 1858 bp, Homo Sapiens
  misc_feature (526)..(555): n is a, c, g, or t
  misc_feature (564)..(818): n is a, c, g, or t
ggcacgagggtgagtgagcagagcaggttatgtgcagacagggaaacgagaactttggacctggctttctgagtccaggtgagagctgtgtggccccccgatgccactctgcccgccggagggatgtgcctgctgagccttttccttccacgccgcctctcactgccaggccagcggcttccgctgagactcgctggagaggcggctcccgtgtccgtccaccgagcactcagatggatgctgatcaccagggccgagggggctcccagaaggaccccaggccctggggagggtggctgtgggaggccaagtccactgcccggaagtcttgtcagccctaagccagggaagcctggagcgtggcctggcgggtctgggtggacaccgtccccactccggactcccagcacaggggagagcctgtatggccctgtagccctgggcagagctgggcctgtcgtgtgttcctgcctggcaggtgcaggtgctggccatctgcaggtggaaggaggtgggaatcttggannnnnnnnnnnnnnnnnnnnnnnnnnnnnngagatgaannnnnnnnnnnnnnnnnnnnnnnnnnnnnnnnnnnnnnnnnnnnnnnnnnnnnnnnnnnnnnnnnnnnnnnnnnnnnnnnnnnnnnnnnnnnnnnnnnnnnnnnnnnnnnnnnnnnnnnnnnnnnnnnnnnnnnnnnnnnnnnnnnnnnnnnnnnnnnnnnnnnnnnnnnnnnnnnnnnnnnnnnnnnnnnnnnnnnnnnnnnnnnnnnnnnnnnnnnnnnnnnnnnnnnnnnnnnnnnnnnnnnnnnnnnnnnntgagccagtgcacccggcggaatcttggaatttttatagacggcacctcagtttctgactccagccgcacacctcctgcctctaccagcaggggttgccgccagaccagagccagggccaggtccctgcgtccatcccccccggtaggatggacgtgagccatccttctaggggacttttttcagtgtgcgactcgtctctgttaggtggtaggagccagtttgtgtggcctgtgccacgctccacagtgcgtggctgggctctgtgtgtggcctgtgtcccctgtccctgcaggacccagcaggcatcgtggcgtgacagctgtgtccaagccactgcccgggcatcccatcacccaccagggtgcacggtctctcctgctgggggctttctgtcgcatgtgtgtctcctgtcgactctgcagtttgttctcagagcagaatgtttcctgttctcagtgcacaaagacactggttttcaatcggcgtctaaaaccacgttcctgcctttcattgcaacacggtgtgttcatttgtttaaaacagtttaatgagtaagtttagatgactggtcaatatcttaaaaatgtatattagtaagaagttcttcctggaatttttctttcgattctggcagaataaacaggtgtttttagttttcccactgtctgagccaagcaggaccctgtcccagagcaagagatgtccccttccatctctgacccttgcctgggacaagctttgatggggggccccagcttcaaggctgtggtgggaacagcacccccaaatgccagcctctcctttcttcccatccaccagtatactgcggggccatttctggtctttgtccaacaggaaacccatttctggtgggatatgccttccagtgccacagggccactcaccccatgcatctctgtcctgcccgtcagtgctgggacggacagcaagggcaagcccagtgtctggcggataggtgggtgggaacagagaggggagaatgctcctaacttctgcttggggcgatacacgctcgcg

SEQ ID NO: 78130 - DNA, 635 bp, Homo Sapiens
gcatgcatgcatgtgtttagagttgcttctcagaagacaaagagatgatagcaactattaaaatatgaatgaatgaatgagtgaatgagttgaaggcctagctcgggctgataaagcttttgccttagtagaggttttatgtcaacaccttcaggagggaagcccttatttctgggttgaactccccttccatgatattatgctagcaattgccatcacttagttcctggcgaaggcagaaaaagaaaacaaaaaatcagcattgtcattgacaaaactggatgctgaagataaagtaaaattgtcttttcccttgtcccacatttttgggattaaagccagaattgaataggaaatacagtactatttctgaagttgatagccgatctttaagaagaccctgtctttaaaatgaaactagcaggcaaacacctaaataatcgaaaattaccaaagaacaacaacgaaacaagaaaacctaaagatttttacttcctattcttattcctttccttattactgtgacaccccttgcattgctcagttgcctgtgtgtcaaaataacttgtggacgttggaaattatttgaaaatgtattgtgtggaatgtaataaaatgatgatatttttatacaa

SEQ ID NO: 78131 - DNA, 971 bp, Homo Sapiens
  misc_feature (933)..(933): n is a, c, g, or t
  misc_feature (948)..(948): n is a, c, g, or t
ggctggaccggtccggaattcccgggatcgccattttgttctgcggtgctggtatttagagcgcagcggctgacgggccggatcgccttcgccgccgcccgcccgcaaaccttcgtgcccggcccgtcctcgcccccgcctccgccaccgcctcggcccgcagagcttgccccctccccacccgcagacatgtccgagtccaagagcggccccgagtatgcttcgtttttcgccgtcatgggcgcctcggccgccatggtcttcagcgccctgggcgctgcctatggcacagccaagagcggtaccggcattgcggccatgtctgtcatgcggccggagcagatcatgaagtccatcatcccagtggtcatggctggcatcatcgccatctacggcctggtggtggcagtcctcatcgccaactccctgaatgacgacatcagcctctacaagagcttcctccagctgggcgccggcctgagcgtgggcctgagcggcctggcagccggctttgccatcggcatcgtgggggacgctggcgtgcggggcaccgcccagcagccccgactattcgtgggcatgatcctgattctcatcttcgccgaggtgctcggcctctacggtctcatcgtcgccctcatcctctccacaaagtagaccctctccgagcccaccagccacagaatattatgtaaagaccacccctcctcattccagaacgaacagcctgacacatacgcacggggccgccgcccccagtagttggtcttgtacatgcgcagtgtcctagtgcccatcgtctgtttcccccggccttgcccccgcccgcccccgtgccgtgggacatctgggcccacttcatcgcccctccagggccccggcgccccaccccctaggagtgctcttgtgtattgcgggatgattttaggattnttcatttctctttanttgggatgtttattttataaaag

SEQ ID NO: 78132 - DNA, 1876 bp, Homo Sapiens
  misc_feature (1100)..(1158): n is a, c, g, or t
  misc_feature (1162)..(1162): n is a, c, g, or t
  misc_feature (1164)..(1164): n is a, c, g, or t
  misc_feature (1674)..(1687): n is a, c, g, or t
gtggaccggtccggaattcccgggatatcgtcgaccacgcgtccgggccggatcgccttcgccgccgcccgcccgcaaaccttcgtgcccggcccgtcctcgcccccgcctccgccaccgcctcggcccgcagagcttgccccctccccacccgcagacatgtccgagtccaagagcggccccgagtatgcttcgtttttcgccgtcatgggcgcctcggccgccatggtcttcagcgccctgggcgctgcctatggcacagccaagagcggtaccggcattgcggccatgtctgtcatgcggccggagcagatcatgaagtccatcatcccagtggtcatggctggcatcatcgccatctacggcctggtggtggcagtcctcatcgccaactccctgaatgacgacatcagcctctacaagagcttcctccagctgggcgccggcctgagcgtgggcctgagcggcctggcagccggctttgccatcggcatcgtgggggacgctggcgtgcggggcaccgcccagcagccccgactattcgtgggcatgatcctgattctcatcttcgccgaggtgctcggcctctacggtctcatcgtcgccctcatcctctccacaaagtagaccctctccgagcccaccagccacagaatattatgtaaagaccacccctcctcattccagaacgaacagcctgacacatacgcacggggccgccgcccccagtagttggtcttgtacatgcgcagtgtcctagtgcccatcgtctgtttccccggccttgcccccgcccgccccgtgccgtggacatctgggcccactcatcgcccctccaggcccccggcgccccaccccctagagtgctctgtgtatgcggatgatttagaattgtcatttctctttactggatgtttatttataaagatctggcctgttcctgcgtctgcggagcggcccttgtctcccagctatctataaccttagctagagtgtcgccttgtgggttcctgttgctgagacttcctggatggagccgccctcaccgccgggcccgtggccctgcgcggagctgtgtccaataaagttcttggatgtgnnnnnnnnnnnnnnnnnnnnnnnnnnnnnnnnnnnnnnnnnnnnnnnnnnnnnnnnnnngggnanggttattagaatatcacctatatgggtcaaagattacgcgtacaccgggttccttgtataatcgtgcaccctgagtcgcgcgtcgtgttacacccctagagcgctgacccctgggggcctacaacgatcttgggcgggggaaaactgaatttcttgggagaggtgtgataattggaacccacacactcttgtgaagatgagataggttggaccgtttgtacctagcagaggtttaagaggactcaaagggggtcaaaaaataaaatgttttaaaggggtcccaaggggtgaaaaaggtggagcctgccataacgggggtgaatggctttgaagaagttttttacctttcccgggcctcctgggggggtattgcaaaaattattttatcccaccgggggaacctgaaggggattctacaaccatggtttggtgtttattgtggaggaatttaagaaaatccccaggggccttgttgtttgaaaaattctttagggcccctcaccacccctnnnnnnnnnnnnnncctctatccctccttttaccccaaattttccacaaagggttcccccctggcgatttgaaaaaatgtgacaaacagcctcccccccgtgaaggcgggtaaacccttaacacttatgcacccccgtgccattggtgaccataggaaaatttggcgccttttcaaaagtgttcccacgtcacacccattttt

SEQ ID NO: 78133 - DNA, 1025 bp, Homo Sapiens
  misc_feature (46)..(46): n is a, c, g, or t
  misc_feature (155)..(155): n is a, c, g, or t
  misc_feature (163)..(163): n is a, c, g, or t
  misc_feature (188)..(188): n is a, c, g, or t
  misc_feature (223)..(223): n is a, c, g, or t
tcgattatagatcattaggatgccctcggccagaatcgcagagctntgtgtctacacttgcttgacgttcagcgggagtcactctggacctttgatatgacagcagagcttacagctcatgtcctgtgatgaccatgccagacccagaccccacncatcactntcagctcctgaccataccatcgagntgaggatgtgatgaccatgcccccgagttgagccnccattcaggaactcaccatctatgctcctctgggccgtagcgtggagtgaccaagatgtcatgccagatccctcaggagccacagcgcctgatctactcctatagcatcgtgggagggaatagccagaaccgattcatcctgcaaggggccatcctggtgcacagtgaccttgtgttggggccgttctggccagagcagccccgtacctatgagctactgatctgtgtggccgatgcaggcccctccaccccccacctcagcaccacagccaccattattgtgcatctagttccccggagggccagcacagtggccaccagcacccacagaaccacagtgccctcaacgatgacacccatgctcgtgacagacacagaggctttctggcagccacagccctggtttgtggtggtgttgacagcaactggtgctcttctcctcttggccctaggctggcttcttggcaggctcctccaggggttggcccagctgctgcaagcacccagcaaaccagcccaggctttgctgctaaacagcatccagggaactgagggatccatcgagggtttcctggaggcaccgaagatggagatgtcccaggcacccagcagtgtcatgagtctgcagcattttgatggcagagcacaggactcccgtaccggaagagactacctgtttaacacacacacaggagcccggcgctggctctgaggccaagtagctgtcttactatgtgtggaatttctttttcacaccatcatgggctgtattttcaagttgattcataataaacaaaattac

SEQ ID NO: 78134 - DNA, 518 bp, Homo Sapiens
  misc_feature (30)..(30): n is a, c, g, or t
gacttaagtctcgttaatcaaatctcttantagttaggcttctgtacattatgtatctccagtagcaatgttgccatattatttatttcccaaacttagtggacaatggagtcatttctacctagagtaccagtaaacatctcccagtgtgctatagtagaaaatgtctactcctcactgctgacatgttaaacttactcttggtttagagcatgtgtagaaacacctaaggtagctctatgctaaataatgaagagtagcacaagaatgaatgtatttgctgatacgttgctcacattctcaagcaaaaattcaactgcattaaccgatctgagagttttcctttaacctggactgtgtttctcaagcacattttttctttgttcactgcccaaggactagaactgtatttttaaggttgttttcccctaaaaggacctttagtaagcaaatttattattaaatgtgcacatcttattcacccaagggaataaaagctacttcgtaatgttgttact

SEQ ID NO: 78135 - DNA, 629 bp, Homo Sapiens
  misc_feature (40)..(40): n is a, c, g, or t
tctatgctgggagaggcattgtggggagggttgtctggcntatggctcccattgtcctctgcttgataaaccacctgagctttggtcattagcagtctcctgtgcctttcacactcaggtagtgtctgcacaggccactctatgtcttttccatgctgaagaaattcctttccaggccatgtctgtgttcctcctgccacacaggaaatttttgagcatgttcatcctccaagctgaatgcagggtcttgggtagtggtcctcacctgctccagagacttctccagccattgccactctccactcaggtgatgaagctggatgagggactgcacccaccagagtcaggccagggtcctgtctgctctgtgagtccctccaattgttcttattccgagatttccattgttctgccccctcttgactcccagggctctcaagggagtgggggtagtgaagggagccctttcccaagctcccccaagagctctagtcacatcacttctgatacttcttttcccaccagctggaagaaagaactttcatttgtcttgaaatgagaaaaatgttcttagaatattttgtattactctctgctctgtcatttatggtaaacaaaataaaataata

SEQ ID NO: 78136 - DNA, 536 bp, Homo Sapiens
  misc_feature (43)..(43): n is a, c, g, or t
agggaagaaacaggaatggatgctttgggcagggaaagtaagngaatatgactccggcctctagaaggctcatcttaaatttgtaagaaccatggtacagagacctgattagtttttggtattgtgctccaataatgtcatagttttaagagataatttttatgagaattgactaagaaccagtatccttcaactacttcatcaatgtttggtataatataaaagcacactatcatctgaaaaagctattaaatacccctctttttccaaatatctacctgtgtgaagccaggttttacaacatgtattgcagcaagttgaatgcagaagcaggtatggtaattcagctgccttctatcaagctaaacattaaagagatttgtagaactataaaacaatgctactctccttaccaaattgttttagaaaatagctttataggctaacattattgttaattgtcatttaattgttttgtcatttaaaatattttaaattgttttctgttagtttcttttttgtatattctatgggta

SEQ ID NO: 78137 - DNA, 1458 bp, Homo Sapiens
  misc_feature (623)..(635): n is a, c, g, or t
  misc_feature (936)..(953): n is a, c, g, or t
  misc_feature (984)..(1229): n is a, c, g, or t
  misc_feature (1342)..(1342): n is a, c, g, or t
tgcggccgccacgacccccctggacgtctgtaagacccttctgaacactcaggagaacgtggccctctcgctggccaacatcagcggccggctgtcgggtatggccaatgccttccggacggtgtaccagctcaacggcctggccggctacttcaaaggcatccaggcgcgtgtcatctaccagatgccctccaccgccatttcttggtctgtctatgagttcttcaagtactttctcaccaagcgccagctggaaaatcgagctccatactaaaggaagggatcatagaatcttttcttaaagtcattctctgcctgcatccagccccttgccctctcctcacacgtagatcattttttttttgcagggtgctgcctatgggccctctgctccccaatgccttagagagaggaggggacggcacggccgctcaccggaaggctgtgtgcggggacatccgaggtggtggtggacaggaaggacttgggaaggggagcgagaaattgctttttctcttcctccctgggcagaatgtagcttttctgcttcactgtggcagcctcctccctggatccttagatcccagaggagggaagaaaatttgcagtgactgaaaacagtnnnnnnnnnnnnntttatgtatataaaagttgcattacacagtacaaaatagatggataatgtttatcctttatttttctatgtagaagtttttgaatttgtgtgtgtgcttgtgcgtgtctacacctagtattacggctgggactctccagctgtttttgttgttgttatgtttttaagagggttgaattcttccatcaggtgaacgaaaaaggcaacaaagtaataaatcagtgaatgtggccggcagctgtgtttagcccctccagatggaagtttcacttgaatgtaaaataataaagtttatattttgnnnnnnnnnnnnnnnnnngcctacagccgcgcctcgtgccgaattcttnnnnnnnnnnnnnnnnnnnnnnnnnnnnnnnnnnnnnnnnnnnnnnnnnnnnnnnnnnnnnnnnnnnnnnnnnnnnnnnnnnnnnnnnnnnnnnnnnnnnnnnnnnnnnnnnnnnnnnnnnnnnnnnnnnnnnnnnnnnnnnnnnnnnnnnnnnnnnnnnnnnnnnnnnnnnnnnnnnnnnnnnnnnnnnnnnnnnnnnnnnnnnnnnnnnnnnnnnnnnnnnnnnnnnnnnnnnnnnnnnnnnnnccagcggtttgccgtatgggcctcttccgcttctcgctcactgactcgctgcgctcggtcttcgggtgcggggagcggtacagctcactcagggcggtatacggttatcacanatcagggatacgcaggacgacatggagcaaaggcacaacaggcaggactgtaaaaggccgcgtgccgggtttttcaaaggttcggcgcctgacgagatcacaaatcgagctcagtg

SEQ ID NO: 78138 - DNA, 460 bp, Homo Sapiens
  misc_feature (46)..(72): n is a, c, g, or t
ctgtcattccacttatatataagcacccctaagtatgacgactatnnnnnnnnnnnnnnnnnnnnnnnnnnnaatatatgtgtacaaaatcaaatacattgttgccattattttgaatgaactgttaactgttagattaagaattggtaccatatggaacaggttagtggaacttactataaaaggcttttctttgggggaaatttttaattactgaaactatttaggagctgtgggattacatgtctatcttcaattagtttgagtaaaatactcgtagtaatttgtgtattttgtcagttttcaaatgaattgttcataatatcctcacattttcaaatttcaactgcgtttataaaattttcatttttccattctctatttgtgtcttcttgctcgatcttaccaaaatattttgttttagtgctttttcaataaacaagttctggcttattttaaa

SEQ ID NO: 78139 - DNA, 497 bp, Homo Sapiens
  misc_feature (424)..(424): n is a, c, g, or t
aatggaatatatttcctagagacaaaaatctttagcagagaaggtaacattaagtttggcacttaaacattttgaagtaacatagttgagaaatactatgttaaaagttatttattttctaaaatgtacaagtgactgactcatttttattatcactcatgcactgtaacagtctggagagcagcaggttgcttgaagatgcaacaaatattctttcaacacttcaataaacacaatgtaaacattcactttaataatgtttcctttgttaatgcaaaaccgagtgcattttttccttccctctggctgagctatgactagctgagtagcaacagcagagtgctgaaagaatttttcaacagcaatttgcttgttctaatttacttttcaaggttgatgatcagaatcattatgttgcttgcanaaagatctatttctattaatttgatccagtcattcctcttcttctcatcatatttagtttccctggcagcttc

SEQ ID NO: 78140 - DNA, 988 bp, Homo Sapiens
  misc_feature (582)..(582): n is a, c, g, or t
  misc_feature (679)..(679): n is a, c, g, or t
  misc_feature (748)..(748): n is a, c, g, or t
  misc_feature (772)..(773): n is a, c, g, or t
  misc_feature (793)..(793): n is a, c, g, or t
  misc_feature (879)..(879): n is a, c, g, or t
  misc_feature (906)..(906): n is a, c, g, or t
  misc_feature (962)..(962): n is a, c, g, or t
gttaaagaaatgtttaattataaaattaagcttatacataatctaaaaattttcaaatgtactgcatttatagcataaaagtacaattagtaaaatgattcactagtaatttaattacatttaatttaaagtaaaattaaaaatgcttttctctatgatgcagaatattactccaaacacctacctcatgcatcactcaatatgaaaagtaaactaacagggcctctccacttagattttcatcataaaccttacattttaatgcccatactcttccacagaaaaaaccataaataatgcccatctaataaaaaagaatctctcctatatctgacacagcaacaatttatcacatgctttcacatgtgaatacaataggaatgaaataaagtaatttgagagttgaatttcatcattatttacttttcaaataagccataattttttcaagaaaaaaagtatactttcaatgtaattataactctccaaagaatcttctactccttttaaagttatttacaaataatctaacaacttatagatttttttatactcaacactctgttttacgtgtatgtctanagtgtcagtgccttagttatttctactgtaaattatttaatatttacatagactcaattttggattaaatatttttcatacttactgcatctgcaanaacacatttcagtataaattcatgttttctacgccgtagttttttgaaaaaatgtttttccaaattcantacatttgcaggatttttctccanntataattcgctgatgttgancaaatttgagcaactgctcagtgtttttctctagtacacatgcgtacaatagatttgtattacagtaaggtactacaccctcctangctcctatatttgtatggttgtctcanataaacaggctctccatttaggggtatgtttctgaattctttgaagtactgattanacgcttttagagtaaaatctggggtg

SEQ ID NO: 78141 - DNA, 836 bp, Homo Sapiens
ccaccgggtatggcagcggggccactgagaatgctgtttgtcataaaatttgcactacccgatttctcaaggggcacaggcctgctccgttcccctttgtcagccaatggccaagaaggaagaagatgactgccatcttattcctgaacttcctcattcaggacccccgtggaaacacagtgagcatccttatcagaggccctggcccaggctggcccctttgctttgtttggagaggctggctgagtttcagcccctagtgctggagacccccttgttggagaggcttcctgtttatgcctcacaagaagaaaaaccacagggctctgggaggggaagaagcatgcactcccgctttggctggagtcccagcgcttgtcgccaccctcctccttgcctgtagtcttgacagcatccgtatgtacgtgtcctggcatttcccctccctctccctgatgactgatacccaccgggtctgacattccaagtaaccagtatgtaactggtagtttgatcccaatagccatagcgactccaggtgggagtgagggagcccagccccctgtcctggaagataccttagagtatgtgaccgcgctccagacccttgcttctctctcctgcagaggatgagtttctagggtgctaagtacctatcagaacagtgtggaggggcgggtccctcatacaggtgtgtgcttagccaaatacagtaactgtgactggcccagggatgttctctcctctattttcaaagatgaaaggaggttttaaaaaccatgtttgattcctaaccttttgctacctgaataaagcagagtctatttcaacacaaa

SEQ ID NO: 78142 - DNA, 1406 bp, Homo Sapiens
gaaagagaaatgagacttttattagctccaagagcatttttcaatactaaggcaaaaagtaaaaagaaggacaaggaaaaccaaggcacaaagaagggacctaggcgcaccccagaactcaccacggacacacagcagagggcttctcttcatatcaagggtatgggtaaacaagaaaggctgctgtttcactgagacaggacgaaccaccaagtccaaatgagaagacaagcagagacgtagtgtcagaccaggagggttagaacttgctagtgtagagggcaataatccacttgggcacacggaggaaggagggcaggtaggaggccagccagcccaggccggacacgtgtgagagaacagagctcaaagacaaatagtcttggacggggcggccgtccacatcccgaaggccatagcgtcgagcaaggtcacaggatggcagcaccttaccactcaggctcaggatattgggatctgttgccaaagccaccacacatttgccactcaattctgtggtttccgcagatgagaaggctgatttgaactgcttcaacacaggatcctgcaggacctcctcctttgccatatgctccttcagcagttctgtctgcacaatccccggccacagagacacacagctgaccccatggcgccgcagctcgtgggcacagtcagcagccagcttgtcacacgcagctttgcccacaccataggggacattgaacatatactgcaggcttcctggggaggagatgaccacgatgagcccctggccagctggtaccatcagccgtgccccatacactgagcaaaagtagtggcctctgagtccgacgttgttgatatcatcccacatggaggcaggggtttcccagaatgccttattcctggtgttcaggatcgtctggacccctgcataagcattgttgaccagcacatctagacgcccttgctgttcccgatccacttgctcaaacaggcttcgcacttcactctcctggcttgaatcgcacaccacaggcacacattggcccccgagggattgtgcctcctgagcaacaacgcgaagggtgtccagatggcggccagtgatgtaaactgtggcgcctgctttgcagagctgcaaggcaatgccacggccaatacccctggaggcaccagtcaccacacacacttggccattcatgggagctgccatgactcacaggcaaaggaggcaggtctgccacctgcgctgccgctgaggtctgcagattgcggggctgcggtggaagtctgggttctcgcccagattgagccggcgacgtggaggcagtgttcaaggattgattctgtagtaggacccggggcgattctgtgctgaggtagaggggcagagtcccaggccaaagttagaacctgcg

SEQ ID NO: 78143 - DNA, 960 bp, Homo Sapiens
cgcattcacgatgaagctccaaccacctggcggtcccaggagcccaaggtgtcagctgccaacggtccccagtgtgaatgcctacttgctagccacgcaagaaggagcaacaagcaaagggaaccgtccatggaatgaggcagaggaggacgctgagaggaggccagccctgaccattcggaaccacttggggattgtaccgtcctgagctataggtaacagtcactgtcggtgaccgtccgcagctcgttatgccactgggtccttcaccgcaagctttgccccacaccataggggacatgtgaacagtatacgtgcaggcttcctggggaggagatgaccacgatgagcccctggccagctggtaccatcaagccgtgccccatacactgagcaaaagtagtggcctctgaggtccgacgttgttgatatcatcccacatggaggcaggggtttcccagaatgccttattcctggtgttcaggatcgtctggacccctgcataagcattgttgaccagcacatctagacgcccttgctgttcccgatccacttgctcaaacaggcttcgcacttcactctcctggcttgaatcgcacaccacaggcacacattggcccccgagggattgtgcctcctgagcaacaacgcgaagggtgtccagatggcggccagtgatgtaaactgtggcgcctgctttgcagagctgcaaggcaatgccacggccaatacccctggaggcaccagtcaccacacacacttggccattcatgggagctgccatgactcacaggcaaaggaggcaggtctgccacctgcgctgccgctgaggtctgcagattgcggggctgcggtggaagtctgggttctcgcccagattgagccggcgacgtggaggcagtgttcaaggattgattctgtagtaggacccggggcgattctgtgctgaggtagaggggc

SEQ ID NO: 78144 - DNA, 660 bp, Homo Sapiens
ccacgtgtgcaccagctccagcaactgcaagcattctgtgtctgcccgcccagctctcgcttctgcaagaccacgaacacagtggagcctctgagggggaatctggtgaagaaggactgtgcggagtcgtgcacacccagctacaccctgcaaggccaggtcagcagcggcaccagctccacccagtgctgccaggaggacctgtgcaatgagaagctgcacaacgctgcacccacccgcaccgccctcgcccacagtgccctcagcctggggctggccctgagcctcctggccgtcatcttagcccccagcctgtgaccttccccccagggaaggcccctcatgcctttccttccctttctctggggattccacacctctcttccccagccgcaacgggggtgccaggagccccaggctgagggcttccccgaaagtctgggaccaggtccaggtgggcatggaatgctgatgacttggagcaggccccacagaccccacagaggatgaagccaccccacagaggatgcagcccccagctgcatggaaggtggaggacagaagccctgtggatccccggatttcacactccttctgttttgttgccgtttatttttgtactcaaatctctacatggagataaatgatttaaaccagaaa

SEQ ID NO: 78145 - DNA, 743 bp, Homo Sapiens
  misc_feature (43)..(51): n is a, c, g, or t
  misc_feature (675)..(675): n is a, c, g, or t
  misc_feature (706)..(706): n is a, c, g, or t
cattttcattatgtagtttttattttagacgaacattattatnnnnnnnnngttcacctgggaataaaatccatttaaaaaaaacatagcatcagtatcagtacacagttaatgaattggcttaaacaagattaaccacatgacaggtccacttatctgcaggagcttttcacattaagccattggagcaaaaataaaatatgtttaaacatgtacagtaggatagttatatggaaaaactagagagtttccattaggggcatgattttcatcaaacagtttatggtattttgcatgaaaggaactgcagtgtcagctgcaaacaaaataaaagccatctgtaaggccataaaattgaactataataactaaattcacattttaaaaaaaggtaaagtgaaataagttctattagtttcttggcacaagaaatgcaattgcatatggcacacgcatttcaagaaatgaagtaaaatctgaaaatatccctagaataattgtttgctaatttttatttctgtacatttcagccatttagatttttttcagagtgaacatgacagccattaattttattagtctaaaaaaatgacttattctactctaaaattgggctagaatttgaaattattttagcatatcctgtccgtctaggtccctctatatcaagggatntcatttttagacattcctttccacccacccntgtgcccccccttggatgtacaaggaaaaaagaatgt

SEQ ID NO: 78146 - DNA, 922 bp, Homo Sapiens
  misc_feature (23)..(23): n is a, c, g, or t
  misc_feature (802)..(802): n is a, c, g, or t
tgatgcgtttggcctccatcctnttggtacaacatgctggtggcggaacccagggaatctgtccttcttcctgactccaccatgtgcacgatgggctcagctttcagaagtgctgagttggcagttttcttctgtcaccaaaagaggtctcaatgtggaccagctgaacatgttgggagagaagcttcttggtcctaacgccagccccgatggtctcattccgtggacgaggttttgtaaggaaaatataaatgataaaaattttcccttctggctttggattgaaagcatcctagaactcattaaaaaacacctgctccctctctggaatgatgggtgcatcatgggcttcatcagcaaggagcgagagcgtgccctgttgaaggaccagcagccggggaccttcctgctgcggttcagtgagagctcccgggaaggggccatcacattcacatgggtggagcggtcccagaacggaggcgaacctgacttccatgcggttgaaccctacacgaagaaagaactttctgctgttactttccctgacatcattcgcaattacaaagtcatggctgctgagaatattcctgagaatcccctgaagtatctgtatccaaatattgacaaagaccatgcctttggaaagtattactccaggccaaaggaagcacccagagccaatggaacttgatggccctaaaggaactggatatatcaagcatgagttgatttccgtgtctgaagtgtaagtgaactcagaagcagtgacatgcagcacacacctcacagccaacaaaaattnaagtattggcccccgcccaagatgcatgtattttacttttccattgtaattgctatcgccatcacagctgaacttgttgagatcccagtgttactgcctatcagcattttactactttaa

SEQ ID NO: 78147 - DNA, 1916 bp, Homo Sapiens
  misc_feature (63)..(63): n is a, c, g, or t
gaactttctgctgttactttccctgacatcattcgcaattacaaagtcatggctgctgagaanattcctgagaatcccctgaagtatctgtatccaaatattgacaaagaccatgcctttggaaagtattactccaggccaaaggaagcaccagagccaatggaacttgatggccctaaaggaactggatatatcaagactgagttgatttctgtgtctgaagttcacccttctagacttcagaccacagacaacctgctccccatgtctcctgaggagtttgacgaggtgtctcggatagtgggctctgtagaattcgacagtatgatgaacacagtatagagcatgaatttttttcatcttctctggcgacagttttccttctcatctgtgattccctcctgctactctgttccttcacatcctgtgtttctagggaaatgaaacgaaaggccagcaaattcgctgcaacctgttgcatagcaagtgaatttttctctaactcagaaacatcagttactctgaagggcatcatgcatcttactgaaggtaaaacttgaaaggcattctctgaagagtgggtttcacaagtgaaaaacatccagatacacccaaagtatcaggacgagaatgagggtcctttgcggacacagcgcagcacacgttaagcaacatctagcaaatgttatcgcataaacgtcagtgcccaactgttataggttgtcggataaaatcagtggttatttagggaactgcttgacgtaggaacggtaaatttctgtgggagaattcttacatgttttctttgctttaagtgtaactggcagttttccattggtttacctgtgaaatagttcaaagccaagtttatatacaattatatcagtcctctttcaaaggtagccatcatggatctggtagggggaaaatgtgtattttattacatctttcacattggctatttaaagacaaagacaaattctgtttcttgagaagagaatattagctttactgtttgttatggcttaatgacactagctaatatcaatagaaggatgtacatttccaaattcacaagttgtgtttgatatccaaagctgaatacattctgctttcatcttggtcacatacaattatttttacagttctcccaagggagttaggctattcacaaccactcattcaaaagttgaaattaaccatagatgtagataaactcagaaatttaattcatgtttcttaaatgggctactttgtcctttttgttattagggtggtatttagtctattagccacaaaattgggaaaggagtagaaaaagcagtaactgacaacttgaataatacaccagagataatatgagaatcagatcatttcaaaactcatttcctatgtaactgcattgagaactgcatatgtttcgctgatatatgtgtttttcacatttgcgaatggttccattctctctcctgtactttttccagacacttttttgagtggatgatgtttcgtgaagtatactgtatttttacctttttccttccttatcactgacacaaaaagtagattaagagatgggtttgacaaggttcttcccttttacatactgctgtctatgtggctgtatcttgtttttccactactgctaccacaactatattatcatgcaaatgctgtattcttctttggtggagataaagatttcttgagttttgttttaaaattaaagctaaagtatctgtattgcattaaatataatatgcacacagtgctttccgtggcactgcatacaatctgaggcctcctctctcagtttttatatagatggcgagaacctaagtttcagttgattttacaattgaaatgactaaaaaacaaagaagacaacattaaaacaatattgtttctaaaaaaaa

SEQ ID NO: 78148 - DNA, 1277 bp, Homo Sapiens
cagtcgacggtaccggacatatgcccgggaattcggccattacggccggggcccttcgatagctcatctttgcgcgtcgcagtcgcgcggagcccggcttccgacgtgcagcctggcagtgcagtgagctgtctggccttttgtccttgatccttggttaaggaaatgaccaaccagtacggtattctcttcaaacaagagcaagcccatgatgatgccatttggtcagttgcttgggggacaaacaagaaggaaaactctgagacagtggtcacaggctccctagatgacctggtgaaggtctggaaatggcgtgatgagaggctggacctacagtggagtctggagggacatcagctgggagtggtgtctgtggacatcagccacaccctgcccattgctgcatccagctctcttgatgctcatattcgtctttgggacttggaaaatggcaaacagataaagtccatagatgcaggacctgtggatgcctggactttggccttttctcctgattcccagtatctggccacaggaactcatgtcgggaaagtgaacatttttggtgtggaaagtgggaaaaaggaatattctttggacacgagaggaaaattcattcttagtattgcatatagtcctgatgggaaatacctagccagtggagccatagatggaatcatcaatatttttgatattgcaactggaaaacttctgcataccctggaaggccatgccatgcccattcgctccttgaccttttccccggactcccagctccttgtcactgcttcagatgatggctacatcaagatctatgatgtacaacatgccaatttggctggcacgctgagcggccatgcctcctgggtgctgaacgttgcattctgtcctgatgacactcactttgtttccagttcgtctgacaaaagtgtaaaagtttgggatgttggaacgaggacttgtgttcacaccttctttgatcaccaggatcaggtctggggagtaaaatacaatggaaatggttcaaaaattgtgtctgttggagatgaccaggaaattcacatctatgattgtccaatttaaacatcaaagtctccaggcttatgctgcaaagagaatgtacggattgatcatgacattccttaccttcttaggcttgtttaaaagaaatatagcatttattgtagcaaagacttaaattttgtagatacaatatgaatcttttcatgttttattggaaatgctgttcatactttaacataaagctttcttaatga

SEQ ID NO: 78149 - DNA, 838 bp, Homo Sapiens
ggatctttgcgcgtcgcagtcgcgcggagcccggcttccgacgtgcagcctggcagtgcagtgagctgtctggccttttgtccttgatccttggttaaggaaatgaccaaccagtacggtattctcttcaaacaagagcaagcccatgatgatgccatttggtcagttgcttgggggacaaacaagaaggaaaactctgagacagtggtcacaggctccctagatgacctggtgaaggtctggaaatggcgtgatgagaggctggacctacagtggagtctggagggacatcagctgggagtggtgtctgtggacatcagccacaccctgcccattgctgcatccagctctcttgatgctcatattcgtctttgggacttggaaaatggcaaacagataaagtccatagatgcaggacctgtggatgcctggactttggccttttctcctgattcccagtatctggccacaggaactcatgtcgggaaagtgaacatttttggtgtggaaagtgggaaaaaggaatattctttggacacgagaggaaaattcattcttagtattgcatatagtcctgatgggaaatacctagccagtggagccatagatggaatcatcaatatttttgatattgcaactgggaaaacttctgcataaccctggaaaggccatgccatgcccctttcgctcccttgacctttcccccggactcccagactccctggtcactgccttcaaatgatggcctacatccaagatctatggatggtacaacatggccaaatttgggctgggcacccttgaacggccctggcctccttggggggctgaacgttgc

SEQ ID NO: 78150 - DNA, 384 bp, Homo Sapiens
taactttagggctttaatacagagtaacaggaaaacaagtgggaaaaataagctgctgttttataccaccatattgctattgctttcttgcctagaaaaaagtatttcccggactgcaactggagagttcagaagcaaaacctcagcccccaattttccaaggctgtatgttaggggagaggcactcaccatttccagaccttcaccaggtcatctagggagcctgtgaccactgtctcagagttttccttcttgtttgtcccccaagcaactgaccaaatggcatcatcatgggctagaatggaaagtgcttcatttataaagtcttcttgcatacgacttaatgaagccgagatactgttcaacaattgtgaggtaacattt

SEQ ID NO: 78151 - DNA, 854 bp, Homo Sapiens
tgccttaaagaaaataataagagaagggtgtgttctcttccaagtaatgagccgatcaaggggaagcaacccaaggctagcaggctcttttcaattcccagctctgccactcttagcatggcagagagttggcctcattatgccagtatggctgccacagtgtcagacatcacattccaggcagtggaaaggagaaagaaccaaagggcatccctttctcttgaagcagtccctgtgaggggggattatctggaagccccaacccaatttctgcttccaaccattatccatagaaacaactggaagttgagaagtgcagtcttttaggtgggcacctggctgccctgtatgaaaccagaattaggttggtcagcaggaaaacaagaaaacacttactgtgttgactgaggtttttgacgcatcgctttattgtcaaattaaacaactctatctcattctgcactgaaacacgtactaccattgcctataattggaaaatgatcctcagaggcacagaagatgccctgatggaaagtttgccccttgggcaaagagacagccatgggaaccttcagacctcagcatggaagcttccaagatccagaggaagaggcaacagcactgagagtcataggtagaagaatcatcacagccctgctaaccaggcagctgatgcccctctcccctggctccctgtgtccaaatcctacaggggcatctgttggctgaactcaacctgaagccaaagagaagatgagtggagagaggcaacatttatagagctcaggtttctagggctggagagggatctggagggacacacaggagacacctggcataaccaaaaaatgatt

SEQ ID NO: 78152 - DNA, 516 bp, Homo Sapiens
  misc_feature (42)..(42): n is a, c, g, or t
agtgtagtcctaacctactgcacagctgggaccccctgcccntagatcccaatactggggatgggaggaccttgcactattcccctcagtccatctatcgaggtctttgcaggaagcatactgggaattgaaacgagagcctaaatgacatctaagaaaggcagtgttcaataccaggtattaggtgaggatgggattctaaggacatcagtgggaggcagggagccaccttcagacctcagcatggaagcttccaagatccagaggaagaggcaacagcactgagagtcataggtagaagaatcatcacagccctgctaaccaggcagctgatgcccctctcccctggctccctgtgtccaaatcctacaggggcatctgttggctgaactcaacctgaagccaaagagaagatgagtggagagaggcaacatttatagagctcaggtttctagggctggagagggatctggagggacacacaggagacacctggcataaccaaaaatgattaaa

SEQ ID NO: 78153 - DNA, 958 bp, Homo Sapiens
gggggagggagctgaatgtgaattgatgtagacgtcagtatgcagaacaggaattggaacaggttcgcatggctctgaaaaaggccgaaaaagaatttgaactgagaagcagttggtctgttccagatgcacttcagaaatggcttcagttaacacatgaagtagaagtgcaatactacaatattaaaagacaaaacgctgaaatgcagctagctattgctaaagatgaggcagaaaaaattaaaaagaagagaagcacagtctttgggactctgcacgttgcacacagctcctccctagatgaggtagaccacaaaattctggaagcaaagaaagctctctctgagttgacaacttgtttacgagaacgactttttcgctggcaacaaattgagaagatctgtggctttcagatagcccataactcaggactccccagcctgacctcttccctttattctgatcacagctgggtggtgatgcccagagtctccattccaccctatccaattgctggaggagttgatgacttagatgaagacacacccccaatagtgtcacaatttcccgggaccatggctaaacctcctggatcattagccagaagcagcagcctgtgccgttcacgccgcagcattgtgccgtcctcgcctcagcctcagcgagctcagcttgctccacacgccccccacccgtcacaccctcggcaccctcaccacccgcaacacacaccacactccttgccttcccctgatccagatatcctctcagtgtcaagttgccctgcgctttatcgaaatgaagaggaggaagaggccatttacttctctgctgaaaagcaatgtatgatcatagtcaccagcaagatgcctttactgacagaactggtcttgtgtggtttctggaaatcagaaggaaaactcgagagctgcactgtctaataaaacttcctgcattg

SEQ ID NO: 78154 - DNA, 1851 bp, Homo Sapiens
  misc_feature (1404)..(1416): n is a, c, g, or t
gagcctgtccaatttctgtgaataaaacttttaataatgtacagcagaaattggacaggctcattcttatattaaaacaaaagatttcctatattacaatttatttacatttgcatactgaagaggtaaagtgtctaagtggctattttacagtcctttctaataaaatgtacaaaaacaaacagaagtaccgagaatgccgttcgggggcctttatggcgacgtaagaacgggcttggacttggtctgtgaatccagaatccagaggtgcaggtagcactatggatcagggttagcctcggggggccaaaaacacggcttcagtttctccccaactctcacttagtgttaagagtggcagaggtgggtgtgggagcttcccaaagacctgctccatcttccccagaggtggaagagttggactgtgtgtggggtaagggcagaagggccaactggggaggtggcctagtggctgggaagtcgacgtgtgttgcaagatcccagagggctacttgggactccgggaagaggagtctaagttccatcattacctataaaccgccaaggttctgctgcagggcggataggtgggaggccagcaggggtaaagacggtcccccccaatgacacaatggtatttaaacgaaattagtggccagtaaattggcccaaaggttaggggaagatctcctttaatgcaaggaaagaagcaataatcagtcaaataaatagaagggccaggagcactggggagcctgagggcagggacagggctctccctcctccacaagctttggcagagaactgctgggttggaggcagagatgctctaaggctacatacacaatacacctcccctggggacaggaagggggctcagaatgaatgcagtgatttgaggtctcacctggggttctaaaccccaggtctcatcacccgcccctggtctctttgtggagggggttgtgggggttcctctttcttcagtgatctaatataagacacaataattctaggctcaaaagggtcgtagaaccaattatgaaaccttctggtctcaaaacaggcatctacttacttggatcagctctttttacagtgctccaggagtagggacccacagcatgtcttgtcccacagatgtatgtcccagcaccctggcacccagcaggcacttcacccacatttgttgaataaatgcctggagagggtacaaccagctggacagtgcaagaaagggccctagagccaaaaccactcaaggaattgggggtggggacaaaatacgatgagagactgagcctcagggcaaagaggaactctcactgctgagtgggaacaggctcaggtgcaaggaccaaacatttccagtgtgattgagctatgtgcgttcaattggataannnnnnnnnnnnnagggatttctttaaaaacaaatagattgagaggtaatcacagagatggttttccttttacaaaaacttaatatttaacaacattaaaaaaagttaaaatccaaaccctcccaataaaattaaaaaaagaaatcaaaccactccagttaaaagttatggcttcaaagttattatatacctaagatatgctgaccaaatcaccacccacagccgtgcttctaggcttcgttaaatactatactcaggttaaataacatgttcggctcaggctgttcccttcagtagggctcctgaagtggatgcaaacctctcaccttccctccacctgatcagacagtccagtaaaagaagacccatgcagatgcctccctcccaccccagactccctccccactcttgcctcgtgccgaattcacaccccagcctcgtacctagc

SEQ ID NO: 78155 - DNA, 918 bp, Homo Sapiens
ggggaggagcggagcggcaggaacccaataacctgcttcgcctcggagctgaagcccgtactcaagatggcggctccgggcgggcgtggccagtgactagaaggcgaggcgccgcgggaccatggcggcggcggcggacgagcggagtccagaggacggagaagacgaggaagaggaggagcagttggttctggtggaattatcaggaattattgattcagacttcctctcaaaatgtgaaaataaatgcaaggttttgggcattgacactgagaggcccattctgcaagtggacagctgtgtctttgctggggagtatgaagacactctagggacctgtgttatatttgaagaaaatgttgaacatgctgatacagaaggcaataataaaacagtgctaaaatataaatgccatacaatgaagaagctcagcatgacaagaactctcctgacagagaagaaggaaggagaagaaaacataggtggggtggaatggctgcaaataaaggataatgatttctcctatcgacccaacatgatttgtaactttctacatgaaaatgaagacgaagaagtggtagcttcagccccagataaatctttggaattggaagaggaagagattcaaatgaacgacagttcaaacctgagttgtgaacaggagaaaccaatgcacttggaaatagaagattctggtcctcttattgatataccttctgagacagaaggttctgtttttatggaaactcaaatgctgccttagaaatcactcctagatgaaatgtttctcataataacttgtcaagaactttttagagttgttacataaaaataattgctgtgtagaaatcagaagttctaatactcttattgcattttattggctatacacacatatccagtcataacacaacttat

SEQ ID NO: 78156 - DNA, 1399 bp, Homo Sapiens
  misc_feature (1355)..(1355): n is a, c, g, or t
tttcagggccaaaacgttttactttccatttgaatttacaaccatatacagacaatatggtaagattttagagaaaacagatcatcactacgaatatccatattctgatttcttttgagaaccaaggtgccttttaaaatgcggctttttagaatagcatgtgttgtttctgtctgggatctagatcttgtctgctacaaaacaaatgaacacaccctgtgtaacaaaatcgaattttaacatttaaatcttgattccaatattcctgacctatctcttgtcatatgaaagaaagaagcctttttttaaaacaaagtttcaattcagaatttttacaaacaaaaacaatcctgcgtctacttaatatccctgtatatcctcaaaaagcaagttcaggaaatttaaaaatgatttataaaaggcactgaagttagcaaaagcattggtgggttttcattttggattaaacactggaaatgttcacagagaaacaactggtgtgagcagttgcccgtaacacccaggaagaaaccgacctccaggcagcacctcctgaacacctcagcggctcctcacacattccaaccacagaccttcattcaagtcaaggtgaaggctacagtcagcacggcaagaaaccaggatgggactcaaacctctaaatgcacactctgcatacaggagatcccaactgaaatgagttccaaaataacggatacctttatcgtataatcatttatgctcaacaaagcctcaggataaatttgaaaacagaacaatgtatagactgtattactgctgcactggctcctgaatgaagcaggcggtgaaggctcacgtgctgaggaaacagggaacaccttggcgccgctgctgagctctgtgttgctcctggtatcactcccacgggctgcaagacttcccaagagaaaagctactttcatcttctgatcagtaatttaaatattccgaacaacccaaatcacaatggttgctgcaagtctgaggcgcgctcctggctccctgatccctgccgtccacctccctctgtctgaaccatgagacccacgggcgaaccaacaggcactctgccaccatcagatgccaccccccaacccaggaaaagacagggcggcaaatagttcatcttggtgagtgcaggttatcaaagggacatcggtgctcacgcctccgccaagcccctcctcatccacagcgtctgtcggatgaggtgagtacagggtaagtacagggctgcctgcctgcaactgcctcagcgccctttcctctgctatatttcagacctagaaattgccacctaaaaagtctaccattaccacatggatattttccanaaaattggtaactgagtttgctttcattaacttctaacttcttc

SEQ ID NO: 78157 - DNA, 1196 bp, Homo Sapiens
  misc_feature (735)..(826): n is a, c, g, or t
agtcccgcgaggaagcgccagcgactacgtgctgtggaaggagatttgttcctggtggacctcatctgctgtggtgccatcctgttccccgtagtctggtccatccggcatctccaggatgcgtctggcacagacgggaaggtggcagtgaacctggccaagctgaagctgttccggcattactatgtcatggtcatctgctacgtctacttcacccgcatcatcgccatcctgctgcaggtggctgtgccctttcagtggcagtggctgtaccagctcttggtggagggctccaccctggccttcttcgtgctcacgggctacaagttccagcccacagggaacaacccgtacctgcagctgccccaggaggacgaggaggatgttcagatggagcaagtaatgacggactctgggttccgggaaggcctctccaaagtcaacaaaacagccagcgggcgggaactgttatgatcacctccacatctcagaccaaagggtcgtcctcccccagcatttctcactcctgcccttcttccacagcgtatgtggggaggtggagggggtccatgtggaccaggcgcccagctccccgggaccccggttcccggacaagcccatttggaagaagagtcccttcctccccccaaatattgggcagccctgtccttaccccgggaccacccctcccttccagctatgtgtacaataatgaccaatctgtttggctcaagnnnnnnnnnnnnnnnnnnnnnnnnnnnnnnnnnnnnnnnnnnnnnnnnnnnnnnnnnnnnnnnnnnnnnnnnnnnnnnnnnnnnnnnnnnnnggcgagaggcgcgtccaaatacaacacaaagaccgcactcacgcggcgccaacacacacaacccagcaatacacgccacagaccgagccaagacaagaaaacacagcaccacccaggaaagtaagcgaccgaccacactgaaccacacgtgctgcaaccagacgaccaacggggaagagaataaagaagacacaaacacggagccgaccgacatagagagagacacacaagagcaccacagagatccagcaagcaaaacaaactatacactggcaagggcacccacagacaaggagtagtacagcaagcagatgaacaaacccacaccaaggagtagagaacacacaacacaaggagcagcggggtagca

SEQ ID NO: 78158 - DNA, 973 bp, Homo Sapiens
  misc_feature (64)..(64): n is a, c, g, or t
  misc_feature (640)..(671): n is a, c, g, or t
tacgtggttccttggcaggaccctgggagccattttacgggcaggaggcaaggtgcccccttcnacaagggctttcggcagtacggcttcaaccgatccagccaggcctgcgagctgcatgtggcggggtttgactttgagctcctgaacgaagctttctcggttcataagggcttcaaaaaagcgttgaagttccatccccaaaaggaggctgaaaatcagcacaataagatcctatatcgccagttcaaacaggagttgaaggccaagtaccccaactctccccgacgctgctgagcccttccctcccctaatctgagaagtcagcctcttggctcctcaggccaccatttaggcctgactggggtaagaaatgtcgctccactttacagaggtagctgtggtgttgaaacactggacttggatatggggtgctgggatcgattcctagctttaccactaactagctgtgtggccttgagtaaatcccgttacctctctgagcctcggttaccctgtctgtaaaaagggaggtgagaatacctacctcacggaactgttgggaggctcagatgagatgctatatgtgaaaacattctgtaagcttcgtacaaatgtgaagtattaatattatcgcagnnnnnnnnnnnnnnnnnnnnnnnnnnnnnnnnacaatcttgggtgggtagtaggagagcaaaaagtatgaatgggatggagctaagaagtctgaatacttaatgaaatggactttttggaaagaaatcagatgaaggcataaaatttagttcttagctcttgaacagaagcctaaaattcctggttctctcagggcttcgccttcaagggttctggaggagggaagggtctgcaggttccatgggtgacagcctgagatctgtcccttcaacgggctgggctgggtatgtgcctaccgatgacaatgtgtaaataaatgcgtgttcacacccac

SEQ ID NO: 78159 - DNA, 2058 bp, Homo Sapiens
  misc_feature (1518)..(1674): n is a, c, g, or t
caatgctttagctataatctacagtcccacctgtatgtaaaacccggcaccggtccggaattcccgggatgcggccgctggcgtagtctgtggccgggtggtcgttgctgcgcgccccgagccccgagagccatgcagatgtcctacgccatccggtgcgccttctaccagctgctgctggccgcgctcatgctggtggcgatgctgcagctgctctacctgtcgctgctgtccggactgcacgggcaggaggagcaagaccaatattttgagttctttcccccgtccccacggtccgtggaccaggtcaaggcgcagctccgcaccgcgctggcctctggaggcgtcctggacgctagcggcgattaccgcgtctacaggggcctgctgaagaccaccatggaccccaacgatgtgatcctggccacgcacgccagcgtggacaacctgctgcacctgtcgggtctgctggagcgctgggagggcccgctgtccgtgtcggtgttcgcggccaccaaggaggaggcgcagctggccacggtgctggcctacgcgctgagcagccactgccccgacatgcgcgccagggtcgccatgcacctcgtgtgcccctcgcgttacgaggcagccgtgcccgacccccgggagccgggggagtttgccctgctgcggtcctgccaggaggtctttgacaagctagccaggtggcccagcccgggattaattatgcgctgggcaccaatgtctcctaccccaataacctgctgaggaatctggctcgtgaggggggccaactatgccctggtgatcgatgtggacatggtgcccagcgaggggctgtggagaggcctgcgggaaatgctggatcagagcaaccagtggggaggcaccgcgctggtggtgcctgccttcgaaatccgaagagcccgccgcatgcccatgaacaaaaacgagctggtgcagctctaccaggttggcgaggtgcggcccttctattatgggttgtgcaccccctgccaggcacccaccaactattcccgctgggtcaacctgccggaagagagcttgctgcggcccgcctacgtggtaccttggcaggacccctgggagccattctacgtggcaggaggcaaggtgcccaccttcgacgagcgctttcggcagtacggcttcaaccgaatcagccaggcctgcgagctgcatgtggcggggtttgattttgaggtcctgaacgaaggtttcttggttcataagggcttcaaagaagcgttgaagttccatccccaaaaggaggctgaaaatcagcacaataagatcctatatcgccagttcaaacaggagttgaaggccaagtaccccaactctccccgacgctgctgagcccttccctcccctaatctgagaagtcagcctcttggctcctcaggccaccatttaggcctgactggggtaagaaatgtcgctccactttacagaggtagctgtggtgttgaaacactggacttggatatggggtgnnnnnnnnnnnnnnnnnnnnnnnnnnnnnnnnnnnnnnnnnnnnnnnnnnnnnnnnnnnnnnnnnnnnnnnnnnnnnnnnnnnnnnnnnnnnnnnnnnnnnnnnnnnnnnnnnnnnnnnnnnnnnnnnnnnnnnnnnnnnnnnnnnnnnnnnnnnnnaacattctgtaagcttcgtacaaatgtgaagtattaatattatcgcagtattattgttgttatcataattgttattattaacaatcttgggtgggtagtaggagagcaaaaagtatgaatgggatggagctaagaagtctgaatactttatggaaatggactttttggaaagaaatcagatgaaggcataaaatttagttcttagctcttgaacagaagcctaaaattcctggttctcttcaaggcttcgccttcaagggttctggaggagggaagggtctgcaggttccatgggtgacagcctgagatctgtcccttcaacgggctgggctgggtatgtgcctaccgatgacaatgtgtaaataaatgcgtgttcacacccac

SEQ ID NO: 78160 - DNA, 502 bp, Homo Sapiens
  misc_feature (24)..(24): n is a, c, g, or t
  misc_feature (153)..(195): n is a, c, g, or t
cttgagtaaatcccgttacctctntgagcctcggttaccctgtctgtaaaaagggaggtgagaatacctacctcacggaactgttgggaggctcagatgagatgctatatgtgaaaacattctgtaagcttcgtacaaatgtgaagtattaannnnnnnnnnnnnnnnnnnnnnnnnnnnnnnnnnnnnnnnnnnacaatcttgggtgggtagtaggagagcaaaaagtatgaatgggatggagctaagaagtctgaatacttaatgaaatggactttttggaaagaaatcagatgaaggcataaaatttagttcttagctcttgaacagaagcctaaaattcctggttctctcagggcttcgccttcaagggttctggaggagggaagggtctgcaggttccatgggtgacagcctgagatctgtcccttcaacgggctgggctgggtatgtgcctaccgatgacaatgtgtaaataaatgcgtgttcacacccaaaaaaa

SEQ ID NO: 78161 - DNA, 1073 bp, Homo Sapiens
  misc_feature (18)..(18): n is a, c, g, or t
  misc_feature (26)..(26): n is a, c, g, or t
  misc_feature (39)..(39): n is a, c, g, or t
  misc_feature (124)..(124): n is a, c, g, or t
  misc_feature (131)..(131): n is a, c, g, or t
  misc_feature (164)..(164): n is a, c, g, or t
  misc_feature (205)..(205): n is a, c, g, or t
  misc_feature (207)..(207): n is a, c, g, or t
  misc_feature (239)..(239): n is a, c, g, or t
  misc_feature (251)..(253): n is a, c, g, or t
  misc_feature (296)..(296): n is a, c, g, or t
  misc_feature (993)..(1014): n is a, c, g, or t
tcccgggccgagccccgncatgagtncgcctctgggctntgctgcctgtctgcactcgtgacgcccggctcctgccgcacgtgggctgagctcggcgccgtgcgccccgcgtgctgcgccgatngtgatcncagtcctccagctcgcccgcgcccagaggctcngccaccccgggccccgcgcctgcagcccgcgcctccccctntnaggctgtctccagcctcgtgccgggatggagnccgccctgcctnnngggacacccgtctgccccccgtctggagaccggctcctcatcntgcaaggcgcagcgcgagtgtcccctcccttgggggcctgtcccggaccctgcacagagttcaccggtccttccgccaccctcaggccactccggtgaccctgcagcgtctcctggcggggccgcctccccagacccgcctgtgtcccgggggctcgcacctggcaggcctcggcgcaggagggaggggcggtcggggagccgggcagggcgcgacggttcctgggcgcctcccgcgggggcgcgtcctggacctgccttctggggaccccggcgcgcaggcggtgacccctccctgttcgcttgcagctgctgctttcttagtgggctcggccaagcctgtggcccagcctgtcgctgcgctggagtcggcggcggaggccggggccgggaccctggccaaccccctcggcaccctcaacccgctgaagctcctgctgagcagcctgggcatccccgtgaaccacctcatagagggctcccagaagtgtgtggctgagctgggtccccaggccgtgggggccgtgaaggccctgaaggccctgctgggggccctgacagtgtttggctgagccgagactggagcatctacacctgaggacaagacgctgcccacccgcgagggctgaaaaccccgccgcggggaggaccgtccatccccttcccccggcccctctcaataaacgtggttaagagcnnnnnnnnnnnnnnnnnnnnnncctgagcaggcggccgcaagcttattccctttagttgagggttaattttagcttggcac

SEQ ID NO: 78162 - DNA, 1277 bp, Homo Sapiens
gctggtaccggtccggaattcccgggatcgcgcgccccgagcccccgcgccatgaagctcgccgccctcctggggctctgcgtggccctgtcctgcagctccgctgctgctttcttagtgggctcggccaagcctgtggcccagcctgtcgctgcgctggagtcggcggcggaggccggggccgggaccctggccaaccccctcggcaccctcaacccgctgaagctcctgctgagcagcctgggcatccccgtgaaccacctcatagagggctcccagaagtgtgtggctgagctgggtccccaggccgtgggggccgtgaaggccctgaaggccctgctgggggccctgacagtgtttggctgagccgagactggagcatctacacctgaggacaagacgctgcccacccgcgagcgctgaaaaccccgccgcggggggccctgtcgtggccctgtcccgcagctcccctgctgcaatcttagtgggctcggccaagcctgtggcccagcctgtcgctgcgctggagtcggcggcggaggccggggccgggaccctggccaaccccctcggcaccctcaacccgctgaagctcctgctgagcagcctgggcatccccgtgaaccacctcatagagggctcccagaagtgtgtggctgagctgggtccccaggccgtgggggccgtgaaggccctgaaggccctgctgggggccctgacagtgtttggctgagccgagactggagcatctacacctgaggacaagacgctgcccacccgcgagggctgaaaaccccgccgcggggaggaccgtccatccccttcccccggcccctctcaataaacgtggttaagagcaaaaaaaacacaacccacaccaagccacatcacaaccacaaacacaaccacgccgcaccgccacgcccgcggccaacccaagcacagcccgcagccacacggccacagacagccaccaccacagccgccagagagggcccagcgccacacgcacccacacgacgcgcgcaaccagagaccacgggacgcggacacgagcgcaccagaggacaccagaagccagccacagaaggacaaggagaggcgccacaacagccgcaaggcggaggagacgagcagggcaaagacacacaggacaccaacaaagcaggcacgagcggagcggcacgcgagcaaggaccagcagcccagcggcacaacgggcgagcacagagagagacacaagaagcagcagcgggggcaaccaagcggaacgaacc

SEQ ID NO: 78163 - DNA, 1248 bp, Homo Sapiens
ttaggctaggtacgaggctgggtgttgaattcggccgaggatggaatacagcgagctcctggacaaggcttcggaaactgatgatccatatgagcgcatggttctcgttgccgcatttgcagtttcaggatactgctccacctatttcagagcaggaagtaagccattcaacccagtccttggggagacttatgaatgcattagagaagacaagggattccgctttttctcagaacaggttagccatcatccacccatttctgcctgtcactgtgaatcaaagaattttgtgttttggcaagatatcatggaaaaacaagttctgggggaagtcgatggaaatcctgcctgttggaacactgaatgtcatgcttccaaagtatggagattactatgtgtggaataaagtcaccacttgcatacacaacatcctcagtgggagaagatggatagaacattatggagaagtaaccatcagaaataccaaaagcagtgtttgcatttgcaaactcacatttgtcaaggtgaattattggaattctaacatgaatgaagtccagggggtggtgatagatcaggaggggaaggcggtgtaccggctgtttggaaagtggcatgaaggactctactgtggtgtggccccctctgcaaagtgcatttggagaccaggttccatgccaacaaactatgagctgtactatggcttcacaaggtttgctattgagctcaatgagttagatccagtactaaaagatctccttccaccaacagacgcccggttccggccagatcaaagatttttggaagaaggaaatttagaagctgcagcatcagagaagcaaagagtagaggaactccagagatctcggagacgatatatggaagaaaacaatcttgaacatataccaaaattttttaaaaaagttattgatgccaatcaaagagaagcctgggtttctaacgacacctactgggagcttcgaaaggaccctgggtttagcaaagtagacagccctgttctttggtagactgggaatgtagagctagccaacatatcacattctgaatgaataaataactatgcacaattatgtttcttatagctatgtgtggtttctgggtcgactgaaaacctaccatttgcttttctattcatctttataatggactttcagaagtgcattagacaaggcccctaaccactttgggatcctttctgttttgctgcaaccatattccttaaaaaaa

SEQ ID NO: 78164 - DNA, 2225 bp, Homo Sapiens
  misc_feature (1596)..(1683): n is a, c, g, or t
  misc_feature (1827)..(1836): n is a, c, g, or t
  misc_feature (2100)..(2100): n is a, c, g, or t
gggggactgccgcgggggattctgggccaagatggcagcaatgaggaaggcgcttccgcggcgactggtgggcttggcgtccctccgggctgtcagcacctcatctatgggcactttaccaaagcgggtgaaaattgtggaagttggtccccgagatggactacaaaatgaaaagaatatcgtatctactccagtgaaaatcaagctgatagacatgctttctgaagcaggactctctgttatagaaaccaccagctttgtgtctcctaagtgggttccccagatgggtgaccacactgaagtcttgaagggcattcagaagtttcctggcatcaactacccagtcctgaccccaaatttgaaaggcttcgaggcagcggttgctgctggagccaaggaagtagtcatctttggagctgcctcagagctcttcaccaagaagaacatcaattgttccatagaggagagttttcagaggtttgacgcaatcctgaaggcagcgcagtcagccaatatttctgtgcgggggtacgtctcctgtgctcttggctgcccttatgaagggaagatctccccagctaaagtagctgaggtcaccaagaagttctactcaatgggctgctacgagatctccctgggggacaccattggtgtgggcaccccagggatcatgaaagacatgctgtctgctgtcatgcaggaagtgcctctggctgccctggctgtccactgccatgacacctatggtcaagccctggccaacaccttgatggccctgcagatgggagtgagtgtcgtggactcttctgtggcaggacttggaggctgtccctacgcacagggggcatcaggaaacttggccacagaagacctggtctacatgctagagggcttgggcattcacacgggtgtgaatctccagaagcttctggaagctggaaactttatctgtcaagccctgaacagaaaaactagctccaaagtggctcaggctacctgtaaactctgagccccttgcccacctgaagccctggggatgatgtggaaataggggcacacacagatgattcatggatggggacatggaaatgagaataggttaaatggtgcaggtacctcatagccagctctacacagaggtctctcctggcagaaagcaggcgaagggcaggaggagctgcttggcagaaggacctcctgcccagacctgaggagtgagaggctttgagggctgaagtctccctttgttacggaccctggcccaggagttgaatgcctgaggacgtgtgggaaccccgttccctacttagcatgatccttgagtctcctctctggatggaatccgcgagctggccacctggccaccctctacacggctccaccctgccatggccgtggggcccttgctctctgacttctcaggacacaggtcatggaggttcttcccaagctggcagaggccatttgtggaaagtggagagctacgtggtggccatctgccaactccagcatctctggaaaatctccacgctgaatgtgatttttgaaaacagcttatgtaattaaaggttgaatggcacatcataattccagccnnnnnnnnnnnnnnnnnnnnnnnnnnnnnnnnnnnnnnnnnnnnnnnnnnnnnnnnnnnnnnnnnnnnnnnnnnnnnnnnnnnnnnnncaacatacatacactcaaacacagcacaaactacccccacccacaccagccacattttcaaatccaccccacccacagagagagagggggcggccctcccaggcccccacagaaaaacctactataaacctccctatccatatnnnnnnnnnnctcaagacaagggtaaaaaccaaacttcacttaattagggggcggcccaaaacctttggcccgttcacacactcggaaaaaaggaacaccgaaaaccgggccacccccggaggcttccaagctggccagaccacgaaaggacaaaaacgcgggggcacgggaccaacataaaacctctgctcctcaaaataaacgcgggcgaacaagcctatgtcaactcataaactcaaaaacggaggccacaccaccgacgggctctacctnacgcgacggcgaagggacagctcacgctgtacacaaaggaactcctacggggcccgcgacttgaggccctctcctagtcatgtcgaatcgggtgtaacataacacatctcacatagcgcgacggg

SEQ ID NO: 78165 - DNA, 906 bp, Homo Sapiens
  misc_feature (773)..(782): n is a, c, g, or t
ataaacctgttttgcagaactcatttattcagcaaatatttattgagtgcctaccagatgccagtcaccgcacaaggcactgggtatatggtatccccaaacaagagacataatcccggtccttaggtagtgctagtgtggtctgtaatatcttactaaggcctttggtatacgacccagagataacacgatgcgtattttagttttgcaaagaaggggtttggtctctgtgccagctctataattgttttgctacgattccactgaaactcttcgatcaagctactttatgtaaatcacttcattgttttaaaggaataaacttgattatattgtttttttatttggcataactgtgattcttttgggacaattactgtacacattaaggtgtatgtcagatattcatattgacccaaatgtgtaatattccagttttctctgcataagtaattaaaatatacttaaaaattaatagttttatctgggtacaaataaacaggtgcctgaactacttcacagaccagggaaacttcctatggaaaaaatcactatgaatttcctgaattgcctatgtgaaacctaccgaacctttgggaacccctggtttaaggtagggtggttaaggactttacacagtaacctcggttttctacccctgaagaaagaaaattgggccatacatttccaggaaacttgcaaggggctttaatgagggggaaaattttagaggccctccctagaaaatttttcgaaggtaaaaatgggccaannnnnnnnnnaaaggaaaggggggtaaaattacacttctaatggcggaaaccttttgaagagggctttaaaccacaaagaattgggttctattgggcaagaaaaatttttaaaaggggggggagaaatttctct

SEQ ID NO: 78166 - DNA, 966 bp, Homo Sapiens
  misc_feature (42)..(80): n is a, c, g, or t
  misc_feature (83)..(117): n is a, c, g, or t
aaaggatgtatagactcactataggcgctagctcgtctgcannnnnnnnnnnnnnnnnnnnnnnnnnnnnnnnnnnnnnncgnnnnnnnnnnnnnnnnnnnnnnnnnnnnnnnnnnncagtcgacggtaccggacatatgcccgggaattcggccattacggccgggaggtagccagcaattttcccagagggcagtggctcctcctaaccagttaacaccagcagtgcaaatgagacccatgaaccaaatgagccaaacactaaatgggcaaaccatgggtcccctcaggggtctgaatctcagacccaatcagctaagcacacagattttgcctaatttgaatcagtcaggaacagggttgaatcagtcgaggacgggcatcaaccagccaccatccctgacgcccagcaattttccttcacccaaccaaagttccagggcttttcaaggaactgaccacagcagtgacttagcttttgacttcctcagccaacaaaatgataacatgggccctgccctaaacagtgatgctgatttcattgattctttattgaagacagagcctggtaatgatgactggatgaaagacatcaatcttgatgaaatcttggggaacaattcctaaagaagaaagggaagacaatttacaaactccaagcactaaaaggcagtatattacagaaactctgtagaggctgaactgttgatgttcaggtggactacatgaagataacatgcttaaaaatggaaagcagaaagtaactgcagtgatgaacattttggtccaaattcttgttttaaatcttacacctgaaagtaaaacattgggatcacttttccctgtctaaactccaggatacagtatccaatttatccaaacagaactgtggtgtcaatgtgtaattaattgtgtaaaatagccttcccaagtttctttttccctggaaaataaaaaaggtaatag

SEQ ID NO: 78167 - DNA, 702 bp, Homo Sapiens
  misc_feature (61)..(61): n is a, c, g, or t
acaagtgtcctcaaggtcatcctggagatgggatccaggacgtggggccatgactctctgngaccttgccacagcccccattcccctgcttgcagtctgcaaggacacctttgcagggatttttgtcctgctggccaccccacccacacctgtccctggccagcaggccgcctgcaagcgtcaggcacacagggacagacatggcgagcacagtgcaggcccggggcccacgggcaacatggaaccctgggaactgccctcccccttagctcacagtgcctgcggtagccactctaggtcgttggccttccttgaccactccatttaattctatctgctgtttgggttgggtttttccccttagttatctgtgggtttcctgtattttatgttaatatttctattaagaacatgttgggcatgtggacccaagcacctgggaaggaggtggcatctgagacagcctgatacgttcccgtctgtgcacccatggagatccaggcgtgggcccgtggctgtccctggttgtaaattcgagggtctgcatatctgatgttcaggtagacctgggcgcctgggaacgaggccatcagctgccatgcacataacaaagagacaatgcattccttcttatttttcctttttaaaaatcgatgaatcatttgtgatgcttttaacaaagattaaatgaatttgatcagc

SEQ ID NO: 78168 - DNA, 583 bp, Homo Sapiens
  misc_feature (488)..(506): n is a, c, g, or t
tttgcttgtgtgtatttttatttcagggaaagaaatgagggatatgataagaaaaagtctattaaaattgtaaggcttactccagacaccattgcttaaatcactcccctcgcacacagagagaaaacccctggcaagtgcacaaaaacactactcataaaagcacggtgaccagtgaactattatgcaaggcacccccacgtgtcctttcctaaccaggaagcccgtcctctaaggagggggcatgggtcccatccctgcccagcctaggcgtgcttctgtgtccagctttaaggcctctgcgtgaggaaggccacagactcccagctgtcagcacgctgtcatgatgagacttggagcaggggagacgcaccttctcaatctacaaaatgagccatggcgcccattaaaatgtcaaatgtcaactctaaatagtctattgggtgctgtcttgcacggaaatctcagccagaaagaaaaactagagnnnnnnnnnnnnnnnnnnngcaattctctcccaccacttcacttttcttggagactgtctatccctcgaattctctttgcctatgtagaaaataac

SEQ ID NO: 78169 - DNA, 1020 bp, Homo Sapiens
  misc_feature (45)..(45): n is a, c, g, or t
  misc_feature (69)..(69): n is a, c, g, or t
  misc_feature (90)..(90): n is a, c, g, or t
  misc_feature (99)..(99): n is a, c, g, or t
  misc_feature (101)..(101): n is a, c, g, or t
  misc_feature (148)..(148): n is a, c, g, or t
  misc_feature (196)..(196): n is a, c, g, or t
  misc_feature (207)..(207): n is a, c, g, or t
  misc_feature (256)..(256): n is a, c, g, or t
cagcttaccacttatctcccgctctatgttgtttgaatgtgagcngatacaattccacccaggaacagntttgacatgatacgatttatnacgactcantntaggaattgccctcgagcccagaattcggcacgagcacgtgctgctntcagacactggggttacacatgcatgtgaccaatgtgcagcaaactcnaacgcctcgcntacctcaatgtgagcacgcttgagcttaacacctccaactacagctctntcaccacagtaacagtggagaccacggagatctcgcctgaggacacaacgcgaaagtacaagcctgttcctaccacgtccactggtaccagccggcatataccacctctaccacggtgctcattcagactacccgtgtgcccaagcaggtggcagtacccgcgacagacaccactgacaagatgcagaccagcctggatgaagtcatgaagaccacccaagatcatcattggctgctttgtggcagtgactctgctagctgccgccatgttgattgtcttctataaacttcgtaagcggcaccagcagcggagtacagtcacagccgcccggactgttgagataatccaggtggacgaagacatcccagcagcaacatccgcagcagcaacagcagctccgtccggtgtatcaggtgagggggcagtagtgctgcccacaattcatgaccatattaactacaacacctacaaaccagcacatggggcccactggacagaaaacagcctggggaactctctgcaccccacagtcaccactatctctgaaccttatataattcagacccataccaaggacaaggtacaggaaactcaaatatgactcccctcccccaaaaaaacttataaaatgcaatagaatgcacacaaagacagcaacttttgtacagagtggggagagactttttcttgtatatgcttatatattaagtctatgggctggttaaaaaaaacagattatattaaaatttaaagacaaaaagtc

SEQ ID NO: 78170 - DNA, 2140 bp, Homo Sapiens
ggttcgcgccgcggtcgccggctgcttacgtgggccgggcctagtgtggggctgagggtgcgggtcgctatggcggtggacatcacgctgctattccgggccagcgtcaagaccgtgaagacgcggaacaaggcgctgggagtggcggtgggcggcggggtcgatggcagccgggacgagctgttccgccggagcccccggcccaagggcgacttctccagccgggcccgcgaagtgatttctcacattggcaaactgagagattttcttctggaacacaggaaagattatattaatgcttatagccataccatgtctgaatatgggaggatgacagacacagaacgagaccagatagaccaggatgcccagatattcatgaggacctgttcagaagcaattcagcaactacgaacagaagctcacaaggagatacattcccagcaagtgaaggagcacaggaccgctgttttggatttcattgaagattacttgaaaagagtatgtaaactttactcagaacagagagccatccgagttaaaagagtggtggataagaaaagattatctaagctggaaccagaaccaaatacaaagacaagagaatccacatcttctgagaaagtttcacagagtccttcaaaagactctgaagaaaaccctgccactgaagaacgtccagaaaaaattttggctgaaacacaacctgaattgggaacgtggggagatggcaaaggcgaagatgagttatccccagaagaaatacaaatgtttgaacaggaaaatcagcgactaattggtgaaatgaacagcttgtttgatgaagtgaggcaaatcgaagggagagtggttgagatttccagactccaagagatattcacggaaaaggttttgcaacaggaagctgagattgacagcattcaccagttagttgtgggggcaactgaaaatatcaaggaaggcaacgaagacataagagaggccattaaaaacaacgctggcttccgcgtgtggatcctcttcttcctcgtgatgtgctccttctccttgctcttcctcgactggtacgacagctagccagggccacgggggcccagcacgagagtcctcatgggcactcacagactgcgtgctttcatgtacttccagtgctggagcatggtatgaccagattttatcacagtgccatttgaagggaaaggagttcagacagacagacgtattccccaaaaagggataccccaggccgatggtgttcagccatttagcagctgaaaaaggaaacagtgcacaccaatgggaggcagcctgcgtagccctcatcaggcaagacagactgaatgcaggagtgggtgattagctgctccttgaacttgaggctgccttggcagcaggggcacagcaggcctcaagagcccctaattgtctcagggttcaaaggaagacactgacctttcccatcccggtagcttcagggaagatcatagttaataacgtctctcaacaaatgattacttctttgtttccttgtggcttcttgtctgtctgagtcaacgaatacacagacttactggattatagaagagaaaattcacatctgccttgttaatctaataaatataattacagccccttaatgtgttgtcaatgagtctaagttgacaaattcagtggcagcccagccacctcctatcaatcaatcagggaaaaaatgcaggggagactggggccctcagtgaggggctgcctggcattactcctccaaagactgctgcccccagaacaggcagggggtgtgggagggccagttttccgccactgggtccaaggagcctttgttcaaaggaagaagtgggccacggaagaacgggcctgcttttttcgtgcctgtgcttttgacctccaggaactgtaaacaggaacacctatgtgtaactgaaggcatgagacatttgtacaggaagcatcccagcgcccacatgggcatgagacagtttgcactgcgcctggtgaaatgggtgtgtgtacaaacagtcccctgggcagcacaggtatcctcatgttttttatttgcccaaagtgaaatgtcagaagttacatgtaaatgaattcaccctccctaaagtccccgtttccctgg

SEQ ID NO: 78171 - DNA, 1175 bp, Homo Sapiens
cggtggagcaggctgccgacagcctggacttcgatgagaccttcctggccacatccttcctgcagcacccctgggacgagagcggcagtggctgcctgcccccggagcccctctttgaggctggggatgccaccctggcctccgacctgcaggactgggccagcgtgggggccttcttgtaagaggccaggccctgccccacctctggacagtgcccaagtcagggtccagaactgccccccaacacaggtccacagacaccccaccacctaggcaggggctgggccaggctccaaggcttgccccagaggccacatggccaccagccccagctgccatcagattcaagcccaggaggctgaaaacgagggcccaggaccagaatcgctgcctcctctccccagccccacattgtacacacagtgtttcattgctccgcgtcttcccagccccagaaaccggctaaaggaccctgcaccatgagagccgaggcctggaggagcccgggtcaggctggggaggaacagaactgggccctcccagagcacctccgcttcccccctgcttccccaggtctctatccagagagagtccccaggtacaacaaatgctaattagatgacagcaaattaaccccctggaggcttctcctggcagagcctccctggggccggggcaggctgtggatggggcggagcagggcagaagatggactgggggagggggcagagagaggagaccaaaatgaggtggtggcacagggtggggcaaggagatcctctctaaggcctctggggtctttgcctggccccatccctagggggcggggaggggacgtaaatccctaatctttaagcccgacttgaggctgagagcagctggaagtttgggtttggtggtttgggggccggggcagccaagctgtatggggcaggacagacagactaatgtagtgagtgtagctgtagctgaggcttaactgggagggatgccgagcttgctggaactactgggaccaagaagcggggtaccccacgcccctgcctgcactcctcgggggcgtggggcgtgccttgctccacccggactccctgggctgcgtcccacatccaccctcctgccccgtggggcaatttaacctttttcatgaaagttatttacaatgaaaagttttt

SEQ ID NO: 78172 - DNA, 1046 bp, Homo Sapiens
gatggctacggtccggaatttcgggatgcgctcatctgcatggccatgcaggccagcaaggccaccaagatcaccctgccggccatctacaagtggatcacggacaacttctgctacttccgccacacagatcccacctggcagaattcaatccgccacaacctgtctctgaacaagtgcttcatcaaagtgcctcgggagaacgacgaaccaggcaaggggggcttctggcgcattgacccccagtacgcggagcggctactgagcggcgctttcagagaagcggcgactgccccctgtacacatccacccagcctttgcccgccaggccgcgcaagagcccagcgctgtcccccgggccgggccgctgacggtgaataccgaggcccaacagctgctgcgggagttcgaggaggccaccagggaggcgggatgaggtgcaggcaaaggaaagctggggcataagcgcaaacaaccgctgcccaagcgggtggccaaggtcccgcggccccccagcaccctgctgcccaccccggaggagcagggtgagctggaacccctcaaaggcaactttgactgggaggccatcttcgacgccggcactctgggcggggagctgggtgcactggaggccctggagctgagcccgcctctgagccccgcctcacacgtggacgtggacctcaccatccacggccgccacatcgactgccctgccacctgggggccttcggtggagcaggctgccgacagccttggacttcgatgaggaccttcctggccacatccttcctgcagcacccctgggacgagagcggcagtggctgcctgcccccggagcccctctttgaggctggggatgccaccctggcctccgacctgcaggactgggccagcgtgggggccttcttgtaagaggccaggccctgccccacctctggacagtgcccaagtcagggtccagaactgccccccaacacaggtccacatccaccctcctgccccgtggggcaatttaacctttttcatgaaagttatttacaatg

SEQ ID NO: 78173 - DNA, 870 bp, Homo Sapiens
  misc_feature (29)..(29): n is a, c, g, or t
  misc_feature (607)..(723): n is a, c, g, or t
gcatcatcatcattgcgcttggcctgctntacaactgctggcagcgccggctgcccaagctcaagcacgtgtcgcacggcgaggagctgcgcttcgtggagaacggctgccacgacaaccccacgctggacgtggccagcgacagccagtcggagatgcaggagaagcaccccagcctgaacggcggcggggccctcaacggcccggggagctggggggcgctcatggggggcaagcgggaccccgaggactcggacgtgttcgaggaggacacgcacctgtgagcgcagccgaggcgcaggccgagtgggccgccaggaccaagcgaggtggaccccgaaacggacggcccggagcccgcaccagccccgcgcctacccgggccgcccccgcggcctggccctcggcgcgggctccttcccgcttcccccgacttcacacggcggcttcggaccaactccctcactcccgcccgaggggcaggcctcaaagcccgccttggccccgctttcccgcccctgaaccccggccccgcgggcggcgggcggcgcttcctgcgccccgggactcaattaaacccgcccggagaccacgccgggcccagcgnnnnnnnnnnnnnnnnnnnnnnnnnnnnnnnnnnnnnnnnnnnnnnnnnnnnnnnnnnnnnnnnnnnnnnnnnnnnnnnnnnnnnnnnnnnnnnnnnnnnnnnnnnnnnnnnnnnnncctttggggggcgccctggccccttaaaaaactttttaaaacctttgtttgggccgggggccccccctaggggaaagggaacggggccaatacggtgttcccaaaggaaaacccgggcccagacaaaaggggttggaaatccccacc

SEQ ID NO: 78174 - DNA, 2104 bp, Homo Sapiens
  misc_feature (14)..(14): n is a, c, g, or t
  misc_feature (34)..(34): n is a, c, g, or t
  misc_feature (36)..(36): n is a, c, g, or t
ccccaccacaacanccccatcaccccacacgcananacctggctggtaccggtccggaattcccgggatatcgtcgacccacgcgtccggcgaggtggggtaggcgggcaaggcgggcgccgaggtttgcaaaggctcgcagcggccagaaacccggctccgagcggcggcggcccggcttccgctgcccgtgagctaaggacggtccgctccctctagccagctccgaatcctgatccaggcgggggccagggcccctcgcctcccctctgaggaccgaagatgagcttcctcttcagcagccgctcttctaaaacattcaaaccaaagaagaatatccctgaaggatctcatcagtatgaactcttaaaacatgcagaagcaactctaggaagtgggaatctgagacaagctgttatgttgcctgagggagaggatctcaatgaatggattgctgtgaacactgtggatttctttaaccagatcaacatgttatatggaactattacagaattctgcactgaagcaagctgtccagtcatgtctgcaggtccgagatatgaatatcactgggcagatggtactaatattaaaaagccaatcaaatgttctgcaccaaaatacattgactatttgatgacttgggttcaagatcagcttgatgatgaaactctttttccttctaagattggtgtcccatttcccaaaaactttatgtctgtggcaaagactattctaaagcgtctgctcagggtttatgcccatatttatcaccagcactttgattctgtgatgcagctgcaagaggaggcccacctcaacacctcctttaagcactttattttctttgttcaggagtttaatctgattgataggcgtgagctggcacctcttcaagaattaatagagaaacttggatcaaaagacagataaatgtttcttctagaacacagttacccccttgcttcatctattgctagaactatctcattgctatctgttatagactagtgatacaaactttaagaaaacaggataaaaagatacccattgcctgtgtctactgataaaattatcccaaaggtaggttggtgtgatagtttccgagtaagaccttaaggacacagccaaatcttaagtactgtgtgaccactcttgttgttatcacatagtcatacttggttgtaatatgtgatggttaacctgtagcttataaatttacttattattcttttactcatttactcagtcatttctttacaagaaaatgattgaatctgttttaggtgacagcacaatggacattaagaatttccatcaataatttatgaataagtttccagaacaaatttcctaataacacaatcagattggttttattcttttattttacgaataaaaaatgtatttttcagtatccttgagatttagaacatctgtgtcacttcagataacattttagtttcaagtttgtatggtagtgtttttatagataagatacgtctattttttcaaaattcatgattgcagtttaaatcatcatatgacgtgtgggtgggagcaaccaaagttatttttacagggactttattttttgatctttatttgagattgttttcatatctatctaaattattaggagtgtgtgtatcagaagtaattttttaatgtcttctaaggatggtcttccaggcttttaaactgaaaagcttaattcagatagtagcttttggctgagaaaaggaatccaaaatattaataaatttagatctcaaaaccactatttttattatttcattatttttcagaggccttaaaattctggataagagaatggaggaaaatactcagagtacttgattattttatttccttttattaaaaaattacttctatgtttttattgtctcttgagccttagttaagagtagtgtagaaatgcatgaacttcatcctaataaggataaaacttaaggaaaaccacaataaaccatgaaggtgtacacatcttataacacagataaagttttggtgtgctacctattcttgagagagtgagtgagtgtatgtgtttaaaggaaacaaaatgggagaaataagtttt

SEQ ID NO: 78175 - DNA, 699 bp, Homo Sapiens
  misc_feature (17)..(17): n is a, c, g, or t
  misc_feature (114)..(114): n is a, c, g, or t
  misc_feature (146)..(146): n is a, c, g, or t
  misc_feature (206)..(262): n is a, c, g, or t
aggccacagtcatgccntaccttcaggtgttatcagaattccgagaaaggagtgcggaagattgcccgagagcaaaaagtccctgagattctgcagctcagcgatgccctgcgngacaacatcctgcccgagcttggggtgcggtntgaagaccacgaaggactgcccacagtggtgaaactggtagacagaaacaccttattaannnnnnnnnnnnnnnnnnnnnnnnnnnnnnnnnnnnnnnnnnnnnnnnnnnnnnnnncggcccggaggaaacaggaacaagaagcagcaaagctggccaagatgaagattccccccagtgagatgttcttgtcagaaaccgacaaatactccaagtttgatgaaaatgtaagcatggtctgcccacacatgacatggagggcaaagagctcagcaaagggcaagccaagaagctgaagaagctcttcgaggctcaggagaagctctacaaggaatatctgcagatggcccagaatggaagcttccagtgagggggcacaggactgactttttaaaccattgtggactagtggctgctgtctgcctcagtgacaatgtcccagcgctcctatcatgtttacagtcacccttgggtcctaaattaagagttgtgttcatgtaggttcgtgtcgtcgttggctctgagacattgataataaatttttctcaacagtg

SEQ ID NO: 78176 - DNA, 611 bp, Homo Sapiens
gccagctgtgtcagaactcagccatgggtaggctctgaggggcacagtgcccctcaccttaggcaggaagcacccccagactctggtcgcccctctcccattcttagctgctggagccagcactgccagatgagtgtgctgactccagagcagtgtggtgactgaatgtccaagcaagaggacatggctgcatcagggagatagacactatgagacgggagggcaaagaaaggggagttggggttacccaggtgcagaggagaccaatagccgctgtgctctgggttttcagggtctgcccacacatgacatggagggcaaagagctcagcaaagggcaagccaagaagctgaagaagctcttcgaggctcaggagaagctctacaaggaatatctgcagatggcccagaatggaagcttccagtgagggggcacaggactgactttttaaaccattgtggactagtggctgctgtctgcctcagtgacaatgtcccagcgctcctatcatgtttacagtcacccttgggtcctaaattaagagttgtgttcatgtaggttcgtgtcgtcgttggctctgagacattgataataaatttttctcaacagtg

SEQ ID NO: 78177 - DNA, 559 bp, Homo Sapiens
cggcccggaggaaacaggaacaagaacactctgaatctgagggcttggaagcaagttgagggctggaggtatgagcagatgtcgttcacagtgcggagccccaggtgctgctcgggggcagtgactgtgccgtgttgcgtgttctaggcagcaaagctggccaagatgaagattccccccagtgagatgttcttgtcagaaaccgacaaatactccaagtttgatgaaaatgaatggtctgcccacacatgacatggagggcaaagagctcagcaaagggcaagccaagaagctgaagaagctcttcgaggctcaggagaagctctacaaggaatatctgcagatggcccagaatggaagcttccagtgagggggcacaggactgactttttaaaccattgtggactagtggctgctgtctgcctcagtgacaatgtcccagcgctcctatcatgtttacagtcacccttgggtcctaaattaagagttgtgttcatgtaggttcgtgtcgtcgttggctctgagacattgataataaatttttctcaacagtgaaaaa

SEQ ID NO: 78178 - DNA, 1200 bp, Homo Sapiens
  misc_feature (362)..(406): n is a, c, g, or t
  misc_feature (1011)..(1022): n is a, c, g, or t
  misc_feature (1117)..(1140): n is a, c, g, or t
aaaggatgtctgctcccatggtacaatgctatcgctttcttaatccagaacgttctgaggctccagaaggtatgggctgtagggggctgcacatgtacctgccgtgtctccacagcgctcccttcaccaagctgtgaggtggagctctgtgtgagactttagggctgctgttctctgctgcctgatgctggggtaacttagagccatggggaggccatacatgcaggtgcggaaggtatctagggtccgggctatgccaagaccatgggccctagcctgcaaaagagttatgtcatatagttgtttagtcgccagttgtttttgtttttgaggtggagtctcagtcttgtcacccagactgnnnnnnnnnnnnnnnnnnnnnnnnnnnnnnnnnnnnnnnnnnnnnatagcaagactccatctcaaaataaaataaaataaaacttagagcaaagtttaaaactgagtattcatattaagtgttttattttccatattagagatgggaagggaaccttatgtgtattttattttgttttcaaccatcaataaagttttctctagaatagtgttttgaacatccttgtaaaagatttgcgagttaaactattttatttactgtctgtgagagcattgggagtaggaaacgatggactccaaagtacaagggagaatacccattttcattcagctatctggagtaaaatatcaagtacttccttcaactaatcttgtctcattcactcaccttttgatatcgaaggcagaaattgcgtttacaacactgaagaccaaagctttttaattagtaaacaagcggaacatagataatggacaatgctggccactgccattctgtgttcagaaagactatgagacctgaacatatggccaagaggaaagaagagtgacgttgtctaagatgtaatgagtgctctctgagagaatcactcaattcctattggagtgcaatccttacttgagaactttattactcttgttctgtgtagnnnnnnnnnnnngtcacttccccatcagaaaagcatattctttttgatagagggtcagtgttataaataattgtcttttgaaataaaatcaaatattcatgcattgnnnnnnnnnnnnnnnnnnnnnnnngcctacagccgcggccgcaagcttattccctttagttgagggttaattttagcttggcac

SEQ ID NO: 78179 - DNA, 1002 bp, Homo Sapiens
  misc_feature (61)..(61): n is a, c, g, or t
  misc_feature (63)..(63): n is a, c, g, or t
  misc_feature (88)..(88): n is a, c, g, or t
  misc_feature (103)..(103): n is a, c, g, or t
  misc_feature (145)..(145): n is a, c, g, or t
  misc_feature (157)..(158): n is a, c, g, or t
  misc_feature (383)..(391): n is a, c, g, or t
ggtctaccttgaattgtaagagagagatgactagaatcttgtataccactgctttgacatntnttcaatgaacttaaagatgaaaatntgtaatagttgatcntgtagaggttttgtctggagccatattgatagttacttgtcntcactgtctatnntgggagcactcttgatggttaggaaaaaaatagtaaagccaagtatgtttgtacagtatgttttacatgtatttaaagtagcatcccatcccaacttcctttaaatattgcttgtcttaaaataatgaacactacagatagaaaatatgatatattgctgttatcaatcatttctagattataaactgactaaactacatcaggggaaaaattggtatttatgcnnnnnnnnntgtttttgtccttgtgagtccatctaacatcataattaatcatgtggctgtgaaattcacagtaatatggttcccgatgaacaagtttacccagcctgctttgctttactgcatgaatgaaactgatggttcaatttcagaagtaatgattaacagttatgtggtcacatgatgtgcatagagatagctacagtgtaataatttacactattttgtgctccaaacaaaacaaaaatctgtgtaactgtaaaacattgaatgaaactattttacctgaactagattttatctgaaagtaggtagaatttttgctatgctgtaatttgttgtatattctggtatttgaggtgagatggctgctcttttattaatgagacatgaattgtgtctcaacagaaactaaatgaacatttcagaataaattattgctgtatgtaaactgttactgaaattggtatttgtttgaagggtcttgtttcacatttgtattaataattgtttaaaatgcctcttttaaaagcttatataaatttttttcttcagcttctatgcattaagagtaaaattcctcttactgtaataaaaacaattgaagaagactgttgccactt

SEQ ID NO: 78180 - DNA, 1646 bp, Homo Sapiens
  misc_feature (727)..(826): n is a, c, g, or t
  misc_feature (1080)..(1097): n is a, c, g, or t
cccaccaccgcaacagcgggccgccccagccacctccgagggccagagcaagcgctgtaaaccctgacggtgggcctggcacacgcctgtattcccacaccaggtcttccgatcagtggtgtctgtgaaggtgccgcgagccaggctgaccaggcgcccgggatccagctcatccccttggctgggaacatcctccactgacttcctcccactgtctgccctgaacccactgctgcccccagaaaaaggccgggtgacaccgggggctcccagcacgtgcaccctggaagggcaggtctggcggctccatccgtggctgcaggggtctcatgtggtcctcctcgctatgttggaaatgtgcaaccactgcttcttgggaggagtggtgggtgcagtccccccgctgtctttgagttgtggtggacgctggcctgggatgagagggcccagaagaccttcgtatcccctctcagtcgcccggggctgtcccgtgcatgggttggctgtggggaccccaggtgggcctggcaggactccagatgaggacaagagggacaaggtatggggtgggagccacaattgaggataccccgagactaccaggagagccctgggctggaggctgagctgcatccctgctccccacatggaggacccaacaggaggccgtggctctgatgctgagcgaagctataggctcttgttggataaaagcttttttaacagnnnnnnnnnnnnnnnnnnnnnnnnnnnnnnnnnnnnnnnnnnnnnnnnnnnnnnnnnnnnnnnnnnnnnnnnnnnnnnnnnnnnnnnnnnnnnnnnnnnngaaaggaggcgggggcggcgcggcaaaactacactcccccgcggaccggccagcgcgacgacgcgacgcagcccacgcgcggggtaggaggggaaggaggagcggccgcccaaccagagaagaagcgaggtcagagtagataaacgtcagaacgcccaagagcgagccgccggcagctaaaaataaagagaggagagcaagaagcgcgagagaagcaaaagacgatagaagagtagcaagagccacaatacacnnnnnnnnnnnnnnnnnnaacagccacacagttcgacgacacgcgaataggcagagatgctgagacgagcagcgaacatatagaacgagagagaagaaagacagcacagacagtcgacacagactagacgcagtaggctgaatcagactactactgcagtccccagccagggcgcggagaggcaccgaagagtaggagagtcgtcacaggccgcgcggggacgaggggtggggatagatagtagttacggggctgatgtgcggctaagacacagacggaaggaacgtgagcgagacagatagaagaggggtaggacacaacgatatcgtaagatgatgcagcagcgagaacagtcgaggcttaaggtacacaggcacgagtctgacaaggtacgtgagtcgagaggagagagtagagcaacggagcatgaggaggtgaggagagcaggcgacatcagagcgtgaagccagtcagagagagaagctagcgcggaagaacccagcaggtaacgcaactgtagagatgacaacatgacaacaagagacgcgagccgctgaggccaagacg

SEQ ID NO: 78181 - DNA, 1011 bp, Homo Sapiens
  misc_feature (201)..(201): n is a, c, g, or t
caatgagggaatgatcttctcactctgtgttagtttttccagcttggctagagacatactgcagcgttaatctgatatggaggatactgccgtgagagcataccgttgtgtttgcctaaatgcgagaccacaatacaggctgtaaccccatgagtgaggaacgtccatcagcaatgtgtactaaatgcactgtctgcattntgatcgtgcagacatctgagtgtagaatccagcactgagacagatgagagcacatgaaaaggaggaataaatgtgtgcaaccacatggaggtggccaaacaggtagccagaacttgaccacagggaacagacaaaccggaggcagcaagtccctttggccctgatctggtccctgtagcacagaggtccgaagaaccgccttcagaaagaggaggcatatttggaagtgatgggaaagactttgtggacaaggatggagaacactttggaaaattgcattgtgccaagagacaacaaataatgagcaacagtgaaaatgcaattgaggaacagattgcctcaaatactactacgactcctcaaacattcatttctacggatgacttgctggactgcttggtgaatccacaagtaaccaggatagtggcacaacttttgatacaaggaagaagtttatgattcaagtggaagatgacttttaaaataatattttttaaatatatatttttaagtagtatgactaaaataaagatgaaccagcaaaaggtcagtttgcacatttgtaaatgtatttatccttaccgaattacatgtcagtctgttgccaccttctttcatgcacattcctctttggccaaactggctgctctttgtttgtaagcttttgttcctctctcatcccatacttttagcctgtgtcaaatgtaagtcccaagtatttccagcaggaagtaatgtcttcctcagcctcaaccagggaccaaccggctgcttacttttgcaaataaaattttactagaacacggcaaa

SEQ ID NO: 78182 - DNA, 591 bp, Homo Sapiens
  misc_feature (110)..(110): n is a, c, g, or t
  misc_feature (145)..(145): n is a, c, g, or t
taaaagcagcgtttcgcatttttgatggcccgcagactttggaagtatagaattcccgcgctgagcacagatggaggcacattaaaaagaaatattaagtgtgtcacccncaattgaagtgggcaaacaggttagcaagacttgnacccacaaggaacagacaaacccggaggcagcaagtccctttggccctgatctggggccctgtagcacagagggtccgaagaaccgcccctcagaaagaggaggcatatttggaagtgatgggaaagactttgtggacaaggatggagaacactttggaaaattgcattgtgccaagagacaacaaataatgagcaacagtgaaaatgcaattgaggaacagattgcctcaaatactactacgactcctcaaacattcatttctacggatgacttgctggactgcttggtgaatccacaagtaaccaggatagtggcacaacttttgatacaaggaagaagtttatgattcaagtggaagatgacttttaaaataatattttttaaatatatatttttaagtagtatgactaaaataaagatgaaccagcaaaaggtcagtttgca

SEQ ID NO: 78183 - DNA, 1356 bp, Homo Sapiens
ggaccggtccggaattcccgggatatcgtcgacccacgcgtccgaggggagcggcgaagaggcaggaagacaagaccatgtcgaagggccccgggcccggcggctccgcagcttcctcggcgcccccggccgctaccgctcaggtgctgcaggcacagcccgagaaaccgcagcactacacctatgttagatactaaagaaggcttccccacaacccatatgcatctgctttgactggtggtttctatcatcctacaaagactgtgacttattggtgagggcagctggacaactctgagagcaacttagagaaatccatcttgggcacactctataaaggagctccttctctgcaaatagcaccccagataagtgcacaaaagcaagataccctcgtggacctacacgtcctcccggcttttcaacaccctgatgcctgaagctatggttgatactaaaggaggttttcccactatccgtatgcatcttctctgttttgagattgcaactatggacagttatggctaatcctagtagattgtcttcccttttaacatcttggatgaatttgggtcacactaattgttatgtgaagatggatgttgaattgtgtagaatttgacagcagtatcaagagctgaggagaaggagaagatggaaaggagtctagcaacttaaaaatctcacagcattctctgtgaggtgaccttttttcctgttggtggctcaatttctttaggacataaagaagatactgaggcctgtgacagcctgtgacagtatcatcaagtcgtatctgaacttattgaactgtttcctccccttccttattctttattcacagtttgcttttcatgtgcataagttgactcatttgtttcctgttagcatttgaaacaccatatagccaccataagtcctgacaaaatgacttttaataaggagggggaaggtccatgtcccaccttcctatgaaattttggcctattcacaagtctacccccacataagagaagtagttatgttctgtaaagaagaggttgataaaaacctttagcatggtgttttgtgacttagaagttttaagtagtcgttcttatatctaagcatttattaattttggtaagaacattactatacgtttctgatgtcacttttactgttaagaggtgccaggcatctggtgacctgtcacttcaggatttgtgtgaatcagaccatctaaatataatataaattagagactggtacttgtatttcctgattaaaaacaaagtaacgtctgttttactattgaagtaagagtactttataatgaatacaaaaatgtatattaaatatccagtagagcatgct

SEQ ID NO: 78184 - DNA, 697 bp, Homo Sapiens
  misc_feature (630)..(630): n is a, c, g, or t
gcattgacctataaaaagtcatttaatgcatattccagatggccaatacaagctggttaggtaattagcccttgaagaattcttttataatcatataaaaatgttttgtcttgtttaaaaaaagtctactctaacaaaaacatccaccaatgggcttgcattttttccatttgcaggtttgtaagatcataaaaatatacacatatgcatctctgggcatatctctgtccactagctaatcagttttggcaatacactgcataggggtatactaccattggtttctgacattaagttagctttaagcttattggctattccaacaactggaggcagcttagaacccaatccctggaaagcacttgcaggattaactacccgtttccctgacaccttgtctatggtggtgagaggtctggggacagacttgctaatccaagggtgtcttaatgcttgagctggggtcaagcgggcaaaggggtcccagtgaagacaccttttcaagaactctataaacaagtagtcatcacaccctttcagtgctgtcccccagtctttgctgcctgggggaccccgctttttacccctacgtgagcgacccccacaagcacaaccctcccatctgcctgngtagtcacagagcagtagcggggtatgcccttggaattaataaagtacttggcacgtttggattgct

SEQ ID NO: 78185 - DNA, 1388 bp, Homo Sapiens
ataaataaataatgcttaataaactagagatatgagatgtgtaggaaatttggttaaacttttttcagatactttctggcccaaataataatttgttagcaaataatatgacccttgaactcaatggccatctattaaaagactgttgttcacactggaaaacatttaaagatgtgactatatccatgggtggattgaatcactcaaaatatattagtatccttctttagggatggttggttacagacatgtatttattcaggaggcagaaaatattccattttaattgcttattaaagaaaacattaaattctaaattattttgaggactgtgaagacttttcattagtgtaatattaggtcattgtcaaatctcccagaatgaagttctatattctctaaatatgaaagtatccagaaaggccagtggtagtaaaaagcttagtgtatataatctcaaaagggatggaatatttacaactcatatttataacatgttgaatcttctcagttatcagtagtcatcagaagtgtcaatagctttctaaataaatattaaatatctactgtcctgtagtgaaggagtaatttttagtaattttctctttacaaagtctccagtgtttccaggtaaatatttgtgaaacaaaatacagcaaactacattgttacttcagtgtattgttgccaaaaatgacaagatattatattaaaatcagtaaattttagacagattttaaaaattaattagcctacaatagaggttatatggtaacacggtgatcttctaagcagttaagtgactgactgttctggcaacaacgacttctccgtgactgaagggccctgttcatttcctgatcctgaagctcgtctctcttttgaacctccgcttgctttggtcgatggtttccctcagctttttctttgctgttcttcatcctccttgttgctggcatcatgttcactgtggctttttacaatacaggcctggaaaattccccttatggacataagttcaggtgcatttgggcttttatcgccctggctccaacggttcttttaccctttaccttggccttaaaagaaaaacgggatccctttggtgccttcctaataaacctttcccccaaacccccacttaagctgtgaacttaaccttattaaaggggcccctccccggcccctttatttttgtaagaaaaccttctctctttcccccatggaagcagggggggctcctttccactggtgggggtttaagccgtggacagcagaaatcttagggtggattcctaagacaatttttggaagtgggcccccttcaactacgagggggggcccccccacacacattgtgggggagacctttccgagacctcacttgg

SEQ ID NO: 78186 - DNA, 1071 bp, Homo Sapiens
gggtattacatttaaaatttagaaatcatcagtccagtgaccatatttatgaaaagctgtagccctccaaggtctgggaatttatcgagaagctctttgatagctctgcatttgttttcccttaggtgaacaatgtaggaaatcctcaaagtggctttgaatttaatgctccacttcagttaccagaggttaaaaatgggttttgttgtttcctgtgcattctcaaactcatttattagatagaacaatctttctatatttaatttttttaatatataggtcttaagtggtgctttaaaaagaaccctcacaagttaaaaattaagagttgtttcagtgctagatcttaccagctaaagacttgtgataccactatatagtatagttgttccagaaatcttcattttaaatagaagtgtttacaatgccttttttcccccagtattggttttcaatacctgttttcatatacaattacaaacctttcaaacctgtattccttctttatactcaggaaaatgtcaccaagcaccctcctccccagttcacaaaaggaagaagatgaagattctgtctccctgttccccctccccagttttccaaagtgtctgagcatatgcctggctgtcctcagatcatcaccatgccacatccctgctccctacttcctggcagccaagaaaagccctttctacatgctagaaggaaatacatccaaaaagttagcattggagtgttagaaactagaatagacctctccgccaccgagctgctgtgtcacgccctcagcctgctagggagtgacaagcccaagtcattcttgatccaccccttctcccaccccagatcccagggactcatcctgtgactttgtaaccacactcattcctttcaaacacagaggaggaattattgcttcatctgactttattcaaatctagttatgtattggcctaaattatttgtgcaaaatttgaaatgttttttatttaaatattagaaatagcacaaagtcatggagtttttaaaaattgttataattaagtaaaaataaagctgaattgtgtcaaa

SEQ ID NO: 78187 - DNA, 801 bp, Homo Sapiens
  misc_feature (1)..(1): n is a, c, g, or t
  misc_feature (141)..(188): n is a, c, g, or t
nccaccatacaaaaatgtgaaatatctaacaatgatctatctgaagcgggtggagcaaagcagcgccatgagcgtttgtcgttgctgtgatctgtttcaacggagaatgggctgggacatgttgtagatttgcacgatttnnnnnnnnnnnnnnnnnnnnnnnnnnnnnnnnnnnnnnnnnnnnnnnngacacgtacgcacacacgctgccgtaccccgagaccgccatccaaacaaacgaacagagactctggaaagtgaacacagcgccacgcataagaacagaagttaacctttttactcgtacatcccccatgagaaactcacgtcttaggagaaaggaactctacataaatatgcccaaaggccagggcatacggcaagccctctcatgggtgggcatgagtggacatcttcctgaaggaaggacaagcttgagagcgtcatgttttcaggcagctatggtgggaagcagggaggcacaaccgatttttccactgggagactaaccgagggctgcaactgcctcaaaatctcagtgcgagaagatgcacaggcaggacagtacacccccaaattcatgatcacagcagctggaatgtcagctctttttgcagatttcacagccgacactccccatcaggcaggttcttaagcacactgggtcatgacaggaaaggcctcacaagagcaacacggaattcactggttaagcacgtacacattcatgacagcctacaaccgtgatgagtgtcaatgtcaacaggcagttagattaaaaaggggaaaaaaccacagcca

SEQ ID NO: 78188 - DNA, 923 bp, Homo Sapiens
  misc_feature (755)..(755): n is a, c, g, or t
gctgggtggcgaattcggcacgagggctgatgcgggtgaaggaggaagagatccactcggccaacaagtgccgtctcaggctcctgcttcctgggaaacccgacaagtccggccgccccattagcttcatggtggttttcatcacccccaaccccctgagcaagatttcctgggtcaacaggttacatttggccaaaatcggactccgggaggagaaccagccaggctggctatgcccggatgaggacaagaagagcaaagccccattctggtgcccgatcctggcctgctgcatccctgccttctcctcccgggcactcagcctgcagcttggggccctggtccacagtcctgtcaactgtcccctgctgggtttctcagcagtcagcacctcccttccacagggctacctctgggtcgggggcggacaggaaggcgcagggggccaggtggaaatcttttccttgaaccggccctcgccccgcaccgtcaagtccttcccactggcagcccctgtgctctgcatggagtatatcccggagctggaggaggaggcggagagcagagacgagagcccgacagttgctgacccctcggccacggtgcatccaaccatctgcctcgggctccaggatggcagcatcctcctctacagcagtgtggacactggcacccagtgcctggtgagctgcaggagcccaggtctgcagcctgtgctctgcctgcgacacagccccttccacctgctcgctggncctgcaggatgggacccttgctgcttaccctcgaaccagcggagggggcctgtggggacctggagagccctcccgggtggcctgactgtgggggcccgggcctgtcccgcacctgttttaacccggaagaatgcccgggtggggcccaactggtgggcccccggggtc

SEQ ID NO: 78189 - DNA, 1161 bp, Homo Sapiens
  misc_feature (492)..(665): n is a, c, g, or t
  misc_feature (681)..(694): n is a, c, g, or t
  misc_feature (729)..(742): n is a, c, g, or t
  misc_feature (828)..(838): n is a, c, g, or t
  misc_feature (921)..(933): n is a, c, g, or t
  misc_feature (982)..(1002): n is a, c, g, or t
cagcatctgcagatgcgcagcctcttctctgccggtgcctctgttcggttctgttacccaaaaacaaagaccaaagaaggccaatctctcatttgaccctgtctttttaatctgcctgttttaaaagttgcgtctgtagtagccgcttgctgtgaagacacatcttgacagtccaagtgattttgtgaccagtgatttgggtcctgttttccgctcttctaagaaaaaacaaaaagaccgtgagttattgcccagcaataatcatgttgttactgtgagttagcaacatgcctgacttcctgatagcattactgttttctagttttgtttattgtatattatgtgtggttttatttggtatttatttgtgttttgaggtcttgcaatgtttttgtgtttctgatgctaataactaaagtttgtaagactgtagaatgcaaaactcggagatgctaaactgtcttattagaggaaaataaatctgattatggnnnnnnnnnnnnnnnnnnnnnnnnnnnnnnnnnnnnnnnnnnnnnnnnnnnnnnnnnnnnnnnnnnnnnnnnnnnnnnnnnnnnnnnnnnnnnnnnnnnnnnnnnnnnnnnnnnnnnnnnnnnnnnnnnnnnnnnnnnnnnnnnnnnnnnnnnnnnnnnnnnnnnnnnnnnnnncaacacacccgtgcgnnnnnnnnnnnnnnacaaaaaaattttctctaacactttttgttggggnnnnnnnnnnnnnnaaaaggggtagatcacgaggcaatcttgtttctccacaaaaaacaaaccgtggcactaaacaaagtagtgtctcttctcccccacnnnnnnnnnnngacccgggcgggaagaaacaccacaccttttttctcacaacacacccccatcgggggtttttccaaggccattcttcttctcnnnnnnnnnnnnnagaggggtgtcatatcccggggcggcctaataattataaagattcttcnnnnnnnnnnnnnnnnnnnnntactatcttagaaaggattgtgtgtggtttaaaatttactaacccccctttctccctgacaaggggggggaagccaccctaaaacaaaggagggggatgaaaaacacattcactttcccggcggcgcgaaccacataccccccgatcccccgcatgggg

SEQ ID NO: 78190 - DNA, 1084 bp, Homo Sapiens
  misc_feature (460)..(469): n is a, c, g, or t
  misc_feature (653)..(653): n is a, c, g, or t
  misc_feature (888)..(916): n is a, c, g, or t
aaggatcaaagaggctcttgtaaattttttctttatttaaacttcaataaaaatatagatttgtaactcaatagaaagacagcagtgataataactcacacatgagcagctcgcaaatttcaaagtctttggtcttcaagtcctatgtcacagcttcctcagtctgattccctccttctctgtagaattctgagaactagtttggttcacttaatcatctcaatggagatggccctttcctgccattcactcaaatctagaactcccaatatgtggctcacaaatacttcagtcatctacaaaagcatctggaaattagataattttagccagagtcagggacataaaacttctttaaagggatgcagtcaatcctggtattcaccacaaagaagatcctcatgtataaaaatgtggaatctgtgctgcttttaataatagaacctttaaggttcaaagnnnnnnnnnntgctttcctgaactacatcatttccagacacatcagccacacaaggagctgacaagacctgctgtttctattatagagaacgtgagactttaaaaccacatcaaaagaaaatggtgggagcttttctgctatgcagagaattccgcatagcactcctttgcccagactgggagacaaacatacncctccctcctgaactggatccccaccacctttccaaaggccactggacatgtctcttaaacgctgcatttcagctcttgatcattctgccctggggatcccttctctttaggttctttgttatggtctggggaaacactctgactttctatggtgttgacagcatctgagtccaatcttcttcttttcttcagttggttcaagtgggatttggattttatgtgcgctgataagannnnnnnnnnnnnnnnnnnnnnnnnnnnncaggaattttctagaattaatcctagaagcaagtaaaattaactatacaatgcttttcttcaacaataaacagcaagatcaacacatgtactggtatagctgcttagcatttttaagggaagaataaattatatggccagccagctagcaaaatagagtgagctacca

SEQ ID NO: 78191 - DNA, 910 bp, Homo Sapiens
accattaagtaatacacatcccagaatttggcactctgtgttaactgtggaggcaaataaaatttagttttaatctgtggtgagctgaatgcactacaacaccttccaagtaatctgatggtttcattctgtcgagcctcatgctgcctacaaaacaccacaatttacctggtgttttcaactttttaaggaatgaagatacaagtagacatgcaagttggaaatgtttctttagaaaggccatccagaataatgatatctgttgcagtcgtccaaatgcaatatgaaatttcctaggtgctattataaacggtgtggtgtcataccaaatgcaaaagcagttacagtatttccgaagttggagttctctttgtaggcctttcaaatacgtgtttgcattccatagaggtctgctcaccaactgtgcctctcaccactggttaaaattgaatttaagcctcattgacataagtcgtttcttgattgaactcttcagtttttacactggaatttctgtagttgtcttgaaagctgcatgtcacatcactgtacacaaagtgctttggtattactcatgcaccgtggatagtgatttctgtgtcgttttcattttcagttgtacagtaatatggaaggcaggatgtctttcctagaggctggaagaaaagtgtatcgtacattttaaatttattttagaacaagtgcatgagatgtgtcactgatttctgttatttatttgtatgttttattattcaaagtgtatgcacttttaagaagcagaatttatatttttacgtttgaaacgttttatttctgaaacagcgttgattatatagtatacagttggaattaagagaaaagtggaaaatgtaacaaaatacaataaatttattacaagatgtcctcttca

SEQ ID NO: 78192 - DNA, 703 bp, Homo Sapiens
  misc_feature (319)..(328): n is a, c, g, or t
  misc_feature (332)..(449): n is a, c, g, or t
gatgattaagaaaccattggaaagggagagcattagtacaactccaaaatgtttcttagaaaaagctaaggataaacagaaaaaggtcactggtcagaacagcaagaagaaagtagctcttgaagacaaaagttaaaaacagactttaaaaatactgtcccagaaatgtaattttatgatcccagcatgaatgttattttcatggaatacttgaagtcttacagtcacctgtaccaaacatttgaaatcaactacaagtacatgggactggtgataaatgatcctaaactatcaagtcagtttcaatttgtaggtgccnnnnnnnnnncctnnnnnnnnnnnnnnnnnnnnnnnnnnnnnnnnnnnnnnnnnnnnnnnnnnnnnnnnnnnnnnnnnnnnnnnnnnnnnnnnnnnnnnnnnnnnnnnnnnnnnnnnnnnnnnnnnnnnnnctctgtaggtgacttttaaatgattatacaatggaaataacattcattgacatttctgtggtttgaatccagagagatacttcttatagaaaaacaaatgtttatgctaaaaataacaccaaaatgtggtgaactcttaaggacttttcccttcaagtgtgaaggaaggtgtgatgaatgctgtggagaggcatctggaacagaaattcaaaataaagccttgacattaaataccccttccactgctcaaaaaa

SEQ ID NO: 78193 - DNA, 726 bp, Homo Sapiens
  misc_feature (120)..(145): n is a, c, g, or t
tgccatatagtactcacctgataactatgtaactttcgtcgtaatgtatctgtttgtgcaatatggaagctgtgagtggattcatagctttttggtttaattgtacattattgtgtgtgnnnnnnnnnnnnnnnnnnnnnnnnnnaggaccaaaattcttagctcgcttacactgttgctagtgtaaacattgttacacttaattttacagggcacaaattatggaattacttcataaattcatggtaatgttttcataaattattgcattaacatacaattgccatttaattatgaagtccatcagtattgacagaagacgttacagtgaagtgctaaaaccacactatatggtaattatattttgggttatgtagtaaatcaaatatgcatgtcattgtgacactttatgtgttaaaacatggtagataatcacattttctgggccctgtaaaatagtgttactgtaatactctgttttgcctcctgccttgtttacattaaacaggatatttggtaaatttttttgtattgaaagttgtgtaggttactgacagtgttaccagcgtctggaattcttggtccctccgtggagaaactcttcagatggtcattgtgtacctactctctcttcaaaggaagttgtgatcaagttcaactttttgtgctaacaatgcatgcaggactaagagggatgatctaaaaaataaataatgtaatttaaac

SEQ ID NO: 78194 - DNA, 1356 bp, Homo Sapiens
cgaaaggcgcaaggttagtactatgaacagtggttagcaagcaggctgtacggtcggaatcccgggatatgtcgaccacgcgtcgccatgcgtcggctgaacagacagaagagttcagcctcatagatggacgagccatcctctgtccccgtcagcagtgtctgtgtgtctgcataaaccctcctgtcctggacgtgacttcatcctgaggagccacagcacaggccgtgctggaactttctgcacactggctctgggactggcagagaggcctggtgctgccctgcgcatcagtcctcttccagtcacatctgtgccagagggctgtctgtgacctgggcccgtgcttcgaatgccacctgtctgcctgggctccaagtgggcaggaccgaggacagaacctacgaggcacacactgagggggcagtgtggctccctgcctgtcccatccccatgccccgtccgcggggctgtggctgctgctgtgcatgtccctgcgatgggagtcttgtctcccagcctgtcagtttcctccccagggcagagctccccttcctgcaagagtctgggaggcggtgcaggctgtcctggctgcgtctggggaagcctgagggacagccataacacccccgggacagtaggtctgggcggcaccactgggaactctggacttgagtgtgtttgcctcttccttgggtatgaatgtgtgagttcacccagaggcctgctctcctcacacattgtgtggtttggggttaatgatggagggagacacctcctcatagacggcaggtgcccacctttcagggagtctcccagcatgggcggatgccgggcatgagctgctgtaaactatttgtggctgtgctgcttgagtgacgtctctgtcgtgtgggtgccaagtgcttgtgtagaaactgtgttctgagcccccttttctggacaccaactgtgtcctgtgaatgtatcgctactgtgagctgttcccgcctagccagggccatgtcttaggtgcagctgtgccacgggtcagctgagccacagtcccagaaccaagctctcggtgtctcgggccaccatccgcccacctcgggctgaccccacctcctccatggacagtgtgagccccgggccgtgcatcctgctcagtgtggcgtcagtgtcggggctgagccccttgagctgcttcagtgaatgtacagtgcccggcacgagctgaacctcatgtgttccactcccaataaaaggttgacaggggcttctccttctctgggattcctctcgttgagcgacagtagcatttgcccacctggcacctgagatccctgtttactaaaccttagaaaagctgccaaa

SEQ ID NO: 78195 - DNA, 356 bp, Homo Sapiens
agagcgagactccatctctaaaataaaattaaagtaatataaaaaactgcttctcatgaaagctttggtataatcttacgaggtaacatcattgttttgcaactacggtatgtgttcaaaatgttcttctttgaccccacatttcattagatatatttttaagccattttaaaattgtttttctctgaaatttattgtgtttagtttacattgaggactgcatgctttctagtctgtatcatacattggaaacattttctagtacctgataaatgattttaggttgtttcgatgtgtacttgataaagatatcaaggaactttttctttatgctaacattaaaatttagttgaagt

SEQ ID NO: 78196 - DNA, 1641 bp, Homo Sapiens
  misc_feature (906)..(923): n is a, c, g, or t
  misc_feature (1313)..(1313): n is a, c, g, or t
  misc_feature (1338)..(1338): n is a, c, g, or t
  misc_feature (1478)..(1478): n is a, c, g, or t
tcggctaggtcgggctgggtgttgaatcggcacgaggctctacgccattggtgacgtggtggaggggcggcctgagcggacacccacagcgatcatggccgggatggctccgtggctgcagcggctcttcggcgggtcctcagatctgatggactacgacaatgttcccacgaccgtcttcaccccgctggagtatggctgtgtggggctgtccgaggaggaggcagtggctcgccacgggcaggagcatgttgaggtctatcacgcccattataaaccactggagttcacggtggctggacgagatgcatcccagtgttatgtaaagatggtgtgcctgagggagcccccacagctggtgctgggcctgcatttccttggccccaacgcaggcgaagttactcaaggatttgctctggggatcaagtgtggggcttcctatgcgcaggtgatgcggaccgtgggtatccatcccacatgctctgaggaggtagtcaagctgcgcatctccaagcgctcaggcctggaccccacggtgacaggctgctgagggtaagcgccatccctgcaggccagggcacacggtgcgcccgccgccagctcctcggaggccagacccaggatggctgcaggccaggtttggggggcctcaaccctctcctggagcgcctgtgagatggtcagcgtggagcgcaagtgctggacaggtggcccgtgtgccccacagggatggctcaggggactgtccacctcacccctgcacctctcagcctctgccgccgggcacctccccccaggctcctggtgccagatgatgacgacctgggtggaaacctaccctgtgggcacccatgtccgagccccctggcatttctgcaatgcaaataaagagggtactttttctgnnnnnnnnnnnnnnnnnnctcgaggcatctatgtccgggcgcgccagaaagaggtaatgaaatgccacatgggccatagactgtttccccgacccagcttttcttgtacaaagatggtaagatctgcccgggcctccctataggggaggtccgaattaattttccaataaagcccagcgttaaaccctgccctttaaagtgaatccgcgcctgccaaggacaccccccgggaaaaatttgtaacccacgccccttacactggaagccggggacctcttatttcttttttaggtagcagatacccaaaaaagggcaaataacttccgcttgtggacgaaaaccccccttatttgtttctctgccgcgaggggaagcgtaaaaatcccctgtcctgtgcctctgtgccanaaacccgacaaacatagaacctcanctctccctcagacctagaggcggtggcgggggttttatggccttttagccgtcgggatgtcgaaaaagaaaagtataaacgaaactcctcttctttgtttcctctccacaaggggataagccatgggaggctttctccancaacacggacccgggcccacggagaacacccatgaaactcaactggggggtcgccgtcgccaccagaggcggccaacgagcggcaccattatattaggggcgcccgcgccgcacttttctatgacagcaaaatcttctcctgagccccaccgccccccgcccg

SEQ ID NO: 78197 - DNA, 1136 bp, Homo Sapiens
tggctaggtgcgaggctgggtgttaatcggcacgaggcgagggccaggatggtgaagctgcggctcctgggcctccgctaccaggagtacgtgactcgtcacccggccgccacggcccagctggagacagcagtgcggggcttcagttacctgctggcaggtcgattcgccgattcgcacgagctgtcagagctggtgtactctgcctctaacctgcttgtgctgctcaatgacgggatcctacggaaggagcttcggaaaaagttgcctgtgtcgctgtcccagcagaagctgctgacatggctgagcgtgctggagtgcgtggaggtgttcatggagatgggagctgccaaggtgtggggtgaagtgggccgctggcttgtcatcgccctcatccagctggccaaggctgtactgcggatgctcctgctgctctggttcaaggctggcctccagacttcaccccctatcgttccactggacagagagacccaggcacagcccccggatggtgaccacagccctggcaaccatgagcagtcctacgtggggaagcggtcaaaccgggtggtgcgaaccctccagaacacgccgtccctgcactccaggcactggggagctccccagcagcgggagggacggcagcagcagcatcacgaggagctgagtgcgaccccaaccccctggggctgcaggagaccatcgcagagtttttgtacattgcccggccgctgctgcacttgctcagcctgggcctgtggggtcagaggtcgtggaaaccctggctcttggctggtgttgtggacgtgaccagcctgagcctcctgagtgacagaaagggcctgacccggagggagcggcgggagctgcggcgccggaccatcctgctgctctactacctgctgcgctctcctttctacgaccgcttctccgaggccaggatcctcttcctgctccagttgctggccgaccacgtccctggcgttggcctggtcacaaggccgctcatggattacttgcccacctggcagaaaatctacttctacagttggggctgacagacctcccggaaggagggtgtggggaggggtggggcagggagcccctcttccctaataaaactgactccggcagcg

SEQ ID NO: 78198 - DNA, 699 bp, Homo Sapiens
taaggctaggtggaggctgggtgttgaattcggcacgagggtcggtgccgagggcaggatggagaagctgcggctcctgggcctccgctaccaggagtacgtgactcgtcacccggccgccacggcccagctggagacagcagtgcggggcttcagttacctgctggcaggtcgattcgccgattcgcacgagctgtcagagctggtgtactctgcctctaacctgcttgtgctgctcaatgacgggatcctacggaaggagcttcggaaaaagttgcctgtgtcgctgtcccagcagaagctgctgacatggctgagcgtgctggagtgcgtggaggtgttcatggagatgggagctgccaaggtgtggggtgaattgggccgctggcttgtcatcgccctcatccagctggccaaggctgtactgcggattctcctgctgctctggttcaaggctggcctccagacttcaccccctatcgttccactggacagagagacccaggcacagcccccggatggtgaccacagccctggcaaccatgagcagtcctacgtggggaagcggtcaaaccgggtggtgcgaaccctccagaacacgccgtccctgcactccaggcactggggagctccccagcagcgggagggacggcagcagcagcatcacgaggagctgagtgcgaccccaccccctggggc

SEQ ID NO: 78199 - DNA, 1021 bp, Homo Sapiens
  misc_feature (685)..(778): n is a, c, g, or t
  misc_feature (835)..(874): n is a, c, g, or t
aggagcgccggagcccgcgctgggggctgccggggaccaggcccggccggacgctgcaggctcgctgcatggagaagaaggcagctcggccccacgcccggcgctggccagcgcgacgaggcccagaggggcgggggagtccaagcccgcccggcccggctgctcctggggggcgctttcctgcccctcccctcctctgctccttcctgcatggacctctgccgttcctgctcctgctccggaagccgccgccgccgccgcgcttgccttgccccctctttttggcctccccctatttcctaggatccgcattcgggtggactctgccccaggagcttgacagggtgcagggcctcttctggcctctctcctctctctgtccatccactgtgccccttgggccacgccgacgcgctcggtgccacgtgccgtgtggtgtctgtgccgcagacgggccatctgcccgctcacttgtggactttgcgctcccggttgtcgcgccctgtgctcccgaccagcagccccaccgtccacctcctcgcccccgcttctcttacgcccccgccccgggcgtgctcctcgcgccctcggcctctctgtccttgctcttttgtaaggggcgggcccggctcagtgacctgtgctgctctgtatggtgccgtgtgtaagaataaacccgttggannnnnnnnnnnnnnnnnnnnnnnnnnnnnnnnnnnnnnnnnnnnnnnnnnnnnnnnnnnnnnnnnnnnnnnnnnnnnnnnnnnnnnnnnnnnnnaaaagaacccattgcgttgtacaacgaattcccgatctccctattgcctacttgttnnnnnnnnnnnnnnnnnnnnnnnnnnnnnnnnnnnnnnnngctaaactacgccgtatgtatagccgctcctccacaccccccctgtcgctctaccgcctcttatccccccaaacacgttccctaatatacatcccccgcccgccgatgtgccccgccatagtagccgctttgtcattatctgccgcc

SEQ ID NO: 78200 - DNA, 1266 bp, Homo Sapiens
  misc_feature (1085)..(1085): n is a, c, g, or t
  misc_feature (1099)..(1099): n is a, c, g, or t
  misc_feature (1104)..(1104): n is a, c, g, or t
  misc_feature (1107)..(1107): n is a, c, g, or t
gcgccggagcccgcgctgggggctgccggggaccaggcccggccggacgctgcaggctcgctgcatggagaagaaggcagctcggccccacgcccggcgctggccagcggacgaggcccagagggcagggggagtccaagcccgcccggcacaatttgctgcctgggtggatgcagtggtgtttgtgttcagcctggaggatgaaatcagtttccagacggtgtacaactacttcctgcgtctctgcagcttccgcaacgccagcgaggtgcccatggtgcttgtgggcacgcaggatgccatcagcgctgcgaatccccgggttatcgacgacagcagagcccgcaagctctccacagatctgaagcggtgcacctactatgagacgtgcgcgacctacgggctcaatgtggagcgtgtcttccaggacgtggcccagaaggtagtggccttgcgaaagaagcagcaactggccatcgggccctgcaagtcactgcccaactcgcccagccactcggccgtgtccgccgcctccatcccggccgtgcacatcaaccaggccacgaatggcggcggcagcgccttcagcgactactcgtcctcagtcccctccacccccagcatcagccagcgggagctgcgcatcgagaccatcgctgcctcctccacccccacacccatccgaaagcagtccaagcggcgctccaacatcttcacgtctcggaagggtgctgacctggaccgggagaagaaggctgccgagtgcaaggtggacagcatcgggagcggccgcgccatccccatcaagcaggggatcctgctaaagcggagcggcaagtccctgaacaaggagtggaagaagaagtatgtgacgctctgtgacaacgggctgctcacctatcaccccagcctgcatgattacatgcagaacatccacggcaaggagattgacctgctgcggacaacggtgaaagtgccagggaagcgcctgccccgagccacacctgccacagccccgggcaccagcccccgtgccaacgggctgtccgtggagcggagtaacacacagctgggtgggggcacangtgccccccactcngccancancgcatccctgcactctgagcgccccctcagcagctcggcctgggctggcccgcgccctgaggggctgcaccagcgctcctgctccgtttccagcgccgaccagtggagtgaggccaccacttccctgcccccaggcatgcagcaccctgccagtggccc

SEQ ID NO: 78201 - DNA, 1927 bp, Homo Sapiens
  misc_feature (1857)..(1857): n is a, c, g, or t
aaattaggctaggtacgaggcctgggtgtgtaattcggcacgagggttcgcgctctccttctccgcggccatccgggccgagatccagcgcttcgagtccgtgcatcccaatatctacgccatctacgacctgatcgagcgcatcgaggatttggcgctgcagaaccagatccgggagcacgtcatctccatcgaggactcgtttgtgaacagccaggagtggacgctgagccgctccgtaccggagcttaaagtgggcatagtggggaacctgtctagcgggaagtcagccctggtgcaccgctatctgacggggacctatgtccaggaggagtcccctgaaggggggcggtttaagaaggagattgtggtggatggccagagttacctgctgctgatccgagatgaaggaggcccccctgagctccagtttgctgcctgggtggatgcagtggtgtttgtgttcagcctggaggatgaaatcagtttccagacggtgtacaactacttcctgcgtctctgcagcttccgcaacgccagcgaggtgcccatggtgcttgtgggcacgcaggatgccatcagcgctgcgaatccccgggttatcgacgacagcagagcccgcaagctctccacagatctgaagcggtgcacctactatgagacgtgcgcgacctacgggctcaatgtggagcgtgtcttccaggacgtggcccagaaggtagtggccttgcgaaagaagcagcaactggccatcgggccctgcaagtcactgcccaactcgcccagccactcggccgtgtccgcccgcctccatcccggccgtgcacatcaaccaggccaccgaatggcggcggcagcgccttcagcgactactcatcctcagtcccccccacccccagcatcagccagcgggagctgcgcatcgagaccatcgctgccttcctccacccccaaacccatccgaaagcagtccaagcggcgctccaacatcttcacgatatgcgccactggtttccaacttttcatcaacaaaaaagccctttccaactcctttccaaattacaagaccacatggtgacacaccgcacctctggacatgccccctgtgaggggccggcaggcgggccgggccactgagcactgctctcacatccacaatcggtcgccgagctttccactccataaaccccaccggcaactttttggaactaaacaccaaccaacccggaaaggacttagtatcggcccggtaccctgacgcctgtagggaccggatcggggagaccaataccctcgggaccggaaaccatcattagggcatcgccgtgtcctggggataaaatcaaacgcccacccttcacacactccaacgacgcgccgaaactaactactccaccccgccctccaccaatacctataaggtctcccacgattgacgagcggcgcctaccggcgcgcacgcccaatcacaaaactaagatttcctatatccccccactgcgccgtcccttacgttaacgagcgtgaccctgattccagttgcgagtagaaggggaccaccacaagccacagaatacccagccgaatggggagtacatctcactatcccccccacccacgatcagccccttttccgactcgaactactatatatccaactaccactcccctcatgacgaattggactttgagtaggtggaagcctggcaccctttctgtagcggaccttcatccgtcgccactccccataaggtcctaaaacatccaaaaaaatataagccatatgtagagatggaggccaagcgcgcatctatatgcatacatcactagttcacaacccacgacaaaacgcaaaantgttagtaatgaccaaccttatagaccacactatacaaaaagagtgtcctagtccgcgctccctgcgcag

SEQ ID NO: 78202 - DNA, 528 bp, Homo Sapiens
cggcggcagcgccttcagcgactactcgtcctcagtcccctccacccccagcatcagccagcgggagctgcgcatcgagaccatcgctgcctcctccacccccacacccatccgaaagcagtccaagcggcgctccaacatcttcacgctaatgaaccggcggccggaaggctgtttgcccaaggcgacacagagggttagctggcccagctagagtcagagcccaggcctccccgtcgccttccggctctttttccgttaccccactgccgaggggaaaattcatgctttccacccaccgctgtgattggtttaacaaaggcttagccatcttttcctgggcttcaccacgctgcctcgttcctccctctcagatatgtgccactgtttccaacttttcatcaacaaaaaggcctttccaactccttccaaattagaagaccagttggtgacacacagcacctctggacatgccccctgtgcggggccggaggcgggccgggccctgggactgctctcagatgagaa

SEQ ID NO: 78203 - DNA, 1246 bp, Homo Sapiens
gggtccggaattcccgggatatcgtcgacccacgcgtccgctctcgtctgaactcccagagttcctctgagcaccagcccagttcctgtctccctcctgatgctcctgtttctgacctggagaaagccaacaatctccaaaatgaagctcagtgtgggcactcagctgacaggcataacgctgaagcctggaaacaaacagagccagcagaacagaagctcaacagtgtgtggattatgccacaacagtctgcggggcttgaagagtcagcccctgataccatcccccccaaagagagtggcgttgcttactatgtggacctgcatggacatgcttccaaaaggggctgcttcatgtacggaaacagctttagtgatgagagcacccaggtggaaaacatgctatatccaaagctcatctccttgaattcagcccacttcgacttccagggctgcaatttctcagagaagaatatgtatgcccgagaccgtagagatggccagtctaaagagggaagcggccgtgttgcaatctacaaagcctcagggataatccacagctacacacttgaatgcaactacaacactggacgctcagtaaacagcatccctgctgcctgccatgacaatgggcgtgccagcccccctcccccgccggctttcccctccagatacactgtggaactatttgagcaggtgggacgagctatggccattgcagccctggacatggcggaatgtaatccgtggccccgaattgtactgtcagagcacagcagccttactaatctacgggcctggatgctgaaacatgtacgcaacagccgaggcctaagcagcactctgaatgtgggtgtcaacaagaagaggggccttcgaactccacccaaaagtcacaatgggttgcctgtctcctgctccgaaaacaccttgagtcgggcacgaagttttagcaccggcacaagtgccggtggtagcagcagcagccaacaaaattctccacagatgaagaattcccccagctttccttttcatggcagtcggcctgcagggctgccaggcctgggctctagtacccaaaaggtcacccaccgggtgctgggccccgtcagaggtaagccagtctgggagcccctgcaacatgtgttcggttgtctggggcattgctgggggaagtaagagcttgaagatatactgttggcccaggaccaaggggtgaatcaataaaattagtttgtagcagaaaa

SEQ ID NO: 78204 - DNA, 774 bp, Homo Sapiens
acaaacccggcaagcagtccaaactgcaggatccccgccaatatcgtcaggctaatggaagtgctaagaaatctggtggggactttaagcctacttccccctccttacctgcttctaagattccagccctttctcccagctctgggaaaagcagttctctgccctcttctagtggtgacagctctaacctccctaatccacctgctactaaaccatcgattgcttctaaccctctcagcccccaaacaggaccacctgctcactctgcctccctcatcccttctgtctctaatggctctttgaagtttcagagcctcactcatacaggtaaaggtcaccatctttcattctcaccgcagagccaagcgcttcgaaatcgctaggtctcaacctgaagacacccctgaaaacacagtgaggaggcaagagcagcccagcatcgagagtacatctccgatttcaagaactgatgaaattagaaaaaacacctacagaacattgaatcaaggtgccaagggcaccaggaccatccatactcccagcctcaccagctacaaggcacagaatggaagttcaagcaaagccaccccatccacagcaaaagaaacctcttaaaggtcaaatcctattaggcacaagtcggagttacatttaaaaaaaattaacagtctacaacaactgttttcacaagagaatgtaacatattgctgtatcgtttgaggcttaatgctaaatatgtgctaaatactggattaatagatttcagtaaagctc

SEQ ID NO: 78205 - DNA, 737 bp, Homo Sapiens
  misc_feature (18)..(18): n is a, c, g, or t
  misc_feature (119)..(119): n is a, c, g, or t
tccatgcaaacaaagcgncagggaaatgacccacagggatcgcagctgcagggagggccagggaggttgggggtgggagtgaatgctaaaagcagatcgtccagtgcccttttcagtgntaccggcctctcaccaagcagtcctccatgtgagcaaccccgagacaaaaatgctaagtgggatcaagagagcagcactcggagagggtgtttgccagtctgagtgtcccgcggtgcccgccaacccgcttcctgactgacctgagcaaggtcttactaagcagtcccatctctgtgggaggcatgcaacgcgtgcagggagttcaggtgccggtcggcgtagccaggcctggaggccccccaggcaggaggccgcccaaaggcggggccggcgtctcgcagactaggggctgggggcggccacagacggcctcgaaaccacagcccttaccccaatcccacgagccccgccaacgaaccacaggtgctgggctttagagaacatgggaaggcggccccagacctggcgggaacgcctttccctcagagccaggccccggccccgtctgggaagctcatcttgcgaagctgagggagctcagggcaaaggccaggctagcgcggaccggaaggggccgaggctgcacgggcctctgccagaacgctcaggacatcccggcctgggtttacaacgctgttaggaaaattaaccaatgaataaagcaacgttcagtgcgc

SEQ ID NO: 78206 - DNA, 881 bp, Homo Sapiens
ggcacaggtggaccaacggggggtgtgactgtgggcaccgtgcgcggaggcggaggctcatctggttcccaccctccgtgccgctggatgccccaggattttctccaaccggggtcccggcttggagccctccttggtgcgagctttggctcagcaatggggaaagcgggaatgggtctcgcccttgtggctgcctggtggaagcggcggttttgacacacgaatagtcgtggggagcagatccagagagggcgcatttgcaataataacgcttagtttatctctgccagaggggcgggaacaggccttcgcgctggtgtcttacatcagccaagcaaaccatgggcgcgattggagccaaccacctccagcggggttttgctccagacttaaggtgcacggaaaccggagcattcagcccttcatggatgcctcccgaaaacctcaccatgccagtgacacgactgcaaacggcgggtggcacatgccgggggcttgggatgggagggtttggaaacctcgctccaaggacgccctcagccaaggagcttcggctccttcctagaatttctagaagcacttttggagggaccgagggcttccggccgggcccagaggaatttgagcgcttgcccgggcaggcagaagcgcagcctgggagtggagaggctgctgggccacattccggcccagcttcccccgctaggccccagccctgccgcggcgccccaggaagcacctccgaaaacaaagcgctgtggtttcagcccaaggttaaagtccaccgcgagcgtgttttttcccccctccagaatttaagagcgatagcgtttttccaaataaaccgccaataaatcagctcccgggggcgcctgttgaag

SEQ ID NO: 78207 - DNA, 1379 bp, Homo Sapiens
  misc_feature (563)..(563): n is a, c, g, or t
  misc_feature (1222)..(1282): n is a, c, g, or t
catcatctaatggcttcccagtgtatttcacaataacagctattggcaacaagtaagcaatgctggcacatgggtacatgccaacttgcaagcacacaatagtccttaacagggaccatcaccaccctcataatccctcagtttggaggagcctgggcctgccccaagtgtatagtaatcctacccagccagatccaaactctagtcaaagaagggtccccaaatgtcccagaacactgacctctggagggtgggtggggggtggaaagggacagggaagggcagcaggttgtagggtctgctgtcaaaggtcccattccggaccgtccttctccatcccaccccccgggtctccattgccgcggccctgccccaccactttcagctgaggggtagttcggagctccatggtcccttccctagagcggccgccccctcgggcctccccagagccttcgaagagccgcgtgaggaaacggggacctgcccggggcagcagatctccagcggtgaagacgtagagcaccgggttgacgctagaactgaagaaggccaaggccgtnagttcccgctcgcgccgcctggccggctccgcacagcttcgccaaggccccttccggtggagccagcgctgcgaccgcctgcagaaggttgactgcgtggtagggggcccagagcaagccgaagacaagcacgatggcgctcaccagccggcccacacgcgccccgtgccgcccggagccccagcgggcgccccgaagccgtgccagcgtcacgctgtagcagccgagcatcagcccgaaaggaagcacgaaagcggtcagagtctccaggctcaggtgggcggcggcgtggaccggcgacgggtggcacagctggcatacgcggtccctccacaggtggcggtagacggcggccgggacgaagagcaacagggccgccagccagaaccgccagcagaaggcggcggccaaaggccgggctgcccagccgaggcgccaggaaggggcgggtgactgccaggcagccctgcaggctgagcaggcccgtgagcagcacgctggcgaacatgctgagcgcgcacacgtaatacacccccttgcagcccgcctgggcccagcggccaggcctggcggggtcaggaagggccacaaagaacgggggggagcaacagcaccggcgcccgtcggccaagggccagggggcagcaacaaagcggggnnnnnnnnnnnnnnnnnnnnnnnnnnnnnnnnnnnnnnnnnnnnnnnnnnnnnnnnnnnnnacccaacaaaaacccgggttgcccaggggcaacccccccaaaaagaggggcccccccgagtggacaaagggaaaagggggttgtgggcccggggggg

SEQ ID NO: 78208 - DNA, 948 bp, Homo Sapiens
caagtagctacatatatggcattcagcccattgtttctcctttagttggtagtgctggccctgccatatacctagctgcctgcttgtatttctttggtctttgcacagaggctgatctcacactacactcagcgtggaattagcttttgtctcgcagagcagctgttttagatgggaaccaaggtgtcatgctcttgccctcaagcatctgcttagggttaaatgatgaaccggcggggtgctgagatttggcaatggtggctgcatccttaagcaggccttcaagactccagagagacatgaatttattcaggtgaggaagggagcacacaggagacagagaggactcagttgggccactcgagacccagcccagtctctgcttcctctgccaacatctttgctaagccttcagccagaacagctatggtctgcgaagattaagtaaagaaaaatagcagctcctcctcctccttgtccatcagtgtgtgctcagactgttgtttgatcctgtgggctgggggtcgtgagcggcataccagtgtcctgcctctcttcttcttgatctcagcctgggcgcgcgcccgggcccgctgcaaatgctcctcctgtaggatcttttgcatctggagcttctcttctcgaagtctgatgcgccgctccttctcctttgccctctcggcctgctcgatcttgacctggggcacgtgctccaggttctctagcagctcatccagctggtgctcaatgatggtcagcatctgcacggtgcccaggttggcctcctgctgggtgccggtgcagtgccggtacacatccagcaccttgcagttcaggctctctagcagcttatccttgccagacacaatatatgtgtttaagaagcagacacatttgttgaataaaagaatgaagcaatggatgaggcgtgggggcaccaagctggct

SEQ ID NO: 78209 - DNA, 758 bp, Homo Sapiens
  misc_feature (60)..(60): n is a, c, g, or t
ctagtgttgtatggtgtatgctgcctaagagcaaagcatcctctgcacaaaagaaaatanctgtagtggcttcgattttaattagaattttctccctggtgtttctttatagactaaagcaaaatcttttaagtttcttactacaggtaaaagctatgtgcaagaacctcaaaatgctaaaatctagcataatgccttagatctgtttttaagtcttgtatattcctacatagctgtccgatgtattatatttgtatagtgaattgtgtacaatttttgaataagtgcatcatcacttaacctttatgttgtttgaatagtgatgatgatacatttcttcagacatttaactgtcatttttttcctttgtcatttgtgagttttatttgtacagttcctcatgaagttgcatctgagatgtgtgtatatgaaaagattatacaagggtaaaattaagcaatatattaactatggttcttcaggagaaagcttacagtgtttcaggttgtgatttattttcaaaatggagttgactctgaacatcactttgttcacctgcattgatgtttgtatttctagtgtgagcagtttatgcaaaggtagatatattcagagaaattttaaatacatttatgcaagttaatattgctttgctgatgctatttgcttatttgatgttaaataatgctattgtaaataaagaattctgttgttattgcatcatttaataaattttaatgccttcggaattaacatgg

SEQ ID NO: 78210 - DNA, 744 bp, Homo Sapiens
cattcccagaatttcaggggcatcgtgggtttggtctagtgattgaaaacacaagaacagagagatccagctgaaaaagagtgatcctcaatatcctaactaactggtcctcaactcaagcagagtttcttcactctggcactgtgatcatgaaacttagtagaggggattgtgtgtattttatacaaatttaatacaatgtcttacattgataaaattcttaaagagcaaaactgcattttatttctgcatccacattccaatcatattagaactaagatatttatctatgaagatataaatggtgcagagagactttcatctgtggattgcgttgtttcttagggttcctagcactgatgcctgcacaagcatgtgatatgtgaaataaaatggattcttctatagctaaatgagttccctctggggagagttctggtactgcaatcacaatgccagatggtgtttatgggctatttgtgtaagtaagtggtaagatgctatgaagtaagtgtgtttgttttcatcttatggaaactcttgatgcatgtgcttttgtatggaataaattttggtgcaatatgatgtcattcaactttgcattgaattgaattttggttgtatttatatgtattatacctgtcacgcttctagttgcttcaaccattttataaccatttttgtacatattttacttgaaaatattttaaatggaaatttaaataaacatttgatagtttacat

SEQ ID NO: 78211 - DNA, 582 bp, Homo Sapiens
  misc_feature (211)..(211): n is a, c, g, or t
ttcaaaactatgcatcaatcccacagcctatgacagaccttccagaacttgatacaccagaatctgccagaataatagctttcatctcttggcttagagagcagagaccatttttcccaatactttatgtaataagggatgagagtccaatgaaagcaaactcccttcaaaacatgatagaagacagaacagaatctgcattatcatattnatggaactccctgttgcatatacagcaacaagtgaataaatgaatgaatgaagaaatttgacttatttttaaggaatgtcacgatagtgcagaatacctggaaatgtgtaataccttctttttctattatgtttgtggactaatgtgatgattgagatgttctcactgtgatttcaacaacctatagcaaacaaaagaccacagcagagaatcaaacatgcaactctgaaatactgtatttttcaaatcagaatatagctacgtatgattggatacttttttcttgccaattatgtttgagttgttatggattaaaataagaatattgcagaggcaaagtacattttgtaaaataaagatttctgtgttct

SEQ ID NO: 78212 - DNA, 364 bp, Homo Sapiens
tgccgggacatgttctccaaaatggccacttacctgactggtgaactgactgccaccagtgaagactataagctcctggaaaatatgaataaactcaccagcttgaagtatcttgaaatgaaagatattgctataaacattagtaggaacttaaaggacttaaaccagaaatatgctggactgcagccttatctggatcagatcaatgtcattgaagagcaggtagcagctcttgagcaggcagcttacaagttggatgcatattcaaaaaaactgggtaaccgtttttacttctgttttgatgtaataaagactgcttcttgccagcatattcttagtaaacataatagttaacatttaaaaa

SEQ ID NO: 78213 - DNA, 1858 bp, Homo Sapiens
  misc_feature (85)..(119): n is a, c, g, or t
aaacttggcactgactcatatagggcgctagcgtcggccatttcgaacgacgagcgcagcgagtagtgagcgaggaagcggccgnnnnnnnnnnnnnnnnnnnnnnnnnnnnnnnnnnncagtcgacggtaccggacatatgcccgggaattcggccattacggccggggaaacagcgcggggtccgctatggcggcggcagccgagggcgtactggcgacccggagtgatgagcccgcccgagacgatgccgccgtggagacagctgaggaagcaaaggagcctgctgaagctgacatcactgagctctgccgggacatgttctccaaaatggccacttacctgactggggaactgacggccaccagtgaagactataagctcctggaaaatatgaataaactcaccagcttgaagtatcttgaaatgaaagatattgctataaacattagtaggaacttaaaggacttaaaccagaaatatgctggactgcagccttatctggatcagatcaatgtcattgaagagcaggtagcagctcttgagcaggcagcttacaagtcggatgcatattcaaaaaaactggaagccaagtacaagaagctggagaagcgatgagaaacttatttctatgggacagagtcttttctttttcaatgtggaagaatgtcttataaaacctgaatcctgaggctgatgaattgtgaaaattcctcaaaaggaaattatgctggtcatcacaggaacatctcaacgttcgagtaaactggaggactgtggctattcctgaaccttctttgagacagaatccctcagaatctcacacttataacttcctaccttttacttgaatgctttgccatattcaggacagagactctcacaaagttcagaaaacagctggacttaccagtaaaatcaaatgagaggacctattttctctggtagtggttgattactacattattttcttaagtggctggttttttagttactatgtaaatggtcgtttttctgttaatgatgctaatgtgttgtaaacaagattctaaatttaaaaaggaaaacaaaacaaacttgttctttgcagcttatcaccttgtgaatgtcggtaacttacttttccataatattgcaaataacataaaatcttaaaataattccaagctgagtcttctagattgagcagaaatggtgaaaggagtattgataacttggcgtatgtgatgggcccctcttgtttattttctatgtgagtcacattgacatgcgatcagtttgggaaatgtgatgaaaacaaagactagatgggtatgtgtgtttatgtgttgggtagggaggtgacgattgccactcataaaataaaggattttataaaataccttcctactgtgtatgtaggatttggggggatcttagggacctaatcgacttctttgcacactaaaaacatcagacaatgggacatactgactgaccagtctacgttgaaagataggcagccccttaccccagaacaccacattaaccacctggggaaggtgtctgaagtcccccaattacatatccccaaacagttttcttacttcctgttttctggacattttccccctcctgcttcccaaaccagtcattcatcttattccctcctgatccttccttggaaatggttggctgtggggcctcccttctcatctttaaaactggtcacctttccaaaacaacccttcccaacacctggcttgccaataagcccattctcttaaaaaaggtataaccctggcccccttaattaccccccctgccttaaaaaaaccacctgctaacaggaaacttaatatacgtggacaccccactg

SEQ ID NO: 78214 - DNA, 1234 bp, Homo Sapiens
aaacctaggctaggtacgaggccgggtgttgaatcggcacgaggggaaaatggcggtgtctacagtgttctcgacttcgtcgctgatgcttgctctgtcaaggcacagcctattgtctcctttgctcagtgtgacatcattcagacgcttctacagaggtgacagcccaacagattcccaaaaggacatgattgaaatccctttgcctccatggcaggagagaactgatgaatccatagaaaccaaaagagcccgcctgctctatgagagcagaaagaggggaatgttggaaaactgcattcttcttagtctttttgctaaagaacatctgcagcacatgacagaaaagcagctgaacctctatgaccgcctgattaacgagcctagtaatgactgggatatttactactgggccacagaagctaaaccagccccagaaatatttgaaaatgaagtcatggccctgctgagagactttgctaaaaacaaaaacaaagagcagagactgcgtgccccagatcttgagtacctctttgaaaagccacgttgagctgtgctccacggcctggcatgggggttcagtctgtggatggtaactacttatgatggacgttagccttgcttccggcttcttagatgcccagctgccctaccccagaccactggtcctgcctcaagtgatggacataaccctctcctaggacatacatgtaaatgcacaatgtgactcattctcatacttttttgttcagctctgagcctcaaaagtgatttgtcagcagcgctggcatgcaggctttgcctggctgctatctctagaggcaagtctgccacgagagggcactgcaggcgaagcagttgtgcttgctcattgcctcagcccaagtgtactcaaagaaaagaggcagccagctgtgcgtgctgtacggaaagcctcccgccctccctgcagctccccgccctcagtggcccagggctttgttgaagtggaactccccacttccaacctggtatggctccttctgcgaagggaagctgatcccagcctcctgagctgaatccttcaaaggcacagcaggcagaatgagggccacaggcaggagtggtgtgggcacactgcttaggagtcaacatcttcatcattgggctttctttaaaacgtgcactttgtaatttgaaagagaattattaaagcatactgaaaaaaggaaatttacaatttcccagccctcac

SEQ ID NO: 78215 - DNA, 1352 bp, Homo Sapiens
ccgggaccccttaaccctcgggtgtgacctttgaccctgtgtgtctgtcggggatctccagagtgagcgtctccggcatcttctaccaggggaacaagctcaacttctctttttccgaggactccgtgaccgtggaggtcacagctcgagcagggccctgggctcctcacctggaggctgagctgtggccatcccagtcccggctctccctgttgccaggacacaaggtctcctttccccgctcggctggccggatacaaatgtcacccccgaagctgcctggaagttccagctccgagttccctgggaggactttttcagatgttagggacccgctccagagccccctctgggtcaccctgggttcctccagccccaccgagtcactcactgtggaccctgcctctgaataatcaggaacggtggcttcagagacgtctcttgggccttccctctggccacgtctgcacccacccctcctgggcaccctcctagcctgccatccctcacctgcagccaggctctcagggaaggtccatgctgcttgccctgagttcaaggctttctgcctgtagcctggactcccgtggacccctcgtgggcaggtggcttccccgtggcatctccacaccgcctctgcctgcccctgtggactgatgctatcgcgcacggtcccacgaccccaccccgagctcctgaagccggggtctgagcctgcatcacctctggcctctcatcccccactctcctgagagcagtggtcacagcggccggccgctctgctgagaaggcagagaggcaggctcaggcctcagcgtggacagcagggataaggggcacgaaggacggggactcggccccttcagaattcctcaggactctcaggtgcagctttgccaaaaaggaacttttcatgtcatgcagttgaggggacttagtctcaatcccaggctcctcttgactctgggcagctttaatcaggttgggcagcctctgctacagcgtggagtgggatggctctcttccctcagccacgccgcttgtgaggacagaggtgggggagtgggaagtgggaagtcaccagagaacaggagagggatttgagggcgcgaccccagcgctctccacggaccagccagagggactggagccaggtgtgcatgggttcaaggccctggccctgcccagcctctgtcttgggagctcagccccagggttcggtcgtcagcagtttcccaagaacaagatgtgatggcatctgctgctgaaaccctgatgaggaccaggccccctgcaccgctgtcagcctgaggaattaaagctttggtgctgggaagagcattattcctctg

SEQ ID NO: 78216 - DNA, 700 bp, Homo Sapiens
tattgtccaaactggcaaatacaaataacaataaattgagacatcatctagcagaagctatttcacgttgctgtatgtggggcaggaatagagtggccttcggtgagcacaaagcagtggctccactagtgcgttatctgaaatcaaatgacaccaacgtgcatcgggcgacagctcaggccttgtaccaactctcagaagacgccgataactgcatcaccatgcatgagaatggtgcagtaaagcttctactggatatggttgggtcccctgaccaggatctccaggaagctgcagctggttgtatatccaatatccgcaggctggctcttgctacagagaaggcaagatacacttgaaatttaaatggacattacaagctatcaaattctacatgacacaggacatgtcactcccatggccagaaagcctaaattgggaaacagttgttagcaaaccctttcaaccatctaaatgaaaacacacaaattgaaaatgcacagaatgtttttcatctgaaaattgcatggagacttttgtttctatttaatgttttcgagatatgacatgtgataagatggaaagccaataaacctgtgataagtttctaagaatatgagaatatacgtatatgatgtatttttagttcagtgatgcttttgtatttgtggcgattttaataaaggatatggccttcccc

SEQ ID NO: 78217 - DNA, 364 bp, Homo Sapiens
caaggatggcacagagcccatgctcgtgctcaagtaggcctggctgccacagggctgcatggacctcagggggctgtggggccagaagctgggccaagccctccagccagagttgccagcaggcgagtgcttgggcagaagaggttcgagtccagggtcacaagtctctggtaccaaaagggacccatggctgactgacagcaaggcctatggggaagaactgggagctccccaacttggacccccaccttgtggctctgcacaccaaggagccccctcccagacaggaaggagaagaggcaggtgagcagggcttgttagattgtggctacttaataaatgttttttgttatgaagtctaaaa

SEQ ID NO: 78218 - DNA, 1033 bp, Homo Sapiens
  misc_feature (104)..(119): n is a, c, g, or t
  misc_feature (138)..(174): n is a, c, g, or t
catgtgatataggaccagtggtacaaaaagcaggctggtccggtccggaatcccgggatatcgtcgaccacgcgtcgtagttctagatcgcgagcggcaccacnnnnnnnnnnnnnnnnggagacaggttcttgcggnnnnnnnnnnnnnnnnnnnnnnnnnnnnnnnnnnnnnatcaagggctcactgcagccgggacctccgggttcaagtgatcctctgtgtctcagtccccgtgagaacaatcccccagcgcccagctacatatttttgggtgggatacaggggtctcattctggtggcctaggcttgtctgggaactccggggctcaaggggatctggtagccttagcctcctaaagtgctggggataataggcatgagtcactgtacccggcctgctctaccgcttttaaggacgcttatgatcacattgcgcctacccagagaacccaggtcgtctttctattttcaggtcagctgattagccaccttagttccatctgcaactttagttcccactggctgtgtaacctaacatagtcacaggctctggggactgtcacgtggacatctttgggaggccgttattctgcccaccgcaccctccgttcatcccctgccctgccgggcacctcgctctaccccaggaaaatgtgagctcgttttcctgctcggcatgtgctccccctaaggctctgctcctccctgggcctgaaagttccttctcagcctgagagggggcccttcgatctcaggcatgactcagcccggctgatgcctctgcagtgctgagtcaggatttggggccggctctcttgggtctgtccccttttcccaggtactgccttacaaagctgtggccaggaagtggccggtataaaggatgcccaaggtctttgtacgtgtgtaggagttagcgtgtttgatattgttaatataataataattattttttagagtactgcttttgtatgtatgttgaacaggatccaggtttttatagcttgatataaaacagaattcaaaagtg

SEQ ID NO: 78219 - DNA, 658 bp, Homo Sapiens
  misc_feature (118)..(229): n is a, c, g, or t
aggcatgagtcactgtacccggcctgctctaccgcttttaaggacgcttatgatcacattgcgcctacccagagaacccaggtcgtctttctattttcaggtcagctgattagccacnnnnnnnnnnnnnnnnnnnnnnnnnnnnnnnnnnnnnnnnnnnnnnnnnnnnnnnnnnnnnnnnnnnnnnnnnnnnnnnnnnnnnnnnnnnnnnnnnnnnnnnnnnnnnnnnccctccgttcatcccctgccctgccgggcacctcgctttaccccaggaaaatgtgagctcgttttcctgctcggcatgtgctccccctaaggctctgctcctccctgggcctgaaagttccttctcagcctgagagggggcccttcgatctcaggcatgactcagcccggctgatgcctctgcagtgctgagtcaggatttggggccggctctcttgggtctgtccccttttcccaggtactgccttacaaagctgtggccaggaagtggccggtataaaggatgcccaaggtctttgtacgtgtgtaggagttagcgtgtttgatattgttaatataataataattattttttagagtactgcttttgtatgtatgttgaacaggatccaggtttttatagcttgatataaaacagaattcaaaagtg

SEQ ID NO: 78220 - DNA, 609 bp, Homo Sapiens
  misc_feature (68)..(179): n is a, c, g, or t
tatgatccattgcgcctaccagagaacccaggtcgtctttctattttcaggtcagctgattagccacnnnnnnnnnnnnnnnnnnnnnnnnnnnnnnnnnnnnnnnnnnnnnnnnnnnnnnnnnnnnnnnnnnnnnnnnnnnnnnnnnnnnnnnnnnnnnnnnnnnnnnnnnnnnnnnnccctccgttcatcccctgccctgccgggcacctcgctctaccccaggaaaatgtgagctcgttttcctgctcggcatgtgctccccctaaggctctgctcctccctgggcctgaaagttccttctcagcctgagagggggcccttcggactcaggcatgactcagcccggctgatgcctctgcagtgctgagtcaggatttggggccggctctcttgggtccgtccccttttcccaggtactgccttacaaagctgtggccaggaagtggccggtataaaggatgcccaaggtctttgtacgtgtgtaggagttagcgtgtttgatattgttaatataataataattattttttagagtactgcttttgtatgtatgttgaacaggatccaggtttttatagcttgatataaaacagaattcaaaagtga

SEQ ID NO: 78221 - DNA, 592 bp, Homo Sapiens
  misc_feature (14)..(14): n is a, c, g, or t
  misc_feature (55)..(55): n is a, c, g, or t
  misc_feature (73)..(73): n is a, c, g, or t
  misc_feature (86)..(161): n is a, c, g, or t
ccagagaacccagnttcgtctttctattttcaggtcagctgattagccacctagnttccatctgcactttagnttcccactgctgnnnnnnnnnnnnnnnnnnnnnnnnnnnnnnnnnnnnnnnnnnnnnnnnnnnnnnnnnnnnnnnnnnnnnnnnnnnnccctccgttcatcccctgccctgccgggcacctcgctctaccccaggaaaatgtgagctcgttttcctgctcggcatgtgctccccctaaggctctgctcctccctgggcctgaaagttccttctcagcctgagagggggcccttcgatctcaggcatgactcagcccggctgatgcctctgcagtgctgagtcaggatttggggccggctctcttgggtctgtccccttttcccaggtactgccttacaaagctgtggccaggaagtggccggtataaaggatgcccaaggtctttgtacgtgtgtaggagttagcgtgtttgatattgttaatataataataattattttttagagtactgcttttgtatgtatgttgaacaggatccaggtttttatagcttgatataaaacagaattcaaaagtgaa

SEQ ID NO: 78222 - DNA, 852 bp, Homo Sapiens
  misc_feature (22)..(22): n is a, c, g, or t
  misc_feature (36)..(36): n is a, c, g, or t
  misc_feature (86)..(86): n is a, c, g, or t
  misc_feature (99)..(308): n is a, c, g, or t
  misc_feature (519)..(519): n is a, c, g, or t
  misc_feature (596)..(684): n is a, c, g, or t
  misc_feature (687)..(712): n is a, c, g, or t
  misc_feature (726)..(744): n is a, c, g, or t
gagggagcctgatcctatcgtntgacgccaggcacntacgggctgagcaacgcgctgctggagactccctggaggaagctgtgctntgggaagcagctnnnnnnnnnnnnnnnnnnnnnnnnnnnnnnnnnnnnnnnnnnnnnnnnnnnnnnnnnnnnnnnnnnnnnnnnnnnnnnnnnnnnnnnnnnnnnnnnnnnnnnnnnnnnnnnnnnnnnnnnnnnnnnnnnnnnnnnnnnnnnnnnnnnnnnnnnnnnnnnnnnnnnnnnnnnnnnnnnnnnnnnnnnnnnnnnnnnnnnnnnnnnnnnnnngaaaaacccactctcataacagaagtgcagactcattgctagattcagtgcccttgagtgtgccagaggtcctctgtgtttgagacaatcctgtgtgtgccaggaggctccgtgtgcaccaggggctctcagaatcccgcttacccagctggagaccatgcctctggcagccccatctcagccagccctgctctctccctcttccctccanggtgaggcaaacttcataggaatctgtacctgaatgtgagctcctgataataaaactctgaggctttggtgagcgcnnnnnnnnnnnnnnnnnnnnnnnnnnnnnnnnnnnnnnnnnnnnnnnnnnnnnnnnnnnnnnnnnnnnnnnnnnnnnnnnnnnnnnnnnccnnnnnnnnnnnnnnnnnnnnnnnnnnaaaaaatgtggggnnnnnnnnnnnnnnnnnnnaaaaagatttttataaacccttttttttgtgggggcgggggcccccccaaaagggaaagggaaaacagggggccaaaatgttgtttcccaaaaagaaaacccgggggc

SEQ ID NO: 78223 - DNA, 807 bp, Homo Sapiens
  misc_feature (41)..(87): n is a, c, g, or t
tcaggtaggtacgaggctgggtgtttgaattcggcacgagnnnnnnnnnnnnnnnnnnnnnnnnnnnnnnnnnnnnnnnnnnnnnnncacaaaaaaggaagatttgggctgggcgcagcggctcacattgtaatcccaaagtgctgggattacaggcgtgagccaccatgcctggccgaaaaacccactctcataacagaagtgcagactcattgctagattcagtgcccttgagtgtgccagaggtcctctgtgtttgagacaatcctgtgtgtgccaggaggctccgtgtgcaccaggggctctcagaatcccgcttacccagctggagaccatgcctctggcagccccatctcagccagccctgctctctccctcttccctccaggtgaggcaaacttcataggaatctgtacctgaatgtgagctcctgataataaaactctgaggctttggtgagcgcatttcgaggcctttcccttgtatgcagggtgccagtgggagctgctatgtctcctgtgcagccagacaccctggacgaggcccttcccacactccccctttcctcatggcttcttcagcaccacatgtggatgcctgtgggtcagtccatctgtccatgggcatggtgccgctgtgagagaccccatgcgcgtgggatgtggtagatgctgattatgggggcagccaccataccggtctatcaggtcgcatgggggccctgggcgggggcggcggctggatttgtgggtatgggggcggtttttgggcgaaggttggttgttaccggtcggtgggccgcaggac

SEQ ID NO: 78224 - DNA, 1183 bp, Homo Sapiens
  misc_feature (830)..(830): n is a, c, g, or t
  misc_feature (1033)..(1093): n is a, c, g, or t
gctgtacgctccgggttacgggatgcggaggcggtgagtgcgcggcttccggggctggccgactccgctagtggccctggacggcctgggctcgggggctccgggctctggtgctctgggtgcgcggaccgggccaggctgcttgaagacctcgcgacctgtgtcagcagagccgccctgcaccaccatgtgcatcatcttctttaagtttgatcctcgccctgtttccaaaaacgcgtacaggctcatcttggcagccaacagggatgaattctacagccgaccctccaagttagctgacttctgggggaacaacaacgagatcctcagtgggctggacatggaggaaggcaaggaaggaggcacatggctgggcatcagcacacgtggcaagctggcagcactcaccaactacctgcagccgcagctggactggcaggcccgagggcgaggtgaacttgtcacccactttctgaccactgacgtggacagcttgtcctacctgaagaaggtctctatggagggccatctgtacaatggcttcaacctcatagcagccgacctgagcacagcaaagggagacgtcatttgctactatgggaaccgaggggagcctgatcctatcgttttgacgccaggcacctacgggctgagcaacgcgctgctggagactccctggaggaagctgtgctttgggaagcagctcttcctggaggctgtggaacggagccaggcgctgcccaaggaatgtgctcatcgccagcctcctggatgtgctcaacaatgaagaggcgcagctgccagacccggccatcgaggaacagggtggnggagtacgtgcagcccatgctgagcaagtacgcggctgtgtgcgtgcgctgccctggctacggcacccagaacaacactatcatcctggtagatgcggacggccaccgtgacttcactgagcgtagcatgatggaccaggacctctcccactgggagacccgaaccctatgagttcccactgcagagctaaccccacctcctnnnnnnnnnnnnnnnnnnnnnnnnnnnnnnnnnnnnnnnnnnnnnnnnnnnnnnnnnnnnnaacgggaaaaaactttccttttggccataacgggcatatggacactggccccccgtgggctttgggcccagaaaatttaccccgggaaat

SEQ ID NO: 78225 - DNA, 576 bp, Homo Sapiens
ggagatcctcagtgggctggacatggaggaaggcaaggaaggaggcacatggctgggcatcagcacacgtggcaagctggcagcactcaccaactacctgcagccgcagctggactggcaggcccgagggcgaggcacctacgggctgagcaacgcgctgctggagactccctggaggaagctgtgctttgggaagcagctcttcctggaggctgtggaacggagccaggcgctgcccaaggatgtgctcatcgccagcctcctggatgtgctcaacaatgaagaggcgcagctgccagacccggctctcgaggaccagggtggggagtacgtgcagcccatgctgagctcgtacgcggctgtgtgcgtgcgctgccctggctacggcaccagaaccaacactatcatcctggtagatgcggacagccacgtgaccaacactgagcgtagcatgatggacaaggacctctcccactgggagaccagaacctatgagttcacactgcagagctaaccccacctctgggcctggccagtgggctcctggggggccctgcctttgaggggcacttgtgg

SEQ ID NO: 78226 - DNA, 1077 bp, Homo Sapiens
  misc_feature (818)..(833): n is a, c, g, or t
gcacgaggtgcatgtggccctttcccaaatcctctggaagaaggaatctcatttgatatttattcaacattcatagagccccccacaatattggatacggaaatgaagaggttggatcaagaacaaggccctgaggagtctcagccagaaactgacacctcagacatggatcctttagttggtttcaccattgaagatgtaaaatcagtgctggatcaagtcacagatgacattttaatcggcattcagaccgagataaacgaaaaactgcaaatacaggaagaggcctttaatgcacgaatagaaaaattgaaaaaggcctaaggacttggtacaaggagagtgatgctaaacttcacagaaacaaacaaaaccagccagaataacagactctctggagcgtcgtgtctccatcacttagttgtgaaaggaaaaccaagccccactttttattttcctaagtaattagaaaagtattggtcccaattttgctatctcccatcccataacagcctctgaatttattgcaccaagtgtaatgagaacattttgtatacaagagtttgaaaaattatatataaaaatacaattacttttatgatagtcctttgacgttttgactaataaatcctattcatcttcaaggagaatgaagtcaactttttaaataaccagaaataaagaaagatgataataacttcatccattttgacccaaacggactgccacgttactggaacactgtgaaaacataccagtaccacactattgaggataaaatttgttaaacaatagcaattcaaatgcatatatgaggnnnnnnnnnnnnnnnnactgaaatcatttggttttcttatttaaacgtttcagtgtgaaaccaattttctgaaattatataatgcagtttgaagcactttaatttattctgtactgtatttgttatttctaatcttgttactctcccaggagaatacatgacctatataaaaagaagcaatgtataaatggttattaaagaccaacctatatatagattgtaaaaatcttaaatacaaatcaaacttttagagttcccag

SEQ ID NO: 78227 - DNA, 703 bp, Homo Sapiens
ggtcctatggctgctactttgtcccagccttttcggggctgtatgcaccttactgggaacccagtgcaagagggataatctgtggtctcactcagttcaccaacaaatgccatattgcctttgctgcattagaagctgtttgtttccaaactcgagagattttggatgccatgaatcgagactgtggaattccactcagtcatttgcaggtagatggaggaatgaccagcaacaaaattcttatgcagctacaagcagacattctgtatataccagtagtgaagccctcaatgcccgaaaccactgcactgggtgcggctatggcggcaggggctgcagaaggagtcggcgtatggagtctcgaacccgaggatttgtctgccgtcacgatggagcggtttgaacctcagattaatgcggaggaaagtgaaattcgttattctacatggaagaaagctgtgatgaagtcaatgggttgggttacaactcaatctccagaaagtggtattccataaaacctaccaactcatggattcccaagatgtgagctttttacataatgaaagaacccagcaattctgtctcttaatgcaatgacactattcatagactttgattttatttataagccacttgctgcatgaccctccaagtagacctgtggcttaaaataaagaaaatgcagcaaaaagaatgctataga

SEQ ID NO: 78228 - DNA, 934 bp, Homo Sapiens
gcggccgcctgggagccgtccggcgcagcagtttctaggtccccactgtccccgccgtcccgccccttcgcgtcccgggaaccggctggcttccgagccgcactcgccgatcctccaggcatgccccgctacgagctggctttaatcctgaaagccatgcagcggccagagactgctgctactttgaaacgtacgatagaggccctgatggacagaggagcaatagtgagggacttggaaaacctgggtgaacgagcgcttccttataggatctctgcccacagtcagcagcacaacagaggcgggtatttcttggtggatttttatgcacccaccgcagctgttgaaagcatggtggagcacttgtctcgagatatagatgtgattagagggaatattgtcaaacaccctctgacccaggaactaaaagaatgtgaagggattgtcccagtcccactcgcagaaaaattatattccacaaagaagaggaagaagtgagaagattcgccagattttagccttatatgtaattccttcacatttgggcagcatggacgagaaggaagaatttgcaagtttggcctttatataagcatgtgttgcaggtgctgtttgatttttctaaggtatttttagcccttgatcccctttgcttgcgagaggtggggaactgctcactgacagcttctctgtaacctgcagtaccagtggatcattcttgattttgttttcattagtgtcatttctttgtcattgaggacttttccccttacaacagtaacaccattttttgaagagcaaaacttataatacctcctgggattgtgagctagtcattcagcctgtgtaaccatgtggaaataaaaattgacgaccaatgtattatatggacaacttttgctttgagtaataaacttgattgtaggaaaaaaaa

SEQ ID NO: 78229 - DNA, 684 bp, Homo Sapiens
gggcaaacatcacataatataagcaaaactatgcgttcactatagttacacacattcttttttgctttatacaagttgtaaacaaatttaagtgaataaaattcttggctaaagacatattccagaactctgacatatacttttcagagttaggacaaaagaaagcatatgtaacttccattagaccatcatcatatgaaaaagtaaattagcatatgctgcttttaaattaacatctgtcattttatttaaacacttttttaggttatagctaaaatgatatttatctgaagttttaggaaagaacagaagctgaccatacaaatcttgttcataaccacattggccacttaaattaaaaatataacaaaattgaaaaatagacatataaccaaaaagattctaaatcttgtaaggaaaaaaagaataaagctgccaataagttattttaaaatactttagatgtagataacatttataatactgggtttcataatatcttgttttatggcttcctaatgttgacattttaaagtaacagattacttcaaaataaacccaaagcatttagtgttttacaatttcaatttcattcttttgtaaatttcagacaccaaaaaattcacatcaagggttacaaaacaggcatcttcagaatataatttgtttggcaggcagaatggc

SEQ ID NO: 78230 - DNA, 660 bp, Homo Sapiens
gatgctaaccagcaagtgtcagagtgtacgcatgcacacgtcagaaagcagcttgccattggcgtaaacaagtcaccagagccctggaaaggagggaactgctgttagttctggtgtgtaaatcagtcaagcctgccatgatcacctcacacttgattcagttaagcctaagcagaagtgtccctgcctgtcaggtcccccggctcagtgagagaatcgcccccgtcattggcttaaaatgtgttctagccttggcgttcaaaaagaacaccactgactttgtggacgaagtaagagccatcatccccagagtccccagtttaagtgtaccatggcttcaagacagaattgaagattctggggaaaatttagagactgaacctctggaaagccaagacagagagcttttggacacttcatttgaagatctgtcaaaacctaagagaaagcttgctgacggtcggcaggcttctgtaacattacaaccccttaaaataaagaaactgattccaaaccctaataagataaggaaaccacccaaaagtaaaaaagctactccaaagtaatcttgcataaacttgtcatgtcatacagtttgtgaaaggacaccttgtaaagaagccttgaaactaataaaatgagtaaaacatacataaaaaa

SEQ ID NO: 78231 - DNA, 1305 bp, Homo Sapiens
  misc_feature (608)..(608): n is a, c, g, or t
cagtcgacggtaccggacatatgcccgggaattcggccattacggccggggagtggctggtaggcagtggctgggaggcagcggtccaattagtgtcgtgcggcccgtggcgaggcgaggtccggggagcgagcgagcaagcaaggcgggaggggtggccggagctgcggcggctggcacaggaggaggagcccgggcgggcgaggggcggccggagagcgccaggtcctgagctgccggagcggcgcctgtgagtgagtgcagaaagcaggcgcccgcgcgctagccgtggcaggagcagcccgcacgccgcgctctctccctgggcgacctgcagtttgcaatatgactttggaggaattctcggctggagagcagaagaccgaaagcgaccccgataacgtggtgttgtgcctgctggcggcggacgaggacgacgacagagatgtggctctgcagatccacttcaccctgatccaggcgtttttgctgcgagaacgacatcaacatcctgcgcgtcagcaacccgggccggctggcggagctcctgctcttggagaccgacgctggccccgcggcgagcgagggcgccgagcagcccccggacntgcactgcgtgctggtgacgaatccacattcatctcaatggaaggatcctgccttaagtcaacttatttgtttttgccgggaaagtcgctacatggatcaatgggttccagtgattaatctccctgaacggtgatggcatctgaatgaaaataactgaaccaaattgcactgaagtttttgaaatacctttgtagttactcaagcagttactccctacactgatgcaaggattacagaaactgatgccaaggggctgagtgagttcaactacatgttctgggggcccggagatagatgactttgcagatggaaagaggtgaaaatgaagaaggaagctgtgttgaaacagaaaaataagtcaaaaggaacaaaaattacaaagaaccatgcaggaaggaaaactatgtattaatttagaatggttgagttacattaaaataaaccaaatatgttaaagtttaagtgtgcagccatagtttgggtatttttggtttatatgccctcaagtaaaagaaaagccgaaagggttaatcatatttgaaaaccatattttattgtattttgatgagatattaaattctcaaagttttattataaattctactaagttattttatgacatgaaaagttatttatgctataaattttttgaaacacaatacctacaataaactggtatgaataattgcatcattt

SEQ ID NO: 78232 - DNA, 1065 bp, Homo Sapiens
cagtcgacggtaccggacatatgcccgggaattcggccattacggccgggggtcctccagtggctggtaggcagtggctgggaggcagcggcccaattagtgtcgtgcggcccgtggcgaggcgaggtccgtgggagcgagcgagcaagcaaggcgggaggggtggccggagctgcggcggctggcacaggaggaggagcccgggcgggcgaggggcggccggagagcgccaggcctgagctgccggagcggcgcctgtgagtgagtgcagaaagcaggcgcccgcgcgctagccgtggcaggagcagcccgcacgccgcgctctctccctgggcgacctgcagtttgcaatatgactttggaggaattctcggctggagagcagaagaccgaaaggatggataaggtgggggatgccctggaggaagtgctcagcaaagccctgagtcagcgcacgatcactgtcggggtgtacgaagcggccaagctgctcaacgtgtaagtggggcccttgcgcgtcccccatggcaccccttcccgccccagcccgggtaggtcgccttggctgggcgcccctcgcccggccgcgccacttcctgtcgcttttctgcctgtctcggaaagggacgggggcgagcgggccgggcggtgacccccaggggacccgggcagggggttgagggcgcccgcgctttctgcgctcactggccccgcccgctgtccccagcgaccccgataccgtggtgttgtgcctgctggcggctgggccgaggacgacgacggagatgtggctcttgagatccacttcaccctgatccaggcggtttgctgcgagaacgacatcacatccttgcgcgtcaggcacccgggccggctggcggaggtccgtgtcttggagaccgaacgcttggcccgagggtgagcgagggcgccgagcagccgcggaacttgaactgggtgctgggtgacggattcacattacatctcactggaaggatcttgcttagtcaactattggttttgccggcaagtcgtacctggatcagtggtcagtgataatttcgc

SEQ ID NO: 78233 - DNA, 527 bp, Homo Sapiens
atacgtataaactgatccagcagtcccactcctgggtatgtacaccacagaaagctatgtccaccgagacattggcaagaatgtttctaaccacacgctgactgtagccccaaacctgaaacaacccaaatgtccatccaccaacccaaatgtccatccacagttgaagctacagtgaagtcacagggtcgaatactactgcacagcaacgaatatgaatgaaaatatcgctatgcacagcaacatggataaatttcacagacatgaggtcaagcaaaagaggtcagagtcctcatcatcaagagagaattcattgtatgattctcttcctacaaaaagtacagaaataagcaaaactgatccatggtgttagaagccaggggaacagttaacaggggagggatactggggaggggcatcctggagtgctggtctacctcatctgggtgttgatttcacgagtattgtcagtttgtttccagactccctgttggagatgtggaaataaaaaccacctaaacaagagc

SEQ ID NO: 78234 - DNA, 1749 bp, Homo Sapiens
  misc_feature (114)..(114): n is a, c, g, or t
  misc_feature (124)..(124): n is a, c, g, or t
  misc_feature (126)..(126): n is a, c, g, or t
  misc_feature (185)..(185): n is a, c, g, or t
  misc_feature (284)..(284): n is a, c, g, or t
  misc_feature (1038)..(1059): n is a, c, g, or t
  misc_feature (1095)..(1661): n is a, c, g, or t
ccgtcttacggacaaagcgtctagaccccgcacaagtgaacggagagtgatgacgccggccattggaagcccttgcctccattgtcgggaccctgactccgcatgcgacagcgnatgtgcagtngnccctgtgaatcgtcccacagcgaagaaagcaggagcgcgtggggtcgcctcccgcccanccgttccgggagccacgcccttgcccgccagccggatttgacagcagctcccgggagaaccagcaccccaatctcctcggggggcgccggcgagccccnccaaaccagacaagttatacggggacaaatgccggcagcagccgccgcaatttgaagatctcgcgctccggccgctttaagggagaagaggaaagtgcgcgccacgctgctcccggaggcgggcaggtccccggaggaggcaggctttcctggtgacccccacgaggacaagcagtagccccaatagcctgcgcgctccaggactgcctacccagcactaccccaaacccccagttccaaacccgagacttcaggcccgcccccttacgcgttgtctcagttccaccaaattcagaatatttacacaatgccttcatgattttatgtgtttctggaaattgaagtgtcaattgggttctcaatatttcatgactccaaggatgcattaaatatttatttgtggtaagagaagatacctgccgcggaggagggtggcataattattttttttcgaaaaagctattctggggccctggccccctggctcctgtcacagctcagcttgaactctgtagcctctcaaatgaagaaggtggctgttatttaggactctgtggaaagcaaatcacagtgctgtttttaatgcctgagaaatgcactttaggggtagacttataccttaagtgaaggagtgggggaggaagaagcattcttaagtagaagcattttaaaataaggcaggattgcttttaatgttaaactacaaaactgtacagcctattttagtgtggactattaaaacccttgcactgtnnnnnnnnnnnnnnnnnnnnnngcctacagccgcggccgccctcgtgccgaattcttnnnnnnnnnnnnnnnnnnnnnnnnnnnnnnnnnnnnnnnnnnnnnnnnnnnnnnnnnnnnnnnnnnnnnnnnnnnnnnnnnnnnnnnnnnnnnnnnnnnnnnnnnnnnnnnnnnnnnnnnnnnnnnnnnnnnnnnnnnnnnnnnnnnnnnnnnnnnnnnnnnnnnnnnnnnnnnnnnnnnnnnnnnnnnnnnnnnnnnnnnnnnnnnnnnnnnnnnnnnnnnnnnnnnnnnnnnnnnnnnnnnnnnnnnnnnnnnnnnnnnnnnnnnnnnnnnnnnnnnnnnnnnnnnnnnnnnnnnnnnnnnnnnnnnnnnnnnnnnnnnnnnnnnnnnnnnnnnnnnnnnnnnnnnnnnnnnnnnnnnnnnnnnnnnnnnnnnnnnnnnnnnnnnnnnnnnnnnnnnnnnnnnnnnnnnnnnnnnnnnnnnnnnnnnnnnnnnnnnnnnnnnnnnnnnnnnnnnnnnnnnnnnnnnnnnnnnnnnnnnnnnnnnnnnnnnnnnnnnnnnnnnnnnnnnnnnnnnnnnnnnnnnnnnnnnnnnnnnnnnnnnnnnnnnnnnnnnnnnnnnnnnnnntggttcgacctggcgcttacggatactgtcggctttctccttcggaaacgtggggctttccaaactcacgctgtagacctcattcggg

SEQ ID NO: 78235 - DNA, 1256 bp, Homo Sapiens
gggccagtaactataacggtcctaaggtagcgaggcctgggtggcgaattcggcacgaggcggcaacagccgcctccctcgcgtcccccactccccctctgtctctccaaggaaaactaggcccctgcgcggccaacgcccaggatccgcaagctgcgcgcccacgagctccaccagcccattggagaaaagttactgttcagtccctgaaggcttgtgccataaaagagtgggagacattcccagggagtttcagcacccatttggactttcacaatcagagatggcagcggtaaaggcatcaacatcgaaagctaccaggccttggtattctcatccggtatatgcaagatactggcaacattatcatcaagcaatggcttggatgcaaagccatcacaatgcctacaggaaggccgtggaatcctgtttcaatcttccatggtacttaccttctgcgcttcttccccaaagctcttacgataatgaggctgcgtatcctcagtccttctatgaccatcatgtggcctggcaggactacccctgcagttcttcacatttcagaagatctgggcagcatccacgttacagcagtaggatccaggcatccacaaaagaagaccaagctttgtccaaagaggaagagatggagactgagtcagatgcagaggtacgaatgtgacctgagcaatatggaaatcactgaagagctccgccaagtactttgcagagaccgagaggcatagagaagaacgacggcggcagcagcagctggatgcagagcgcctggacagctatgtgaacgctgaccacgacctgtactgcaacacccgccggtcggtagaagccccaactgagaggcctggtgagcggcgccaggccgagatgaagcgtttgtacggggacagtgctgccaagatccaagccatggaggccgcggtgcagctgagctttgacaagcactgtgaccgaaagcagcccaagtactggccggtcatccccctgaagttctgagctcagggcacagggtacccagcctctccttcttccttttgggtacacgctctttatctctccttctgtacatttcttagggaaaggggactttgtactggggtacaggcatgttcaccacagtcccagtgggcctgtcacggggtggatgtactatgccagccacttggaggtctgcaggacatgttctgttgccaacatgataaattttctcctgacataaaataattttgcatatacta

SEQ ID NO: 78236 - DNA, 1934 bp, Homo Sapiens
  misc_feature (1710)..(1837): n is a, c, g, or t
  misc_feature (1862)..(1886): n is a, c, g, or t
cggcagtaactataacggtcctaaggtagcgaggcctgggtggcgaattcggcacgaggcacgcgcgttgtttccgcggtagtcagggcagtttctaccgcaggcttaaggaggcttcgggctcctgggatttctgtccgcgctcctggccctcgtccttcgcgccagagcaggttcgcaaactcctcagacccttctgctcccggccgccgctttccgccggggcgagacccccaggttcaaaatgagcctgtttggaacaacctcaggttttggaaccagtgggaccagcatgtttggcagtgcaactacagacaatcacaatcccatgaaggatattgaagtaacatcatctcctgatgatagcattggttgtctgtcttttagcccaccaaccttgccggggaactttcttattgcaggatcatgggctaatgatgttcgctgctgggaagttcaagacagtggacagaccattccaaaagcccagcagatgcacactgggcctgtgcttgatgtctgctggagtgacgatgggagcaaagtgtttacggcatcgtgtgataaaactgccaaaatgtgggacctcagcagtaaccaagcgatacagatcgcacagcatgatgctcctgttaaaaccatccattggatcaaagctccaaactacagctgtgtgatgactgggagctgggataagactttaaagttttgggatactcgatcgtcaaatcctatgatggttttgcaactccctgaaaggtgttactgtgctgacgtgatataccccatggctgtggtggcaactgcagagaggggcctgattgtctatcagctagagaatcaaccttctgaattcaggaggatagaatctccactgaaacatcagcatcggtgtgtggctatttttaaagacaaacagaacaaggcctactggttttgccctgggaagtatcgaggggagagttgctattcactatatcaaccccccgaacccccgccaaagataacttcacctttaaatgtcatcgatctaatggaaccaacacttcagctcctcaggacatttatgcggtaaatggaatcgcgttccatcctgttcatggcacccttgcaactgtgggatctgatggtagattcagcttctgggacaaagatgccagaacaaaactaaaaacttcggaacagttagatcagcccatctcagcttgctgtttcaatcacaatggaaacatatttgcatacgcttccagctacgactggtcaaagggacatgaattttataatccccagaaaaaaaattacattttcctgcgtaatgcagccgaagagctaaagcccaggaataagaagtagtggctggagactctggctcagccagagttgtttctctccactctgcctcatctctgtacgaatttgggtcccagccttgttgggttgtcagccatggacatggatttcaacccctggagaaaacgatgtcattgttcagcagctgagagcccaggcgtccgcggcgacttgccgtctctccattccactgcctgttgcagagtttttctgtaactaagggggttgaggttattgtagacgttagattgcgggcaccgccagggattttgcagcgcttcagtgtacgtgttagagaatattggaaaagcgtctgtgagccccgtgctgtattttgtaataaagtcttttgcagattgnnnnnnnnnnnnnnnnnnnnnnnnnnnnnnnnnnnnnnnnnnnnnnnnnnnnnnnnnnnnnnnnnnnnnnnnnnnnnnnnnnnnnnnnnnnnnnnnnnnnnnnnnnnnnnnnnnnnnnnnnnnnnnnncttgtggggcccccctcggcccccnnnnnnnnnnnnnnnnnnnnnnnnngggccccggcccccaaaaagaaaggaaacggggcaaaagttttttccc

SEQ ID NO: 78237 - DNA, 758 bp, Homo Sapiens
  misc_feature (500)..(626): n is a, c, g, or t
  misc_feature (635)..(648): n is a, c, g, or t
  misc_feature (673)..(683): n is a, c, g, or t
atcaaattttcaaaatctatattcaattattgattcaaaaaataagaaataaaatcaattagccagatttgtatactttaaagctaccacagtgagatttttctcttaaaaacatgcatgtttttatactgtattctttaatatttatattgtacagttacatgtgacacatattacatatgactaatttatatgtagcaacagggattaaagaagacctcttttaattgtaccacttgttataatgctattatttaccctgattcaaatgtaactacttacaatttttaaacatttttatttctgtattctttaaaatattaaggcaatggtttttcttgaaattatattttgccctatgtattctatttttattcacactggatttattatgataattatatcaaagtgattatttttaccctgacttttaaaagtcaactgtttcagaagtcaagttgattgtggatctaaaatataaattcaatgtgttcatagcnnnnnnnnnnnnnnnnnnnnnnnnnnnnnnnnnnnnnnnnnnnnnnnnnnnnnnnnnnnnnnnnnnnnnnnnnnnnnnnnnnnnnnnnnnnnnnnnnnnnnnnnnnnnnnnnnnnnnnnnnnnnnnncttggccgnnnnnnnnnnnnnnaaaaaattttttaaacctttttttnnnnnnnnnnnccccaaaaggaagggaacaggggaaaaactgtttcccaagaaaacccgggcaggaaaaagggttggattcccccc

SEQ ID NO: 78238 - DNA, 657 bp, Homo Sapiens
ctgggggtattgctggtgggtaagtagggaaactactgtatcctgatgaattacaatagtctgcagaagagaaaatctctttctaaagtgtaacaaatttctgattttaattacatgataacatcttagcaattttaaaattagcaactgaggtgtcctgctgccgtagaaagctttctggactaaaagtccagttcgccaattagatattgacttactatttagactttggtaaattactaatctctgtttaccttttattttttgtaaagatttatgtataagatcatttccatctccatgtccatctgaataacttctttttcttagggttgtgaaaataaaatcagtgcatggtataatgttaatgtgttaaccttaatcggaattaactttggacttttaacttcagaggttttccaagtctcattaacagtttgtttcttcaaaaacatcaagaatataatccatgcagaaatgtgacctttggatttcaatttgttcagaagaaaccagttaattcttaaaaaatcacattatattattttattccaaaaacgttttgaattgtattaaataacagatgtattcaaattattaattatatgtaatattgaattactgaatactataataaaacattcatgaaattatatt

SEQ ID NO: 78239 - DNA, 1000 bp, Homo Sapiens
tgaaacgaacgcagcatttcagggactggatgaggagcttacggttttttacagaatcatcagtatcttggaagaaaaagaatgttaagaaataacaaaacaataattattaagtactttcttaatctcattaatggagctttcttggttcttggacttttattcatgggatttggtgcatggctcttattagatagaaataatttttttaacagcttttgatgaaaataatcacttcatagtacctatttctcaaattttgattggaatgggatcttctactgttcttttttgtctattgggttatataggaattcacaacgaaatcagatggctcctaattgtgtatgcagtattgataacatggacctttgctgttcaggttgtactttcagcattcatcatcacaaagaaagaggaggttcagcaactatggcatgacaaaattgattttgtcatttctgagtatggatctaaagataagcctgaagatataaccaagtggactattctgaatgccttacagaaaacattacagtgttgtggccaacataattacacagactggataaagaataagaacaaagaaaattcaggacaggtgccatgttcttgcacaaagtcaactttaagaaaatggttttgtgatgagccactgaatgcaacttaccttgagggttgtgaaaataaaatcagtgcatggtataatgttaatgtgttaaccttaatcggaattaactttggacttttaacttcagaggttttccaagtctcattaacagtttgtttcttcaaaaacatcaagaatataatccatgcagaaatgtgacctttggatttcaatttgttcagaagaaaccagttaattcttaaaaaatcacattatattattttattccaaaaacgttttgaattgtattaaataacagatgtattcaaattattaattatatgtaatattgaattactgaatactataataaaacattcatgaaattat

SEQ ID NO: 78240 - DNA, 1340 bp, Homo Sapiens
  misc_feature (671)..(671): n is a, c, g, or t
ctactctagtccaagacaacagtgggccctacggcaagatctgggagggcagcagcaagtgcaacatcaacatcttcatcttccacaaggtcctgagcaaaggcagcttcgggaaggtgctgcttggagagctgaagggcagaggagagtactttgccatcaaggccctcaagaaggatgtggtcctgatcgacgacaacgtggagtgcaccatggttgagaagcgggtgctgacacttgccacagagaatccctttctcacccgcctcatctgcaccttccagaccaaggaccacctgttctttgtgatggagttcctcaacgggggggacctgatgtaccacatccaggacaaaggccgctttgaactctaccgtgccacgttttatgccgctgagataatgtgtggactgcagtttctacacagcaagggcatcatttacagggacctcaaactggacaatgtgctgttggaccgggatggccacatcaagattgccgactttgggatgtgcaaagagaacatattcggggagagccgggccagcaccttctgcggcacccctgactatatcgcccctgagatcctacagggcctgaagtacacattctctgtggactggtggtctttcggggtccttctgtacgagatgctcattggccagtccccncttccatggtgatgatgaggatgaactcttcgagtccatccgtgtggacacgccacattatccccgctggatcaccaaggagtccaaggacatcctggagaagctctttgaaagggaaccaaccaagaggctgggagtgacgggaaacatcaaaatccaccccttcttcaagaccataaactggactctgctggaaaagcggaggttggagccacccttcaggcccaaagtgaagtcacccagagactacagtaactttgaccaggagttcctgaacgagaaggcgcgcctctcctacagcgacaagaacctcatcgactccatggaccagtctgcattcgctggcttctcctttgtgaaccccaaattcgagcacctcctggaagattgaggttcctggacagatcaggctagccctgccctccacccacacctgcccgctccccacgataagcaccagtgggactgtggtgacttctgctgctggccccgcccctgcccccagagcgtccttggctgccgtctggccgggctctcatggtacttcctctgtgaactgtgtgtgaatctgcttttcctctgccttcggagggaaattgtaaatcctgtgtttcattacttgaatgtagttatctattgaaaatatatattatatacatagacatatat

SEQ ID NO: 78241 - DNA, 1070 bp, Homo Sapiens
  misc_feature (905)..(952): n is a, c, g, or t
ggggacaccaggcagttgaagaacatctggggtggacccatcactttggacagaattaggacctggttctggaccaagtgggtaaggatgcggaaggattgcaatgcccgccagcacagtggcggcaacattgaagacgtggacggaggaggggccccgacgacaggtggcaacaatgccccgagtggtggcagccaggagagcagcgcagaacagcccagaaaaggcggtgctcagcacggggtgtcatcctgtgaagggacacagagaacaggcaggaggaaaggcaggagccagtccgtgcaggcacactcagcgctaagccaaaggccgcccatgctgagctcatctggccccatcttagagaagccgccaaaacattcctcccaggacgtccacctcaagtgcacgagctggcccagaggctctcgggcagccggctctccttgcacgcctcggccacgtccctgcactctcagcccccgcccgtcaccaccaccggccacctgagtgtccgtgagcgggccgaggcgctcatcaggtccacgcctgggctcctccaccagctccaccctgagcttcctcttcggcaagaggagcttttccagcgcgctcgtcatttccggactctctgctgcggaggggggcaataccagtgacacccagtcatccagcagcgtcaacatcgtgatgggcccctcagccagggctgccagccaggccactcggcacctctccgagccatgtgagccccctgatgccaccgagcaggggcagcttcatgaccgatgtctggctgaggctgtggcggacactctcggggttgtctgcaggagagcaagccaggaggacatgggcctggacgacacggcctcgcagcaaagtgtgtcagacgagcagtgacnnnnnnnnnnnnnnnnnnnnnnnnnnnnnnnnnnnnnnnnnnnnnnnncattgctttccctcgtgctccccaaatcaccacaaccaaccaataccgcgatccatgagggactcctcctgggaaaaggagagctgttccagaacacagaactgatctcaggttttgg

SEQ ID NO: 78242 - DNA, 581 bp, Homo Sapiens
  misc_feature (122)..(169): n is a, c, g, or t
ttcaaaaacctgagatcagttctgtgttctggaacagctctccttttccacaggaggagtccctcatggattgcggtattggttggttgtggtgatttggggagcacgagggagagcaatgnnnnnnnnnnnnnnnnnnnnnnnnnnnnnnnnnnnnnnnnnnnnnnnngtcactgctcgtctgacacactttgctgcaaggccgtgtcgtccaagcccatgtcctcctgccttgctctcctgcatacaaccccgatagtgtccgccacaacctcagccagacatcggtcatgaagctgcccctgctcggtggcatcagggggctcacatggctctgagaggtgccgagtggcctgactggcagccctggctgaggggcccatcaccatgttgacgctgctggatgactgggtgtcactggtattgcccccctccgcagcagatagtccggaaatgactagctctctggaaaagctcctcttgccgatgaggaagctcatggtggagctggtagatgagcccacgctggacctgatgagcacctccgcacgttcacggacactcaggtggccgtgggtggc

SEQ ID NO: 78243 - DNA, 783 bp, Homo Sapiens
cacacgcacaacttgggaatttaatcttcacttttcctcccataaatatagagtgagggtgtgataccagccccagcccagtctccttggggtctgcatctctgcttcctggcagcctcttgagtcgacttggggatttgacgtcagttgctcagctccattccttccttctggacttggggaggtccggatatgtcggggagtgagtcagtgcaggggactgagggggtggttcccattctccctctagccccctcaaccaatgatccaagttcaaggagctcatctctgtttttcagaccatcgagctagtgccttgaagtctccggaacagcgcacccaggaaggggatgttgcagacattgcccaggaagccgaaggcgacagggaaaaagcccttaaagaggctgaagaatccgtaggtttccaggaacatgccgaggaggggccagcgtaggagcacgataaccacaccccccaggaggaagctggttcccttgagtttgtgccgttggaagaagaaccaaaaggtcttcctcaggccaatgatgagggacaggcccgtcaggaacagcaggtttccaaaggccaggagcacggaatcaaagtacaggagtgttccaaagaggatgaagaagatgccgaaaccggtgatccccacaccaatcttctgccattcggtgatggagatcatgccgcactcagcctggggggctttccgggtggaagcgggcaagtggagcgtggcccagaggacgcagctggtacatggtcacgggaccc

SEQ ID NO: 78244 - DNA, 1045 bp, Homo Sapiens
  misc_feature (139)..(139): n is a, c, g, or t
tttcatgtgcagtttgacctagtttgcaacgaccggaccattagcccatgatgcccctcaaccctcagagacagcagactcagatgagcttggacttcacagtgagaaagagtcgggatcccccaaagacaggtccatntcatgcccagatccccctgtatccgaggacacacccagcaggacccggaagtgcctaagtctttagtttccatttgcggatccactgccctctgcttgcgggctctgctctgatcacctttgatgaccccaaagtggctgagcaggtgctgcaacaaaaggagcacacgatcaacatggaggagtgccggctgcgggtgcaggtccagcccttggagctgcccatggtcaccaccatccaggtgatggtgtccagccagttgagtggccggagggtgttggtcactggatttcctgccagcctcaggctgagtgaggaggagctgctggacaagctagagatcttctttggcaagactaggaacggaggtggcgatgtggacgttcgggagctactgccagggagtgtcatgctggggtttgctagggatggagtggctcagcgtctgtgccaaatcggccagttcacagtgccactgggtgggcagcaagtccctctgagagtctctccgtatgtgaatggggagatccagaaggctgagatcaggtcgcagccagttccccgctcggtactggtgctcaacattcctgatatcttggatggcccggagctgcatgacgtcctggagatccacttccagaagcccacccgcgggggcggggaggtagaggccctgacagtcgtaccccaaggacagcagggcctagcagtcttcacctctgagtcaggctaggggcctccccttctcatcctccccacccccccgccaaggttctcacactggcctgggcttgggtgcccatataggaggtctgtatgttcaccaacagtgcggaggggtcacacattgcaaaacactgcccagaacagtaaaaagagctgcatgcaaaaacaacaaaaaacaga

SEQ ID NO: 78245 - DNA, 107 bp, Homo Sapiens
ccaccttatcctcccaccccactccctccaccaccacagcacaccggtgctggccacaccagccccctttcacctccagtgccacaataaacctgtacccagcggtg

SEQ ID NO: 78246 - DNA, 513 bp, Homo Sapiens
ctcttgcagcattttcctcagctgaggaatttcctgaacctgaggaaaatgctgcaagagaagaaaggaaattaaaagacgacacggagaaaagggaacagaaggatgaagaaatccctgaaaatgcaaacaatgaaaagatgtccatggaaacactactcaaagtgttcaaagggggaagtgaagcacaggactccaatagatttgccagccacctaaagatagagaacatttatgcagagggcttcataaaaacatttcaagacctaggtgccaagaacctggagccaattgaagtcgctgttctcttgaagcatccttttattcaagacctgatttcaaattattcagactataagtttcctgatattaaaataattctccaaaggagtgaacatgtacaaggaagtgatggagagagatcaccttcaagacatacagaggaaaagaaatgaagacaaaaagagtgtgatttttttaattctgcaataaatcttccaaaaattaaatgtg

SEQ ID NO: 78247 - DNA, 1555 bp, Homo Sapiens
  misc_feature (1128)..(1161): n is a, c, g, or t
  misc_feature (1170)..(1208): n is a, c, g, or t
  misc_feature (1257)..(1327): n is a, c, g, or t
  misc_feature (1382)..(1500): n is a, c, g, or t
gccaacttctccagccggccggggcgagcgccagcgcggcgtccggggcgagtgacacgcagagctgaagccatggttcatcaggtgctctaccgggcgctggtctccaccaagtggctggcggagtccatcaggactggcaagctggggcccggcctgcgggtgctggacgcgtcctggtactcaccaggcacccgagaggcccgcaaggagtacctcgagcgccacgtacccggcgcctctttctttgacatagaagagtgccgggacacggcgtcgccctacgagatgatgctgcccagcgaggctggcttcgccgagtatgtgggccgcctgggcatcagcaaccacacgcacgtggtggtgtatgatggtgaacacctgggcagcttctatgctccccgggtctggtggatgttccgtgtgtttggccaccgcaccgtatcagtgctcaatggtggcttccggaactggctgaaggagggccacccggtgacatccgagccctcacgcccagaaccggccgtcttcaaagccacactggaccgctccctgctcaagacctacgagcaggtgctggagaaccttgaatctaagaggttccagctggtggattcaaggtctcaagggcggttcctgggcaccgagccggagccggatgcagtaggactggactcgggccatatccgtggtgccgtcaacatgcctttcatggacttcctgactgaggatggcttcgagaagggcccagaagagctccgtgctctgttccagaccaagaaggtggatctctcgcagcctctcattgccacgtgccgcaagggagtcaccgcctgccacgtggccttggctgcctacctctgcggcaagcctgatgtggccgtgtacgatggctcctggtccgagtggtttcgccgggcccccccagagagccgtgtgtcccagggaaagtctgagaaggcctgagccgtgacctcttctgcttactgtaactgcggccggtttagtgaccccatgacttacagccggttcttacctcttaggtgaaggagatgacatgtttttagaattgctgtgcaaggctcaccctctctctgtcaacactggaataaactttgccttttctgnnnnnnnnnnnnnnnnnnnnnnnnnnnnnnnnnnctcgaggcnnnnnnnnnnnnnnnnnnnnnnnnnnnnnnnnnnnnnnncatggtcatagctgtttcctgacccagctttcttgtacaaagtggtaannnnnnnnnnnnnnnnnnnnnnnnnnnnnnnnnnnnnnnnnnnnnnnnnnnnnnnnnnnnnnnnnnnnnnntgcagtacccgggaaatttaacccgcctaatgagcgggcttttttttgtgatccnnnnnnnnnnnnnnnnnnnnnnnnnnnnnnnnnnnnnnnnnnnnnnnnnnnnnnnnnnnnnnnnnnnnnnnnnnnnnnnnnnnnnnnnnnnnnnnnnnnnnnnnnnnnnnnnnnnnnnntccaaaggtaactgggcttccaccaaagccgcaaaataccaaaatactgtttcct

SEQ ID NO: 78248 - DNA, 788 bp, Homo Sapiens
  misc_feature (62)..(62): n is a, c, g, or t
aaaatcagaagaggtagaaccagcccccaagcactcctttttctctgcatgatacttctgcntattgtccttcacactagctacatgatttatagtcttgctccccaatatcgttatgtatggaagccaaaattacgtgaatagagacttaatataacttctgataatcataaaggcaattcaaccctttctgtgccaaagagatgtgatgcagaagctcctgaagatcagtgtactgttacccggacatacctattccttcacaagttctggttcttcagtgctgcttactattttggtaactgggcctttcttggggtatttttgattggattaattgtatcctgttgtaaagggaagaaatcggttattgaaggagtagatgaagattcagacataagtgatgatgagccctctgtctattctgcttgacagccttctgtcttaaaggttttataatgctgactgaatatctgttatgcatttttaaagtattaaactaacattaggatttgctaactagctttcatcaaaaatgggagcatggctataagacaactatattttattatatgttttctgaagtaacattgtatcatagattaacattttaaattaccataatcatgctatgtaaatataagactactggctttgtgagggaatgtttgtgcaaaattttttcctctaatgtataatagtgttaaattgattaaaaatcttccagaattaatattcccttttgtcactttttgaaaacataataaatcatctgtatctgtgccttc

SEQ ID NO: 78249 - DNA, 800 bp, Homo Sapiens
  misc_feature (706)..(707): n is a, c, g, or t
  misc_feature (709)..(709): n is a, c, g, or t
  misc_feature (718)..(719): n is a, c, g, or t
ggacctctcatcaagaagaactcacttgaaagcagtggggtccggacaaccaaaaatgaagaggagaatgaaaaggaaaaggagctccagctggaatatctgctgggtgcctttgaaagcctgggcaaagcctggccgcgaaacgcggagacccaacgttgttatcgtcaggagctgtgcaaactgatgtgtgaacggctaaaactcagcacgtggaaagtgcagctaggagtcctgcaatcaatgaatgccttttttcaggggttaatgcttttggaagaagaacatgccgatcctgaggctttggctgaaattctgcttgaaacttgtaaatcaatcacatattctttagaaaataagacctactcatctgtgagaacagaagctttatctgtgatagaattgctgcttaaaaaacttgaagaatctaaacagtgggaatgtttgacatctgaatgcagagtgctcctaattgagtctttagctactatggagccagacagcagacctgaactgcaggagaaagcagcgttactgaagaaaacacttgaaaatctggaataaattagaaggggaagaaacaaacaagtgccatgttcattgggggttgaagtggtggtgttctttgaaaaaccaagtgggaaaaagtaaagattaatctgtagcatgcatcattccttggctgaaataaaaagaaaaagccccnngnaaaaacgtnntggaaccaagggagggccttgtcgggccgccttgggcacttcgagaaaatttttctagaccatttccctttgggcgggggg

SEQ ID NO: 78250 - DNA, 1096 bp, Homo Sapiens
  misc_feature (38)..(38): n is a, c, g, or t
  misc_feature (44)..(45): n is a, c, g, or t
  misc_feature (51)..(51): n is a, c, g, or t
  misc_feature (172)..(172): n is a, c, g, or t
  misc_feature (259)..(259): n is a, c, g, or t
  misc_feature (637)..(645): n is a, c, g, or t
tttagttttgttgtttggttggttgattatatttttcncctatnnttgacntattgttttctagtttagtatagcatcttgatccttgctagcatgtagggtcatatacctcagggatagcaagctgtaagtacccatactgaataactattaataccagtgactcatctcntaaaaatgttcaggtgtaaatctattgagaaacatgaaaaagcacactgatttatggagagttgagctaaaaacatttataaatatntgctgggatgttttagcatcttttcattgtactctgagaacaattaaaattgtccagagatcatttatattaccttccaaattgtttattacccaagatcctttgggagaaaatcttatagaatgggggaacaatatgtggtttaaagttattaaaatgccagttaatttcctcggcaaaggacaatagaggaacttagcttaattgtctggctttaatttaaactgtgttaatacaacattaaaataaaacactaaatacttttgaggtacagtctgctcacttttttggttctcaaatagcaaagaaagtaatgtctaaaataggctcttagcattaaaaactgacagcatttcgtaactacacagtgtacagaannnnnnnnnaattgaagtcaatcactaaaaaaattagaaggcagggtctatttacacaattaagctgaagaaagcactaattttttgtagtttaaaatatatatatattttagtcagatttaaaattttaagctttatagagtgtaaatatattttgctattactgtatgtgtatgtgactgctcaagcactttgtaaagaaattaggatattttagaatggtacactatgcattcaaatgaaatgtgcctttcactatgtcattctaagaaaacaagtgttttttgcagtcataaattatcacaaatgcacaaattaaagtctatatagattgaaatttgtaactttggttttaagtattctttccttttagaaacttcctaatgattaaaatatactttaacttttctgtgttcaaaatctcaaagactaattaactttaataaacattcttgcaagt

SEQ ID NO: 78251 - DNA, 878 bp, Homo Sapiens
atatatcctgcgacagcagaagcgcccatacactaaatacttcattttgttggccaacgaaagttaaagacagcacatagcgatctagagtatatcatacccgacatatgtataccacaaacaaaaggagtactagagcaagaagaaaaggaagagaaagcagccctggaaaaaccaatggacctggaagaggaaaaaaagcaaaatgatggtgaaatgcttgaaaaagaagaggaaagtgaacctgaggaaaagagtgaagaagaaattgaaatcatagaagggcaagaagaaagtaatcaatcaaataagtctgggtcagaggatgagatgaaagaagcagatgagagcacaggatctggagatgggccgataaagtcagtacgcaaaagaagagtacgaaaggactaaactagattgaaatatttttaattcccgagagggatgtttggcattgtaaaaatcagcatgccagacctgaactttaatcagtctgcacatcctgtttctaatatctagcaacattatattctttcagacatttattttagtccttcatttcagaggaaaaagaagcaactttgaagttacctcatctttgaatttagaataaaagtggcacattacatatcggatctaagagattaataccattagaagttacacagttttagttgtttggagatagttttggtttgtacagaacaaaataatatgtagcagcttcattgctattggaaaaatcagttattggaatttccacttaaatggctatacaacaatataactggtagttctataataaaaatgagcatatgttctgttgtgaagagctaaatgcaataaagtttctgtatggttgtttgattctatcaaaa

SEQ ID NO: 78252 - DNA, 838 bp, Homo Sapiens
  misc_feature (94)..(94): n is a, c, g, or t
caagaagggcgtgactgtgaagacaaagtcgttagagcctatagatgccctgaccgagcagcttcggaagcttgtgtcctttgaccaggaaganccaactgccaagtgctatattcaaagcaggatgccaatcagctcccccgggcactggtcaggaagttgtcatccagaagtcagagcagagtgcgcaatattgctagtcgtgccaaggagaaacaggaagccaacaagcagaaagttccaaaccccagcaatggggcaggagtggttcttagaaacaaaccctcagcacccacccctgcagtgaatcgccactccaccggctcctacatcgcaggctacctgaagaacacgaaagggggtggccttgaaggccggggcatcccagagggggcatgcacggctcttcactatggccacgttgaccagttttgttcagataattctgttttgcagactgagccaagcagtgatgataaaccagaaatttattttcttttgagactgtgaattatttaaaactgcattcttaaggttttcaaggtattctgtagaatgtcagagttttcagtaaataagttccttggctttggaatgattttcaaatgtatttttaaacttgtatttgggtctccctttgacttcatgtgttttccctgttaatgcgtttgtatatagatttggtgacatttcccatgtacctattatgatctttttcccttgagttgttgtaaactgtatcagtatgaaatatgtgcatgccctagatgtgaaactcctcagcagctcgggttataatgtgtgtgtgtttcaccaagatgtcctttactgtgtcctc

SEQ ID NO: 78253 - DNA, 2696 bp, Homo Sapiens
  misc_feature (1141)..(1141): n is a, c, g, or t
  misc_feature (2205)..(2205): n is a, c, g, or t
  misc_feature (2208)..(2208): n is a, c, g, or t
  misc_feature (2250)..(2312): n is a, c, g, or t
  misc_feature (2410)..(2463): n is a, c, g, or t
  misc_feature (2492)..(2503): n is a, c, g, or t
  misc_feature (2539)..(2548): n is a, c, g, or t
  misc_feature (2572)..(2656): n is a, c, g, or t
agggtatgaagtcgacggcgcgccgaattcggcacgaggcagacggagccactgtgatggcggcaggtctcagtcccctggtctctggcaccactgtgcagacagggcctttgccgaccctggtgagtggcggaaccatcttggcaacagtcccactggtcgtagatgcggagaagctgcctatcaaccggctcgcagctggcagcaaggccccggcctctgcccagagccgtggagagaagcgcacagcccacaacgccattgagaagcgctaccgctcctccatcaatgacaaaatcattgagctcaaggatctggtggtgggcactgaggcaaagctgaataaatctgctgtcttgcgcaaggccatcgactacattcgctttctgcaacacagcaaccagaaactcaagcaggagaacctaagtctgcgcactgctgtccacaaaagcaaatctctgaaggatctggtgtcggcctgtggcagtggagggaacacagacgtgctcatggagggcgtgaagactgaggtggaggacacactgaccccacccccctcggatgctggctcacctttccagagcagccccttgtcccttggcagcaggggcagtggcagcggtggcagtggcagtgactcggagcctgacagcccagtctttgaggacagcaaggcaaagccagagcagcggccgtctctgcacagccggggcatgctggaccgctcccgcctggccctgtgcacgctcgtcttcctctgcctgtcctgcaaccccttggcctccttgctgggggcccgggggcttcccagcccctcagataccaccagcgtctaccatagccctgggcgcaacgtgctgggcaccgagagcagagatggccctggctgggcccagtggctgctgcccccagtggtctggctgctcaatgggctgttggtgctcgtctccttggtgcttctctttgtctacggtgagccagtcacacggccccactcaggccccgccgtgtacttctggaggcatcgcaagcaggctgacctggacctggcccggggagactttgcccaggctgcccagcagctgtgggctggcccttgcgggcactgggcccggcccctgcccccttcccacctggaccnttgtagcctcctctggaacctcatccgtcacctgctgcagcgtctctgggtaggccgctggctggcaggccgggcagggggcctgcagcaggactgtgctctgcgagtggatgctagcgccagcgcccgagacgcagccctggtctaccataagctgcaccagctgcacaccatggggaagcacacaggcgggcacctcactgccaccaacctggcgctgagtgccctgaacctggcagagtgtgcaggggatgccgtgtctgtggcgacgctggccgagatctatgtggcggctgcattgagagtgaatgaccagtctcccactgggccttgcattttctgacacgcttcttcctgagcagtgccctgccaggcctgcctggcacagagtggctcagtgcctcctgccatgcagtggctctgccaccccgtgggccaccgtttcttcgtggatggggactggtccgtgctcagtaccccatgggagagcctgtacagcttggcctgggaacccagtggaccccctggcccaggtgactcagctattccgggaacatctcttagagcgagcactgaactgtgtgacccagcccaaccccagccctgggtcagctgatggggacaaggaattctcggatgccctcgggtacctgcagctgctgaacagctgttctgatgctgcgggggctcctgcctacagcttctccatcagttccagcatggccaccaccaccggcgtagacccggttggccaagtggtgggcctctctgacaagctgtggtgatccactggctgcggcgggatgaggaggcggctgagcggctgtgcccgctggtggagcacctgccccgggtgctgcaggagtctgagagacccctgcccagggcagctctgcactccttcaaggctgcccgggccctgctgggctgtgccaaggcagagtctggtccagccagcctgaccatctgtgagaaggccagtgggtacctgcaggacagcctggctaccacaccagccagcagctccattgacaaggccgtgcagctgttcctgtgtgacctgnctnttcttgtggtgcgcaaccagccctgttggcggccagccaacnnnnnnnnnnnnnnnnnnnnnnnnnnnnnnnnnnnnnnnnnnnnnnnnnnnnnnnnnnnnnnnagggctttcccgcccccttttgaaccttgccttgggcctttcccaaaccggggaaccctggaaaacccaccccctttaaaaagcccgggccttttggnnnnnnnnnnnnnnnnnnnnnnnnnnnnnnnnnnnnnnnnnnnnnnnnnnnnnnaaattgtcctaataaagggcgggggtctnnnnnnnnnnnnaaccattttgcgagaggggccccccaccgggggctnnnnnnnnnnaacccctccttaaaaaataaaacnnnnnnnnnnnnnnnnnnnnnnnnnnnnnnnnnnnnnnnnnnnnnnnnnnnnnnnnnnnnnnnnnnnnnnnnnnnnnnnnnnnnnaaatctttttttaaaaaacactctcctctacccaaaaaaa

SEQ ID NO: 78254 - DNA, 1051 bp, Homo Sapiens
  misc_feature (54)..(54): n is a, c, g, or t
  misc_feature (117)..(117): n is a, c, g, or t
  misc_feature (124)..(124): n is a, c, g, or t
  misc_feature (192)..(192): n is a, c, g, or t
  misc_feature (974)..(992): n is a, c, g, or t
cgttgtatggctgctatcaatacatatctcatattgtccctagccatctgtttntacaggctgtgcccataccatgatcagactggaggtacatagtcttcaactcttgattagcangtttccntagtccatcacaatgatatgaagattgattctgcatgaccaaacttagagtaaaaaccaaattaaatntagaaagaaggaaaaagagaaaactcaatctatacttgtagagtccaattcttagcaatggatccctctaggatctagtttgggctttgtctggatttcttttctcagttgtgctttgaagtgaataagctttgttacaaattaattttttattagttccaatattagttggagttaacttgaattgattgtatgtagcacagcacttttgcagtaagattggtgtgaaatactaaacactatggattttgtaggtgtcaggttaaatggtcaagggatacctacattaagtcatatattaggtattgatgatcttacttcttttctgttcccctgtacaaaacacttacctaacccagcttgtggttttaggacagccaaagctcactgttgttggttagtcctaatcactacacgggtctcataaatgagacttgtttgaattttggtacattggagcatgttggttggtattacacggcagcatttcgaatgagtgcagctctgtgtctgtcagaaaggagagataagactactttgaagggaattaaatatgtgagtcctctttttaatggtgctttttgtaacctttaatgctgaggtacagagctgcttttcaatatttcataaaggagtggcagacaagagtggattttaaagctgttcttcaaacgtaatttgtcactggactctgacacacctggaaattatatgatatgatacatacagaaatgttgtgggttttttccataaaactttaataaaagtattatacagcaatnnnnnnnnnnnnnnnnnnncctgagcaggcggccgcaagcttattccctttagttgagggttaattttagcttgccac

SEQ ID NO: 78255 - DNA, 685 bp, Homo Sapiens
  misc_feature (49)..(49): n is a, c, g, or t
  misc_feature (80)..(80): n is a, c, g, or t
acaaactgagccttccatcatgaacacctggaaagacgagaactattantatgacaccaactatggtagcacagtagatntgttggacagcaaaactttctgccgggctcagatctccatgacaaccaccagtcaccttcctgttgcagagtcacctgatatgaaaaaggagcaagacccccctgccaagtgccacaccaaaaagcacaacccgagagggactcacttatgggaattcatccgcgacatcctcttgaacccagacaagaacccaggattaataaaatgggaagaccgatctgagggcgtcttcaggttcttgaaatcagaggcagtggctcagctatggggtaaaaagaagaacaacagcagcatgacctatgaaaagctcagccgagctatgagatattactacaaaagagaaattctggagcgtgtggatggacgaagactggtatataaatttgggaagaatgcccgaggatggagagaaaatgaaaactgaagctgccaatactttggacacaaaccaaaacacacaccaaataatcagaaacaaagaactcctggacgtaaatatttcaaagactacttttctctgatatttatgtaccatgaggggaaaaagaaactacttctaacgggaagaagaaacactacagtcgattaaaaaaattattttgtt

SEQ ID NO: 78256 - DNA, 1174 bp, Homo Sapiens
aaaagcaggctggtaccggtccggaattcccgggatatcgtcgacccacgcgtcgctgtaaaaacacctttggggtagacgataaaagtcatttttaaggcaaatacttaccatgtgactttttattaccaaatgcatcagtagtggagctggtatgttgtttcataggatggaaacattagaagtccagagaaaaataaattttaaaaaaaggtggaaaagttacggcaaacctgagatttcagcataaaatctttagtatgaagtgagagaaagaagagggaggctggttctgttgctcgtatcaataggttatctgtgtccctcatcttggtgttacagtgttatttctgtcagtattatgaatatgtggttgacccatcctgtcaaatgtaccaacattttcgaaagaattcattcaaatctcttatgccaacagaaaagttccttcttgtttaatatctctttacctcagtcctacattttgattctctggaggagattttagcttgtcttaaaaagccaaatttggagtcatcaagcctgctgaacctgatggggcagctttttgaacagctttctggaagtaagaacttcagttgaaaagccctttgatcgcttcagcccgggacatgcccttcagatggcttattctcagtaaagctttatgtagactgtgacactgtatatgtgtgactcgtacaactttgacgtgtttctgaagtggtttaatcgtatttgttattagcttctttgtggaaatgcaatttttatactaaaaacattgcttatttgcaatgcaatatgttataaatttgttgtttatattactggtattagtcttagcctaatgaacctaattatttttctttctgtattctttgcttcctcaaatagcatctgcagcaattggaatgagaaatccagatatgtgtttcaagtagtacattgcctgaatcacaaatcacttgatcacagtattgtatataatccctgatcctatttgtttcattttattgtaaattcccatttgcatcaaaacctaatgatagtgattggtaagtaaaaacaaatggtgtattgcttttcatacaagtgttttcacaaaagccatttgcctaggcagcaaaaaatattaatttgttaaaaaaaattttccttcgtgtccatcctc

SEQ ID NO: 78257 - DNA, 1146 bp, Homo Sapiens
  misc_feature (977)..(977): n is a, c, g, or t
  misc_feature (1098)..(1098): n is a, c, g, or t
tttttaactgaggcatcatggcagtttaatagtgaggtatttaattgcatttttataaaaaacattgcaaaacaaagtgacaatagggacctaaattctttggacttacggtagagatgcttgaggatcctaatattctacttctgccaacatgtcaggtaggaagctcacaatgttccccataagccattacaaactggctaaggaaaatcagtcatgactaagtccttgtctgcatcacgctcctgcccctccacacactgtctgagcgtgcacttttctttcgaaggctaatttatgaggcattctgcctgagtcagggctattgctaagtggaaggtttgatgaacctcccagtagaaaatgcaaggcctgcaaaaatgcgaacagctcgatttactatggcttataatcaaggcaaactatacaataagaggttgtattttcatcagatctgcaaaaggtcaaagcttacagcaaaagacaaaaggaagaggtatatatcttagagacaagctcacagcacctttaagtggggagatctcatggccaaccggtgactcaccgtgtgttgttttccagacgtgggcagatggcagctctgctgaccccacaacccacctacacgatcttcagcatttcaggatcaccggagcttgtttaaagtgagtctacactgctgaatttcccatcatccccctcgggagcagccctgggcaaatggctgcactgacagctgtgactcaggcactggttcccagagatctagaacccaggccagcaccgaggcctagacagctgtgactcaggtgctggttcccagaggtctagaacccaggccagtcactcaccactgatttatggaatggaccatatacgtatttatcaaccaagttcccaaacttagggtgcccaatgtccctcaccttgaagttagcaagagaaccacaactttgcttctctgtagacagatctcncaactttcccatctgttcctcacacacattcatttaaaaacagctgagagagctgggtgtggaaccttattacaaataccttcctgaggactcatgccaccaccagaccatgttacctcanagtctcctgcctccatttccccattttatacacagttcatgcttttaa

SEQ ID NO: 78258 - DNA, 889 bp, Homo Sapiens
tgcaaatatggcatgtataggaacaaaactcttttggagtggctggtcattgttttgccctcttttggtacctgagtacctttctggggttttgtaaatcgtgtgtcatttgtaagaatttcacgttaactctgcgttacttggtgttcacctgtggtatccttgactgaccataatgatttagtttgggtatgatgtgtctgctttgaaatgcctaactggagtatgtcagatcctgctttaaagcattccatatatctgctgggacaataagttgcttctccttgggaaatatgctctagattcagaagcaaaaccgattttgctttcaccattaaggttgcattttaatgcagttattgttttaaattagagaataaaatgtaaaaccaagggaggctttagaaccctttattgaatggcatggcaaacttttaaaactgcttttgctatttcactagaactatctttgataaaggatatagctaaaaaatgtcagcccaaactgtgtgtaattagggttgtttattaaaattttctctaaatgtcatacagaggcttaagatctgtgtatgctgttgggtcggagtgccagtcactgctttggaagtctgtgttctggggctgcagaatgacaaacgtgtcatgggattaaaaccaatcaactgtgaattgtgaaattgaaactactctttcggttttattttctttagcatattgagtatagaaatctgaaacttatttaaaatttatactgcttttgttgatggctcattttggctgtgtatcctcacttatgtactgatttctgataaaggcttgacattattataacacgcattttgtgttccagtttaataaaacggtttctgagtcttgtctgaaaaaa

SEQ ID NO: 78259 - DNA, 700 bp, Homo Sapiens
  misc_feature (46)..(46): n is a, c, g, or t
  misc_feature (69)..(69): n is a, c, g, or t
  misc_feature (104)..(104): n is a, c, g, or t
ccaagatgccctacatggaggcagtgatccacgagatccaaagatntggagacgtgatccccatgagtntggcccgcagagtcaaaaaggacaccaagtttcgngatttcttcctccctaagggcaccgaagtgtaccctatgctgggctctgtgctgagagaccccagtttcttctccaacccccaggacttcaatccccagcacttcctgaatgagaaggggcagtttaagaagagtgatgcttttgtgcccttttccatcggaaagcggaactgtttcggagaaggcctggccagaatggagctctttctcttcttcaccaccgtcatgcagaacttccgcctcaagtcctcccagtcacctaaggacattgacgtgtcccccaaacacgtgggctttgccacgatcccacgaaactacaccatgagcttcctgccccgctgagcgagggctgtgccggtgcaggtctggtgggcggggccagggaaagggcagggccaagacggggcttgggagaggggcgcagctaagactgggggcaggatggcggaaaggaaggggcgtggtggctagagggaagagaagaaacagaaggggctcagttcaccttgataaggtgcttccgagctgggatgagaggaaggaaacccttacattatgctatgaagagtagtaataatagcagctcttatttcctc

SEQ ID NO: 78260 - DNA, 657 bp, Homo Sapiens
  misc_feature (64)..(76): n is a, c, g, or t
  misc_feature (556)..(570): n is a, c, g, or t
tgaaattgcactacgtcttggacgggaatcactggggcagagggcgcctgaagtagggtcccgnnnnnnnnnnnnnattcagacacatggatgttgggtctctgtgcggacggtgacaatgtttacaagcaccacatttacacatccacacacgcacacgggcactcgcgaggcgacttctcaagcttttgaatgggtgagtggtcgggtatctagtttttgcactgtcttactattcaaggtaagaggatacaaacaagaggaccacttgtctctaatttatgaatggtgtccatcctttccccatccctgcctcctgcccctgacgcccatttccccccttagagcagcgaaactgccccctcctgcccgcccttgcctgtcggtgaggcaggtttttactgtgaggtgaacgtggacctgtttctgtttccagtctgtggtgatgctgtctgtctgtctgagtctcgtggccgcccctggaccagtgatgactgatgaatcttatgagcttctgattgatctcggggtccatctgtgatatttctttgtgccnnnnnnnnnnnnnnngagtggatcagtttgctaaatgaacattgaaattgaaatgctttatctgtgttttctgtaaataaaagagtgcaataatctctgaaa

SEQ ID NO: 78261 - DNA, 303 bp, Homo Sapiens
  misc_feature (209)..(223): n is a, c, g, or t
ggacggtgacaatgtttacaagcaccacatttacacatccacacacgcacacgggcactcgcgaggcgacttctcaagcttttgaatggtctgtggtgatgctgtctgtctgtatgagtctcgtggccgcccctggaccagtgatgactgatgaatcttatgagcttctgattgatctcggggtccatctgtgatatttctttgtgccnnnnnnnnnnnnnnngagtggatcagtttgctaaatgaacattgaaattgaaatgctttatctgagttttctgtaaataaaagagtgcaataaaa

SEQ ID NO: 78262 - DNA, 1017 bp, Homo Sapiens
gcagagctcaaaacagacgtgttccagagcctgagggaagtgggcaatgccatcctcttctgcctcctcatagagcaagctctgtctcaggaggaggtctgcgatttgctccatgccgcacccttccaaaacatcttgcctagagtctacatcaaagagggggagcgcctggaggtccggatgaaacgtctggaagccaagtatgccccgctccacctggtccctctgatcgagcggctggggacccctcagcaaatcgccattgctcgcgagggtgacctcctgaccaaggagcggctgtgctgtggcctgtccatgttcgaggtcatcctgacccgcattcggagctacctgcaggaccccatctggcggggcccaccgcccaccaatggcgtcatgcacgtcgatgagtgtgtggagttccaccggctgtggagcgccatgcagttcgtgtactgcatccctgtgggaaccaacgagttcacagctgagcagtgtttcggcgatggcttgaactgggctggttgctccatcattgtcctgctgggccagcagcgtcgctttgacctgttcgacttctgttaccacctgctaaaagtgcagaggcaggacgggaaggatgaaatcattaagaatgtgcccctgaagaagatggccgaccggatcaggaagtatcagatcttgaacaatgaggtttttgccatcctgaacaaatacatgaagtccgtggagacagacagttccactgtggagcatgtgcgctgcttccagccacccatccaccagtccttggccaccacttgctaagcagaagatcctgcagacccttatctggaggaggaagagaagcaggagagagaaagccacagccagcctgccataggatccaactggacaacgtgtgggatggacctggaaacaagcacctccccaaacacatcaccactccctagggcggggcctgtgcatgctctcccatgacatctccatgctggtttctccatagcataaatgaaa

SEQ ID NO: 78263 - DNA, 925 bp, Homo Sapiens
ctgtatttaatttttctttccttccatctgaggagcaaggaaatcctactgctgaatagctgttagtatctattttacaaagatttactcattttcaggtacctaatgtagctgctagcatgcatgcacaacaatacaatttatatggtaaatggaaccaaataatggcttcactgaatgttatggctgcactgaagggaaatgtcacggtaaatagctgccaaattatggatcatgccgaagtgtcacaactgcactaaagacaaatagcactagaggctattgccactgtgacgcttttgagttatgaagaagggtagcggcctgatgcgaggctctttgtgtcctcattatagcaaagggttactggtgcaggggactaggaaaaacccgtccagtgtggtgcttagttattcatccatccctttcagacctaacagccacagccacacggaaagagactttgcctcacttttacattcacaaacaaacaaaggaggggggagcaggttttatgaatgtaactgtgcacaggaaatgactggtaatggaaaaaatgttgtaataaaataatctaatcaaagaatattattaaatttaacatagtctatgtccaaaaggcttagttgcttcttatgcagatagatgtgtgaaatctaagcagtaatgtactttctccctttgtaaagacttggggagtaaggacattaccaactaaattgcttcttcgaaactgaagtgagtcccggtttgtttcattttaatgggagggtaataaagatgaaagaccaacattttaactgatggatcccttaagctacagaatagaaatttattgtgttttgagggaatatactaaatgcagctatgtaaaaataaaattcaaacgcccaggattaaaataaaatataatcagaaaacctca

SEQ ID NO: 78264 - DNA, 817 bp, Homo Sapiens
  misc_feature (372)..(399): n is a, c, g, or t
tgcccctcgagcccaagaattcggcacgaggagcatttgtgtgatcccttacctctggctgataaaactctaatgggttgtggcttactttgtttccattttctttggctttgtgcaatttttgtgtaactttacttgtacctatattttctgtttacagttctttttaaggggaggggtagggttctaagatcttgttgtttattgtagataaaaattttttcgtgttgtagaaaagcatgggttatgcgtttgactgaaaaagacactgtattatttaccaaaggggtattgtttttgcatttgtttataaatgcattattttggtactgtaaatttggacataatttctgagtttattactactggcannnnnnnnnnnnnnnnnnnnnnnnnnnnaaccgtaagtgcacgatgcaggtgcataggccccagaccaaactagaccaccagcatgttcatgtccagacctcggcagtggcgtgcactgcttgtgcacctcagttcctccagtgttggtttgtttgttttttaattcagcatcctgctggttttactttccaagcaagatctgttgcgactcccaaatgcgttttaatgagctcatccttatttgcctttcttcttacgtattttgtgtattagattgtgcaggagatattctagaaggcattaatggtttgcattcaaaacgatgtggtttgtccaagttattttctgtctttattactgagacggattaatctccttatttttttcttgatgatttgaagttgtaacagttgtccagctattgcttaataaaattttgcagatc

SEQ ID NO: 78265 - DNA, 1005 bp, Homo Sapiens
  misc_feature (77)..(77): n is a, c, g, or t
gcacgaggacaaatgatggcaacatcttcttttcccctgtgggcatcttgactgcaattggcatggtcctcctgggnacccgaggagccaccgcttcccagttggaggaggtgtttcactctgaaaaagagacgaagagctcaagaataaaggctgaagaaaaagaggtgagcacaagtaaatctgtacagatgatgacacagagccattcctttagcttcactttcctggaggacttgcaggccaaaattctagggattccatataaaaacaacgacctaagcatgtttgtgcttctgcccaacgacatcgatggcctggagaaggttaatcactgttctgaagatggtgtttgtaacaccagttatgcttcatacttctgaggtaggagtctggacatgactcagcaggcaagactcaactctggcagtggggttcagacatcagacaaattgaggactagctaaaacagggaagagttggaagcacctctccagaagacatgcccaccagtgtgccatatcagtttacccttgccatggctacacccagaagttatggatgaagctgctatggatgaagctggaggacattatgctaagtgaaaagtaatacacaaaaagaaaagtactgaatgatctcacttaaatgtgtaatataaaaaagtcaaatacatagagaaagagaataaaatggtaactatcagggattggggagatgcagggagagggagaaaaaaatagagagatataggtcaaaggatccaaagttgaagatatgtaggatgaacgagtctagagctctaacgtacaagacaaggatgatggttaataataatgtattatatataagatttttgtgaaaatagtagatttaaggtgctcttgccacacatacaaaaaggataactatgtgagatgacggatatatgttaatttacttcactagagcaaccatttcactgtgtacatgtatatcaaaacatcaggttgtatatagagatat

SEQ ID NO: 78266 - DNA, 2245 bp, Homo Sapiens
ccatcaggtcctaggtagcgaggcctggggtggctgttccagtggcacaggagctaggatccagaagcccagaggctcagcggtgcttctggagttccagtgatcccggagtctgaaccggcagtgagagtggggaaagagggatgccgtgcgcatgctcaataccctgcagaccaatgccggctacctggagcaggtgaagcgccagcggggtgaccctcagacacagttggaagccatggaactgtacctggcacggagtgggctgcaggtggaggacttggaccggctgaacatcatccacgtcactgggacgaaggggaagggctccacctgtgccttcacggaatgtatcctccgaagctatggcctgaagacgggattctttagctctccccacctggtgcaggttcgggagcggatccgcatcaatgggcagcccatcagtcctgagctcttcaccaagtacttctggcgcctctaccaccggctggaggagaccaaggatggcagctgtgtctccatgcccccctacttccgcttcctgacactcatggccttccacgtcttcctccaagagaaggtggacctggcagtggtggaggtgggcattggcggggcttatgactgcaccaacatcatcaggaagcctgtggtgtgcggagtctcctctcttggcatcgaccacaccagcctcctgggggatacggtggagaagatcgcatggcagaaagggggcatctttaagcaaggtgtccctgccttcactgtgctccaacctgaaggtcccctggcagtgctgagggaccgagcccagcagatctcatgtcctctatacctgtgtccgatgctggaggccctcgaggaaggggggccgccgctgaccctgggcctggagggggagcaccagcggtccaacgccgccttggccttgcagctggcccactgctggctgcagcggcaggaccgccatggtgctggggagccaaaggcatccaggccagggctcctgtggcagctgcccctggcacctgtgttccagcccacatcccacatgcggctcgggcttcggaacacggagtggccgggccggacgcaggtgctgcggcgcgggcccctcacctggtacctggacggtgcgcacaccgccagcagcgcgcaggcctgcgtgcgctggttccgccaggcgctgcagggccgcgagaggccgagcggtggccccgaggttcgagtcttgctcttcaatgctaccggggaccgggacccggcggccctgctgaagctgctgcagccctgccagtttgactatgccgtcttctgccctaacctgacagaggtgtcatccacaggcaacgcagaccaacagaacttcacagtgacactggaccaggtcctgctccgctgcctggaacaccagcagcactggaaccacctggacgaagagcaggccagcccggacctctggagtgcccccagcccagagcccggtgggtccgcatccctgcttctggcgccccacccaccccacacctgcagtgccagctccctcgtcttcagctgcatttcacatgccttgcaatggatcagccaaggccgagaccccatcttccagccacctagtcccccaaagggcctcctcacccaccctgtggctcacagtggggccagcatactccgtgaggctgctgccatccatgtgctagtcactggcagcctgcacctggtgggtggtgtcctgaagctgctggagcccgcactgtcccagtagccaaggcccggggttggaggtgggagcttcccacacctgcctgcgttctccccatgaacttacatactaggtgccttttgtttttggctttcctggttctgtctagactggcctaggggccagggctttgggatgggaggccgggagaggatgtcttttttaaggctctgtgccttggtctctccttcctcctggctgagatagcagaggggctccccgggtctctcactgttgcagtggcctggccgttcagcctgtctcccccaacaccccgcctgcctcctggctcaggcccagcttattgtgtgcgctgcctggccaggccctgggtcttgccatgtgctgggtggtagatttcctcctcccagtgccttctgggaagggagagggcctctgcctgggacactgcgggacagagggtggctggagtgaattaaagcctttgttttttaaagaaatggcaaagccttcgactga

SEQ ID NO: 78267 - DNA, 1252 bp, Homo Sapiens
  misc_feature (76)..(110): n is a, c, g, or t
  misc_feature (819)..(819): n is a, c, g, or t
gtacacatatagggcgctagctcgcggtattctgaacgacgagcgcagcgagtcagtgatgtcgaggaagcggcgnnnnnnnnnnnnnnnnnnnnnnnnnnnnnnnnnnncagtcgacggtaccggacatatgcccgggaattcggccattacggccgggggtctcccgcccgggcctagagcgctgccgggggcgccgggactatgtcgcgggcgcggagccacctgcgcgccgctctattcctggcagcggcgtctgcgcgcggcgtaacgacccaggtcgcggcgcggcggggcttgagcgcgtggccggtgccgcaggagccgagcatggagtaccaggatgccgtgcgcatgctcaataccctgcagaccaatgccggctacctggagcaggtgaagcgccagcggggtgaccctcagacacagttggaagccatggaactgtacctggcacggagtgggctgcaggtggaggacttggaccggctgaacatcatccacgtcactgggacgaaggggaagggctccacctgtgccttcacggaatgtatcctccgaagctatggcctgaagacgggattctttagctctccccacctggtgcaggttcgggagcggatccgcatcaatgggcagcccatcagtcctgagctcttcaccaagtacttctggcgcctctaccaccggctggaggagaccaaggatggcagctgtgtctccatgcccccctacttccgcttcctgacactcatggccttccacgtcttcctccaagagaaggtggacctggcagtggtggaggtgggcattggcggngcttatgactgcaccaacatcatcaggaagcctgtggtgtgcggagtctcctctcttggcatcgaccacaccagcctcctggggggaacgggggagaagatcgcatggcagaaagggggcatctttaagcaaagggtccctggcttcactgggctcccaacctgaaagtcccctggaagtgctgaaggaccgagcccagcaaatctcatggccctctaaacctgtgtccgatgctgaaggcccttcaaagaaagggggggccgccgctgaccccggggccctggagggggggaccaccacgggtccaacgccgcctttggcctttgccaactgggcccacgctgggtcgtgaacggaaaaacacccaatggggggctgggggaacccaaggggttcccgggcagggggctccggtgggcagttgcccctggga

SEQ ID NO: 78268 - DNA, 711 bp, Homo Sapiens
  misc_feature (128)..(137): n is a, c, g, or t
  misc_feature (139)..(139): n is a, c, g, or t
  misc_feature (147)..(147): n is a, c, g, or t
  misc_feature (150)..(150): n is a, c, g, or t
gcatcaaagtccctgcctgacaagctttccactcatgtgatctttccaacctgtttggggcctggggaaggggccggggacgttataaagagccctttttttcccaacacttctggggattttaggtnnnnnnnnnncncggctggnagnaagccaggcatcggggagccgggagcctgaccctcatctttcttccaaacaggctcagagggtgtcctgcaccggggcctgggcaggagggaggtgcttctagttctgccaggagacaggttagctgctccccacgtcagctgggacaccccgacttttgtttaccagagaaaaagggagggggagagggctgcctttggacttgtcccgggacacctaggctagggtggggagagacgggccctggtggtggctcgggaggcgaagcgttgtcctcagccccgcgtggaactcgtgtctggcacagcctggctgtggcctaacctgccgagagtccatcagcctccatcctaccccctgtgccttgtcacgccagacttcccacggctcctcgagatcccaacactgccagcatttcccttccttcctctcctgtctccctcctctgcccgggagctcaggaaccgaggcagggaaggatcccatgagctccttaaggctcttttgtaaggtttttgtagtgatttttatgccccctgaataaagaatgaatgggccaaa

SEQ ID NO: 78269 - DNA, 927 bp, Homo Sapiens
ccggtccggaattctccgggatatcgtcgacccacgcgtccgcggacgcgtggggaaagctgcgccccgcccaaaagcactgggttctgcagtccaggcccttcctcagctcccaggtccaggagaactgcaaggtcacctacttccacaggaagcactgggtccgcatccggcccctccgcaccactcctcccagctgggactacacccgcatctgcatccagagagagatggtccccgcccgcatccgcgtcctgagagagatggtccccgaggcctggaggtgctttcccaacaggctgccgctgctgagcaacatcaggcctgatttctccaaggctcccctggcctacgtgaagcggtggctttggaccgcccgccacccccacagcctgtccgcagcctggtgaccgtgaaaatcgccccgccagagagcagaggaagcccgacgcccaggccatctgccttcaggtctgtgatgagaaacggagtggcctgttccgttgtgcccaggtctaggccgctgagcagagccctcactcccaggcagagttgtctgaatccttcctggcggccgcctgctgccctgacgcctcaggcttgcctgcacctggaaggagcttcgccaggtgggccatgagcctctgagcacacccagcctgctgcccggctccaagagtcaggcccctgccaccacctcctgagcctccagccctcagcaccttcaccctactgaccgcggttctacccccacaccagccaccggccccaccggggcacttcccactgctccagccgaccactcagcgagccccaggcccacctctcctctcccttaaagcccttcccttgcccttgcccattcgctcctgccttctccctggggacaggaggcatgcttctccccagtttccgcaataaaatatt

SEQ ID NO: 78270 - DNA, 685 bp, Homo Sapiens
  misc_feature (622)..(644): n is a, c, g, or t
gccttctaagcagattgggaaggaggtattttctggttttcgctttcctccgacttaataggacttgccttctccctgggcagggagagaggctgggttggtgctctcccttactctactcatactgacttagagcctctggctgctgtttgggcatccaagaaagggaggggaaggaatgagctaaaaacaaaacagaatgaggtgggaaagggagattttcttctttacagaggaaaataggaaaccctccaagaattgtgcaagtaaagacatttgttgaatgcactgagtcccttggtgtagtagcaataaggaaaaatgaaattactttcctgtgcacacagtccagcctaattggtatgtgatgttgcacttagcagccatgtggtgggcatgtgtgactactctggttttcactttagtttctaaactttttatccctctcaagtccagcatggatggggaaatgtctctggatccccacagctgtgtacttgtttgcatttgtttccctttgagatttgtgtttgtgtcctgctttgagctgtaccttgtccagtccattgtgaaattatcccagcagctgtaatgtacagttccttctgaagcaagcaacatnnnnnnnnnnnnnnnnnnnnnnncaattccgtgttttataaagacaacagtggcttctatttct

SEQ ID NO: 78271 - DNA, 999 bp, Homo Sapiens
  misc_feature (145)..(145): n is a, c, g, or t
  misc_feature (150)..(150): n is a, c, g, or t
  misc_feature (195)..(218): n is a, c, g, or t
  misc_feature (486)..(494): n is a, c, g, or t
  misc_feature (513)..(521): n is a, c, g, or t
  misc_feature (561)..(592): n is a, c, g, or t
  misc_feature (624)..(638): n is a, c, g, or t
  misc_feature (652)..(660): n is a, c, g, or t
  misc_feature (884)..(935): n is a, c, g, or t
ccataatagcctttaatactaaaatgcattacaatttttttgaagcagagaaaacacatttaaagggggaaacagagaaccaccagataaaaggaaacaatgtggcagataacaccatttgaaacataactgtaataattttaantaganagctgcttttatcatccttcaataaaatagacagtgggggattcnnnnnnnnnnnnnnnnnnnnnnnnacagaggatttcactccctggggaaaaatgtccattacatacaaggtctacgcatttgcaaccaatttttaccctccaaaaacccagcaacaataaatggttaattggaaccaacggttctttgcatccccccaaatttttccaccccggttttgcaaggtaaacaaataacaatgttcacccagggccacttccccccccataaaaggggcgaagggggttactcccctttgcaaaaaaaccctcttaacctctacaaacccaccannnnnnnnntttgttgtctcgttttctnnnnnnnnnggctactcgtgggtttgttgggataaaaatttctggtctnnnnnnnnnnnnnnnnnnnnnnnnnnnnnnnngtcgcgcactaaaacctcttttttaaccagtnnnnnnnnnnnnnnnttaccctggtttgnnnnnnnnncgcggtggtaccaccctttctccgtttatttacgacgggccttttgtttgtgtacacgcccccctctccccttttttggtcctggtgggcgcatttttccctaagtgtggggcgtctttttctcttctccccacctgctgctttgttggtggtggtgtgtgtctgcccactcacgacttataaaatatcacttggtgtcaactcctttctgttggctgtgcgtnnnnnnnnnnnnnnnnnnnnnnnnnnnnnnnnnnnnnnnnnnnnnnnnnnnntgtgacgcgcgtcgcctctcctcccatatactgcccactcgcgcgggcggtggcgttttgtctc

SEQ ID NO: 78272 - DNA, 988 bp, Homo Sapiens
  misc_feature (61)..(61): n is a, c, g, or t
  misc_feature (110)..(110): n is a, c, g, or t
  misc_feature (246)..(246): n is a, c, g, or t
  misc_feature (324)..(324): n is a, c, g, or t
cagtcattctgacagtcttgccaacatagatatccattccattcattctgtgcttgactgnacattaacgcctgccatacatccgatgtgtatgtttgcgactctggatntctcacccagatgatggacacgcagcatagttgtactgcagctagtagttaaagcagacctccctaatgctcctgccacttggagttaggtagatcttgttcccaaagttcgcagggtgcctggagggcaaataanaaagcagcagtcagtcagtagtcagtgatggagagaacaagaggagagatgcctggcctctgcccaagaaattagctntgatggaagcctgagcaagtcacctggttattgtaacgtggagatctttgtaggtttagacatggctccctgtccccagtaaacatccagccattcagacaaagggggcctggagatacagagagcccaaatgcctgctggattgtctcctgatgagtacatgtggactcacctgaggaagggaaggaagggaataatcttttatgtttcatttaccttatgaaaagtgttaaaacattgccaactcaaaataacattatttaatgcatgtgcaaagttaggtcttcccagttgtctcagtgctgaggaacctcatcagagaagcatggaagatgccaaaggatttttggaaggtaaagaaggctgaatagtgaccacatgggcctgttttcagggtcccagcttagttaagtcacccatgcacctggtcattgtgtctcccgtgcacatccagcgtttctcagaagcagacccacccttaagttgacaggattgatggaacatgctctcctgctcaaggcacaacctctgggctggagtagaggactctggtgggaaggttttgctgctaatgtatttatggaatgaatgtatttcattcaaatctgtattcctctaggaaggattaaaattaaacttttttaaaatacaggaaaaagaacaa

SEQ ID NO: 78273 - DNA, 1366 bp, Homo Sapiens
  misc_feature (46)..(55): n is a, c, g, or t
  misc_feature (804)..(895): n is a, c, g, or t
  misc_feature (903)..(928): n is a, c, g, or t
caaatatctctccatcagaactctgcaacttaattgaaggcatctnnnnnnnnnnggacattaaatataaaatttaagagagagagttctacatgacatttcatcaactacagtccatcagaaggctctaacttattgaccacaaagttctaagaacctacaatacataaccctgtaaagcactgttgtaagcagttattcacaagttagtctccgagtatttctattaaaattttttcaaagtataactactaggaacagaagcttttaaggcctgccctactgaactcactattggtataaatttaataaaacatacatatttgtatttgctttctgcctgcctttcgtctcccactgaatactggactccatctgaacagttaactgccacaattaactacatgcgaacctgaggaaggtcagtccaaaacaaacaacgctactaaataagatagaaattttccccacagtgagtcctacctgtgaagatgagttcagatccaaagagtacatcagaatatgctcatttatgtctgaggcaatgcaagagtattggattcacatattctaaaaatgctcgtcatttgtggctaattttatcaagtctagtttaatctcatatttacagagtttagttaattctaattagctttgttggaggtcataaaccacattattaaccttgaaccgactctgtgtttacttgagttcctctgcataatagcatgtcaccaccatcataaacatgttggtattgcattatgcttctagaggagacatccaccaatatttgaaaatctnnnnnnnnnnnnnnnnnnnnnnnnnnnnnnnnnnnnnnnnnnnnnnnnnnnnnnnnnnnnnnnnnnnnnnnnnnnnnnnnnnnnnnnnnnnngccttttnnnnnnnnnnnnnnnnnnnnnnnnnntcttaacttatatttacttactgtatgttgtgattagtttaatagaagggagtttaatccttaataattaagttagtcctcaacgtttattgacttagttctgatgtagtccttgtgtactattgtataatgtagactacttggccatacttgattttgtctaaaagttaatgcataaattaatattaaatatggccaaatataaaagtttaatgagtcatttgaggtcatttagccagaaaactgcatttatgttcctggtgaatttttttcaatgtccttttccaaaagtggcagtaagcagctgtcttaaaataaggagacagtgggaatgatgttgttaaagtcttttatacaatgtattgtctgtctgttccataaaaagtaaaactactctattcgtgaccagcttgggcaacatagtgagactgtctcttt

SEQ ID NO: 78274 - DNA, 1054 bp, Homo Sapiens
  misc_feature (144)..(144): n is a, c, g, or t
  misc_feature (155)..(156): n is a, c, g, or t
  misc_feature (184)..(184): n is a, c, g, or t
  misc_feature (197)..(198): n is a, c, g, or t
  misc_feature (213)..(213): n is a, c, g, or t
  misc_feature (225)..(225): n is a, c, g, or t
  misc_feature (355)..(355): n is a, c, g, or t
aagtttccgcaccgatgtggatcagccacttgctgcattgcccacaaaggagagtgttgtatgggccaagacatccgaggtgcctgggatcggtcgcttggaggaccagtatttcccatggagggtgacgatgcttggggagcntgtgacgtgcnnatgtgcgtggaccacatggtgaccttgnccaagtcatcatnntaaccgtccctcacntgcttggcggcnccgtcccgggaaccactgcactcccttggcagaggccagcgcgtggccagccccccgggttcttggatggtggtggcggaggaccttgcgtgcagtgtgacgctctgtcttgaatcccttagcgggtacntaccaggaggatcagggcaaggtccctctccagctgcaggtgaggcctgcggaactcagcttggatggcagcctttggtgggccgctgtggcccgcacgtctctgttctctccaagtaacatgcgacggtgtctggtgtcacgtctcgcctgagaagcccgtcttaggaaagcttagcttgaacacagtgctcgggaggtttctgctctgtctgtcatggcagtctcttggtttgtgtctggccaaggccatgcgtgtgcctcggaccgagccccagcttaggcgagggagtcaggctggcttcggccctcggttttcattcaggccaccctgctcatggcccttcctggccgcctgccacaccgcaagctcgctggggggacactagaagcaccgtggcctgggattccatctggagctgtccgcaggcaccagccccagcctcccaccacgctcactgcctggcttggaaaagttaagaagcccctcaggaagagaatcgaggccaagttcctctgcgccgagggccccgagcatatccgccaaggctcagctgcagtgccaggcggaggaggaagatccagaaattgtgaacaatgtttgatttagtagcgtgacttgcctttccctttaaaaacatcttttacaaatctgtcttggaataaagtctattttctgccttttggtttttaagctctg

SEQ ID NO: 78275 - DNA, 1795 bp, Homo Sapiens
  misc_feature (1668)..(1668): n is a, c, g, or t
  misc_feature (1700)..(1700): n is a, c, g, or t
  misc_feature (1738)..(1738): n is a, c, g, or t
gccggaaggcagatctcaccgcctgcttccctctgcagcggtagcacaagctcagcgagtggcggctccagaaggcagcggtctaggcgaggacgcccggctggaccaggagaccgcccagtggctgcgctgggacaagaattccttaactttggaggcagtgaaacgactaatagcagaaggtaataaagaagaactacgaaaatgttttggggcccgaatggagtttgggacagctggcctccgagctgctatgggacctggaatttctcgtatgaatgacttgaccatcatccagactacacagggattttgcagatacctggaaaaacaattcagtgacttaaagcagaaaggcatcgtgatcagttttgacgcccgagctcatccatccagtgggggtagcagcagaaggtttgcccgacttgctgcaaccacatttatcagtcaggggattcctgtgtacctcttttctgatataacgccaaccccctttgtgcccttcacagtatcacatttgaaactttgtgctggaatcatgataactgcatctcacaatccaaagcaggataatggttataaggtctattgggataatggagctcagatcatttctcctcacgataaagggatttctcaagctattgaagaaaatctagaaccgtggcctcaagcttgggacgattctttaattgatagcagtccacttctccacaatccgagtgcttccatcaataatgactactttgaagaccttaaaaagtactgtttccacaggagcgtgaacagggagacaaaggtgaagtttgtgcacacctctgtccatggggtgggtcatagctttgtgcagtcagctttcaaggcttttgaccttgttcctcctgaggctgttcctgaacagaaagatccggatcctgagtttccaacagtgaaatacccgaatcccgaagaggggaaaggtgtcttgactttgtcttttgctttggctgacaaaaacaaggccagaattgtttagctaacgaaccggatgctgatagaattgctgtggcagaaaagcaagacagtggtgaatggagggtgttttcaggcaatgagttgggggccctcctgggctggtggctttttacatcttggaaagagaagaaccaggatcgcagtgctctcaaagacacgtacatgttgtccagcaccgtctcctccaaaatcttgcgggccattgccttaaaggaaggttttcattttgaggtagggtgtttctgggactcactcattttcctttcatctgctctgtagaagatctaaggcatgtctttctcttttggattatccctttaggaaacattaactggctttaagtggatgggaaacagagccaaacagctaatagaccaggggaaaactgttttatttgcatttgaagaagctattggtaagaagtgatcatgaacattaaggaattggctgcaaggcaaaaggaaaaggtttggattgggattcaaaagatccacagtgaaacacggtttatttttgctctccagcactcaagttgaatgtcgaactgtcctactccaaaattgacatctcagatgatttacagcccaaaggaatgtcttaaaaacaactaagtcattcatgtcagaatcctttgcctggatgactccaaacagnggacattgtatggcttggctgccgggtactgntattttggggaattgtggatgtttccctccccgggggnggggtaaataccaggcccctaaccccgtggggaatttaaggtccccccctcctccaa

SEQ ID NO: 78276 - DNA, 722 bp, Homo Sapiens
tcccaggaactgcatcctggagcggctaagactgagcctgccgccctgagttcccaggaggcagaggaagtggaggaagaggggctccagattacgagaatctgcaggagctgaactgagggcctgtggaggccgagtctgtcctggaaccaggcttgcctgggacggctgagctgggcagctggaagtggctctggggtcctcacatggcgtcctgcccttgctccagcctgacaacagcctgagaaatccccccgtaacttattatcactttggggttcggcctgtgtcccccgaacgctctgcaccttctgacgcagcctgagaatgacctgccctggccccagccctactctgtgtaatagaataaaggcctgcgtgtgtctgtgttgagcgtgcgtctgtgtgtgcctgtgtgcgagtctgagtcatagatttggagatgtctctgtgtgtttgtgtgtatctttgggtctccatcctccatgggggctcagccaggtgctgtgacaccccccttctgaatgaagccttctgacctgggctggcactgctgggggtgaggacacattgccccatgagacagtcccagaacacggcagctgctggctgtgacaatggtttcaccatccttagaccaaagggatgggacctgatgacctgggaggactctcttagttcttaccttttgtggttctcaataaaacagaacttaaaaaatt

SEQ ID NO: 78277 - DNA, 714 bp, Homo Sapiens
  misc_feature (25)..(25): n is a, c, g, or t
  misc_feature (67)..(67): n is a, c, g, or t
gagtgaggagtgcgggagcttctcntgcaaagaggaaccacgaaggtggccacaggtctggttctgnaacagagaccagaggctcgcctgagcagagaacagcattgacttcatcagcagggagctgtgtgcgcattccatcaggaagctgcaggcccatgtcctgttgatcaaagcagtccacggatattttgattcaagacagaattactctgagaaggagtccctgtcgttcatgatagacacgatgaaatccaccctcaaagagcagttccagtttgtggaagtcccaggcaatcactgtgtccacatgagcgaaccccagcacgtggccagtatcatcagctccttcttacagtgcacacacatgctcccagcccagctgtagctctgggcctggaactatgaagacctagtgctcccagactcaacactgggactctgagttcctgagccccacaacaaggccagggatggtggggacaggcctcactagtcttgaggcccagcctaggatggtagtcaggggaaggagcgagattccaacttcaacatctgtgacctcaagagggagacagagtctgggttccagggctgctttctcctggctaataataaatatccagccagctggaggaaggaagggcaggctgggcccacctagcctttccctgctgcccaactggatggaaaataaaaggttcttgtattctc

SEQ ID NO: 78278 - DNA, 520 bp, Homo Sapiens
aggctaaaggccagaaacaaactttaattcccaagccggacccttaagtcacaaggaacgtcagatccggctcactccctgacagggtgaattggaaactggcccctacttggtctctaaccccttccactgggtctagtggggactctgacgccgaacaggggctgtagatcagtgagtgtgtatgtgtgtgtggaggggcagcaggggccgctttccacgtggttacataagcacgtgttggggttgggcaggtgttcctccggtctgagggtcctcgtatgtccaaagtctctgtgcataatcgcagacccagatgtgtttgcatttggtagaatcagggtgcttaaaaaggggtgactgagggctgcagttgcagaggtggctggggactgtgcctctgtgggggcggcgtgtctcagtgggaagatactctggggagccaggacgatgtcgtacgtgggtagctgtgtggacaagtggttgggggtgtgtggacatctgtggtcacaggctggga

SEQ ID NO: 78279 - DNA, 844 bp, Homo Sapiens
  misc_feature (262)..(279): n is a, c, g, or t
tgtgcgcaggcagcttaagttcataggaagaaataaggttctgatatgtttagagtgcacattttaaaacaacaaaataaaaatttcaagcatgtgataaaaatattgatttttataatacagtattgctttataaatatagatggaaaagctataaactttactggtctttggtgcatccagagagggataaataatttgccatttgtaaattagaaatccaaattttttcttttgttataaaagtccattacatgaggcnnnnnnnnnnnnnnnnnntgcttaaaatataattaacacacacatcaggttcagaatcagacccaccaagtggtacagcacagtaacaacccatggaagcttgggtctgtgacctggaaaattctactatgggtccaacacagcctctgaccactgagagtaggagagatacttgttaagcagcactccagctgacccccccggcagtcataaaattaagtgcataacacaaaaagaacaggggaaaatagagaaaatattttatgtcactaatctataggccagatccaaagccaattccactgtgaaactcaattcttgcccccactactttcagtatcactggaacaaacacatcgtcaatttctaacaatcgtttctcaaaaaggtaagctgagtaaataagttgtataaaacaccaccaatctagctttacaaagattgtgtttgacgggttaaatgagagcagagaaaaaccagaaacttgacgagcactgctcttaccaggaattaaatgtaggcgttggaaaatgaatgcaaaatatatccagatcataaggctacatactcttaccaaaaataa

SEQ ID NO: 78280 - DNA, 1728 bp, Homo Sapiens
  misc_feature (62)..(93): n is a, c, g, or t
ttcatcttatcacacttagtattttttccttcagatgtaaaggtgaatctcgtgccgcgagnnnnnnnnnnnnnnnnnnnnnnnnnnnnnnnnagaaaagctcgactttaatggttcagatagttttacaatgaaaataggtacccaaagactgtcttaaatgtccacaactatacaaaagatgaatacaaaactcccaggcaggcacaggcaggggacaaggcccaccgtctcccacgctctggtgtggtcgggtgtccctgccgcacccccagtaccaccgtgccaccttggtcccctcaaccctgggggtaggagggcactgccccagcgagggaaaatagaaaagattttaaaaagtaagagtctaacaggcagagctgtcactaaaattaggaagttgtaacttttttggttaatttacttactacattcaaaaatgtaacgttgagtccaaaaagtgtcttaaatcacacaaaaaagaacccatattaaaattttaaaaataagccccaaataccccagagaaatgcatccagaacttaaaacaggctgggtcagcagcagggcggcggccgggggacctcgggggccaggtgtccgccatccggttactttaagctggcaaagccatcgtcccgtggacccccacaagtgacggccagctgtgaggcaggtggttctaggacacattggtcatgggcttgtacttcttgaagcgcgtccactggcccgtggcatagttcatctcaaacactgtgtccaccagcatggttgtgctaccctggccgtccgccttgggcaggtcctccgtgtgctcgctcagcttgatctggatcacgtccccctgctcctggcacgggttctctcgggagccggccatgaagcccaggatgagggccttctcagggccgcgtgactttgttggccgtcttgaacatctcctgggcagcgaacatctgctctctcgtgagggacagggtcttcttaggctgctgctgagcaggggcctgggtctgcggggccaccatggcaaccgggggtgtctgagtggtaggggcgacagccggaggtgtggtgggtgtcagaggcgaggtgggcgccgcaggcgtgggtgtggcagggctcaggccgctgttgtacatgggcgcccgctgcttgaactgcgctggcaacgtggggctcggggcgctgggctcctctggtgggcggctggcttcccgggaagatggggctgggggtgtctcggagctggggatgtaggaggaggcgggaaccacgctgggcgtggagggaaggtagctcgtggagggcagcgcaggctcattgttcagggacccaagtttctgcgtggacaccaggccggctgcgtagtccggggtggcgttctccaccaccgtttcctccttggccggcttctccatcttccgcagcagcccccggcccttggcgtggaagggcaccccggcgctccgcttcaactgctgggcggtctccgtggacttctgcagcagctccgcccgcagcgtggcgctcttgggtttccgctttaactgaaaatgcttcaccgggggagtgaggggtcccgcgagggtcgtcagggcgtttttgttcaagtactggcactccagtggcagcatggcagacgcttcacactcacccaccttttctctaagttctcccaaaatccctcgtgcggaattcgccacccagcctcgctccttgacc

SEQ ID NO: 78281 - DNA, 883 bp, Homo Sapiens
ggtctaggagcgagcctgggtggcgaattcggcacgagggcgacacgggcctgtggctgcacacaagctgggggccacggacgagctgtgggcgccgcccagcatcgcgtccctgctcacggccgcggtcatcgacaacatccgtctctgcttccatggcctctcgtcggcagtgaagctcaagttgctactcgggacgctgcacctcccgcgccgcacggtggacgagcatcctattttgcagatgaagggcgccctaatggagatcatccagctcgccagcctcgactcggacccctgggtgctcatggtcgccgacatcttgaagtcctttccggacacaggctcgcttaacctggagctggaggagcagaatcccaacgttcaggatattttgggagaacttagagaaaaggtgggtgagtgtgaagcgtctgccatgctgccactggagtgccagtacttgaacaaaaacgccctgacgaccctcgcgggacccctcactcccccggtgaagcattttcagttaaagcggaaacccaagagcgccacgctgcgggcggagctgctgcagaagtccacggagaccgcccagcagttgaagcggagcgccggggtgcccttccacgccaagggccgggggctgctgcggaagatggacaccaccaccccactcaaaggcatcccgaagcaggcgcccttcagaagccccacggcgcccagcgtcttcagccccacagggaaccggacccccatcccgccttccaggacgctgctgcggaaggaacgaggttgtgaagctgctggacatctctgagctgggatatggtttggcgcctggccgagaagccgaaacggaaaaaggaagactctccaatgcgga

SEQ ID NO: 78282 - DNA, 980 bp, Homo Sapiens
gtggaccggtccggaattcccgggattccatgcgggagagcgacacgggcctgtggctgcacaacaagctgggggccacggacgagctgtgggcgccgcccagcatcgcgtccctgctcacggccgcggtcatcgacaacatccgtctctgcttccatggcctctcgtcggcagtgaagctcaagttgctactcgggacgctgcacctcccgcgccgcacggtggacgagatgaagggcgccctaatggagatcatccagctcgccagcctcgactcggacccctgggtgctcatggtcgccgacatcttgaagtcctttccggacacaggctcgcttaacctggagctggaggagcagaatcccaacgttcaggatattttgggagaacttagagaaaaggtgggtgagtgtgaagcgtctgccatgctgccactggagtgccagtacttgaacaaaaacgccctgacgaccctcgcgggacccctcactcccccggtgaagcattttcagttaaagcggaaacccaagagcgccacgctgcgggcggagctgctgcagaagtccacggagaccgcccagcagttgaagcggagcgccggggtgcccttccacgccaagggccgggggctgctgcggaagatggacaccaccaccccactcaaaggcatcccgaagcaggcgcccttcagaagccccacggcgcccagcgtcttcagccccacagggaaaccggacccccatcccgccttccaggaacgctgcttgcggaaagaaaccaaggggtgaaacctgctgggacatctctgaagctgggaaaatgtttggccgctgggcccaaaaaggcgaaaccggagaagggaaaaactcctttattccccacggggtgggggaaaaaccccggcccagggagggataccgggggtgtgaaaaacccctcaccccggaatttcgcaacacccggacctgggtggtccccac

SEQ ID NO: 78283 - DNA, 693 bp, Homo Sapiens
catcgccacactgcgggtggccctgcccagcgtcatgcgcttctgctgctgcgtggctgtcatctacctgggctactgcttctgtggctggatcgtgctggggccctatcatgtgaagttccgctcactctccatggtgtctgagtgcctgttctcgctcatcaatggggacgacatgtttgtgacgttcgccgccatgcaggcgcagcagggccgcagcagcctggtgtgctcttctcccagctctacctttactccttcatcagcctcttcatctacatggtgctcagcctcttcatcgcgctcatcaccggcgcctacgacaccatcaagcatcccggcggcgcaggcgcagaggagagcgagctgcaggcctacatcgcacagtgccaggacagccccacctccggcaagttccgccgcgggagcggctcggcctgcagccttctctgctgctgcggaagggacccctcggaggagcattcgctgctggtgaattgattcgacctgactgccgttggaccgtaggccctggactgcagagacccccgcccccgaccccgcttatttatttgtagggtttgcttttaaggatcggctccctgtcgcgcccgaggagggcctggacctttcgtgtcggacccttgggggcggggagactgggtggggagggtgttgaataaaagggaaaat

SEQ ID NO: 78284 - DNA, 1113 bp, Homo Sapiens
  misc_feature (428)..(445): n is a, c, g, or t
cccgccgtgttttaacctccgcgacacccgagcgcgaacgcgacggtatggggtgacttccctgcagtcctgggggcctagatgggcccaagactgggtgagagtcttggcagagcctttgcaacaccttaagtggacaggactgggaggtcttggtggttggagccaacgtgggttccctgcggctccttagtcacctctgatagcagattgagggaggaaaacaggtaaggcatgaggaaatggccaggttgggttaacccactggtttcaaccagttcaggaatgaggttatttggccatgactggctgatcttgagctcaaggatctgcttcaaatgcacacaggcctagttgaagtttaaaccccagcaaaacattcctccctgtaaatggaaaatcctacttctacccccaccctgccctgnnnnnnnnnnnnnnnnnnccccaagatcattagatgtcctcacccctcctcactgcctctcctctctgggacaggctgggacctttgaggaagataaagccttccttgactacccatcatattcagtgtccctgttcctcactcagagaggaaggcagaaccagtcaggcttatttcagtaagttccacagttctacaagactgcaggaattctccttaagggaggagagcaagcaggtgtggccccagcttctggaaatggcagaagagagggttttctcattgaatgggggtgggggctcgtgtgtcctgggaaaccccatcagtcccttcatttcttgagactcaactcctgggaggagagggtctcaagagttgtccctggaaggagggcgggggcagtctgcatctatttcaggttgtggctcttggttctaggactcttacttctctggctaagggctcagcttcttgggacttcaaccatcttctttctgaaagaccaaatctaatgtaaccagtaacgtgaggactgccaagtatggctttgtccctatgactcagaggagggtttgtcgggcaaattcaggtggatgaagtatgtgtgtgcgtgtgcatgggagtgtgcgtggactgggatatcatctctacagcctgcaaataaaccagacaaacttaccaacgtc

SEQ ID NO: 78285 - DNA, 1184 bp, Homo Sapiens
tttgcataggaagatttttactatgtttacatttttcttaaattaatttttaaaaaagcatagtaaagagtctgaggacaaattattcaactgtttatcatacataagaccgcatgactataatacaaaggggggttcttttttcatttaacgttacaatatacacagcaagtccggactagatcttacaatctgaacacaggtatttaaccttttccatgctgtttatgtttacaatgcacagaagtcctgtaaccaaactgtgtagtaaagcacacaaaactggactgtaacataacacagtatgcagaagcattggattttatgattttctttacgtaaatatcggtttaaaaactgctttagttttttggtgcttgctaagatgtggcaaccagcacagaaaaaataaatgacctgacccatatgatatcttaaccttatattcctaaacagcagtaactactgaattccttttgatattgctatactcaagatgatatccttttattcactgtaaacctttatgaactaccaagttcaaaaaaatcatccacaggcttgacagttaattacaaaataaatatggatttcctgataaacaacaaaaagtttttgtagtttataaaaacgagtatttccaagtttccattcacatttacatagtgtttagcctttcttttctcactgtttacatataaaaacctgcttttgttcagaaaaaattgactagtccgcacatggaattgaccatggatgaacgcggtgtccgctggtcatctaaacaggtatcgcagggaagatatgcttctttccgggctccttgttctgaacggtaattactatcttcatctccattcaccgctcaagtgtccacccaaaatggtcattttaaatgggaacaatttggcaatggcggctgggttcatttggcggggattccaccgggggccgtaaataccgcttctgcccgggccgccgggagttctgcccctggcgattttggcccggggcgattccccaatagggcggttaatagaaactgtaaacggttcccggtgaatgtgtacccgcaatccacaacaacagcggggggaaggtaaagcggggggccatggggaaacaacaataattgttcctccgcatcccaggagaattgtggagtgttataaaataataagggg

SEQ ID NO: 78286 - DNA, 832 bp, Homo Sapiens
  misc_feature (72)..(120): n is a, c, g, or t
gccacccactgtgggactttctggtgggctcctcagctcccaccccaggctggggcccagattgtgaggtcnnnnnnnnnnnnnnnnnnnnnnnnnnnnnnnnnnnnnnnnnnnnnnnnngggatctggcctggcccttggggatggggctgctggggactgcccccttcccgcgtggcaggcgctctgtgtgctgtgtgtgccccaggctctgttgaccccgtccaggaactaacttacccagcttggtctctcctgagtcctccaccctggcctgggattggccagggagcagggcgggcattgggaccagtgtggagcctgagggtgcctgccctgctctggagggagggccaggagctgccacacccccaagtcctctcagggcccaccctcctttttcagcctctgcataaggcccctgggtacactgcagaagccccatccttcccgcctccgggcataaggcccctgaccacacttcagaagccccatcccccctgccaccgggcgatccctgctgtgagccgaagctctccctgccccgccctggccatgtgatcgtgttggtgacagaccctgatgtgctggtgctgtgtccccaaaaccggggccctccacagaggccccttcccagcgacactacctggggctcaggcctggacccccccagttcacggttgctcctgggagctgcccctcccgtcacatcagaaccttggaagctgctgctgctgcttacagaattatatttttttcttttgaagagttttaagaagttgtaactttttgtgtcttgtcatgtcagagaataaataaatattctaagtag

SEQ ID NO: 78287 - DNA, 1028 bp, Homo Sapiens
  misc_feature (159)..(160): n is a, c, g, or t
  misc_feature (175)..(176): n is a, c, g, or t
  misc_feature (180)..(180): n is a, c, g, or t
gcagcagtcccgatgaagcgcatggcgcacgcatatgtgagtactcatccatagcacccagcttacacttatctcccgctcgttgtgtgtggatgtgacgatacatttcacacaggaacagcttgcatgatacgaattatacgactcctataggattgnnccctcgagccagatnncgcnacgaggaaagatgtgattctagagatagagccgttagcatccatctcctccctgtaactcttaggaaatgcatcaaggaccataatagaaaggatccccctgacctaaggatgaaatcgacctagggttaatcatgacagctgcatcagttgtattggatgcaagtcaactctggaggtgagtgcccgcaagcagttcccctgctttgaaagaagatggtcagcccgctgcctccccagcggccacagctcctttgagtgtggggggtcacagccaggatgtattcctgacaataaggatccttttattttcatttctgcataatgaaagagcctttcgatttattagaagtggtttttcctccctacatctttaaattcttggttctctttagtcctcatcccttgaatggacttgtcagctacctccccaggaggagttcagaagcttctgttggccatcacttgagtagatgacaagctgtaaggtatctgctgctaacgtggctgcttctccgagagcacattgaggtccagacagatccaaaccttggccctaaaaaatgtgtgctgtaaagttacttgatgtatatttattataattatttatggttgcatttaacaaacttttcattcaatctgatgctatttacaccatgctgtgtaaaggaagctcactaaaggaaaaaagtcacaccaataaataaccttcatctaattttgatttaccttaagagttgtgtgatcatctactcttgctgagcaagttcaaaggctggcatgcttggatggctctgatatttaagtgctgccaagtggctaggaattaaagtgtttctaattataaaa

SEQ ID NO: 78288 - DNA, 543 bp, Homo Sapiens
  misc_feature (532)..(532): n is a, c, g, or t
ctttcgtccacattccagggcctcctggaagacttaaccttttgtctttgaaatgcatcaaggaccattatagaaaggatcccctgacctaaggatgaaatcgacctagggttaatcatgacagctgcatcagttgtattggatgcaagtcaactctggagtcctcatcccttgaatggacttgtcagctacctccccaggaggagttcagaagcttctgttggccatcacttgagtagatgacaagctgtaaggtatctgctgctaacgtggctgcttctccgagagcacattgaggtccagacagatccaaaccttggccctaaaaaatgtgtgctgtaaagttacttgatgtatatttattataattatttatggttgcatttaacaaacttttcattcaatctgatgctatttacaccatgctgtgtaaaggaagctcactaaaggaaaaaagtcacaccaataaataaccttcatctaattttgatttaccttaagagttgtgtgatcatctactcttgctgagcangttcaaaggct

SEQ ID NO: 78289 - DNA, 1313 bp, Homo Sapiens
agtactatacggtcctaaggtagcgaggcctgggtggcgaattcggcacgaggggccatctggggccgtgtggtatttgccactcaggagacatgtccctatgacatagcagtggtgagcctggaggaggacctggatgatgtccccatccctgtgcccgctgagcacttccatgaaggcgaggctgtgagtgtggtgggctttggcgtctttggccagtcttgcgggccctcggtgacctcaggcatcctttcggctgtggtgcaggtgaatggcacgcccgtaatgctgcagaccacgtgtgctgtgcacagcggctccagtgggggacccctcttctccaaccactcaggaaacctccttggcataatcaccagcaacacccgggacaataatacgggggccacctacccccacctgaaattcagcattcccatcacgggtgctccagccggccctgcagcagtacagcaagacccaagacctagggtggcctccgtgagctggaccgcgctgctgagccagtcagggtggtgtggcggttgcagcggcccctggcagaggccccgcggagcaagctctgaggctgtgttaccacctttggaaagaagagtgaccttttttctgctgtaggaagtgatgttgaggtgacggtggccctcaggattcagggcccagcccctgcaggggcccaggctgcctctcatctccacccactgactgcagactgggctttgggctctggggcaaacttctcttcagccccatggatccttaacctggcagcccgttttggggtgctttcttgagcccccagttctctgtcccctagcactagactcagctgtattgtttttccttctggggagcccactccaactgcacagaagttctgggcctgacaggtagattccagctggaaggcaggcccgtgcctggttttgcgtctgttcccctgagggccatcgtcatcctggagcttcaatggggccttggctcctgtctgcctctcagtcagagtcagggctgacaaaggactcagcttccttagcatctcagcagaaaccttgctctgaagaccagagacagaagggacagaaacaggagtgcctcctgctgtgccaggcccatgggcagtgcaggcagatccctgaaggtcagcactcctgggtcttcatatgccaacaggggcgctcttgacactgtgccttcattttccagcccacagcctgggtctcagggatcttgaggggtagaacatgtctggttggggcttgggaataaacatgatctattgaaaaacctctgtaaaa

SEQ ID NO: 78290 - DNA, 251 bp, Homo Sapiens
agcggccgcctactactactatacggctgcgagaagacgacagaagggacagaaacaggagtgcctcctgctgtgccaggcccatgggcagtgcaggcagatccctgaaggtcagcactcctgggtcttcatatgccaacaggggcgctcttgacactgtgccttcattttccagcccacagcctgggtctcagggatcttgaggggtagaacatgtctggttggggcttgggaataaacatgatctatag

SEQ ID NO: 78291 - DNA, 1114 bp, Homo Sapiens
  misc_feature (43)..(81): n is a, c, g, or t
  misc_feature (83)..(118): n is a, c, g, or t
  misc_feature (874)..(874): n is a, c, g, or t
  misc_feature (983)..(983): n is a, c, g, or t
caaaaacttgatagatcactatagggcgctagcgcgttgatgnnnnnnnnnnnnnnnnnnnnnnnnnnnnnnnnnnnnnnncnnnnnnnnnnnnnnnnnnnnnnnnnnnnnnnnnnnncagtcgacggtaccggacatatgcccgggaattcggccattacggtcgggggcccccggctccatcttgcgggagaccgggttgggctgtgacgctgctgctggggtcagaatgtcatacccaggctatcccccaacaggctacccacctttccctggatatcctcctgcaggtcaggagtcatcttttcccccttctggtcagtatccttatcctagtggctttcctccaatgggaggaggtgcctacccacaagtgccaagtagtggctacccaggagctggaggctaccctgcgcctggaggttatccagcccctggaggctatcctggtgccccacagccagggggagctccatcctatcccggagttcctccaggccaaggatttggagtcccaccaggtggagcaggcttttctgggtatccacagccaccttcacagtcttatggaggtggtccagcacaggttccactacctggtggctttcctggaggacagatgccttctcagtatcctggaggacaacctacttaccctagtcagcctgccacagtgactcaggtcactcaaggaactatccgaccagctgccaacttcgatgctataagagatgcagaaattcttcgtaaggcaatgaagggttttgggacagatgagcaggcaattgtggatgtggtggccaaaccgttccaatgatcagaaggcaaaaaattaagcagcatttaagacctcctatggcaaggatttaatcanagatctcaaatcagagtttaagtggaaatatgggaagaactgatcctgggccctcctcatgccctcctaagtattacgatgccctggagcttacggaaaagcaatggcngggagccagggacctccggaaacctgtaatggattggagaattttggggcccagaaccaaatcagggaaatcccgaaaaatttggtccatggtttatcagctcaagaattttggaacaaaaaccttgaaac

SEQ ID NO: 78292 - DNA, 713 bp, Homo Sapiens
ccgggttgggctgtgacgctgctgctggggtcagaatgtcatacccaggctatcccccaacaggctacccacctttccctggatatcctcctgcaggtcaggagtcatcttttcccccttctggtcagtatccttatcctagtggctttcctccaatgggaggaggtgcctacccacaagtgccaagtagtggctacccaggagctggaggctaccctgcgcctggaggttatccagcccctggaggctatcctggtgccccacagccagggggagctccatcctatcccggagttcctccaggccaaggatttggagtcccaccaggtggagcaggcttttctgggtatccacagccaccttcacagtcttatggaggtggtccagcacaggttccactacctggtggctttcctggaggacagatgccttctcagtatcctggaggacaacctacttaccctagtcagcctgccacagggactcaggtcactcaaggaactatccgaccagctgccaacttcgacgctataagagatgcagaaattcttcgtaaggcaatgaagggttttgggacagatgagcaggcaattgtggatgtggtggccaaccgttccaatgatcagaggcaaaaaattaaagcagcatttaagacctcctatggcaagggaaatcgtgatgagaaccagagtataaaccaccaaatggctcag

SEQ ID NO: 78293 - DNA, 2002 bp, Homo Sapiens
  misc_feature (1420)..(1433): n is a, c, g, or t
  misc_feature (1841)..(1849): n is a, c, g, or t
gctggggtcagaatgtcatacccaggctatcccccaacaggctacccacctttccctggatatcctcctgcaggtcaggagtcatcttttcccccttctggtcagtatccttatcctagtggctttcctccaatgggaggaggtgcctacccacaagtgccaagtagtggctacccaggagctggaggctaccctgcgcctggaggttatccagcccctggaggctatcctggtgccccacagccagggggagctccatcctatcccggagttcctccaggccaaggatttggagtcccaccaggtggagcaggcttttctgggtatccacagccaccttcacagtcttatggaggtggtccagcacaggttccactacctggtggctttcctggaggacagatgccttctcagtatcctggaggacaacctacttaccctagtcagcctgccacagtgactcaggtcactcaaggaactatccgaccagctgccaacttcgatgctataagagatgcagaaattcttcgtaaggcaatgaagggttttgggacagatgagcaggcaattgtggatgtggtggccaaccgttccaatgatcagaggcaaaaaattaaagcagcatttaagacctcctatggcaaggatttaatcaaagatctcaaatcagagttaagtggaaatatggaagaactgatcctggccctcttcatgcctcctacgtattacgatgcctggagcttacggaaagcaatgcagggagcaggaactcaggaacgtgtattgattgagattttgtgcacaagaacaaatcaggaaatccgagaaattgtcagatgttatcagtcagaatttggacgagaccttgaaaaggacattaggtcagatacatcaggacattttgaacgtttacttgtgtccatgtgccagggaaatcgtgatgagaaccagagtataaaccaccaaatggctcaggaagatgctcagcgtctctatcaagctggtgaggggagactagggaccgatgaatcttgctttaacatgatccttgccacaagaagctttcctcagctgagagctaccatggaggcttattctaggatggctaatcgagacttgttaagcagtgtgagccgtgagttttccggatatgtagaaagtggtttgaagaccatcttgcagtgtgccctgaaccgccctgccttctttgctgagaggctctactatgctatgaaaggtgctggcacagatgactccaccctggtccggattgtggtcactcgaagtgagattgaccttgtacaaataaaacagatgttcgctcagatgtatcagaagactctgggcacaatgattgcaggtgacacgagtggagattaccgaagacttcttctggctattgtgggccagtaggagggannnnnnnnnnnnnnaatgaaaaaaaatttctattcatagcttatccttcagagcaatgacctgcatgcagcaatatcaaacatcagctaaccgaaagagctttctgtcaaggaccgtatcagggtaatgtgcttggtttgcacatgttgttattgccttaattctaattttattttgttctctacatacaatcaatgtaaagccatatcacaatgatacagtaatattgcaatgtttgtaaaccttcattcttactagtttcattctaatcaagatgtcaaattgaataaaaatcacagcaatctctgattctgtgtaataatattgaataattttttagaaggttactgaaagctctgccttccggaatccctctaagtctgcttgatagagtggatagtatgttaaaactgtgtactttnnnnnnnnnttcaacctttacatctagaataatttgcatctcattttgcctaaattggttctgtattcataaacactttccacatagaaaatagattagtattacctgtggcaccttttaagaaagggtcaaatgtttatatgcttaagatacatagcctac

SEQ ID NO: 78294 - DNA, 1021 bp, Homo Sapiens
  misc_feature (479)..(479): n is a, c, g, or t
cagtcgacggtaccggacatatgcccgggaattcggccattacggccgggggggttggtaccaaactcaggacgtggtggacacgctctctgactctgtatttcaggaagctgccaatcaatagagatttaaagcttctgacttccgcatatccgaataccaggtaggaaacatctgctttggagtaagagaaggccccagtacctgctttttctccggaaccgtgagagggagccatggggaggagaccagaatttcagccttcctatctccctttaccacaaggacgccttgaggacccaagtcaaattgagatctttcaaccacgggctcggaaacccgctttctgtgtccacttcaaccaaacacgtctaacaggcaggaatttagaggtggccaaggtaacgagaactagtggttttcaccctgtttggtgaccttcatagggcttatttatgcacttcaagcgcatgacctanatacatgttggtttggcttctcttctcgtaatagcagcctgtaaaaagcttttgagaattccccgtgttttctcatttgtgggtcaaagaaaataaaatcgatatctaagtaaccttaaaaaaatggcctgcacaatctacaaaatttggaattgtttccactaggactaaggatatctctgaaagcctcaaagatcattcaaaatgaagtccaacatttgctgtttttaaggtgagatatttggctaaccggagtatgagagaactggctaagggggctttttgacataagtcaaacaatgacatttaaaactcacgtaaaagcaattactgtgtggaatttttctgtgtttttctcatttcttaaacagaagtgtatatgttttcagcatagcttcttgctgtaattttctttcttgacaaacccacatcttaccatgaaacccaaagtatgcatgctgcagaaacaataatggttgaaacagacccggctgtctctggcatgatttttctttacaaaattaaaatgtcttttggctaat

SEQ ID NO: 78295 - DNA, 792 bp, Homo Sapiens
  misc_feature (110)..(110): n is a, c, g, or t
  misc_feature (542)..(550): n is a, c, g, or t
  misc_feature (553)..(564): n is a, c, g, or t
gatcacctttagttattacattggatttttaagctgagtttttccactctatttctattcccacgtatgccacaggcctgcttcctccaggagttgatccctttcttttntggagatgttctgtaccatcccctagcatccccagagagatgatctttcttctctctgtagcttgtaccagctccactgcaaatatttcttactgttaaagttaagaaagaactgtcatcttcaggaatgcttgcaaaaaccattgaaaatatgttgttcctatccagaattactgaatccttcctgtgggggggttccttgtaagactggattgcagcctaggagtctctggcctttggtgcatgcattcttacttttgttttcctttatttgattcattctttttggttctagaacacaacagttccctattctccagagaccacccaagttggtgataaggaaatggagacctcctactattcactgacctctcagaagaataacctcagcaaatgccgcctcttcccccaacagggtggcagtatttnnnnnnnnntgnnnnnnnnnnnnggtttgttaaagcagtttctttgtcttaaacatttaaatgccacttgaaagcaaaaacaaatgctggtgttacagagtaaactgctaatattttatctctgggggatgaaaataacaattattttgactttcttccttgtacattgctccttgatttttttatgcactgcatttaaattgaaaataaaacaaataaaaatcaagccatgcgctctctgccacaaaaaa

SEQ ID NO: 78296 - DNA, 1060 bp, Homo Sapiens
  misc_feature (867)..(867): n is a, c, g, or t
aatttccgggatcgcggggcaagatggcggaagtgcgtcggctgctgccccgggtctggcagaactcgggtgttttgggctgagacagtggcagctgcggccccgaccccaagtgcggggacctccggcgaataaagaaaaaataacaagcttttctgaagtgagaagctgttctcagccacgagtcctgtgcaagatcactaatgattacctggcatttctgcgacacaggcaggtcctcagggtttgtgcaagtttgcaaacatgttcaccctgtctcagacctcgagagcatggttcatcgatagagcccgtcaggcacgagaagaaaggcttgtgcagaaggaacgggagcgggcagctgttgtgatccaggcccatgtccggagttttctctgtcggagtcgactgcagagagatatcaggagagagattgatgacttttttaaagcagatgaccctgagtccactaaaagaagtgcactttgtattttcaagattgccaggaaactgctgttcctattcagaatcaaagaggataatgagagatttgagaagttgtgtcgcagcatcctgagcagcatggatgctgagaatgagcctaaggtgtggtatgtgtccctggcttgttctaaggacctcaccctcctttggattcaacagatcaagaacattttgtgggactgctgtgattttctcaagcagctcaagcctgaaatcctgcaggactcccgactcatcaccctgtacctcacgatgcttgtcaccttcacagacacttcaacgtggaaaaattcttcggggaaaaggggaaagtctttcgacagcgatgaaacacatttgtgcaaatataatgggacatctcanccagcatggattttattctgtgctgcagtgctgtgatgggctgtttcctgatttggttcatatgctcctcacacaaccctgtgaaggggtccgttggcaaaagctggtatgactggcaattttctcgctaaaggaacttcttactctaccatattaaacggcttctaaaaaataggaggccttaaaatttagc

SEQ ID NO: 78297 - DNA, 678 bp, Homo Sapiens
  misc_feature (119)..(119): n is a, c, g, or t
atatggctagtacgagggctggggtgttaattcggcacgagggtcggagtcgactgcagagagatatcaggagagagattgatgacttttttaaagcagatgaccctgagtccactaanaagaagtgcactttgtattttcaagattgccaggaaactgctgttcctattcagaatcaaagaggataatgagagatttgagaagttgtgtcgcagcatcctgagcagcatggatgctgagaatgagcctaaggtgtggtatgtgtccctggcttgttctaaggacctcaccctcctttggattcaacagatcaagaacattttgtggtactgctgtgattttctcaagcagctcaagcctgaaatcctgcaggactcccgactcatcaccctgtacctcacgatgcttgtcaccttcacagacacttcaacgtggaaaattcttcggggaaaaggtgaaagtcttcgaccagcgatgaaccacatttgtgcaaatataatgggacatctcaaccagcatggattttattctgtgctgcagtgctgtgatgggctgtttcctgatttggtttcatatgctcctcacaacaaccctgtgaggtggtccgttggcagaagctggtatgactggcagttgtctcgctagaggaaccttctacttcataccataattaaacgg

SEQ ID NO: 78298 - DNA, 1063 bp, Homo Sapiens
  misc_feature (107)..(162): n is a, c, g, or t
  misc_feature (234)..(247): n is a, c, g, or t
gccgtgctgctgccccacaggtggttgcaggtagagggcctgagtcagacttgaacctgcagcattcactgtcatgggctcggatctcacccctgcctcttgcccannnnnnnnnnnnnnnnnnnnnnnnnnnnnnnnnnnnnnnnnnnnnnnnnnnnnnnntcaaaggcccggcgggtgatgagatgaatttctgtgggtagaacacttcgagcggtgccagcaccgttaccnnnnnnnnnnnnnnctggtaggacagttgttcccaggaccacactgaggccggccttggggccaggtgcccctcggcgtccccaccttcacattccattctgcaggccccccggacagaccacccagccctgtacagggacctgctgaggaccagccgcgtgcactggattgcggaggagcctcccgcagcactggtccgggacaagatgatggagtgccacttccgattccgccaccagatggcactagtgccctgtgtgctgaccctcaatcaagatggcaccgtgtgggtgacagctgtgcaggctgtgcgtgcccttgccacaggacagtttgctgtgttctacaagggggacgagtgcctgggcagcgggaagatcctgcggctggggccgtctgcctacacgctccagaagggccagcgcagagctgggatggccactgagagccccagtgacagcccagaagatggtccaggcctgagtcccttgctctgacagagatggatctgctagaaggaacctggagagcaggacccatggctgggcggctggtgagcagtccaggtgcccaagggccagcttgctgctgcccaaagcagaggaagccgggctggctgagggtccgaaaagcctgcaggggcccggcgagccccaggaagagcctcagctccaggctggggctctggctgctggagcatctgctggctggtggggtggcccgagttccccttcaccgcccaccagggagggtttcccacctcagagtacaccgaggggacctgcagagggggctgtcgggacagcgtggaataaacattatttcaagg

SEQ ID NO: 78299 - DNA, 1495 bp, Homo Sapiens
  misc_feature (79)..(113): n is a, c, g, or t
  misc_feature (1306)..(1366): n is a, c, g, or t
  misc_feature (1418)..(1436): n is a, c, g, or t
gctgtatagatcactataggggctagtcggtgtagcgaacgacgagcgcagcgaagtcagtgagcgaggaagcggccgnnnnnnnnnnnnnnnnnnnnnnnnnnnnnnnnnnncagtcgacggtaccggacatatgcccgggaattcggccattacggccgggggcctgcgcagtgtagccgggtcagctggacagggtcatcctgagggtgcgactccgccgcgatggtgacccggttcctgggcccacgctaccgggagctggtcaagaactgggtcccgacggcctacacatggggcgctgtgggcgccgtggggctggtgtgggccaccgattggcggctgatcctggactgggtaccttacatcaatggcaagtttaagaaggataattaattacacaaacccttcacagactgctctggtgcctggtggtgctagctcctcccacctcagcacctgctgcatctggagcagcccaagcctcaggatggacaagaggaaacccacagctcagcttcaggcttcttatgtttctgaaaacagcttggatattttaatgcacgttgcattaaacctcactgaaacctgctccgtgcccggatgttgatcatgctggtggcttggttactgtgactgtagctggagtggcacaggtgacccaggcgtcctttcagctccagaatgttgcaagtctaggagagtgttccaatggctgacagaaactgcctatttgaaatggctcataagtagtatctgcagtgtgttcatccgttgctgccttaacaagtcacccacacgtagtggcttaaagcaacgaacattcactctctcacagtctgtgtcagtcggggattgggagtgatgtatctgggtggttgtggcccagagtctctcatgaggttgcagttaagacatcagcaaggccacttcgtctgaggaaggtcaactggggctggagccacttccaagccagtgcctcacgtggtgtcggtgacagccacagttccttcccatgggggcccctacacgaagctgcttgagcatcctcacggcatggcctctgccttccccagagcaggtgaaccaagggagaggaaggagcaagccacagtgcttctatgagccaccctgagaagtctcacgtgatcacttccgccacagcctgtttatcaaaagcaagccccccaggcccagcccacgtgcagagggaggagaatgaggttctgtgttttgaagggaagaatatcagaattggtagacatttcaaactgtcacattagggatacaaaaatgaacaggctgnnnnnnnnnnnnnnnnnnnnnnnnnnnnnnnnnnnnnnnnnnnnnnnnnnnnnnnnnnnnnaaccaggagttcagtactaacctgggcaacaaagaggcccctgtctctgatnnnnnnnnnnnnnnnnnnncctgagcaggcggccgcaagcttattccctttagttgagggttaattttagcttggcac

SEQ ID NO: 78300 - DNA, 550 bp, Homo Sapiens
ttttaaggaactgctccaagggttcattatagaacaggagtgtgtacggaggacttaggtccccacatagagtggccgttctgtggcggctccaaccaattccatccctcctttcctgcggacacacacctggcccctggcccctgccctgtgtgtctggaggaggggcactggggaggctgtggagcagagagaagaggccggatacattgaggatggcacctggcaagccaggcttccttctcaaaggccagactgctttctcagtgttacttactaaagctctctttttatactgttaaaaagatatataaagttcgtataaacaggcttgagaccactttgatgtaaaagctgtcatagtagtttttctcacagtggcacaattcatttgattgatggaatattcagtgacgccatgtatgccctatcgcttttttctcatccatctttatgctataactcatactgatttaagaaatgatttctccttttggcaaagcgaccccattcaatatggttataataaaagactaatgtcaaactgaaa

SEQ ID NO: 78301 - DNA, 1247 bp, Homo Sapiens
  misc_feature (211)..(211): n is a, c, g, or t
  misc_feature (320)..(345): n is a, c, g, or t
taggctaggtacgaggctgggtggttaattcggcacgagggcctccgtgggtgcagttggtcgccagcgagggatgcggagacgcccctgaacgaccatggcatctggccgacgagctgaccttccatgaattcgaggaggccactaatcttctggctgacaccccagatgcatgccaccaccatgcagaatgctgatcatgcttgacccncacaatggtgcactgtgtgctgtgtgcctgtgtggctcagtgtgtgcatagctatggatgcctgagtgatgagtgtggaggatggagagtgacaatggccgcgctcctnnnnnnnnnnnnnnnnnnnnnnnnnncgggattctggaccttcagctactatcagatgcttctttgacgtggacacctcacatggtcctggacctggatcaaaggctcactgctgccccggcctggccacaactttgtgcggcaccatctgcggaatcggccggatctgtatggcccacttctggatctgtgccactgttggcctttgtcctggccgtcactggcaacctgacgctggtgctggcccagaggagggacccctccatccactacagcccccagttccacaaggtgaccgtggcaggcatcagcatctactgctatgcgtggctggtgcccctggccctgtgggcttcctgcggtggcgcaagggtgtccaggagcgcatggggccctacaccttcctggagactgtgtgcatctacggctactccctctttgtcttcatccccatggtggtcctgtggctcatccctgtgccttggctgcagtggctctttggggcgctggccctgggcctgtcagccgccgggctggtattcaccctctggcccgtggtccgtgaggacaccaggctggtggccacagtgctgctgtccgtggtcgtgctgctccacgccctcctggccatgggctgtaagttgtacttcttccagtcgctgcctccggagaacgtggctcctccaccccaaatcacatctctgccctcaaacatcgcgctgtcccctaccttgccgcagtccctggccccctcctaggaaggcccgggtcccacagacaattctttctttcaggcaacacctaagtggaccaacccctctgcctgtcctgccccccagacgatgactgaaggctcctttgacaccttgagatgattctgctactttccagacttttcttacaaagcaaacacttttattttctatgc

SEQ ID NO: 78302 - DNA, 1257 bp, Homo Sapiens
  misc_feature (345)..(370): n is a, c, g, or t
ggcctgggtggcgaattcggcacgagggcccaggtggcctcaggtgagggggggcggagcgcacctgtggggacgggacgacgagttcaagcctccgtgggtgcagttggtcgccagcgagggatgcggagacgcccctgaacgaccatggcatcggccgacgagctgaccttccatgaattcgaggaggccactaatcttctggctgacaccccagatgcagccaccaccagcagaagcgatcagctgaccccacaagggcacgtggctgtggccgtgggctcaggtggcagctatggagccgaggatgaggtggaggaggagagtgacaaggccgcgctcctnnnnnnnnnnnnnnnnnnnnnnnnnncgggattctggaccttcagctactatcagagcttctttgacgtggacacctcacaggtcctggaccggatcaaaggctcactgctgccccggcctggccacaactttgtgcggcaccatctgcggaatcggccggatctgtatggccccttctggatctgtgccacgttggcctttgtcctggccgtcactggcaacctgacgctggtgctggcccagaggagggacccctccatccactacagcccccagttccacaaggtgaccgtggcaggcatcagcatctactgctatgcgtggctggtgcccctggccctgtggggcttcctgcggtggcgcaagggtgtccaggagcgcatggggccctacaccttcctggagactgtgtgcatctacggctactccctctttgtcttcatccccatggtggtcctgtggctcatccctgtgccttggctgcagtggctctttggggcgctggccctgggcctgtcagccgccgggctggtattcaccctctggcccgtggtccgtgaggacaccaggctggtggccaccagtgctgctgtccgtggtcgtgctgctccacgccctcctggccatgggctgtaagttgtacttcttccagtcgctgcctccggagaacgtggctcctccaccccaaatcacatctctgccctcaaacatcgcgctgtcccctaccttgccgcagtccctggccccctcctaggaaggcccgggtcccacaggcaacacctaagtggaccaacccctctgcctgtcctgccccccagacgatgactgaaggctcctttgacaccttgagatgattctgctactttccagacttttcttacaaagcaaacacttttattttctatgcaaaaa

SEQ ID NO: 78303 - DNA, 1002 bp, Homo Sapiens
  misc_feature (659)..(684): n is a, c, g, or t
ccggagcgcagcgacttgaagaaatttccaattttcaaagcccactggcccaggagggcgtggaagcagcccggaccccggggaaagacaagccttgtggccaccagcctgggtgtcctccacgaccccccgggccagaaggtgaataccagcccgggcggctgacaggcccagggcccagcgccccaaaagagccactgcagccaaggcacagggatgagccacaggaccaccatggggatgaagacaaagagggagtagccgtagatgcacacagtctccaggaaggtgtagggccccatgcgctcctggacacccttgcgccaccgcaggaagccccacaggcccaggggcaccagccacgcatagcagtagatgctgatgcctgccacggtcaccttgtggaactgggggctgtagtggatggaggggtccctcctatgggccagcaccagcgtcaggttgccagtgacggccaggacaaaggccaacgtggcacagatccagaaggggccatacagatccggccgattccgcagatggtgccgcacaaagttgtggccaggccggggcagcagtgagcctttgatccggtccaggacctgtgaggtgtccacgtcaaagaagctctgatagtagctgaaggtccagaatcccgnnnnnnnnnnnnnnnnnnnnnnnnnnaggagcgcggccttgtcactctcctcctccacctcatcctcggctccatagctgccacctgagcccacggccacagccacgtgcccttgtggggtcagctgatcgcttctgctggtggtggctgcatctggggtgtcagccagaagattagtggcctcctcgaattcatggaaggtcagctcgtcggccgatgccatggtcgttcaggggcgtctccgcatccctcgctgaggccacctgggccggcgtggctggggctctctgcgcgggagcgtctcgcctacccgtcacatcccggaattccggaccggtccagcc

SEQ ID NO: 78304 - DNA, 755 bp, Homo Sapiens
gtcccgttgtcccattttgctctgtgaaggtgcaaatccctttcttcccttcccatctcaggctctcctgttttccctcagggtccagtatgcctttgagctttagctgttagaaaggaacccccgtgacttgacacagctttcacagctggctgctaggaccggcgggctgggtgttcacgtgtgtctgtgtcatggatgcaatgcaggccctggaggactgtgcgtcacccgtcaaccagagcgtgcctccgggccagcttccctccaaggaatgagtggatttcatacaggatctctttattgcacagactgaatggctttacatgtttctaatgtgaattaggcatgtgaagcagtgggtgtccacccgtgtccctcatgggtgagccctccagctgtgagcccaggcagtgtggtcaccgagtgaggaccctcctcaccaggaaccgcatccctgtgctgcctccacctgagagttgctagggggttcttgtcgagatcatgtcatcagcacccctaagtcaagtcacgggtttccatagccaggcagttggtatgtacaattcagttcagcgtatgaacttgtatctctaatctgatgtccatttttatattttttgaaactgagcacaatgaaatcctttcttgaatcattttccttttggattataaaaatatgggggaaagtgctatgatgaattttatgcaataaatgtatacatgtgtgcacatgcacccatgctgtgaaaaaa

SEQ ID NO: 78305 - DNA, 1789 bp, Homo Sapiens
  misc_feature (978)..(978): n is a, c, g, or t
ggtaccggtccggaattcccgggatctccatttaatggcgcggacgccggcggcggcgggctcctggccgggccagcgcagcggaagagccaagccagcatgtcggggacccgagcctccaacgaccggccccccggcgcaggcggcgtcaagcgggggcggctgcagcaggaggcggcggcgaccggctcccgcgtgacggtggtgctgggcgcgcagtggggggacgagggcaaaggcaaggtggtggacctgctggccacggacgccgacatcatcagccgctgccaggggggcaacaacgccggccacacggtggtggtggatgggaaagagtacgacttccacctgctgcccagcggcatcatcaacaccaaggccgtgtccttcattggcaacggggtggtcatccacttgccaggcttgtttgaggaagcagagaagaatgaaaagaaaggcctgaaggactgggagaagaggctcatcatctctgacagagcccaccttgtgtttgattttcaccaggctgtcgacggacttcaggaagtgcagcgccaggcacaagaggggaagaatataggcaccaccaagaagggaatcggaccaacctactcttccaaagctgcccggacaggcctccgcatctgcgacctcctgtcagattttgatgagttttcctccagattcaagaacctggcccaccagcaccagtcgatgttccccaccctggaaatagacattgaaggccaactcaaaaggctcaagggctttgctgagcggatcagacccatggtccgagatggtgtttactttatgtatgaggcactccacggcccccccaagaagatcctggtggaagggtgccaacgccgccctcctcgaaatttgacttcgggacctacccctttgtgacttcatccaactgcaccgtgggcggtgtgtgcacgggcctgggcatccccccgcagaacataggtnacgtgtatggcgtggtgaaagcctataccacacgtgtgggcatcggggccttccccaccgagcagatcaacgagattggaggcctgctgagacccgcggccacgagtggggagtgaccacaggcaggaagaggcgctgcggctggctcgacctgatgattctaagatatgctcacatggtcaacggattcactgcgctggccctgacgaagctggacatcctggacgtactgggtgaggttaaagtcggtgtctcatacaagctgaacgggaaaaggattccctatttcccagctaaccaggagatgcttcagaaggtcgaagttgagtatgaaacgctgcctgggtggaaagcagacaccacaggcgccaggaggtgggaggacctgcccccacaggcccagaactacatccgctttgtggagaatcacgtgggagtcgcagtcaaatgggttggtgttggcaagtcaagagagtcgatgatccagctgttttagtcgcagactgagctgatcccaacaggccctggcagcgtctggacttgtgtaaacagcagcagtcacgttcctcggccgccacaaccaacaccaaagcaggaaaaccattttctgtacttttatatttctgttcaacctgttggtttctacaatgattttaaacattggaaagccagccttgtgtatatttttaaaaattatattcaaaatgagccaaagtgctcagagaccttctatgacacattagtgtcacatggttgcgtgtccagccgaagcagtgtaataaacatctccaatggccactgaatgggaaaa

SEQ ID NO: 78306 - DNA, 1274 bp, Homo Sapiens
agaaacaaatggaagcctttagagatgggtttaataaagtttttccaatggagaaattaagttccttcagccatgaagaagtccaaatgattctttgtggaaaccagtcaccatcctgggcagcagaggatattatcaattacactgaacctaagctgggttatacacgtgacagccctggtttcctgaggtttgtgagggttttatgtggcatgtcttctgatgaaaggaaagcattcttgcagtttaccactggttgttcaactctacccccaggtggactggctaacctgcatcccaggctcacggttgtacgcaaggttgatgctactgatgcaagctatccatcagtcaatacatgtgtgcattaccttaagttgcctgaatattcttccgaggagatcatgagagagcgcctgctagctgctacaatggagaaaggctttcatctcaattgagctttgaagtgcaatgggagacatcagagactttaaaaatactagtgaagcctcttgtgtttgtgtgcagagaagtatatgatccaccatgctaatgacacttgcctttttttccaccattaaggctttaagaacatgtggaataagttttttagctgctaatgacaaaacaaatcctgtaactacccagccagcaagtatatagcacagaacactgtgttactttacaagggcttatgtgactggaataaggtggtcccacttgactgttccaaagagcagcttctcagatcttcagtgttcactggtaaatttctaacagtgtatttgtgtaaagtttgtcatttcatactccatacactacagttgctgtcactgatccctgttttgctggcttttaagctacttggtcaaaaatcctgcttccttaaaacatagagaattaatgagcatctcaagctttttcttttcctttttaatgatgcctgcactatcaagagtattctagtgttctctctttgtttggcatataatcatgcaccaaactttttatttctttaaggtgggagtatatttttatttcctaaatgccatactatgaagatcaaagtcttaagtgtgtttgcagctcaaaaataaagatgtattaaggggggaaaacctggtctaagtgcaaggcacacttacagcgagttttactttcggttgtattttctttgtatattataaacatttatttaacttgttgccgtttgaagtaaaaaatttccaaaatgtatgctcaacaataatcattaaaatgtttgcagcgtaaaa

SEQ ID NO: 78307 - DNA, 685 bp, Homo Sapiens
  misc_feature (32)..(32): n is a, c, g, or t
tgaacgaggtacacagcaggaaaagaaccgtnttcctcccagactatgtcttacacgctgagttatgccacaagcgttatcatcaaaactatttaaggctggagtcttagacctctaaaaatagacaggaagggctgccctgagcagtgacacctttgtgtttttatgtctccgccagcgccgtaacagagcctgtttctttcccgttgagtattacttaaattcaggcttaaatgtgctatgaagggcatttttcatagtatcccatttgccttgtaagttatataaagtgcatgattataattttttccttagaaatgcaatatttagtttcatccagctcttatgaataataacctcatagattcctgatcttaatttaaataggtgctttaattttacagctttcaaaagtagttactgtaaattttactcctgttaatgctggattggtttaaaggatttataagggctgtgtttgctctttacaaggcaagatgccatacagtgttcaataatagaaggtcttgatacaaccgacattttaaatattctttatacatgaggactgcgtctttttcactgaccctatgatttcactgtgagtagggtgaactggactgcatattagtttatttgttgccataatcacatttttgaaaaataaatttaagagttttttctt

SEQ ID NO: 78308 - DNA, 682 bp, Homo Sapiens
agcctgtttctaaaccgaatgatccaggattcaagcttctattgtagtgaaactttcctcagatggactccaggtagccaggtcacctaaacctagtggtcctgtgcgatgctctttctgccagtccctgaatctctgcagcttctcttacctgtcttacctgtagtaaagcacaattgcagtggcgtcgcattcagaagaagggaaggtcagcagaggctatgcatgttgtgtgatgatgagtgtttacagccaccttctcctaaaacgaaatttataccggggtggatagtattccattaggtagacttatcgactttgctaagtgctttttagacagcttaaaaaattttcaagattttaaaagatgtataaggttaagtttgcaaatataatggaaatgctgtatatcttttgaagtgatgaaatccacgttggaattttaaagaaaatatgttgtaataatgctgttgtaagtaatattttaatgtctctttgcctgttttctatttcagcacattcattgtggtgaatgttcatagcattataactgcttagccattgaatgataacatttgttagtggaaattggaaaatttatttgtgaaattctgcagaattcatttttctatttccaatatttgctgaggttaaataaaaattttcaagccattgatgtaat

SEQ ID NO: 78309 - DNA, 1006 bp, Homo Sapiens
  misc_feature (38)..(38): n is a, c, g, or t
  misc_feature (89)..(89): n is a, c, g, or t
  misc_feature (131)..(131): n is a, c, g, or t
  misc_feature (136)..(136): n is a, c, g, or t
  misc_feature (175)..(175): n is a, c, g, or t
  misc_feature (264)..(264): n is a, c, g, or t
  misc_feature (481)..(481): n is a, c, g, or t
gacgtacatcccagacagttgctgtcgattatcgatcnttaggattgcctgagccagatcgccgagatatcaccattaggagcatcctngtgtacagctgatacaagcagcaccagttcccgatcccactntctantaactctgacctcattctacaccataatagggagccagnatcgctgcaggatatgtgaataccaacacatacataaaatgcttgcaaccgtagagagcttacaatgaactgcatctcagtattccttntactacgtgaaaagactgaacatggtatctccccattcataggcacacagacattcctacaagcatcaggggtgggagtgcaagaacgaattcccatctatttacagtggcctgatagaataaaagaagttgacttctcagggaagctcccgatgttagggagcttacatttgcgccaggttctgtgctatctgtcaaaatctcccaccttcccttntcagcgcgaacatcattgctgtgaagagtaaccacacctttcagggctgaccaaagaatacctcctcctctcagacacctccttttctgcctcagtttccttcctcttgctgttctctgcaattgagtgggtttcatttttcacaacctcacacagagcatgagtgaccagtcatcccagttcacctctaggtgtgccaaggaacaggcaggccacacaaggaagaggaacgtgttccacttataaattttttgaggttatcctcattgatccattccataaaactatcagaggaaatcttgacacccagcagatcaccaaatctgtccacaagcatggggagatgtgtgggctgacatcctcaggctgcaagagccatggccttggaaagggccgtaagttctaccacgctattggtggttctcaccatgcaacttggagaaggtgcaatattctccagctctaatgttatcacagatataagtaacgtttgtaaaattcatacctaataaatttagaacagtc

SEQ ID NO: 78310 - DNA, 671 bp, Homo Sapiens
acacctggagccatgggatctactgaggaccatcctggagcctcacgctgctctgcacatggtggggcttgtccactgtggtgtgctctccagctcttcaccttcctcacctcacatctgaccctggagcttggggttggcacctctgccccgacagaatggggctgaatcagctccaggaggaaccaggccctgctctcctgtgtaggcctcagagaggccaagaagggaagctttgggcttcggtgggtgcaggctcagcgatgaacatctggctggggcagctcctggggagcatcagggaagagggggccatgagccggccagcagtggagacggcagtccagtttctctcccctctgacccctagaaggggagttgtagccccatgaactagtttcttgtctgggtcaggaacaagggccggctggggcctggggtgcagctggtgtcagggtatgctgtttgctgatgggcagggacacccctgcagggtctcgggctctgagcccaggacattccctgccccttgctcaccttggctgtgggctgtgaacattccgggaccctgggcatcttatctaggtccgtgcagcccaagggtcagccctcttgactgtcacatgctgcccccacccagcctaaaataaagagctcactgctgtgcaaaa

SEQ ID NO: 78311 - DNA, 1072 bp, Homo Sapiens
gtgaaatgaaaagtggtgcaaaaagcaggctggtacggtccggaatcccgggatatcgtcgaccacgcgtcgggggctggaatcagggccagggcctaacagtgtttcttcccctcggcccacggcccatactcaccccttcacctgaggcttctcccctctcaacttgctgttgatttcttttgaggggtaaaagaaagaccgagttcattgaagcagagatgggaggtggtgaggcgtcctcacctccccccaccacagctgtggctggtaacggcaactgcttgaccactggcccagcaaagcagaggcgggcaggaggatctgggcatcctgagccccctccctgaggctgtctcctgagaatgctggaccagggagattacttcccccacccacacccccatttggacatctggggaagtggagattaacccctcccccagactcgtgccttgcctctcaggacctggcacagtggcttggccttatggagtatggaaaaggcctctgccttcctcaggagggacacatagtgggtcatcaccctttctcacacctgcttcccaatgagcactcagcagcatggctgagacctggggcttgacaggcctgcgctccttagattaggatgctctggtattcctggggccagttaaaatgggtcagtgaggggctctcctggcctcaatctccatctttagggtctccacagactaacattgaagtcttccagaaacctcgaggagctgggctagatacttcgagagtagccctgtcttgtcccctcctacccccagattagcaccacccctctcacttttgggttggatgcgtatgggaattacaacccatcactcccaatgcctccctttcctggaggagcctgctgcattttcctgctgagggatcccagagagggcaggtgcccaccccacaggccctttcctggaccatggagccaggtgaaacctgtctggccccttacccattgggtttttactccttcacaacggtcagcactcctctcccagcccccctgcccactgttttcaataaaatgtgagtggtg

SEQ ID NO: 78312 - DNA, 825 bp, Homo Sapiens
ttttttttaaggttcattgtttaaattaccatgtttatttatatcaacacaaaatacaataataaacacgacaaaaccattttatcttcatgtaacataactcttcagtgaacagaagtactactgttaatgttttggcctttccaaggtcctgcctggggtcaaaacagtattcagagaaagagcagattcttctctaccttccctaaaacacacacaaaggtaacttctattttctaaaatcccattccaataataattaaaaaaacaacagtaagtccacgtagaggagaggattgctgttgtgttatcagcattgcaacctgtatattgctgtagatttcccccaggttctgcgcatcagtcaggaacataaagggtatatcagcccttcggattttcaaggtgatttttcagtaattctttcacctagccctgtactctgtaaaggtctgatttacctgagttatctagaaaccagcaaaaaaagagtctccaagtgatcaaaggtatatggatctatcttgtagaattgaagaaacttatagattttgctgtgacaattcaatggacaaccacgaagcctccactacataatgaactattcacctagtaaaagcttcacattacaattaaatcaaaggtaataaacattgcacaaaagtacaatatctcatctatatgccagcagtttaaatgctatttgttcagtctcgaacattttcaaacaaatgacagttatcacttaactaacacaatctttctattatttcactgacaaaagaggcagtttcctgcagtggaaagaggagatggcttggagtt

SEQ ID NO: 78313 - DNA, 832 bp, Homo Sapiens
  misc_feature (321)..(321): n is a, c, g, or t
gactcttgaggatcccaagtctggaaaaggggaaggcagggccttggtccctgagtgcttcccccatccaccattctgagctttaaattaccacgatcagggcctggaacaggcagagtggccctgagtgtcatgccctagagacccctgtggccaggacaatgtgaactggctcagatccccctcaacccctaggctggactcacaggagccccatctctggggctatgcccccaccagagaccactgcccccaacactcggactccctctttaagacctggctcagtgctggcccctcagtgcccacccactcctgtgntacccagccccagaggcagaagccaatgggtcactgtgccctaaggggtttgaccagggaaccacgggctgtcccttgaggtgcctggacagggtaagggggtgcttccagcctcctaacccaaagccagctgttccaggctccaggggaaaaaggtgtggccaggctgctcctcgaggaggctgggagctggccgactgcaaaagccagactggggcacctcccgtatccttggggcatggtgtggggtggtgagggtctcctgctatattctcctggatccgtggaaatagcctggctccctcttacccagtaatgaggggcagggaagggaactgggaggcagccgtttagtcctccctgccctgcccactgcctggatggggcgatgccacccctcatccttcacccagctctggcctctgggtcccaccacccagccccccgtgtcagaacaatctttgctctgtacaatcggcctctttacaataaaacctcctgctccacaaaa

SEQ ID NO: 78314 - DNA, 600 bp, Homo Sapiens
  misc_feature (521)..(534): n is a, c, g, or t
attttaaacttttctttttatttatttcataaacaataacaaaactcagctaggtaacattatgacagtttcaccgtacattcagtcacaaatatttgaaaccttcgcaacaagaacaacaaaaccagaagtgttacaagaataatttacaagaaaatctataaaacagcaagaagctcacaaatgttcattttttttgcacaagatcactacactctttcacaacatgttttgtgttacaaaatttccaacaaaagtgtatttttcttctttgtattgtggtttctaaaaccagaaactttgaagtaaatatccttttattagcacctagtggtgcagaaaaaggaaaactctcacatacagacacttcacagcacttttctaagaaaaatatacacttacaaaatatgttacaaattggcacacttaaaaatatacaagattttgtagacgtcttaagagtgatccttaagctttaaacttcaattgattctacagattatttataaagcttaactctnnnnnnnnnnnnnnggcaaataatttcctaacatttttaagttgcagtgtcatatgtcaaacagaaacttaggttacatt

SEQ ID NO: 78315 - DNA, 857 bp, Homo Sapiens
  misc_feature (133)..(258): n is a, c, g, or t
gagacagtcacgctctgttgcccaggttggagtacagtggtgatcttggctcactgcaatctctgcctccctgtctcaagcgatcctcccacctccacctccccattagctatgactgcaggcatgcacaacnnnnnnnnnnnnnnnnnnnnnnnnnnnnnnnnnnnnnnnnnnnnnnnnnnnnnnnnnnnnnnnnnnnnnnnnnnnnnnnnnnnnnnnnnnnnnnnnnnnnnnnnnnnnnnnnnnnnnnnnnnnnnnatgtgtcactgagcctggccgattttaccctgttctatgaatcactttaaatctgtcaacttaaagatggtttgcatcaacgtgagatgaaaaagagagatgatctgtgtcaaggtgttgtaaagtggctgagagagggccacacagattcaaaaagttgtgtgtgttcagaggcaagttatggccattccacatgggaaaaagaagacacatacctgtgactttctcatatcatttcaatctggaatgatcctggaacttgcaactcctcaaacaccttcagaactcattgagacttataaatgtgggatctatagctttgcctaatgtgggaaaccactgtagacaggggctcttaactaaccatagggcacaaagttgaccaacacaggtgtggtgaggcatttagcctagtcatcacaacagatcttcgagcctgacattctgttatttggcttccaaatacatggtacttttcttttggtagacaactgactgtaagcatagctaaaggagcaccaaatcatcagtctgattgtgtgtgaggcagaggtctctgcttggtttggagaaagggcaaagacctgctttggtcttca

SEQ ID NO: 78316 - DNA, 675 bp, Homo Sapiens
  misc_feature (32)..(32): n is a, c, g, or t
  misc_feature (448)..(467): n is a, c, g, or t
gaaatttgtagttaaaactatttaatgtaatntgaatttaatttctgtaattgggaaggagggtaataatgaacaaaaagtttgagaaaaaaatgctttaatgggttttacaggcatgctacaatccaggactgtggtgttctatgtgccgtgtatggtcatattagtagctatttgttgcaagatacttgaagccaaatgtttgcagtataggttcctggctactgtttatgctgtgatttcactctgtctatcatgggcagtattagaaaacacactggttttcactatctggtttacaaacactatcattattttaccctggattgaagtgcagaatttggcatatcgatgcatgcaatggaaagaaaaaaaatttgttaaaatttgtaaatgttcagctaaatctcagatatactgtgggatgagtatctcagggtaagtaacnnnnnnnnnnnnnnnnnnnntcactgaaatttttccctcacagtcagtagctttgtttgatatttaacaataagtatatggtgatatacttgaaatttatgtccagaatgtcactggaatattacaatgagcataaataatcaagcttaggactaaatgaaagatactatctcatgtatgctttaaatagagaatttatttcttttaaaaataaagctatttttcctt

SEQ ID NO: 78317 - DNA, 876 bp, Homo Sapiens
gcaggctggtaccggtccggatttcccgggatatcgtcgacccacgcgtcgcggacgcgtgggtgcagctgcagctagaacggcagcatgcccaggcagcacggcaacaactggagaccgcacgcaacgcaacccggcgtactaacacaagcagtgtcaccactacaatcacacaatccacagcaacaaccaacatagctaatacagaaagcagtcagcagactctacagaattcccagtttcttttaacaaggttgaatgatcctaaaatgtctgaaacggagcgccagtccatggaaagcgagcgtgcagaccgcagcctgtttgtccaagagctccttctgtccactttagtgcgtgaagagagctcatcctcagatgaggatgatcggggggagatggcagattttggtgctatgggctgtgtagatattatgcctttagatgttgctttagaaaacctaaatttaaaagagagtaataaaggaaatgagcctccaccacctcctctttgatgacatcccaattcgcagacaatgtcctctgtgctgtatttgccaatgaaagtggacaacaactatcttgggtttgtttggtgattgtaatttcaggtctgtcactcttgttacattgtgtacattcaaaaggaagagagaaaatatatatgataatcatttccacttaactaatttttacttctagcaggtaaatgtaggtagcagtgcaggggtgatctctgcttcctgtaccttgacatgcaaaaggctctcctaatactccacattcaaactgaagaggaaaattgaaatctctaatgaagctgctgtgtgtatttatgaatattaatgaataaaaactgcttggatggtttacctt

SEQ ID NO: 78318 - DNA, 1050 bp, Homo Sapiens
  misc_feature (128)..(128): n is a, c, g, or t
  misc_feature (169)..(170): n is a, c, g, or t
  misc_feature (235)..(235): n is a, c, g, or t
  misc_feature (265)..(265): n is a, c, g, or t
  misc_feature (350)..(350): n is a, c, g, or t
cttccacgttcgatggacggcgtacaaccatattgatgtcatctgcccccagctacattatctccgctgttgttttgatgtggcgatacattcaccagaacagttgcatgtacgattatcgactcctntaggattgcctcgagccaagatcgcacgagccttacgactnntgtaactgatgacagcagcaggagagtcttggagagatttggcactccatcttggggtactcttntgctctcctcctttaatataaagtagtaantaattaagtaataaataattagagaagtgcacagatacatatgcccctggacgttcagatcagcgtggtggataatagtaacgtntcagaagtagggtctggttaaataaactactgcacatcttacccaagggatggtgcttcctatggaaaaagtttcctaaggaaaaaggttcctgtggaaaaaggttcctgtggaaaaaggttcctatggaaaatgctttcctgaagagcacatgctttgaaggtggccagacttgggtggaaactgaaactctgctagtgactagatgtgtaattcagggaacattccttcactctttcagcttcagtttccttatctttaaaaggaaatgatcataatagcacttatgctgctgtgagatttaaatgagataatgtgtccacagtactcagtacagtgccggacacacagtaagcactcaaacaatggtaatgattattataatgtattttaaaatatgacactatattcaaacataccattataatatgtcaaatgggaatatggacagaatatatgagacaacctgttcacaactgtttaatgaggaggttatccaacattaggaatgatttgatccttcaataaaaaatcaatgtgtgaaggttcctaggcataaaagaaagttcagaaggatatgtaggaaatactgttgtctctctggggattgggattacagggattttttcctcttttctttttgttaagtttgtgtttcctaaagtttctgcaataaacatatgatgctaaaaaaataaaa

SEQ ID NO: 78319 - DNA, 1117 bp, Homo Sapiens
aaaacattgtactatgaacaagtggtacaaaaagcaggctgtaccggtccggaattcccgggatatcgtcgacccacgcgtcgctggcttgccccgggtccttaagccagcgacagtttttattgccgaacccaggctggaagcgggcggccctaggagccgcgcacaacagcgcaagcgggctggataccgggagccgattccaggcgcccacagaagcagaatcagaggggttgctcacacccgagatgtgaggtttcaggagcgccgacccagagttgccaggcctgaaggcgggagaggctcagtcgcaccctacatttcccacctccaagattttaagtatagttcgcttgaaatccctggaatgcgctttcttctggctcctacccggagatccggagtccggacaaaccggggcaggaagggtccgtcggaccagctcctcccaagccgaggcttccaggtctcggccgggctcttctccctgcttttagctgagccgggctgggcgtacctctctcctccatctagagcagggtgtgaagaggaagccagagggggctgtctgaaaatgaccctgaccccctcctcgggctgtcgtgaggaggagggccgcttcgcccggctgctcgtcaccgcgaaggctccaaagaagtgttgcgcagccgtgctggtataactgagggtgtccttggcgaagcccagcccctggcgccctggtgaccgggggggtcgatgtgcggactgcgcagaaactggagcccgaagcttggagagcgcccctcaaaaagaagcctggaagcccgagagatgaaaccgactcagagagggccaagactgcagaccttggggaccgaggacaccctcaccacgctggtgggggctggggggatggcgcgggcggtggcgtgcggggaagcgcctggggaacacctggctctgcaagttttgtgccttagcggaaagaggcgacatctctggcaagttgggagtacaggaagtagcgaaggagtgccatctggtggatccttctggtagtgacactcagacctgggccaggggccttgagacaatttacttgactggaaaaatctgaataaaaaaaagatgcttc

SEQ ID NO: 78320 - DNA, 1506 bp, Homo Sapiens
  misc_feature (1232)..(1232): n is a, c, g, or t
  misc_feature (1373)..(1373): n is a, c, g, or t
  misc_feature (1399)..(1399): n is a, c, g, or t
  misc_feature (1412)..(1412): n is a, c, g, or t
  misc_feature (1468)..(1468): n is a, c, g, or t
ggagcagaggtggccggcgggcccggctgactgcgcctctgctttctttccataaccttttctttcggactcgaatcacggctgctgcgaagggtctagttccggacactagggtgcccgaacgcgctgatgccccgagtgctcgcagggcttcccgctaaccatgctgccgccgccgcggcccgcagctgccttggcgctgcctgtgctcctgctactgctggtggtgctgacgccgcccccgaccggcgcaaggccatccccaggccccagattacctgcggcgcggctggatgcggctgctagcggagggcgagggctgcgctccctgccggccagaagatgtgcgccgcgccgcggggctgcctggcgggcagggtgcgcgacgcgtgcggcctgcttgctgggaatgcgccaacctcgagggccagctctgcgacctggaccccagtgctcacttctacgggcactgcgggcgagcagcttgagtgccggctggacaccaggcggagaactgagccgcggagaggtgccggaacctctgtgtgcctgtcgttcgcagagtccgctctgcgggtccgacggtcacacctactcccagatctgccgcctgcaggaggcggcccgcgctcggcccgatgccaacctcactgtggcacacccggggccctgcgaatcgggggccccagatcgtgtcacatccatatgacacttggaatgtgacagggcaggatgtgatctttggctgtgaagtgtttgcctaccccatggcctccatcgagtggaggaaggatggcttggacatccagctgccaggggatgacccccacatctctgtgcagtttaggggtggaccccagaggtttgaggtgactggctggctgcagatccaggctgtgcgtcccagtgatgagggcacttaccgctgccttgcccgcaatgccctgggtcaagtggaggcccctgctagcttgacagtgctcacacctgaccagctgaactctacaggcatcccccagctgcgatcactaaacctggttcctgaggaggaggctgagagtgaagagaatgacgattactactaggtccagagctctggcccatgggggttgctcacacccgagatgtgaggttccaggagcgccgacccagagttgccaggcctgaaggcgggagaggctcagtcgcaccctacatttcccacctccaagattttaagtatagttcgcttngaatccctggaatgcgctttcttctggctcctacccggagatccggagtccggacaaaccggggcaggaagggtccgtcggaccagctcctcccaagccgaggcttccaggtctcggccgggctcttctccctgcttttanctgagcccgggctgggcgtacctctnctcctccatctanagcaaggtgtgaaaaaggaaacccaaaggggggcttgtctgaaaaatgacccctgnacccccctcctttcgggcttgtccctggagggaggcat

SEQ ID NO: 78321 - DNA, 1206 bp, Homo Sapiens
ccgatgttggcgccagcagctggtgagggccctggggtggacctggcggcaaagcccaggtgtggctggagcaggtgtgtgcccacctggggctgggggtgcaggagccacatccaggcgagcgggcagcctttgtggcctatgccttggcttttccccgggccttccagggcctcctggacacctacagcgtgtggaggagtggtctccccaacttcctagcagtcgccttggccctgggagagctgggctaccgggcagtgggcgtgaggctggacagtggtgacctgctacagcaggctcaggagatccgcaaggtcttccgagctgctgcagcccagttccaggtgccctggctggagtcagtcctcatcgtagtcagcaacaacattgacgaggaggcgctgccccgactgccccaggagggcagtgaggtgaatgtcattggcattggcaccagtgtggtcacctgcccccaacagccttccctgggtggcgtctataagctggtggccgtggggggccagccacgaatgaagctgaccgaggaccccgagaagcagacgttgcctgggagcaaggctgctttccggctcctgggctctgacgggtctccactcatggacatgctgcagttagcagaagagccagtgccacaggctgggcaggagctgagggtgtggcctccaggggcccaggagccctgcaccgtgaggccagcccaggtggagccactactgcggctctgcctccagcagggacagctggtgtgagccgctcccatccctggcaaaagtctagagccttggcccagctggccccaagccgactcagccctgaccacctcagtgcagctgcgtgagccactccacagtaccaggcagagctctccgagagcctgcaggcccagctgaacagtctgagcgcgacgcagtccccctgagacacagagcggggctgacggaaccctccaccagtcacacagtttgagccgaggcccatccctggcagagtctagagccctggcccagctgtccccgagccgactcagccctgaccacaggcggctccggacccctgcacactaccaggtggtgctgtccgagaggctgcaggccctggtgaacagtctgtgtgcggggcagtccccctgagactcggagcggggctgactggaaacaacacgaatcactcacttttccccac

SEQ ID NO: 78322 - DNA, 455 bp, Homo Sapiens
gcagttagcagaagagccagtgccacaggctgggcaggagctgagggtgtggcctccaggggcccaggagccctgcaccgtgaggccagcccaggtggagccactactgcggctctgcctccagcagggacaggtggctgccccaccgccctcatcctgacccccagccccggtagagccctgactgggagctagccccaagcttctctttccttacctcctccgtgcagctgtgtgagccgctcccatccctggcagagtctagagccttggcccagctgtccctgagccgactcagccctgagcacaggcggctgcggagccctgcacagtaccaggtggtgctgtccgagaggctgcaggccctggtgaacagtctgtgtgcggggcagtccccctgagactcggagcggggctgactggaaacaacacgaatcactcacttttccccacaa

SEQ ID NO: 78323 - DNA, 1758 bp, Homo Sapiens
ctgtgccgccgctgcagcgctgggctcggcgccctggcccagcgccctggcagcgtgtccaagtgggtccgactcaacgtcggcggcacctacttcctcaccactcggcagaccctgtgccgggacccgaaatccttcctgtaccgcttatgccaggccgatcccgacctggactcagacaaggatgaaacaggcgcctatttaatcgacagagaccccacctactttgggcctgtgctgaactacctgagacacggcaagctggtgattaacaaagacctcgcggaggaaggagtgttggaggaagcagaattttacaatatcacctcattaataaaacttgtaaaggacaaaattagagaacgagacagcaaaacatcgcaggtgcctgtgaagcatgtgtaccgtgtgctgcagtgccaggaggaggagctcacgcagatggtgtccaccatgtccgacggctggaagttcgagcagttggtcagcatcggctcctcttacaactatgggaacgaagaccaagccgagttcctctgtgtggtgtccaaggagctgcacaacaccccgtacggtacggccagcgagcccagccgagaaggccaagattttgcaagaacgaggctcaaggatgtgagggacacagtattgacagctgaagaaatgatttacgttttcccgagatgtaatgaactgccatgtccaggaagcttggctgtgagaagaaacctgcttttgatcatttttctagagatctgggtgtgaatccttttttgcctctgaggtgggtggtgagagacgggcccagctgtccaaggccagacgtccccaagttgggggagcacggcggccgggtgggcgctgcctcttgggggggcctcgctctgttttttccaagtgccacgtgggactgaggcagacactcccagtcagcccgctcgatcctgaagatcgtgtgaaggaagcgttcttggtgctacacacagtctggaaaagcaacctgggcttcactggcaggtaagcggccgcagccgcgtcagtgtccagcacgtcgtggcctctggtccgaccaccaggccctagtctcggtcagggagtctgctctgcctcccaggcgggatcgctggtttctctcgacctcgcagagctcctgacaaaggcggcttctgcgtcgtcactgcttcccggcgccattccgaggccgggccttcttctgacacgggctccaaccccacctgaccaagcccgggacagtcaaggcttctcaatttgtattttccaggcaagagaactttgtaccccttctctgtgtggatagactccccagcgtttttcctctggaaatgcccacagggcttgccgcgtggagactgatctgttccatccgttagcgcgaggtagcagtgtcgcctcgcccctcccactgcgggctcacggggagctggcgtctgtcagtgccttgtcacgcctggcatagaggttgggctggaggcctgtccactggcttctggagctgaaggtctgcgtcacggtgaaaattcgggatgtttacagagcatcacaaatgcctctctctcgccgctctctcattttctttgtataactatgcagccttccctctctttctggagacttcctgcctaggcctcatcctcctctttgccagtcacctgattaaccaattctccagcattaggacttacctccttctttttgtaaggtctcttgtatgttgttaaatgtttggcttaaacaatt

SEQ ID NO: 78324 - DNA, 1325 bp, Homo Sapiens
  misc_feature (196)..(197): n is a, c, g, or t
  misc_feature (205)..(208): n is a, c, g, or t
  misc_feature (215)..(215): n is a, c, g, or t
  misc_feature (225)..(233): n is a, c, g, or t
  misc_feature (241)..(242): n is a, c, g, or t
  misc_feature (257)..(270): n is a, c, g, or t
  misc_feature (290)..(290): n is a, c, g, or t
  misc_feature (386)..(396): n is a, c, g, or t
  misc_feature (425)..(426): n is a, c, g, or t
  misc_feature (428)..(428): n is a, c, g, or t
  misc_feature (436)..(436): n is a, c, g, or t
tgcggccgcagccgcgtcagtgtccagcacgtcgtggcctctggtccgaccaccaggccctagtctcggtcagggagtctgctctgcctcccaggcgggatcgctggtttctctcgacctcgcagagctcctgacaaaggcggcttctgcgtcgtcagggcgtgtgcgggggccattccgacgccgggcctggccnncacagggnnnnttggggnaggtgaggannnnnnnnncgggaaanncttctcaatgggtannnnnnnnnnnnnnagcggtgggccccttctctntatcggtaaacgcgcgcaggggttttcgtttgaaatggctcaagggcttgccgagtggacactgggctgggcgaggcgggggcgcgagggaccacnnnnnnnnnnnccctccggggggtaagatagggggagctnncntctgtcantgccttgtcacgcctggcatagaggttgggctggaggcctgtccactggcttctggagctgaaggtctgcgtcacggtgaaaattcgggatgtttacagagcatcacaaatgcctctctctcgccgctctctcattttctttgtataactatgcagccttccctctctttctgggatgtttgggacttcactcgacctgcacgggctctgcccgacatgccgtgggagctgctgggattcctttagaaaccgctgcccgcatgctttgaaaacagacctttctcagctggctgtggggacctgtcagagtctggggactcggcgtgcagggcgggctccaagcgctttgcttccggaactccggcttcccaaggggtactgtgcagactgaccaccggcctcccgcctgcaggtcagaggctctgacactgtctggtttccaatgcttctggagacttcctgcctaggcctcatcctcctctttgccagtcacctgattaaccaattctccagcattaggacttacctccttctttttgtaaggtctcttgtatgttgttaaatgtttggcttaaacaatttataaaagcctttctagaaggcagacttagccccagcagagcctgggaggaaggcggccgctggggctcctgggcatcctctctggggagctgctggccgcttagcgttgtttgatttttgaccttgacatagtagataggcttgtggtttttttaatttaaagatattaagacttaattcactaaaatttattctaaggggatatttatacttttatacttttttaggtatcgtattttatcagcttacagtttaatgcctaagtttcccctgaaaatagcaaacaaaactgtgtatttatgaaaaa

SEQ ID NO: 78325 - DNA, 364 bp, Homo Sapiens
ggaattttacagtatcacttcattaataaaacttgtaaaggacaaaattagagaacaagagagcaaaacatcacaggtgcccatgaagcatgtgtaccacgtgcttcagtgtcaggaggaggaactcacacaggtggtgtccaccatgtccgacagctggaagtttgaacaactggtcagcaatggctcttcttacaactatgggaatgaagatcaggccaagttcctctatgtggtgtccaagaaacttcacaacaccccatacagtatggccagtgaacccagaaagaaggccaagattttgcaagaacaaggttcaaggatgtgagggacacagtattgacagctgaaaaaatgatttact

SEQ ID NO: 78326 - DNA, 1825 bp, Homo Sapiens
  misc_feature (1431)..(1560): n is a, c, g, or t
  misc_feature (1774)..(1774): n is a, c, g, or t
tcccgggatatcgtcgacccacgcgtccgcgcccccgccggttcgcgtctctctgctgcggcgcggggaccgctgtgctctcgacccctcctcctgtagagagtggtgctgccctctcgggatgtacctgcaggtggagacccgcaccagctcccgcctccatctgaagagggctccaggcatccggtcctggtccctgctggttggaatcttgtcgattggcctggctgctgcctactacagcggagatagcctgggctggaagctcttctacgtcacaggctgcctgtttgtggctgtgcagaacttggaggactgggaggaagccatcttcgacaagagcacagggaaggttgttttgaagacgttcagcctctacaagaagctgctgactcttttcagagctggccacgaccaggtggtggtcctgctccatgatgtccgtgatgtgagcgtggaggaggagaaggtccggtacttcgggaaaggctacatggtggtgctccggcttgcgacgggcttctcccaccccctcacgcagagtgcagtcatgggccaccgcagtgatgtggaagccatcgccaagctcatcaccagcttcctggagctgcactgccttgagagccccacagagctgtctcagagcagcgacagtgaggccggtgaccctgcaagccagagctgacagccccactgtgcctgagcccgtgcaccgcccacaggacccatggcacattcccggtgtgcctgagcccgtgcaccgcccacaggacccgtggcacattcccggtgtgcctgagcccgtgcaccgcccacaggacccgtggcacattcccggtgtgcctgagcccgtgcaccgcccacagaacccgtggccttggcttcagttggtgcctccagccgagttggcctattgcctgctcatgctgctgcttgcacactgcatgaaacagcaggccagaccaggacatccagactttctccatcgtgaggcctgggcctgcctttctgcagccggaggtctcgccagccctggactcctgctttgggccacagcaagacctcgggcgagtggagaggcggggccaggccgggcccttgtgggtgctgatgctgcatgttgtccccgacacagcgtcctctccctggtggacatccccagcggtcaggtgcttccccaagggcagtgaggggtgaacatccagggcctacctggctgtgcacgctgcagccacactgtggaagctgcccctccccgaggacccgcctcccttgctgatgccaggatctcggcgcatagaccactctgccccagcggtcgtcacagaaaggtctctctgttcctcacactcagcttcagcataagctgtgaggccagaaaaaaggtcagctcttctagtatcgtgcagtgcttaaaaaccgggagctccnnnnnnnnnnnnnnnnnnnnnnnnnnnnnnnnnnnnnnnnnnnnnnnnnnnnnnnnnnnnnnnnnnnnnnnnnnnnnnnnnnnnnnnnnnnnnnnnnnnnnnnnnnnnnnnnnnnnnnnnnnnnnnnnnnccaaacaggaaaaactgggagattttctgcagaaattgagttccagcctctctcgaacctgggaagacctggcaggagggggctgggctctcggctacagacttctccccaccccgtaggagctgaacgccaaccatcctgacccgccagtgctcttggtctcctgagtgtacccaggtcctcccaggtgcggtgtgcaccgagcgcgcctggnctgatgccctggcctgtgagctggggactcctgggccctgtgagcccctag

SEQ ID NO: 78327 - DNA, 725 bp, Homo Sapiens
  misc_feature (97)..(97): n is a, c, g, or t
  misc_feature (175)..(293): n is a, c, g, or t
atctgatctcggcgcatagaccactctgcaccagcggtcgtcacagaaaggtctctctgttcctcacactcagcttcagcataagctgtgaggccangaaaaaaggtcagctcttctagtatcgtgcagtgcttaaaaaccgggagctccagccgggcgcagtggttcatgccannnnnnnnnnnnnnnnnnnnnnnnnnnnnnnnnnnnnnnnnnnnnnnnnnnnnnnnnnnnnnnnnnnnnnnnnnnnnnnnnnnnnnnnnnnnnnnnnnnnnnnnnnnnnnnnnnnnnnnactgggagattttctgcagaaattgagttccagcctctctcgaacctgggaagacctggcaggagggggctgggctctcggctacagacttctccccaccccgtaggagctgaacgccaaccatcctgacccgccagtgctcttggtctcctgagtgtacccaggtcctcccaggtgcggtgtgcaccgagcgcgcctggcctgatgccctggcctgtgagctggggactcctgggccctgtgagcccctaggcggcaggcccaggaatggctgggtaggacagggaacacctttgccccacgtctggctgtgacctcggtgaaagccgacaggagagagatgggaccctcctcctcagtagtggctgccagtccctcgttgcaggacagggtcatcataaccataaataacccttcacgtgtcaaaaaaaa

SEQ ID NO: 78328 - DNA, 1350 bp, Homo Sapiens
  misc_feature (13)..(13): n is a, c, g, or t
  misc_feature (86)..(86): n is a, c, g, or t
  misc_feature (98)..(98): n is a, c, g, or t
  misc_feature (159)..(360): n is a, c, g, or t
  misc_feature (373)..(373): n is a, c, g, or t
  misc_feature (1182)..(1197): n is a, c, g, or t
catgtgcacattntcctgctatccctgatatgtggtacctatacgctttgaggagtgtacgctcccccacccgacgaccgggcagngatcgtgagcgnggagcgaaaggcgccaataggcaaccgctctccccgcgcgtgccgattcataatgcagctnnnnnnnnnnnnnnnnnnnnnnnnnnnnnnnnnnnnnnnnnnnnnnnnnnnnnnnnnnnnnnnnnnnnnnnnnnnnnnnnnnnnnnnnnnnnnnnnnnnnnnnnnnnnnnnnnnnnnnnnnnnnnnnnnnnnnnnnnnnnnnnnnnnnnnnnnnnnnnnnnnnnnnnnnnnnnnnnnnnnnnnnnnnnnnnnnnnnnnnnnncccaagaattcgncacgaggccagtgcccatcagctctggggtgcaggctcccgccccgcccctccctttttcctggctctggagccttgggtccctgagaagagcttccttggactggggtgctctgctgctctgggggtttggcccagaaggaacccctacccagccctgtccacccaccccagcgttcctgggcccccctctgggagcttcctcttggtcccaggagctgcggtggtgtctgccccctgcactgggctctgtgccctgtgggtgttcaggagactggactgtctctgctcctcatgcaaaccttgtgggggaagcaatgaccaggagcagcacctggcccctccctgaggcctgtgagtgtctcggatccgccctggagaagtgagtggctgagacccgggtggggccctcctacccttggctctgggggcttcccttctgggtcttgtccgggatatggccttcctgaaggtcttacctcccccagccgccctgcacttgaccaccaaagcaatctctaagcttataaaggagaaacatatatatatggggttttttggagtaaaggaaaattctaagatattaagacatatttttatgtagatctgatctatctgtgtttggtgaatttaatattctacattgatttttcctactccacattaactctaatttatttcttaaatggccttttctcggccgctctttactctaggaccgtttttacttaggttcctcttaataaggttaccttaattctgattatcgacaatttgcactttctcttttccctgtcgcccttattctcnnnnnnnnnnnnnnnnctcttctgtaattgtcccctcttattctttcgtgaactattctttaagcaatctatttgttgtctcaatgctttctctactttaatctcacatctgatcattttatttattttctctcctatcttttctattctatacttctaactctcttcc

SEQ ID NO: 78329 - DNA, 676 bp, Homo Sapiens
  misc_feature (222)..(258): n is a, c, g, or t
taacttacaaattgagagaactctctgaaatgcaactgttcgttgtgtgtgcagatttgcagtccagaacagttttttgtttattttaaaatgtaactttacaatactattaatgtcacaaactgcattacaaagcagttttcgttccatatcccgtgccggtacaaaacaccacacagatataaaactatggtaaataaaacatttcagccaagactggcnnnnnnnnnnnnnnnnnnnnnnnnnnnnnnnnnnnnnatttcaaaacagctaacaattagtgtcatccttagtcaaaactgaagtcacgctaaccttaaaactacaacactctgaatatatgtcagcactatgcctcccaaacaatatttaaaatatatttaactttcaaatacatttataaggtacaccaatagtgagaaaataaagtcttaaaatttaaatacaaatcaccatataaaaaattcaggaaacacagaaaatcctatcttacagaagtccaggcaagcctgtcctcagctggctctgacgcacagcactgctgtgcgacacagctctgcctgttgcaaaactgtcagcacgcacagccaaatgacagctgcgtcatcaagagaaagagagaatggatgcagggggcacgtgctcccctcttcactctactcaagcatcaagaccc

SEQ ID NO: 78330 - DNA, 638 bp, Homo Sapiens
gtttacaaggcacacactgtttcgtcagtttgcagtgcttgctgacacatccttcaattatattaaagtaaaacccttattagtgcagtctagaacgaccatgacagctatatcctcttcaagtcattgtacatcttcaatagacggtaagcatgtggatgtagtcagtgatcaggcagcccttcaactttcaccaaaagggaagttgtcggaatccccaaaagaagagtccttggaggagccctccatgcgccagagcagccccgcagagactgttgattaacccagcagaagcctgggctgcgcagacggggcctcagaaagagtggcctcgccgtcctggtgtaaggtgcctccctcggaaaggatactatctccaaggattttctaaactaattgtttaatctctccagattatgtatattaaccagcactgcgctcgaatagacctcaatgcgcgccttgtgcgcgctcctttccacgcctttaaggaaagccctggctggtgctgggtgagcggggcgcactgaacctccggggcaaccacatccattcaggagctccggggactcagaagagcccaggcgtctaagagtgggaagggacggactttaattaaaaagtttgactccctctct

SEQ ID NO: 78331 - DNA, 1584 bp, Homo Sapiens
ttttcatctgtatggaggcatatcttactttgttaatattcatatcaatagcaggtattctgtataaattccaggatgtatgcttattttccagaacagccatcctcttcacgtctttatgttcccatgcccacgtggcattccacatgaaaacattttcatcagaaccaaagatggaatacgtctgaatcttattttgatacgatacactggagacaaattcaccctattccccaactataatttattttcatgggaatgcaggcaacataggtcacaggttgccaaatgcattacttatgttggttaacctcaaagttaaccttttgctggttgattatcgaggatatggaaaaagtgaaggagaagcaagtgaagaaggactctacttagattctgaagctgtgttagactacgtgatgactagacctgaccttgataaaacaaaaatttttctttttggccgttccttgggtggagcagtggctattcatttggcttctgaaaattcacataggatttcagccattatggtggagaacacatttttaagcataccacatatggccagcactttattttcattctttccgatgcgttaccttcctttatggtgctacaaaaataaatttttgtcctacagaaaaatctctcagtgtagaatgccttcacttttcatctctggactctcagatcaattaattccaccagtaatgatgaaacaactttatgaactctccccatctcggactaagagattagccatttttccagatgggactcacaatgacacatggcagtgccaaggctatttcactgcacttgaacagttcatcaaagaagtcgtaaagagccattctcctgaagaaatggcaaaaacttcatctaatgtaacaattatataatgtttccctttttgattattgcattgtattttaatttgtgcagaatgataaagaatgttccttttagaagtgtgttatgtctgtacctgtctgaagagtgacattaaactttgaaaggacttcactgctcctttacgatattccaaatagttctttacattggaaaaagctaattctcggcgattctttcatcacattttcatcaaaactttcagtgtgattatgtattcatatcttcagtttaatatgtcagtataatagatattgttcaaaagtttcttgttgctaaagtggtgtaatctgttacacagatgaatagctagatgtggaaagagatatgtaaacaagaaacctttgggtattgtttcttaagtaaatattgggacaatcatggtaagcaaacttagttctgtaactgcatttttcaccttaaaagttaaatgaaatgcatgatggtattttattccttgaattatgcaatgcaacattttacatgtaaatagcactggtcatatactgatgtatatggttatctgggttatatctatttttatgtaaactctattttgtttttggcaagaagtgaaattgagacttatgtgcaggttgccattgaattttgctctggtgaatgctgagatccagctttttcttacaaataaatgggaccctgttttcc

SEQ ID NO: 78332 - DNA, 518 bp, Homo Sapiens
  misc_feature (26)..(26): n is a, c, g, or t
tcctctgccactgccagcatggcccnaagggaggcttggccttgggcttgccagcctcagctctgccctgacaagggtcttgtatccagggcagaggcctgaggtgacccaggcttgctttgtggctaatgccagcaggcttggttctagtgggcaccactggtgggcaacctccataactggcccttaggccctaccttcctacacagctaggctataatgggcctgagtgagagggtagcttccccagccccaagcacaggcagaggggtggagagcaatttttggttttatttttgtttctgaagtggtgcctgtacctccagcccccagggggccttccctggccacacttctctgccccacccaggcatcgccatcccagcactttgctccatgtcacccgtaagatgccctttgctgaatgtacctgagtgtatgtatttaaaaggactcacatgggcatcagagaatttatggctctgtatccaataaaaaagatggtgaaactggtcaaa

SEQ ID NO: 78333 - DNA, 1050 bp, Homo Sapiens
  misc_feature (649)..(844): n is a, c, g, or t
aaaagtgaataatgtgttcaactcttaaattcatgctgtttcatcattgctggtgtattcatatgtgaaagcatgtgactaattgttgctgcataaaagatatgagattcttttttattaggcattatttatgaccttttctatgaaaagataaggacattaaaatgtaagatgcgtgaggaaaatttaggtagagaggctctttgtggttaacttataatattgagtgatgcatgaggtaggtgttcagaataatattcctctgcattattatgaatgaaaagcattcttaattttagttaaaattaagttagtcatatgttattttattaattgtacttctatgaaataatatgcagtctatttttaaattataaattatgtgtgaacttagcttttcagttcaacatttttaacatattaaatactattgtgaattcaatgaagtgttcttatgccactaactttaacctattcccttactcaaggatgtaggtaaaagatggtaacaatacactatttggtaagataatgtactgacatctctagcaatcttttttgccagtggctttaaattgccaataagttaaagaatattgttcctatgggttaaatttttattcttattttcacatttaaatttattttnnnnnnnnnnnnnnnnnnnnnnnnnnnnnnnnnnnnnnnnnnnnnnnnnnnnnnnnnnnnnnnnnnnnnnnnnnnnnnnnnnnnnnnnnnnnnnnnnnnnnnnnnnnnnnnnnnnnnnnnnnnnnnnnnnnnnnnnnnnnnnnnnnnnnnnnnnnnnnnnnnnnnnnnnnnnnnnnnnnnnnnnnnnnnnnnnnnngggtcatttttatggtcataataaaaaattttatacaaacgtgtaaaatctatacatttctgagttctgaataaatatttttaaaaattttaatatatttttctttgaatatgtgacctttgcctgcaagcacatatggactcttagaattgatttacataaaattaaatatatacttctattaaagataaaccttaggtgtaaat

SEQ ID NO: 78334 - DNA, 937 bp, Homo Sapiens
agcatgtaatatgacaggggtaaaaagcagctggtaccgtcggattcccgggatatcgtcgacccacgcgtccgctacctggttatattcagtgtcaagtttgcatggatggatgctcagagattgaacttagtatacaacacatctactctatagaatgtggccacatctgtagtcagtgcttctgcacttcctttacacatactaacactgcccagtttgtttgaaaaaaatcagcctccatcagtatcactgcagttatatatgatgtatgccttattgctcaagacagatcctgtggctggatttttccatgtctttgtgcaggaactatgggttgttggcatccaatgctctgagcttaaaaatactgatttttaaaattgctatctgcagtatataagaaactctttgatttctcatatgctctgagactgctttttgtttcctttggttttatgcttcagctctggacttcagttgccagagtgtgccagatactggggtcgtccttaaagcaactttccctttcttatagtcatcaatttttagttggccacatgtagacattctggaccacataaataaagacaacaccctagagatggtgaagtaagttgtaaactaaaatcctaagccccctaattgactgaatggaacccctcttgaccaaagtgaccccagaaaaaccttaaaactgagttcctggccatgacgggatgggaggtcagacacgcttcattatatctccgtctcttttatggtttagacacagcaactgaccagcattaatgtcaaaataaagatcataaggctgacagaatagaccctttgtggcaataacaaattattcgtaagatctaaggtcatgccaggcaagtgttatgtcatgcactcctacacttaaagaataaactatgttctaacacaaaaaaaa

SEQ ID NO: 78335 - DNA, 1000 bp, Homo Sapiens
  misc_feature (40)..(41): n is a, c, g, or t
  misc_feature (45)..(45): n is a, c, g, or t
  misc_feature (57)..(464): n is a, c, g, or t
ggcgagctatgggaaaacgccagcacgccgccttttacgnnttcntgcctttgggtnnnnnnnnnnnnnnnnnnnnnnnnnnnnnnnnnnnnnnnnnnnnnnnnnnnnnnnnnnnnnnnnnnnnnnnnnnnnnnnnnnnnnnnnnnnnnnnnnnnnnnnnnnnnnnnnnnnnnnnnnnnnnnnnnnnnnnnnnnnnnnnnnnnnnnnnnnnnnnnnnnnnnnnnnnnnnnnnnnnnnnnnnnnnnnnnnnnnnnnnnnnnnnnnnnnnnnnnnnnnnnnnnnnnnnnnnnnnnnnnnnnnnnnnnnnnnnnnnnnnnnnnnnnnnnnnnnnnnnnnnnnnnnnnnnnnnnnnnnnnnnnnnnnnnnnnnnnnnnnnnnnnnnnnnnnnnnnnnnnnnnnnnnnnnnnnnnnnnnnnnnnnnnnnnnnnnnnnnnnnnnnnnnnnnnnnnnnnnnnnnnnnnnnnaagaattcggcacgaggcggcacgagggcaaacattacaaaccaatgccatttttcaaatgcactgccatttaagattgattatagatggatttcttaattgaagtacttttataatcacagtgactgaacaaaatattttcaaagacatttgtcattccttaaagccaagattttaaagactaatgtccttcctgagggttactttactatactgtgtatggtgtatagccacagaaagtcagtctgataaattttcaatgtgtaagtgtgatgcattcaacccagattattgtagacttaacttattatatttcctctgatatgtaaaatgacaaactcttctttcctttttaatctttgtctttaatccatgaattaggtgcattatctgctgttgattcttttatatctgcactcattttatgacgtcagacaaaatgttttctaggtgttgctattgtatgagtcataattggtataattttaaagaaaattgtaatattgttttttggtgaaatatattattagtagtat

SEQ ID NO: 78336 - DNA, 647 bp, Homo Sapiens
  misc_feature (65)..(65): n is a, c, g, or t
  misc_feature (95)..(95): n is a, c, g, or t
gagattgggggcagacagggactttcctctgccggctgcgtggagaaggaagcggctaaaaggtntgggccggggagttccccattcgttctccnggggagggagggactttacacctacccctcaccggaaagctagacccgcttcagggccaggagtggcgtttccgcacaggatttcctaagacgagagggatttagccaagagcacagacttggattccttctgtccctccccacctttctctcccaatgaagaaacgtttatatcctgtgattactctaggaaaggggcgtattaacggtcctttgcttccccgcaggggagaaaaagcttgacgaacttcacagaagagttcaagcttggaaataatggagtttatagagaaaagatatatttttaaaagctctaggtcagaagtactacacagtgcttttaaaaagtgtttaatgagagtttacagacagaagcccgaagtggaaagaccttatggttttgtagatatggtgactccagtctttgttgtataaaggttgggggagctgataaggtttttgtacagtattttctccttcgttgtattgatttttgtataaaaatgtaacttctacgtgtctaacacgtattaaatattttgaagcaacgta

SEQ ID NO: 78337 - DNA, 321 bp, Homo Sapiens
gctgttctgaatggatttaataatctaggtttaatcaaagcaatttgcatttggattttggaatgaccactccttgctaaggaagctatgtacttcatgctgtggaaactggcaaatacagaatgtagcttgtttgttttcttagccttgaagatgaccaggtagagagacagagtgagaccaacagtttttctgatttccctgctcctcctattccttcctaaaaatcagactcattgtgaccagtagtcttgaggactcaagctgaatgatagagaaggcagctcagacagaaaagaaaaaaagcctacagccgcggcc

SEQ ID NO: 78338 - DNA, 965 bp, Homo Sapiens
ggggttatatatgagagttcattgaagaagtccagtgaggctgaagtaaaggggcaagatagggcagttaactaaagagcactttatttctttgaagcctttctaagaaagaaatgggggtgcgagtggcttgaatctcccatgatgttggagggcacttagtggggttgaagtatgacataatatttcccattggggaaaggagaatttctcttaaagggtggcaaaatgcctttgcccagtgtccctattttaggcatcttttccttccttattccttccagtcagggtgtgtcctatacaaaacttcccatcagttctcctcaatattccccatttgtaaatgatcacttctcttttctaaacccttttcctgttcagatccatacaggatttgcaagggtaggatcatacatgcaaatgccccttgttcatctgtgtcttctgcaaactagtctcatgaagaattctggcgtgcagccagggtagctgaagtttgggtctgggactggagattggccattaggcctcctgagattccagctcccttccaccaagcccagtcttgctacgtggcacagggcaaacctgactccctttgggcctcagtttcccctccccttcatgaaatgaaaagaatactactttttcttgttggtctagcattgctggacacaaagtgtagtcattattgttgtattgggtgatgtgtgcaaaactgcagaagctcactgcctataagaggaaataagagagaaagtggaggagagggacaaaaggagtaattatttggtatagatccacccatcccaacctttctctcctcagtccctgctcctcatgtttctggtttggtgagtcctttgtgccaccacccataatgctttgcattgctgcatcctgggaagggggtatatggtctcacaagttgttgtcattgtttttttgcatgctttcttaataaa

SEQ ID NO: 78339 - DNA, 734 bp, Homo Sapiens
aagcaggctggtaccggtccggatatcccgggatatcgtcgacccacgcgtccgctctttcataaaaagtttttatgcatatgtgtctccatacaagtggctcattaaaataagaactttgtaaactgacttaaaatcagatattttttcaagagttagggaaagttgaagtgttttactgttttgtctcttgagccctttctctggggaaaaaatacatatccatctatctatctatatataaactgtgtatacattcttactgtttgaacaactattgcctttaattaaatgtttcatttttctccagagtccccaaagccacatggcattattatagtcatttttgagatgcctgtagagaatgaaagtattgactccgttagagggaaaatgggtttctctgggtgaattccaacgaagcatacctaggggtaacagtgaacctacctgggtttgttttgttttggtaaggatttatgtagtgtctggctgtaagcaagaatgagtggattataaacttgaagatttctctgttaaagtcacaaaaatgatcgacaaacaatatttttgtgatgtttatttaaacgttgtattttataacatacttcaaggaagagtatcgaagtaagttgctttataaattaagactaaattcgtatggatgcagaattcaattaataaaatttgagcctgttacgtaaattgaatattaataaaattgaaaatttctg

SEQ ID NO: 78340 - DNA, 637 bp, Homo Sapiens
gctttgcccatctgtaggtagacacacagatcgctcagggcactgagagatcccagaaggtaacgttaatgttttcagtcattgtgtgtcctttgttgctcccaatgtctttggactgtaatcagtgcatccacacctcccaggatccagtgctccctctcagctcagtctcccctctctccctgtcctgcattccatcccagctcctcagcatggcctcagtgggcgcacccatgcctcccgcagtccaggtgagcaggggagcaactgagcaggaagaggatggatcaacaagggtcacggggaataggggacccacggggtgtgacctgcttgctagagaactgtgaacatgtggctctggatagagtgactgctgctccatattagcttccagagggtgagtgagggacagaatatttccttcataatggtcatgggtgaatgctttctgctgtaagtgtcttttagagtaggaatcagcatagtgggatgcccagcaggcacaaaccatgggtccagggagtctcagcggggaacttctatcagtatcaataaccattggaaggagaaatgattcatgtgtgaaaaaattctcagatccatcaaataaatttttttcagagccattgataaa

SEQ ID NO: 78341 - DNA, 739 bp, Homo Sapiens
  misc_feature (66)..(66): n is a, c, g, or t
tcattgacatagggcattatgtacgtgatatcagtgcttatgaagaattggtatccaagctgaatntattagtggaggatgaactgaagcaaattgctgaaaatattgaaagcattaatcagaacaaagctcctttgaaatatataggcaactatgcaattttggatcatcttggaagtggagcttttggctgtgtttacaagctttatcatcccaacattgtacgttattacaaaacatttctggaaaatgataggttgtacatagttatggagctgatagaaggagccccgcttggagagcatttcagttctttgaaggaaaaacatcaccattttactgaagaaagactatggaaaatatttatacagctgtgcttagctcttcgatacttacacaaggagaagaggattgtccatagagatctgacaccaaacaacattatgttgggggataaggacaaagtaaccgttactgactttggcctggcaaagcaaaaacaagaaaacagtaaactcacgtctgtggttggaacaatcctgtattcttgtggtttcatgagaagatgcaaagaaactgtggcaggctaacatgtaccttgtaagctgcaagcttatatgatgtctacttatcctcttaacagtaaggctgacctactcgttactttctgagagaagaataattttcttttgtttcactgtgtactgtttttataaaataaacaataaaatttgatcat

SEQ ID NO: 78342 - DNA, 654 bp, Homo Sapiens
taggatactggcccagattttgccactgggtatggcagatcattttctaccatggcctgctgctcttgtagtggacttcctgagtccaatcccacctcctggtgtagaatttacactgctgcacctgaggtcgatgtttcaaagtaagatcaagccagtgttttgatctgggctctgagcacaagtcaggaaacaccaacatattcacactctcccagtaggttcctcagtccgatggtgaatggctattcgtaaatggctggtctggctctttggtgttggagcctttccaatagccccatgaaaagaagcatcacccaaggatattgtaaaaaggatgtaacaaggagatagggtagacattgtactcagtgggccttggggcctagcccagctctgagcagaggactgtggcattcactgtccttgagtgtttcaccttcttggataacacacgggccttctcttctggatttcatcagagattacagccagatgggggctgaagaccatcctcttgaccacagaggtgtgactgtgggaattcctcccaatttatggtttcccagaaaatcttagttccttttatttatagaatgcatgtcttttgtgttaagaaaccaaagagaaataaagagaacactcctaataaaa

SEQ ID NO: 78343 - DNA, 1464 bp, Homo Sapiens
tgtagcttgaccacggtttcaaaaagcaggctggtacggtcggatatcccgggatatcgtcgaccacgcgtcgcaacattgagtccacttaacacttaggtgttagaagacctaactttctgtaacaattaaccttatacttgttgtcatcgaatatttgttgaatgcatgtcaggtaatggtcttgatgtgatagcttcaaggtggaacatactgtaatctccagatgctaggaagttagtctaataattcactgcagaaaattgattaagtggctgtccttttaattaagagtgtggagtcataaacttaagttcttcatatagtgacaagagtccttagagattgttattcaagttccttagaaatgttatttaggtataatatcatcttgtctttgactagagcttgaaaccttgttatctgattgtgtaccactccaaattccctgccttctgcaagttgaatgtcttgctgaatgtgtctaggggttcatcttcagtaatcgacattccactagtgccatagttaacttcatgacatgtagacattcaacaacttgagccttggatgttcctgtggacctgacagttaacacaatataaagaacctaggattcaaattccaactttctccgtctgccttgggttgaataacttatcttttggagaatagctttcaagtggcttagacaactgataaaattcaactgtgttgtcgacgctcatctcttttgtcttacgcttagccatatctaaatcttgaatttaatagagtctagtgaaaaaaatgagtgggaagaatgaatataaaagtaataatataaggaaaaagggaaagtaaactatttagaatgtagttttgttatattcccagcatttcaatatttattagttacttgtaaattactgtggctgtgtagtttataaatgtctgtgcactatattaattagaagaccatagaacatgccagcaggttggctaatgctatgggggtttttaccacagttgccattgtggaagaaattatttggtacattaataaaaaaagttggtaaaacatgattttatacctcagtgtataagatgtgcaagacaaatatgcttatttccttttctagaatataagtgatattatttgcttatgacactaacactattaatgacaggagtcaatcagcctttacagctatcaaaatataatgagatcccaatgatgattcttttttactttgaatgttaattagtttgggactttgattggctggcaaacattttatcattgtcagaatttaatttagatttcaaaaatagcttacaggattttaaacatggtgtggtattctaaagccttttttttaaaaaaagagatctttttgagagaaacaaatgaggattgtaaagtttggggacttacctctgtagcattgtgaaaataaactttgattaagctgatttaaaagg

SEQ ID NO: 78344 - DNA, 1014 bp, Homo Sapiens
  misc_feature (107)..(107): n is a, c, g, or t
tctattaggatattgatttattcatatgtaggagtaatctatgttctaaaaagtaatattggatcattgtaatagtgtatcatccacctatatcaaaatcatgaacntatgtacctataaaattacataattgtcatattatcaaattaaaaacaaaactactctcccccaaaaaaacatctcagtggggaacagatgtatcttttcatctgaaagacaatgctgggggaagagctccactgagatgcgggcagggaggctgggctcgagccagcccctgcgttagcaggagggcgagaacagataggtaactctttaacatttcctttatgatctggcacttctccccagctccttccctctgccccccacccctactcctcaacacttctggtttgccctgacttctctacggctctggcttcttcccgaagagatataggagccatgtaagcacgcagtgggtgaactgcttaatttcactacatgttgatgtacttgtcttccgtcttgtaggtcttttctatataactttatgccacccttaaatgaatcattgggtatacctgtcatgttggatcctgtaatcacagttttccctgctcacctttttgtctaagatctattgagaaagggaaatatgggaaggagaaccatttgatcagaatacaaccaatagtctttaagcattgttaaagtatgaaactgaaatacattcaaaacacttaatccttgaggcttgtgatctgagtaattagcaggtatgatgctgggactggaaaatagaaagtaataactaaagggttaatgtgcaacgttattttttggccttgttcatgattttatgttttcagtgtcctgtgtacatatagaattgttaaagttgtcatttccaatatttatattagaaaaattatttagatactttataattttaaccggcatttttaataatgacacttgcatttattgtattgtaataaatttcacttttaactttaaaagtttaacttt

SEQ ID NO: 78345 - DNA, 1001 bp, Homo Sapiens
gacaaaagacaaccatttcacgcggataacgatagtaagaaatgacaaaggttccgatgaaaacgcacatggcccacgcaatatgtgagttgctcaccaatagcacccaggattacgcttatgatccagctcaatggtatataaatgtgagccaataacaattcacacaggaacagctatacatgttcgaatttatacactcactataggaattgccctcgaaccaagattcgccacgagggcctccgagctgaaatgaaggaactggcaatctttcacaaagtggcacccaaggccccactccctgtcctactcaatctctgcagggaaaaactgtgggataggatagcagccagctggggacacacagaggaacattcaacaggaaggtcccgcctagggaaaaggccacagagcccaggcctcttgccgattcagggatccttggatataagtggattagaggagagggaggaaagctatcatttcagtggtctccaaatcaagtagaaatattactgggaggtatcccacttaagcctgaaccagcagacatccgaaagggtcactctagagtcagaaaggaaagcaggtcccccagaaggcaacacattgataggaagtggaggccacagaaaaagaatgtgcccacttgataattacttaagacttctatttaaccaaaagaacattgaaatactttgtaaatattcatattgttgaacctttcataatcaggaattcactatgtactatactgtaagtcatagttcgcctataatttactagtatatctccctctaggacagatagtaaaatgtgtactatgttgttacagtggtgcaaaaatgttttaaaagtttatcacttgttttgaagactagaactttctttacttttctatattttcttagcaattcacagatatgttctctttggatttagtactttaacatatgtacatttcttcagaataaaaataagggtatttcacaaaaaaa

SEQ ID NO: 78346 - DNA, 889 bp, Homo Sapiens
caacaccaaacccccccctcggcccttcttccgctcctaggtagcgaggcctgggtggcgaattcggcacgaggaaatctttctacaggcaattacctccccaagagaagccttccttattttggagtaaggtcctaagatagctggatgaatcaggaaaaccatgtcccctctaggtattattaatataagcaggaagggatctactataggaatgaagtatttataaaccactgaaagggatagagaagtgaacattggagaaagccagtagcaactgtgagaaatcagcaacttgcaggaggcacagaaaactcctgctgatggtctcagcttccagcagcacaaaagcagatgatgtactggaaaatgctcagaagatgctacaaaacctcatgcctactgtctgccactgctggagaaggaatcatggtttctagaagtgcctctcattagtggactttaaagcaaatcctggctggcaggaaattctgaggaatatagctcttaggcttccagcctctaccatgcaggagagaacacagaaggactgatgtatgttggtggatccatgtatgtgtccagcacagcggcctgctggactctgagaactgggaaagatcagagcaagccttgcctcttatcttcgggaaaccagaatatgtttggggtggtaggagccacacagactcttctgagccccctcactcacttccttccccctgtgcctttcctttgagagtgaaggtgggtggagttgaccagagaaaggggagagaattcgggaaagacccaaagtgtttgtaattcttctttgtccttttacctacagaaatggtcacatggttctatttaaatagcctaataaacacatctggagcctgtcttg

SEQ ID NO: 78347 - DNA, 1038 bp, Homo Sapiens
  misc_feature (789)..(789): n is a, c, g, or t
  misc_feature (792)..(792): n is a, c, g, or t
  misc_feature (794)..(795): n is a, c, g, or t
  misc_feature (797)..(798): n is a, c, g, or t
  misc_feature (800)..(800): n is a, c, g, or t
  misc_feature (807)..(808): n is a, c, g, or t
ggtgggtcccggagaggaagctttgacgccacagggaattcttcctactcttattcctactcatttagcagtagttctattgggcactagtagtcagttgggagtggttgctataccttgacttcatttatatgaatttccactttattaaataatagaaaagaaaatcccggtgcttgcagtagagtgataggacattctatgcttacagaaaatatagccatgattgaaatcaaatagtaaaggctgttctggctttttatcttcttagctcatcttaaataagcagtacacttggatgcagtgcgtctgaagtgctaatcagttgtaacaatagcacaaatcgaacttaggatttgtttcttctcttctgtgtttcgatttttgatcaattctttaattttggaagcctataatacagttttctattcttggagataaaaattaaatggatcactgatattttagtcattctgcttctcatctaaatatttccatattctgtattaggagaaaattaccctcccagcaccagcccccctctcaaacccccaacccaaaaccaagcattttggaatgagtctcctttagtttcagagtgtggattgtataacccatatactcttcgatgtacttgtttggtttggtattaatttgactgtgcatgacagcggcaatcttttctttggtcaaagttttctgtttattttgcttgtcatattcgatgtactttaaggtgtctttatgaagtttgctattctggcaataaacttttaggacttttggtancancnnanncnaaaagannagaagaaattggcggcccgccttcgggccctcaaaaaagctttctaaaaccattccgtttgggggcggcggggccccacgaaagggaaagtgaacactggggtcaaatgctggttttccctaggagagatcccggcggccccgaacaaagggggcttgggagatccctcacgccaaattaagtatatggcccccgggggcggggagccccggagagggatttttcgagaa

SEQ ID NO: 78348 - DNA, 730 bp, Homo Sapiens
catccgtaagcccctcagtcacactttccatgtagctgaccagtgactacaggatgtggctgacagtgctcactgaaaggagagttggtgcgggactggtggttctgagcacatagacgcctattagtccttctggtcagtgaacgaaaattctagacctacagttactggctacttgcatttgtcagtttagagaaaaggtaaaatgaggcattttcaattgtagaatagactaacatttaccacagaagtgcttcagcattctaaatggattagatcactcattaagctatttttatatgccaatttactaatgccttacatcaatccactaataggttgttgggcccgcagtagagtccctatgcagtcccaattctgttttctgtaaccatgtgactggtgatgcagagtgataaccatgtctgcctatcttgtactagactcttcatgctgatcggatcttgcattgaaataaccatgtggaagaacaatgaatcgattaatgatgacatgtacaaccatatttaaagagcaatagtgtccgtgtgtcatgaaaaacttatttgtaaacgtttatatggtatgattttgattttatgtatgttcataaatcctgcactgtatgatatatgtgagttaaaacattggtgcatgaatttattttcaaagtataaaacacatcacttaaacattttatgtgtcaaataaaatttgattatgtaaaccc

SEQ ID NO: 78349 - DNA, 1044 bp, Homo Sapiens
  misc_feature (42)..(62): n is a, c, g, or t
  misc_feature (674)..(674): n is a, c, g, or t
  misc_feature (698)..(698): n is a, c, g, or t
  misc_feature (824)..(824): n is a, c, g, or t
ccctcacctaaagggaataagcttgcggccgcctgctcaggnnnnnnnnnnnnnnnnnnnnncacagaaaacattgctttattaactgcgtttgccaacacacgaggagtgcaaagggctccctatgacacaagccctggtggggccggggtctggaagcccccatgagtgagcaggacaggatggggctgggaactatgcagcagcggcaacacagaatcatgcagggcacagcgggcactggccacacccaggtgaccatacattctattgctcgttaagggttgcgcacatggacaatgtacaaaaaggagaaataggtctttgcgttaatgaaaaatacattttttctctacaaaggaatcttttctaatacaagaaaataaatattgcaacataagccaaaaataatttaaaattgctcttttcaatatattttcaatatttatattaacaaatggcacatcactttctttgaaacaaagacagaaggtgtctcctcctgtgacattcatatcatccccccaccgtcccctcaaactgacgtggaacacaaagtgtttgtgcctctgagggagaaagtggcaggaggtgccttaaagaacaaccaaaggtctcagactccagccctggctcattggccaatgtggccagcgaggccaagggcatgggangacgtgccccccccaagggccttngctatagaaatccagatcattttttcagtggtttgcatatgggacaaggttggcacatctggcagttagcaggaaatgcaagttcagccgctgccatgttggttagattgggcagttgatctctangattgtccagctatccacagtgtgccataccagtaacacaggatgctgcataggaacacagacgtggctggaacccccacaacatcacactattctggactggggtgtctccaggagctgagcttcatgcatgtccaactgtcctatcggcattataataactctactctctcccatgttcaaacatttataaaaacttctgcatacctgcttaaaggga

SEQ ID NO: 78350 - DNA, 1371 bp, Homo Sapiens
actaagcacggaggctgtttataggctgggccgcatattacaatgctcagggctccactgcaccctctcgggggtctgctagcgctttccgtagactgtctccacgccctccccactcccagccagtccagatcctctccggagggactgcagcaaggatcgttaagtctgtccaccgggatgggggaagaccagggccggagcagattggccatccttcagaagatcgacttccgctattggggagagtctgaggagtccgttctcccacggggcctcgtcactctttgcgaagggcgcctggcaggtcaaatgacctccatttccacctcgccttccaccttcttcttttgcttctccatcactgcctccagctctgacactttctctttgtcctccagcagcgagcgctgcacggtgacctggctgtacacacgtgccccctcctcggggctcaccgcccgcagctcctccttctgcagcgagaaaagctgcgccccggtcagcacacccagcgcgtccacggtcccggagctaaagcccttggcctgcagccaggcgcggacctcggaggcgtccgagcccgggctgagctgcggttccggggcgcggggccctgggactgcgcggctcggtcccgagcggccctgggccaggcgcgcctgcagttcctcgttgacgatgagcatctgggagaatttctccttctcgctggggtccaagccgttgaggctatcgcagctgtcccagcggggcctgtcccagcggggccgagccagagctggaggtggggccggggctggggctggtggtggaggaggagtgctgttcaggctgcgggcagggctttggctgtggtgcagccggggtccggggtagggtgtcaggatgttgtagggcacatatccctcctgccccgctgggtcccgaaccttccaccacttacgactgtcatccaggacctccagtacgtcccgctgcttgaccgacagctcactgctgttgcgggcctggaagtcataattacacaggacccattttcctgctgtctctgactccagctgaggctcagattctggctccaagtctcggtgaccattgacagcgacctggggggcgctttgctgccggcgcctccgctcgtgctgtagctgtttctcaactgggtcctcccaggcgcggctctgcgggtcagtgaccggcggctcccagccgctgaagaactcgggtctgtatgggggtccctcctccggggacagctccagcccggggcgggtccacgagtcccccagcgaggtccagagctcgttttcacgtggagtgacgttgtcccgcagcagcgccacggcatccgatgtcagatgcggccgc

SEQ ID NO: 78351 - DNA, 1369 bp, Homo Sapiens
  misc_feature (113)..(113): n is a, c, g, or t
  misc_feature (710)..(771): n is a, c, g, or t
  misc_feature (806)..(890): n is a, c, g, or t
  misc_feature (971)..(983): n is a, c, g, or t
  misc_feature (1048)..(1057): n is a, c, g, or t
atcttaaggcacatgtgcaatggaatgaataaagaagtggcatatgtccatggactactgtaaaacagtgagcatgaatgaactagaagtccgtgtaataacgcagctgaatntaacaaaccttgctgaatgaaagactccagacacaaaagccaacatgctgtatgattccttctatataaattataaagacgggcaaaacttgtatacgtggtttaaaattaggatagcagttacccttggccaaggctgaaaggggccatttatctggtgctgggaataatctgtttctaaacctaggtgctaagtatttgagtgtgttctgacctgtgcacttaagatatgtgtatttttctgcatgtgtgttacactttccataaaagttttctaaaatcacaaatggctaacatttgtgtcgctcatcactctaatcatatttttctagatgtgtatgaatatgctgcacaacaggaattaaatggcagattttgcataattctgtgcaggaaatacatatttatagtaattttgatggcaactactaagatttcctacgctgtccttaaagcttagcataatgtatattttaagtgaaatatttgagaaggttaaagaatcattacatactttgtcatcctatacttttgcatatataaataggtctgagctgcctcttcaataaagaagctaatgtgtaacatttcgcccannnnnnnnnnnnnnnnnnnnnnnnnnnnnnnnnnnnnnnnnnnnnnnnnnnnnnnnnnnnnnttccctcaccaccctcccgtcggacaccctccccnnnnnnnnnnnnnnnnnnnnnnnnnnnnnnnnnnnnnnnnnnnnnnnnnnnnnnnnnnnnnnnnnnnnnnnnnnnnnnnnnnnnntcttccaaaagattttcctcacaaccctcttggtgtgccggcgggggcgcccccattgaccgcatagaaccccttgtcccnnnnnnnnnnnnnccccccgcagcggatctgcgccgccccgcaaccaaggcggttgcccggacttttcccaccaaatnnnnnnnnnnccgccctcggcgtacccacgccacgccgtccttttatccgccgactctcccctaacggcgggttctttctcgcccccccgatattcgtcccgtgggcgccgctttcatcgcaacggagggcgcccccccgtccgcggatacgcctcgcaccgccgataaaagccctcgcctgcgacgcttccttctgcccgctttcctactattcgagcagttgtggtgccgtgccctaccccttccccttctacagccttttttccgcttcgccgagtagtccgcgaggccctcccccccctattcacgcctttatttcgc

SEQ ID NO: 78352 - DNA, 1041 bp, Homo Sapiens
tttaaaaagtaacaaacccgaagagaaagaccaaaacggctggtacggtccggaattcccgggatggcgggcccgcgagtccgagacctgtcccaggagctccagctcacgtgacctgtcactgcctcccgccgcctcctgcccgcgccatgacccagccggtgccccggctctccgtgcccgccgcgctggccctgggctcagccgcactgggcgccgccttcgccactggcctcttcctggggaggcggtgccccccatggcgaggccggcgagagcagtgcctgcttccccccgaggacagccgcctgtggcagtatcttctgagccgctccatgcgggagcacccggcgctgcgaagcctgaggctgctgaccctggagcagccgcagggggattctatgatgacctgcgagcaggcccagctcttggccaacctggcgcggctcatccaggccaagaaggcgctggacctgggcaccttcacgggctactccgccctggccctggccctggcgctgcccgcggacgggcgcgtggtgacctgcgaggtggacgcgcagcccccggagctgggacggcccctgtggaggcaggccgaggcggagcacaagatcgacctccggctgaagcccgccttggagaccctggacgagctgctggcggcgggcgaggccggcaccttcgacgtggccgtggtggatgcggacaaggagaactgctccgcctactacgagcgctgcctgcagctgctgcgacccggaggcatcctcgccgtcctcagagtcctgtggcgcgggaaggtgctgcaacctccgaaaggggacgtggcggccgagtgtgtgcgaaacctaaacgaacgcatccggcgggacgtcagggtctacatcagcctcctgcccctgggcgatggactcaccttggccttcaagatctagggctggcccctagtgagtgggctcgagggagggttgcctgggaaccccaggaattgaccctgagttttaaattcgaaaataaagtggggctgggacacacgaa

SEQ ID NO: 78353 - DNA, 734 bp, Homo Sapiens
  misc_feature (49)..(49): n is a, c, g, or t
acagctcctcttgtcagcatggggttcgtcgtgctccagcagtatgccnccggatctgaacgtcaagcgctgcgaatacgagtggtctccaccaccagaatggctaaagtgaaaaagaccgcaccgtgtggaggcgagaaagtagagcgactggacctctcttgtatttctgggggagtgtaaattggtagagacattttggaaaactggcagttttctaatgaagccgaacatatgccacctctgtgatccagcagttccactcctaggctgtcaacacccagcagaaatgtgtaggtgtgagcatcaagagggtgcatgggaatgttcagagccctttcataacagccccaaactggaaataacccatcaacagaatggaaaatgaatgatgccctactcactaccatgcacatagacacagcaacgggattgacatgcccggctacacacagcaacatagacaagtcgcatgatgaaatcttgagtgacagaagccaaatgcaacagtacatactagatggttccaggtgtattacgttcagaaccagacaaaactaatttatagtgcaccaaagtcaagatagtgatcgcccttagggttgggaggggacgaggggagagcttctgggagctgatccagttctgttgtgtaatctggtgctggttccctgggcatatgtattctgtgaaaatccatcacatgacttaaataaaatgtacattacttaaat

SEQ ID NO: 78354 - DNA, 1109 bp, Homo Sapiens
  misc_feature (34)..(34): n is a, c, g, or t
  misc_feature (46)..(46): n is a, c, g, or t
  misc_feature (160)..(160): n is a, c, g, or t
  misc_feature (827)..(837): n is a, c, g, or t
  misc_feature (1010)..(1031): n is a, c, g, or t
tatttatggagagattccagacacttcatttacntgaatacggatntaaatggacgtgtgcaggacgcacacagtgcctgtgtagagtgaaccagttatctcttgaaacattatcagaacttaaatattcatacgttgatccagagctctctaaatcatnaagcagacatgttaggaaagacatactcataagtgtattattttactcaagaactggaaaccaactaaatgccttctatagaagtaatttttgatgaggagaaatggtacaatactaattaacaacttggtttaacatgtttactgagcatctgttaagtgttgggggaaaaagcagcaggatccagagctataggtacagtgtgatctcagctttgcaaacacattttctacatagatagtactaggtattaatagatatgtaaagaaagaaatcacaccattaataatggtaagattggtttatgtgattttagtggtatttttggcacccttatatatgttttccaaactttcagcagtgatattatttccataacttaaaaagtgagtttgaaaaagaaaatctccagcaagcatctcatttaaataaaggtttgtcatctttaaaaatacagcaatatgtgactttttaaaaaagctgtcaaataggtgtgaccctactaataattattagaaatacatttaaaaacatcgagtacctcaagtcagtttgccttgaaaaatatcaaatataactcttagagaaatgtacataaaagaatgcttcgtaattttggagtaggaggttccctcctcaattttgtatttttaaaaagtacatggtnnnnnnnnnnnttcacaacagtatataaggctgtaaaatgagaattctgccccctcacctcttaccccagtactattctccagaggtaatctattaacaatttcttatgtaattttcagaaaatttgtatgcgtatataagcaaatatgtaatctttattttttaaataaatgggatcatattnnnnnnnnnnnnnnnnnnnnnncctggcaggcggccgcaagctttttccctttagtgagggttaatttcgagcatggcacgtggccgtcgtttaccaacc

SEQ ID NO: 78355 - DNA, 1351 bp, Homo Sapiens
  misc_feature (943)..(963): n is a, c, g, or t
  misc_feature (1056)..(1078): n is a, c, g, or t
ctttaataatgaaataatttattatttgttaacagttgaacaatacagtttacatatacacagcaaagattctctaaaacatgtagtagtttctaaaaatgcatgtgctaactgtagtaaaaagcaccattctctatgatcttgacacaggatttacattggcgtcatatttacataaagaaacatctggaaacagaatagcataccctttcatctgctgctcccctgtcaggctgtgtgtagcattaggaagatggccccccaaaaatgatggtaacagcaatattccaagagcaccaattctagggatggggtaaaggcaagtttggttgtcaggtaaaagctaaaatgaagaatgctccctcaacttgccaccccacagagagaagaaatcaaaatgtaaaaatctggataaatcttaacattgggtgccttatgaattctcactttatgattttgagagaaggtcaaatactcaatctcttcagccattcaatagctgaatctagcagtgcctgtcaatttcttctttcagaagaatctgagaaaatcatccatgtaatattgataatgaaaaaaaccatgataaatcacctattgcacaccccaccctctaacccagttatctttgaaagcaaagcatcctacagtctatagagatcagaggatgtagaatgagaaaccacctcatcgaaaagggtctttgggttgtcttctaccaggaagagtttttaataggagtagccagctactagacacgctaaacacactgcatcagagtcaaacatagaaaaagaatagattgacatgcaagaaattgcgtttagccttttactacctgatgttcaacactcagggaaggcaaagggggacagacaaacttggcgaaacaaagaagaaacagaaaagaccaggatgttaaagtctcctgtgtggttcatgnnnnnnnnnnnnnnnnnnnnngaccaagacttgggggaagaaatagactgtaaaggacaatgatagtggtattctcgccaatacagtatggtataaaaacctaaataataatannnnnnnnnnnnnnnnnnnnnnnatatatagatacttttcaaaaataagttctctcttgaaaggatggggaagaggcaagaagaaataagcccacaaaatctattctcaagctccaagatattgctagatggttattttgagcatcacaatcctacctagtttacacttttttcttatcccccaggatttgctcttggccgctttggggatgcagaagagaggcccataggaaactcaggttgaggcccctttgttgcttctgaaaaagtagaggttaaaggaaaatgcccacctt

SEQ ID NO: 78356 - DNA, 1600 bp, Homo Sapiens
gggtccggaattcccgggatatcgtcgacccacgcgtccgctgcccgagcccgcggccctcacgcgcgccctctcccgtgccatggcctgcaggcaggagccgcagccgcagggcccgccgcccgctgctggcgccgtggcctcctatgactacctggtgatcgggggcggctcgggcgggctggccagcgcgcgcagggcggccgagctgggtgccagggccgccgtggtggagagccacaagctgggtggcacttgcgtgaatgttggatgtgtacccaaaaaggtaatgtggaacacagctgtccactctgaattcatgcatgatcatgctgattatggctttccaagttgtgagggtaaattcaattggcgtgttattaaggaaaagcgggatgcctatgtgagccgcctgaatgccatctatcaaaacaatctcaccaagtcccatatagaaatcatccgtggccatgcagccttcacgagtgatcccaagcccacaatagaggtcagtgggaaaaagtacaccgccccacacatcctgatcgccacaggtggtatgccctccacccctcatgagagccagatccccggtgccagcttaggaataaccagcgatggattttttcagctggaagaattgcccggccgcagcgtcattgttggtgcaggttacattgctgtggagatggcagggatcctgtcagccctgggttctaagacatcactgatgatacggcatgataaggtacttagaagttttgattcaatgatcagcaccaactgcacggaggagctggagaacgctggcgtggaggtgctgaagttctcccaggtcaaggaggttaaaaagactttgtcgggcttggaagtcagcatggttactgcagttcccggtaggctaccagtcatgaccatgattccagatgttgactgcctgctctgggccattgggcgggtcccgaataccaaagacctgagtttaaacaaactggggattcaaaccgatgacaagggtcatatcatcgtagacgaattccagaataccaacgtcaaaggcatctatgcagttggggatgtatgtggaaaagctcttcttactccagttgcaatagctgctggccgaaaacttgcccatcgactttttgaataaaaggaagattccaaaattagattataacaacatcccaaactggggtcttcagccacccccctattgggacagtgggactcacggaagatgaagccattcataaatatggaatagaaaatgtgaagacctattcaacgagctttaccccgatgtatcacgcagttaccaaaaggaaaacaaaatgtgtgatgaaaatggtctgtgctaacaaggaagaaaaggtggttgggatccatatgcagggacttgggtgtgatgaaatgctgcagggttttgctgttgcagtgaagatgggagcaacgaaggcagactttgacaacacagtcgccattcaccctacctcttcagaagagctggtcacacttcgttgagaaccaggagacacgtgtggcgggcagtgggacccatagatcttctgaaatgaaacaaataatcacattgacttac

SEQ ID NO: 78357 - DNA, 1019 bp, Homo Sapiens
gctggaccggtccggaattcccgggatatcgtcgaccacgcgtccgggtgggcggggctaggcgtctccttctacggatatctgtggaccttatggaagcaaagactcttggaactgtaacgcccagaaaacctgtcttatctgtcagtgcaagaaaaattaaggacaatgcggctgattggcacaatttaatcctgaagtgggaaaccctcaatgatgcaggttttaccactgcaaataatattgccaacttgaaaatcagtttattgaataaagacaagatagaactagacagcagcagcccagcctcgaaggaaaatgaagaaaaggtgtgtctggaatataacgaggaactggagaagctgtgtgaggaactgcaggccaccttggatgggttgaccaaaatacaggtgaaaatggaaaagctgtcttcaactaccaagggaatttgtgaactagaaaactaccattatggggaggagagtaaacgaccccctctgttccacacgtggcctacaacccatttctatgaggtttcgcataagctcttggagatgtacaggaaggagctgctcctgaagcgcacggtggccaaggagcttgcccacaccggggatcccgacctcaccctgagctacctgtccatgtggctgcaccagccctatgtggagagcgacagcaggctgcatctggagagcatgctgctggagacaggccaccgagctctctgacgtcctgagacggctgcggacactggctccttccacgtctcaccaggcagacagtctgcctaggacccagtgccgcaggcctggatcagaccccaggatcagaccttcttggggtcttctggccagagcttgtcaccagccccatggcctctccaggcgtgctcatgcccacaacccgcggccagccccacgtggtgccgctcagccttctctgcccctcctgggaatctgtcattcgtgggtgcttcagagtaaaatcaatgagtttctgagcagaaaaaataaaaa

SEQ ID NO: 78358 - DNA, 1026 bp, Homo Sapiens
  misc_feature (142)..(142): n is a, c, g, or t
  misc_feature (165)..(165): n is a, c, g, or t
  misc_feature (167)..(167): n is a, c, g, or t
  misc_feature (180)..(180): n is a, c, g, or t
  misc_feature (190)..(190): n is a, c, g, or t
  misc_feature (206)..(206): n is a, c, g, or t
  misc_feature (209)..(209): n is a, c, g, or t
  misc_feature (222)..(222): n is a, c, g, or t
  misc_feature (349)..(349): n is a, c, g, or t
  misc_feature (913)..(921): n is a, c, g, or t
tgtcgcgcagtgatcacgaagtcttgatgttgagtgagcactacttctcttgtaagaagtcaagctcgcaccagatgcagtctgcgtccagagctgcgtgagtgtgtccactgatgagtccaagccaccccaccagcactcntgatgggttgctcacactgcagntncctatcaccaccntgcacgtccntggaagattaaatgtntgntgcaaatgatgtntaaaatgtattaatgcagttttcctgctctcaacatgaccacccaagattcaaacacagagacttccaagttactattttttcagaacatcaccgattttaaaatctgtcacaacaggacttggttntgtgcagatatcagagtgctaatgtgagaaacccagttaaaagaaaacttagtttattgggaagaaagcctcaggcccactcgtttctagaactgtgaaaatatccttggttggcatttttaacacaaaacactatagtgttggtattaaatagtactaggtaaatataaagaaaccaataatgaattgctgagacaatcttgaacccaaatagcattagaaagctgaaggcccaatgaaataacactttcacacttaaactctgtggataaattttgcctgtgggtataaacagatggtcaaattaaaatgctttactataattaacttttctgatttgaatgaagggaaatgtatttattgaaacaaagctgtttgctgctttatgcaggtgcagtgttcagtcagcaaggaagtgggaagagtggacatggtattgtgtctacacccaagttcttaactaagcttctcgctctaatactgcattctgtttctccttttgtgccctgattgtaatccaaaatttatgaactagaaaagaatgtccaatttaataagttgcannnnnnnnnctttaagcactttattcagaacaatacatgttcttctggtagtgtttggataatatgattttaacacatgctaataaaagccaagaaaaatccttgccacttttt

SEQ ID NO: 78359 - DNA, 867 bp, Homo Sapiens
  misc_feature (248)..(248): n is a, c, g, or t
  misc_feature (756)..(790): n is a, c, g, or t
atattaagttatacgtaataccatgtaaatctttatctgagtataacatatgaaaacagtccttccacaaccaaaaatctggaaacatttaaaaaataaggactcatcttttaaagtaactgatccagattccacaggctactcttggacagggatcttgctggatagaatcccttcatttcgtggctttcttgcatgcacttcaactggaccaattcttctgctgtgttgttctaagagctcaccanaacatagatcatgccatataggtagtaaaaaaatgctacgaagataaaaacctcaatttgcacccatccttccttctgacaatattgctagaatatctgcattcatgatgattgataggcgtcactacgagtcctggaaccactcatcactggtctactcatatacctcccaatatgatatgccaagaggggcatattgagacccagtgtaagccactctgctgcacaaagaaacatgacacagaagaaagcgtggatgaggtactctgggagtacaaggggattcagggtagtacactggtctataggagtcttgtaatcagtcttcagctcatcagatgctataatgtgccaaatggcgaagaagatgagcgcggcagtgagcagcagcgccagccatgtagcacgaagcccgcagaacgtgaacgccatggctggggaggaggagcggggagcccccggccgtaatggccgaattcccgggcatatgtccggtaccgtcgactgnnnnnnnnnnnnnnnnnnnnnnnnnnnnnnnnnnncggccgcttcctcgctcactactcgctgcgctcgtcgttcgctgataccggcgctacccctatatgattatcaattt

SEQ ID NO: 78360 - DNA, 2080 bp, Homo Sapiens
  misc_feature (1448)..(1572): n is a, c, g, or t
  misc_feature (1617)..(1625): n is a, c, g, or t
  misc_feature (1644)..(1697): n is a, c, g, or t
  misc_feature (1741)..(1749): n is a, c, g, or t
  misc_feature (1766)..(1890): n is a, c, g, or t
  misc_feature (2005)..(2015): n is a, c, g, or t
tttactatgaaccgtgtgtacaaaaaagcaggctggtacggtccggaatcccgggatatcgtcgacccacgcgtccggcgccgcctttctccgctggcaacggcgccgctccccgctcctcctccccagccatggcgttcacgttcgcggccttctgctacatgctggcgctgctgctcactgccgcgctcatcttcttcgccatttggcacattatagcatttgatgagctgaagactgattacaagaatcctatagaccagtgtaataccctgaatccccttgtactcccagagtacctcatccacgctttcttctgtgtcatgtttctttgtgcagcagagtggcttacactgggtctcaatatgcccctcttggcatatcatatttggaggtatatgagtagaccagtgatgagtggcccaggactctatgaccctacaaccatcatgaatgcagatattctagcatattgtcagaaggaaggatggtgcaaattagctttttatcttctagcatttttttactacctatatggcatgatctatgttttggtgagctcttagaacaacacacagaagaattggtccagttaagtgcatgcaaaaagccaccaaatgaagggattctatccagcaagatcctgtccaagagtagcctgtggaatctgatcagttactttaaaaaatgactccttattttttaaatgtttccacatttttgcttgtggaaagactgttttcatatgttatactcagataaagattttaaatggtattacgtataaattaatataaaatgattacctctggtgttgacaggtttgaacttgcacttcttaaggaacagccataatcctctgaatgatgcattaattactgactgtcctagtacattggaagcttttgtttataggaacttgtagggctcattttggtttcattgaaacagtatctaattataaattagctgtagatatcaggtgcttctgatgaagtgaaaatgtatatctgactagtgggaaacttcatgggtttcctcatctgtcatgtcgatgattatatatggatacatttacaaaaataaaaagcgggaattttcccttcgcttgaatattatccctgtatattgcatgaatgagagatttcccatatttccatcagagtaataaatatacttgctttaattcttaagcataagtaaacatgatataaaaatatatgctgaattacttgtgaagaatgcatttaaagctattttaaatgtgtttttatttgtaagacattacttattaagaaattggttattatgcttactgttctaatctggtggtaaaggtattcttaagaatttgcaggtactacagattttcaaaactgaatgagagaaaattgtataaccatcctgctgttcctttagtgcaatacaataaaactctgaaattaagnnnnnnnnnnnnnnnnnnnnnnnnnnnnnnnnnnnnnnnnnnnnnnnnnnnnnnnnnnnnnnnnnnnnnnnnnnnnnnnnnnnnnnnnnnnnnnnnnnnnnnnnnnnnnnnnnnnnnnnnnnnnnccctttaaaaattcccccgggggggccccattttcccgccccccnnnnnnnnngaaaaagggggcccctaannnnnnnnnnnnnnnnnnnnnnnnnnnnnnnnnnnnnnnnnnnnnnnnnnnnnnaaaaaaccgccctttgggaatttttgaaaaaaaccctttctttnnnnnnnnnaaaatttgggaaaaccnnnnnnnnnnnnnnnnnnnnnnnnnnnnnnnnnnnnnnnnnnnnnnnnnnnnnnnnnnnnnnnnnnnnnnnnnnnnnnnnnnnnnnnnnnnnnnnnnnnnnnnnnnnnnnnnnnnnnnnnnnnnnaacccccggggttcgggttcctcatttggggggggtttttaaaaaccaacccccctcggggtctttttttgggcccctttcatcctaaagagttgtgtgtttttttacaattttnnnnnnnnnnnttgtttagagggggtttccccgggtctataaaaaaaccaccacgcacgcctcccccggtacctag

SEQ ID NO: 78361 - DNA, 1308 bp, Homo Sapiens
  misc_feature (773)..(790): n is a, c, g, or t
  misc_feature (805)..(805): n is a, c, g, or t
  misc_feature (829)..(996): n is a, c, g, or t
  misc_feature (1029)..(1029): n is a, c, g, or t
  misc_feature (1048)..(1127): n is a, c, g, or t
ttaggagtatatgggaggttattggttttatgtttaaggatacgtttacttgagtttaagatacaggtcatccatcattcttaggctcactttttacagaaagtatgcaaatagtaaagtgacagcactgctaatgtttttccccagtactataacttgtggtttctgaactcattattgttgtatttccaaaaaagtaataccttttaattagtgtattaaaagttaagtataattattttaatgcaatctaatacaatcagattactcagttgccttacctcatgggaagagttacttttttagatctaaaaagctgaatagcatgttagttacttggtttcaacttgagttttcttttaatgttaataagattgaaactttagtatttagtggggaatggaaagagttgcccttgttgcaagtaatgaagcctgatttgattatgaagctgcttaatcactcttcatgtgttcagaattactgtttttcttgcatgtttttcctttttgtcactgtgtacattaaaattttggaagatgctttactatgtaaagtatagatggtcattttaatcattcagccacatacggttggctggtaaacagcttattctgatacaagaatgcttgggtgcatatggaaagattgtgaaagagtgtgtcttgcatcaacagctgtcttatttatgatatataagtagaaatagagcaaatgttggaatctgttatttttagtaccatgtctttaataaagctaagtattttagaggnnnnnnnnnnnnnnnnnngcctacagccgcggncgctcccctcgtgccgaattcttnnnnnnnnnnnnnnnnnnnnnnnnnnnnnnnnnnnnnnnnnnnnnnnnnnnnnnnnnnnnnnnnnnnnnnnnnnnnnnnnnnnnnnnnnnnnnnnnnnnnnnnnnnnnnnnnnnnnnnnnnnnnnnnnnnnnnnnnnnnnnnnnnnnnnnnnnnnnnnnnnnnnnnnnggtggcgccactgccgctttcaagtcggaaacntgtcgggccagttgcattnnnnnnnnnnnnnnnnnnnnnnnnnnnnnnnnnnnnnnnnnnnnnnnnnnnnnnnnnnnnnnnnnnnnnnnnnnnnnnnntttcgctgcgggaagggtacaactcatcaaagggggtatacggttttcacaaatacagggaaacggaggaaaacatgtgagacaaggcagtaaagggcagaacggtaaaagcctgttgctgggtttcaaaagctcgcccctgaaacatcaaaatcccctaatcaagtgggaaccgaaggat

SEQ ID NO: 78362 - DNA, 1527 bp, Homo Sapiens
  misc_feature (142)..(142): n is a, c, g, or t
  misc_feature (256)..(256): n is a, c, g, or t
  misc_feature (494)..(506): n is a, c, g, or t
  misc_feature (625)..(648): n is a, c, g, or t
  misc_feature (1034)..(1066): n is a, c, g, or t
  misc_feature (1499)..(1499): n is a, c, g, or t
ccgtgtgcattgtcgtacaaagaaccgtcgctgatgagaacaataatataggggttgtggcgcgagaatgaagacgcgccgtgttgcacgatcgggccggtcttattgcggggtaatcaatctttgtgccacccccgcgctntgccacccgccggcgagtgttccccaccgccccgacatcacggcgatacacaaaagtctcgtttttcggcgggggttcttgcatggtagttcggggcgggctccccgtgttaantcaacatactttcacgctaacgcaagatattttgcatgacccacctattgtggtttttttcaccccccacgacagatagtgggcgaccgttggttatgagcggtgtgggaagagataatcgtatagcgcgccttcgtatttgatccatccgcaaaggagcgcgggttgtttatttgtggaaggagactgtggagttgtcgtagctgggttgggtggaaaacacactaaatgcctcatnnnnnnnnnnnnntttttctcaacccaagttggtgacaatttttaaaccgggggggagacgagtatgtggaaaagaggggtggtgtgggccccgggtttttttctacccagggggaaaggagggagatagcnnnnnnnnnnnnnnnnnnnnnnnnagaatactcctatgggggattccggggttggttcatccccattttttgaggggtctgcggggtcggacataaattcctttattatatgtcggacagttcctggggaaaagtggcaggggcggggggctaacgtaatatcgagattcgtgtggactccctgtttatagatcccagggagggcctcaggactcgcatttggagttgttcgaggaccctgggttgtggcgcgaggcgttttttggttgtgcgggattcaaaccgctggtcatggccaggatttcctagggagcgaggtgtgggccattttccctttccttcgggggcgcgggggccaaatagaatggttttgaaagcttttttgaggtctcgagagcggccgagcaagnnnnnnnnnnnnnnnnnnnnnnnnnnnnnnnnngcgaattgcaaaatctggtttaattaagatctggggaggggagcacatagtgaaaatacatatgcacaggaaccaaatcaatgctagacaatgtattagtttacaatataataggataactacaagtttgaaggctcaaattgagtccatcagctgtaaatacaattttatatttggctcaagtggctgttgaatatcaagtggtgccgagtccctccagagcacctactgaccccctcagccttggaaggagtttcaccacagtctcagaagaaatcccagtcgtgcctttaactcttttggcccttgggagtcattgcaaccccaatacaaatgccggcccagggatttccagtggccacaagttattgcacagagaggtctgttctaagccagactcttacagctaaggaggtgtgagattagcccttanatactggtctagcattagcatggtctat

SEQ ID NO: 78363 - DNA, 1294 bp, Homo Sapiens
  misc_feature (615)..(615): n is a, c, g, or t
tgactgccattgaatcggcctggctgttggagctggctccacacttttatcaacaaggaacgcacctgtctctgaaagccaaaagggccaaggtccaggacccgtgagaggagcccacagctacagctgcagggactgctggcgtcctctcctccatgctgctgcccctggtcccaggtggggtgagctggcaccagctcctgtggaatgtttggttgctctgaagtgggctgcggcctgttcattagtcctttcttcccgctgcccacagcatttgcatccttgctgggatcctggaggactttgtgcatgggcaggcatccttctgtgctgcagcgggcagagtgggagttggctcactcagcacgctcactaacccagcatgccacttccagcaggcatgcagtcctggcccagctctatgggaaacaaggaggaaagttagccactgaaggccaaaacaccatgtggggtggacagagggtttgctgggctggctttgctttccctgctggggccacagctgtgttaaccaatgaggtctgctgccaggtgtgaacaagcatgtctctacgaatgaacgaaacattggggatctctgccgaaaccaccaanagggcatgtctgatgggcacagggtctcccaaacccagtggcttctgtctgtcctcagcccttgtccctgtttatctgcagccaggagacttgcaaggggattggtgattgacagagaggactcgtgcgctgttttgtgttagcagaggatttgtgtttcacaggtaggcttagcgtcctctcagagtgtagtgccaggtcctggtgccacgctagctgagcactcaggagagttcatcagctcagatcccacagggcctcctctttagcaggaattcacaacagtttggatgccctaaacttctgtagctcaggaacatcactggtgtatttgtttttttgtttgtttgcttgggttcttgcaagagcgcgtggggacagttcttccagcaggcactggttttgttgccccagggctgctttgctgtgatgatgattgcatttcaacacatgccagatgcagattttttcccccttactgtttcaatgacctttattttaaaaacacatagcttgaaaatttatttttatactgatattagtttggatgtgccacttttggcaccaaacgtgtatgtcatttttatttccattttataaacatgtaaataatagtgataacttgttaataatagtaaacctttatacctaaagtaaatgtcttccctcccaaaaaaaa

SEQ ID NO: 78364 - DNA, 1036 bp, Homo Sapiens
  misc_feature (29)..(29): n is a, c, g, or t
  misc_feature (67)..(67): n is a, c, g, or t
  misc_feature (155)..(155): n is a, c, g, or t
  misc_feature (268)..(268): n is a, c, g, or t
  misc_feature (293)..(293): n is a, c, g, or t
  misc_feature (309)..(309): n is a, c, g, or t
  misc_feature (333)..(333): n is a, c, g, or t
cgcgggaaagccaggcccctgcctgcagntagaaaggagcgagcgtgattgtcacagctgcggcatngggaaggctagctgactcttcacctgcatcctgctgccgtgaggatccccgtgtagaggtggggacgcctgctggagcccgcctgctngatgtaggctatcgggaagtgccaggccctgtgtcccaactgtcgcccccttcagctaagtctcaggcagggacagacccagaaagaacacagtctgccctcagagagctctntgcagtgtagtgacactgggttctngcagtcagggaggagngaggtggccaggctgacagctttntgcaagaggaggggaccagcaccagctgggaggcataggctaggacaggcccactcccatgctggtggccctggccccactgagcacgcctgagcctccggggccacgcttcgttctcaggaacaaaacctgaggcagccctttggatgccctcacagccttgcttctctcagcctaggttcccatttggggacttcaggaccccagagccactaggacttccttgggaagcccgttagcccagggtgggtcccgccaggacagtagggaaacagttgtttccctagccatttccgaatagcccatcattccgagtcatcatctctgtttgctgccttcctggccagccaggtggaagaaagtttccaagctaggtctggcccgttggggatctcagcagtggggcaggagggtgcctgatttcggggagtcctgacccgagcctgttgtcagagttgggaggggctctgagcagtgttgggcaggccgggtctcccatcccgaggccagcgttcctgtgcagagccccatccactggttcttgccctgagccacatatgtctgtgccatgggctgagtgccacgacaggcccgtgtgacagctgctgcccacgcatgtggaagctaggtgggactcattcctaattctgccgttgtaatgagacttgattaaaacaccgccacttttttgcaatggagaagg

SEQ ID NO: 78365 - DNA, 1025 bp, Homo Sapiens
  misc_feature (740)..(740): n is a, c, g, or t
  misc_feature (836)..(836): n is a, c, g, or t
  misc_feature (882)..(882): n is a, c, g, or t
  misc_feature (982)..(982): n is a, c, g, or t
aacaaatccaaagtaaattaaaacccacccggaagcgaggcctgggtggcgaattcggcacgaggcccctctctgcttgttagttgctctttctggctctgcctctcctttgcgttcctcgggatgccactctgtgcccaggacggttctgagactgaacactgagggcaggagcaagggaggaagccaggggcgaggcaggccgcgggaaagccagggcccctgcctgcaggttagaaagaggcgagcgtggattgtcacagctgcgggcatgggaagggctagctgagctcttcacctgcatcctggctgccgtgaggattccccgtgttagaggtggggacgcctgctggaggccgcctggctgatgtagggctatcgggaagtgccagggcctgtgttcccaactgtcgcccccttcaggctaagtctcaggcagggacagacccagaaagaacacagtctgccctcagagagctctttgcagtgtagtgacactggggtttctgcagtcagggaggagggagggtggccaggctgacagctttttgcaagaggagggggaccagcaccagctgggaggcataggctaggacaggcccacgtggaggctgggcaggaagggcctgctgaggtcacacagctgttggtggttgggccagggcggcttcctcctttcagaatgctagggtggctctcaccactggccgcctctccttgccaggcctgccaactcaggngacagatggagcaggagtggagaaagggaaggcaggtctgggggtgtggtcgtgttttcttaactctgcttctggtctgctctcccctcccctggncttcctctctgcctgctcctgtctctccctgggggtttctggtggntggaaaagctcaagccttttgcgaaagctatgacctggcctctgtgcggagctttacggggaggctgggacctcgacaacaggactcctgctggatgggncctctccggccccctcctgctggcggttccccgggagccccat

SEQ ID NO: 78366 - DNA, 798 bp, Homo Sapiens
  misc_feature (67)..(96): n is a, c, g, or t
cgggcagtgccaagctaaaattaaccctcactaacagggaataagcttgcggccgcatacgcggtcnnnnnnnnnnnnnnnnnnnnnnnnnnnnnngaggctggagaatttaattcctaatggatgacctccaggattgggacatctgccagagctctcccatcatcccagatgggggcctgggtggggctttgctgattgtcacagttgaggtgccaggactgagttttgggggaccccagttgtccacccctggccaggacagagaggcaggtgcagatacagctggaggagcagcaggagagaggcaggtgggcttgcaaaagattgaggcagaatggtggtcaccttggcccatctgcctaccccaccctcagggccccaggcccccttcctccagcccccgatggccctggggactaggagacaggctgttgggcgccagggcctcccgatcaggtccccaggagccaccaccaccagggtctacagtctctaggcgcaaggcgggcaacaggcccaggcttcgaggcacagctggtgggaaggcccaggggccaggcaacccagagggcccctcttcactactgccccggctgctgccattactgctcctgtcaggagccactcgggacaggcggcggctctggggtgaggggctacggctggcaccacggcgttcacgggatgagggccgtagggcaagccagggaacctggccagtctcgggctgcggctgcggtgtcgcttggacttgccaggactggggctgcaggacttgggtgcaaggagctccag

SEQ ID NO: 78367 - DNA, 376 bp, Homo Sapiens
cctctctcccattcgtcatttcctgtgccagccctgtttcctctgtaaccacgagcaccttcccttgtctggtgctcatctgctgtcttccttcccagggtccctctctgtcctgctacgatgacctgcaggacctgagtgaagccatttccaaagaggaagctgtttgtcaaggagacaaccttgacagatgctccagctccaatccccagatgagcagctaagcagctgacagttggagggaaagccagcctgggggctgggaggatcctggagaagtgggtggggacagaccagcccttccccatcctggggttgccctgggggataccagctgagtctgaattctgctctaaataaagacgactacagaatg

SEQ ID NO: 78368 - DNA, 492 bp, Homo Sapiens
  misc_feature (371)..(405): n is a, c, g, or t
  misc_feature (409)..(451): n is a, c, g, or t
aatgtctacatcaaggaatgaatgctaaatgagcccatttagcagcctgaaatcaaatactgcatttattttttgaaactcttggtagcaaaagaaaaagctgattaaaatatgattgtgttacatgactaaagggttaacttctcattaattctaaattcttcaaaatgtacaagcatcataataaaggcttttgatgagacatgactggtgatgatcatatgtgccaatttaataatttatttgtcacagaaaattcagattcactgcaatattgtgttctggcttcccaagctgcagggaaatacaagttttttgttcccggccgtaatggccgaattcccgggcatatgtccggtaccgtcgactgnnnnnnnnnnnnnnnnnnnnnnnnnnnnnnnnnnncggnnnnnnnnnnnnnnnnnnnnnnnnnnnnnnnnnnnnnnnnnnncagacgagctagcgccctatagtgagtctatcgatcttttt

SEQ ID NO: 78369 - DNA, 2714 bp, Homo Sapiens
  misc_feature (1220)..(1220): n is a, c, g, or t
  misc_feature (2633)..(2657): n is a, c, g, or t
cggtccggaattcccgggatatcgtcgacccacgcgtccgacgcaacgggcgcaggtgcggggcgcgggctctctcacgccgcggcctcacccggcggtgcttcggcaggcggccggcgcggggcgcaggcggcgcggccatgggctcgcagggcagtccggtgaagagctacgactacctgctcaagttcctgctggtgggcgacagcgacgtgggcaagggcgagatcctggagagcctgcaggacggcgcggcagagtccccgtacgcctacagtaacgggatcgactacaagaccaccaccatcctgctggacggccggcgcgtgaagctggagctctgggacacgtcgggccagggccggttctgcaccatcttcaggtcctactccaggggcgctcaggggatcctcttggtgtatgacatcaccaaccgctggtcctttgacggcatcgaccgctggatcaaggagatcgatgagcatgcacccggagtcccccggatcttggttggaaaccggctgcacctggccttcaagcggcaggtcccgacggagcaggcccgcgcgtacgcagagaagaactgcatgaccttctttgaggtcagccccctgtgcaacttcaacgtcatcgagtccttcacggagctatcccgcatcgtgctcatgcggcacggcatggagaagatctggaggcccaaccgagtgttcagcctgcaggacctctgctgccgggccatcgtctcctgcacccccgtgcacctcatcgacaagcttccactgcccgtcaccatcaagagccacctcaagtccttctcgatggccaacggcatgaacgcggtcatgatgcacggccgttcctactccctggccagcggggccgggggcggcggcagcaagggcaacagcctcaagaggtccaagtccatccgtccaccccagagccccccccagaactgctcgcggagtaactgcaagatctcctagcggggacgggcggggccgcctgtgcagatgccaggagggctcgagctggacactcctggctggacgccaggccagtgccgcctacgtggagactgtccacacagctgcctcagaagcgccgggctttcctcacacctgagccgggtgcgaggaggagcatgcacggaccaagcgcggcaggcggcaggagggggcgcggctgggctgctggtgcttccgggaatcttggtctgnaaacaagccgggcccttccccagctgcctgggcttgaacggcggggaacctggttggcctttcttatttatatagagaacacttcacttttttgtacatttttaaggggccttcagggaagcctgggtgtggcccggtggtggtgcactggtgacttcatggccacgccagctgcggggacgcacttgggactcctcgagaggggactcgcggccgcgatggcaaggcatcctgtgaattcatgcgctgcgagtggcggggctgcccagaggccgggggagcagacagggccggtgctccctctggaagcttgggtgaccggggccctggctcccacgggatggagggtgtggtcctgtggtcagagcccaagcagcactcaggagaggggagaaaggaggtgcacctggcagcccacatttttgttgctccccaaatccctccccacgtggggatgagaaccttcctgctgtgatgtgacaccttcggggacattgaccactcaaaactcagatcatctcgcccaccctggagagtgcagagctatctgtagacttaggaatacttgatgggcagcggtgcagaccccgggcacctgcgtgcagcctcctgttctcggcagcttctgtcgctggccctggggtccccacagctgcagctctcctgtgaggttgcacggcatcagaaccatcctgaccttcttagggacgtgcctggaaccacctcgtccacgtccacgtccacctgggggcctcgggaggctaggcccctcctcaaaggcccaccagcccggcgctcatgctgagccccaggcacgcagggccggccacctctctcctgaagccattggccgctcctccacccagtgcttctgcccatgcctgccccagcagcccctctgcacggtcaccatcgcctgggcctgcccacagcactggtgctcacctctacctcctgtcctcaggccgtgcggcacgacatggccagcacgcagaaggagccctcccgggacccaggaccccccgtggtggactccgcggcacatgcttcccaaggtggtcccacggagggtgttactgggcaccagtggactcgccccatggcccgttcctgggagatgagggccgtggcctgcatgaactaccagatgagtaagggaaccccaggcaggcggccctgccacagcccccaaagacactggcctcctgctccagcttccctgtcctggccccacctgtcctgttgctgccagcagggcccttgtttgggattatgaacaaacctcacagactttgaggacctggatggtcctgcattcacggcatcaacactacccgcgctgctgttagacactccgccattcctggttctctccgaaccgttctttgtacagtaaatgtaattcagctgtgnnnnnnnnnnnnnnnnnnnnnnnnncctgagcaggcggccgcaagcttattccctttagtgagggtaattttagcttggcac

SEQ ID NO: 78370 - DNA, 500 bp, Homo Sapiens
atctagaggatcgcgggaggcggacactattattacaattttgttgataaaaatactgatgtcagagaccttaagtaacatgttcgaggtcacacagctaggatgtatatgtgtgaatgtgtcccagatatctattaccccataacaaaccaccccaaatgtagactaaatcaacagtcatgttgttatgctcataatccacagaactcaggaattgcggcaggttgagtgtttcttctgctccccgtggggttgctcagtggcatacaggtggagggtggtctggtgtggaggctctaagaaggcttcactcatgtgtctacaccatgcagtcgggggtggctggaaatctgggctcagttgagccttctctcatgcagcttcaacacttctctgagtggtccctccagtgaagtcgttggaatttctacgtggcagcttagggctccaagaaagcgaggcagaagccgtcagctctattcaaggtggcaactggcagt

SEQ ID NO: 78371 - DNA, 1058 bp, Homo Sapiens
  misc_feature (980)..(998): n is a, c, g, or t
agcaggtgtggggactgggaaactgcatctgtaacctgctgtaatctaacgcttatctaaatactactgtgctcacacagagaacaccgcaaaagtagaggtgttcctccagagggcaggtgagcagatggcacagtctgcttggaattcagtcaggtgatgagagatgagatgaggcactcctagctttgggaagagggagctgaaagatgaacctttgcaggtgcccacggtcaaagtggtggtttaatgccatgccatgcccattttctgttggccttggcagggagttacagccctaccttaggacctggctccttatttctgctgtaggctctttcctgccctggccgagatggagtggaatgagacctagaaacatcaagctaaatacatgtcctcagaaagataaaggtttacattttcacccccatcaaatctgaaagctctctgcctgtgtttttctaagggatagggacatcattactcagtccacaacctggactcatgtagggtcccctgtcagtaaaggagtcagtcaagcccaccaggtataccaaggactcttaccctcagcccctactccttggaaagctgccccttggcctaatattggtgtttagcttgagcctgactccttctcaacactaagagctgatgaagtcctgaagcagaaagagctctgacctgagagtcaaacatccttattctgatctcagctcagcccctgatttgttgtgtgaccctggatatgtcacttcctgtctttttgactttttaaaatgaagggtagactagaggagagcttctaaaactttaatgtggtcaacgaaatggaataggaaattccacaagtctgtccttccacaaaagcagcaaataaggtggcaaaaactcaaatttatgggaactctggaaacgaattgaaagtttacagcaatcaggtgaatacctaagaataaaagctggatttagtaagnnnnnnnnnnnnnnnnnnncctgagcaggcggccgcaagctttttcccgtttagtgagggttaatttcggctatggcac

SEQ ID NO: 78372 - DNA, 944 bp, Homo Sapiens
  misc_feature (71)..(71): n is a, c, g, or t
  misc_feature (83)..(83): n is a, c, g, or t
  misc_feature (171)..(171): n is a, c, g, or t
  misc_feature (492)..(492): n is a, c, g, or t
gtaatactgagatgtcgcagagcacacaggctccgggaccgtcgagcacgttcacttcgaccagtcacatnttgcagatgttntgactgaccattctccacgccatattgcaacgggagatttccagtgtgttcattgagaaaactcagctgcccgaccagatcttgatcntacttcagacagagagcacccgagccttgctcaatccacacaaatgctccacaccatttcccagacagcttccaggccacccctttttgctttaaccagagcctgatcccaggatcaccttcaaattcctccattctctctggctccttagactacagttactcgccagtgcagctgccttcatatgctccagagaattacaattcccctgcttctctggacaccagaacctgtggctaccccccagaagaccattcctaccaacacttgtcctcacacgcccagtacagctgcttctcctcggccaccacctccatctgntactgcgcatcgtgtgaggcagaggacttggatgctctccaggcggcagagtacttctacccgagcacagactgtgtggactttgccccctcagcagccgccaccagtgatttctataagagggaaacaaactgtgacatctgctatagttaatagaaattacagtaattcagaacatggcatgggtatatctatttttctaccacgtctagatgacactgcaaaatatgcaacttggtaacacaatatcccaagcacagtttacatgtcactatttccaattttctgatgctaagcattcatatgaagtcctcagacccggtcacagcgccactcctactttgtatgctcatagtttaaatttttgtaggaaactttcaattgttttactttttgtataacgaacaaatgctgtctccttttttactaataaataattttgtattactaaa

SEQ ID NO: 78373 - DNA, 1734 bp, Homo Sapiens
gggtccggaattccctgcatctttgggagggccggccccgggatgctacacacaacccagctgtaccagcatgtgccagagacacgctggccaatcgtgtactcgccgcgctacaacatcaccttcatgggcctggagaagctgcatccctttgatgccggaaaatggggcaaagtgatcaatttcctaaaagaagagaagcttctgtctgacagcatgctggtggaggcgcgggaggcctcggaggaggacctgctggtggtgcacacgaggcgctatcttaatgagctcaagtggtcctttgctgttgctaccatcacagaaatcccccccgttatcttcctccccaacttccttgtgcagaggaaggtgctgaggccccttcggacccagacaggaggaaccataatggcggggaagctggctgtggagcgaggctgggccatcaacgtggggggtggcttccaccactgctccagcgaccgtggcgggggcttctgtgcctatgcggacatcacgctcgccatcaagtttctgtttgacgcgtgtggagggcatctccagggctaccatcattgatcttgatgcccatcagggcaatgggcatgagcgagacttcatggacgacaagcgtgtgtacatcatggatgtctacaaccgccacatctacccaggggaccgctttgccaagcaggccatcaggcggaaggtggagctggaagtggggcacagaggatgatgagtacctggataaggtggagaggaccatcaagaaatccctccaggagcacctgcccgacgtggtgggtatacaatgcaggcaccgacatcctcgagggggaccgccttggggggctgtccatcagcccagcgggcatcgtgaagcgggatgagctggtgttccggatggtccgtggccgccgggtgcccatccttatggtgacctcaggcgggtaccagaagcgcacagcccgcatcattgctgactccatacttaatctgtttggcctggggctcattgggcctgagtcacccagcgtctccgcacagaactcagacacaccgctgcttccccctgcagtgccctgacccttgctgccctgcctgtcacgtggccctgcctatccgccccttagtgctttttgttttctaacctcatggggtggtggaggcagccttcagtgagcatggaggggcagggccatccctggctggggcctggagctggcccttcctctacttttccctgctggaagccagaagggcttgaggcctctatgggtgggggcagaaggcagagcctgtgtcccagggggacccacacgaagtcaccagcccataggtccagggaggcaggcagttaactgagaattggagaggacaggctaggtcccaggcacagcgagggccctgggcttggggtgttctggttttgagaacggcagacccaggtcggagtgaggaagcttccacctccatcctgactaggcctgcatcctaactgggcctccctccctccccttggtcatgggatttgctgccctctttgccccagagctgaagagctataggcactggtgtggatggcccaggaggtgctggagctaggtctccaggtgggcctggttcccaggcagcaggtgggaaccctgggcctggatgtgaggggcggtcaggaaggggtacaggtgggttccctcatctggagttccccctcaataaagcaaggtctgg

SEQ ID NO: 78374 - DNA, 472 bp, Homo Sapiens
actccgggcttgagcccaggcctcccgcacggctcagctgctgaatttttccttgaggctgtttggtgtgtgacccagcaagggccctgtgtaggacagcaggagggaggcgtcgggggccttagcagaaggggaacaatgagggcatttcatgaaccatctcaggcacttctgcatcacggaagacctggccctcccagccgtcctggggatgctcagggtgcaggcagaggctcgggaggccggactcaggggtcagaagcagggactggggcaggcgagcccggacagggaagaggggctccgatcaaagccggccgtgctgctggccgggggcccaggtgggtacaagctcctttgtgctttgcacaaacctgaatcccccaccagagaggatgtgtgtgaggagccagaaacgctgaatccaattaagagagaaaaataataataacaataaatgatcttggacaag

SEQ ID NO: 78375 - DNA, 1093 bp, Homo Sapiens
ggaccggtccggaattcccgggatatcgtcgacccacgcgtccgagttaaatgtgggctgcttaggaatgatgactgtgtcttaatgatctctgtattcttagtgacatgtagaatcattgtgcctgacacatagtatgtactcaggaaagaaatggaaaatgtggttttagcattgaaggccgggagagagggtctaacagactacaagccctgccaggagcagagtaagggaaacagaggagaaaagtgtttttagtctgtgcctgaatgtatttacatctgtttgtagcccaaaagccaaaagcgtacatacgcttggcttttctgtagctatgtttatggctttacagcagattttatggagctgcaattactttgatcatgagggactgatgctagtggatttacttcaccaaatggaactcactttgtggcttctgaagaagggacctttgtggactgtcatggagtagttaagagtgcaggctctgatttagtgatcagagtctgcattgtcaggaatgggacaaagtgaagttatgtggcacttgataggatgccctgagaagattgcaacatcacccctgtgatattcctgctgaagatccataacctggatgtaatcatgaggatatatcagacaaacccacgtaaagagacatgctgtatacaaaactgtaatcttagaaagtgccaaggtcatgaaaatcaaagatagaccctggaactgttccaaactggaggggaccaaagaggcatgacaactaaacacaacacatgattctgaactggatctttttgcttgaaaggaagttacagggacagttggaaaagtttaaatggggcctacaatgccgtggtaatgatgtgtccgtgttaatttcctgattttcatggttgcctgttaagttacatcagaggatgttcttgtttgctggaaagtaaatcaatgtatttggcaggggataaggcatcaaatggtcaccttaatttcaaattattacagggaaaatgtttctctctgtacttaataacttttttgcaatttcttaaaatgaaagctctggagtaaaaacttcaaggatccaaaa

SEQ ID NO: 78376 - DNA, 1083 bp, Homo Sapiens
  misc_feature (57)..(57): n is a, c, g, or t
  misc_feature (68)..(68): n is a, c, g, or t
  misc_feature (1004)..(1025): n is a, c, g, or t
ggcaaggtgaaacccctccgatggtcgtgtgccaggttcagcctctgttgagaatgntcaagccacangagtgcagcactctgaagtgtgcatagtacgtgagagtgtcctgaactggcgggagtcaccctcacatcttgggatgtgactcaacaaggctggcagatgggatgagtctgtttctcaacaaaggagagaatgcatgcagcagccgactcttgtgtgaggactccattcatgatgattcgtgcggagagtgtagaagagtgcggaagatgaaggtgggcaacccgctggacagggacaccgaccacgggccgcagaatcaccatgcccaccttgtgaagctgatggagtactgccagcatggcgtgaaggaaggggccacactggtctgcggcgggaatcaggtccctcggccagggttcttctttgagccaactgttttcacagacgtggaagaccacatgttcatagccaaggaggagtccttcgggcctgtcatgatcatctctcggtttgctgatggggacttggatgccgtgctgtctcgggccaatgccacggaatttggcctggcttctggtgtcttcaccagggacatcaacaaggccctgtatgtcagtgacaagctccaggcaggcactgtgtttgtcaacacgtacaacaagaccgacgtggccgctcccttcggaggattcaaacagtctggatttggcaaagatctaggagaggcggctctgaacgagtacctgcgggtcaagacagtgaccttcgaatactgaagaaaggtctttgtgagaagaaagtccctgcccctccctcgtggctggggccccctccctcttgagcctgggtgcacagcacctcccacctggggggctagtggaagccctcctgcctgcacaccatgtctgcatcttggacgccctctgtccagtcagaagcagcccttggctgggtgaggtgtgcccctcccagggagaataaagcttctgaagagnnnnnnnnnnnnnnnnnnnnnnccgagcaggcggccgcaagcttattccctttagttgagggttaattttagcttggcac

SEQ ID NO: 78377 - DNA, 795 bp, Homo Sapiens
tcccacagttccgccagtgcgctgaaacaccggagctccgggaacaatgaactccatgtggacatctccaagatgcacatgatcctgtatgacctgcagcagaatctgagcagctcacaccgggccctggagaaacagattgacacgctggcggggaagctggatgccctgactgagctgcttagcactgccctggggccgaggcagcttccagaacccagccagcagtccaagtagctggacccacgaggaggaaccaggctactttccccagtactgaggtggtggacatcgtctctgccactcctgacccagccctgaacaaagcacctcaagtgcaaggaccaaagggggccctggcttggagtgggttggcttgctgatggctgctggaggggacgctggctaaagtggggaggccttggcccacctgaggccccaggtgggaacatggtcacccccactctgcataccctcatcaaaaacactctcactatgctgctatggacgacctccagctctcagttacaagtgcaggcgactggaggcaggactcttgggtccctgggaaagagggtactaggggcccggatccaggattctgggaggcttcagttaccgctggccgagctgaagaactgggtatgaggctggggcggggctggaggtggcgccccctggtgggacaacaaagaggacaccatttttccagagctgcagagagcacctggtggggaggaagaagtgtaactcaccagcctctgctcttatctttgtaataaatgttaaagccag

SEQ ID NO: 78378 - DNA, 1306 bp, Homo Sapiens
gctacggctaggtacgaggcccggcgtgttgaattcggcacgaggaccatggcgaaagccggggataagagcagcagcagcgggaagaaaagtctaaaacggaaagccgctgccgaagaacttcaggaggctgcaggcgctggggatggggcgacggaaaacggggtccaacccccgaaagcggctgcctttccgccaggctttagcatttcggagattaaaaacaaacagcggcgacacttaatgttcacgcggtggaaacagcagcagcggaaggaaaagttggcagctaagaaaaaacttaaaaaagaaagagaggctcttggcgataaggctccaccaaagcctgtacccaagaccattgacaaccagcgagtgtatgatgaaaccacagtagaccctaatgatgaagaggtcgcttatgatgaagctacagatgaatttgcttcttacttcaacaaacagacttctcccaagattctcatcacaacatcagatagacctcatgggagaacagtacgactctgtgaacagctctccacagttataccaaactcacatgtttattacagaagaggactggctctgaaaaaaattattccacagtgcatcgcaagagatttcacagacctgattgttattaatgaagatcgtaaaaccccaaatggacttattttgagtcacttgccaaatggcccaactgctcattttaaaatgagcagtgttcgtcttcgtaaagaaattaagagaagaggcaaggaccccacagaacacatacctgaaataattctgaataattttacaacacggctgggtcattcaattggacgtatgtttgcatctctctttcctcataatcctcaatttatcggaaggcaggttgccacattccacaatcaacgggattacatattcttcagatttcacagatacatattcaggagtgaaaagaaagtgggaattcaggaacttggaccacgttttaccttaaaattaaggtctcttcagaaaggaacctttgattctaaatatggagagtatgaatgggtccataagccccgggaaatggatacaagtagaagaaaattccatttataaagtactgagagaatgatattggattttgctgaacaggcctatcttgaactttggtaaattatttttgacagaatactcttttcaaaatggcatttgctgatttcataaacctttcacgtctggacgaattaccaaatgccatgaattgccactgtgtgtttatgtagaaaatacaaataaaagttattttgatggcttaggtttcctt

SEQ ID NO: 78379 - DNA, 842 bp, Homo Sapiens
  misc_feature (321)..(336): n is a, c, g, or t
cagtcgacggtaccggacatatgcccgggaattcggccattacggccggggacggaagcaaaggagccaagaccatggcgaaagccggggataagagcggcagcagcgggaagaaaagtctaaaacggaaagccgctgccgaagaacttcaggaggctgcaggcgctggggatggggcgacggaaaacggggtccaacccccgaaagcggctgcctttccgccaggctttagcatttcggagattaaaaacaaacagcggcgacacttaatgttcacgcggtggaaacagcagcagcggaaggaaaagttggcagctaagnnnnnnnnnnnnnnnngaaagagaggctcttgcgcgaattagggtccacccaaaggctgtatcccaagaaccttgagcacaccacacgcagatgtgtgtagaggtgaaacacagttgatagaccttatatgtgatgaagatgtcgttttgtgatgaacgtctacagatgaatgtgcttcttacttcaacaaacagacttctcccaagattctcatcacaacatcagatagacctcatgggagaacagtacgactctgtgaacagctctccacagttataccaaactcacatgtttattaccagaagaggactgggctctgaaaaaaattattccacagtgcatcgcaagagatttcacagacctgattgtatttaatgaagatcgtgaaaacccccaaatggacttatttgtgagtcacttgccaaatgggcccaactgctcattttaaaatgaagcagtgtcgtccttcgtacagaaattcaggagacgaggcaaggaccccacagagacacatactgaat

SEQ ID NO: 78380 - DNA, 738 bp, Homo Sapiens
gaattccaaaccaggaggccaccttgggtataaaacccccttcggggaattgggccggtaatacgcgagtttccacgccatatggagatgctgttgaaattccctgccaaaagcagaagataaattttcttgaagtgaagactttggaaatgaaacccattaaattgcccacccaaagtcatgtcgataaagaggaggaagcttgttaccataaagatgaatgaaccagttcaactaacttttgcactgaggtacctgaacttctttacaaaagccactccactctcttcaacggtgacactcagtatgtctgcagatgtaccccttgttgtagagtataaaattgcggatatgggacacttaaaatactacttggctcccaagatcgaggatgaagaaggatcttaggcattcttaaaattcaagaaaataaaactaagctctttgagaactgcttctaagatgccagcatatactgaagtcttttctgtcaccaaatttgtacctctaagtacatatgtagatattgttttctgtaaataacctatttttttctctattctctgcaatttgtttaaagaataaagtccaaagtcagatctggtctagttaacctagaagtatttttgtctcttagaaatacttgtgatttttataatacaaaagggtcttgactctaaatgcagttttaagaattgtttttgaatttaaataaagttacttgaatttcaaacatca

SEQ ID NO: 78381 - DNA, 1000 bp, Homo Sapiens
  misc_feature (72)..(111): n is a, c, g, or t
  misc_feature (114)..(148): n is a, c, g, or t
aaagacatgttaattactgtgacacaccatcaaataaatgcgggccggcaaatgcgcctggtttttttagtnnnnnnnnnnnnnnnnnnnnnnnnnnnnnnnnnnnnnnnncgnnnnnnnnnnnnnnnnnnnnnnnnnnnnnnnnnnncagtcgacggtaccggacatatgcccgggaattcggccattacggccgggggcgcgcttgcggacgcggcggcattaaacggttgcaggcgtagcagagtggtcgttgtctttctaggtctcagccggtcgtcgcgacgttcgcccgctcgctctgaggctcctgaagccgaaaccagctagactttcctccttcccgcctgcctgtagcggcgttgttgccactccgccaccatgttcgaggcgcgcctggtccagggctccatcctcaagaaggtgttggaggcactcaaggacctcatcaacgaggcctgctgggatattagctccagcggtgtaaacctgcagagcatggactcgtcccacgtctctttggtgcagctcaccctgcggtctgagggcttcgacacctaccgctgcgaccgcaacctggccatgggcgtgaacctcaccagtatgtccaaaatactaaaatgcgccggcaatgaagatatcattacactaagggccgaagataacgcggataccttggcgctagtatttgaagcaccaaaccaggagaaagtttcagactatgaaatgaagttgatggatttagatgttgaacaacttggaattccagaacaggagtacagctgtgtagtaaagatgccttctggtgaatttgcacgtaatatgccgagatctcagccatatttggagatgctgttggaaatttccctgtgcaaaagaacggagtgaaaattttctgcaagtgggaggaacttggaaaatggaaaaccattaaaatttggccccagaaccaagtaaatggtccgattaaaaaaggggagggaagcctggtttacccatt

SEQ ID NO: 78382 - DNA, 1489 bp, Homo Sapiens
  misc_feature (42)..(76): n is a, c, g, or t
aaacggacgagcgcccgagtctgtgagcgaggaagcggccgnnnnnnnnnnnnnnnnnnnnnnnnnnnnnnnnnnncagtcgacggtaccggacatatgcccgggaattcggccattacggccgggggcggcggcattaaacggttgcaggcgtagcagagtggtcgttgtctttctaggtctcagccggtcgtcgcgacgttcgcccgctcgctctgaggctcctgaagccgaaaccagctagactttcctccttcccgcctgcctgtagcggcgttgttgccactccgccaccatgttcgaggcgcgcctggtccagggctccatcctcaagaaggtgttggaggcactcaaggacctcatcaacgaggcctgctgggatattagctccagcggtgtaaacctgcagagcatggactcgtcccacgtctctttggtgcagctcaccctgcggtctgagggcttcgacacctaccgctgcgaccgcaacctggccatgggcgtgaacctcaccagtatgtccaaaatactaaaatgcgccggcaatgaagatatcattacactaagggccgaagataacgcggataccttggcgctagtatttgaagcaccaaaccaggagaaagtttcagactatgaaatgaagttgatggatttagatgttgaacaacttggaattccagaacaggagtacagctgtgtagtaaagatgccttctggtgaatttgcacgtatatgccgagatctcagccatattggagatgctgttgtaatttcctgtgcaaaagacggagtgaaattttctgcaagtggagaacttggaaatggaaacattaaattgtcacagacaagtaatgtcgataaagaggaggaagctgttaccatagagatgaatgaaccagttcaactaacttttgcactgaggtacctgaacttctttacaaaagccactccactctcttcaacggtgacactcagtatgtctgcagatgtaccccttgttgtagagtataaaattgcggatatgggacacttaaaatactacttggctcccaagatcgaggatgaagaaggatcttaggcattcttaaaattcaagaaaataaaactaagctctttgagaactgcttctaagatgccagcatatactgaagtcttttctgtcaccaaatttgtacctctaagtacatatgtagatattgttttctgtaaataacctatttttttctctattctctgcaatttgtttaaagaataaagtccaaagtcagatctggtctagttaacctagaagtatttttgtctcttagaaatacttgtgatttttataatacaaaagggtcttgactctaaatgcagttttaagaattgtttttgaatttaaataaagttacttgaatttcacaaggggccgcggggggggcgaagggacgtccggggcgcgaacgccggagacgtgtttcgcgccaacaagcggaccaagagggga

SEQ ID NO: 78383 - DNA, 953 bp, Homo Sapiens
  misc_feature (743)..(746): n is a, c, g, or t
  misc_feature (748)..(748): n is a, c, g, or t
  misc_feature (750)..(751): n is a, c, g, or t
  misc_feature (754)..(754): n is a, c, g, or t
  misc_feature (756)..(757): n is a, c, g, or t
  misc_feature (760)..(760): n is a, c, g, or t
  misc_feature (789)..(789): n is a, c, g, or t
  misc_feature (843)..(843): n is a, c, g, or t
  misc_feature (856)..(900): n is a, c, g, or t
caactggtatagtatatttattacccattcttcattcttaggagaaaatgctgagaagcttctgcagttcaagcgttggttctggtcaatagtagagaagatgagcatgacagaacgacaagatcttgtttacttttggacatcaagcccatcactgccagccagtgaagaaggattccagcctatgccctcaatcacaataagaccaccagatgaccaacatcttcctactgcaaatacttgcatttctcgactttacgtcccactctattcctctaaacagattctcaaacagaaattgttactcgccattaagaccaagaattttggttttgtgtagagtataaaaagtgtgtattgctgtgtaatattactagcaaattttgtagatttttttccatttgtctataaaagtttatggaagttaatgctgtcatacccccctggtggtaccttaaagagataaaatgcagacattccttgctgagtttatagcttaaaggcctaaggagcactagcaacatttggctatattggtttgctagtcaccaacttctgggtctaaccccagccaaagatgacagcagaacaacataatttacactgtgatttatctttttgctgagggggaaaaaatgtaaatgttctgaaaattcactgctgcctttgtggaaactgtttcagcaaaggttcttgtatagagggaatagggaatttcaaaataaaaaattaagtatgtaaannnnananntgnannccnaaatgctaaaaacccccctcccactttanttttaataaaccgtacaacttatttttgtggaagcagagtaataaactaataantttatttgcgggnnnnnnnnnnnnnnnnnnnnnnnnnnnnnnnnnnnnnnnnnnnnnggggcccgggcgccccgaaaggaaagggaaacagggccaatacttggtttccc

SEQ ID NO: 78384 - DNA, 731 bp, Homo Sapiens
cagtcgacggtaccggacatatgcccgggaattcggccattacggccggggcggcaactaatcctcgcgtctcagagttcagatgctgatgctgttttctcagcaatggatttggcatttgcaattgacctgtgtaaagaagaaggtggaggacaggttgaactcattcctaatggtgtaaatataccagtcactccacagaatgtatatgagtatgtgcggaaatacgcagaacacagaatgttggtagttgcagaacagcccttacatgcaatgaggaaaggtctactagatgtgcttccaaaaaattcattagaagatttaacggcagaagattttaggcttttggtaaatggctgcggtgaagtcaatgtgcaaatgctgatcagttttacctctttcaatgatgaatcaggagaaaatgctgagaagcttctgcagttcaagcgttggttctggtcaatagtagagaagatgagcatgacagaacgacaagatcttgtttacttttggacatcaagcccatcactgccagccagtgaagaaggattccagcctatgccctcaatcacaataagaacaccagatgaccaacatcttcctactgcgaaatacttgcatttctcgactttacgtcccactctaattcctctaaacagattctcaaacagaaatgtgttactcgccattaagaccaagaatttggttttgtgtagagtataaaagtgtgt

SEQ ID NO: 78385 - DNA, 664 bp, Homo Sapiens
aaattctggagttaggctctcaagaggacagagggactgtctggcaatggccagccagacctttactgccaaagaacccatttcatattgcgttccactgattgagattgattcagatttttgcactgtagatgagcgtatgtctcagtgctgccccaagccccagggatttctcattatgttcaaatgtcctagtgatttaccttaatcattgcaaacaattatgcttatgaagtttacttacaaacaagcaactgagtcactttattttctttagtgtagtatgtgaaggcactggttcaacaggatggctccagaactgtgtttttctaatgtttggtaaggggctagtgagaattttaatgatatggtgaagaaaaatatatctgtataattaatttattatattggtgtatgggctgtgagttcaccttttagtggtcatttgtcatttcataacaactatgcattttggttcactgtgatgatgatctatatttagtgactgcaacatgtttataccactgattcaaattccatccatgatgaagttatacaaataatgcatatattgataacttttattgcaaaaatgtaaatttaaaacttgtataatgttcttgtgctttttaaaataaaatatatgtgtatatttaaaaagaaa

SEQ ID NO: 78386 - DNA, 1048 bp, Homo Sapiens
  misc_feature (36)..(36): n is a, c, g, or t
  misc_feature (142)..(142): n is a, c, g, or t
  misc_feature (144)..(145): n is a, c, g, or t
  misc_feature (159)..(159): n is a, c, g, or t
  misc_feature (164)..(164): n is a, c, g, or t
  misc_feature (166)..(166): n is a, c, g, or t
  misc_feature (169)..(169): n is a, c, g, or t
  misc_feature (187)..(187): n is a, c, g, or t
  misc_feature (199)..(199): n is a, c, g, or t
  misc_feature (207)..(207): n is a, c, g, or t
  misc_feature (216)..(216): n is a, c, g, or t
  misc_feature (220)..(220): n is a, c, g, or t
  misc_feature (226)..(226): n is a, c, g, or t
agaggctgatccagactctgtgtgcccctccctccnctggtgcagaggagggccactgttctccacaggccccccgagctgggatcccagcccagactccgagcgaggagtctgacagtgctcgagagatcttcttttcccntnnatgtcctcccatcntctcntntcntcttccccagtgtccaantgatcccaaccnccaccctnaacatgccncctntctgcnccctgagtggaccttctctccccccgagtatcctgtctaggggtgcccctgctgggccccctctgctcttcctgctggaggctggggcctttcgggagtcagcaggtgccccggccaaccgcagccggcgtggggtgagcgaaactgcaccagcgagtcgtcggggtgagctggctgtgtgcgatgcagtcagtggctgggtgacagaccgccggaccgctgtggacttgcgtgggcgcgaggtggaggtgttgggcgaggtgcctgcagctggcggcagtcccctccgccagtacttctttgaaacccgctgcaaggctgataacgctgaggaaggtggcccgggggcaggtggagggggctgccggggagtggacaggaggcactgggtatctgagtgcaaggccaagcagtcctatgtgcgggcattgaccgctgatgcccagggccgtgtgggctggcgatggattcgaattgacactgcctgcgtctgcacactcctcagccggactggccgggcctgagacccatgcccaggaaaataacagagctggatgctgagagacctcagggatggcccagctgatctaaggaccccagtttgggaactcatcaaataatcacaaaatcacaattctctgattttgagctcaatctctgcaggatgggtgaaaccacatggggttttggaggttgaataggagttctcctggagcaacttgagggtaataatgatgatgatataataataatagccactatttactgagtgtttactgtttcttatccctaatacataactcctcagatcaactctcatgg

SEQ ID NO: 78387 - DNA, 719 bp, Homo Sapiens
gttggcgggtggggagataaccctaatataaaatcatcaggaattgactgtgcttaatttagtagattttcttcatctgtatttaattatacattatactctgtggtattcttagagtgatatatacaatgtaaacaaatgtaaatatcacatatatgcaaaaattacttagtaaaggtaaactcccattaatacctactgtgggctcattttagctgatccatgtatactttgtatgctaattttatttatttatctgtttttttataggaagtcctggctgagcaaggttggaagccctagttctcgcattgaccgcacaaacttttctaatgaaaaaaccatctctaagcttgaatactctaattttagtattagatactaatagaagagaaaaattgtaacacactgaacaatagatactgtatgttcttaagactatgtatactagaataatagtagcagagtagggtgaaaaggaactttctgttctgaaagctaagcgactgtacgtgctactaaaaatgtctgacactgaaataattttactcaactatgttttcaacaagcaaaaatatagtattctaagattaaaatgtcattacaaaatatttagtgtgaacatttaatttaaacttgtctcatggaatctttaatttcaatgaacattacagcatatatatgttatttggcgagacatcaaataaagttaaccattt

SEQ ID NO: 78388 - DNA, 1014 bp, Homo Sapiens
ggggaagccactctttttttgggcacagcatccggcttttatttactaactttgagaacagagtaccttgatcaattaaatggtagggagcgctgtggagacagcatcctccccagtccgggaagagaggcctaggatgcctggggcccagcggcctcttccctcctggcgtccccggctgccctcgctcccaggccccgcagtctcatttgccgcttccgacgcgtgaccccggcgcgctagcgtccgggaccggtgacaggcgcggggtgcgccaagcagtcccatgtgtcccctccctctcgcagccgccgcagtcgctgcgccccgagcccctctccggctcctcaacagagggctcgccgccgccatgtctaccgcccagtcactcaaatccgtggactacgaggtgttcggaagagtgcagggtgtttgcttcagaatgtatacagaagatgaagctaggaaaataggagtggttggctgggtgaagaataccagcaaaggcaccgtgacaggccaagtgcaggggccagaagacaaagtcaattccatgaagtcctggctgagcaaggttggaagccctagttctcgcattgaccgcacaaacttttctaatgaaaaaaccatctctaagcttgaatactctaattttagtattagatactaatagaagagaaaaattgtaacacactgaacaatagatactgtatgttcttaagactatgtatactagaataatagtagcagagtagggtgaaaaggaactttctgttctgaaagctaagcgactgtacgtgctactaaaaatgtctgacactgaaataattttactcaactatgttttcaacaagcaaaaatatagtattctaagattaaaatgtcattacaaaatatttagtgtgaacatttaatttaaacttgtctcatggaatctttaatttcaatgaacattacagcatatatatgttatttggcgagacatcaaataaagttaaccatttaaaaattaaa

SEQ ID NO: 78389 - DNA, 355 bp, Homo Sapiens
  misc_feature (118)..(133): n is a, c, g, or t
tgagagatttcacatgaaagccaggatttctggcttcccaggaacagtcagaagagctagctagcaacactggtctgcttggctaccttctttggaacaacatgaaatctagctcccnnnnnnnnnnnnnnnnggcccacttcatccattcacatgacctgcctggcctctgcaggtaagtgagtatgcaacaaaaatgtagcacaggttttgtcgctgaactacgtggtttcaggtccagctgtgccacttgctagcatgacacctctttgagctcagttccctcatctatagaataggtataataactgccccttatataatggggactgtggggttccccaagcctcactca

SEQ ID NO: 78390 - DNA, 857 bp, Homo Sapiens
  misc_feature (43)..(43): n is a, c, g, or t
  misc_feature (761)..(781): n is a, c, g, or t
ggaattaccacggtgcttgtataactgtaaagatattgtatancgaagaaacacagctggaagtctgggcttctgcattgtaggaggttatgaagaatacaatggaaacaaaccttttttcatcaaatccattgttgaaggaacaccagcatacaatgatggaagaattagatgtggtgatattcttcttgctgtcaatggtagaagtacatcaggaatgatacatgcttgcttggcaagactgctgaaagaacttaaaggaagaattactctaactattgtttcttggcctggcacttttttatagaatcaatgatgggtcagaggaaaacagaaaaatcacaaataataggctaagaagttgaaacactatatttatcttgtcagtttttatatttaaagaaagaatacattgtaaaaatgtcaggaaaagtatgatcatctaatgaaagccagttacacctcagaaaatatgattccaaaaaaattaaaactactagttttttttcagtgtggaggatttctcattactctacaacattgtttatattttttctattcaataaaaagccctaaaacaactaaaatgatttgtataccccactgaattcaagctgatttaaatttaaaatttggtatatgctgaagtctgccaagggtacattatggccatttttaatttacagctaaaatattttttaaaatgcattgctgagaaacgttgctttcatcaaacaagaataaatatttttcagaagttnnnnnnnnnnnnnnnnnnnnngcctacagccgcggccgcaagctttgtccctttagtgagggttaatttcggtatggcactggccgtcgttaccacc

SEQ ID NO: 78391 - DNA, 656 bp, Homo Sapiens
  misc_feature (1)..(1): n is a, c, g, or t
ngagcaagatattccttattacatttataaaagaacatttggtccttttacaaaaagatcccttttaatttaaatacatttcttatttacagattaaacataaaatatcatctacagttgcaaagcatattgcacattacagagaagcatttgtgtatttccgtaagttttcccagagtttccaactctatacttttttttgtaaaaagatttacctttcttatgcaaaataaataaaaatgcagcttgtgttttgctatttaaaactaaaacaaaataacctttaaaaatattattcctctgccttgcagaaagaaggaagagggtatagaatcaaggagttccacaggtacttgatatttttaccagattcacgtccagattcaagcgggagcataaccctgagccctgtgaaacctgggacacagggcccagcccgtcccacctcctcgatttcccaaggggtccctgccctgcagggaagaggcactagaataggagctggatgctgggaatggacaggaaagctcaggattttcttctaaagttcctgctcagccaccctgtggctaaggtaatcactcagccctaccttttcaccagcactacatttgaaaaaagattttgtttttgtcaacagacaaaaaaatttatca

SEQ ID NO: 78392 - DNA, 1565 bp, Homo Sapiens
tacggtaggtagcgaggctgggtgttgaattcggcacgaggggaaattcgaactttgagaaagcgtttagaagaatctattaaaacaaatgagaagctacggaaacagtggaacggcaaggatctgaattgttcaaggttctacaagcatttttgcttctggttcagagcttcatagttctctaacatcagaaattcatttcttgaggaagcagaaccaggccctcaatgcaatgctcattaaaggatccagagataaacagaaggagaatgacaaattacgagagtccctctccaggaagaccgtgagcctggagcaccttcagcgggagtatgccagcgtgaaggaagaaaatgaaaggctgcagaaagaaggcagcgagaaggagagacacaaccagcagctgatccaggaggtccgctgcagcggccaggagctgagcagggtgcaggaggagctgaagttgaggcagcagctgctctcacagaatgacaagctattgcagtctctccgagtggagctggaaggcgtatgagaagctggatgaagagcacaggagactgagagaggcgtcggggagaaggctggaagcggcaggatcctttcagggacctgcacagcctcctgatggagatccaggctctgcgcttgcaactagaaaggagcatcgaaaccagcagcactctgcagagcaggctcaaggaacagctggcaaggggggcagagaaggcacaggaaggagccctcactctggctgtccaagccgtgtccatccctgaggtgccccttcagcctgacaaacacgatggtgacaaatatcccatggaaagtgataattcatttgatctgtttgatccctcccaggcagtgacaccaaaatcagtttcagagactcctccactctctgggaatgacacggactccctctcctgcgacagtggcagttcggcaactagcactccgtgtgtgtcccgcctggtcactggccaccacctgtgggccagcaagaatggccgccatgtcctgggcctgattgaggactatgaggccctgctcaaacagatcagccagggacagaggctccttgctgaaatggacattcaaacccaaagaggctcccagctccacaagtcaagagctgggaacaaaggggccacaaccagcaccactgagcaagtttgtgaacagtgtgagcacggccaagctgaccctggaagaggcctacaggcggctgaagcttctctggagagtctcactccccgaggatggccagtgcccccttcactgtgagcagattggagaaatgaaggcagaggtcaccaaactacataaaaaattgtttgaacaagaaaagaagttgcaaaacaccatgaagcttttgcagctgagcaagcgccaggaaaaagtcatctttgatcaattggtcgtaacccacaaaatccttcggaaggccagaggaaacctggagcttaggcctgggggagcccatccaggaacatgcagtcccagcagaccaggctcctgagaagaactttcagccaataaagcttgtgcttcccccaccg

SEQ ID NO: 78393 - DNA, 897 bp, Homo Sapiens
cagtcgacggtaccggacatatgcccgggaattcggccattacggccggggcttctcagaagccttccctgttctctccctccctgcacagataattgttttttctggctctggcccttcatcactctgctgttgcaccttctgcagtgtctgtgttctgatcagactgtgggctactggaatgcaggcaccagcttgagtcatccttgtgaatctggggtcttctgccgagtgggtggttgataagtgttggttgagttgacttgagcctctcctacaagatgactcataagcccagtgtgggtttcagagactcctccactctctgggaatgacacggactccctctcctgcgacagtggcagttcggcaactagcactccgtgtgtgtcccgcctggtcactggccaccacctgtgggccagcaagaatggccgccatgtcctgggcctgattgaggactatgaggccctgctcaaacagatcagacagggacagaggctccttgctgaaatggacattcaaacccaagaggctcccagctccacaagtcaagagctgggaacaaagggtccacacccagcaccactgagcaagttcgtgagcagtgtgagcacgggcaagctgaccctggaagagggcctacaggcggatgaagcttctctggagagtctcactccctgaggatggccagtgccccttcactgtgagcagattggagaaatgaaggcagaggtcaccaaagtacatacaagaaggttggaccaagaaaagagattgcaagacacaatgaagcctttgacgctgagcaaggccaggaaaaagtcaatcttgatcaatggtcggtaccacaaatcctcggaaggcggaggaactggagctaggctgggagccatc

SEQ ID NO: 78394 - DNA, 1263 bp, Homo Sapiens
  misc_feature (164)..(172): n is a, c, g, or t
  misc_feature (174)..(185): n is a, c, g, or t
atttggtgaggaattcccaagcacttagtccatggcccagggatctccctagggaaaccagcttatgacccatggttcacttaccctgactggggcccggcgcgccaaaaccgaatggttctagaaaagcttctccgagggccgaggccgggccgacatgtttnnnnnnnnntnnnnnnnnnnnnttttgaaatgaaatgaatcatttaatgagaatcttcaaactgtggcactggctgagtactaagcaaatccaggggaagacgtgaagcccaccaaggcgcacagcctcaactccggtgcctgcccctgatctgaaatacaacatccaagagctcgaggcctttttaccacccgtttgtggagcacctgcacctttctgacaacaactctcaagccaactttcagagagaaaacatgaagggaaaaaatagatttcctttggccagacagctctttcttcctcaataaataggaaccacacttggaacaaagagacagcgtgagctcggtgggggaagcacaagctttattggctgaaagttcttctcaggagcctggtctgctgggactgcatgttcctggatgggctcccccaggcctaagctccaggtttcctctggccttccgaaggattttgtgggttacgaccaattgatcaaagatgactttttcctggcgcttgctcagctgcaaaagcttcatggtgttttgcaacttcttttcttgttcaaacaattttttatgtagtttggtgacctctgccttcatttctccaatctgctcacagtgaagggggcactggccatcctcggggagtgagactctccagagaagcttcagccgcctgtaggcctcttccagggtcagcttggccgtgctcacactgctcacaaacttgctcagtggtgctgggtgtggaccctttgttcccagctcttgacttgtggagctgggagcctcttgggtttgaatgtccatttcagcaaggagcctctgtccctggctgatctgtttgagcagggcctcatagtcctcaatcaggcccaggacatggcggccattcttgctggcccacaggtggtggccagtgaccaggcgggacacacacggagtgctagttgccgaactgccactgtcgcaggagagggagtccgtgtcattcccagagagtggaggagtctctgaaactgattttggtgtccctcgtgccgaattcgccacccaggcctcgctaccttaagaccgtggtagttactgccg

SEQ ID NO: 78395 - DNA, 875 bp, Homo Sapiens
cgagaggctaccaagttgtaaaagcaggctgttaaaacgagcggcagtactataacggtactaaggtagcgaggcctgggtggcgaattcggcacgaggattgttttttctggctctggcccttcatcactctgctgttgcaccttctgcagtgtctgtgttctgatcagactgtgggctactggaatgcaggcaccagcttgagtcatccttgtgaatctggggtcttctgccgatttcagagactcctccactctctgggaatgacacggactccctctcctgcgacagtggcagttcggcaactagcactccgtgtgtgtcccgcctggtcactggccaccacctgtgggccagcaagaatggccgccatgtcctgggcctgattgaggactatgaggccctgctcaaacagatcagccaggacagaggctccttgctgaaatggacattcaaacccaagaggctcccagctccacaagtcaagagctgggaacaaagggtccacacccagcaccactgagcaagtttgtgagcagtgtgagcacggccaagctgaccctggaagaggcctacaggcggctgaagcttctctggagagtctcactccccgaggatggccagtgcccccttcacttgtgagcagattggaggaaatgaaggcagaggtcaccaaactacataaaaaatggtctggaacaagaaaagaagtgcaaaacaccatgaaagctttgcagctgagcaagcgccaggacaaaagtcatcttgatcaatggtcgtacccacaaaatccttcggaagggcagaggaacctggagcttaggctgggggagccatcaggaactgcagtccagcagacaagctctgagaagaat

SEQ ID NO: 78396 - DNA, 879 bp, Homo Sapiens
  misc_feature (50)..(50): n is a, c, g, or t
ctgcccggtggtttgccatgtcgcttttggggcctccttcccatgcctgnctctgttcagatgtgcatttcacctgtgacaaaggatgaagaacacagcatgtgccaagattctactcttgtcatttttaatattactgtctttattcttattactattattgttcccctaagtggattggctttgtgcttggggctatttgtgtgtatgctgatgatcaaaacctgtgccaggctgaattacagtgaaattttggtgaatgtgggtagtcattcttacaattgcactgctgttcctgctccatgactggctgtctgcctgtattttcgggattctttgacatttggtggtactttattcttgctgggcatactttctctctaggagggagccttgtgagatccttcacaggcagtgcatgtgaagcatgctttgctgctatgaaaatgagcatcagagagtgtacatcatgttattttattattattatttgcttttcatgtagaactcagcagttgacatccaaatctagccagagcccttcactgccatgatagctggggcttcaccagtctgtctactgtggtgatctgtagacttctggttgtatttctatatttattttcagtatactgtgtgggatacttagtggtatgtctctttaagttttgattaatgtttcttaaatggaattattttgaatgtcacaaattgatcaagatattaaaatgtcggatttatctttccccatatccaagtaccaatgctgttgtaaacaacgtgtatagtgcctaaaattgtatgaaaatccttttaaccattttaacctagatgtttaacaaatctaatctcttattctaataaatatactatgaaata

SEQ ID NO: 78397 - DNA, 539 bp, Homo Sapiens
tctgtgctttctaatcgctgccgagccatgtgagaagcgggttcactggatggctttgaggaattatctgtactgtccacacactcgcttcgtccatttatctgatccaagtgctctgaaaaactgccaactgacagggtggagctgctgatggtgctggctggggtggtgacctcaggctcctcctgggcacactcttcaggaggaagggctggctttcctggctcctcatgggggtctccagggcaggaggcagcttcatcttgctctccctctgttgaaatagccagtttgggaagtaggccagaactgagtttatgtctgttgctttcagtatctgaagagttggatgttgatagctgttgcatttcagaatattctgaactccagctcagtgtttctgtggatggcaaggtggtgcctttggttttgtccacagagtcctccttctcctctgacgaattccgagtgattcgatctataccgctgaaaacttttgaaaaaccgtgtgaacatgaagaaaaactgcctaattccac

SEQ ID NO: 78398 - DNA, 737 bp, Homo Sapiens
gtcatcgtagatgtgcaagtgagaccatctgatgacctagacatgccaaggtgagagacatctggtcgactgaagacaaggaaaaatgaaagccatctggttgagcttagacatggcaaggcaagagtcatctggccgaccttagacatggaaaaagaagagccatctgtttgaccttagacatggcaaggcaagatccatctggtcaaccttagacatggcaaggtgagagccatctggttgaactcactcgaagaggagacccatctggtcaacctcagacatggcaaggtgagagccatctgatcgaccttagacatggcaaggtgagagccatctggtcgaccttagatatggcaaggtgagaatcatctggtcaatcttaaacatggcaaggtgagatccaacttgaccttagatatgatgaggtgagaaccaactgttcaatcttagacatggctaggcaagtgccatctggtccaccttagatatggcaaggcgagagccatctggtcgaccttagacatggcaaggtgagagctgtctgttcatcttagacatgacaagctggcagctaaatgcgatgcatgcagtcgacatccatctcaaaataaatgaaccaacagtaaatatataacaataacaaggaaataatagtgaacaaccctaaagaccaaataattaagtaggagtgtacaataataaaaggtaattaatgtcgcaatttaaaaaaactc

SEQ ID NO: 78399 - DNA, 808 bp, Homo Sapiens
  misc_feature (627)..(644): n is a, c, g, or t
gtgagaatgtgggcccccctgctgccgcggtgcccgggcccttgagccgcagcaccagtgtcgcttcccacatcctcaatggttcttcccacttctattcctgaggtgcagcggggaggagcagatgagctgggcagggcaggggtgggtggagcctgaccctggagggcactgagctggaggcccctgcaagggtaggggacaagatgtaggctccagctcccctcagacctcctcatctcatgagcttcttggggctggccagtggcccagggccagcttggcgatagatgcctcaaggctgcctgggagccccgcctccctaccatggtgccaggggtctccctccgccacctaggaaaggagggagatgtgcgtgtcaaatattcatctagtcccctgggggaggggaagggtgggtctagacatactatattcagagaactatactaccctcacagtgaggccctcagacctgccacagggcagagcaggtctggggcctgaggcagggagaatgagaggccaccttactggcaggaaggatcaggatggggtcttggggtcaggatgcctgggtctcttcccgtaactgtctgacgtcctgtgccgtcttgtcctttatcnnnnnnnnnnnnnnnnnnaattggggatcagggctggggcggggaaacaagggaaggaccttggaaggggctgctcccagtgcctggggggcatgtcgtgggagcccctctcagctgtggggctggcacagagcccccagggcaacgctttttaattaaactgttgggttattctaaacacg

SEQ ID NO: 78400 - DNA, 1365 bp, Homo Sapiens
gctaggtacgaggctgggtgttgaattcggcacgagggtcaacatggaggcagaggaatcggagaaggccgcaacggagcaagagccgctggaagggacagaacagacactagatgcggaggaggagcaggaggaatccgaagaagcggcctgtggcagcaagaagcgggtagtgccaggtattgtgtacctgggccatatcccgccgcgcttccggcccctgcacgtccgcaaccttctcagcgcctatggcgaggtcggacgcgtcttctttcaggctgaggaccggttcgtgagacgcaagaagaaggcagcagcagctgccggagggaaaaagcggtcctacaccaaggactacaccgagggatgggtggagttccgtgacaagcgcatagccaagcgcgtggcggccagtctacacaacacgcctatgggtgcccgcaggcgcagccccttccgttatgatctttggaacctcaagtacttgcaccgtttcacctggtcccacctcagcgagcacctcgcctttgagcgccaggtgcgcaggcagcgcttgagagcggaggttgctcaagccaagcgtgagaccgacttctatcttcaaagtgtggaacggggacaacgctttcttgcggccgatggggaccctgctcgcccagatggctcctggacatttgcccagcgtcctactgagcaggaactgagggcccgtaaagcagcacggccagggggacgtgaacgggctcgcctggcaactgcccaggacaaggcccgctccaacaaagggctcctggccaggatctttggagccccgccaccctcagagagcatggagggaccttcccttgtcagggactcctgagggcctgggtggccccttccatttcctggccctgctctgcttcctgtctacctcatactagaatgatcgtgactacccgggcagacattttactgtgtttctcagaccaagtgtctactgatggcccaaacatggagttttgtgggcttccactgtccccactccgaactcctgtatgtgcctggctgagtcacctaattcatactgtcatactagcataattatgactattgcatatgcttgttttgtttgactcttggctgcctacgtctgtagggtcccctgaaaatcccacttcctgcccccagaaagggcctttatttccaactaggaggataatgcctagtccaggcaatctttctctgtttagcagtcacaggtgagggtggtattagcatcttttttatgtagaaaaaattgagttaatggggtggactgggttgggaagaaatacatttcctaatgtatttatagaaaataaaaatatttttatgtgccttgaa

SEQ ID NO: 78401 - DNA, 1134 bp, Homo Sapiens
  misc_feature (52)..(52): n is a, c, g, or t
  misc_feature (54)..(54): n is a, c, g, or t
  misc_feature (71)..(71): n is a, c, g, or t
  misc_feature (95)..(95): n is a, c, g, or t
  misc_feature (195)..(196): n is a, c, g, or t
  misc_feature (198)..(198): n is a, c, g, or t
  misc_feature (201)..(201): n is a, c, g, or t
  misc_feature (223)..(223): n is a, c, g, or t
  misc_feature (227)..(227): n is a, c, g, or t
  misc_feature (231)..(231): n is a, c, g, or t
  misc_feature (293)..(293): n is a, c, g, or t
  misc_feature (296)..(296): n is a, c, g, or t
  misc_feature (299)..(299): n is a, c, g, or t
  misc_feature (848)..(954): n is a, c, g, or t
  misc_feature (1057)..(1075): n is a, c, g, or t
gcgagcatcgttgctgtgtgtgtgacacaattgcggtgtgcctattccgatntnttgaaagccaaccattngtgcacctgatgagtgagcacacntggggagatgcgcccaggggcagtggagtgtctctggtgagtgggaaatacagaccaaaggtatctgtcagccatcaaaggagtatatgacatacatggnngnccntcatcttgaacgtgaccagtgngccntttntgcagtcagccctttgctccgccattgcccgctgttccgccgcaccagccaccccaaagccntcntcntccttaaccctgccagtttctccatccagctcacgcctggtggtgggcccctgagcctgcgggtgccctctcacttgaagatcaggcacagatggctgtggagttcaaatgtcgatgctaccctggctggcaggcaccgtggtgtgagcggaagagcatgtggtgattggccacacactgagttgcacatattgagaacctaatgcactctgggtctggccagggcttcctcaaatacatgcacagtcatacaagtcatggtcacagtaaagagtacactcagccactgtcacaggcatattccctgcacacacatgcatacttacagactggaatagtggcataaggagttagaaccacagcagacaccattcattccatgtccatatgcatctacttggcaaggtcatagacaattcctccagagacactgagccagtctttgaactgcagcaatcacaaaggctgacattcactgagtgcctactctttgccaatccccgtgctaagcgttttatgtggacttattcattcctcacaatgaggctnnnnnnnnnnnnnnnnnnnnnnnnnnnnnnnnnnnnnnnnnnnnnnnnnnnnnnnnnnnnnnnnnnnnnnnnnnnnnnnnnnnnnnnnnnnnnnnnnnnnnnnnnnntatagcccttgcactcctactgagtttgtggtaaccagccctgcacgacccctgaatctgctgagaggcaccagtccagcaaataaagcagtcatgatttacnnnnnnnnnnnnnnnnnnncctgagcaggcggccgcaagcttattccctttagttgagggttaattttagcttggcac

SEQ ID NO: 78402 - DNA, 1298 bp, Homo Sapiens
agcatgtgaatataaccagtggttaaaaaagcaggtggtaccggtcggaattcccgggatatcgtcgacccacgcgtccggaacccaaggccctgggaggcaacaggctagcccttagtttcatggctagctgagagcagattaggagccaacgtgttgcacatgtcccatcacacctgagatgtcagacatgggaagttcgtgctattattcagttgcctctctggaccatggcaagatttcctcattcatcaaacagactccaggccctgacaaagcagttggatttggcatgtgtgatgaaaacaattagccatccatgtacaacattatgcttactgcatcccatggaaacttaattccctcctagcacatatttgcatactgaaaggtccgaaaagggcatccacggcagcttgagccccttagcaccatgtaaggagcacagcatgccaaacggcgtcttgagaaccattggggaatgtcgttcgttggcacatccaattgtttagtgtctatttattcttgggtggccagttttgaaacctaaaaagggacaataaagcaaaaagtatcagtaaggataggtggctgagacccactgccctgagctactagtgtggctgtgcctgtgggtctctagaaccatctgcattggacgtgaagccacagcaggtggctggactgctggcctgttcctaatgagctacgctgggctttgaggtagaggttggggtttatgaaccccaactctggcttaaagatcttgctgtggctctgttatgttctgaggccttgggattagcctcttcctcattacggagctgattttctagtctgtggatcagctatgcctttggacacttctcttttccattgtgccttttgaatgttgtcttctcactcagcatcagcacttcgatctaaatgcagactagggagttgggaggaggaaccaaagtgaaccatccttcatttattcagtcattcgttcatctgtcaaacacgtatttggacatcaaggttgcagagatgaacaatgcatggatttcatctttgaggagttcaaaacctagtggagagaacacatggtacaatcgtaacacatgaaggacaagtaagtgctgcagtaaaggtactaataacatgttccttggaacagaggaagaaaaaccacgaaaccatggaaattagggaagcctttacagagggtgtgacaaaactcaatttgacattttcaagctatgtacaatgatgtgcaccttgcagatgctcaataaagtaattactgacaacta

SEQ ID NO: 78403 - DNA, 1534 bp, Homo Sapiens
  misc_feature (229)..(229): n is a, c, g, or t
  misc_feature (263)..(263): n is a, c, g, or t
  misc_feature (323)..(810): n is a, c, g, or t
  misc_feature (860)..(889): n is a, c, g, or t
  misc_feature (1021)..(1125): n is a, c, g, or t
  misc_feature (1177)..(1253): n is a, c, g, or t
  misc_feature (1289)..(1388): n is a, c, g, or t
  misc_feature (1463)..(1471): n is a, c, g, or t
ctaagacataagcaacagccacaaaagaaggtgagaaaatgtccgagatatacaaaggaaaaagagtaacagtagataagagttgaaccgtaaggaggggaaggataaaggagtaggcagaagaaaaaatgagggaagactaaacgaattagatactaaaggtgacttgagagaaaacagacttccgaagggagaaagcagaaagtatccggtaagcggcagggtcggntcagggagcgcaagaaggaagtcacagggggaancggcttgtaaacttatagtcctgtaggaaataaccacctctgaaatgagcgtagataacnnnnnnnnnnnnnnnnnnnnnnnnnnnnnnnnnnnnnnnnnnnnnnnnnnnnnnnnnnnnnnnnnnnnnnnnnnnnnnnnnnnnnnnnnnnnnnnnnnnnnnnnnnnnnnnnnnnnnnnnnnnnnnnnnnnnnnnnnnnnnnnnnnnnnnnnnnnnnnnnnnnnnnnnnnnnnnnnnnnnnnnnnnnnnnnnnnnnnnnnnnnnnnnnnnnnnnnnnnnnnnnnnnnnnnnnnnnnnnnnnnnnnnnnnnnnnnnnnnnnnnnnnnnnnnnnnnnnnnnnnnnnnnnnnnnnnnnnnnnnnnnnnnnnnnnnnnnnnnnnnnnnnnnnnnnnnnnnnnnnnnnnnnnnnnnnnnnnnnnnnnnnnnnnnnnnnnnnnnnnnnnnnnnnnnnnnnnnnnnnnnnnnnnnnnnnnnnnnnnnnnnnnnnnnnnnnnnnnnnnnnnnnnnnnnnnnnnnnnnnnnnnnnnnnnnnnnnnnnnnnnnnnnnnaagaattcggcacgaggattttgatgttggagcggccgctgctgtaggcnnnnnnnnnnnnnnnnnnnnnnnnnnnnnnaatctactgacaagttgctctagtaacccaaagaagtgaaggagaaagcagctgcctcaccgcccagacattgatttgttcagatgtttcaatgcctcatgatacaataaaaccacaaaaattttcttaacnnnnnnnnnnnnnnnnnnnnnnnnnnnnnnnnnnnnnnnnnnnnnnnnnnnnnnnnnnnnnnnnnnnnnnnnnnnnnnnnnnnnnnnnnnnnnnnnnnnnnnnnnctcaaaaaaatccccgggggggccaaagttaaggggaacccagttttttggnnnnnnnnnnnnnnnnnnnnnnnnnnnnnnnnnnnnnnnnnnnnnnnnnnnnnnnnnnnnnnnnnnnnnnnnnnnnncggcaacttgggaattttgggaaagaaacctaattnnnnnnnnnnnnnnnnnnnnnnnnnnnnnnnnnnnnnnnnnnnnnnnnnnnnnnnnnnnnnnnnnnnnnnnnnnnnnnnnnnnnnnnnnnnnnnnnnnnnggctggcggctgaaaaattttgctaagggggaaggatttaggaaaaaattaaaaccgggagcgggggaatcaaannnnnnnnnaatttaaaaaccaaggcccaaagggtaatttgaggcccccaaagcttaaaagggggggaaagg

SEQ ID NO: 78404 - DNA, 860 bp, Homo Sapiens
  misc_feature (755)..(776): n is a, c, g, or t
gcgggcgaaggaaggcaggtgggaagggacagtcggccgcagaccgcgctgggttgccgctgccgctgccgccatcgtgccagcccctcgggtctccgtgaggccgggtgacgctccagaatgggagacaagccaatttgggagcagattggatccagcttcattcaacattactaccagttatttgataatgatagaacccaactaggcgcaatttacattgacgcgtcatgccttacgtgggaaggacaacagttccaggggaaagctgccattgtggagaagttgtctagccttccgttccagaaaattcagcacagcatcaccgcgcaggaccatcagcccactccagatagctgcatcatcagcatggttgtgggccagcttaaggcggatgaagaccccatcatggggttccaccagatgttcctattaaagaacatcaacgatgcttgggtttgcaccaatgacatgttcaggctcgccctgcacaactttggctgacctcctctcagctaggcactcacgctgtttcctcctccctcctcttcccaatactattcccactcctccagatgctccaaatatcatgcacaaatgagcagggccgcggtgggagtgggcgcagtgcgctgctgccactgaggtgttgtgcatgatgtttggatgctagactagttgcatctgacgggaaaagtttgtgttgtaccagcgcatgccttggaaagacttaagtaatgcaaaaggttggcccnnnnnnnnnnnnnnnnnnnnnnaacctactggacaagtgcctcaattaccccaaagaaagggaagggtaaaaggagtttgcctccccggcctaaaatttgattttg

SEQ ID NO: 78405 - DNA, 952 bp, Homo Sapiens
  misc_feature (725)..(725): n is a, c, g, or t
gcacccagatgagctgaccttggagaagactgacatcctgtcagtgaggacctggaccagtgacggctggctggaagggtccgcctggcagatggtgagaaggggtggtgccccaggcctatgtggaagagatcagcagcctcagcgcccgcctccgaaacctccgggagaataagcgagtcacaagtgccaccagcaaactgggggaggctcctgtgtgatgggcagccatggcctaggaccccaactccatgcctggctcctggatggtcctggaggggcctgcagtgtctccattccccaagctgctcctgctggcacttcgcttctgtggccttggcattgagggcacaggctggacacaggaatgggggcgcctccagagggtctctccgtcctcatgctcctcagtgtccacacttcaaggccaaggatagtttcttcctctgacatggggaccataacaggtgatcactgatacctggcaaagactggggccctctcctttctatgtcctcaatcctgcctgactcttggtccttctggcagggacctggctggggaacgttctggtgctgatggtgctgggacctatatgtatatttatatatatctggggtcttgtctaccacctcccctggtcagagcccgagtgggtgctggttgctgtgtcttgtctgtaaataaactcctatcatgcctttgcttggagtctgtgatccatntgatgctgcccccacccccacagtcctattttcccagctaaagaccaggagagtctccggctggctcccaactggggctttgcatttctctagagttcatctttgagctgtaagggtgaccagggggcagggggacgattgtgtatcagctaggctgcttttggctgcaagtaacaaaatatcagatacaaataggcttaaacattaaagagatttgattagttttt

SEQ ID NO: 78406 - DNA, 671 bp, Homo Sapiens
  misc_feature (21)..(21): n is a, c, g, or t
cttaaatacctgaaggtgagngaggtgaagtacgaggtgtggctgcaggagcagggggagaacacctacgtgccttacatcctggctctgcagaaccacaccttcactgagaacatcaagcccttcaccacctacctggtgtgggtccgctgcatcttcaacaagatcctcctgggaccctttgcagatgtgctggtgtgcaacacgtagcgagcaggccacagcctggcctcgggaaggtggctcctgcagttcagcgtccctgggcccattaatcccactgtggagacttctgggaactatttattgagcaggcctgtgcctccacatcatcttgttgtctctggggtgtggtgtcacagcactcctctttgccctagagataagggacctgacttccccttctcccatcctgaacatttgtacccctggagaagttccttagcagggaggaggaagaggagaggaggaagcaaagaatcacaaggaacctctggctaggtgatcctgatgtttcctactgagtttttctggtatccagatttctggaaaccgagtaatcatgtactgtttgattgggtggttcatctgcttccatcccagtgaaatttacctgtagcccagtgaagggtgtgtttggaacattcattaaatgattctaagcatcaaaa

SEQ ID NO: 78407 - DNA, 1352 bp, Homo Sapiens
  misc_feature (12)..(12): n is a, c, g, or t
  misc_feature (242)..(242): n is a, c, g, or t
  misc_feature (824)..(824): n is a, c, g, or t
  misc_feature (856)..(897): n is a, c, g, or t
gagagggcttgngagcccacttttaatttctcacccccattttacaaaggagtgcttagattcttacaaattatgatgtaagttatccatttggctttttcctaactagtcttaccaaacttagggggaaacctgtgctccattaccacatgggtgcaagtcagcattgtaagttttctcaggttattattattagagaggttggaaacattggtaaactctgttgattgagaaggaaaaanaaagtcccattgaactgttgcaacaaatcagaaatccacataaaagtgctctcctgcctgggcagcaacaaccaagaacaaagccccgggactgttttctttttaataaagccacaggcaggcatcgtagctccacagcccgaggggacacaggatggaaaccccaggatgagaagggagcagggagagttccagaaagggggatgaaataggagtattaaaaagctgcgttggtaagtttttcatggaaccaagatttgacaaaggcatctcttatccttggttttaaattcctgctgggagcaaggcctggtatgagcgccctgggtcttgtttttggtgtttcgcttttctgtaaggattaagcagatagggagaagggaaaaggggcctcactttagaatgaatgagtcaccttgtgatttttaaatttttattttaataaagctaatcaatttctacaaccttgtcacatgtagctgagtctgggatgactcagtggatcagtggatgcgtggaaggttttggtgtttataactcatgacccaaatccttccaagacacaaatgaagctaatcttcnttcccctccctttcctctcccacttcccctcnnnnnnnnnnnnnnnnnnnnnnnnnnnnnnnnnnnnnnnnnncgcgcgcgcgcgtgcatgcagagaggaaggaagggagctttagcacaagtagctacatagtgttcaaggatcagctttcttgaactccgaggcttggttgcctttgctgaactccaagttagtggattgcagaatggaaacttggcttttgcggcactgggtgagttttagtttgtgtgtgtcttgctggggggtggtgatgattgtctcagcactcacgcactgcttggtgggtgctcatcgcaatgttctgaaggctccagggccactttgtttgtaagtatgatctgggcctcaaaataccatagtagctgcttgataaaattctaaaaatatctggttctctattatgtaaacactattacagtcaccagtgtgtgaagactcttgagtctggttctcatatcagagtcatcatttttcttcctgtggaataaaatgccttgtgacttccc

SEQ ID NO: 78408 - DNA, 1026 bp, Homo Sapiens
  misc_feature (160)..(160): n is a, c, g, or t
  misc_feature (169)..(169): n is a, c, g, or t
  misc_feature (172)..(172): n is a, c, g, or t
  misc_feature (193)..(194): n is a, c, g, or t
  misc_feature (207)..(207): n is a, c, g, or t
  misc_feature (214)..(214): n is a, c, g, or t
  misc_feature (231)..(231): n is a, c, g, or t
  misc_feature (237)..(237): n is a, c, g, or t
tcgatcatatcagtgagacagttccgatgaacggcatggccacgcaaaattgatactcatcatagcacccagcttaccttatgtcccgctctatgtgttggaatgtacggtaacaattcacacaggaacagctatacatgatacgattaatacgactcanataggaatntgnccctcgagccaagaaatcgcnnacgaggagcactntgacatntgcacctagggagagcnagatgnaaaatgaatcccaaagaccacctagggcgggcctgggtggaagatgggagggccaactgcgagctgctccacgtctcagctctcccctgccctgcagccctgggccagacaaggccagaaggtttcaggggcatttgacatcccctcctggttctcaccaggaaaacatccaaagctttggaggaaacaggccctgcccctggctccttaaatgccccgtctctttgtaaactgatattcagccagcaatgcctaagactttgttaagatcatttctactgcttttctttctgcttcaaacacacagttcgtctctgaggaaagtaaaataaatggaataagagtaaattgggtaaggagatatccaaagctacccagtcccttgacccagcacagttggccgacccgtgtcactccctggctgtcgctgcttctctgtgctcactgaagggtgagccaggccagtgcttccccagcccctgggcctggtcactacacagtggaaaacagacaagcggccccttccccaaatcccaagagtgtcttgctgcttggtgggtgctcatcgcaatgttctgaaggctccagggccactttgtttgtaagtatgatctgggcctcaaaataccatagtagctgcttgataaaattctaaaaatatctggttctctattatgtaaacactattacagtcaccagtgtgtgaagactcttgagtctggttctcatatcagagtcatcatttttcttcctgtggaataaaatgccttgtggacttcccaaaaaaaa

SEQ ID NO: 78409 - DNA, 936 bp, Homo Sapiens
  misc_feature (58)..(83): n is a, c, g, or t
  misc_feature (102)..(158): n is a, c, g, or t
aagagatggggtcttgctatgttgtccaggttggtgaataaactctttaaaactggannnnnnnnnnnnnnnnnnnnnnnnnnagagacagggtctcattcnnnnnnnnnnnnnnnnnnnnnnnnnnnnnnnnnnnnnnnnnnnnnnnnnnnnnnnnntgggctcaagtgatcctcccaccccaacctcacaagtaggtaggagtacaggcatgtgctgccatacctggctaattttttaaattttttgtggagttggagtcttcctatgttgcctaaaacaggatttttgatccttttgattatttcaggctgacacaggacagctcctccagttccatgcttcatatcccttacaaaacagtaaacacagcagggagaaaaggggagaaagtgactctctatcagggaagaagacctctccctgaagcctcagcatctttcctctgtgactcatcatgcccaacccatatggatcactggaaaagaagaaggggatgtcatgactgacttaggtctatcaagaatcatgccataggatacattgctacaacaaaagctgggttttaataacaaaagagaaaggaagaatggctgttgggtaggcaactaacatttgctataattcttaaatgtgtttcctgaagattattaatgaaaaaaagtatcagcccctttatctaccattttacactgattctttcaactagtatttataacatctactatatgttgggtactgtgatagaagcaggagcctcaaagatcatcaagacatagttcctgtcctcaaggtcaaattaaatgagagaacaattcgtcaataattcagaacagtatagcaaatgctgttaggtagcatatgcatggtatagtggggcaacagaatagtctgcagcatcttgaaaagcaatccttgaattgagttttagagaag

SEQ ID NO: 78410 - DNA, 688 bp, Homo Sapiens
  misc_feature (605)..(621): n is a, c, g, or t
gccctttcagtggacatctgcttctttatataattatgacatgaatcagtatgaaaatgctgagaaactttatctgcgatctatagcaattgggaagaaactttttggtgagggctacagtggactagaatatgattatcgaggtctcattaaactttacaactccattggaaattacgagaaagtgtttgaatatcacaatgttctgtctaactggaaccggttgcgagatcggcaatattcagtgacagatgctcttgaagatgtcagcaccagcccccagtccactgaagaagtggtgcagtccttcctgatttctcagaatgtcgagggaccgagctgctgagggaggacctcagttaaccaattaccttttcccggattccagggaattcatactgtgaaatcaaaaccatgttgttttggggggctggaatttgcattgaaacactggtccagtccattgaagaccctattttgggtgatccctatcttgcagaatgtctgtaggaataagcatatattcagttatattcagcatgtaccgcatgtgtaagtagtctggcccacattttcaacctagtagaacaaacaacaggaaatcnnnnnnnnnnnnnnnnnaaaaaattcattttgcagaaagcctgaaagaaaaaaaatacccctaaataaaactatttaagagttt

SEQ ID NO: 78411 - DNA, 743 bp, Homo Sapiens
gggagacaggagaaacaagcagtcgcatagtcgtttttccctaaatctaatacgtttcacttaaggctgttgtgatctgtgacatatgggttatattattgtgtctttgtcaaacaaccaaaaacttgaacttagccctttttttgctgcagaaagtgtccttttagtggcttcttaaaattgagtggcattttataatgaacttaccaatataaaaacatgatttggttcctgagctgttgttgttggacttgtgttccaatgagtgactaggaaaaaataaattggcaaaaacctagagttttctgctatctttgctggaaatgagttgcaaaagtttttctcaagatgtagtgcgtaattgatcagagcaaaacatgcagagcccttagcagaaacccactttaatgcattttcttcatatccctaaagttccttaaaaatatgtgacaatgcatcaggaagaggagaactgaagagtagaagttcccttgcagatttttttatcagtgacatgtaatgagcaattcacagatgagcgcaggcagagctctgtgtgccgtgtacatatggaccgtgctatgatgtgtctcacattggatgatattccactttgggaattttagtatttgtatatagaaaatgggtttaataactcaccatggttttgatttgtcttatattcgttatttcttaaaactcttgtatgtgtttttataataaaaaataaaagtaagccatgg

SEQ ID NO: 78412 - DNA, 673 bp, Homo Sapiens
aaagcacagggccccggctaagaaaacgatcattttcaggaggggccgggagttatgtatctgaagcagctttccaagcaaagccaaagttgactgtgttcttgtcccgcagccggtccacactgtgaggccaggcctcaacttccctcaccctgggcgtgacatgcacccagtgcaagacggttgtgggtgcgggtgcacacaaatgagtgggttgctgtgctgtctccggaagattctgtcgttgcccttggcctggctccctgcccggggctggtgctgtggtacctacatcttcaggaagctgtgcagcctctgccattgccatcccagggggatctggcatcctcctaaggaccggggcgcgtggcccagataagaataggtgttcctttgtgctcataaaacagaatgcggcgatggttgctttagccgtttctcaccatgcaatgcagagggacaaagggctgtgctacacttcccagttacattctgaagctcataaatgtatgagaaggtttgtgattttgcacaaggtgtgtgtagtaagttaaattgttgaacacaaaaatgttgctgcttgaggcataagttggataataggctttaaatgatcagggattcaggttcataatgaacttcacagtaaagaacacgtttgttctgtaaagca

SEQ ID NO: 78413 - DNA, 747 bp, Homo Sapiens
  misc_feature (12)..(12): n is a, c, g, or t
  misc_feature (111)..(111): n is a, c, g, or t
aaccccaccgtntggggtgagaagcagaatctgtgcttccccagtctccttgccccagacaaccagcatgtaagacccttcccgcttcaccattccgattcctgtcccctntggggtacttgggggagactctggctcccaggatctgttccctatttcagtgccttcctaggacacaggggactccttgacgctccccaggctttctgtgcccaggcctctgtccccagcggtgaggttgcagtgagtgaaggagaggaggtgatctgttctccctccccttctgcccatctccagcatcttcttccccttccctggccctgcagggccttctccagctccctttggttagtccctggccatccctcctgtcctggatcccttctccctaactgcaaaatgcctgcagcttccagctccttcgtccctgatcctcaagcggttccctcccgtctcagctcagcggatcccccagagtggaggaggcctctccatgaggaggggagcagcccaaggcacctgtcctctgacccaccggcagcgagtgcgcaggtgtgagtgtaagttcatgtaggagagtgtatgcgtgtgcgcctgtgccctgcttgcaggcaagcagggctccctcatgtagcccggccttccccctgctgggggtccaccacatcgctgctctttctcacagtctgcctctgatgagggcgaattgctatgacattccaagctccaataaagactgtcccagac

SEQ ID NO: 78414 - DNA, 717 bp, Homo Sapiens
tctgtttgtataacaccttcccccgtcccctctccatccctgccaattgggctctatgcatattgacaagcaaataagaaaaccttaggtttcttgtatttgaatttccaaaacaataaaaggttttgactcaagatttgcattcaagaagaggcagaaattttgtcttatctttttatcattttgtgaacttgtgtttctctgtatgcttagaaaattttacacacaaggaatgtttgaaaaagtgagaattttagagtgcttgggtggtttttatttggtcagtgctgatgtgttaggtgtttagggaaataatgcttcaggacctttttgacaacacagcttcatgaatgactgggggatatttatgtttgtgctgagaaaagggagggagtgggcaggttggagtggggacctttccattgaaagcagtgcagtcagctgtttcgtagatgcattttttctttatgcttgtaacattgttcttgtgtccataattgactgaaatgtcaagctccaggaatgcaaggcatttatcaggtgaccagaagtagaaccttgttgattatgaaatggaagaataatgtcaaggtagtgggggtaaaatgacaaataagattttactggtgaatttccatgcttagtatgtacattaacctctttttaagttgcatgttaatctggtataacgtattgtgtctggtttatgctttgagt

SEQ ID NO: 78415 - DNA, 978 bp, Homo Sapiens
  misc_feature (51)..(51): n is a, c, g, or t
  misc_feature (60)..(60): n is a, c, g, or t
  misc_feature (69)..(69): n is a, c, g, or t
  misc_feature (119)..(119): n is a, c, g, or t
  misc_feature (168)..(168): n is a, c, g, or t
  misc_feature (206)..(207): n is a, c, g, or t
  misc_feature (248)..(248): n is a, c, g, or t
ggcttccctgagtgcctgcacaggaccagttcagtgacagcagtccaagcnggcgggacncagtgcctntggttgacagtgcctgtctctccccagaaaggctcctccgccgtcccgtnggggacgtgtgccaagaccctgtgtgcgtccaagagtacacacgcttgnctgacccgtgcagagcacgagcggaggcgcgcgccgcnngtaccagcaccgcagcactctgtgcggagagacgtcctccntagcctcaggcttttccgaccgcccggccaggccccaccggaccttcagtcctccccgggccccactcagggccctgccccagcagactgtaccccacgacccagccccctgagcagggcttggatcccacccgcagctccctgccccgctccagcccggagaacctggtggaccagatcctggagtccgtggactcggattctgaagggattttcattgactttggccggggccggggctctggcatgtccgacttggagggctctgggggccggcagagtgtcgtgtgaggcctcacagctggccttgagtttttactgacacgtccctgtgtgcgggggtgtccatgtggcgtgtgtgtgagtgagacttttttactgcgtcccgtcccgccagccctatcggcctcgtcactggccttggtcactttgtatttctgtcttggttggaaataccatcagccttccttgctcggcccaggtctgtttcaggcatctgagtcggcgtttacccaggggccgggccagagacgggggtcggccgctcgctcccacgctcctcctgccccagccctctggtgtccacacctgcccacagagaatgtaaacccagtgggctctgcccacgccgggccccaaagtgaccagactccagcacacctgtctcctcctgcctggggtggccatggggatggaagggggtggaataaaacctgtcaacctggaaaaa

SEQ ID NO: 78416 - DNA, 1477 bp, Homo Sapiens
ggtacggtccggaattccgggatatcgtcgaccacgcgtcgggccagttccttctgtccgggcaggaaggggtgctctggtgggcttggaggatgcaggcgccttcctggggactgctctgtgagcagtgataaaatatttatcagccagcagctgggcttccctgcatagggtgcagtcgggggcagctcccacccgagcctgcagcctgagttctgctgagtcatgggggagcccagtgagccgcctgccctcaagctcctgggccccctctgccctttggccatgtgaacgcctcctaatgtgtaagccattcggctgcccccaaggccaggcatccagtgtgcttagtgctgagcagggtttcagagctcacccccaggagggtgcagacctcagccaaggtcgcagagcagaggagacccgtgggctgggattccacctgtgcccaccctggcagcatcccacctcctgagtcctctcggcacccagaacagcatccacaacggggtgatcgccgtcttccagcgcaaggggctgcccgaccaggagctcttcagcctcaacgagggcgtccggcagctgttgaagacagagctggggtccttcttcacggagtacctgcagaaccagctgctgacaaaaggcatggtgatccttcgggacaagattcgcttctatgagggacagaagctgctggactcactggcagagacctgggacttcttcttcagtgacgtgctgcccatgctgcaggccatcttctacccggtgcagggcaaggagccatcggtgcgccagctggccctgctgcacttccggaatgccatcaccctcagtgtgaagctagaggatgcgctggcccgggcccatgcccgcgtgccccctgccatcgtgcagatgctgctggtgctgcagggggtacatgagtccaggggcgtgactgaggactacctgcgcctggagacgctggtccagaaaagtggtgtcgccatacctgggcacctacggcctccactccagcgcaggggcccttcacccattcctgcatcctggaaaagcgcctcctccgccgctcccgctttcgggggacgtgctggccaaaaaccccgtggtgcgctccaagagctacaacacgcctctgctgaaccccgtgcaggagcacgaggcggagggcgcggcggccggcggcaccagcatccgcaggcactctgtgtcggagatgacgtcctgccccgagcctcagggcttctccgacccgcccgccagggcccaaccggaccttcaggtcctccccggcgccccactcatggccctgccccagcagactgtaccccacacctgcccacagagaatgtaaacccccatgctctgcccacgccgggccccaaagtgaccagactccagcacacctgtctcctcctgcctggggtggccatggggatggaagggggtggaataaaacctgtcaacctgg

SEQ ID NO: 78417 - DNA, 2435 bp, Homo Sapiens
ttgagggtgtgggcagggcagggtgggctggtaggccatcagggccctcatgcagcccctgctcgggtgggtggccagttcccctgggtcctgcaggactacgtgtccccaaccctggacctcagcaacccagccgtcttccgggacctgtctaagcccatcggtgtggtgaaccccaagcatgcccagctcgtgagggagaagtatgaaagctttgaggacccagcagggaccattgacaagttccactatggcacccactactccaatgcagcaggcgtgatgcactacctcatccgcgtggagcccttcacctccctgcacgtccagctgcaaagtggccgctttgactgctccgaccggcagttccactcggtggcggcagcctggcaggcacgcctggagagccctgccgatgtgaaggagctcatcccggaattcttctactttcctgacttcctggagaaccagaacggttttgacctgggctgtctccagctgaccaacgagaaggtaggcgatgtggtgctacccccgtgggccagctctcctgaggacttcatccagcagcaccgccaggctctggagtcggagtatgtgtctgcacacctacacgagtggatcgacctcatctttggctacaagcagcgggggccagccgccgaggaggccctcaatgtcttctattactgcacctatgagggggctgtagacctggaccatgtgacagatgagcgggaacggaaggctctggagggcattatcagcaactttgggcagactccctgtcagctgctgaaggaagccacatccaactcggctctcagctgaggaagcagcccatcgccttgcacgcctggacactaactcacctagcatcttccagcacctggacgaactcaaggcattcttcgcagaggttgtcagtgatggtgtacccctggtgctagccctggtcccccaccggcagccccactccttcatcacccagggttccccagacctgttggtgactgtgagtgccagtgggctgctgggcacccacagctggttgccctatgaccgcaacataagcaactacttcagcttcagcaaagaccccaccatgggcagccacaagacgcagcgactgctgagtggcccgtgggtgccaggcagtggtgtgagtggacaagcactggcagtggccccggatggaaagctgctattcagcggtggccactgggatggcagcctgcgggtgactgcactaccccgtggcaagctgttgagccagctcagctgccaccttgatgtagtaacctgccttgcactggacacctgtggcatctacctcatctcaggctcccgggacaccacgtgcatggtgtggcggctcctgcatcagggtggtctgtcagtaggcctggcaccaaagcctgtgcaggtcctgtatgggcatggggctgcagtgagctgtgtggccatcagcactgaacttgacatggctgtgtctggatctgaggatggaactgtgatcatacacactgtacgccgcggacagtttgtagcggcactacggcctctgggtgccacattccctggacctattttccacctggcattggggtccgaaggccagattgtggtacagagctcagcgtgggaacgtcctggggcccaggtcacctactccttgcacctgtattcagtcaatgggaagttgcgggcttcactgcccctggcagagcagcctacagccctgacggtgacagaggactttgtgttgctgggcaccgcccagtgcgccctgcacatcctccaactaaacacactgctcccggccgcgcctcccttgcccatgaaggtggccatccgcagcgtggccgtgaccaaggagcgcagccacgtgctggtgggcctggaggatggcaagctcatcgtggtggtcgcggggcagccctctgaggtgcgcagcagccagttcgcgcggaagctgtggcggtcctcgcggcgcatctcccaggtgtcctcgggagagacggaatacaaccctactgaggcgcgctgaacctggccagtccggctgctcgggccccgcccccggcaggcctggcccgggaggccccgcccagaagtcggcgggaacaccccggggtgggcagcccagggggtgagcggggcccaccctgcccagctcagggattggcgggcgatgttaccccctcagggattggcgggcggaagtcccgcccctcgccggctgaggggccgccctgagggccagcactggcgtctgcggccgcagcagcactttttgcacagtctggggcggggttccccggcttccaagtcgctgtttcgtcaaagcacgagggccgcctgtggccttaattcctaacggcggccccggttctcccttctcggcaataaaccaggcctagttttgtaaaaaa

SEQ ID NO: 78418 - DNA, 995 bp, Homo Sapiens
  misc_feature (122)..(122): n is a, c, g, or t
  misc_feature (142)..(142): n is a, c, g, or t
  misc_feature (169)..(169): n is a, c, g, or t
  misc_feature (175)..(175): n is a, c, g, or t
gacatgtcccagtatccgttgatccgtgctccttgtgccaatccatcagagatgaatcatgttggcacagagtctgtttttgactattgtatggtagttactttcgtaacatcctgctcatnaaactcttaaccatgcgatntgaatctgatagttagtaataataggngccatntaaatcaaaatatgatactgtttctagggttgttcaccctgatttggcccggtctttccattgtccggttacccttttactgaaagtaaggacttaaaaggatggaagaaaaactacatggttggagtgtttttagatcagataaatatagaaaagtaaaatggaaaatgatactcaatacctagttaaactcatttcacttctcctgggagacgtattaagactggaagtcctattttatttaatcagtatcagtaaaaagacaaaaattacagtgtgaacaagagaaaaacaggaatagaagaaaaaagttgcaggttgaattatctatctggatattactagagttgtaaaacacaacttggaaactggaatttatgtgaagaaccaaacaacttaaaccagcatcacttttgtcttcaatttgccttccagtgattttagtttacaacctgcgttttgttatttgaaacacacacacttatatataaacacatgtaattttactattttattgtctttcctttaatcgatgaattgattaaatttagacaattaaaacatttctaaagtgagactgaaaataatatagaaaatctcattgctacttgtgattatcaaaaaaagtatgtattttctttctaaagttatctataaatatgtttttgatatgttggacatgaattaccctgtcatgaagcgtttaaattgttaaaatgctgattttcttattagtttgttaattgcctgttactagtacttgaccaatacattgtgctatatgtaaatgtgtaaataaatattgtaattttctcacaaa

SEQ ID NO: 78419 - DNA, 1623 bp, Homo Sapiens
tggctaggtatgaggctgggggtgaatcggccgaggcaatgctcccctctttgcaggagtcgatggatggagatgaaaaggaactagagagcagcgaagagggaggctcagccgaggagcggagactcgagccgccgtccagcagccactactgtctttacagctatcgcggaagcagataggcacagcaacgaggggacagtgaggacggaagcccaagtggcacaaatgcagaaactccctctggtgatgatttcagcctctccttggcagatactaatctaccatccgaagtggagccagagctgcgcagtttcattgctaagcgtctttcaagaggtgcagtctttgaagggctgggtaatgttgcatctgtggagctaaaaattccaggttaccgagttggttgttattactgccttttccaaaatgaaaaactgcttcctgaaacagtaacgatagactctgaacgtaacccttcagaatatgtggtctgttttttaggagggtctgaaaaaggacttgagcttttcaggcttgaattggacaagtacattcaagggctgaaaaataacatgaattgtgaggcaaggggcctggagagtcacataaaatcctatcctgagcagctggtttgaggatgttgtatgcccaatccaaagggttgttcttctctttcaggaaaagcttacctttctgctacatgctgctttgagttacactcctgttgaagttaaagaatcagatgaaaaaacaaagagagacattaacaggtttctgagtgtggccagtcttcaaggacttattcatgaaggcaccatgacttctttgtgcatggccatgacagaggagcagcataagtctgtggtcatcgattgcagcagctcccagcctcagttctgcaatgcaggaagtaaccggttttgtgaggattggatgcaagcttttttaaatggtgccaaaggaggtaacccttttcttttccgacaagtactggagaactttaaactaaaggccatacaagacacaaacaatttgaagagatttatccgacaggcagaaatgaatcattatgctttgtttaaatgttacatgttcctaaagaactgtggtagtggagatatacttttgaagattgttaaagtggaacatgaagaaatgcctgaagccaaaaatgtgatagctgtccttgaagaattcatgaaagaagctcttgaccaaagtttttgatcatatgttttgagataattgtatgatcaagttgtatatttaagtcttagtgtttgaaattgcagttataattgttcataggattgctatttaagatgatttgaaactcaatccagattttctttttgtattttaccaatttaacttaaataaaaatctgaagaacatcttcactgagtcctagatagataatgtatgtgagagttgtgaaattttagtgtctcactggccccataaattccacgcttcaggaagttgttgcttaaaaaatttcagagatgattttgtttgtggcttttctcaggaaaagcctgagtttgctgcagtatttagcaacttttcttctcagaaaaaccataatacttccttttcagtggactgtagcttcttaaa

SEQ ID NO: 78420 - DNA, 466 bp, Homo Sapiens
  misc_feature (54)..(89): n is a, c, g, or t
tttttatgacttatacttattttatttaaaaactttaaatacccaaattatgcnnnnnnnnnnnnnnnnnnnnnnnnnnnnnnnnnnnncagaatatgctcaaaaaccaaacagtctgagagagggttttaagccaaggtaaaatgactttaaaaccagtggcataaacactgtgctggctgtctcttcccgttcagaaggtatctgcccccgaagactccatgtcctcctgcattgtgctgagactcagagactgagagcagtcctcgaggttcactgacggcagcatcactgacatcttggcagggggcatctgtgaagcggagagtggcactgctttcccacctgaaaatacacatgtgaggtacggattaagctcaatttgtgtccgatccatatcacctggtgaaactacataaaaatttattttttcagaagaaaatcagttaagcatagaaataatcat

SEQ ID NO: 78421 - DNA, 629 bp, Homo Sapiens
  misc_feature (29)..(29): n is a, c, g, or t
gacattctaaagggacattctctctatangcagccacctgtcactaatacacagtctttggatcaacaatgtgatcttaaaccattatctcggcaatttgacacagtttcaggtagtatttatgaagattcatgtgctagtcatggtccaatgagtttgggagaattggagttggagccaaattctaagctggttcttcccacaacacttctgacagcacaagaaaatgatgttaatttaccagtagccgctgaagatttttcccagtaccaactaaagcaaaatcaggatgttaagcaagttgaacacaaaccatcacaaagttacctacgtgttagaaataaatctgatattgcaccttcacagcaacaaggtgggaaagcagtgccactctccgcttcacagatgccccctgccaagatgtcagtgatgctgccgtcagtgaacctcgaggactgctctcagtctctgagtctcagcacaatgcaggaggacatggagtcttcgggggcagataccttctgaacgggaagagacagccagcacagtgtttatgccactggttttaaagtcattttaccttggcttaaaaccctctctcagactgtttggtttttgagcatattctg

SEQ ID NO: 78422 - DNA, 706 bp, Homo Sapiens
  misc_feature (618)..(653): n is a, c, g, or t
aaaccataatctcggcaattgaccacagtttcaggtagtatttatgaagattcatgtgctagtcatggtccaatgagtttggagaattggagttgaagccaaattttaagctgggttcttcccacaacacttctgacagcacaagaaaatgatgttaatttaccagtagccgctgaagatttttcccagtaccaactaaagcaaaatcaggatgttaagcaagttgaacacaaaccatcacaaagttacctacgtgttagaaataaatctgatattgcaccttcacagcaacaagtttcaccaggtgatatggatcggacacaaattgagcttaatccgtacctcacatgtgtattttcaggtgggaaagcagtgccactctccgcttcacagatgccccctgccaagatgtcagtgatgctgccgtcagtgaacctcgaggactgctctcagtctctgagtctcagcacaatgcaggaggacatggagtcttcgggggcagataccttctgaacgggaagagacagccagcacagtgtttatgccactggttttaaagtcattttaccttggcttaaaaccctctctcagactgtttggtttttgagcatattctgnnnnnnnnnnnnnnnnnnnnnnnnnnnnnnnnnnnngcataatttgggtatttaaagtttttaaataaaataagtataagtcataaaaa

SEQ ID NO: 78423 - DNA, 1236 bp, Homo Sapiens
gggaaactttctggtgctgtcttttgttctctgaattttcagagactttttttataatgttattcatttggtgactgtgtaactttctcttaagattaattttctctttgtatgtctgttaccttgttaatagacttaatacatgcaacagaagtgacttctggagaaagctcatggctgtgtccactgcaattggtggtaacagtggtagagtcatgtttgcacttggcaaaaagaatcccaatgtttgacaaaacacagccaaggggatatttactgctctttattgcagaatgtgggtattgagtgtgatttgaatgatttttcattggcttagggcagattttcatgcaaaagttctcatatgagttagaggagaaaaagcttaatgattcggatatgtatccatcaggatccagtctgcaaaacagaaaccattctaggtgtttcaacagagggagtttaatacaggaaattgacttacatagatgataaaagagaagccaaacagcaagaagctgttacccacacccagggctatgaggataatgggaagaggtttggtttcctgtgtccagtagtgggatcatccagaggagctggaaccatggtgggggctgcctagtgggaattaggaccaccaatggattgtggaaaatggagccatgacaagaacaaagccactgactgagatggagtgagctgagacagataagagaataccttggtctcacctatcctgccctcacatcttccaccagcaccttactgcccaggcctatctggaagccacctcaccaaggaccttggaagagcaagggacagtgaggcaggagaagaacaagaaatggatgtaagcctggcccataatgtgaacataagtaatcactaatgctcaacaatttatccattcaatcatttattcattgggttgtcagatagtctatgtatgtgtaaaacaatctgttttggctttatgtgcaaaatctgttatagctttaaaatatatctggaactttttagattattccaagccttattttgagtaaatatttgttacttttagttctataagtgaggaagagtttatggcaaagatttttggcactttgttttcaagatggtgttatcttttgaattcttgataaatgactgtttttttctgcctaatagtaactggttaaaaaacaaatgttcatatttattgattaaaaatgtggttgcttaattcctaaa

SEQ ID NO: 78424 - DNA, 1228 bp, Homo Sapiens
aactctaacaatgtgagaaatgtagatcattgcaattatacccacaaggcagatggctacatgcagaatggatagcagaatctagctacttacgctagccacatggtagacgttttttcctttgtttttgcaaaattgcaatataagttgcatatcgttagagtgaaagatgtaaagaacccatagaagcagtgatgaaggacatttatattttcaacttacaaaagaccttaaaattgcctatgtggagcagaactgaggagggcaaacatcgtaaaaattttgttctatttgatttggcacatatactcacagtactttgttaacttcttaaaaatatctatttggaaaaacagtttataaatatgagaataatgtaatgattacccagaagcctacaaaatttcctttttattgttatctgtaaactgtttgcaaggtattttaatttcctgttggtcattaattattgctacaactgcatagttaatgtagttaatatttcaatattatctctaatgttgtctcacaggaaacatataactcagtctatcaccttcaatcaatccagatcacttgagaaagccattgtattagaaaaaattacatatattcaaaaaccaatgagaggcagatccctggtatatggtggatttgggcttttcagaaaaatttgcttcagtcaccaaccaaagaaattgttgccacgaataaacaaatgaagctataattctagttggagatttatttgaaaatggtaccacattaaatcccaggtacgaatccaagttttgagttctagaaggatcatggcatgcttatcctttttgttttcaccaaccctgagaggtagtctacattccaagattagaacataatgaagttagaagggctgcattctatgaggcagggagaattagacatggaattacagagcttttcattgcaatttccatgactgttatttatgtgaacttacacaaatctaaggatcactctgagccacagtttctttatcctattctgaaatctctttaaaggacttgagtccaagctctctcccacactgcaagaccccactgcaatggctcctatagctgctgccatggcctcctccaatcaagtcagccttactatcttaaaaaaagtaaataagggcagctaaacgccatggcaaatgtatacctatgtaacaaacctgcacgttctgcacatgtatcccagaact

SEQ ID NO: 78425 - DNA, 1495 bp, Homo Sapiens
  misc_feature (87)..(87): n is a, c, g, or t
  misc_feature (95)..(95): n is a, c, g, or t
  misc_feature (104)..(104): n is a, c, g, or t
  misc_feature (112)..(113): n is a, c, g, or t
  misc_feature (124)..(124): n is a, c, g, or t
  misc_feature (1047)..(1059): n is a, c, g, or t
  misc_feature (1416)..(1435): n is a, c, g, or t
aatcgccgagtgacacttctgtatactcaagcgatcgtatgacatgtatgatgattcacttatctgagtactgcatggacaaacttnttgctggnggtgagggntgagtgcnnctaaccctttntagattgttcaggtacccctcactaaaggcaccgaaggcttaaagtaggacaaccatggagccttcctgtggcaggagagacaacaaagcgctatatcctaaggtcaagagaagtgtcagcctcacctgatttttattagtaatgaggacttgcctcaactccctctttctggagtgaagcatccgaaggaatgcttgaagtacccctgggcttctcttaacatttaagcaagctgtttttatagcagctcttaataataaagcccaaatctcaagcggtgcttgaaggggagggaaagggggaaagcgggcaaccacttttccctagcttttccagaagcctgttaaaagcaaggtctccccacaagcaacttctctgccacatcgccaccccgtgccttttgatctagcacagacccttcacccctcacctcgatgcagccagtagcttggatccttgtgggcatgatccataatcggtttcaaggtaacgatggtgtcgaggtctttggtgggttgaactatgttagaaaaggccattaatttgcctgcaaattgttaacagaagggtattaaaaccacagctaagtagctctattataatacttatccagtgactaaaaccaacttaaaccagtaagtggagaaataacatgttcaagaactgtaatgctgggtgggaacatgtaacttgtagactggagaagataggcatttgagtggctgagagggcttttgggtgggaatgcaaaaattctctgctaagactttttcaggtgaacataacagacttggccaagctagcatcttagcggaagctgatctccaatgctcttcagtagggtcatgaaggtttttcttttcctgagaaaacaacacgtattgttttctcaggttttgctttttggcctttttctagcttnnnnnnnnnnnnngcaaaagatgctggtggttggcactcctggtttccaggacggggttcaaatccctgcggcgtctttgctttgactactaatctgtcttcaggactctttctgtatttctccttttctctgcaggtgctagttcttggagttttggggaggtgggaggtaacagcacaatatctttgaactatatacatccttgatgtataatttgtcaggagcttgacttgattgtatattcatatttacacgagaacctaatataactgccttgtctttttcaggtaatagcctgcagctggtgttttgagaagccctactgctgaaaacttaacaattttgtgtaataaaaatggagaagctctnnnnnnnnnnnnnnnnnnnngcctacagccgcggccgcaagcttattccctttagttgagggttaattttagcttggcac

SEQ ID NO: 78426 - DNA, 1225 bp, Homo Sapiens
  misc_feature (154)..(165): n is a, c, g, or t
gccattcaggattttgaattgcatatgagtgcttggctcttccttctgtctagtgagtgtatgagaccttgcagtgagtttatcagcatactcaaaatttttttcctggaatttggagggatgggaggagggggtggggcttacttgtgtagcnnnnnnnnnnnnacagacttcacagagaatgcagttgtcttgacttcaggtctgtctgttctgttggcaagtaaatgcagtactgttctgatcccgctgctattagaatgcattgtgaaacgactggagtatgattaaaagttgtgttccccaatgcttggagtagtgattgttgaaggaaaaaatccagctgagtgataaaggctgagtgttgaggaaatttctgcagttttaagcagtcgtatttgtgattgaagctgagtacattttgctggtgtatttttaggtaaaatgctttttgttcatttctggtggtgggaggggactgaagcctttagtcttttccagatgcaaccttaaaatcagtgacaagaaacattccaaacaagcaacagtcttcaagaaattaaactggcaagtggaaatgtttaaacagttcagtgatctttagtgcattgtttatgtgtgggtttctctctcccctcccttggtcttaattcttacatgcaggaacactcagcagacacacgtatgcgaagggccagagaagccagacccagtaagaaaaaatagcctatttactttaaataaaccaaacattccattttaaatgtggggattgggaaccactagttctttcagatggtattcttcagactatagaaggagcttccagttgaattcaccagtggacaaaatgaggaaaacaggtgaacaagctttttctgtatttacatacaaagtcagatcagttatgggacaatagtattgaatagatttcagctttatgctggagtaactggcatgtgagcaaactgtgttggcgtgggggtggaggggtgaggtgggcgctaagcctttttttaagatttttcaggtacccctcactaaaggcaccgaaggcttaaagtaggacaaccatggagccttcctgtggcaggagagacaacaaagcgctattatcctaaggtcaagagaagtgtcagctcacctgattttattagtcatgaggacttgcctcaatccctctttctggagtgaagcaatccgaaggaatgcttgaagtacccct

SEQ ID NO: 78427 - DNA, 520 bp, Homo Sapiens
ctgactgagaaaacatgtatggttttattagagaatgtttacttttagaaagctgtctccttatttaaataaaatagtgtttgtctgtagttcagtgttggggcaatcttgggggggattcttctctaatctttcagaaactttgtctgcgaacactctttaatggaccagatcaggatttgagcggaagaacgaatgtaactttaaggcaggaaagacaaattttattcttcataaagtgatgagcatataataattccaggcacatggcaatagaggccctctaaataaggaataaataacctcttagacaggtgggagattatgatcagagtaaaaggtaattacacattttatttccagaaagtcaggggtctataaattgacagtgattagagtaatactttttcacatttccaaagtttgcatgttaactttaaatgcttacaatcttagagtggtaggcaatgttttacactattgaccttatatagggaagggagggggtgcctgtggggtt

SEQ ID NO: 78428 - DNA, 508 bp, Homo Sapiens
agaccctgtctcaacaacaacgaaaagttgggagggaaagggagtagctccatgaactgacgctggacattcaggcatatccacatgagactcactgtgcacttgctcagtagctaagatgtctgccccacaaaatagaagccttcagttgctgctgctcaaactcctgcatcaaagacacaagagcttgcctaagtgaccacaacagttgcagccacacatcaccactggtcctcacttggaactggccaaggtaggggaggggccagcagctgtccaggcacctgcagaggctgctcagagctgggagaggcctgtgccactgctgtcagctacagagcctgatcttgagcatcctgtcgcagatagaaagtcaatcagaaaaatctggttgtgctcttggattagctgggcatttggggtaagggagggactgcagattctgatttgtacagaaaactaaaatttcagtatgttgcaataaaatgaaaatatgtcttaaaaaaaa

SEQ ID NO: 78429 - DNA, 730 bp, Homo Sapiens
  misc_feature (20)..(20): n is a, c, g, or t
  misc_feature (31)..(31): n is a, c, g, or t
  misc_feature (63)..(63): n is a, c, g, or t
gcacgagggcgctcctgttnttaaaacattntgaaaacccctggctgaacagtgctctgcctntaactccctcctcacactccagaatacccttcctcatctgtgcctgtctgtccaacccctcccccacgtctctctgcctgtctgggctattaactgttgctcgaagactgtgacatcagaagtaactcccactcctaatcaagagtctctccagcctcacagatgctggcctcttggcacctgcctagctcttgggcctgacctccagtcctgctggcatgctcttacttcccccaccctgggtttggcccctggaacctttccattgtgtgtaccacaccctgcctgctgtggagcccattgtggaggcggtggggggaagaaggcctcccctgaggatcccctgtcccctggggctggtggattgggcagaatcctgggcccccagagacctttgcccacacacactccttccccttgtccctggggcactcccccaggattgtgcaatagtcagagtgtccctttttgcaggggactgggccatgggtcctcggcccatctgtccatcctcctctccatgcaagtgctgtttgggcaggagtcaccatgcaagggtgacatcgacaaccacgtaccaagccaccgcagctgctgccactctgctgcctgtacagaagaaactgaatctttttcatattctaataaatcaatgtaaaatttaaaa

SEQ ID NO: 78430 - DNA, 487 bp, Homo Sapiens
  misc_feature (409)..(418): n is a, c, g, or t
tgaaccaccctgcccagccagaaactagattttctttatgcctccaccccttcttattcatttactttacaataccaaaataacaaattgcataggagtgtgggatgtggtttctgccttctagagagagatcagaattaaactagtactatgaaatgtccttttgaatgttaggtcaagaaatccatgtacagagtcgtgcacttcattggctgtaactgtcaaacttgccttgtattagaagttaaatcccatcgtaaatacatcacgaggccagctgtgtgatttctgagacctagatgagagtccatttacttcagcctttgattcagtaaatgttaagcagcagaagacttcgaatggttgaaattcattgttacaggatttaactcataaaccaatgagagannnnnnnnnnctctgcaatggttgctaagtctattccatgttaacactgtggaaataaatatgaagatgtggacattgc

SEQ ID NO: 78431 - DNA, 1120 bp, Homo Sapiens
  misc_feature (68)..(91): n is a, c, g, or t
  misc_feature (562)..(571): n is a, c, g, or t
  misc_feature (758)..(919): n is a, c, g, or t
  misc_feature (924)..(924): n is a, c, g, or t
  misc_feature (982)..(982): n is a, c, g, or t
  misc_feature (1033)..(1033): n is a, c, g, or t
  misc_feature (1052)..(1052): n is a, c, g, or t
  misc_feature (1104)..(1104): n is a, c, g, or t
gacgggcagtgccaagctaaaattaaccctcactaaaggaaataagcttgcggccgcggctgtaggcnnnnnnnnnnnnnnnnnnnnnnnngggttagattataatcatctgaagcacaggataaccgagaagcaaaattccattctggtacaaacacccaatttctagaaaagagaaaggaaaagaagaaatacgacgtgagcttttttgatcagaagactccatgaaatgagagcggtggtaatatgaatccacgtgatttttcaagtcttcctgttgtacagtcatcaaaatgaccaggtttgtgctgcaaaggagccagcaccatgtggctactgctttgattgttctcagatgaatgtttatacaaaataatatcttatcttcatttagtttataaacatacacagtgctgtccctttcaaattaaggaaaaaaaaccacacacacaaatactgcaaagtagcaaaatacaaaggaaaacaaagctacttttggttttggcaacattaaaaaagaaagaaatataaaaagcaatgcggcattggtccctattcattnnnnnnnnnngggtacttgggcacgacacaatcagaattagtttgttttctaaaattcagagtatctgggattttaaaagtagcactttttaaaaagttcaacaagtcacataacacttaaaacatcaaaaaagctttctgataaaaagctcagcttttaaatcacgttttgtttctgccctcgtgccgaattcttnnnnnnnnnnnnnnnnnnnnnnnnnnnnnnnnnnnnnnnnnnnnnnnnnnnnnnnnnnnnnnnnnnnnnnnnnnnnnnnnnnnnnnnnnnnnnnnnnnnnnnnnnnnnnnnnnnnnnnnnnnnnnnnnnnnnnnnnnnnnnnnnnnnnnnnnnnnnnnnnnntaatntgcgtgcgctaactgccgcttccagtcggaaactgtcgtgcagctgcataatgatcgngcacgccggtgagaggggtttgctatgggcgctctcgctcctcgtcatgantcctgcgtcggtcgtcggntgggaagcgtacagtcatcagggggtatacgtatcaagatcagggatagcangaaacatgtggcaagg

SEQ ID NO: 78432 - DNA, 3715 bp, Homo Sapiens
  misc_feature (2694)..(2712): n is a, c, g, or t
  misc_feature (3239)..(3249): n is a, c, g, or t
ctggtaccggtccggaattcccgggatatcgtcgaccccgcgtccggagcctcagagagggatgggttacatgcccaagaggggacttgatgttaacaaatgtgagattgccagattcttcaaacttcatgagagaaagtgtgaacctattattatgactgttcccaggaagtctgaccttttccaagatgacctgtatcctgacacagcggggccagaggccgcgctggaggcagaagagtggttcgaaggcaagaatgcagacccaatcctcatctccttgaagcacgggtacattccaggcaaaaacagggatctcaaggtggtcaagaagaacattctggatagcaagcccactgcaaacaagaagtgcgacctgatcagcatccccaagaaaaccacagacacggccagtgtgcaaaatgaagccaagttggatgagattttaaaagagatcaaatctataaaagacacaatctgcaatcaagatgagcgtatttccaagttagaacagcagatggcaaagatagcagcctgaaggtcccacccccacccctacagaaaaaatgggagcaagaacttgtgcttgggagctggttattggtgtggtcctagggagggcggaaagggaggcactgccatttggagacattccatttcagatttgtcaaccagcgataggccacattccagtaagaactcaatttgtctcccaaatttgcagaaacaaaacgtgatttaaaagctgagctttttatcagaaagcttttttgatgttttaagtgttatgtgacttgttgaactttttaaaaagtgctacttttaaaatcccagatactctgaattttagaaaacaaactaattctgattgtgtcgtgcccaagtaccctggtcttgtaatgaatagggaccaatgccacattgctttttatatttctttcttttttaatgttgccaaaaccaaaagtagctttgttttcctcttgtattgtgctactttgcagtatttgtgtgtgtggtcttttatttccttaatttgaaagggacagcactgtgtatgtttataaactaaatgaagataagatattattttgtataaacattcatctgagaacaactcaaagcagtagccacatggtgctggctcctttgcagcacaaacctggtcattttgatgactgtacaacaggaagacttgaaaaatcacgtggattcatattaccaccgctctcatttcatggagtcttctgatcaaaaaagctcacgtcgtatttcttcttttcctttctcttttctagaaattgggtgtttgtaccagaatggaatttgcttctcggttatcctgtgcttcagatgattagaagctaacccaaactagcatgtgtttctgcagtttgttacacaccttaggatcatattgcattcatcactttaaacagcatgtttcaggttttgggcaatacttgacaagggtgcccaggacaggaagacgtgtactgctgagtggtccttcttgcccttttcagcagcttgcccagctcttgagtacagtggtggggactaaaaatgtgggcatgtggagaggggtattgccctgggtgatcctgtttccctgtgctgtccccatgctgtgttggaggaggaagtggctctccttccaccaacaaagctcctgctctaccctcttcctcacatgtgctgcgacctctctcagggctcccccagccattccttctttccttcctgccttttagctctaaccacattaagctaagacaaggccagagggtgcgattgaatgagtattgagactgaggagaatgatagagagtgaagcagaaacaggagcacagacctctgctgtagctttaatgcatacaaacatgtccctccgcacaactaacctgccctgcctctccatctctcaccaaggctgcgtcaaagcacagaggctccccggactcggagggggccagagactgagctctggtcacctgttcattcctcggttagctggaactttgccccgtttccagtttctaatagtgcatgcttgggaaacaagatttaaggagcctctgttttggaagggctgtctgtgattgaacgtgaaatgtgtagtgccattgggaccacgaagggaattcttgcacatgctcgtgctggtgtgggcatgggactggctggaaacgtctgtatgcagggagccagggtgagggcagagtgtggtgacagccgaacttggagtaatgtccgtgtagaaaaaggaccatgttcttatccagccaatactgggagtgctgtctccacaatttcagggcatctgaatgtttgatgtggttttgtgtgtgtgtatgtatgtgtttaatattgaagtggatcatgagatgtaaagaaaacaataatggcaatgacttatattcaaatctgtatttgtttctttatcaatgtaatctgctgaggaccttttgtctaagattcagtagtgttttaaggttctgatatcgaattaatgaagtaaagttgttgatggtggtgaaacaccgtagggcatgtggttcaaagagaagcaggagggcaagggaaagttaccctgatcttagtttgtagcttatgacttatttaatgaatggatgcccagccaagctcagagtaggcgcccaaagcattgtggattattttcctgttttgtcnnnnnnnnnnnnnnnnnnnaagccatgacatcccagaagaggacagtgaattactcctaggtcggctcttatagagtggccatagtgttctgtcaaaacacttgcttccattttcagagataaaaatcattgattacaaaaaaacaaacaccaagacaacaaagcagacccgtcatcactcggcggacgcctccgaatcacaccgcgacccacccgaacaaccacgtagcgcgatcctcaaaataagaattcttttgtggcgccccctcccccctcaaaaaaattttcttaaaacaattttttttggcgcccgcggcccccaaaagggaagcggaaactgggcccaaaactgttctccaaagaagaacctgggccaagacacaaggacgttggtattccccaccaaataaaaaaaccccccccggggggcaaacacgaggttttcttaaaaaaaatccccagagggggttctggtggggccctttccgggggattcttcccacggggggcccccaggcgaagccctttaatactaaatttaagcgnnnnnnnnnnngtgggccccttattgggaggaaaggggtggaaaaatttcctttaaaacatttttcggccgcaaagtggggaaacccctctcacacaatggctgcgtggtgagacccctcgaaatccccgccggtgcggtttctccaacccccctttggcgcgccttgtgtggaatataaaatatattcgcccccggggggaacaaaacgcggggggaaaaaacaaaattttctcccctttttgcgccgcgccgctttcaaaaccaaccatcgggtggggaactaccccaccccattgatatctgttttctcacatacaaaacaccacttttctcttctcactaacacccctttttggggggaaatattgggggcctggtgtatttcgtcatcgcacaaacccacaaccctattgtgtgtggcatatcattttgtgcgggagaataatgcgctgagcgagaagacatcctccacggg

SEQ ID NO: 78433 - DNA, 1191 bp, Homo Sapiens
  misc_feature (47)..(47): n is a, c, g, or t
  misc_feature (84)..(183): n is a, c, g, or t
  misc_feature (213)..(213): n is a, c, g, or t
  misc_feature (216)..(216): n is a, c, g, or t
  misc_feature (225)..(226): n is a, c, g, or t
  misc_feature (234)..(235): n is a, c, g, or t
ccttcccgcggtgcagatcatatgcactgcagacagttccgactgangcgcagtggcgcacgcaatatgtgagtagctcatcannnnnnnnnnnnnnnnnnnnnnnnnnnnnnnnnnnnnnnnnnnnnnnnnnnnnnnnnnnnnnnnnnnnnnnnnnnnnnnnnnnnnnnnnnnnnnnnnnnnatttataccgactcactataggaaatttgnccntcgagccanngaatcgcnnacgagggaaaaaatcaaaaagagccctctcactatatgctatccagaatatgcaggatcaaacacatatgaagaggcagctgcatatattcaatgtcagtttgaagacctcaataaaagaaaggacacaaaggaaatatacacccacttcacatgtgccacagatactaagaatgtgcagtttgtttttgatgctgtaacagatgtcatcataaaaaataatctaaaagattgtggtctcttttaagttttgcagttcatggtaaaatgcattttcaaaccaaatgagtacttatatatggatctctgtagactagagtcttgcagcaacacagaatgtaatataaggcaaatgcatctgggacttgaccaaagttgttctgttttgtttttttaactgaaagtaacagaaggacctttcttaaatgtgacagatggtcctgcagtgtgaaactgaaggacagtgttaaagctgggctctagtatattgatgatttctgcataagtgtaaatatgcaaatgtatgtatacatgtatttatgactttagttttcgacattatttttaggttttaagagtggcaacttaggattttagggtgatggctttggaaataacataaatataccttgtactgaatgacagactattactacgtttgccagttttaaacagctttatttatgttcatgtcctgtaaatttttaagtacagtaattaatattaggaaacattacagcccttatctagattatatgtatacttgtattaataaaaatgttatttgtacaaacattgcacagactattttaataacatgatttgttctttaaattttatgtgttttattgaaatgttcttaagatgaatacacctgcctttggatcaactatttaaacattgtatgcattttgatttttcctactttaagaaaataaaataatttaattttaaaaa

SEQ ID NO: 78434 - DNA, 1273 bp, Homo Sapiens
gaggagtgcgattcccgtgcctggtacgcaggcctcttcttcttcactctcctcttctacttgctgtcgatcgcggccgtggcgctgatgttcatgtactacactgagcccagcggctgccacgagggcaaggtcttcatcagcctcaacctcaccttctgtgtctgcgtgtccatcgctgctgtcctgcccaaggtccaggacgcccagcccaactcgggtctgctgcaggcctcggtcatcaccctctacaccatgtttgtcacctggtcagccctatccagtatccctgaacagaaatgcaacccccatttgccaacccagctgggcaacgagacagttgtggcaggccccgagggctatgagacccagtggtgggatgccccgagcattgtgggcctcatcatcttcctcctgtgcaccctcttcatcagtctgcgctcctcagaccaccggcaggtgaacagcctgatgcagaccgaggagtgcccacctatgctagacgccacacagcagcagcagcagcaggtggcagcctgtgagggccgggcctttgacaacgagcaggacggcgtcacctacagctactccttcttccacttctgcctggtgctggcctcactgcacgtcatgatgacgctcaccaactggtacaagcccggtgagacccggaagatgatcagcacgtggaccgccgtgtgggtgaagatctgtgccagctgggcagggctgctcctctacctgtggaccctggtagccccactcctcctgcgcaaccgcgacttcagctgaggcagcctcacagcctgccatctggtgcctcctgccacctggtgcctctcggctcggtgacagccaacctgccccctccccacaccaatcagccaggctgagcccccacccctgccccagctccaggacctgcccctgagccgggccttctagtcgtagtgccttcagggtccgaggagcatcaggctcctgcagagccccatccccccgccacacccacacggtggagctgcctcttccttcccctcctccctgttgcccatactcagcatctcggatgaaagggctcccttgtcctcaggctccacgggagcggggctgctggagagagcggggaactcccaccacagtggggcatccggcactgaagccctggtgttcctggtcacgtcccccaggggaccctgcccccttcctggacttcgtgccttactgagtctctaagactttttctaataaacaagccagtgcgtgtaccatg

SEQ ID NO: 78435 - DNA, 736 bp, Homo Sapiens
gaagagacagagctactctggccccatgcaggaggttcaaatctgggagtaaaggctgatgggctggccaggacaccaagaaatgaagctctttatccatgtcctcacttcatctcctcagtagtcccctcagatagctggggtaaaaaaacttatctttattttacagatgagaagcatgaggctgagagaggaggagtcacccggacccagccacacagcgtcctgcctctgcggctctgccccctgcatcctgtgcagctgctgccccgccagccgcaactccaccgtgagccgcctcatcttcacgttcttcctcttcctgggggtgctggtgtccatcattatgctgagcccgggcgtggagagtcagctctacaagctgccctgggtgtgtgaggagggggccgggatccccaccgtcctgcagggccacatcgactgtggctccctgcttggctaccgcgctgtctaccgcatgtgcttcgccacggcggccttcttcttctttttcaccctgctcatgctctgcgtgagcagcagccgggacccccgggctgccatccagaatgggttttggttctttaagttcctgatcctggtgggcctcaccgtgggtgccttctacatccctgacggctccttcaccaacatctggttctacttcggcgtcgtgggctccttcctcttcatcctcatccagctggtgctgctcatcgactttgcgcactcctgg

SEQ ID NO: 78436 - DNA, 1017 bp, Homo Sapiens
aaggtagcgaggcctgggtggcgaattcggcacgagggcgccccgcgcccggcgccgggcgcccgaagccgggagccgccgccatgggggcctgcctgggagcctgctccctgctcagctgcgcgtcctgcctctgcggctctgccccctgcatcctgtgcagctgctgccccgccagccgcaactccaccgtgagccgcctcatcttcacgttcttcctcttcctgggggtgctggtgtccatcattatgctgagcccgggcgtggagagtcagctctacaagctgccctgggtgtgtgaggagggggccgggatccccaccgtcctgcagggccacatcgactgtggctccctgcttggctaccgcgctgtctaccgcatgtgcttcgccacggcggccttcttcttctttttcaccctgctcatgctctgcgtgagcagcagccgggacccccgggctgccatccagaatgggttttggttctttaagttcctgatcctggtgggcctcaccgtgggtgccttctacattcctgacggctccttcaccaacatctggttctacttcggcgtcgtgggctccttcctcttcatcctcatccagctggtgctgctcatcgactttgcgcactcctggaaccagcggtggctgggcaaggccgaggagtgcgattcccgtgcctggtacgcaggcctcttcttcttcactctcctcttctacttgctgtcgatcgcggccgtggcgctgatgttcatgtactacactgagcccagcggctgccacgagggcaaaggtcttcatcagcctcaacctcaccttctgggtctgcgtgtccatcgctgctgtcctgcccaaggtccagggacgcccagccccaactccgggtctgcctgcaagccctccggtcatcacccctctacaaccatggtttggccccctggttcagcccctatcccggtatcccctgaaacagaaaattggcaacccccaattttggccaaaccccaagcttggg

SEQ ID NO: 78437 - DNA, 1432 bp, Homo Sapiens
  misc_feature (1291)..(1291): n is a, c, g, or t
cgcgagccgccgccatgggggcctgcctgggagcctgctccctgctcagctgcgcgtcctgcctctgcggctctgccccctgcatcctgtgcagctgctgccccgccagccgcaactccaccgtgagccgcctcatcttcacgttcttcctcttcctgggggtgctggtgtccatcattatgctgagcccgggcgtggagagtcagctctacaagctgccctgggtgtgtgaggagggggccgggatccccaccgtcctgcagggccacatcgactgtggctccctgcttggctaccgcgctgtctaccgcatgtgcttcgccacggcggccttcttcttctttttcaccctgctcatgctctgcgtgagcagcagccgggacccccgggctgccatccagaatgggttttggttctttaagttcctgatcctggtgggcctcaccgtgggtgccttctacatccctgacggctccttcaccaacatctggttctacttcggcgtcgtgggctccttcctcttcatcctcatccagctggtgctgctcatcgactttgcgcactcctggaaccagcggtggctgggcaaggccgaggagtgcgattcccgtgcctggtacgcaggcctcttcttcttcactctcctcttctacttgctgtcgatcgcggccgtggcgctgatgttcatgtactacactgagcccagcggctgccacgagggcaaggtcttcatcagcctcaacctcaccttctgtgtctgcgtgtccatcgctgctgtcctgcccaaggtccaggacgcccagcccaactcgggtctgctgcaggcctcggtcatcaccctctacaccatgtttgtcacctggtcagccctatccagtatccctgaacagaaatgcaacccccatttgccaacccagctgggcaacgagacagttgtggcaggccccgagggctatgagacccagtggtgggatgccccgagcattgtgggcctcatcatcttcctcctgtgcaccctcttcatcagtctgcgctcctcagaccaccggcaggtgaacagcctgatgcagaccgaggagtgcccacctatgctagacgccacacagcagcagcagcagcaggtggcagcctgtgagggccgggcctttgacaacgagcaggacggcgtcacctacagctactccttcttccacttctgcctggtgctggcctcactgcacgtcatgatgacgctcaccaactggtacaagcccggtgaagacccgggaagatgatcagcacgtgggaccgnccggggtgggtgaaaaatctgtgcccaagctgggcaaggcctgccccctctacctgggggaccctggtaacccccactccctcctggcgcaacccgcgaacttcagctgaaggaagccttacaagcctgccaatctggggg

SEQ ID NO: 78438 - DNA, 827 bp, Homo Sapiens
cctctgccacaaaagacctttaatggcctcctatttattgttcttttgttcatttgttagagttgaatgaactataataacttgtctgacataataagaatgccacaggtataacagataaacctggcaggtggtccaggaatgagagtgtcacaaaataatcactcaacacaagggccacagacctggagattcttcccagccatccctcactcctgccccaggacacaacccatgcaggcccccattccataggaagaggcaggtcccacagtgtctgtggctagaccttaacactgagcagagatgcccgggaagatggcacttcctatgctcgttcccaagtgctctgctcatctgccatgcaggtcaggaccataccccgagtttgtgaggcacccacctctcatactcaccacctcatatgaccacctatcatacccacctctcctatgacccttgcaattgtcccagtgaggtgggaagagcctggactagccccattttgcacacagggggtgggagtgggggacagggcaggcagggttttgtgccaagggctggtccagttctcactaaagtgtccaggattcctgggggaatcctgccctcaaaggagggacttttgtcataaaatcctccctgagtctgtcttttatgtgagccaagatttcatccatccggcgctgtgtaaagatgaatttaccctagctctctcctatcacactgcttctcctgctgtgtcccttgggcctaggccaggaaagtggggtgccagataggggtgcagacacaagtcctcagtgggggattgagcctgcttcccc

SEQ ID NO: 78439 - DNA, 377 bp, Homo Sapiens
agccacaaaagacctttaatggcctcctatttattgttcttttgttcatttgttagagttgaatgaactataataacttgtctgacataataagaatgccacaggtataacagataaacctggcaggtggtccaggaatgagagtgtcacaaaataatcactcaacacaagggccacagacctggagattcttcccagccatccctcactcctgcctaagtgagaagcagggcaagcgatgaagactggtggggaagaagtctgcaggaaagaggtcatcccaaacactaaaggatcttgtgtcagccccaaaggtttcagaagacactggagggcatatgtttgccatgcattgctccagcatttcatcagctctg

SEQ ID NO: 78440 - DNA, 1287 bp, Homo Sapiens
  misc_feature (1207)..(1207): n is a, c, g, or t
gcggccgccgagggccccgatgtgctgcagggcctctaccaggcgccgctgtccatggacgtccatatgctcgtggccgagcacgtgaaggcggccggcgccatctccgcggagctggaggccaccaccctgcgaatctgcacgcgggcgctcggcctcttcgtgcccaggtttgaaaaggcttttctggcgtcggaggcggtgagcgagccgcacctgggcgcctacatcaacgcctgcgaggagctcaggaccagtcttctctccaggttcccaggaacccaagaggagctggagaagcccctggtgacggccacctgcagcttccagaagcacttgcttcagggcttgcagcgtgagttgcagccgctcttcagggttgtgtgcaccagggactggctgacgcaggactggctgcatcccctcatggacaaggtggtgaccttcgccggtcatctccagcgtgtggcccggccgcgggcacagggagactctgcaggaggtgcaccggttcgtggtccgcgagtacctggcgcgggcgctgaggccacgggagcggttccggggcatggagcgcatgcatggctcccagaagatgagcctggatgcccaggccatcagcgacaccttccagggcctgggttccgaggccacatggttggaccaagccatccagtgcgtggctgagatcctgggcgagacctacaaagatgacatccagcggcacctggagactcttatccggagctaccccgacatcaggcgggaccacatactggccattctggcgctgcgccgactgggccgccggcggaaccagcatctcttgcagcacactcaagacctgctgagagctgcggccggggcggcgggtgcggaggcccctcggggccgcgtgctcttcgaggagatcaaggtgcccagtgccatggctgtgctgatcacctgcgtctagttctctctggctcgagggggggccggccgctggcagggagctgtggtcagtgggggtcagccaggagcccagggagtcactctgggccctgcccccaactctgacactgcagttagggaatttttgtcgtcagcagccaagcgcagctgtcaggccagaaggagcagccgtgcaggaggcatttcaggcatcgttgaggggagtgttttggggccgcagagctctcaatgctgcctatcgggcggggggggncctcccgcccgactgtccagcttcaccctccagtctgaaagtgaagagcagagtatttatttaaaaaataaatgtgaatt

SEQ ID NO: 78441 - DNA, 1353 bp, Homo Sapiens
gagccaaagcaatgtcaagtttgtccaggatacatccaagttctggtacaagccacacctgtcccgtgaccaagccattgccctgctgaaggacaaggaccctggggccttcctgatcagggacagtcattcattccaaggagcttatgggctggccctcaaggtggccacaccgccacccagtgcccagccctggaaaggggaccccgtggaacagctggtccgccatttcctcatcgagactgggcccaaaggggtgaagatcaagggctgccccagtgagccctactttggcagcctgtccgccttggtctcccagcactccatctcccccatctccctgccctgctgcctgcgcattcccagcaaagatcctctggaagagaccccagaggctccagtgcccaccaacatgagcacagcggcagacctcctgcgtcagggtgctgcctgcagcgtgctctacttgacctcagtggagacagagtcactgacgggcccccaagctgtggcccgggccagctctgcagctctgagctgtagcccccgcccgacaccagctgttgtccacttcaaggtgtcagcccagggcattacactgacggacaaccaaaggaagctcttctttcgccgccattatccagtgaacagcatcaccttctccagcactgaccctcaagaccggagatggaccaacccagacgggaccacctccaagatctttggtttcgtggccaagaagccgggaagcccctgggagaatgtgtgtcacctctttgcagagcttgacccagatcagcctgctggcgccattgtcaccttcatcaccaaagttctactgggccagagaaaatgaaggaaggccacaagctcagagcccacatcaacactgcccccctcccagcaccccacagccctcacatcccctggcctggacccaggagacccaggagaaagcaccctcccttaggaatgaggagtgggcatcaggcctgggacactgctctccttccccgcccccagcctgctaagttaagtggacaggcccacaagatgaccttgcatgtgagcagatggcagagatgggtgtgtgaggggtgaggaggcatcagcagttgagccccgaaggagatcaggcagccccacctgcaggagaacgtcagccctccaggggatcagcccctgccagttccacccagctgcaggtgccagcacggcagggatgggagaggggtggggagcgagtcactgcctcctctgagcagagattcagagtaggatcacatgaataggggaaaaaagagagtctatttttgtctaataataaagaatttctataaactttaaaaaaaa

SEQ ID NO: 78442 - DNA, 1798 bp, Homo Sapiens
gagtatgaagtcgacggcgcgccgaattcggcacgagggctaccgggaggtggtcatcctggaggaccctgggctgcctgccctatacccatgcccagcctgcgaggagaagctggcgctgcctacagcagccttgtatggactgcggctggagagggaggctggagaagggtgggcaagtgaggctggcaagcctctcctgcacccagtgcggcctgggcacccgctgcctctgctcttgcctgcctgtgggcatcaccatgccccgatgcctgactacagctgcctgaagccacccaaggcaggcgaggaagggcacgagggctgctcctacaccatgtgccccgaaggcaggtatgggcatccagggtaccctgccctggtgacatacagctatggaggagcagttcccagttactgcccagcatatggccgtgtgcctcatagctgtggctctccaggagagggcagagggtatcccagccctggtgcccactccccacgggctggctccatttccccgggcagcccgccctatccacaatctaggaagctgagctacgagatccctacggaggagggaggggacaggtacccattgcctgggcacctggcctcagcaggacctttggcatctgcagagtcgctggagccggtgtcctggagggagggccccagtgggcacagcacactgcctcggtctccccgagatgccccatgcagtgcttcgtcagagttgtctggtccctccacgcccctgcacaccagcagtccagtccagggcaaggaaagcacccggcgacaggacaccaggtcccccacctcagcgcccactcagagactgagtcctggcgaggccttgccccctgtttcccaggcaggcaccggaaaggcccctgagctgccgtcgggaagtgggcctgagcctctggcccctagcccagtctctccgaccttccctcccagctcgcccagtgactggcctcaggaaaggagtccaagggggccactcagatggcgccagtcctcggagccctgtgcccaccacacttcctggcctccgccacgccccctggcaaggccctcgaggcccccccgacagcccagatgggtctcccctcactcctgtgccttcccaggatgccctggcttgtggccagcccagagccgcctcagagctcacctacacctgctttccccctggctgcctcctatgacaccaatggccttagccagcccccacttcctgagaaacgccacctgcccgggccggggcaacagccaggaccctggggcccagagcaggcatcatcgccagccagaggcatcagtcaccatgtcaccttcgcacctctgctctcagataatgtcccccaaaccccagagcctcctacacaagagagccaaagcaatgtcaagtttgtccaggatacatccaagttctggtacaagccacacctgtcccgtgaccaagccattgccctgctgaaggacaaggaccctggggccttcctgatcagggacagtcattcattccaaggagcttatgggctggccctcaaggtggccacaccgccacccagtgcccagccctggaaaggggaccccgtggaacagctggtccgccatttcctcatcgagactgggcccaaaggggtgaagatcaagggctgccccagtgagccctactttggcagcctgtccgccttggtctcccagcactcccctcgtgccgaaatcgccacccaggcctcgctacttagtactttggcgggccctaagttgatataattaaata

SEQ ID NO: 78443 - DNA, 665 bp, Homo Sapiens
gggagtacggaatccagaacatcttgctcttgatcagcacatccaaaaacaccaagacaaacatccagtggagcagaacctctcctgcctcgggagttctgaccaggttccccagcagggtgttaagcctctgtctctggccctaccagcatccaggttccactttcctaggagagagtggagatgggaagacagggaaaggaaggcagcaggaggccacaagcccaccaggtcttcatgtcaagagagggagtaacatgtcttctcattgcccacggacccaacctctgtccaggtgcccctcatcatcacagtttaacacaagctcccctgctccagccaaattgatctcccagtcttgtccttacccattccaagtgctctgccagcccctgttcatccaagttttaagtcctccaccctgttctaagagactgttccaacggctctgggcctcagtggtcacttgaccaccattgtctcagagctgcccactttgtgtgtgtcacatgctgcctgagtcacatgtacatcttatttctgcctctagttttgtaagctcctggagggcggataacatcttatactactcttgtattctcatggcacctagtgcagtgctgggcacagagtaggtgctcaataaagacttgttgaatgaaaaa

SEQ ID NO: 78444 - DNA, 1037 bp, Homo Sapiens
tggatacatgtgctgcccttttgttctggacaaagatggagtcagtgccgctgtcataagtgcagagttggctagcttcctagcaaccaagaatttgtctttgtctcagcaactaaaggccatttatgtggagtatggctaccatattactaaagcttcctattttatctgccatgatcaagaaaccattaagaaattatttgaaaacctcagaaactacgatggaaaaaataattatccaaaagcttgtggcaaatttgaaatttctgccattagggaccttacaactggctatgatgatagccaacctgataaaaaagctgttcttcccactagtaaaagcagccaaatgatcaccttcacctttgctaatggaggcgtggccaccatgcgcaccagtgggacagagcccaaaatcaagtactatgcagagctgtgtgccccacctgggaacagtgatcctgagcagctgaagaaggaactgaatgaactggtcagtgctattgaagaacattttttccagccacagaagtacaatctgcagccaaaagcagactaaaatagtccagccttgggtatacttgcatttacctacaattaagctgggtttaacttgttaagcaatatttttaagggccaaatgattcaaaacatcacaggtatttatgtgttttacaaagacctacattcctcattgtttcatgtttgacctttaaggtgaaaaaagaaaatggccaaacccaacaaactaacattcctactaaaaagttgagcttggacatattttgaatttttgtaagtgaagatttttaaactgactaacttaaaaaaatagattgtaattgatgtgccttaatttgcataaatcataaatgtatgtcctctctgtaattgttttaatgtgtgcttgaaatatccagaaaacctatggagttagtaaattctgggctgtcatatgtaggatagccactttttaggtatatgtacatttatatttctatcaattccttagaaagtaaaataaatgaatagatcaa

SEQ ID NO: 78445 - DNA, 884 bp, Homo Sapiens
aacatctccaggttcctgctgcacagcctgcccaaggacaccccctcgggcatctctaaagtgaaaatactcttcaccttggccaagcagagcaaggccctcggtgcctacaggctggcccggcacgcctatgacaagctgcgtggcctgtacatccctgccagattccaaaagtccattgagctgggtaccctgaccatccgcgccaagcccttccacgacagtgaggagttggtgcccttgtgctaccgctgctccaccaacaacccgctgctcaacaacctgggcaacgtctgcatcaactgccgccagcccttcatcttctccgcctcttcctacgacgtgctacacctggttgagttctacctggaggaagggatcactgatgaagaagccatctccctcatcgacctggaggtgctgagacccaagcgggatgacagacagctagagattgcaaacaacagctcccagattctgcggctagtggagaccaaggactccatcggagatgaggacccgttcacagctaagctgagctttgagcaaggtggctcagagttcgtgccagtggtggtgagccggctggtgctgcgctccatgagccgccgggatgtcctcatcaagcgatggcccccacccctgaggtggcaatacttccgctcactgctgcctgacgcctccattaccatgtgcccctcctgcttccagatgttccattctgaggactatgagttgctggtgcttcagcatggctgctgcccctactgccgcaggtgcaaggatgaccctggcccatgaccagcatcctggggacggcctgcaccctctgcccgccttggggtctgctgggctgtgaaggagaataaagagttaaactgtcc

SEQ ID NO: 78446 - DNA, 1340 bp, Homo Sapiens
tgcggccgcgtcaagccgggggggcgctggcgcgaggccgcctggcaactctgcgactactacctgccctacgcgctgggcggcggctacgtgctctcggccgacctggtgcactacctgcgcctcagccgcgactacctgcgcgcctggcacagcgaggacgtgtctctgggcgcctggctggcgccggtggacgtccagcgggagcacgacccgcgcttcgacaccgaataccggtcccgcggctgcagcaaccagtacctggtgacgcacaagcagagcctggaggacatgctggagaagcacgcgacgctggcgcgcgagggccgcctgtgcaagcgcgaggtgcagctgcgcctgtcctacgtgtacgactggtccgcgccgccctcgcagtgctgccagagaagggagggcatcccctgagccgccgcggcccggccctccgggacacctgcttcacccggcggcgccttggggcaggtgccgagcgggcgcactacgcccgggccccaaggcccccgtcccgcagccacgcttgtggtcgctgcgtcccggtctgcgtttgggagacccctgggggttgccggggcagcgcgccgtgtccaggtggaggtgcccgttcctggacctcagcgagcttgagccgggcccggccgcacgctgacccccgtgctgtccccgaccggctcacggggctgggctccgatcttccgtgtctcttatcagtggcgtttctcacgtctgcgtctcagatctaacgtggtttcacatcaatccgctttcatgggattttggtctctgtccagtgacttcgtggtaaatgtaactcagtgtttgcttgcgacttatttataaatattgtaagtttgtgtcgatgagtgtaagttggcagtgcccacgtctcggtttttttacatgatttaaggaaagacttttatgtcagaacttggtgcctgtaccgtcaaccccgcctgctgcccgtgtttaaacgcaggagaaactttaaaactggccatctattcttttcagggtacaagtcactgaacccattgtttctttctgaagagactttcctttcaaggcttcccatgggtccgcgccacacagggccggtgctgctttatttcagactctgccccaggttccaggaatccgaaccccggagtgctgacgcggttccccaacttccgccttaagaaaacaggaccagccggcaccaggcccgtctctcacgtactttaacacatccttgaaagcccctcgtttaatgagaaaagcgaacactgcggtccttgccaaagtaaaatgaagctgccccaggacaaggggttaccatg

SEQ ID NO: 78447 - DNA, 1014 bp, Homo Sapiens
gggggcaatcgttacgacctgtaacttgagggccaccgaactgctactcccgttcgcctttggcgatcatcttttaaccctccggagcacgtcagcatccagccaccgcggcgctctcccagcagcggaggacccaggactatcccttcggcgagacggatggaaaccgagccccctggaggacctgcccctgcagttctgcctcacacggctcaagtcaccaccgtgaacaagggaccctaaagaatggccgagccttgggggaacgagttggcgtccgcagctgccaggggggacctagagcaacttactagtttgttgcaaaataatgtaaacgtcaatgcacaaaatggatttggaaggactgcgctgcaggttatgaaacttggaaatcccgagattgccaggagactgctacttagaggtgctaatcccgatttgaaagaccgaactggtttcgctgtcattcatgatgcggccagagcaggtttcctggacactttacagactttgctggagtttcaagctgatgttaacatcgaggataatgaagggaacctgcccttgcacttggctgccaaagaaggccacctccgggtggtggagttcctggtgaagcacacggccagcaatgttggggcatcggaaccataagggggacaccgcctgtgatttgggccaggctctatgggaaggaatgaaggttgttagcctgatgcaggcaaacggggcttgggggagccacaaattcttcaataaacgtgggggagggctcccccacgttgcctctactttatcaattaaactgagtagctcctcctgacttttaagggcatttgttaaaatacagttctgtcatatgttaagcagctaaattttctgaaactgcataagtgaaaatcttacaacagggcttatgaatatatttaagcaacatcttttttaacctgcaaaatctggttctaacatggtaattgcaggataactttgacttttcctcgtgaatattttata

SEQ ID NO: 78448 - DNA, 998 bp, Homo Sapiens
gggagattaaccatcccagtccttctgtcagtctccgatgccatcatgcagcctggttaggagcaaaggaaaggggaaaaagaaaaacgactaattcatcttttcctgatcgtcaggaccctaaagaatggccgagccttgggggaacgagttggcgtccgcagctgccaggggggacctagagcaacttactagtttgttgcaaaataatgtaaacgtcaatgcacaaaatggatttggaaggactgcgctgcaggttatgaaacttggaaatcccgagattgccaggagactgctacttagaggtgctaatcccgatttgaaagaccgaactggtttcgctgtcattcatgatgcggccagagcaggtttcctggacactttacagactttgctggagtttcaagctgatgttaacatcgaggataatgaagggaacctgcccttgcacttggctgccaaagaaggccacctccgggtggtggagttcctggtgaagcacacggccagcaatgtggggcatcggaaccataagggggacaccgcctgtgatttggccaggctctatgggaggaatgaggttgttagcctgatgcaggcaaacggggctgggggagccacaaatcttcaataaacgtgggggagggctcccccacgttgcctctactttatcaattaactgagtagctctcctgacttttaatgtcatttgttaaaatacagttctgtcatatgttaagcagctaaattttctgaaactgcataagtgaaaatcttacaacaggcttatgaatatatttaagcaacatctttttaacctgcaaaatctgttctaacatgtaattgcagataactttgactttcttctgaatattttatctttccttggcttttcccttgcttccccttttgccaatctcaacacccaagttgaagactttgtttttaaaatggtttgtcctgatgcttttgtctaattaaaacactttcaaaacagg

SEQ ID NO: 78449 - DNA, 762 bp, Homo Sapiens
  misc_feature (266)..(299): n is a, c, g, or t
  misc_feature (361)..(383): n is a, c, g, or t
  misc_feature (395)..(521): n is a, c, g, or t
  misc_feature (534)..(547): n is a, c, g, or t
gtgttatgactcaatttaaacacatctgcagaatttctttgccaggtaggggaacatattcacagatcccagggattagcacatgggcactgtcagagtcatgcaagccacaccccaaattcagcctccctgcaacctgcgccccgttccgtgcctgacaccaccatctagtcagtagcccaagccacaaaccctccttcctctccccactgtcactcttccctcaattaaaactgggcgctaggccaggtgcagtggctctcatnnnnnnnnnnnnnnnnnnnnnnnnnnnnnnnnnnaggattacttgaacccaggagtttgaggccagcctcgccaacatagggaaacctcatctctnnnnnnnnnnnnnnnnnnnnnnntgtagctggatnnnnnnnnnnnnnnnnnnnnnnnnnnnnnnnnnnnnnnnnnnnnnnnnnnnnnnnnnnnnnnnnnnnnnnnnnnnnnnnnnnnnnnnnnnnnnnnnnnnnnnnnnnnnnnnnnnnnnnnnnnnnnnnagaccctgtctcnnnnnnnnnnnnnngtaagcaccaggtcctatactttgtaactcacaagtgtctctcccatccacctcttctgctacctgccgccacccccactcccagtggggcctcagccctttccactggacaaccacagtgagtgacctcgcaattcatcttccgcctctgccccgccttccacccatccagcccatctcccgtcagcagccagaaataaactgagtcataacac

SEQ ID NO: 78450 - DNA, 787 bp, Homo Sapiens
gggggagttagagatgagtcaccgctgagaagcagctgcagtagctgagcagtggcagcagagaggcagacgtgagctgagggcgcagaggcaggcagcatctctgagggtccccaaggaacatggctgggagccgtgaggtggtggccatggactgcgagatggtggggctggggccccaccgggagagtggcctggctcgttgcagcctcgtgaacgtccacggtgctgtgctgtacgacaagttcatccggcctgagggagagatcaccgattacagaacccgggtcagcggggtcacccctcagcacatggtgggggccacaccatttgccgtgggccaggctagagatcctgcagctcctgaaaggcaagctggtggtgggtcatgacctgaagcacgacttccaggcactgaaagaggacatgagcggctacacaatctacgacacgtccactgacaggctgttgtggcgtgaggccaagctggaccactgcaggcgtgtctccctgcgggtgctgagtgagcgcctcctgcacaagagcatccagaacagcctgcttggacacagctcggtggaagatgcgagggcaacgatggagctctatcaaatctcccagagaatccgagcccgccgagggctgccccgcctggctgtgtcagactgaagccccatccagcccgttccgcagggactagaggctttcggctttttgggacagcaactaccttgcttttggaaaatacatttttaatagtaaagtggctctatattttctctacgcc

SEQ ID NO: 78451 - DNA, 1052 bp, Homo Sapiens
  misc_feature (512)..(512): n is a, c, g, or t
tggaccggtccggaattcccgggatatcgtcgacccacgcgtccgggggaaagcagcaagaaaaggtagagaggaaccagattggaagagggtcgtaaatgcatggctacagaattcagatttgttttgtaggacagtgtggttcccaaactggctgtataccacaaacaggtacggcattctgggccccggcccctaaaacattcattaagtctggggtgaagatttggaatcttgaatgcttataaaggttaccacatgactagggtacagccagatttggaaaccatagcttgaaggcagtgagggagccatgaaatggtttttaatagggggactccagatcagatgtgaacttaacctgtttctggctggctagccaaccagcatggaaaacagattaggttagatgttcatgctgtatgtgcccgtgcctgtagcttccctgttaatcagcttcttacactactatatttgcttattttgtctctgaataagctttaggcaccacnaagggtgggcctggggatattttgcttaccagtatagcccctgcaaaaaagcacagtgcctgacacaaaacaggcacccagtaaagtttttgaatgaatgaatgcatgagtgaatccatttgtgagagagcgaatggagatgacaagattagctaggagactggaaaaagaccaggaggcctgcactagggcaaaggccagtaggaatagattggaggtgttaaggtgtgaactgttaaggtaagatgataacttaatgactgattattggatgtggagggtgactgagaggatagaatgagtacccatgaatagccatgattcctaccctgtcccagtcatctctttccttatccatctctgaaacaatctgcttacatcctcctcagcaactggaattcctcaagttagttagacattctgtgtgctgtgtggtctctcactgcccccccactccccacccctccacaagccattgattcattcatccagttcaataaatcttggctaagcacctccagtgtgcagtaaggctcttcc

SEQ ID NO: 78452 - DNA, 1831 bp, Homo Sapiens
aaggtagcgaggcctgggtggcgaattcggcacgaggggcctgcgccgggacatgcggccccaggagctccccaggctcgcgttcccgttgctgctgttgctgttgctgctgctgccgccgccgccgtgccctgcccacagcgccacgcgcttcgaccccacctgggagtccctggacgcccgccagctgcccgcgtggtttgaccaggccaagttcggcatcttcatccactggggagtgttttccgtgcccagcttcggtagcgagtggttctggtggtattggcaaaaggaaaagataccgaagtatgtggaatttatgaaagataattaccctcctagtttcaaatatgaagattttggaccactatttacagcaaaattttttaatgccaaccagtgggcagatatttttcaggcctctggtgccaaatacattgtcttaacttccaaacatcatgaaggctttaccttgtgggggtcagaatattcgtggaactggaatgccatagatgaggggcccaagagggacattgtcaaggaacttgaggtagccattaggaacagaactgacctgcgttttggactgtactattccctttttgaatggtttcatccgctcttccttgaggatgaatccagttcattccataagcggcaatttccagtttctaagacattgccagagctctatgagttagtgaacaactatcagcctgaggttctgtggtcggatggtgacggaggagcaccggatcaatactggaacagcacaggcttcttggcctggttatataatgaaagcccagttcggggcacagtagtcaccaatgatcgttggggagctggtagcatctgtaagcatggtggcttctatacctgcagtgatcgttataacccaggacatcttttgccacataaatgggaaaactgcatgacaatagacaaactgtcctggggctataggagggaagctggaatctctgactatcttacaattgaagaattggtgaagcaacttgtagagacagtttcatgtggaggaaatcttttgatgaatattgggcccacactagatggcaccatttctgtagtttttgaggagcgactgaggcaaatggggtcctggctaaaagtcaatggagaagctatttatgaaacccatacctggcgatcccagaatgacactgtcaccccagatgtgtggtacacatccaagcctaaagaaaaattagtctatgccatttttcttaaatggcccacatcaggacagctgttccttggccatcccaaagctattctgggggcaacagaggtgaaactactgggccatggacagccacttaactggatttctttggagcaaaatggcattatggtagaactgccacagctaaccattcatcagatgccgtgtaaatggggctgggctctagccctgactaatgtgatctaaagtgcagcagagtggctgatgctgcaagttatgtctaaggctaggaactatcaggtgtctataattgtagcacatggagaaagcaaatgtaaaactggataagaaaattattttggcagttcagccctttccctttttcccactaaattttttcttaaattacccatgtaaccattttaactctccagtgcactttgccattaaagtctcttcacattgatttgtttccatgtgtgactcagaggtgagaattttttcacattatagtagcaaggaattggtggtattatggaccgaactgaaaattttatgttgaagccatatcccccatgattatatagttatgcatcacttaatatggggatattttctggg

SEQ ID NO: 78453 - DNA, 944 bp, Homo Sapiens
tcacgcgtccggcatactcagcggcagagacggaagaacagcgctcccgaggccgcgggagcctgcagagaggacagccggcctgcgccgggacatgcggccccaggagctccccaggctcgcgttcccgttgctgctgttgctgttgctgctgctgccgccgccgccgtgccctgcccacagcgccacgcgcttcgaccccacctgggagtccctggacgcccgccagctgcccgcgtggtttgaccaggccaagttcggcatcttcatccactggggagtgttttccgtgcccagcttcggtagcgagtggttctggtggtattggcaaaaggaaaagataccgaagtatgtggaatttatgaaagataattaccctcctagtttcaaatatgaagattttggaccactatttacagcaaaattttttaatgccaaccagtgggcagatatttttcaggcctctggtgccaaatacattgtcttaacttccaaacatcatgaaggctttaccttgtgggggtcagaatattcgtggaactggaatgccatagatgaggggcccaagagggacattgtcaaggaacttgaggtagccattaggaacagaactgacctgcgttttggactgtactattccctttttgaatggtttcatccgctcttccttgaggatgaatccagttcattccataagcggcaatttccagtttctaagacattgccagagctctatgagttagtgaacaactatcagcctgaagttctgtgggtcggatggtgacggaggagcaccgggatcaatactgggaacagcacagggcttcttgggcctggttatataatgaaaagcccagtttccggggcacaggtaatcaccaattgaatccgttggggaaagctggtaaccatcttggtaagcatgggtgggctttctattaccc

SEQ ID NO: 78454 - DNA, 969 bp, Homo Sapiens
aggctggaccggtccggattcccgggatcggaagaacagcgctcccgaggccgcgggagcctgcagagaggacagccggcctgcgccgggacatgcggccccaggagctccccaggctcgcgttcccgttgctgctgttgctgttgctgctgctgccgccgccgccgtgccctgcccacagcgccacgcgcttcgaccccacctgggagtccctggacgcccgccagctgcccgcgtggtttgaccaggccaagttcggcatcttcatccactggggagtgttttccgtgcccagcttcggtagcgagtggttctggtggtattggcaaaaggaaaagataccgaagtatgtggaatttatgaaagataattaccctcctagtttcaaatatgaagattttggaccactatttacagcaaaattttttaatgccaaccagtgggcagatatttttcaggcctctggtgccaaatacattgtcttaacttccaaacatcatgaaggctttaccttgtgggggtcagaatattcgtggaactggaatgccatagatgaggggcccaagagggacattgtcaaggaacttgaggtagccattaggaacagaactgacctgcgttttggactgtactattccctttttgaatggtttcatccgctcttccttgaggatgaatccagttcattccataagcggcaatttccagtttctaagacattgccagagctctatgagttagtgaacaactatcagcctgaggttctgtggtcggatggtgacggaggagcaccggatcaatactggaacagcacaggcttcttggcctggttatataatgaaagcccagttcggggccacagaattcaccactgatcgtgggggagctggtagctctgtaagcattgtggcttctatacctgcagtgattcgttctaccccaggacctcttttgcccactaactggcac

SEQ ID NO: 78455 - DNA, 868 bp, Homo Sapiens
  misc_feature (321)..(321): n is a, c, g, or t
  misc_feature (612)..(612): n is a, c, g, or t
  misc_feature (819)..(819): n is a, c, g, or t
  misc_feature (844)..(844): n is a, c, g, or t
ttagaagcggcacagaatgttctcttatgtaaagaaatttttgcacagctctctcgggaagctgttcaaattaaatcacaagtccctcacattgtggtgaaaaaccagattatctctcagccctttccgagcttgcagttatctatttctttgtgccattcctcaaatgataagaaatcccaaaaatttgctactgagaagcaatgtccggaggacaaccctttatgtcctagagcataatttgcatctactgattagagagtttcataaacagaccttgagttccatcatgatgcctcatccaggcaagtgcaccttttnggccacaagagaatgagactttcgggtcctcaagcttttgataaaaatgaaattaattcattacagtccagtgaagggcttctggaaaaaataattaaacaagcaaagcatatttttctaaggagtagagctgctgcaaccattgacagcttagcaagccgaattgaggatcctcagatacaggctcattggtcaaatatcaatgatgtttatgaatctagtgtgaaagttttaatcacatcacaaggctatgaacaaatatgcaagtccattcaactgcaattgaatatntggagttgagcagattcgagttgtacatagagatggaagagtaattacacctgtcttatcaggagcaggagctacaggattttcttctgtctcagatgtcacagcaccaggtacatgcagttcagcaactccgccaaggttatgggctgggcaagtacttgagcttcagtaatccatgtggggactttggacctatagagagccttnggtaatgcatctgcaatcagggggncccccccaagggggggactatgca

SEQ ID NO: 78456 - DNA, 1059 bp, Homo Sapiens
  misc_feature (103)..(137): n is a, c, g, or t
ggtatactgacgcatcaattaattcgggggcgccccactcccgccctgtttatttattgtcccagaacacgagcgcagcgagtattgagcgaggaagcggcgnnnnnnnnnnnnnnnnnnnnnnnnnnnnnnnnnnncagtcgacggtaccggacatatgcccgggaattcggccattacggccggggtgaaagttttaatcacatcacaaggctatgaacaaatatgcaagtccattcaactgcaattgaatattggagttgagcagattcgagttgtacatagagatggaagagtaattacactgtcttatcaggagcaggagctacaggattttcttctgtctcagatgtcacagcaccaggtacatgcagttcagcaactcgccaaggttatgggctggcaagtactgagcttcagtaatcatgtgggacttggacctatagagagcattggtaatgcatctgccatcacggtggcctccccaagtggtgactatgctatttcagttcgtaatggacctgaaagtggcagcaagattatggttcagtttcctcgtaaccaatgtaaagaccttccaaaaagtgatgttttacaagataacaaatggagtcatcttcgtgggccattcaaagaagttcagtggaataaaatggaaggtcgaaattttgtttataaaatggagctgcttatgtctgcacttagcccttgtctactatgattttttccagatgtttcctaaagaagtttccagaaactttgacttgaaatgtttgcagatcaactataagcacaaagaagagataacttccaaaagagtgctgtttttaaaaataataattaggaaatgtttatttagcactttcaaacttttcactttataaatgacaagtgctttgaaatgcagaagtttatgtacagttgtatatacagtatgacaagatgtaaaataatatgtttttcatgcagtttaaaatattactaacttaagggtttctatgtgctttttaaaatattccttctttgatgttgacatcaaataaagtatgtggtttaaaa

SEQ ID NO: 78457 - DNA, 933 bp, Homo Sapiens
  misc_feature (46)..(62): n is a, c, g, or t
  misc_feature (142)..(142): n is a, c, g, or t
  misc_feature (200)..(200): n is a, c, g, or t
ccccatctttatcacctgtcagatgacagttggacgatcactcaannnnnnnnnnnnnnnnncaaagcagcaccttgtaaaatccagctatcagtttctcatgagataaatattcaaaatatctttctgtatcagtggcttntaagtatacagggtctagttttatctacaaaatttctattcaaatatgagctctattntgaataaaaggggctacgttgtgagagaagttctaaagacctcaaatgtccttagacacaatggcacttgacttgacatgcttttgcagacttgatagtatttggtttaaaacagtggtttctaaccactggaacagcagaaacagacttctcaactattagtaatcacaaccaaataagagcagagtgcataacaaaattagatattcaaacggagtcctcccattccaagaaactggaaacccctagtttatgttaaaaggccagtctaaattctttcacttacatctttacagaaaactatattttctctcttccatacccagaaatctaatcagaaaactgacttttctcatgttcaactggacctaggggaatatgacagaaaagcatcccataggctttaatatactttttaaaatatataaaactgaaaattaatagccatttaccctgaaagagttctgcgtggactttgtcacttgcatagtaatagcatgtgcctcattgttcagaagattagctttaggtcctattttcaaatacgaaatggtagcataagctgtaaaactgtagtcttctctgcagaaaataaaggccaacaataagaaagcttttgaaggaatcacggaaaacaaatttataaaagaaataactatatgcgcagtaattcttaacacattgacttgaaataataaaatttacaagaatgcaaataaagcctttaaagaaa

SEQ ID NO: 78458 - DNA, 718 bp, Homo Sapiens
  misc_feature (69)..(69): n is a, c, g, or t
  misc_feature (558)..(567): n is a, c, g, or t
ttaataagtctctagctctccatctattgatagtttcatttacaatttcaaaagaacattcttatattntatcaaggaagtcttcaaatttgattctaaatagcgattataatctccaactttattttgaatgtacctctattagtttcaattgagtaattctaagacataactggtttgactctgtccaactctgtatttaggccatttgtaccagtttcttcatgcattacttactgttaaaactgtaccttttgcgatttcacagttggcacttctgccatgagcagagaactgatgcgacttgttttgctgcttggtagcactttaaaaaattttttgattaatgaagaaagtaaaaccataaacatttgccaaaaattcatgccccagtattagcaatgaattagttgcattggtttgagaaaggcacatattggagggaaatcttggtgtaacttaaatatttgaaaattacctttaatgcaatgcatatctgtttattctgggaaatgttttaatgccagggcctgctgagttgcttcttcttgtggagannnnnnnnnnaatctcctgagttgtataaaagttgtactgcatcttagtttactggataaatttaaaacacagtattgtagaaagctaatacaaaactatcctatgccttcaaatagtatagaaaatggaaaatatacaagtaaattctgttgaaccacct

SEQ ID NO: 78459 - DNA, 1128 bp, Homo Sapiens
  misc_feature (664)..(689): n is a, c, g, or t
  misc_feature (710)..(729): n is a, c, g, or t
  misc_feature (735)..(735): n is a, c, g, or t
ccactttggtcctggatataatgaaatgatacatattaggataaattttcactgtgtatagtagcaatacgaacacacatgccaatgtatcaacatatctacttggttacattttggtttatgataattaaccttgattcatgtattgggaagctacagggactacgtaatacctgcttatcacataggaaaattatgtccatgattctgagctcccttcttcaaaagtttcctcctgggtgttctatgttctctctttatcctgaaatacatttattaggttgtgaggtatgttgaagaagtagaagccaggggtatgctttcagcatttattgcaaccaaaagttaaccccatcacggttaacgagcatctttggtctcttgtggaatttgaactaaaactatgagccttattcaatatctataattctatgatttttttaaattatgggaaattaatgaaagatgtttacatgaataatgtttgcccttactgtgttatgaatgagttttttgtagtgtgtctgggtgcatgatgcaagagagtaggaaaaatgtttctgaaacaaaacttgacaaatatttgtaatgaaagtaaatttaaagattgctataattgcgctatagaaacaatgcaagtattaaacaaaatatacaatcatcnnnnnnnnnnnnnnnnnnnnnnnnnncatggaaaccgcctcaagacnnnnnnnnnnnnnnnnnnnncattanattgtcctgggcgcccgccccggccctgaagaagtttttaaaacctttcgttgggggcggggccccagaaggaaagggaacgtggccaaaccggttcccaaggaaacccgggcaaggacaagggctgggatccacacaaataaaaacgcccggggggaaaccgaggggtttgaaaaattccaaaatgggagtccaggggcccttacggggtctttaccacagggaagtccagggaggcctcaaattaaaaataccgccccgcccctgccacttctttgaaaagaggggggaaaatccttaaaccctttccggccgaacagggaaccctctcccaaggggggtggataaaccccgaatccgcccacggggcttcaccaacctttggcccctttc

SEQ ID NO: 78460 - DNA, 1344 bp, Homo Sapiens
  misc_feature (654)..(654): n is a, c, g, or t
acttaggctagtacggagctgggtggtgaattcggcacgaggcgctgtcctgccgccccgccatgggcctagagctgtttcttgacctggtgtcccagcccagccgcgccgtctacatcttcgccaagaagaatggcatccccttagagctgcgcaccgtggattggtcaaagggatggaaagaaaatactgaatggagttgacagagttcttgcgtggaatgcacgcatataaattcacaaagcccagaagacctcgggaagaaggacatgctgttggcagcacaagagcaaggagttcttgcagatcaacagcctggggaaactgccgacgctcaaggatggtgatttcatcttgaccgaaagggcggctgctggcatatcacagagatgaggttctcaaaatgcaaagcagaaggtccagccaagagtcggtgcccaagctcggcatcctgatttacctgagctgtaagtaccagacgccggaccactggtatccatctgacctgcaggctcgtgcccgtgttcatgagtacctgggctggcatgccgactgcatccgtggcacctttggtatacccctgtgggtccaggtgttggggccactcattggggtccaggtgcccgaggagaaggtggaacgcaacaggactgncatggaccaggccctgcaatggctggaggacaagttcctgggggacaggcccttcctcgctggccagcaggtgacactggctgatctcatggccctggaggagctgatgcagccggtggctctcggctatgaactgtttgagggacggccacgactggcagcatggcggtggacgaagtggaggctttcctgggttgctgagctatgccaggaggcccacagcatcatcttgagcatcctggaacaggcggccaagaaaaccctcccaacaccctcaccagaggcctatcaggctatgctgcttcgaatcgccaggatcccctgaagggtctgggatgggggccaggagattagcaacaaggattcattctgttacttacttgcccctttttatctttccctcttgccccagtcccttctctccagcttcatgtgaagctctgcacagacaagacactcagtgtccttggcagtgctgctactcctcaggtgcagcatacataaccagtaagagactaaatctgcaatatataaagagctcctacaaatcagtaacatgaagaacactcaaaaattggcaaatgtcatcagtgttttaaacagaataaagattccaaacactttgaatagagaaccaagagttattggttttactacattgttgtgttatacatatggagtaaaagtatg

SEQ ID NO: 78461 - DNA, 925 bp, Homo Sapiens
cgcgctcagcgccttcactgccatccccgctgtccttgccgcccccgccatgggcctagagctgtttcttgacctggtgtcccagcccagccgcgccgtctacatcttcgccaagaagaatggcatccccttagagctgcgcaccgtggatttggtcaaagggatggaaagaaaatactgaatggagttgacagagttcttgcgtggaatgcacgcatataaattcacaaagcccagaagaccttgggaagaaggacatgctgttggcagcacaagagcaaggagttcttgcagatcaacagcctggggaaactgccgacgctcaaggatggtgatttcatcttgaccgaaagggcggctgctggcatatcacagagatgaggttctcaaaatgcaaagcagaaggtccagccaagagtcggtgcccaaggcaacaaagacaggaggagactcgtaggaggaggggggtggtgttggggagctggagatggagggcgaggctggagggcagtccttcaaatgcagagaagcccccgggccccactggcagatgggagcagttaggggtaaatgcctggtgccagtgtccttatagccactgcccatttgttcccagctcggccatcctgatttacctgagctgtaagtaccagacgccggaccactggtatccatctgacctgcaggctcgtgccagtgttcatgagtacctgggctggcatgccgactgcatccgtggcacctttggtatacccctgtgggtccaggtgttggggccactcattggggtccaggtgcccgaggaggaagtggaaacgcacagggactgccatggacccaggccttgcaatggctggaagaccaggttcctggggggacaggcccctttccctccctgggcaaacagggtgacacctggcttggt

SEQ ID NO: 78462 - DNA, 661 bp, Homo Sapiens
gagccagtcagctaccacaactctggagtaaaatatgctgcatccgggcaagaatctttaagactgaaccacaaagaggtaaggctctccaaagagatggagcgaccctgggttaggcagccttctgccccagagaaacactccagagactgctacaaggaggaagaacacctcactcagtcaatcgtcccaccccctaaaccagagaggagtcatagcctcaaactccatcatacccagaacgtggagagggaccccagtgtgctgtaccagtaccaaccacacggcaagcgccagagcagtgtgactgttgtgtcccagtatgataacctggaagattaccactccctgcctcagcaccagcgaggagtctttggagggggcggcatggggacgtatgtgccccctggctttccccatccacagagcaggacctatgctacagcgttgggtcaaggggccttcctgcccgcagagttgtccttgcagcatcctgaaacacagatccatgcagaatgagccctgcgagcaatagagttgaagcagcctctgctggacagtggactgttctatttttttcaataaccaaaaagattaaacaaaaaatactataaaacccctgaccacatttaaaaaatgataataaaagtaaacaaatcag

SEQ ID NO: 78463 - DNA, 783 bp, Homo Sapiens
  misc_feature (66)..(66): n is a, c, g, or t
  misc_feature (156)..(185): n is a, c, g, or t
agtctcaataacttagtaggacttcagtaagtcacttaaatgacaagacaggattctgaaaactcnccgtttaactgattatggaatagtctttctcctgcttctccgttatctacccaagagcgcagacttgcatcctgtcactaccactcgttnnnnnnnnnnnnnnnnnnnnnnnnnnnnnntgggtgggctggaagaatgtcctagaatgtgttattgcccctgttcatgaggtacgcaatgaaaattaaattgcaccccaaatatggctggaatgccacttcccttttcttctcaagccccgggctagcttttgaaatggcataaagactgaggtgaccttcaggaagcactgcagatattaattttccatagatctggatctggccctgctgcttctcagacagcattggatttcctaaaggtgctcaggaggatggttgtgtagtcatggaggacccctggatccttgccattcccctcagctaatgacggagtgctccttctccagttccgggtgaaaaagttctgaattctgtggaggagaagaaaagtgattcagtgatttcagatagactactgaaaacctttaaagggggaaaaggaaagcatatgtcagttgtttaaaacccaatatctattttttaactgattgtataactctaagatctgatgaagtatattttttattgccattttgtcctttgattatattgggaagttgactaaacttgaaaaatgtttttaaaactgtgaataaatggaagctactttgactaa

SEQ ID NO: 78464 - DNA, 430 bp, Homo Sapiens
  misc_feature (57)..(92): n is a, c, g, or t
gagacggagtcttcccattgcaccccagcttgggctacagagcaagactccgtctcnnnnnnnnnnnnnnnnnnnnnnnnnnnnnnnnnnnngtcctcatcctcctaaagaggagactaggggtcagacaggatcacagagggaagtgtcttgcccatggtcacacagcagttcgacagcagagagggccagggtgaccagacaggtggtggtaaggtgcaaggaccaacattaaagtcagtaatctgggtttgaatcggctttgccacgtccatgtgcctgctgtattcctgggtgagttgattaacctctctgagcttccatttttccacctgtaaaatagggatcatctgtaattcacacaattttcatgagattccaggtgccaaacacagggataagtgcttaataaatgtttatttgttttgag

SEQ ID NO: 78465 - DNA, 1029 bp, Homo Sapiens
  misc_feature (28)..(28): n is a, c, g, or t
  misc_feature (42)..(42): n is a, c, g, or t
  misc_feature (49)..(50): n is a, c, g, or t
  misc_feature (52)..(52): n is a, c, g, or t
  misc_feature (59)..(59): n is a, c, g, or t
  misc_feature (66)..(66): n is a, c, g, or t
  misc_feature (69)..(70): n is a, c, g, or t
  misc_feature (72)..(73): n is a, c, g, or t
  misc_feature (81)..(81): n is a, c, g, or t
  misc_feature (133)..(133): n is a, c, g, or t
  misc_feature (154)..(155): n is a, c, g, or t
  misc_feature (273)..(273): n is a, c, g, or t
ttaaaaatgggggaagttgcatattttntaaaaagtaagtgntgagtannanaaaatgnaagtacnttnntnnaaggaaanaaaattatatgcccacagtttacatagacattcaggatcaaacacgtactcntgaatataatgtttctttacnntgtcaaaaatgcatgtatagcatttctttcatcttagttccttgtgttgcctatgtggtccttaatatattttttatggtatcgaagaaacaaaactatctcaaaaaataagttaatntggatatatttgtcatatcaaactacaaagtgtacaaagttaagtttagcccttttctagaaagtgatctttaaaattaaaaatgctcctcttttaaattcaccaaatttatgtgtgggaaggcaccaaaatgattttgtaagtgccactgcaatattccctttcaagtgtggcctaaatttcaatcttaaggatggaatgcatgtctgctccttgttctgaaaaatgtaggcatctactacattttaaaacacagtgaaacatatacataagcctataaaaaaagatttgtgcaatttgaaagcctgttaattttttatgtagacatacctacacacgaaagggttaaattcacagccttactagttccttgcttccagtatttcaattggtctcctcccctcattattattattactactagtactattatttttgcacatagttaactgcccttcaatatgattcttaaaaagtgctgtttctgtggtatcgtattctctaaataatcatatttaattttttaaaacaaggttgcagtttctaattgtttcgttcctgtgtttttgctggtgtgtaataaaagcaagttttttcttttcatggttatttaatacattagctgcctgtaaataattcttgttataatgctctggaatgtgttgtagaagttgtattagattagttttaaacccttgtttgaaagccacattgttttggttatttctattaaattagaaaattgaaaaagttttc

SEQ ID NO: 78466 - DNA, 2263 bp, Homo Sapiens
  misc_feature (1126)..(1176): n is a, c, g, or t
cagtcgacggtaccggacatatgcccgggaattcggccattacggccgggggaccatggttatcttcctcacttagaaatagatgcacacctttgttctctagaaggaggcgagagggaagagatgaatcttcaaggatacctacctctgatacatcatctagatctcatatttttagaagagaatcaaatgaagtggttcaccttgaagcacagaatgatcctcttggagctgctgccaacagaccacaagcatctgcagcatcaagcagtgccacaacaggtggctctacatcagattcggctcaaggtggaagaaatacaggaatatcagggattcttcctggttccttattccggtttgcagtccccccagcacttgggagtaatttgaccgacaatgtcatgatcacagtagatattattccttcaggttggaattcagctgatggtaaaagtgataaaactaaaagtgcgccttcaagagatcaagaaagattgcagaaaataaaagagagcctccttttagaggactcagaagaagaagaaggtgacttatgtagaatttgtcaaatggcagctgcatcatcatctaattggctgatagagccatgcaagtgcacaggaagtttgcagtatgtccaccaagactgtatgaaaaagtggttacaggccaaaattaactctggttcttcattagaagctgtaaccacctgtgaactatgtaaagagaagttggagcttaacctggaggattttgatattcattgaactacatagagccccatgcaaatgaacaagcctgagtatgagtttatcagctctggtctccacccagtggtgttattgcacttgtgcgaacaaagcttttctgatatgatgggaaatacaaatgaaccaagcacacgtgtccgatttattaaccttgcaagaactcttcaggcacatatggaagatctcgaaacttcagaggatgattccgaagaagacggagaccataacaggacatttgatattgcctaacttcatataagacagatggatgatctgtgaacataagtgtttattaaaaatggcaattaaatataaattacttttgtgggggaatgcctaataaatacattgannnnnnnnnnnnnnnnnnnnnnnnnnnnnnnnnnnnnnnnnnnnnnnnnnntcattctccagtgttgctgaattaaaattctgctggactttttaacatagcaaatccgatgtttataaactggtaatcaaaaaggttttttcttttaggtgagtgggaaagtattacccttgttttaaatatctaagcaatgcctatcaacccttttttgtgttatgattactgtagtcatatttatgaaaaaaggtttgtgttttactcttgctagtgagaaaagtgggacaaaatatacttttgaaataaaatgctatatggcacctaattattttttcttttaaaatgccttaagttgcagtctcattttgataatcatttgcttccagtgtttaaaaattaaaaaaagaatggggagaaggttatgagaagagcattattaagtttccaaatttaatttgaattccaaattcacctagcaataaaatctaatttttaaaaagtatataaatataaaatgtataaatgatggatagatttttgtattgatttgcaaaatgcagattatatttgataggctatagtatgtagatattccttttaggaatattacagctgtaaattatatgagacttgccagtcaaatgctatttggtttaaaaaaattattgcaatctcaagttaatggaatatttttaaatcccacattcagagtttaaaacactggttttcaatgtgttttttagtgttgtcacttgtttatagataaatatataaataacctgtttggatcctggtcctttttaactgttccttggtaattctgagcatttatttgatgacttaatatttttcactacctttggagaacagatgaacattattcaccatgaatggatctatactgtgtggtcatgagttgtgtatacttccataacactgtatttttcttctgtcagtacccttaggatacactttaaaacaccttaaggtctgatgttatggcaacaaactactttttcaaacctaaataggaaccatgtaatttctcaaaagtgattgaacagtttgcccacacttagtttgttggtcttatgtaaaacattggctcaaaataaagtacacactgatttattttactgtt

SEQ ID NO: 78467 - DNA, 895 bp, Homo Sapiens
  misc_feature (319)..(393): n is a, c, g, or t
  misc_feature (562)..(571): n is a, c, g, or t
  misc_feature (840)..(849): n is a, c, g, or t
aggcatgagctaccatgcccggccacaagacatagattttctatatgcacatcaagggaggtgctggtttaggttgctataggacagagctatcctgtattccagttggtttttgtagagaaacaattagacttctctagatagagccctgatttttctctcacgctttcagttttttaaaagcactaatgatatttcctgttttctcataagaaaaagtcaatactatgccttacaaagagacctttccttctaatatagaattttatttgaaagtgagtacatgtttataactagagaataaaaggagaatttttgnnnnnnnnnnnnnnnnnnnnnnnnnnnnnnnnnnnnnnnnnnnnnnnnnnnnnnnnnnnnnnnnnnnnnnnnnnnccgcctaaaaataccccccagggggcccaagtttaccggaccccattttttttgaaaaaaggggcccctatagggggccgatttaaaacttgggcccgggccgccttttaacacctccgggatgggaaaacctgtaacttgggaatttttggaaggaaaccttacttcnnnnnnnnnnacatattgggcacaacccccctcccggaatttttaaggcccctaagggaaattaaaaattttttaaaggggtaaaaagggggtaaaacctacccgccaaaagccttggccggcctaaaaaaattttgggcttcctggagtttgggtttttgtgaaaaatttttatccccgggggcctagggggtttccaaattgggttggggggatttttaaaaatcccacggccccccagagggcttatttttagggcccccccaagtcccctcacannnnnnnnnncccggagaccaaaaaacccgcccccaacccccacatttttgggagg

SEQ ID NO: 78468 - DNA, 670 bp, Homo Sapiens
  misc_feature (40)..(40): n is a, c, g, or t
aataagacaacttcactgggccagatggagaacaacaatntggatgaactaaataaaagcaagatcattgttaaaaagaaacccaaacaattaaatccatttcatttaaaagtgggtcatgaagttttaagacaaaggaaaaattggtggaaggatggtcgttttcagtctgaatgggttggtccttgtgtcatagactatattacagaaagtggatgtgctgtcctgacagacaacactggggttagactgaaaagacctatcaaaatgtcccaccttaagccctacataagagaatccagtgaacaagaaagtctttatctcttgcaaggttcagtagtggcagatcatgactacattggattgcctgaaattccgattggagcatatcaagcaaatattctggtggaagatgcaactattggtatagtcgataaagaatttactgacatcaagcaaggatcgtgaactattagaatatagaaatacgaaaatctctccattgatagacgagcatagttctcttgaaaagcagactttcagtctgttggactcttcaaaccaggttcttgaatacttaagttagtaaataccaaaatttatttaaagtgcttgtttagaatacaaattcttaatgatatcttattcattaaaaaccgttgtatagaag

SEQ ID NO: 78469 - DNA, 2123 bp, Homo Sapiens
  misc_feature (1154)..(1192): n is a, c, g, or t
tggaatataccaggggtaaaaaagcagggtggtccggtcggaatcccgggatatcgtcgacccacgcgtcgcctgaatccactctctgtattcatgctcttggcaatttctttgactttcttttaagggcagaagcattttagttaattgtagataaagaatagttttcttcctcttctccttgggccagttaataattggtccatggctacactgcaacttccgtccagtgctgtgatgcccatgacacctgcaaaataagttctgcctgggcatttgtagatattaacaggtgaattcccgactcttttggtttgaatgacagttctcattccttctatggctgcaagtatgcatcagtgcttcccacttacctgatttgtctgtcggtggccccatatggaaaccctgcgtgtctgttggcataatagtttacaaatggttttttcagtcctatccaaatttattgaaccaacaaaaataattacttctgccctgagataagcagattaagtttgttcattctctgctttattctctccatgtggcaacattctgtcagcctctttcatagtgtgcaaacattttatcattctaaatggtgactctctgcccttggacccatttattattcacagatggggagaacctatctgcatggacctctgtggaccacagcgtacgctgcccctttctgccctccatgctccagacccacttctgaaagtatcagctactgatccagccactggatattttatatcctcccttttccttaagcacaatgtcagaccaaattgcttgtttctttttcttggactactttaatttggatcctttgggtttggagaaagggaatgtgaaagctgtcattacagacaacaggtttccagtgatgaggaggacaacactgcctttcaaactttttactgatctcttagattttaagaactcttgaattgtgtggtatctaataaaagggaaggtaagatggataatcactttctcatttgggttctgaattggagactcagtttttatgagacacatcttttatgccatgtatagatcctcccctgctatttttggtttatttttattgttataaatgctttctttctttgactcctcttctgcctgcctttggggatagnnnnnnnnnnnnnnnnnnnnnnnnnnnnnnnnnnnnnnnaagcatcattttcttatgtgaggtggggaagggaaaggtatgagggaaagagagtctgagaattaaaatattttagtataagcaattggctgtgatgctcaaatccattgcatcctcttattgaatttgccaatttgtaatttttgcataataaagaaccaaaggtgtaatgttttgttgagaggtggtttagggattttggccctaaccaatacattgaatgtatgatgactatttgggaggacacatttatgtacccagaggcccccactaataagtggtactatggttacttccttgtgtacatttctcttaaaagtgatattatatctgtttgtatgagaaacccagtaaccaataaaatgaccgcatattcctgactaaacgtagtaaggaaaatgcacactttgtttttacttttccgtttcattctaaaggtagttaagatgaaatttatatgaaagcatttttatcacaaaataaaaaaggtttgccaagctcagtggtgttgtattttttattttccaatactgcatccatggcctggcagtgttacctcatgatgtcataatttgctgagagagcaaattttcttttctttctgaatcccacaaagcctagcaccaaacttctttttttcttcctttaattagatcataaataaatgatcctggggaaaaagcatctgtcaaataggaaacatcacaaaactgagcactcttctgtgcactagccatagctggtgacaaacagatggttgctcagggacaaggtgccttccaatggaaatgcgaagtagttgctatagcaagaattgggaactgggatataagtcataatattaattatgctgttatgtaaatgattggtttgtaacattccttaagtgaaatttgtgtagaacttaatatacaggattataaaataaaaa

SEQ ID NO: 78470 - DNA, 881 bp, Homo Sapiens
acatggagaaggataaagcagagaatgacaaacttaatctgcttatctcagggcagaagtaattattttttgttggtttcaataaatttggataggactgaaaaaaccatttgtaaactattatgccaacagacacgcagggtttccatatgggccaccgacagacaaatcaggtaagtgggaagcactgatgcatacttgcagccatagaaggaatgagaactgtcattcaaaccaaaagagtcgggaattcacctgttaatatctacaaaatgcccaggcagaacttattttgcaggtgtcatgggcatcacagcactggacggaagttgcagtgtagccatggaccaattattaactggcccaaggagaagaggaagaaaactattctttatctacaattaactaaaatgcttctgcccttaaaagaaagtcaaagaaattgccaagagcatgaatacagagagtggattcaggtgaggggcaatcagtctgaacaatgagcaagtctatagttgtccattatcatctaaaaggtgactctaggaaaggaaaatgttctgttgagtttctacgttagttgccaaagggaatgtcatggccgcttcagaggaaaagaaatggtagcagaaaatagcaaaggctgctatatagttcctccttttccaaccttcttatagggctgttttggatcatagaaaacaagtccaactttccaattcctgcacttgaacatataaagtccatgtcttcagtgagaacatactgggtataccagtaacacggaccacacggtgtgaaagaaagattggtgagcaggcctttaagcagcaagataatcagtagagactgatcatctgacaaacggaagacaactgtca

SEQ ID NO: 78471 - DNA, 1558 bp, Homo Sapiens
  misc_feature (82)..(116): n is a, c, g, or t
caactatctacctcatatggcgcctcgctgtattatgccgaacgaccgagcgcagcgaagtagttagcgaggaagcggccgnnnnnnnnnnnnnnnnnnnnnnnnnnnnnnnnnnncagtcgacggtaccggacatatgcccgggaattcggccattacggccggggaggtcagatgaaggctaggtggctggaactgcaaccatggtgcccagcttcctctccctgagcttctcctccttgggcctgtgggcttctgggctgatcttggtcttaggctttctcaagctcatccacctgctgctgcggaggcagacgttggctaaggctatggacaaattcccagggcctcccacccactggctttttggacatgccctcgagatccaggagacggggagcctggacaaagtggtgtcctgggcccaccagttcccgtatgcccacccactctggttcggacagttcattggcttcctgaacatctatgagcctgactatgccaaagctgtgtacagccgtggggaccctaaggcccctgatgtgtatgacttcttcctccagtggattgggagaggcctgctggttcttgaggggcccaagtggttgcagcaccgcaagctgctcacacctggctttcattatgatgtgctgaagccctatgtggccgtgttcactgagtctacacgtatcatgctggacaagtgggaagagaaagctcgggagggtaagtcctttgacatcttctgcgatgtgggtcacatggcgctgaacacactcatgaagtgcacctttggaagaggagacaccggcctgggccacagcagggacagcagctactaccttgcagtcagcgatctcactctgttgatgcagcagcgccttgtgtccttccagtaccataatgacttcatctactggctcaccccacatggccgccgcttcctgcgggcctgccaggtggcccatgaccatacagaccaggtcatcagggagcggaaggcagccctgcaggatgagaaggtgcggaagaagatccagaaccggaggcacctggacttcctggacattctcctgggtgcccgggatgaagatgacatcaaactgtcagatgcagacctccgggctgaagtggacacattcatgtttgaaggccatgacaccaccaccagtggtatctcctggtttctctactgcatggccctgtaccctgagcaccagcatcgttgtaaagaggaggtccgcgagatcctagggggaccagggacttcttccagtggcaagctaagagccaaatcatgaatgaactaccattcacaactgccacaaaagaatagaatatctaggaatacatctaacaatggaagtgaaggacctttttgagaagaactacaaaccactgctcagagaaatctgagaggacacaaacaagtgggaaagcattccatgctcatggataggaagaatcaatatcatgaaaatggccatgttgctcaaagcaatttatggattcaatgctgttcccattaaactactattgagattcttcatagaattag

SEQ ID NO: 78472 - DNA, 1138 bp, Homo Sapiens
  misc_feature (270)..(298): n is a, c, g, or t
atatgtatgtgtttagaattgaaggtttttgatagcattgtaagcgtatggctttatttttttgaactcttctcattacttgttgcctataagccaaaattaaggtgtttgaaaatagtttattttaaaacaataggatgggcttctgtgcccagaatactgatggaatttttttgtacgacgtcagatgtttaaaacaccttctatagcatcacttaaaacacgttttaaggactgactgaggcagtttgaggattagtttagaacagnnnnnnnnnnnnnnnnnnnnnnnnnnnnnctgctttagacttgaaaagagacaggcaggtgatctgctgcagagcagtaagggaacaagttgagctatgacttaacatagccaaaatgtgagtggttgaatatgattaaaaatatcaaattaattgtgtgaacttggaagcacaccaatcttactttgtaaattctgatttcttttcaccattcgtacataatactgaaccacttgtagatttgattttgggggttaatctactgcatttagggagtattctaataagctagttgaatacttgaaccataaaatgtccagtaagatcactgtttagatttgccatagagtacactgcctgccttaagtgaggaaatcaaagtgctattacgaagttcaagatcaaaaaggcttataaaacagagtaatcttgttggttcaccattgagaccgtgaagatactttgtattgtcctattagtgttatatgaacatacaaatgcatctttgatgtgttgttcttggcaataaattttgaaaagtaatatttattaaatttttttgtatgaaaacatggaacagtgtggcctcttctgagcttacgtagttctaccggctttgccgtgtgcttctgccaccctgctgagtctgttctggtaatcggggtataataggctctgcctgacagagggatggaggaagaactgaaaggcttttcaaccacaaaactcatctggagttctcaaagacctggggctgctgtgaagctggaactgcgggagccccatctaggggagccttgattcccttgttattcaacagcaagtgtgaatactgcttgaataaacaccactggattaatggccaaaaa

SEQ ID NO: 78473 - DNA, 1758 bp, Homo Sapiens
  misc_feature (59)..(73): n is a, c, g, or t
cgcccctactctttctggtgttagatcgagctaccctctaaaagcagtttagagtggtnnnnnnnnnnnnnnncacaccaaacgctcgcagccacaaaagggatgaaatttcttctggacatcctcctggcttctcccgttactgatcgtctgctccctagaagtccttcgtgaagctttttattcctaagaggagaaaatcagtcaccggcgaaatcgtgctgattacaggagctgggcatggaatggggagactgactgcctatgaattggctaaacttaaaagcaagctggttctctggggatataaataagcatggactggaggaaacagctgccaaatgcaagggactgggtgccaaggttcatacctttgtggtagactgcagcaaccgagaagatatttacagctctgcaaagaaggtgaaggcagaaattggagatgttagtattttagtaaataatgctggtgtagtctatacatcagatttgtttgctacacaagatcctcagattggaaaagacttttgaagttaatgtacttgcacatttctggactacaaaggcatttcttcctgcaatgacgaagaataaccatggccatattgtcactgtggcttcggcagctggacatgtctcggtccccttcttactggcttactgttcaagcaagtttgctgctgttggatttcataaaactttgacagatgaactggctgccttacaaataactggagtcaaaacaacatgtctgtgtcctaatttcgtaaacactggcttcatcaaaaatccaagtacaagtttgggacccactctggaacctgaggaagtggtaaacaggctgatgcatgggattctgactgagcagaagatgatttttattccatcttctatagcttttttaacaacattggaaaggatccttcctgagcgtttcctggcagttttaaaacgaaaaatcagtgttaagtttgatgcagttattggatataaaatgaaagcgcaataagcacctagttttctgaaaactgatttaccaggtttaggttgatgtcatctaatagtgccagaattttaatgtttgaacttctgttttttctaattatccccatttcttcaatatcatttttgaggctttggcagtcttcatttactaccacttgttctttagccaaaagctgattacatatgatataaacagagaaatacctttagaggtgactttaaggaaaatgaagaaaaagaaccaaaatgactttattaaaataatttccaagattatttgtggctcacctgaaggctttgcaaaatttgtaccataaccgtttatttaacatatatttttatttttgattgcacttaaattttgtataatttgtgtttctttttctgttctacataaaatcagaaacttcaagctctctaaataaaatgaaggactatatctagtggtatttcacaatgaatatcatgaactctcaatgggtaggtttcatcctacccattgccactctgtttcctgagagatacctcacattccaatgccaaacatttctgcacagggaagctagaggtggatacacgtgttgcaagtataaaagcatcactgggatttaaggagaattgagagaatgtacccacaaatggcagcaataataaatggatcacacttaaacttttggtgtttccatctttttgtcttaaacagaacatgacaaccttcaaattaaaggaaaataaattgtgcaatcttttttt

SEQ ID NO: 78474 - DNA, 556 bp, Homo Sapiens
tctgaacagttaaccctatagaagcatgctttatatgagtgtcttctgggaagaggaaccttcttaatctcttctgtgggattttcaaaatgctaaagactcacactgcagcaatcatcccagatgattaaattcaaagaaataggttcacaacaggaatatactgaagaactagagtgtcactgctggtgaactgtggcacggttgctcaacacatcacctcggacaaattcaggaagcatttctttagcccacaagtccagacccaggtgctctgtatgtttgtttttaatattcatcatatccaagttcactctgtcttcctgagcagtggaagatcatattgctgtaacttcttttaagtagttgatgtggaaaacattttaaagtgaatttgtcaaaatgctggttttgtgttttacccaacttttgtgcatatatataaagtatgtcatggcatggtttgcttaggagttcagagttccttcatcatcgaaatagtgattaagtgatcccagaacaaggaatactagagtaaaaagcacctctttttcac

SEQ ID NO: 78475 - DNA, 1574 bp, Homo Sapiens
  misc_feature (1493)..(1527): n is a, c, g, or t
gataggcccggtgtgaatcggcacgaggctctgcacgatttgtcacgatactctgtgtttgtcactgagctttcactcaggcccatttctaatgaaagtcccaaggagatcaagaaaccttggtaactggtagcaaagaaccttccatcacccaaggaaacactgaagaccaaggaagtggtccttcggaaacaaagcctgtggtttccatttcccgcactcagctcgtgtatgtggttgcagacctggacaagcttcaggagcagcttccagaactcttggaaataatcaagccaaaacttgaaatgattggctttaagaatttttcttctatctcagcagccctggaggactcccagagctctttttcagcctgtgtgccctccttgagtagcaagatcatccaggatttaagtgactcttgcttcggtttcctaaaaagcgccctggaggttcccaggctttaccgaagaaccaataaggaggtcccaaccacagcttcctcctatgtggacagtgctctgaagcccttattccagcttcagagcggacacaaggataagctcaaacaagcaataattcagcagtggctagaaggcactctcagtgaaagcactcataagtactatgaaaccgtgtcagatgtattaaactctgtgaagaagatggaagagagcctgaaaaggctgaaacaagccagaaaaaccactcccgccaaccccgtcggtcccagtggtggcatgagcgacgacgacaaaatcaggctgcagttggccctagatgttgagtacttgggagagcagatacaaaagttggactacaagcaagtgacataaaaagcttctcagctctcgcagagcttgttgctgctgccaaggaccaggcaacagcagagcagccttaagcatcttggaagatcccgaggttagattcttaagcaagagaagagttggacttccaggctgaaggggagaaagtgactctgttctcttagcaaccgtctgtagcaaagaagtgcttccagcatcactccagcaacacgcccatgcgtcttctctcagcgtatttgggtcttctttgcccaaaagaacacaaaagcctttttccattgtatggaagatagtttttaagacatttgaaactttctactatagtttacagaacaaattattttatttttattgtaaatcttagtgtggaagagctgatttctaaaatatgattaaagtaaatatatacctatgaatatcaagagtcgtctccctgagcctgtagttggaagtgacgactgtaatggaatgatgtcttgtatagaaatgcccttctctgaaataaagagaactcctgggctttctaaagaggctgcgggaagccatcctccactcccactgtgtgtgagagcagtgcttctgatcctgctgtcaccccgacctctggcaggagccggcgccagtaggaaagacctccttcctaaataaaagaagtgtctcccnnnnnnnnnnnnnnnnnnnnnnnnnnnnnnnnnnncctgagcaggcggccgcaagcttattccctttagttgagggtaattt

SEQ ID NO: 78476 - DNA, 558 bp, Homo Sapiens
  misc_feature (11)..(11): n is a, c, g, or t
  misc_feature (73)..(89): n is a, c, g, or t
atttcggaacnagggaaaaaatatcctacaagtcttcagggaactgtcttctggtttagtagaggatgaagannnnnnnnnnnnnnnnncccccccaatattcagcttgaattgcagtaacataattcattctcatggcctttgcagatacaaaagttgggactacaagcaagtgacataaaaagcttctcagctctcgcagagcttgttgctgctgccaaggaccaggcaacagcagagcagccttaggcatcttggaagatcccgaggttagattcttaagcaagagaagagttggacttccaggctgaaggggagaaagtgactctgttctcttagcaaccgtctgtagcaaagaagtgcttccagcatcactccagcaacacgcccatgcgtcttctctcagcgtatttgggtcttctttgcccaaaagaacacaaaagcctttttccattgtatggaagatagtttttaagacatttgaaactttctactatagtttacagaacaaattattttatttttattgtaaatcttagtgtggaagagctgatttct

SEQ ID NO: 78477 - DNA, 1091 bp, Homo Sapiens
  misc_feature (71)..(79): n is a, c, g, or t
  misc_feature (217)..(230): n is a, c, g, or t
  misc_feature (253)..(483): n is a, c, g, or t
actgacgtgtcagcttttaatcagttatgaccactgttgttcatgttaatttcttgcaatcactcctaagnnnnnnnnnttctctcattccaaattacaaacaaccaaattacaaacatctggaacaaaactcttccaaaggaaacaaacaactacttttattgttaaactttcaattcacagattaactttcaaaggttcatatttcccacgttcnnnnnnnnnnnnnngagacagggtctcgctctgtctnnnnnnnnnnnnnnnnnnnnnnnnnnnnnnnnnnnnnnnnnnnnnnnnnnnnnnnnnnnnnnnnnnnnnnnnnnnnnnnnnnnnnnnnnnnnnnnnnnnnnnnnnnnnnnnnnnnnnnnnnnnnnnnnnnnnnnnnnnnnnnnnnnnnnnnnnnnnnnnnnnnnnnnnnnnnnnnnnnnnnnnnnnnnnnnnnnnnnnnnnnnnnnnnnnnnnnnnnnnnnnnnnnnnnnngtgtgagccaccgcactcggcccctatttcccacattcttaatgacaccccatccacagtggtccaatcaactttcaaattagctctggggaaaaaaatacatttaatgaaagctagaaaacctagagaaggtcttgctcttcatctttcactgcagctatggacagctcggcaccacatttgcaccaatcagcatgtttgcccatgtcctgccaaggagagaagtttacatcatcactgacaaggtgtgttcacctattctcatcacgtaacactgatggattccatacctaatttatcaatctaagacattactggaccacgtaaccttacatataactacctgaccatattttcacatgaagttgctgctgcttattatacatcaaagttcacgtcaatgtggcatgaagtcaagaggattccaagcaaactccatcaaaaccttggggctcacagcatctcccagtgtgtagattttcacatctaagttctgaagacatgatctaagcatggaagaacttctgaagttgaccactgatcttctgagtgcaagtcacatctggaaatcctgtaggcaatgtcatgggcaaaatgtgttcataaaa

SEQ ID NO: 78478 - DNA, 415 bp, Homo Sapiens
  misc_feature (343)..(343): n is a, c, g, or t
  misc_feature (351)..(352): n is a, c, g, or t
  misc_feature (361)..(361): n is a, c, g, or t
  misc_feature (371)..(371): n is a, c, g, or t
agacataaagctgggcatcagcaactggcctgtggtgatgcaaagctgctttgctctgtatctggctggactgatctgtctcacaagaagccatgaggccatagggagaagctccctctccccttcatcttctgctccaaaggtggtagcaagaggagtacccagttaggggttggagcccccatataacatcttcctgtcagaagactgatggatctttttcattccaaccatctccctttcccccgatgaatgcaataaaactctgtgacaccagcaaccattgctctttagaaatgggttttctgatcatatggctgatgtgttatgggcagtatggagncttcattnngtgctctgntttcatcttntttgtttttataataaaatttatggatttgctcctggtaccttt

SEQ ID NO: 78479 - DNA, 745 bp, Homo Sapiens
ctcaagggcatgcagaagaagcggccgtcagatgtgcagagcgccctgctgcggcggcacctcctggagctcacccagagcttcatcatccccctggagcactacatggccagcctcatgcccctgcagaagagcatcacgccctggaagactcccccgcagatccagcccttcagccaggatgacttcctgcgtagcctggagcatgctgggccccagctcacctgcatcctcaagggcgactggctgggtctctacaggcggtttttcaagtccccccattttgatggctggtaccggcagcggcacaaggagatggccctgaagctggaggccctgcacctggaggctatctgtgaggcgaacatcgagacctggatgaaagacaagtccgaggtggaggtcgtggacctggtcctgaaacttcgtgagaagctggtgcgggctcagggccaccagctccctgtgaaggaggctacgctgcagcgggcacagctgtacatcgagacggtcatcggctccctgcccaaagacctgcaggctgtcttgtgccctccctagaacaaagccaagggccacggtcccagggccctaggtctgcctgagcctcccactccccagtggtggcggcactgggccaagcacacgctccccttccttggccccccgcccagactgcaggctccccttcctgcaccaccattgtctcagcagtaaaggcgacatttggaaccacaaataaaaa

SEQ ID NO: 78480 - DNA, 367 bp, Homo Sapiens
taccgaggcgcaattctgcacccaggcgcacttctgcacccaggcgcacttctgcaggcgcatgaggctggcaatgctagtgctccagggggatgatgaagctctgggtgagctccaggaggggccaccgcagcagggcgctctgcacatctgacggccgcttattcgtgcacgcccgggagcacccgtgtgagcagcgccttatcgcggtggaggtgggccgtgtaagcggtgtagaggcctggcttggtgtccagggtcttcaaccttgaaggcatttgtcagcgttgacatgcttaggcaggtctccgtgacatctttgggctccccgactcggaggatgtggggccagaagtgcgcctgggtg

SEQ ID NO: 78481 - DNA, 602 bp, Homo Sapiens
  misc_feature (602)..(602): n is a, c, g, or t
gggaagatccctgaagccatcacagaggctccccaacttctgagtcgcccatctgttgctgtgggagtgtgaacggatcgctgaaggagagggagctttgctctctctaggtgggcaagtttcctgggctctctgtgttgcctccctctggcttcttcctcccgtgccctctccccgtgtgccccagggggaatcagggatcctcaccctcctgaggccccagtggggaagaatgaacatggcttcatcccaggttaactgatgctgccatttgcccagcctcttccatcccagccctgtcagtgagcccaggtctggtgcaactgctgcaggatgcctgtagtagggaactctggaagtgtattgggctgaggtgggattttccctccccacagtgcactgagcaatggagggtggtgagggagccatgctgctgaattctggttggcatttccccattatgtaaaatggggtgttgggtagggcagactctgcttgggtttggttgtaagataaacctggaggagaagcacagttgtcccattgaattatttgagcaaaaactactgtaaataacttttttgtcttttgtcaaataaaan

SEQ ID NO: 78482 - DNA, 397 bp, Homo Sapiens
  misc_feature (42)..(42): n is a, c, g, or t
  misc_feature (44)..(44): n is a, c, g, or t
ttgctcagtgcactgtggggaggggaaaatcccacctcagcngnaatacactcccacagcaacagatgggcgactcagaagttggggagcctctgtgatggcttcagggatcttcccagaaagtacagaacacatgttactgtctttctcctggctagacccacccaagttagtcagtatccaggaaccttttctccttgtgcctgacctggtgatttcaggaaaactaaaggctgtcgtcctgatctatcttttggcccagtgacactactcaggacaaaaatattttggctagcaataacctaggattagtgtttcttaggatatataaagatggggcatattgttgaacactgtcagcaatgaaacagcaaaagaggctgggcgtggtggctca

SEQ ID NO: 78483 - DNA, 2873 bp, Homo Sapiens
ggcttaggtacgaggctgggtggtgaattcggccgaggctcgagcggtccagcgccaagttcggggtttggggttggagcggctggtcacgtggctggcccgcggcggtgcgcggggcgttgggtcagcgggtctgggactggtggcaccggcggcggcgtaggacggaggcgtcgctaggcagcttcgaaccagtgcaatgacgatgccagtcaacggggcccacaaggatgctgacctgtggtcctcacatgacaagatgctggcacaacccctcaaagacagtgatgttgaggtttacaacatcattaagaaggagagtaaccggcagagggttggattggagctgattgcctcggagaatttcgccagccgagcagttttggaggccctaggctcttgcttaaataacaaatactctgaggggtacccgggccagagatactatggcgggactgagtttattgatgaactggagaccctctgtcagaagcgagccctgcaggcctataagctggacccacagtgctggggggtcaacgtccagccctactcaggctcccctgcaaactttgctgtgtacactgccctggtggaaccccatgggcgcatcatgggcctggaccttccggatgggggccacctgacccatgggttcatgacagacaagaagaaaatctctgccacgtccatcttctttgaatctatgccctacaaggtgaacccagatactggctacatcaactatgaccagctggaggagaacgcacgcctcttccacccgaagctgatcatcgcaggaaccagctgctactcccgaaacctggaatatgcccggctacggaagattgcagatgagaacggggcgtatctcatggcggacatggctcacatcagcgggctggtggcggctggcgtggtgccctccccattgaacactgacatgtggtgaccaccaccactcacaagaccctgcgaggctgccgagctggcatgatcttctacaggaaaggagtgaaaagtgtggatcccaagactggcaaagagattctgtacaacctggagtctcttatcaattctgctgtgttccctggcctgcagggaggtccccacaaccacgccattgctggggttgctgtggcactgaagcaagctatgactctggaatttaaagtttatcaacaccaggtggtggccaactgcagggctctgtctgaggccctgacggagctgggctacaaaatagtcacaggtggttctgacaaccatttgatccttgtggatctccgttccaaaggcacagatggtggaagggctgagaaggtgctagaagcctgttctattgcctgcaacaagaacacctgtccaggtgacagaagcgctctgcggcccagtggactgcggctggggaccccagcactgacgtcccgtggacttttggaaaaagacttccaaaaagtagcccactttattcacagagggatagagctgaccctgcagatccagagcgacactggtgtcagagccaccctgaaagagttcaaggagagactggcaggggataagtaccaggcggccgtgcaggctctccgggaggaggttgagagcttcgcctctctcttccctctgcctggcctgcctgacttctaaaggagcgggcccactctggacccacctggcgccacagaggaagctgcctgccggaggacccccacctgagagatggatgagctgctccaaaggggaactgttgacactcgggccctttgagggggtttcttttggacttttttcatgttttcttcacaaatcaaaatttgtttaagtctcattgttagtaattctgggacaggttattaaaggatttaaatttgaacctggctttctcacagctggacataattctaggaaaataaaatactatgtcgccacttggtcataatcatttagatggtggtgtagggcaaagctgttagaaagattgtagcgttttactctccctgggctttcctccgccttgctgcaacagagaggaaatgcccatgtccacagcttgtacacactgccccctcactatcttgttatccagtggcatgccaaaggagaactgaattagcttctgaggcttctgctgtaaatcagaagtgtatgttagtcaagagtaaacaagatgcacccagtatggtgggagggttttgctgtcagtagctcaaagtatggtgtagaaatggcctcctccctccatcctgggaagtcccagtcccatcctggtgtgagaatcaaccaggctttcctgctccacctgagataaccaactccctcccgtaatcaggaagccaaatgtcaccttcccaaagaaattttattttcacgtagctgaagtgcaaaacatagatgaccatttttaataagcacaatcaaatttttaaccacagaatgtctacaagaattatagctttaaaaaatacaaccaatttttatatttcaaaaatatttgaactcaaataaattaatttcttaaaaagtacacttctcatactatgtgtttggcattgactctggttaactcttgtgcagcaacacctacgagatgctatcacacacgcgccagctgcactcctgcaccagccgctgcaacgactgcacctcacgtggtggcggggactcacattcacaagacgggacgggaacatgcagtaataaaatagctttttaaaaaataacacatataaattcatcacataggattatgcttttcactgcaaccttgaaggtggcatttatctcaatctgtgactccagctatttagtggcagacaatcccggtgaggcagcctgtggtcccaccttgtaggtggcagcccctgcaatct

SEQ ID NO: 78484 - DNA, 1041 bp, Homo Sapiens
gagacccgccgacacgagcagagcaacctaaaaacggtccccccccagacgcggacaggaaaaaagggtctggacggcgaagaagcttcacctgcgggctacaagactggaaccgtgggccctaaagccccaggctctcttcgatcagggcggcatatccgagaagcgatgcccacatgcccacggacagcgaagcgtggattgtccaatggggcccaccgaacacgtgagagcaagccagtgcaagaagctggccaagcccccgggaaggtagagctgggaccacagctctgcaccttcacagtgcactgaaggtacctagggctcatttggaccttctgcgcctgctatggggacctgacctggtggtgtcagtcactgctgacaaccactcagagctggaacccaagatcctagatagtccgtagatagcacttaggacaagaatgtgcattgactgggggtggatgactgaggtgccaggcactgggtagagcaccatggtccacgtggattgtctcagggaagccttgaataaccatctggaggatggatgaccagcataagggcccatgtaggacagaaggcaaagtacaggtccaagaattgggagcgatgggagcgagatggcttcccccaactatagggatcgatcgaggcgagagggaagcccttgctgcctgccattcccagaccccagccctttgtgctcaccctggttccactggtctcaaaagtcacctgcctacaaatgtacaaaaggcgaaggttctgatggctgccttgctccttggctcccccacccccctgtgaggacttctctaggaagtccttcctgactacctgtgcccagagtgcccctacattgagactgtatgccctgctatcagatgccagatctatgtgtctgtctgtgtgtccatcccgccgaccccccagactaacctccaggcatggactgaatctggttctcctcttgtacacccctcaaccctatgcaccctggagtgggcatcaataaaatgaactcgtcgactgacc

SEQ ID NO: 78485 - DNA, 635 bp, Homo Sapiens
  misc_feature (446)..(455): n is a, c, g, or t
tgtgtgggcctatgcactcacacactgaagaaacaaggaagatgcctttcaagcctcactgggcctctctgggacatggccacctgacctgtgtgtggctggtgcagcctggcaccaagtgggctacctgttaggaacatgaataccttacaaagctgaagctggaacttttcccaaagggttttgggtatagcctgccctggaggggaaggaagtccatgcaagcaaagacatgcagtttgcttgcacacaccagcagagctaagactggagtctcctgtggcctaactttcaatgagggaaccggatgctgttcacactttgactggatggagatgcatttacaaaacagactggagaaggacttaatactcagatggattggaactatcatggtcactgctcctctcccctccccacaaaaggaaaaaaaagctggatttgannnnnnnnnnctggtcactcgagcacatctaagatcacccattaggttttatctgggacctgcagtttggctttgggattgatcatcttgtggattttattcctgacgattcccttgctgcctacccttttctctcctctggttctcaacctcaacgagttcaaatcagttgtcctttttagctcccgtg

SEQ ID NO: 78486 - DNA, 722 bp, Homo Sapiens
tcaatcagctgctccaggggtcagcagggcagggtgctgccagtaagtccctcagggagcacagcccggccgcccaggctgggggatactggggcagagcttccaggtctgtggggcctgatctctccccaaggctctccaggccttggtgcgccctccacagtgaccttcagagaggctgcaccccctcagaagaacagtgagaaatctctccatcacacgctccctggtccttatgtccctgaggccacccttccccaccccccagtgcctggagaagcgtgagactctggaggggcgccaggaggccaggggtcctcagggctaggcctggagctcggcccaagagctgcttttgcgaagcctgtcttgaatccggattcaccagagaacaagagcctcccagcctttggcgtttctgggcctgtaaagatgtgtgtacctcccaggccactctgatgcaagggcagggaccatgccaggcctgggttgggaatggctctgtgactccagaagctccgtctaaaactccaaagatgcccaaaaggctgtgctgctatgtggaatgtgtattatttgtgagcacgatgcggcttcttcctcattttgcagagcaacctaagcgggcagatgtacaaaccgtgtgttcgaaacccctgagtccatgtgtgtgaaaatgcaggttttctcttagaaataaagtggtgacttagagctgtaaa

SEQ ID NO: 78487 - DNA, 2090 bp, Homo Sapiens
  misc_feature (42)..(42): n is a, c, g, or t
tatttttaatctattttacccccacactccccgctcgatctnaaacacggatggtaccggtccggaattcccgggatcctggagttacaatggcggcgcccatgctgcgctggggctgccgtggaagacgttgggctttcgcccgggttgacggtggttcttgccaccgaagaggggctccgactgggtccacatccaaccagattaggggagagagctcagtggctcagcagcccctccacacggcccagaagacgaggaaaggtgaacacaaatgggctgctgtggtaggtttggaaattcatgcccagatttcctccaactctaaactcttctctggatctcaagttcgcttttcagcacctccaaattctttggtttctttttttgatgcatctctacctggaactttgccggttctcaacaggaggtgtgtagaagcggcggtgatgacaggcctggctctgaactgccacataaacaagaagtccttgtttgacaggaagcactacttctatgcagacctccctgcaggctaccaaattacccagcagaggctcccaattgctgtgaatgggagcttgatatatggcgtctgtgcagggaagaagcagagtcaggtgatccccaagacggtgaggatcaagcagatccagttggagcaagacagtggcaaaagcctccacgacaacctgaggtctcagacgctcattgatttgaacagggcaggagtgggccttctggaggtggtcctggagcccgacatgtcctgtggagaagaggcggcaacagctgtcagggagctgcagctgatccttcaagccctggggaccagccaggcgaacatggcagagggccagttgagagtggaagccaatatatccgtgcatcaccctggggagcctttgggcgttcgaacggaagtgaagaatctcaacagcatcaggttcctggccaaagccatagactatgaaattcagaggcaaatcaatgaacttgagaatggaggtgaaattctgaacgaaacacgctcatttcatcacaagctggggtgcaccatgtcaatgagagacaaagaaggaaaacaggactacaggttcatgccagaacccaacctgcctcccctggtgctctacgacgccacatctctgcccgcaggtgcagacccacagcaagtgatcaatattgaccagattcgggagacactcccggagctccccagtgtgacccgagagaagcttgtccaacagtatgggatgctgctggaacacagcttcactttgctgaacgaagtcggcctactggagtttcttccaaaatgtgataaaagaaactagggcagagccaaaaaaggtgactagttgggtcctcaacacttttctgggctatttaaagcaacagaacctcgctgtcagtgagagtcctgtcacaccctctgcactcgctgagcttcttgacctgctggacagcagaacaatttcttcatcagcagctaaacaggtgtttgaggaactgtggaagagggaaggcaagactccagggcagattgtttcagaaaagcagcttgaactgatgcaggaccagggggcactggagcagctctgcccactctgtgatggaggcccatccttcaagtggtaatggatgtgaagaacagaaaccccagagctataaataaactgattgggttggtccggaaagcgactcaaagccgagcagatccagtcatgataaaggagatcctggagaagaagctgtcattgtgagatgtttgggatccccttgcccaagggacaacaacaaacagtgcagcctgactgggaacaggatcctgtgaaagctgatgcccatgtgccctgagagctgcctctcaatccctgtcccaagccacagctatggcattaatgtcaccagtgttctcaccctctaggccctgtgcctggaggtgcctccacagccgaccagcagccaccccgcctgcttcatccacatcaggagggtccggtgaggctgcagcagtggttaaggagtaacaccttcttgtattaaggaattttaaactaaataaaatgtatgttggagatactgtt

SEQ ID NO: 78488 - DNA, 1147 bp, Homo Sapiens
  misc_feature (239)..(247): n is a, c, g, or t
cagtcgacggtaccggacatatgcccgggaattcggccattacggccggggatgatagacttcgaaaacagatgagaagactagcagctagcaagggtgcttgtggtcacactgtggaacactaaagagctaggaaagagttgagcacaggcaacattacaaacaaaggatttgaaaacaccaagagtacaggtcttctttaaggaagaataaaaaagaagaggttcatttttctggcnnnnnnnnncacctgaaacactttttctcgagtccaaaatcattccccccgtgaagtctgcttaccaaaacataagacgacttatatatttgaaagaagtcaaatgaatgagctctctaatagaagtccatgagttgagtgggtatttcttatttgaaagtgtttttctttaatcaaaagtccttagaatgagggaaacaaaatatttattagttctgggaatcccacttatcaaatcattcaaaactttcagctggagtggggtttgcttaggtttagtaagtgtccataagagaaatggtagaagatgaatcagtatgaagacactgttaatgaggttatgagaaaaaaacagcaggggcattagtttcaggcaaggcagctcccaggtttagagattaatttttaccccctaaggaatatccagtcaaagacgctgagtgggagctgtcaggcagtagcagctgtgtttgagtttctggctgaaaatggtgaagaatggacttaattatgctaacaaactgaaaaatctagacatagatcctctgatatacaattagagatatttttatatagaccccaagcattctgtgcataaaagttaacattaggctgtggtgcagtaaccatttaatgtcgaggctctatttcggaaatacactacaaatgttaaagtacgtggctgtcctcttaagacactagtagagcaaagacttaatcatatcaacttaattctgttacacaatatgtgttttttaatatactaaccatttcttatggaaaggtcctgtggggagcccatcctctcgccaagccatcacaggctctgcatacacatgcactcagtgtggactgggaagcattactttgtagatgtattttcaataaagaaaaaaatagttttacatt

SEQ ID NO: 78489 - DNA, 1110 bp, Homo Sapiens
ctctggggtgagtcggacgagggggactcaggatcattgttatcagtgggccaagttagatttgctttcaagatttgcttttcgggcctgatgattttaaagcaaaaatcaccctctagttgaaagagcttacagctcgagtcaccttttagctattgtctgctttttatttaccctgtatgttatcctcagagggaagatgataatatataaataatataatgaacacacccttagtttctcataagcatttgccctcaccatggtttataaaactttgggaaaacggaatattcagaaataggtttccgccatgtactgaaaggtctgtggccatctgtgaggtagatgaagaagcagcatagtggtctccttacatctaggcctaactgtccctcttcctgcccccgggtaccacagtccacctttagaccctactgtcgccccatcttctccgtggatgggccatgcgtcctgaaaacaggacatcagattcactggttctgtaacccagtagctgtgacgttccatctcttctaaccagccatggccttcccctcctctgccatacccttaatgcggccctcagattagatgaaaaacttgctcctggtggatcccaagggaccctcaaggacctcgaggttactgcagtcagatgccatctcatcccctgtgggggccaaagtttttatgtgggcagatgctgtggtcaggaactaggcatgctttctggcaatgcactcaccagacaaaaatcccttgatgtaaatcccatgttaatttattaaatttcagtcagaaggtcagcatttacatgacagaatgtatgtagagagttggggtgtctggtaggcaaactgcaaggcagttgagatagttggattaagaggctagacgagacatagaatactattggtatgtgtgcaatttcatgaatattaaattatgtttcgaagtccagttgtcattcccgcattcagatttcatttgctgttgctttatacgttacgtacccaaggacattgcctcagggttgcaaactctttaaaggaaaatttatccatatatccatgtattatatagaagaataaaaattgagtttacttc

SEQ ID NO: 78490 - DNA, 779 bp, Homo Sapiens
  misc_feature (81)..(81): n is a, c, g, or t
catgttaggaaagcagaaaactatttaatatgcttggaaagattccaaccagagtaaactgaataaaaaccttggacattntgaagagaaaagcatttagttctatctaatttcaatatgcacgtgaattagttcatgttactctaacaatgtattcttactgtccttttttatgaaataggaaagtaaaactgaaagaactatttcttgtgtttttaaaactagccttttctaatatttgatatctaattaaagttagataatatgtaatatgcttttgaacaataatctaaccagaaaatattgtataataaattaccaagaaatcattacattaattataaaaggaacatgtcaatacaacaaatgtttatttaacacctactgttactccaaatactgtgttagaatttgactattcgaagatgaataatagtctttgccctctggaaggccacaatgtagaagtaattctctgtatcagatatttccttgagtgttaagtgtattagtaatcatgttgtaaatcccagtgtaagtcaagaagcaatatcaccaccaccacctccctatgattttgtgataatttggcattttcaatgcttgttaactttcatgttttcatttttatgaaatcatgcagagcttgttataatttttagtggggtttggattaaaatgcttttttgatgtagcagaagatacattttttcccattttacattgttttccttaaatattaagaataatgagtaaaataaactgattttaaaatcccc

SEQ ID NO: 78491 - DNA, 712 bp, Homo Sapiens
  misc_feature (47)..(47): n is a, c, g, or t
  misc_feature (151)..(151): n is a, c, g, or t
tgaacatcttcccagtaaccaggtagtcctggtactcctttagtttnaaaattaggagttaagagagaagaggtgataaacatagtagggaagggaatatcggattcatgcatcagtttatggtgaatccaaatcaatgtcttgaatcctntgaaaacaggcactgggacatcacaggcttcagtacctgaccagtattagttgcatatatcattgaacacacataccagagatgttttagaaatgtgagaaaaacatccttttgcaccatttcaaataagaaagacaaacactaaacaatacaaccatgaaattgatcaccgggattgcaaatctaattgggaaaagagttgagcaaacagcttggactgtttggagttgttgccttactttttaatatgtatttataaagtattccagcaaaagaggatgtagcctctgggaaaaaacaaacatgttacagtgttttttgtagattctcgttctatatctcatcacagcgccagccctgtttttagccggaaaggattcaggataaacattattatgcattctgaattggatgcatattcctaactactgtatttgttaccaaaagtggttctacaaatgctactgaaaaaaatctggaaattcctaatgtcctgagtattaataataaagtttaaaaatgcttttatatcaaaggtgcatcgtgaccaaattgtttaag

SEQ ID NO: 78492 - DNA, 1451 bp, Homo Sapiens
cagtcgacggtaccggacatatgcccgggaattcggccattacggccggggactttgcgaaggcatggcggggacactgtgaatgtcagcccagaaggtgatcagagcctgttaattaaaatggaaagaagacagaagggaaggtagacatcaggttctccctggagacttttcgttttcatttacgctgcggaaactgacgtttttgcctaacaccccatgtaatgtaaacgtataggcttgagtacgtgtccggccgcatgtgtagtgaaccctaaagctttcctaattgtagttagcatcgtccctaagcggaacgattttccgtgaacatgatttgtacttttctacgagccgtacagtatacggagaagctgcacaggtcctcggcaaagcgattgcttttgccatacatcgtgcttaacaaagcgtgcttgaagactgagcccagtttgagatgtgggcttcaatatcaaaagaaaacgctgcgacctagatgtattcttggagtcacccagaaaaccatctggacgcagggaccgagcccccgaaaagcaaaggaggatggcagcaaacaagtgtctgtgcacaggagtcagagagggggaaccgccgtcccaacatcacaaaaagtgaaagaagccggaagagattttacctatttaatagtggtgctttttggaatcagcattacaggtggcttgttttacacgattttcaaagaacttttttcttcatccagtcctagcaagatatatgggagagccttagaaaaatgcagatcacatcctgaggtgatcggtgtctttggtgagtctgttaaaggctatggggaggtgacaaggcggggtcgccggcagcatgtcaggttcactgaatatgtaaaagatgggctgaaacacacgtgtgtgaaattctacattgagggctctgagccagggaagcaaggaacggtgtatgcgcaagtgaaagagaacccaggaagtggtgaatatgattttcgatatatatttgtagaaattgaatcttatcctagaagaactattatcattgaagataatcgatcccaagatgattaaaatagggtttctgatggatgttgaatggcgtggactcgctactccgttcttcacagctgccttccagaatgtgttcaaaagaaagacaagaaggagtgtatggcttataaagtgaatctaatacagtatttgttgcatttaaacaaactagacattttcttacggaaaaattatgaaatacagcatattttatgttctcccattgactcaatcatgacaatatttctgctttaacaccatctttcatgattagaaatgtttgttattggaaatgttacaccatgtaaataaaggaaatagattttagtattgtattcattttatattatagaactgcataatgtctgcagaataaaattaaaactaacaaat

SEQ ID NO: 78493 - DNA, 942 bp, Homo Sapiens
tttttaaactggactttttatgttgcccttgcttcgcttcatctttgttttctgtgatttcaggtggcttgttttacacgattttcaaagaacttttttcttcatccagtcctagcaagatatatgggagagccttagaaaaatgcagatcacatcctgaggtgatcggtgtctttggtgagtctgttaaaggctatggggaggtgacaaggcggggtcgccggcagcatgtcaggttcactgaatatgtaaaagatgggctgaaacacacgtgtgtgaaattctacattgagggctctgagccagggaagcaaggaacggtgtatgcgcaagtgaaagagaacccaggaagtggtgaatatgattttcgatatatatttgtagaaattgaatgttatcctagaagaactattatcattgaagataatcgatcccaagatgacatttttttcagaacccaggaagtggtgaatatgattttcgatatatatttgtagaaattgaatcttatcctagaagaactattatcattgaagataatcgatcccaagatgattaaaatagggtttctgatggatgttgaatggcgtggactcgctactccgttcttcacagctgccttccagaatgtgttcaaaagaaagacaagaaggagtgtatggcttataaagtgaatctaatacagtatttgttgcatttaaacaaactagacattttcttacggaaaaattatgaaatacagcatattttatgttctcccattgactcaatcatgacaatatttctgctttaacaccatctttcatgattagaaatgtttgttattggaaatgttacaccatgtaaataaaggaaatagattttagtattgtattcattttatattatagaactgcataatgtctgcagaataaaattaaaactaacaaatatgtctaataa

SEQ ID NO: 78494 - DNA, 369 bp, Homo Sapiens
aaatatggttggcgtaagttgtattttgaaattcacttattttaaaatcgaagaggattgtaatcatggaaatagaatgtttgtatctacctgcccacattttcttaaaaagatatttcatatacagataatgaagaccaagctagtggctgcactgtaggtctgctgcttatttgtatttgttgtgcttctgtttatgttgtagaagctgaaattctagcaacatgcttcaattctgttattttgatacttatgaaaatgtattaggttttactatattgtgcttttgaaagccataactcttaagaactttgtttttgcatattgtttgctaattctttactttaataaacctcaaaacctgaaaaa

SEQ ID NO: 78495 - DNA, 950 bp, Homo Sapiens
  misc_feature (131)..(175): n is a, c, g, or t
  misc_feature (756)..(811): n is a, c, g, or t
  misc_feature (814)..(822): n is a, c, g, or t
aatcagcaaaacacgatgtaaaagcaaacaagtaattagagaaatcacgtgctgtcaggtcttggaatcaattagaaagagatgactagccagatggaatgcagcccaatcatgtgaacaggcaaaccgcnnnnnnnnnnnnnnnnnnnnnnnnnnnnnnnnnnnnnnnnnnnnnttgttagtagttaaaatgcgaattaaaatacatgctgttttccctaccagacaagcaaagagtaaattaaaatagtagcccaggcttgcctggcagtggcagggaggtgtggctgccagggccttagaggttggcatcaggctgcccaccccagtcactgccagagcctcccacctgagtgttcctcccggcactggaagccagtggccgtccagaggaacgtgattgaattgctgtatatccatctggtggagcactgctgtgtgtctgttaaaaaagaaaccataggtttttagggatatgtaatgatatttagaaagggtttaagagacagtaaagcttggcagaataaaccgtgtatacagaatggatgtttgcttgcataaataaatttatataaatatgtctgggggataaaaataagtatatcacaatgctaagacaggcatatggggaatttaagcttttctttatacttgtccatagtttccaatttttaaatttgtaattttttatcagaaaaataaatgtgtaaatatagtggaatctttattaaaacattcacttttatttgctaaagnnnnnnnnnnnnnnnnnnnnnnnnnnnnnnnnnnnnnnnnnnnnnnnnnnnnnnnnatnnnnnnnnnccgcttctaagaaaatccccctcacggggggcccacagttttacccggtaccccattttcttttttgaacaaaaagggggccccccaatagaggggggcccataatttaaagaaccgtaggggcgccg

SEQ ID NO: 78496 - DNA, 859 bp, Homo Sapiens
  misc_feature (53)..(53): n is a, c, g, or t
  misc_feature (726)..(787): n is a, c, g, or t
agaccagatatggccagttgcgcaggtttctgccaactgtgaagtatcctccntggagcagtgacacaatcttggcggagcattgctacccccgctgccccctccacagttcctgaatggtgctaaggatctgcagcagttggcaacgagctggggctgggggcggcctccatgtccactgagatcataggacactccaatggggatgggacctttcccctcctccatcagaggtgctctgaccctaggttacacgggaaagtgccccacatgcaagtctccctgagggttctgcccctaaaggcagactgcctcatgcccgctagctgtgaggttcattgctaccctcggccctactagccctctcttcccccttgtgcagcggaccacttgcccagtttgctgtggtgctagccttccccatcatccaccaggtgatttctgggtcccagggaaagaaagagagagctgatgcaggtttctacagtgaggaacaggcgtttcccaggccccacacccagatttctctatctttgctgtgttttatggcctgggactgagtccacacggatagatttttccttgtaaccttgagacgagaattccaaggagtgtcaccatcagaggcttctcttcattgtgtcaaagaagcccctagctgctctcgtggcctccttcccccactccctatcccttcacctgtgaaatgcctttgctttgcatatnnnnnnnnnnnnnnnnnnnnnnnnnnnnnnnnnnnnnnnnnnnnnnnnnnnnnnnnnnnnnncctaatgctctgtctcttggtcactgaagcatccaaataaagaatttccctcatgggccagactacaactta

SEQ ID NO: 78497 - DNA, 896 bp, Homo Sapiens
tgaccctctccccaagaagatgaaagattcagtgacggatgtctcaaaatgggatctcatcgtctgcgcagtggttgctgtcctatcatgtgcagtcagcgccagcactgtattcctgtcattgcgaatgttgcccatttaatgtggttcgaaagactctatgtttggcttcagtgttttgaaaaatacatcttgtacccagcgctaattttgaatgccctcactattgatgcatttttaataagcaatcaccggagacttggtacccactgggacatttttctgatgatcattgctggcatgaagctgttgcggacatcattctgcaacccggtttaccagtttattaacttgagcttcactgtcatcttggtccacttggactacaaagatatttcagagagcttcttactggatttcttcatggtgtccattgtatttagcaagctcggggacctgcttcacaagttacagttcgtcctgacatatgtggctccttggcagatggcttggggttcttcgtttcacgtgtttgctcagctctttgccattcctcattctgccatgcttttctttcagacgattgccacatcaatcttttctaccccattgagcccatttcttgggagtgtcattttcatcacatcatatgtcaggccagtgaaattctgggagaaaaactacaagtaagatcctaaaatcagtgctcaattgcttttctccagtttgcacttcagaaggctcctctgccttcctctgttaggaggtccctggctccaggcttcccctgctgtggggccaggccaaacctgtctctcttgatgacctcctcagttcattgactcagctcttgggtctcagggatctggaaagaacatgactgatttcaaagttag

SEQ ID NO: 78498 - DNA, 1618 bp, Homo Sapiens
tatctagagaaaaacacaagaccaggtttatttcatacaatgttattcacacatttttcattttctaatttatacataatatacaaagaagtgaagttaacattatttcatatgaaccaataagagccaggacttagacaaactggtccagaaacaatccctatcaaaaggagacactcaagagtaaagcctaggtagttttgcccaattgttttattctgaaatgtgattttcagattttaccaaaatttcatgccaacttactaaaaggtaaaaattggggtgggcacccaaaatggcagactgtaaaatttctacaagaacaggtacttttgtagagcaggcctgaaagtattgggaagattgggttgtcagcactgggacaaatgggaatgagtatcaggaccccaagaagagggtttagtttctcaatgtagtattctctacttgtcattttctaaaattgcagagataatgcctgtgccaacagagggcaaggatgaaggaagactaggaattcaactgtacaaagacaggaaagccattaccaatctccaacatgacagctttgatcctgaaaccatgggctgatactgagaacaaaagttcgatacgggccgaaatactctgaggttggtaaagtaagaaaaaagtgagacagcggctttgtgtgggtttttaaaaaaatgaaacaaacaccaaggcagttgctgcagtgactgggacatgctgatgacccagagtgactatgagaaggaacggtgacaagtgtttggatttaatggtctcaccaaggaatgttgggttagaaaagtaaaataactcaacaccaaacatgaaaaagtatgcctggcatccccaaactttatgccattatttttaggttcataatatgaacaactaagtgataaaacctttagattccatattgtgctcagaagattgcgtttcttctgcagatctctagtaaaaaaagatctcttccatattcagctgacagaatagcatgttcattttagttttcagcactgaacataagtgggtcaacataaatgtttatacaaaatactgacttcaacaaaatacaaagcactttctttatctttcagaaactgaatatacacagcaagtttttttccaaaatattttcataggcaaaggattaaaaacgattttaattatacacatatggtcacaattttgccttaaaaagattgttgggaaatgtacataaggccgcttgtaaatgtacatcgtgttactgttatgtcttatgtccagaggaaaaaatgttatcatacagatttgctcttacttgggagtaggctattcaaaaatacagtactcttctgtacaaagaaaaaagtcacatcacatttaataagatgaaaaaagcattggcctccatggtaaccaaatatctcagtccaatactttctattatgcacaataccctgacttcaattgaaagtgatccaaattctagcaggtccatattaacagtcaacaactatgttataaaacaaaatgatctcacaataataaaaagaaagctggttcatacttctgaaaccatataaagataaaaaattttaaaaaatcccaggaattccggacc

SEQ ID NO: 78499 - DNA, 1042 bp, Homo Sapiens
  misc_feature (118)..(118): n is a, c, g, or t
  misc_feature (148)..(148): n is a, c, g, or t
  misc_feature (181)..(181): n is a, c, g, or t
  misc_feature (194)..(194): n is a, c, g, or t
  misc_feature (206)..(576): n is a, c, g, or t
ccacccaaatgagcctaagctagtttgaaagcccaccttcccggaggagaagccgacagttccggtagcgcagtccgaacagagagcgacgaagagctcccaggggaacgcttgtatntttagtctgtcggttccccacctctgactnagctcgatttgtgatctcgtcagggggcggacntatgaaaaacgcnagcaccgcgccnnnnnnnnnnnnnnnnnnnnnnnnnnnnnnnnnnnnnnnnnnnnnnnnnnnnnnnnnnnnnnnnnnnnnnnnnnnnnnnnnnnnnnnnnnnnnnnnnnnnnnnnnnnnnnnnnnnnnnnnnnnnnnnnnnnnnnnnnnnnnnnnnnnnnnnnnnnnnnnnnnnnnnnnnnnnnnnnnnnnnnnnnnnnnnnnnnnnnnnnnnnnnnnnnnnnnnnnnnnnnnnnnnnnnnnnnnnnnnnnnnnnnnnnnnnnnnnnnnnnnnnnnnnnnnnnnnnnnnnnnnnnnnnnnnnnnnnnnnnnnnnnnnnnnnnnnnnnnnnnnnnnnnnnnnnnnnnnnnnnnnnnnnnnnnnnnnnnnnnnnnnnnnnnnnnagtatagtatatattttcctaacctttcttctgggtccttcctcagatctttgagtcacgatagaaaaggagcacgaggtctttgtgtaggaaagttaagcttcctgcctgcggtgttcttgcaattgccttaggaattcacaagctctaggagttctgaacggaaggcagacgagaggcactttatccagtcccagaaagaatctctaaccgtgtgactgagaagtcatctagaaaaacttatatttttaatgtaaaaacaaatggggcttaccagacctcacagagtattggacgtctacaagtgcttttatattttgtaactgtaaagaagtttcatatgcacagaagagcagttggaaatctggtcgactgcaataaaacaagatgacctttgcatgtacaaagatgttgcattcagactatgaaaatagcaaataaagctttggtgcaagttgcattggag

SEQ ID NO: 78500 - DNA, 611 bp, Homo Sapiens
agtgagcccctctggaacctggtctcctagctcacagcagccctggcccacagtgcaagaggacaagatgggggatatctgaggccagtgctctcctgcctctttgtctttctgattagagaccacgttggtctgctgagaaccagaaaagctgggaaattcccggctggcccctctgcctagccttctgcagggtcttctccctaccctgtggaaataaagccagagaccctgtggccccccctttatatttgcagccactgtcaatgggcatcacagcaaggcaggctttttgatctgaagctgtttggggtgaccccatagtgagtctggccttgactcacttttctggcttgtctcacagtagcaggggatctgctgttctccaccctttaaaaatggagcctttcatcttccaagaccaaagaaggaaggaaggtggacggtgagagggtcttaaatccccagcctgtgagtctcagcctctttccagggaagcctcattctactgcttggggcttgctgaggttgagatatgagttatttctgagtaagtgaaggctgaaggcagtgctgagtcctttctgctagctgggtggtatcttttactg

SEQ ID NO: 78501 - DNA, 718 bp, Homo Sapiens
  misc_feature (419)..(624): n is a, c, g, or t
aaggagtagaatggctgagttgagctctgtgtagagacatcctggcagcaagtcagaggatgacttgtggagttgatgtgagcatctattaggaggctgctaccatagttctgataaaagtcagaactgaggtactagcgaggctgatataaatgattttgaaatgagggagataagctcaagcaggaccccaggtttctagcttgggtgacctcatcgataaagaacagaggaagaagagcaggcatgtcgaggtggaaggagaggaagcatttggttttggacttgatggtgacggagttcaggacaccctgccccaaaatattttaaggtgacggaatttgaggaaactaaagcagcaggaagatcagtctcaccttcccccgaccttctcccctgaagtaggtcataaaaccagnnnnnnnnnnnnnnnnnnnnnnnnnnnnnnnnnnnnnnnnnnnnnnnnnnnnnnnnnnnnnnnnnnnnnnnnnnnnnnnnnnnnnnnnnnnnnnnnnnnnnnnnnnnnnnnnnnnnnnnnnnnnnnnnnnnnnnnnnnnnnnnnnnnnnnnnnnnnnnnnnnnnnnnnnnnnnnnnnnnnnnnnnnnnnnnnnnnnnnnnnnnnnngcataaaacatacaagtttaactgtttcttagggtctttgtttcctcacgaaggctcctgtattacatgtaaaacaaataaacgtgtacgcttt

SEQ ID NO: 78502 - DNA, 1024 bp, Homo Sapiens
  misc_feature (65)..(65): n is a, c, g, or t
  misc_feature (110)..(110): n is a, c, g, or t
  misc_feature (178)..(178): n is a, c, g, or t
  misc_feature (238)..(238): n is a, c, g, or t
cccatagcgaatcatatgacaatgcaggacagtttccgactgaaagcggcaatagcgcaagccantaattgagtactcaatcattagcaccccagcttacacttttgctnccgctcgtatttgtgtgaatgtggcggatacaattcacacagaaacagctagaacagattcgaattantagactcactataggaatttgacctcgagccaagagtcggcacgagttagaaccggggcntggttgcggttgaggcccgatggaaggttgcccccaatcttagcctgtgcactctcttccttgggtgtatggtgctggctcctggggactacaaatcccagagtgcggtgtgcccggcctcatttctgatagatcccgcttgggggaggtggtgtatggttacggagctgtgcatcttgggacatgtagtagcccaggtcggcttgtcactcgctgtgagatggggagattttgtcttttgatttatccctgtagggctggcagggttgtagatgaagggggaatgatctgagccttggttcccctgacacgtcttgctagccccagggttagagtgggcagggcagagccgcgcagcacctgggagcggtacctttcccttgggcagcctggggtcccaggaacaagccagggcgagtggcatgtctgcctgagcagggtgtggccccagaaagctgaggagtgtgggctggcagagagcttcgagggcaaggccacccgcgggggcgtgtgtgtggtggggcttggcatgtgatggcagctccaggcatgccgctgcttgtatggctttctttggcctctgaccctgctgcccattctttccaacatcacagatgaactgcctctcctcctccctgcctggggagcccagtggccagggaggggagtggtggagccagtcgctgtaacactgagcctcagagacgaaccaaaaccagctgggctgagctcagatccagggggaaatgctggaagtcaataaaactgagttttgagagcttgaag

SEQ ID NO: 78503 - DNA, 1173 bp, Homo Sapiens
gattcccgggatcgcatgcctgcgcgcacagctgggccgggcgcgtcctacgcagcagccgcgagccgggctgcgggtgccagacggttcccggcggggggcaggggcggggcgccgcaggaggccgggactcctggcggaggagccccaaggaggcccgcctgacgactgaccagttgccatggcatcctactacgagatcctagacgtgccgcgaagtgcgtccgctgatgacatcaagaaggcgtatcggcgcaaggctctccagtggcacccagacaaaaacccagataataaagagtttgctgagaagaaatttaaggaggtggccgaggcatatgaagtgctgtctgacaagcacaagcgggagatttacgaccgctatggccgggaagggctgacagggacaggaactggcccatctcgggcagaagctggcagtggtgggcctggcttcaccttcaccttccgcagccccgaggaggtcttccgggaattctttgggagtggagacccttttgcagagctctttgatgacctgggccccttctcagagcttcagaaccggggttcccgacactcaggccccttctttaccttctcttcctccttccctgggcactccgatttctcctcctcatctttctccttcagtcctggggctggtgcttttcgctctgtttctacatctaccacctttgtccaaggacgccgcatcaccacacgcagaatcatggagaacgggcaggagcgggtggaacgtggaggaggatgggcagctgaagtcagtcacaatcaatggtgtcccagatgacctggcactgggcttggagctgagccgtcgcgagcagcagccgtcagtcacttccaggtctgggggcactcaggtccagcagacccctgcctcatgccccttggacagcgacctctctgaggatgaggacctgcagctggccatggcctacagcctgtcagagatggaggcagctgggaagaaacccgcagatgaactgcctctcctcctccctgcctggggagcccagtggccagggaggggagtggtggagccagtcgctgtaacactgagcctcagagacgaaccaaaaccagctgggctgagctcagatccagggggaaatgctggaagtcaataaaactgagttttgagaaaaa

SEQ ID NO: 78504 - DNA, 1364 bp, Homo Sapiens
  misc_feature (523)..(534): n is a, c, g, or t
atacagaaaactattatcagttgttattgttatcccttgaaagcgagggtgacaaaaacaacaaaacaccgttataaacacatcaaaggttcattctgactgaggtaagactttccaagcccttgttagattaggccttataaaacttgtgtgcattataacctaagctgtgcaacctgtgaagccaagagtgaactgatgtttcatttatattttcatccaaatgacattatctgcacgtttttaaaatttaaaaacaaaggactatttaaaaatacagtttattaacaaacgtgaactactttctgttacattaggtgttccctagtgtttcttaatttctttttagaaagtgtatttttattagtatttttccggtgaacagaagatttgtttggatttaaacatttactaagacagtacctattaggaaaaccaaatattgcaaatggtcaattcgattttaatttctcaaaagatactctgttatccagaagattaaaatgcctacattgagtgcttnnnnnnnnnnnngcaactgtgatgatgtgagcagaatggcaagtaagttaagcatttttgatcctgtaatcatggtatcattacaatgaaaggaattcacaaactactgccagaggaagtttgttttttaatttaagagggaaatataacctataaatttgtttcttccaagcttagctcttaaatttggagactcaaagttaaacatcctcaacagagttttatttataattttgaattgtcaatttgtattttgctactgatctgtgatcaaccattttaactttcatctctagggatgtttaacatttataattgcaaaataaaccaactataaaaaaagaaactaagagagaattggaactttaattaccttgtgggttttgcaaataggctccattttccatgttgagtagattataaccttattaactatgcataggcctaagaaaggtggcaatgaactgtgcatgtaaattttaaatgggtactttgtgcaattcgttaaaagaagatactctatgaatatgattctatatattgaaatcagaaaacctaccaaacaaaaacatcagaagctgctgccataatgactattttctactgtaggctgctttggaaataattcccatatccttgctttgtaagttggtaatatcactatgcatttctacacattttataaatttgatttatgcagattttgataccctgtatgtttctgtagaaattgtataaatattcaaaattttattaggataaatttgagaaacttacgtatatcttaattctgggttgcttgttttttaggtgacaaaaataaaatattgtattttaattcc

SEQ ID NO: 78505 - DNA, 732 bp, Homo Sapiens
  misc_feature (153)..(153): n is a, c, g, or t
tacgtgctcggagtgcggctgccgaatgtgtacatgccaggcgacgtgccagtgtgcagcccccagcagtacaagaactgtgcccacccggccatagatgccatgcttcgcaaggactcgtgcgcctgccccaacccgtgcgccagcacgcgntacgccaaggagctctccatggtgcggatcccgagccgcgccgccgcgcgcttcctggcccggaagctcaaccgcagcgaggcctacatcgcggagaacgtgctggccctggacatcttctttgaggccctcaactatgagaccgtggagcagaagaaggcctatgagatgtcagagctgcttggtgacattgggggccagatggggctgttcatcggggccagcctgctcaccatcctcgagatcctagactacctctgtgaggtgttccgagacaaggtcctgggatatttctggaaccgacagcactcccaaaggcactccagcaccaatctgcttcaggaagggctgggcagccatcgaacccaagttccccacctcagcctgggccccagacctcccacccctccctgtgccgtcaccaagactctctccgcctcccaccgcacctgctaccttgtcacacagctctagacctgctgtctgtgtcctcggagccccgccctgacatcctggacatgcctagcctgcacgtagcttttccgtcttcaccccaaataaagtcctaatgcatcaaaa

SEQ ID NO: 78506 - DNA, 554 bp, Homo Sapiens
tttatagtcaaagactttaattactagaacaagaaaggaaggtatacattatttaaaataacaaaagttaacagaggcactaataataatgacataaccacactggaggtggagagcagtgtagatatcctcattgtcacagaagtcagtcaatagaccgtgtctgaaaactaggaaacagaaaaaaacaagacagttccttccagggaactagccccaaggtgaggcaggaaactgatgattttcattatagggtacccttccatactgccatgttgacccatgtgcacaaattaccttggtgaagtttttaatgtttaaaaacaatcatggtgattacacactaaatggtccttatttaaggtcatacctggaattccaatattctcttggcaccacaggggcaatctggaatatccttttcttgaggaatattttcaccagaaatccagatgggggcaatacctctgccatatctaagaatctaaaatcaatgaagatcatgttcaaataatcaataccttacctataagttgccaatggtaacatgctat

SEQ ID NO: 78507 - DNA, 1286 bp, Homo Sapiens
gggcccgccttccgacccagctgtgggctgcgccccacgccagcccgcgccccgcatggctgccgccggggccaggcctgtggagctgggcttcgccgagtcggcgccggcgtggcgactgcgcagcgagcagttccccagcaaggtgggcgggcggccggcatggctgggcgcggccgggctgccggcgccccaggccctggcctgccagctgtgcggccgcccgctctccttcctgctgcaggtgtatgcgccgctgcctggccgcccggacgccttccaccgctgcatcttcctcttctgctgccgcgagcagccgtgctgtgccggcctgcgagtttttaggaatcaactacccaggaaaaacgatttttactcatatgagccaccttctgagaatcctcccccagaaacaggagaatcagtgtgtctccagcttaagtctggtgctcatctctgcagggtttgtggctgtttaggccccaaaacgtgctccagatgccacaaagcatattactgcagcaaggagcatcagaccctagactggagattgggacataagcaggcttgtgcacaaccagatcatctggaccatataattccagaccacaacttcctttttccagaatttgaaattgtaatagaaacagaagatgagattatgcctgaggttgtggaaaaggaagattactcagagattatagggagcatgggtgaagcacttgaggaagaactggattccatggcaaaacatgaatccagggaagataaaatttttcagaagtttaaaactcagatagcccttgaaccagaacagattcttagatatggcagaggtattgcccccatctggatttctggtgaaaatattcctcaagaaaaggatattccagattgcccctgtggtgccaagagaatattggaattccaggtcatgcctcagctcctaaactacctgaaggctgacagactgggcaagagcattgactggggcatcctggctgtcttcacctgtgctgagagctgcagcttgggtactggctatacagaagaatttgtgtggaagcaggatgtaacagatacaccgtaaaggcatcttaaagccttgaaaaatgttaataatcttttataccttgcaattccatttctgggattttatcctaaggaaatacttataccaaaaatagaggtgcagagatgttgacagattgcttacacagtgtctacttattagtgaaacaaaagtgtccagtgacagggaattaaataaattttggtacatccac

SEQ ID NO: 78508 - DNA, 660 bp, Homo Sapiens
ccagggcaactattaataatgacatacccacactgggaggtggagagcactgtagatatcctcattgtcacagaagtcagtcaatagaccgtgtctgaaaactgaatttcaatattctcttggcacaacaggggcaatctggaatatccttttcttgaggaatattttcaccagaaatccagttggcggcaatacctctgccatatctaagaatctgttctggttcaagggctatctgagttttaaacttctgaaaaattttatcttccctggattcatgttttgccatggaatccagttcttcctcaagtgcttcacccatgctccctataatctctgagtaatcttccttttccacaacctcaggcataatctcatcttctgtttctattacaatttcaaattctggaaaaaggaagttgtggtctggaattatatggtccagatgatctggttgtgcacaagcctgcttatgtcccaatctccagtctagggtctgatgctccttgctgcagtaatatgctttgtggcatctggagcacgttttggggcctaaacagccacaaaccctcgcaggccggcacagcacggctgctcgcggcagcagaagaggaagatgcagcggtggaaggcgtccgggcggccaggcagcggcgcata

SEQ ID NO: 78509 - DNA, 556 bp, Homo Sapiens
ggctcctccataagactgtgagcatctgaccactggagtgttgcttcccattatatccccatgctccctataatctctgagtaatcttccttttccacaacctcaggcataatctcatcttctgtttctattacaatttcaaattctggaaaaaggaagttgtggtctggaattatatggtccagatgatctggttgtgcacaagcctgcttatgtcccaatctccagtctagggtctgatgctccttgctgcagtaatatgctttgtggcatctggagcacgttttggggcctaaacagccacaaaccctgcagagatgagcaccagacttaagctggagacacactgattctcctgtttctgggggaggattctcagaaggtggctcatatgagtaaaaatcgtttttcctgggtagttgattcctaaaaactcgcaggccggcacagcacggctgctcgcggcagcagaagaggaagatgcagcggtggaaggcgtccgagcgcccaggcagcggcgcatacaccagcagcaggaaggagagcgggcggccgc

SEQ ID NO: 78510 - DNA, 1008 bp, Homo Sapiens
  misc_feature (43)..(43): n is a, c, g, or t
  misc_feature (51)..(51): n is a, c, g, or t
  misc_feature (109)..(109): n is a, c, g, or t
  misc_feature (132)..(132): n is a, c, g, or t
  misc_feature (159)..(159): n is a, c, g, or t
  misc_feature (198)..(198): n is a, c, g, or t
  misc_feature (205)..(205): n is a, c, g, or t
  misc_feature (318)..(318): n is a, c, g, or t
cgcggtggttattgtagagcgtttccagtccctcaccacctcnagctctantgaggcagagagctgttttatccgataattctttcctgcacagtctcatgagcccggntgctgtgggaggaaaatcccgtntcagtgagagccgccgagctgggtcanttagaccttgcagatgctgtgagggcagcgtgcccagtnccacgtntgaaagtaattcccgggtgacgctgacataccgctgagagctcttcccctgttccagggacagtgtccaagctcagtgggggggactcccagacttgaggacccagtccccancccaaatgctccccctcccccaaattccctttctcctcctgctctttctccccgctgtgcctcccccagttacccacagaagtgcctgcctctccagcgctcacagaacacacaaaaagggacaggaattggtcactgggtagtggccgtggctcctgacgatccagaccagcgtctggcccaagccattcagaggtggggtctggggcctgggggttttgtgtcgtgacactttgtctcaaggagattccacatagggatttgaattaggctttctgcttgccaaggcctgtggcatctgagcctggctgagggccgggcaagcctcccctgagcctttggaagccgagttcactctctgcctgcccaggggagcaccggcttggttctgggggctcctctaacatctcaggtttttatcttgtcttaaatttctttctaggaaaaaacccttccctgccaaaggtgactgtgttttctgccgccgaaggagggcccggtccctccaggctcagtgtggcttctccctgacccccgccctagaacttttgccagtgccttttctgaaactcctgtgtcccgggccccccaggcggagaaggatatgccggattctgcctggggctgggctctaggagaccccaaatttgacaccacagaaagcaaataaaacacttgaaatacgaaaaa

SEQ ID NO: 78511 - DNA, 719 bp, Homo Sapiens
gcaggaccatgaccctggccgccacctcttcgtggggcaactgatccaaaacgtgggccccatccgggctttttggagcaagtactatgtgccagaggtggtgactcagaatgagcggtacccaccctattgtgggggtggtggcttcttgctgtcccgcttcacggccagctgccctgcgcctgtgctgcccatgtcttggacatcttccccattgatgatgtcttcctgggtatgtgtctggagcttgagggactgaagcctgcctcccacagcggcatccgaacgtctggcgtgcgggctccatcgcaacacctgtcctccttacttgtgggatcaaatgctgtaatggtggaggtgtgggcagaggagggaggcaagtgtctttgaaagttgtgagagctcagagtttctggggtcctcattaggagcccccatccctgtgttccccaagaattcagagaacagcactggggctggaatgatctttaatgggcccaaggccaacaggcatatgcctcactactgcctggagaagggagagattcaggtcctccagcagcctccctcacccagtatgttttacagattacggggggaccgggtgagccagtgaccccctgcagcccccagcttcaggcctcagtgtctgccagtcaagcttcacaggcattgtgatggggcagccttggggaatataaaattttgtgaagacttgg

SEQ ID NO: 78512 - DNA, 1032 bp, Homo Sapiens
caggtacgaggccggtgttaatcggcacgagggtctccttctggtctcctccttcctccccacccctctaataggctcataagtgggctcaggcctctctgcggggctcactctgcgcttcaccatggctttcattgccaagtccttctatgacctcagtgccatcagcctggatggggagaaggtagatttcaatacgttccggggcagggccgtgctgattgagaatgtggcttcgctctgaggcacaaccacccgggacttcacccagctcaacgagctgcaatgccgctttcccaggcgcctggtggtccttggcttcccttgcaaccaatttggacatcaggagaactgtcagaatgaggagatcctgaacagtctcaagtatgtccgtcctgggggtggataccagcccaccttcacccttgtccaaaaatgtgaggtgaatgggcagaacgagcatcctgtcttcgcctacctgaaggacaagctcccctacccttatgatgacccattttccctcatgaccgatcccaagctcatcatttggagccctgtgcgccgctcagatgtggcctggaactttgagaagttcctcatagggccggagggagagcccttccgacgctacagccgcaccttcccaaccatcaacattgagcctgacatcaagcgcctccttaaagttgccatatagatgtgaactgctcaacacacagatctcctactccatccagtcctgaggagccttaggatgcagcatgccttcaggagacactgctggacctcagcattcccttgatatcagtccccttcactgcagagccttgcctttcccctctgcctgtttccttttcctctcccaaccctctggttggtgattcaacttgggctccaagacttgggtaagctctgggccttcacagaatgatggcaccttcctaaaccctcatgggtggtgtctgagaggcgtgaagggcctggagccactctgctagaagagaccaataaagggcaggtgtggaaacggcc

SEQ ID NO: 78513 - DNA, 713 bp, Homo Sapiens
cagtgagctgaggaggctcagcagtgcctgcacgtcccctcgccacaatgtcatgtgccacctcttcaaaggagggatgtaccagctagtggacgtgaccttgactgcaaagggcggcacgcagctgatgtaatggtcgcttaagtgttcacaaatgcctgaacaccctgtcctacctggtcctacctggatgctggcctcagtaagctcctgggctcattgaagatgaacctagcagtagtatttacaccacttgttgtgtgcccactgtgggcccggcgccatgccgagtgctctatggatgtgagagaaacggaggcccagaaagcagaaatgatgtgttaagatcactcatcaagctgatggtacagaggttagagcctctgctccctgctctacctctttcccttactccacatccatgcctgtctcttccaatgggtcggcatccaccctgacacattaaagccaaaaggaaccttaagctagggaaggggctccagaactttagtgaaagattcaaacatgtccactcaactcaatggagaaaatacaatattcaatcaatggtgttgggatgcctggaatattgttggagagggatcataaaaatggaaccaaaacaattccatttgggtcaaagatttaagtgtcataaagccatgtaaattctataaggaagtatgggtaaattgatttacattttggaatag

SEQ ID NO: 78514 - DNA, 1086 bp, Homo Sapiens
tttgtgatatgaacagttgtacaaaaaagcggctggtacggtccggaatcccgggatatcgtcgaccacgcgtccgatttgagatttaggttccttcactgagtagtctggaagatataatctggataattgctatgaagttatgagggatacaagtgaaatactggggaagaaaatggattggaaagtaaaatggtactaaagcccatactgattatcttgactttgttttttaaggcataggtatatatttggatcaaaatccttccaaatttgaaaactcaataaaaataacacttattaaattctagttagtgtagcactcatgctgaagtaaacatgatcgtaggcagaagcaaaattttattataaaatctaaaacaaaactttatagagttgaatctattccatctgacttcaatatttgccaaacgtttattttacctcctagattgatgttggtatagtatccttaatacagtgtagtatattaatgtccttaatacaatcaggaggtttttacctttaagcaaataaattatgtcattattgaaaaagacttaagggatgattagacttggcaatctgtaagcaggagtataaatgttttaaattgcattgtccctatgtaactatcttaatggctatatatatgtattttataaagccatttatgtatacacatgtaacttggaatttccttcatccctacacattttctacacttacatcaccttattgcataaaacaaagtcacgcgctttctgcttgaacatcaaaatatcaaaaaccaaggtacccaaaagatacaagtcagagacaacatccttgtccatatccaaacccagtgtttcagtgctagcaacttaatttctcatacatttatagagtttggtttgctttgctagttgtgtgaatcattgggctgtttttagagccactgttaagagagaatataaaataatcatgacaattactactgtttccacatttacaaattgtgtacttaaatgaacctcatttcccttttatttctgaatggcttgtctgagaggaaacaaaattaaaattcatctgggaaaaaaa

SEQ ID NO: 78515 - DNA, 1242 bp, Homo Sapiens
  misc_feature (41)..(87): n is a, c, g, or t
  misc_feature (91)..(125): n is a, c, g, or t
  misc_feature (1066)..(1192): n is a, c, g, or t
aaaacttgtatagactcactatagggcgctagcgtcgttannnnnnnnnnnnnnnnnnnnnnnnnnnnnnnnnnnnnnnnnnnnnnnccgnnnnnnnnnnnnnnnnnnnnnnnnnnnnnnnnnnncagtcgacggtaccggacatatgcccgggaattcggccattacggccgggacagaaacaatcaggatctgaatgcatttgtatgtctccagaagaagactgtagccatcattcagaagatctctgtgtgtttgacacagactccaacgattactttacttcacccgcttgtaagttttggctgagaaatgtttaaataatcagcaactccattttctacatattggttcctgccaagacggccgccagttagaatgggtcttgaaaggacaagactttcatccaacagcacaaagaaagaatcctgtggctatgacacctgctatgactgggaaaaatgttcagcctccacttccaaatgtgtctgcctattgcccccacagtgcttcaagggtggaaaccaactctactgtgtcaaaatgggatcatcaacaagtgagaaaacattgaacatctgtgaagtgggaactataagatgtgcaaacaggaagatggaaatactgcatcctggaaagtgtttggcctagcacaattactgctaggcccagcacaatgaacagatttaccatcccgaagaaccaactcctacaaatgagaattcttgcacaaacagcagactggcatgctcaaagtactgacaaaaattattttctgttagtttgagatcattattctcccctgactctcctgtttgggcatgtcttattcagttccagctcatgacgccctgtagcatacccctaggtaccaacttccacagcagtctcgtaaattctcctgttcacattgtacaaaaataatgtgacttctgaggcccttatgtagcctgtgacattaagcattctcacaattagaaataagaataaaacccataattttcttcaatgagttaataaacagaaatctccagaacctctgaaacacattcttgaagcccagctnnnnnnnnnnnnnnnnnnnnnnnnnnnnnnnnnnnnnnnnnnnnnnnnnnnnnnnnnnnnnnnnnnnnnnnnnnnnnnnnnnnnnnnnnnnnnnnnnnnnnnnnnnnnnnnnnnnnnnnnnnnnnnnattcaggggtagacacacaaaaaatgaaataaacaggtaaaatatgtagc

SEQ ID NO: 78516 - DNA, 581 bp, Homo Sapiens
  misc_feature (371)..(371): n is a, c, g, or t
  misc_feature (418)..(418): n is a, c, g, or t
  misc_feature (504)..(504): n is a, c, g, or t
  misc_feature (519)..(519): n is a, c, g, or t
gcatcaagccagttgtgcaggaagtcctgacaattacaccatttcagagattgtatagaattggtgaatccattgagctaacttgccccaaaggctttgttgttgctgggccatcaaggtacacatgccaggggaattcctggacaccacccatttcaaactctctcacctgtgaaaaagatactctaacaaaatgggatcatcaacaagtgagaaaacattgaacatctgtgaagtgggaactataagatgtgcaaacaggaagatggaaatactgcatcctggaaagtgtttggcctagcacaattactgctaggccagcacaatgaacagatttaccatcccgaagaaccaactcctacaaattgagnattcttgcacaaacagcagactggcatgctcaaagttactgacaaanattattttctgttagtttgagatcattattctcccctgactctcctgtttgggcatgtcttattcagttccagctcatgacgcccngtagcatacccctanggtaccacttccacagcagtctcgtaaaatctcctgttcacattggtacaagataatggtga

SEQ ID NO: 78517 - DNA, 1034 bp, Homo Sapiens
gggagccgagagcacgatggctactggggagctcggggacttgggtggctactacttcaggttcttgcctcagaaaaccttccagtctctgagctctaaggagatcaccagccggctccgccagtggtccatgctgggcagaatcaaggcgcaggcgttcggctttgaccagacctttcagtcctatcggaaggatgatttcgttatggcttttttcaaagacccaaatgttattcccaatttgaagttactttcagattcttctggacaatggatcatattaggaactgaagtgaaaaaaattgaagctataaatgttccttgcacacagctttcaatgtcattttttcatcggttatatgatgaagatattgtacgagacagtggacatattgttaaatgtttagattctttttgtgatccatttctcatttctgatgagttacgaagagttttgctagtggaagactcagaaaaatatgaaatattcagccaaccagatagagaagagttcctgttttgtcttttcaaacatctttgccttggtggagccctttgtcaatatgaggatgtgattagcccatatctggaaacaacaaagcttatctataaggatctggtgagtgttcgaaagaatcctcaaaccaagaaaatacagattacctcttctgtctttaaagtttcagcttatgattctgctggtatgtgctatccttcagcaaagaatcatgaacagacattttcttactttattgtggatcctatcaggcgtcaccttcatgttttataccactgttatggtgtgggagacatgtcttaatgttctttcagattatgtacctctactattttgtatttatcatttttctatcttaatactaacttatagataaacatatactttgcaaattaattcaagaaaaatgtaaggagcctacttagagcagaagaaagcaaacaccaagatgcctttttaaaaatttgtgtggaatactaaccggggatcaaatttcatccataataaaatctatacc

SEQ ID NO: 78518 - DNA, 1112 bp, Homo Sapiens
cagtcgacggtaccggacatatgcccgggaattcggccattacggccggggaacttgaatctggagaccaagaggatgaggatgatgaaagtgaagatcctggcaaggatctagatcatatctagttttcaaatctctaggaacaatagagattatatcataactctgaagatggactctaaactttggtttacctccatggaaaataaagatttagaaaccaggtggaaaacattcactattaagactattgatatatttttgtaatgttgccacccatgttgaaaaccttaaaactgaatttatgtagaacacacatcttttatttaaatccatctgaactgtcccaaaatgtaatttgcaaagagcttcaaacaccaaaaatataccattttaaggcatgtggtgacaatgctatttgccttagttcattcgttgtttactttgcaaaatttgtgacttttaagtactaacacatttgattgaatgtgtattgaattggaattattatttctaaattcagcatttgagtccttagttgatgattttcttttaaagaaattagtttatttaaaagcaagatagcctgggttgggagttagtgcatatcatcagccctccatctaatgtgattgctaagatgtgcaggataggacagcttagaatgagtgccttgacacctacatatggctgcattccatacctcagtgaagaagccgaaggatgctgacacacagtgatgtggagggcattccggagaaacttttgcaacagtgtattaatgtgattggttttctttttgttttaagctaaacatctaaaacaaatttcaagttaacagttcatacaactcagatttagtattattgtttatcataaaacatattatgttcctagttttaaaaagacccaaagtatgattaatataatttattggcatttttgctgaataggtttaagtcagataatagattttaaaaaagcaaatgaggcaatgtgtcaaaatttaatgtttcataataaaaatagatacgttgacttaatccttggtcatggttccctttgtttacatcttaaaagtattttattcttaataaaagatgaggcaagtg

SEQ ID NO: 78519 - DNA, 1289 bp, Homo Sapiens
ggggtatttaaaaagtgtttggagacttttcacctgtcctataaaattttgaattgtgtatgtgatctacatagaaagaatattaaagagtaggttgaactctttatagccaaatacagccttaaatatgcttgtatagcatccactggcagaagtaatagttgtgcctcagacttgggggttgcatgtggccctgggggagttactacccttggtatgcatgagcggttcctattagcatcagtgggaactcagtactctgtatgtatccacaaaagggaacttgagacccacagttattcttaatttctgatattaacaaccgtacatactgctgaatttaactcaaaatatttcaggtaagtgaaagtggtgcttaatgtagactatagaatgactttcaggtgttttcaactgaaagtatatatccagaactgcatccttatagaaatacaagtaagacttaggataatttgccttcaaaacagttttcctaatctcagcagtatccagtgagtgaagaacacttgactgactcttgggccacctctgttacttactgtactatggaagctcctggtgaatgtttacaattatgggatgtagtatttctatttgtactttaagtcaaatgcttatatgaaatatgtgacaacaaatagagaagactggctctgttagtaattatgcagtatgtactctatttaaggatctgtggtagtataacatgagtgaatgtcattaattttgaagtaataactgccacatgtgggaagtaggggagtaaggagaatgaattccaatctgtgattaaaagtgtaaactatagactctactgtagtacatttcaggatctagaagttttacttttataaagatggtgtccggaagatgttgctaatgtattttacttcaacatagggaacaaactttttaagtatattaataaacctgtatggttagtttttaacagttttttaaaataaactttatggatatgacaaatattctgtgttttactaagtgcttggataggctttctaattttgtatacgtgctagagttaattattgaacatttttatccaaatttagttgtaactctgtttatactactgattgctcattcgtttaaatgatattttaatgtaaaagtcataaccaacatatgaacagacagatttatgtctttaaacacagaatgtaagctatagtttaatctgataccagttgctggaagttgccatttgtttttcttaaatctatacccataaaacttcttttaagatt

SEQ ID NO: 78520 - DNA, 1360 bp, Homo Sapiens
  misc_feature (796)..(857): n is a, c, g, or t
  misc_feature (1009)..(1076): n is a, c, g, or t
  misc_feature (1129)..(1255): n is a, c, g, or t
ggaaattaaaggagtaaacacacagatttaggggattttgtgaagctaaacacctcagagagtttaacctttgtaggctttgaaggaaaagagtgcaaacatcagagttctgcagcccagcagagaacacctccagttaagtgtgtaccacatagggtttttcagcagcgtgatcttctgttttcattgtcagtggctccaccttacaacctcagtgctgaggaacagaagggcactcaggagagcctgagccacttacttagaaagtatttaataacagcacactaagcttactgggctagatacccacctcagcacccagcttgataacaggaggaaacagctggaactggagactggagagaaggaagttcatacatttccaacttggtctgcatctctttagttccttgtattgcttattaatccagaggagaaaacagctagttaattaaaaattccaaaaaatctgaagttttagctaatagttacttccctggttcatcaatttaagataaggatctaaatactgtgttaaaatatagaaaaacggagactcttataaggtttttgacctctacacttgaaagtgagctcttacaagaaactaatcagtgtttcgttattccatatcagtggcttttactgtcaaagattgtgtaagctaaattatctggcaaaatttgctttccagaaatactatctatatttaattttaagcattttattattgtgaacactatagtgtaaatacataaagcaattatatagtataagtgattataaaggaaaccannnnnnnnnnnnnnnnnnnnnnnnnnnnnnnnnnnnnnnnnnnnnnnnnnnnnnnnnnnnnncctgccatgaccttcccgaacacaactctttccctccctcctaagtgtagtcattattctaacatttgtgataatcatttccctgcttttctttgtcgctttgtcgcaagcatgcatccctaaacaatatattgtttagtctcactctttcnnnnnnnnnnnnnnnnnnnnnnnnnnnnnnnnnnnnnnnnnnnnnnnnnnnnnnnnnnnnnnnnnnnntgtttttaattcatatgttgttcaggttgttcctatagctgtaatttgtgcannnnnnnnnnnnnnnnnnnnnnnnnnnnnnnnnnnnnnnnnnnnnnnnnnnnnnnnnnnnnnnnnnnnnnnnnnnnnnnnnnnnnnnnnnnnnnnnnnnnnnnnnnnnnnnnnnnnnnnnnnnnnnncttcatatatgtattccatcacatctacgtcagtttctgtataacatatacctgggagtgtaatatgtatcataaacttgaataaataatgccaagttcttttct

SEQ ID NO: 78521 - DNA, 1999 bp, Homo Sapiens
gatttatagcagtagcagtgatcccgggcctgtgggctcggggcctggggctgcagttcggaccgcctcccgcgacccgcggggccggctcggagacagtttcatggccgcatctttgctgacccgagggtggggccgcgcgtggccgtggaaacagatcctgaaggagctagacgagtgctacgagcgcttcagtcgcgagacagacggggcgcagaagcggcggatgctgcactgtgtgcagcgcgcgctgatccgcagccaggagctgggcgacgagaagatccagatcgtgagccagatggtggagctggtggagaaccgcacgcggcaggtggacagccacgtggagctgttcgaggcgcagcaggagctgggcgacacagcgggcaacagcggcaaggctggcgcggacaggcccaaaggcgaggcggcagcgcaggctgacaagcccaacagcaagcgctcacggcggcagcgcaacaacgagaaccgtgagaacgcgtccagcaaccacgaccacgacgacggcgcctcgggcacacccaaggagaagaaggccaagacctccaagaagaagaagcgctccaaggccaaggcggagcgagaggcgtcccctgccgacctccccatcgaccccaacgaacccacgtactgtctgtgcaaccaggtctcctatggggagatgatcggctgcgacaacgacgagtgccccatcgagtggttccacttctcgtgcgtggggctcaatcataaacccaagggcaagtggtactgtcccaagtgccggggggagaacgagaagaccatggacaaagccctggagaaatccaaaaaagagagggcttacaacaggtagtttgtggacaggcgcctggtgtgaggaggacaaaataaaccgtgtatttattacattgctgcctttgttgaggtgcaaggagtgtaaaatgtatatttttaaagaatgttagaaaaggaaccattcctttcatagggatggcagtgattctgtttgccttttgttttcattggtacacgtgtaacaagaaagtggtctgtggatcagcattttagaaactacaaatataggtttgattcaacacttaagtctcagactgatttcttgcgggaggagggggactaaactcaacctaacacattaaatgtggaaggaaaatatttcatttagcttttttattttaatacaagtaatattattactttatgaacaattttttttaattggccatgtcgccaaaaatacagcctatagtaaatgtgtttcttgctgccatgatgtatatccatataacaattcagtaacaaaggtttaaagtctgaagattattttttaaaaaggtaaatggttaaattttacatgacagatattttatctattggcctgttccccaaatggccattttaaaatgcttgggtacacttctcttaagtggtctagtcaaaggaacctcaagtcatgcttttgctatcaccaatcatagtgtacccatctttaatttatatcaggtgtataaatgtacatttccaaatgaacttgcacttgttatattataattggaagtgcagtcagcagatgctgttgtgaagctaatgtcacaattatgtgcaaaggtgtgcttcctgctgtatgtgagctgtaaaaatgttacgtgaagaaataaatgaaacttggccagtttgttcctctagtagtatatttaattttgacataagtaacttttaaaatttgtcttaaaaatttatacaccagcaatttagacaaagccttaagcaaattttgtattattgttctcacttattattaataatgaagtagaagttacttaattgccagcaaataaatacgtgtcaaaagaatctgtattcagaccctgggtcaggaaattactgcccacttgtcaagttcagcccaccatctgtttgaagattatatgaagtttaaattctagtgtccataaataaagtttcaacggaacac

SEQ ID NO: 78522 - DNA, 2365 bp, Homo Sapiens
caaaattaaaactacattcaattccatttgggctgcccaaacctcagacaacatttatagtccaacaagacaccatccttcaccccaactccatcccaaggctccctcaccaaaatgctcttatagacactgccatcttcccccaactccatctggactcggatgatacggcaatcagaggcccctggcccagatccctctcccccatatccagtccccccggaggcctcttctgcacccccactcagcggggagccacaggaggctgagcggcggtgacctcgagaaggcctaggggaggaggctggtggggagaggtggctggggtcagctggactgtgcagggatggactgctttccaaggcagagtctagtgacgagacagatggccacttcatgtgctgggccagccgagtcagcagaggagcaggagttgtaggcgcctcatctcccccagtactgggccggtcacaggacacaagcggggtagggaccccaacagagcccaaaacctctgtccactgcgagatgaccaatgttggccgaagcacccgtggggcaggagggtcactggaaccaggtggctccacctcacaggatacacgatggctctgagcctctgtcagtggccggagcccctgtagccacctctggatatcatggtcaggttggaggttatagccacgacattcattctggagccgtcgcaactcagaaaggactgcaaactccttcctccgcttgtcaaaattgatgtatccattctccaactcatccttggaggctgcatccagcatcacaaggtccttcaggaaggtgccaaggtatgggaccacacccccaccccgggagccagacctcggggccttcttggagtgtggctccagaggagactgcagcttcacctcctgcacgagcagctcccgactctgggaataattatcctcctcggagaaaatctggcagaggctggaaaagactctgaggctgtccctggttgcttccccccaggctgcccgaagcctgtggatggggctggactgcagggctgacaccacggcataaactgaagagaagtttcggagcagccggcactcctctgccacgcggatccacttctccaggagccgggccctctgtgggggacggagtggccgtatggtcacctccccaggtccctctccagtggaagtagcccccaggacagaactaaccactgcccctgccaccttgttaaactgtgtgacagtagctcggacagatgggcagaggtgagaatgtcctggccggtctctgtgaccccacaggcctcccaggcactgagaggggatcaaattgagaaaaagttccgcatctagcagggtcagctgttcggccaagtggtcagcgaggaacaccaggacatccgtggggtcagcagggggatcgccggggagggccaggggcttaggaaggtcgggggcctgggggtccacccgggaccggagattgcggatgaggtcagcgctgccccccccaacacccttccctgctgcataccctgtctgaagtaagaagctctcaagccggtcaagctgacccttggcctcagagccaaaatcctcagggtgagaggccagccaggttgacagtacagagatggctacctctgttgtcctctctagttcgtcggtaggatgagattcaagggcttccagcctgtcagccataagccctagcaaggcaggcgtggaggtgaaggcccggtgggtagccaggaaggctgacatgaagctcacatcagtccctgatgtccgggtatccagtaggtgtctgaccagggcctccagagtgccagctcggagccgtcgggaggaacgtgggggaggcatagggaccaagggatcaagaggtcgatattggcggcttgtgacggtaaacacggcaccatcctcctcctcatcccagacggacacaggggcctcttcttcttcctcctcctcttcctcctgccccccgcccacgaccaggccacctgggcccccaccctcttcggggtcccggcttcggaagctgctcagtacgactcccccgggggggctcgtgtccaaaagcagccgcaggggccgcgggagcatggccgagtgaaggaatcagcggggtcgggccatgggggcgcctgctcgggaggggtgggggcagcgtgggtcctgagccgctgttgccgtcggtctccggccccggaccgagtcccctccccggcttttccgtacccccttgaacccccccgccgggctcctgggccctcccgccctttccgctcccccccgcgtccgcccgctccgagagcaggagccaaaaggggaaggaagtgaggactggagcc

SEQ ID NO: 78523 - DNA, 716 bp, Homo Sapiens
  misc_feature (130)..(130): n is a, c, g, or t
tacactctgtaaggacctggggcaggatatcttctcccccagggatcttctatttaagtggcttctgagagggtgaacaggattgttacttttaagcctacctctgctgtgacccatcatgtgggtcttntgtttctcccttctgtggtttatgagcctgcccttaccttttccctgcctctgacttggtatttccaggtccgtatttctctgtagcccagggtctggggtagagctgactgctgttcaccctttgaacaactcatggacgtgagggatgggtgctgagcagaaccaagagaggaaactttggcgctgttaaaatggaatttctcatctgccggcattattaagggtgggctaggttggatggaaggtgaaagggatgaactgccttttgctggaagctgtcttaggctgtgagacaggagcaggggaaccacagcctatggggaactgcccttgactccacctatgttggagccttagcccaaggccattccttctgtgatgataaagcccagttctggaattggagccatattaaggaatgattctcttccagcgctgctcctcaagggttgggggtccttctccctcgcagccaccacatgtctcagggctaccttctccgattggatttgcatttgtggcactgtctttgatgcagtgatgtacttaatggtgcaataaagctgcttcgatttggaaaaaaa

SEQ ID NO: 78524 - DNA, 358 bp, Homo Sapiens
tttaccatcttccctaggaatattcctagaaagcatctgcttaattttgctgctaacagctaaccttatcccacgttgagggtggtattaaaactgttcacacagagtgagcctgggtcagtcaaaaacagaatttgggcatttgagtgataacagacaacctaaggacaatgagcactttgcagatctctacaattaaaagttgcctctttgaggcaggaggggagaagcacagtccctgccaggttgcctgaactaaagatgccatggagcaggagtgtcttggtgcattgttccccgcttaggagtacctttaaaaagggggtgaaataaatttggcttaataattgtaaaaaaa

SEQ ID NO: 78525 - DNA, 682 bp, Homo Sapiens
  misc_feature (509)..(542): n is a, c, g, or t
cgagactccatcttccggcggctctggcagctgcaggcccagctggtcagctacagcctggtgttcgaggaggccaacacgctggaccaggacttggaggtcgagggagactcggactggccaggacctggtggggtctgggggccctgggcacccagtagcctccccacttccacagagttggagtgggatccggcgggggacattgggggccttgggcccttgggacaaaagacagcccggacactaggagtgccctgtgagctgtgtggccacagggggccccagggcaggggacaaggccttgaggaagcagacacctctcactcccgacaggacatgctggagtctggcctcggccaccagaaacgcttagcacgtcaccaaagacactccctgctccggaagcctcaggacaagaagaggcaagcatctcctcatctccaggatgtgaggctggaggggaatccaggggcccccgatcctgcatccaggcagcctctgacctnnnnnnnnnnnnnnnnnnnnnnnnnnnnnnnnnnggtgggtgccatgtttctcctgcccgcgtcaggaggcccctgctgctctcatgcccgaatacccaggacaccctacctggtgctcagctatgtcaatggtcttccccccagtctgatgtgtgtaataaatggtcactgtc

SEQ ID NO: 78526 - DNA, 1181 bp, Homo Sapiens
  misc_feature (81)..(113): n is a, c, g, or t
  misc_feature (1124)..(1124): n is a, c, g, or t
tttcaaatatgaaaattctcagagataatgcatttataaacacagaaatggttacaacaaagatggccgtgatgagtgagnnnnnnnnnnnnnnnnnnnnnnnnnnnnnnnnnaatccgtgtccggcatctgactgtggcacctagggagctaagtccagtccttgcgtttgccttgaactctcccttctccgcaacacccctgttttggagtttcacagataacacaaagcctcccacagctccttgggggtgggttggggagactgagagtatagggtctttgtaggcagagaaggagagaggcttcaaggaaatccgtaaaaccataacacacacttctaagccacctgtgaccaacttgggaatttctggccccttggggaccacatctcagcccttgcccccttcaaataaaaggaggtctagcccctaccccaaatctccttctaccagcagtcaataggaagcaaagtgagacgatgtaggggaagaaatggctctcagggactgaggcatttgagaaacctctgttcttttgcaggcaagaatagaacaagaggctggttgcatttggggctcccttttctctgttatctgggagggccagcctctagtcttacatcagcccaaactttgaggataaggagggtaaggatagggtaagtggccacactggacaaggttctatgaggtcatagcaaatccttcccttgagcaccgacccccagttttagaagctttgcttgggaggggaggctgctggatgacaccatcagctcagtattcctttgcaatcaggagggctgatgttccttttgaagaagagttcagaaaaaggatggtatcctgtgaaggaaagccgtgacagaggcccaaggagatggagccaaggcctgtcaaggaagaaaaggacttttcccaccaagagttggagaaagaagacaccaggactacttcttcctcttcccagtgggtggcagcacggatctctaagagctggccaggtgctccacctggatggtgctggtggtgacagtgaggcagatgtccttatgatgctccgccgtcttatacggggtcaggtcaaaggaacactggggtggagggttgggattgctgtcnccaccacccccaccctggggggctgccccaggagactggaagtgtggtggtggctgt

SEQ ID NO: 78527 - DNA, 702 bp, Homo Sapiens
  misc_feature (665)..(665): n is a, c, g, or t
ctgataccttgttcaagaatgtaattcttatcagaaatccatggcacactagtctggaaaaaaataattttgtgtctttttaaattcctagagtacctctccacttcaatcacaatttaagtccagggcaggtatcctgggctcctagcaaacactacaccccaacaagagtttgggagccaaattattttgcaaacccttaagaacacaaactaaaactaatttatccttatatctctgcaaaaattagcattttgaacatccaacgaaacttcaagtttgaggataatgggcttactgacctgacctttgatttcacgtaactaacaacaaatttctttaaaatctggttaagaaatatgaaaatattgaaaagtaaacataaattccacaaagctgaatggcagcaaaaaatatttcttaacatcaagaacatatacaaaagatgatcattaccacccaaattatctctgttgctcaggatttcagttataaaaatagccaaatcaagacaaagacaattacagcttaaaacgaaaagctacaccttcttcattaaaggtgagcatcttgtcacactgtgcatatggagagagaacaagtacaaggcacgggagaactaccatgtcaagggacagagctttttcaaaatattttatcctcangaagtaaaccccactaccatagaaagaaaaaaataaa

SEQ ID NO: 78528 - DNA, 469 bp, Homo Sapiens
ctgactcatccctgccacagggaggttcacagcaagagcacagaaactagggccagtgcccggttgtgtgaccttgagtaagttctttttcccttgaacagggagagagacacaatggatcagagtgtctctgccagttctaacttggggattctagtgggttgaaccgaacggtagtccgtttccaaaagaggaagccaagaccagagtgggagtggttccttcaagtttgcagaaccagtaagtggcagagcaggactcatatctagttagtggttcagagcatgggctccggagctagactgcctggatttgaaccctggctttgccacttgcctgttgggtgactttggacaagctgcttaaattatgtctccatttcctaatccacagaacaagtgtaatactagttatctgtttcatggagtgattgtgaggattaaataaagttaatataacacaaagcaaa

SEQ ID NO: 78529 - DNA, 938 bp, Homo Sapiens
  misc_feature (707)..(707): n is a, c, g, or t
  misc_feature (710)..(710): n is a, c, g, or t
  misc_feature (764)..(764): n is a, c, g, or t
  misc_feature (805)..(805): n is a, c, g, or t
  misc_feature (872)..(874): n is a, c, g, or t
caaatcttaagcattaaaaaaaattcaaccaactagctcagaagaggggagaaggccaaggttgagagaagagtcacagcctgtcaggcagatagctggcctccggcgggaaggccatttccctgagcacttgcagaggaagacagggtggtggcaggactggagtggcagtggctcccaaggctctctcctccaacatgtgcatctgccatctgctctgcagtcctgccgcaggattccctagtgaagcagctcaggcctgggggagccgtgtgtatcccagctgtgccggcagcatcataccaatcgtgggggtggtgaaggagccaggggttcattcatggttggtttctgatcaggcatcttgggaatggataatggaggcagccgctttcaggacaggcatgtccaggggctcctcccagcctctaccccgaagtcctcttcccaagtgaccccagtgatgtttccattgagatgcgctcctggctatggcaggcaccttctcaacttatatgtgggaagggggggtcccccatgcttgggggacctaggcagctggcttggcccaagagagatgaggatggaggccaaaccaaaggggggcgccaatccctgtccacaccttctcacaaaagctccgtttggctggaggcagacctgtggctctgaccagactctctggcagcatcctccacatttgtatnctnaagaaggcctcacctctttgagtggagtcagaagatcctcaaattcaaatgtancatcaaactgcttctgtccagagctcctaatttgggaaaanagagctgtccaactgtcaggctgaggcacaaatctgtctcgtgcgaatcttgctccaggcaatcctnnnggatcgataatcgtacagtcaacgtacgggtgaatgttcgcaatcaacaaacagcgagaaatgg

SEQ ID NO: 78530 - DNA, 917 bp, Homo Sapiens
  misc_feature (737)..(737): n is a, c, g, or t
tccggatgccggaaagcaaggaggaagtgacagagctagaatcagtgccactttgcagcagcaaggatccagacgaagtggaaacagagagcaggggccctcccaccacctctgacctccttgccccagacctgctggagcaaggggactggagcctgtcccagaacaagagcgccctggactgccctcatcagcacctagacgtaccgcacgggaaggaggagcagatctgctgacctcagggcctgacagtgtgggacaggctcttctttcccaaaattagggagctcttgacagaaagcagttctgatgcttacatctggaatctgaggcatcctctgactccactcaaagagggtgagggccttcttaagatacaaatggcggaggattgctgccagagaagtctggtcagagccacagggtctgcctccagccaaacgggagcttttggtgagaaggtgttggacaggggattggcgcccccctttggtttggcctccatcctcatctctcttgggccaagccagctgcctaggtcccccaagcatgggggaccccttcccacatataagttgagaaggtgcctgccatagccaggagcggcatcttcaatggaaacatcactggggtcacttgggaagaggacttcggggtagaggctgggaggagcccctggacatgcctgtcctgaaagcggctgcctccattgatcattccccagatgcctgggtcgnaaaccaacccatgaatgaaccccctgggctccttcaccaccccccacgaattggtatgatgcttgccggcacagccgggggatacacccggcctccccccaggcctggaactgctttcactagaggaatccgtgcggcagggactgcaaaaacaaaagggccaaaaggcccatggttggt

SEQ ID NO: 78531 - DNA, 1393 bp, Homo Sapiens
agatggcagcccccatacctcaagggttctcttgtttatcgaggttattgggctggtggtttcggcagccagttctggtgactcagtccgcagctatagttccagtaagaactaaaaaacgtttcacacctcctatttatcaacctaaatttaaaacagaaaaggagtttatgcaacatgcccggaaagcaggattggttattcctccagaaaaatcggaccgttccatacatctggcctgtacagctggtatatttgatgcctatgttcctcctgagggtgatgcacgcatatcatctctttcaaaggagggactgatagagagaactgaacgaatgaagaagactatggcatcacaagtgtcaatccggaggataaaagactatgatgccaactttaaaataaaggacttccctgaaaaagctaaggatatctttattgaagctcacctttgtctaaataactcagaccatgaccggcttcataccttggtaactgaacactgttttccaactctggccatctatgaccggtttggccggttgatgtatggacaggaagatgtacccaaggatgtcctggagtatgtgtattcgaaaagcagttgacaaacccctatggaagctggagaatgcataccaagatcgttcccccatgggcacccctaagcagcccatccttaagacggtgatgatccctggccctcagctgaaaccagaagaagaatatgaagaggcacaaggagaggcccagaagcctcagctagcctgatgacaaaaatgacttctagggtgaagcctgggtgatgaggctgctggaagctttgaagtctcccattcccctcatgctataaaaagaactacctttgttctctcccatcctgctcaggtcttttcagcagtctcatcatcagcaaccatgactgatgactgggccctagcaggtggcaggtataacatggccatggacactcttcttttttaaattttatgtctagcttctgagtctagatgaaagacagtatgtttcagagaacattggatatcagtttttcccacagcagggactgtgagagacaaccagcagcatcctctttgtaatcacagggcagggatcagagtttgaaatgaaatgttgtcagggtgttggaaaaattttggtgagttctgcacatttcccctggttcaggctgggcatggaccagccttcagatggcagaagtggaagatgagcctacttgtgagcgatgtgactttaaggaaatgaagactggggaagaataattagtgtttataagacatttaagaggccctttttcatatactgactcactgatgaatcagcatttgcattttatggaaaaatataaatccaaagaaataatttatccctt

SEQ ID NO: 78532 - DNA, 1083 bp, Homo Sapiens
  misc_feature (353)..(452): n is a, c, g, or t
  misc_feature (461)..(640): n is a, c, g, or t
ggaactgatagagagaactgaacgaatgaagaagactatggcatcacaagtgtcaatccggaggataaaagactatgatgccaactttaaaataaaggacttccctgaaaaagctaaggatatctttattgaagctcacctttgtctaaataagttgggcccatgagatgtgtgctctgtatattccggaggtacaatttgccagtgtttccacaatggaaccaattgttttacagtctgttccacatgatcattgtaataaggtttcaccattacccaatgtgcctttaaatacagttttaccacttaattgaaggtacacattccaactgtggaagaaattgcagccagcnnnnnnnnnnnnnnnnnnnnnnnnnnnnnnnnnnnnnnnnnnnnnnnnnnnnnnnnnnnnnnnnnnnnnnnnnnnnnnnnnnnnnnnnnnnnnnnnnnnngagacagannnnnnnnnnnnnnnnnnnnnnnnnnnnnnnnnnnnnnnnnnnnnnnnnnnnnnnnnnnnnnnnnnnnnnnnnnnnnnnnnnnnnnnnnnnnnnnnnnnnnnnnnnnnnnnnnnnnnnnnnnnnnnnnnnnnnnnnnnnnnnnnnnnnnnnnnnnnnnnnnnnnnnnnnnnnnnnnnnnnatttttgcttatagtatatacttacgaaaaagttgaatcgttttgcttatattttttgtttgcttttgaaaattacacagcatcttttgtgtgtcaataaattgtgtttctgctgtatttttaatagatacttggtctgtaatacagaatatcatgagattcaacaaactgtaaatttaattaagcaaccctttgtggttgaagggcctagtttggtgtctggcatttagtatacactgctagcatctgtgtaaaagtgtgtgaacattttggaagcttcaagaaatacattgtgtgaaattgtcctctagaacttacactgtattagctgtatgtgagattgctcataactctatattttgttaggtacactgtgttacccttaaaaaaatctttgctattctttctagtaaaaaaaatattaaaatgtttgaatgagtaaa

SEQ ID NO: 78533 - DNA, 1030 bp, Homo Sapiens
  misc_feature (793)..(793): n is a, c, g, or t
ctggtacgctccggatttcccgggatatcgtcgacccacgcgtgcggcgggaacaagatggcagcccccatacctcaagggttctcttgtttatcgaggtttttgggctggtggtttcggcagccagttctggtgactcagtccgcagctatagttccagtaagaactaaaaaacgtttcacacctcctatttatcaacctaaatttaaaacagaaaaggagtttatgcaacatgcccggaaagcaggattggttattcctccagaaaaatcggaccgttccatacatctggcctgtacagctggtatatttgatgcctatgttcctcctgagggtgatgcacgcatatcatctctttcaaaggagggactgatagagagaactgaacgaatgaagaagactatggcatcacaagtgtcaatccggaggataaaagactatgatgccaactttaaaataaaggacttccctgaaaaagctaaggatatctttattgaagctcacctttgtctaaataactcagaccatgaccgacttcataccttggtaactgaacactgttttccagacatgacttgggacatcaaatataagaccgtccgctggagctttgtggaatctttagagccctctcatgttgttcaagttcgctgttcaagtatgatgaaccagggcaacgtgtacggccagatcaccgtacgcatgcacacccggcagactctggccatctatgaccggtttggccggttgatgtatggacaggaagatgtacccaaggatgtcctggagtatngtgtattcgaaaagcagttgaccaacccctatggaagctggagaatgcataccaagatcgttcccccatgggcaccccctaagcagccattcttaagacggtgatgatccctggcccctcgctggaaaccggaaaaagattatgagaggcaccaaggagaggcccaaaagcccagctagcctgatgacaaaatggacttctaaggtgaaaccctgggtgaataaggctcctggaaaa

SEQ ID NO: 78534 - DNA, 897 bp, Homo Sapiens
  misc_feature (654)..(766): n is a, c, g, or t
  misc_feature (774)..(787): n is a, c, g, or t
ggaaaaagaaaattgtaagaaagcacaccctattctatatgtgtcttctaaatctactccagagacccagtgccctcaacagtaaagacttttctttaataagagtacggtgccacttgcctcaaaagttactatggtgcttaagattgtcttgatctgacatatatcaccttctgggttatttactcattgtgccaggacctggcattttcatgtgcctttgaccaagtgttcagaatttgcttgactctaacctggagagcttcttaagtgatgccccttcatggagcttctatgacagtgaataaactattaattgaaggaaaatgttataattaatgtatctatttgctgcattgtatatggattaaatgataaaaaacaagtaatctaccctcagagccatgtatttgagaatgcttcaatcatattttcctatgtacttttttttataaacttagttttagactatgttgtaaaaatgggaaggttgtaaactatgttgtaaaaataggaaatgtggcttaaaatatatacattatattgtttcaggattttgtcagtgtttaaagaaccaatgttcatctttgtatttatatacatgatttaaattttgtctaaaattttaaataaaactgcagtgatttatccttnnnnnnnnnnnnnnnnnnnnnnnnnnnnnnnnnnnnnnnnnnnnnnnnnnnnnnnnnnnnnnnnnnnnnnnnnnnnnnnnnnnnnnnnnnnnnnnnnnnnnnnnnnnnnnnnnttggcggnnnnnnnnnnnnnnaaaaaatttttaaaacctttttttgggggccgggcccccaaaaggaaaggaaaagggccttaattttttccaaagaaaatcggggcaagaaaaagggttggatttccccc

SEQ ID NO: 78535 - DNA, 501 bp, Homo Sapiens
attttcaaaaagatgatattttgtttattaaaattaaaccacaatctgtctcctgacatacaaataactgagaagttaaaagatgttgcaaccccaacctaatttcacaagtgttgttttcatctccaatcttgaaaggtttgtcacataaacagtttagtgaggtcacagtcatgataatatgcgaatcttaaactgattttgaaaaggatgcatcacaggttcacacttccacatctatacaactttattaacaagtaaaatacatgccagcatgttttatatatgggcaaggacattcctatgataatgaatggcacattatcatctaacaattgacctttatcaaatatatgttttcatatgactatttgaagaattaaataataaacaactaataaatgctaaaataacatttaacagcagttaaaaatataaaagccattcagtttagtatttacgataagctggaatcattcaaatacaactattaaaaaaaag

SEQ ID NO: 78536 - DNA, 865 bp, Homo Sapiens
  misc_feature (768)..(802): n is a, c, g, or t
attattagagtaacaatttattagcagacaaaacaaatgaaacctctaaatctcaacacacatacaggatcttacataataaacagcataaaacataagcttctagaagaaaagtatctgctattaaccaactccccctcctttccagtaggctgcaatacattaataactcatcctcatcccataagagggttaagcaatgatttacatggaattacatcaaggcacttgctttaattaaaaaatacagtataaaacatgttcctaaaagtcatcaaccttgaataattaaagaaaaaacaggcagtatacttttttggtgaatagacaagactgagaatttaagttcattcacctgtcaccctgatattgtcttggtttgtgtacaaagttccaaagaagacaaaaaaaggtagcctattacatagattggtatgttcatacacactcatttctgagaaacagaagccatggcagcaacaggactcaaaccataattttccaactgatttgtgttgaaaaggcaagggctatttgatcccatgtatcttattattttagggatgacgcatgagataagggaagagaacatctccaaaataagttgattaaagcttcagttgaaagacctttttggcttaagttgcttagctatagacttacaaacatagtatctacaataaaggcatttagtgtccttcattattccagtttttacccggccgtaatggccgaattcccgggcatatgtccggtaccgtcgactgnnnnnnnnnnnnnnnnnnnnnnnnnnnnnnnnnnncgccgcttcctcgctcactacttcgctgcgctcgtcgttcgtctgcgacaggcttggccaata

SEQ ID NO: 78537 - DNA, 792 bp, Homo Sapiens
tccatatgcctcagttccctccatacgccccagtttcctccatacgcctcaatttcctttgtacgccccagtttcctccatacgccccagtttcctccatacgcctcagtttcctccgtctgcctcacagtttcctctataagcctcagtttcctcagtacaccccacagtttcctccctacacctccgtttgcttgttttgcacaaatgactgacaacagaacacttgtgggtgtggacggagctcgcgtctcgaagtgtttctaagatgctattttcagcaggtcactataaacgctttctactctgaagcacacaggggctggggctggccttcggagttacgaggaaacgaggaccaggaccagggattctgcatcagcacagccgccaggagccggccggggccccatccctgacactgctgtcgcccggctgtacctgggtgctgtgtccgcggggcgtctggagacgtcgatgtggtcatagcagggcctggaacggggaggtctggcctgaactagagaaatgaggggcgtatccgcttctccaccctggcctcagatgaagaggctctgggggcaggagggagtcagacacgtgcagggcaggcggcctgtgcagggcccaaccctccggcaccagaacctgacctcctcagaggcccccaccatggagggatgtctgggggatgctgtgcgctgccgctacgatgtttggttagagattaaagccatttcagaagtggacacctgcccatgtgatgcaaagggctgggaacccggaaaaaaa

SEQ ID NO: 78538 - DNA, 659 bp, Homo Sapiens
tgcagcccctcctcagctgctcgctagatgcacccagatgggaagcgttggagtctctgtcccaaagcctcagagatcagtaccgctgccgccgctgcctcctcctcaagcgccttgacctcactacatctgctttccactggagtgaccgggcagaggcccaaggagaggccatgagggcagtgctgatcccaattcgagaggttctgaccccagaatcggacatctccattgcacacgttctggctgcccgagccgacctgtcttgtctcgtcccagccaccagcgtggctgtccgcagagggacctgctgtgccatcaacaaggtgcttatgggcaacgttccagaccgggggggccgcccaaatgagctggagcctcccatgcccacctggaggagccgaagagaggatggaggcccccagtgttggggtcgcaagaagaagaagaagaagtaaagggggactggtggtcgggggcggggggtcctccatgagatgctaatgctatcggtaatctctggggagtccgtttaaggctttccttggtatttggcacccaagccccccatctcctattcctgagtccccaaatgccctgctcccattcacgtcaataccaagaaccatgttctccagagaataaatttaatttatgac

SEQ ID NO: 78539 - DNA, 1325 bp, Homo Sapiens
gggtccggaattcccgggatatcgtcgacccacgcgtccggctcttcatgatcggctacgcttcagccctggtctccctcctgaacccgtgtgccaacatgaaggtgtgcaatgaggaccagaccaactgcacagtgcccacttacccctcgtgccgtgacagcgagaccttcagcaccttcctcctggacctgtttaagctgaccattggcatgggcgacctggagatgctgagcagcaccaagtaccccgtggtcttcatcatcctgctggtgacctacatcatcctcacctttgtgctgctcctcaacatgctcattgccctcatgggcgagacagtgggccaggtctccaaggagagcaagcacatctggaagctgcagtgggccaccaccatcctggacattgagcgctccttccccgtattcctgaggaaggccttccgctctggggagatggtcaccgtgggcaagagctcggacggcactcctgaccgcaggtggtgcttcagggtggatgaggtgaactggtctcactggaaccagaacttgggcatcatcaacgaggacccgggcaagaatgagacctaccagtattatggcttctcgcataccgtgggccgcctccgcagggatcgctggtcctcggtggtaccccgcgtggtggaactgaacaagaactcgaacccggacgaggtggtggtgcctctggacagcatgggagacccccgctgcgatggccaccagcagggttacccccgcaagtggaggactgatgacgccccgctctagggactgcagcccagccccagcttctctgcccactcatttctagtccagccgcatttcagcagtgccttctggggtgtccccccacaccctgctttggccccagaggcgagggaccagtggaggtgccagggaggccccaggaccctgtggtcccctggctctgcctccccaccctggggtgggggctcccggccacctgtcttgctcctatggagtcacataagccaacgccagagcccctccacctcaggccccagcccctgcctctccattatttatttgctctgctctcaggaagcgacgtgacccctgccccagctggaacctggcagaggccttaggaccccgttccaagtgcactgcccggccaagccccagcctcagcctgcgcctgagctgcatgcgccaccatttttggcagcgtggcagctttgcaaggggctggggccctcggcgtggggccatgccttctgtgtgttctgtagtgtctgggatttgccggtgctccaataaatgtttattcattgacggtgg

SEQ ID NO: 78540 - DNA, 1149 bp, Homo Sapiens
  misc_feature (129)..(204): n is a, c, g, or t
ggggccgcgggccggggagcgctctgggtggccagctgtgggcccgggccgtcgtgggctccggcttgcgtgcggagatgagcgggtccctcggccgagctgcggcggctctgctccgctgggggcgcnnnnnnnnnnnnnnnnnnnnnnnnnnnnnnnnnnnnnnnnnnnnnnnnnnnnnnnnnnnnnnnnnnnnnnnnnnnnagcagttggacgcgctggtgaagaaggacaaggtggtggtcttcctcaaggggacgccggagcagccccagtgcggcttcagcaacgccgtggtgcagatcctgcggctgcacggcgtccgcgattacgcggcctacaacgtgctggacgacccggagctccgacaaggcattaaagactattccaactggcccaccatcccgcaagtgtacctcaatggcgagtttgtagggggctgtgacattcttctgcagatgcaccagaatggggacttggtggaagaactgaaaaagctggggatccactccgcccttttagatgaaaagaaagaccaagactccaagtgagggcggccaagtcctcgctgagcagagagggagccgttcatgtcagagactcactgccagaaaagccttacccattttggttttcactattgagaccgcaactgcttgcactgatcattttggttcgtgagcagttggtgattttagttggtctggtgttcgggctaagaatattttattgtggacttaattacaaccactgcactgtaatgattcaatgctgtattatgatattgctgtaaacaaaattcattcttatattgtcacttattctttgcctgattcagaagttaaataggagctttggaatcattattcatgacccctctgcaaatgtgtcagtctccaaagagagtatctccccccaaattttgtgtagcttcttttgttatggaaaatggtggacaaaaaaagaaactgtgataactggggcgttgttttttaaaataaactccagcacagggatgctgtgcatgcctgagttgattccgaagtgcatatgtctgtaaggatttggagtgcctgcagtgttttatgtgtgggaagtaagggtgagtctcatattcttctattaaatttgccacaagaattgccgtcg

SEQ ID NO: 78541 - DNA, 609 bp, Homo Sapiens
gcacgagggaggcggtcccgggatttcaagggtctacgcgcttttctatggcgaatgcaacccgacgagggagtgggctgtatcttcagagttgtctccgtctttccaagaacagaacaaaatgaacaaggtagaacagaagtcccaggagtcagtatcatttaaagatgtgactgtgggcttcacccaggaggagtggcagcacctggaccctagtcagagggctctgtatagagatgtgatgctggagaactacagcaaccttgtctcagtggggtattgtgttcacaaaccagaggtgatcttcaggctgcaacaaggagaagagccatggaaacaggaggaagaattcccaagccaaagctttccagtctggacagctgatcacctgaaagagaggagccaagaaaaccaatctaaacatttgtgggaagttgtattcatcaataatgaaatgctgactaaggaacaaggtgatgtaataggaataccatttaatgtggatgtaagttcttttccttccagaaaaatgttctgtcagtgtgattcatgtggaatgagtttcaacactgtttcagaattggttatcagtaagataaactatttagg

SEQ ID NO: 78542 - DNA, 761 bp, Homo Sapiens
gagagcaaaggagctccgctgccccagattgcagcaaaaataaactgtcaagtagtaaagagaacttggatgccagcaaagaaaatggggctgggcagatatgtgagctggctgacgccttgagtcgagggcatgtgctggggggcagccaaccagagttggtcactcctcaggaccatgaggtagctttggccaatggattcctttatgagcatgaagcatgtggcaatggctacagcaatggtcagcttggaaaccacagtgaagaagacagcactgatgaccaaagagaagatactcgtattaagcctatttataatctatatgcaatttcgtgccattcaggaattctgggtgggggccattacgtcacttatgccaaaaacccaaactgcaagtggtactgttacaatgacagcagctgtaaggaacttcacccggatgaaattgacaccgactctgcctacattcttttctatgagcagcaggggatagactatgcacaatttctgccaaagactgatggcaaaaagatggcagacacaagcagtatggatgaagactttgagtctgattacaaaaagtactgtgtgttacagtaaagctaccactctggctgctagacagcttggcggtgagggagatgactccttgtagctgacatttggcaaaagcgtcactgaaaggcaagctaaatgtagttattttatcctgtggccctgaagcacaaaataaaaattctaattaaaatagttaacttt

SEQ ID NO: 78543 - DNA, 476 bp, Homo Sapiens
gagccatcacaggtaccagcagcactgtcaccagtgtggtagccctggctgcccaggccagtgctgcagctctgcagaatgttcagcatgccatttctgactggcacatctcgtgaagtttcatagaaacaaggagttggcatcttggatctcagaatggcctggaaacggatggcctctacgctgttccatcacagtctccaactaaggcttatggtatttcattaaactgttgcatacccagttagcacagtaggtggggagtctgcttcatttctatcattccatttttctgattaaactgtcaaatctgtcattgcatatgccatcgttttctagcaaaatcccatgattggctataaacgttttgtaagaagtcactctccttgaaaatactgaacatagctgtataggtttgtgattattagagaatatgttaataaaacttcttgtaacggctaactgccacctaaaaa

SEQ ID NO: 78544 - DNA, 1098 bp, Homo Sapiens
atttgcaataagtacggtaattaatagatacccaactaataaatatttatgaagtgtgctagacactgttaggcatagtacagagattcacaatattactataattatggaaaaagtaaatacactggttgagcaaaaacaggcttgagaagccaggagcgcacagagtagttgacccagtaccggatttggaatggggagtcataggccataatcttggctctgccgttaactcgctgtgtactgttgggtgggtggttacttcagttctttctcacagagccagtttcttcagctgtaaaatgaagcttttgaccttgaaacgatgatcctcaaggtccttctcagcactggtattccctgaaggcattggatgaataacggagattctaacagtctctgttaagacaggatgtcgaatgggggcatttttgggagtatgttggcctcttattgttggtttgtttctttagctgcaaatgtacttaggactcatgatttttctgtaactagagtgccacaaataaaatacgtttttcattcagttggataaacagggcaggaaagaagaaaacccgattttactaaggtaaatgggcaaaaactggaagaaaggggagtgtggttttggagagggtcccgatggtaagatcctgattggaaggtgtgttggttaaacaatttctgaactaaccgccagatggcatcactggccaggactgtttactacctgctagaaggggtagggcaaagtgaaacgaagccactctagggcgaatggggtaaggggaaagcaacgaataaattgccctttataaagatgatcacagattggatatttattactcagtgtgtctgtatgcagtactagggtggactaatgtctcacttcaaaaaaaatatgagtgtagtatacttggcctaaaattgttactcagtgttactaaagtgtaatcattttccacatctccaaatatattccaagtctctgaaatactagtgcattgggaggtagaacattttcgagcttcatgtctgtaaatggtttctctttactgtcattcagtaaaatcagaataaatgattgatgtaatactt

SEQ ID NO: 78545 - DNA, 1002 bp, Homo Sapiens
  misc_feature (49)..(49): n is a, c, g, or t
  misc_feature (74)..(74): n is a, c, g, or t
  misc_feature (99)..(99): n is a, c, g, or t
  misc_feature (108)..(108): n is a, c, g, or t
  misc_feature (127)..(127): n is a, c, g, or t
  misc_feature (152)..(152): n is a, c, g, or t
  misc_feature (154)..(154): n is a, c, g, or t
  misc_feature (156)..(156): n is a, c, g, or t
  misc_feature (159)..(159): n is a, c, g, or t
  misc_feature (166)..(166): n is a, c, g, or t
  misc_feature (220)..(220): n is a, c, g, or t
  misc_feature (238)..(238): n is a, c, g, or t
  misc_feature (527)..(543): n is a, c, g, or t
caggataggatgacagaatttgattttcagagaaatgattgaaatcgcnttgacgagacagattcaaaacactnggttccccctcctcatgctcgggtnttgataatntgaaagggccacctctcancgaaaagtgataaatgtgcctcagntnantgntgaaatnacagagagacatgctcagccaccacctataccagtacagaatgatcttgaactntatgaaaaactgacatcntcaaatgaaataaacaaggagaagagtgacacagttgctgatatagaaagtgaaccagtggtagaaagcacagaaactgaggggacataatcatcactcagtaggtaaaagataccttttgtaaagttgtcatctctctgtaatagataatggctgactggaccatagttgttcacttttgtctgccagaattaagttaatctgatgttcatgttcacctttctcttaaaataattgtacaactgacttgtatagacattgttcttaatatgaacatggtaggtaaacnnnnnnnnnnnnnnnnnctgataaaatacaaatgttggccccagattcttttaacgtcaaggaaatgaataacagcttgtcagagacttcctatggaagaaagaattttttagatactatcattaggttggatatggtaatagatatatttcagaatagcaagtggtggtatatcttatccatatctttaggctgctgcagaattttaaggttatagataaagctgtgatattttatgcaaagactggctctaggtatttgaggagcacaatacagagattttaaaaagtgattttgtaaaatctacactacggtctctgtttctccaaagtaagtgtttgtgatttgttcctcatactgcagtgagtaaaaaagaaacaagaaaacaacaacataaatattaaagtacgtttcaatgttgggtgaattttgtttttagatgccaataaaacttatttgtttgataccagtgaaat

SEQ ID NO: 78546 - DNA, 1201 bp, Homo Sapiens
  misc_feature (938)..(988): n is a, c, g, or t
cagtcgacggtaccggacatatgcccgggaattcggccattacggccggggatgtgcctgataagagtcaagaaaaagctgatttatacatccatgtgacatacatcaaaaagtgggatatatgtgctggtaatgccatcttaaaagccctaggggggcatatgactaccctgagtggtgaagaaatcagttacactggttcagacggcattgaagggggactccttgctagcatcagaatgaaccaccaggccctggtcagaaaactcccagatctagaaaagacaggacataaatgagcataactgattacagggtacagttcttcacagctgaaatggttagcctgagatgctggaagcttcaaaggattggtggagactatgcatggttaaggccatcccgaactttttaaagtatttatgaagcatcagagacttattttccctgtaatagaatgcaaaatcagggaaaatgggttgctttgtgtctcaagtattgtctttatttttgagactattttcatacagttgtcatacacaaggcgcatatatatatttgtgaattaaaatctgtagctgagtctacattgttatgagtcaccattttcacacaacatcatgaatcttcactgttagtactttcatatagaattcggttgaaggaaagattgatttttgtgtagatgtttaatataactttacaactatatctcattgaaaataaagtcattggggatttttacctctaatttggatggaaagcacaagaagccacacattcattaatatgcaacaaatgttgtatttatgttactgaatatttctatggattaaaatagaaaaagtttaattgattttttcttttaaattttaataacaggttcaccagctggtagaaaatagagacacatgatgatttgcattgtaataatttcnnnnnnnnnnnnnnnnnnnnnnnnnnnnnnnnnnnnnnnnnnnnnnnnnnnacccatgagtttagcatttctgccatcttgctattttcattttccctgtggaagatgcatggttgcatccttttccttctgaccaacacttaatctttaactttgtaaggttcggtttaaggtttcagggttagcactatagttttggttcattttctcattaacgataaaatatgctgtaaggcactataagaatataaatgattctattac

SEQ ID NO: 78547 - DNA, 591 bp, Homo Sapiens
  misc_feature (41)..(41): n is a, c, g, or t
  misc_feature (143)..(193): n is a, c, g, or t
  misc_feature (476)..(484): n is a, c, g, or t
caaatgttgtatttatgttactgaatatttctatggattanaatagaaaaagtttaattgattttttcttttaaattttaataacaggttcaccagctggtagaaaatagagacacatgatgatttgcattgtaataatttcnnnnnnnnnnnnnnnnnnnnnnnnnnnnnnnnnnnnnnnnnnnnnnnnnnnacccatgagttcagcatttctgccatcttgctattttcattttccctgtggaagatgcatggttgcatccttttccttctgaccaacacttagtctttaactttgtaaggttcggtttaaggtttcagggttagcactatagttttggttcattttctcattaacgataaaatatgctgtaaggcactataagaatataaatgattctattacaattgaaagttacttgacattacatgaattgaactgcctttcattatcttcagacactttgttttagtannnnnnnnnaatttgctaggtttgtatatagaagatcctttcattatcaagaatgagtatggttgcttttgccatggttgcttttactattaataaatgtatctagcctacccaaa

SEQ ID NO: 78548 - DNA, 1921 bp, Homo Sapiens
tggaccggtccggaattctgtcagcacagcacaggttagacttgcgctcccagctggggactgctccacggccatggagaatagacagcaggcccggggggctccccggcagtagctgcaacctaggtgcagcccgagaacacatgcaggcggtcacccgaaactacatcacccacccccgtgtcacctacaggactgtgtgcagtgtgaacgggcccctggtggtgctggaccgggtcaagtttgcccagtatgcggagatcgtccacttcaccctcccagatgggactcagaggagcgggcaggtgcttgaggtggctggcaccaaggcgattgttcaggtgtttgaagggacatcagggatcgatgccaggaagaccacttgcgaatttacaggggacatcctacgaactccggtgtcagaggacatgctgggtcgggttttcaatggctccggcaagcccattgacaaggggccagtggtcatggcggaggactttctggatatcaatggccagcccatcaacccgcactcccgcatctaccccgaggagatgattcagacgggcatttctcctattgacgtcatgaacagcattgcccgcggccagaagatccccatcttctcagcagccgggctcccccacaatgagattgccgctcagatctgccgccaggcggggctggtgaagaagtccaaggctgtgctggattaccatgacgacaaacttcgccatcgtcttggcagccatgggggtgaacatggagacagccagattcttcaagtctgactttgagcagaatggaaccatggggaacgtctgcctcttcctgaacttggccaatgaccccacgatcgagcggatcatcaccccgcgcctggcgctgaccactgctgaattccttgcctaccagtgtgagaagcatgtgctggtcatactgaacggacatgagttcctatgcagaggccttgcgggaggtctctgctgctagagaggaggtgcctgggcgccgagggtttcctggatatatgtacacagacctggccaccatctacgagcgggcgggccgcgtggagggtcggggaggatccatcacacagatccccatcctcaccatgcccaacgacgatatcacccaccctatcccagacttgacgggcttcatcacagagggacagatctacgtggacagacagcttcacaacagacagatctacccccccatcaacgtgctcccttccctgtcgcggctgatgaagtcagccattggggaaggcatgacaagaaaggaccatggagatgtctccaaccagctgtacgcctgctatgccatcgggaaggacgtgcaggccatgaaggcagtagttggggaggaggcgctcacctctgaggacctgctctacctggaattcctgcagaagtttgagaagaacttcatcaatcagggcccctacgagaaccgctcggtgttcgagtcgctggacctgggctggaagctgctgcgcatcttccccaaggagatgctgaagcgcattccgcaggccgtgatcgacgagttctattcccgcgagggggcgctgcaggacctcgcgcctgacactgcgctctagccccgcgcgccgtggcaccccaacaccggcagggaacctaccctcggctcccgggtctcccctccctcgccaccccaaccagcggcttctgcgccgccctccgccctccgctggctccgaggtggtgggggcgccgcacgctccatccctttccctcgctcgattccttttcccgcgctccatgcctccccctcgactcccggtgctgcggaagaactgaaggttgcgatgccttactctgacgggagcatctgtatttttatgttaaaagcccacaaaataaaaataaaaagtaactgagatgaattt

SEQ ID NO: 78549 - DNA, 1482 bp, Homo Sapiens
  misc_feature (1140)..(1140): n is a, c, g, or t
  misc_feature (1145)..(1145): n is a, c, g, or t
  misc_feature (1163)..(1163): n is a, c, g, or t
tccctttgtgtaaaatgagataatatgtatgtcacagaattgttttaaggatgataaaggactaagtgagataatgtaggtgaagtttagtatgatgcctggctcatagttaagtgctgaattatgatagtaatcaatatctactcctaacctctttcttcacagattttaagcttctgtctttctagggggttaagagtcataaaccaaaattacactttcctctgctaggtttcctccctttcctcttcttgacagtctgatgggaaacaaaggcacacataagagcctagttccaagtagtcaagagcctgagaggaagggatatggagagtaatccttcatatctccaggagtgcctgtgaagaagctgaggaatgggactgggaaagcacacaaaataaggaaaacctttcctggggttgggaaagagaagaaagtgcacagctggctacataccataagaattttgtgtcaaaatgtttaaaagcctccaaagattgaatggaattgtctgggactggggaaaaggggctgggacctgggagagagagggaatagggagaagacggtaccctctaaaggcactagctgccattaaatgctccctgagtgccacagggagcaggagttacgttctctgggcattagccttggggaaaagcctgctatgccagtaatcagggttatcaaaggcagagtctgtagcctctaagctacgtagagtttttaggcgggcataatggacatggggggcctgatgtccaggcccctgaaaagctctcatctcttcatacccttgctcagatgctgggcaggcccccatggctgcataatcacccccaggaccacctccatctcgttgccgattcatatattcatagtcttcatctggagttgtgcctgcagtgggcatgatgggtacagggtggagtgggcaactctgtgtgctgcccagagaggcactgaggtctgaccccacatccatgtactcataacccagctcctcaagggaacttggactagggggatgaggtggactgtgccttctcctccggttcatgtattcatactcctcatcttcatcttcttcttcagtacccaggacagaactgagaccactgaagaaagggtgcttcncgggnaggagggagtactttgangtgtgtatctggcatgacataccgttgacatctcttctctaaccgggtggggagagtgtgtacaaggatcatatactgtgggctgggatggtagcgtatctcgcgtggcgtgggtccggtctgctcgggtctacaattgcacttctcctgagtcacctcgagctgttcatgcctctcttcgtgcgatctggctcagggcaaatcccaaggagcgtataatcggacagtatactgttctgtgggattgtacctcaaatcaacacaacaacggacatatgtaactgggggcagatgctatcaatatgctgcccacgcctca

SEQ ID NO: 78550 - DNA, 1208 bp, Homo Sapiens
aggctggaccggtccggattcccgggatcatggagctggctggaggggtccccctggaccagtgccagggcctaagccaggacctgcggaaccagatttgcttccagctcctgacgctgtgtctgcgggagctgtttgagttccgattcatgcagactgaccccaactgggccaacttcctgtatgatgcctccagccaccaggtgaccctgctggactttggtgcaagccgggagtttgggacagagttcacagaccattacatcgaggtggtgaaggctgcagctgatggagacagagactgtgtcctgcagaagtccagggacctcaaattcctcacaggctttgaaaccaaggcattctccgacgcccacgtggaggcagtgatgatcctgggggagcctttcgccacccagggcccttatgactttgggtcgggggaaacggcccgccgcatacaggacctcatcccggtgctgctgcggcaccggctgtgtcccccacccgaggagacctatgccctgcaccgcaagctggcaggggctttcctggcctgtgcccacctccgagcccacatcgcctgcagggacctcttccaggacacctaccaccgctactgggccagtcgccagccagacgcagccactgccggcagcctccccaccaaaggggactcctgggtggatccctcatgacagcctccatgggggattcagtccccagagcaggccgtaccctgctgtagtgcctcttatcccttccccgtctgccctgggtcagaggagcccccttgggcttcccagtcttgcctggctctcctccttggcccaggagctcaggatccctggggctggggaactcccaacttcgtgccctagatcctgcacctccccactcgaaagtgggtatccgaaaactaagccagggaagcggttaacttatctttgccaacatttgagggagccttgggccgctgcatgtcgttatgcagatcagactcatcagggggagccctcacctctgcctcaagcctcccgtggaaggcgagatggtcctggaggcagtcctcacctctgcctccctcgctcctccaacagctgccttctcccgggttccagcctctcagtgtgttggagaggtaggggtgcggggtgggggggagctgaatcttcaatcggaataaaagcagccctccccttccccgcaac

SEQ ID NO: 78551 - DNA, 1017 bp, Homo Sapiens
agataagccatacacaaaaggataaatattatgtaatttcacttatctgaataaaaaatgtatagagatggaaagtataacagagtttactaggggctgtgctggaaaggggagaatggaaagctattatttaatgggtatagagtctctgttggggatgatgagaaatattcaggaaatggatagagatgatggttgcacaacattgtgaatgtacttaatgccactgaattgtacactaaaatggttaaaatggtttacaaagtacttctaataaaatatagctagtatttccaagatggaagaaaatcatattctagtctcaagcctctgagaagatatccattgctcaacaaaacaactttacgtatactttctggttatactgcaacataaatattttctagttgctgggccacaccgttgacattatttcctcatttttggacactccggagcagacttgtacattttcagaaaactgtcaataacattttttgccactttgcaccattaagtgttatctttgaatcaggtgttggccaaatcgtgtagactgttctgttttgttcatggttactatggaaactgtgcagtcataatgttttgaggagactagcaggaaatttaagagtgtacaataaaagttaacttatttcatggtttaaaatttcttccagctgtctccatttgtgatgattatcatgttcacattgggagtataaacatacaaccaaaagggctctggtgactatggccaataagccatctcacccctaacagacttccctcccaacctcttttcctcaaagatttgtaataggaacacgtgaaacaagtggtatgtaaggttcaggtgttttcaattatttccctcctatgaacagaggtttcctggatccaaaacatgtttcagctcaaagggttttccttatttttgaagatggtgttatctcaggaaaatttcatctacatatctctgattcattgatcttcatcaataaagcatctccttgg

SEQ ID NO: 78552 - DNA, 1270 bp, Homo Sapiens
  misc_feature (240)..(295): n is a, c, g, or t
accaacagcatacttaacagacttgctgtgtagcagtttttttctggtggagttgctgtaagtcttgtaagtctaatgtggctatcctactcttttgggcaatgcatgtattatgcattggaaaggtattttttttaagttctgttggctagctatggttttcagtacatttcctactttaagagtaattactgacaaatatgtatttcctatatgtttatactttgattataaaaaagnnnnnnnnnnnnnnnnnnnnnnnnnnnnnnnnnnnnnnnnnnnnnnnnnnnnnnnngtcaaatcatgtttagaaactttggatgagttaagaagtcttaagtatgcaggcgtttacgtgattgtgccattccaaagtgcatcagaactgacattcccttctaatatcttctcaggagtaatacaaatcaggtatttcatcatcatttggtaatatgaaaactccagtgaactcccaaggacatttacaacatttatattcacacgctgtatggaagggtgtgggtgtgtgtgaaggggcgagtggagacactgtgtgtatctctagataagaagatatgcaccacgttgaaaatactcagtgtagatctctatgtgtataggtatctgtatatctttccttttgtttacaactgttaaaaaacctcaaaatagttctcttcaaaagaagagagattccaagcaacccatctttcttcagtatgtatgttctgtacatacttatcggagcgcgccagtaagtatcaggcatatatatctgtctgttagcaatgattattacatcatcagatcagcatgtgctatactccctgcaagaaatatactgacatgaacaggcagttcttggagaagaaagagcatttctttaagtacctggggaatacagctctcagtgatcagcagggagtttatttgaggacatcagtcacctttggggttgccatgtacaatgagatttataatcatgatactcttcggtggtagtttcaaaagacactactaatacgcaggaagcgttccagctatttaatgctggcaactactgtttaatggtcagttaaatctgtgataatggttggaagtgggtggggttatgaaattgtagatgtttttagaaaaacttgtgaatgaaaatgaatccaagtgtttcatgtgaagatgttgagccattgctatcatgcattcctgtctcatggcagaaaattttgaagattaaaaaataaaataatcaaaatgtttcctctttcttaaa

SEQ ID NO: 78553 - DNA, 674 bp, Homo Sapiens
  misc_feature (103)..(226): n is a, c, g, or t
tagggtgtaattgagtgaaggaatcctgggtagagaccattctcaggtggttgggccaggctaaagactgggatttgggtctatctatgcctttctggctgannnnnnnnnnnnnnnnnnnnnnnnnnnnnnnnnnnnnnnnnnnnnnnnnnnnnnnnnnnnnnnnnnnnnnnnnnnnnnnnnnnnnnnnnnnnnnnnnnnnnnnnnnnnnnnnnnnnnnnnnnnntcctcttcctcttgagaaatattcttttcatacagcaagtatgggacagcagtgtcccaggtaaaggacataaatgttacaagtgtctggtcctttctgagggaggctggtgccgctctgcagggtatttgaacctgtggaattggaggaggccatttcactccctgaacccagcctgacaaatcacagtgagaatgttcaccttataggcttgctgtggggctcaggttgaaagtgtggggagtgacactgcctaggcatccagctcagtgtcatccagggcctgtgtccctcccgaacccagggtcaacctgcctgccacaggcactagaaggacgaatctgcctactgcccatgaacggggccctcaagcgtcctgggatctccttctccctcctgtcctgtccttgcccctcaggactgctggaaaataaatcctttaaaatag

SEQ ID NO: 78554 - DNA, 1516 bp, Homo Sapiens
  misc_feature (1456)..(1474): n is a, c, g, or t
ttacggctaggtagcgaggcctggggtgttgaattcggcacgagggctgagaggcgagcgtgagcccagcgacaggagagtgagctcaccacgcgcagcgccatgaccagcaagggtcccgaggaggagcacccatcggtgacgctcttccgccagtacctgcgtatccgcactgtccagcccaagcctgactatggagctgctgtggctttctttgaggagacagcccgccagctgggcctgggctgtcagaaagtagaggtggcacctggctatgtggtgaccgtgttgacctggccaggcaccaaccctacactctcctccatcttgctcaactcccacacggatgtggtgcctgtcttcaaggaacattggagtcacgacccctttgaggccttcaaggattctgagggctacatctatgccaggggtgcccaggacatgaagtgcgtcagcatccagtacctggaagctgtgaggaggctgaaggtggagggccaccggttccccagaaccatccacatgacctttgtgcctgatgaggaggttgggggtcaccaaggcatggagctgttcgtgcagcggcctgagttccacgccctgagggcaggctttgccctggatgagggcatagccaatcccactgatgccttcactgtcttttatagtgagcggagtccctggtgggtgcgggttaccagcactgggaggccaggccatgcctcacgcttcatggaggacacagcagcagagaagctgcacaaggttgtaaactccatcctggcattccgggagaaggaatggcagaggctgcagtcaaacccccacctgaaagaggggtccgtgacctccgtgaacctgactaagctagagggtggcgtggcctataacgtgatacctgccaccatgagcgccagctttgacttccgtgtggcaccggatgtggacttcaaggcttttgaggagcagctgcagagctggtgccaggcagctggcgagggggtcaccctagagtttgctcagaagtggatgcacccccaagtgacacctactgatgactcaaacccttggtgggcagcttttagccgggtctgcaaggatatgaacctcactctggagcctgagatcatgcctgctgccactgacaaccgctatatccgcgcggtgggggtcccagctctaggcttctcacccatgaaccgcacacctgtgctgctgcacgaccacgatgaacggctgcatgaggctgtgttcctccgtggggtggacatatatacacgcctgctgcctgcccttgccagtgtgcctgccctgcccagtgacagctgagccctggaactcctaaacctttgcccctggggcttccatcccaaccagtgccaaggacctcctcttcccccttccaaataataaagtctatggacagggctgtctctgaagtactaacacaaggacnnnnnnnnnnnnnnnnnnncctcgtgccgaattcgccacccaggcctcgctaccttggacc

SEQ ID NO: 78555 - DNA, 856 bp, Homo Sapiens
gggacctcgcaggcgacctcgctggaccctaagtccaggccacagtcagggaagggcgctgagaggcgagcgtgagcccagcgacaggagagtgagctcaccacgcgcagcgccatgaccagcaagggtcccgaggaggagcacccatcggtgacgctcttccgccagtacctgcgtatccgcactgtccagcccaagcctgactatggagctgctgtggctttctttgaggagacagcccgccagctgggcctgggctgtcagaaagtagaggtggcacctggctatgtggtgaccgtgttgacctggccaggcaccaaccctacactctcctccatcttgctcaactcccacacggatgtggtgcctgtcttcaaggaacattggagtcacgacccctttgaggccttcaaggattctgagggctacatctatgccaggggtgcccaggacatgaagtgcgtcagcatccagtacctggaagctgtgaggaggctgaaggtggagggccaccggttccccagaaccatccacatgacctttgtgcctgatgaggaggttgggggtcaccaaggcatggagctgttcgtgcagcggcctgagttccacgccctgagggcaggctttgccctggatgagggcatagccaatcccactgatgccttcactgtcttttatagtgagcggagtccctggtgggtgcgggttaccagcactggggaggccaggccatgcctcacgctttcatggaggacacagcaacagagaagctgcacaaaggttgtaaactccatcctggcattcccgggagaaagaaatggcagaggctgcagtcaaacccccacctgaaaagagg

SEQ ID NO: 78556 - DNA, 765 bp, Homo Sapiens
  misc_feature (720)..(720): n is a, c, g, or t
ttttaacttttttcaagtcactcaggtttaatgattccatcatttggacacataaacttctgttccatttaagtctgctcactgtagataatccaggtcacccagcctcccattaagatttaatcaaagttttctgcaccccaaaccctcacaaaacagacctctatgatgaaatcacagaaagatacatattagtccagttagtggccaaacattggtctttagagtccaaagacctctataaccagtaacagtagttgggagaaaagaaggaataaagaaactgagttttctgagaaccccctttccagactgcctgaataagttgccttttcttaaaagagcaggattaatctacttatgccaagacccactgggcagaaagcaccccaacccaggtttagctgatctttaccacttccctgtgagagctacagcaatcttttggaattttctgcagcaaattttccccttttgctgtccctacaaaggcagaaaagctaggggccaatctctgagctaattccttgaatccaggcaggatgagcattcaccatttggacccctctctgtaagaagctaggactttatttcttaatgaaagttcaacactgaggaaaagatagcaaagtcgttgactcacaatctcaggccaacctcaggcagataggttaaggcaaggataggcaagaaaggtctattttaaccctatccaggcanaaagcaggttacttttggaaatcctaagatcaagctggtgctcag

SEQ ID NO: 78557 - DNA, 676 bp, Homo Sapiens
gcggccgcaccatgagcgacatccgccgcccaccccgccctgcccacgcaccccggccacaccttcatctccggcgtgacctttcccttcaggcccatccgctaggctggcccgtgtgtgccttctgcgctctcgctggacgaagcctttcgagatggaaggggtggccggactcccagaagagaacctcggggaaggggtcgggcagcccctccccgccggcagaaccgtcttggtgtcacggagtccaggtgcttcccacccggtcgcattctttgacatgcagattggatggtggagggaagagtccagcctctgccgagagcctgctgcgtgcatttttaaaagatgccgatcctgggagcctctgttctctgcgcatttcagacacagcctgtgtggcgaggagtgtgacggcaggagccacgggtgcaagcccgtgtgtctggcctctttcctcgtgaagacgatgtgtccccgccagaaaaagtgggctccttctgcagccccgtgagctgagcccaggctgcgtagtgaccacaagcttatgtgcagcactgctcagggaggctgtcaggaattcccctcacctcggaaaggaacttctcagttttattgggggtgtctaaatttcctttcatatgttcaaataaatttttctaaacagtcaaaaaaa

SEQ ID NO: 78558 - DNA, 678 bp, Homo Sapiens
ggcaacaggttgcgacactgtctcaagagaaaagaaaaagaaaaatagggataggtttcccttcctagcccagtagagtttgacctcattagtatggtgctttgggtgaggacctcttccttgattatcccactttctagtgaacagctaaaattcctgagagtctctactgttaaggtacctttaataggataaagcagggaccacctatctcagtgggtccatttttcttttaaaattagttatctgaaaaaacttagcagtagttcccatctttaaggtaagtctttcatttggtccccattgtgtaaaatactaatcaacattttcaagcttctgtacaacagactgcttttgtctagatttctcaactccactttataaagcttatcagttttcagagaggaatgtgaattttttttctaatgcaaataaatggatatggcaggaactacagcataagtgattattgtgattctgggtggacggatataatttacaacatttagggatgttctaggtagcctgctgtagtttgacttccagtcactgttgtctttcacattataatttgtatatttcttgtgatagaagggatgatgcaaatatgtaattaaagtgtcaccagatttctgttaaaacccaaggttgaaataaaaagcctaacattggtaagct

SEQ ID NO: 78559 - DNA, 1394 bp, Homo Sapiens
  misc_feature (332)..(341): n is a, c, g, or t
  misc_feature (1009)..(1162): n is a, c, g, or t
  misc_feature (1253)..(1253): n is a, c, g, or t
gacgggaaaatggagaagccacagacactattctctgttatgatcctgcaacaagtatcatcacaggggtagctgcaatgcccaggccagtgtcctatcatggctgtgtgactattcatagatacaatgagaaatgctttaaactctgaagacaggatacctcaccgaagaagccacactgatccaagatgggaggttttaaaaactctacagtgggaacttcacatatctcctttgtgccatatgcaaaaaatagtaaaaataataatttggtgcctttctcctcaaaatatcaatctttcaaactataataaagcctttcctataattgnnnnnnnnnncttttttgttaaaggtaatggtggttgttacttggcctttgaagagtgtacctttgtaagtatttgtaagaagtctatgtgaattaggaaatgtctgtctgcataccttttaggagcgtgtgaatggtgtcttcacttattatgtatgtttatctgtatgtatattccttattttgtcatatatgtagagaaaattgcatgacttgaggcatcatttaggttgaagaagttaatgcttagaatgcattctaggagaaaaaatcagttttaaaaacctttgttgttaacaaagtatatccagattggttaattttattgaagggtttttttctgtaattgataaaaatgtaatgacaacaattcaggcatcataaaatactgaactattgtgactttattcttagaattgctgtcttacattaaacatgtttttagggggaagttaggtaggagatagaaaaataagtgcccctacaagggggattaaaattacaagttaattcctaagagaaaaatggaatggcctttgaaggaaaaatgacccactatggctctcaaagtttttatgcatcatctcttcaatcctctaagaaagcctcttttcttaacttgataaagcagtggaaacccattttgcaatattgttttgtgaaaaacagggacagacnnnnnnnnnnnnnnnnnnnnnnnnnnnnnnnnnnnnnnnnnnnnnnnnnnnnnnnnnnnnnnnnnnnnnnnnnnnnnnnnnnnnnnnnnnnnnnnnnnnnnnnnnnnnnnnnnnnnnnnnnnnnnnnnnnnnnnnnnnnnnnnnnnnnnnnnnnagaaaagaaaaatagggataggttttccttcctagcccagtagagtttgacctcattagaatggtgctttgggtgaagacctcttctttgnatatcccactttctagtgaacagctaaaattctgaaagtctctactgttaagggtacctttaattagataaagcagggaccccctatctcagggggcccattttccttttaaatttattatccgaaaaaacttacccgtag

SEQ ID NO: 78560 - DNA, 1162 bp, Homo Sapiens
  misc_feature (63)..(71): n is a, c, g, or t
  misc_feature (889)..(942): n is a, c, g, or t
  misc_feature (1132)..(1132): n is a, c, g, or t
cctgcatgtaaaaactgaaggtttcgtatgtattaaaagccatatttccaccttcttaagggnnnnnnnnntcggacgtcataacactgggtggatgtttttatggtaacagtggtctgaggcccttggcggatgctcaccgagccactgtcactatcctgcctgcctttatctgccttgccctgcgattatttggctttgtaagcataagctacgtaagacataccacacctaagaaactaaacagcaatgaaaacccatacttctgaaaagggtgtcttttaaaaattaagtttgatcttttgggaaataaagcacatagttttcaaaatgatttaccaagatctatgctctttcaaatggagactgggatattgttgttttgagaccactgttttcctgtttcctcccaaatgttagtcacatatatgattacccttaagttggtcactatctatctatctgtcaataatttaggattaaagtttgaagtgtaattacatttgacttttacaggcatctcagggtggacttcttatgaatacactgaacctatacaaatgatcttagaaaacgtttaatatcagatttctttattttttccaacacaactgaatcagttttcttaaataaaagtttattgtctactgtttacactcatgttgctgctgtgagtacaacaacagacacaaattcctagcatgaatatattcattgttcacccccactgaactacagacattgcttgagaattagatctttgctttagggatttaaacagaaaagaatcggggcccagaatcttgaaagaatattctcaagtgactggttggagttagaaggcatagccaatacaggcaaacagcacgatgatgctgtcactgggaannnnnnnnnnnnnnnnnnnnnnnnnnnnnnnnnnnnnnnnnnnnnnnnnnnnnncggccttagaagcagttgtggcagaaataactggagacttgatttcgcccatgtgggctaagtggctgctttgagaagggacaaataaaaaatgaggtggggggtgggggagtgggataccatgagttaaaaaagtataaaaagtaattatctaaaatatagattagatataaatgtccagaactcatanataagctcaaaaatactggaaaggggcaat

SEQ ID NO: 78561 - DNA, 666 bp, Homo Sapiens
ctgagcaaagattcgagaaggtggggagagccccggagccttccccgcagagcagaggaggcccgggaagctctggactcatagcggttcagcacggccacgacacggccacttccagacagagcccctggctgctgggtagggaccgcagcacctcagagaaccctttctggggtcacttctggcaccctctgcaaacctcaagggggagcgtgaggctgggggctgtccatcagggtccaggcacctcctgaaggaacctctcaaagccagccgatcaccggctccagacccacgctgtcagacatctctgtggccaccagaccactgccactctcacgggtgtgatgacatgggacctgcctactggtagtcttctgccttcgtggaattctgcaacttccttcctgcctcggccacagcatgtcagccaagcacctgtcagggtccctccctggcaggacgatgtttagaagctcaacaccgtgctcctgcctcctcttcagacccatcagaacttgctaccatgggtgtgttttaataaataacttcatttctgcagcaaataaataaataaataaatgtagttgcaatattgcctttaaaagcacttttaagcatcaattgtgaaataaaaagcccgagcaaaagccctctttgagcgtg

SEQ ID NO: 78562 - DNA, 686 bp, Homo Sapiens
tgcatagcaagtattttcctgcattccaattaaatgcttaagaaaaagcagcatcctataaaattgtgatcataaacatccatttccctcagcttttgtgagtgccttgacttacagccaacatcactgtttaactcagtctgtttaaaaacaaacttttctggtggttgataacagagagttgctccctgagccatcagggtcctgggagctggaagtgaaagggttattaacattctacctttatgcagctgttggctgaccagaataaactccctgctgagttcaagctttgaatggaatggatgcaaatgatgttgtttccattagagcaggtgctcacagcattctgattggcctgagcagaccgaggctatggctgttgggacaagcttagcatcctggacatcttgtcaaagaacctcactcacccctctggcctctacagccctcagaggagagaaaaccaattctccaacaaacaggtctctccaacatggtggtgctggcaggcttaggtttagaaaatcctgactgttaaaggcgtttgaatacatcacattcctatgcaaatgtttttaatctccagtttaatgtagtttatttttcctatatgtaaagtatttttatacggcttgtatcatgatagtttagcaataaaacagttggaagcaacatctaaaaaa

SEQ ID NO: 78563 - DNA, 1038 bp, Homo Sapiens
  misc_feature (164)..(164): n is a, c, g, or t
  misc_feature (166)..(367): n is a, c, g, or t
  misc_feature (380)..(380): n is a, c, g, or t
  misc_feature (451)..(451): n is a, c, g, or t
cgctttacgtctgcttgtgctttgcaactgttcctgctatccctgttttgaaacgtatccccttgatgagtgtaccgtccgccacgaacgacgggccaggatcatgagcgagagcgaagaccccatacgcaccgctctcccgcggttgccgatcataatgcagntnnnnnnnnnnnnnnnnnnnnnnnnnnnnnnnnnnnnnnnnnnnnnnnnnnnnnnnnnnnnnnnnnnnnnnnnnnnnnnnnnnnnnnnnnnnnnnnnnnnnnnnnnnnnnnnnnnnnnnnnnnnnnnnnnnnnnnnnnnnnnnnnnnnnnnnnnnnnnnnnnnnnnnnnnnnnnnnnnnnnnnnnnnnnnnnnnnnnnnnnnnccaagaattcgcnacgaggaaaacccacaagccagcattccttgagatggcagtggcagaaaaagtctgatgtaaaatgacaanaagggggtcagatgatagccctgaacttataatcaggactgaaggtgaacagggcaaagaatccagaaagagggtgagtttgctgcctgatcatcaagctcatctgctcttctcccttggcacaaagttaaactgcatttttttcagcctccctggaggttaagtgcaaatcagagagatgcatgaaaaagtgatgtttctcatgcatttcagaagaaaccatcaaaacctcccaggtgtgcttcttccggctcttttcccatttgcaactctgcaactcataggctaggaaatgacctcaggaaggactttgaagtcatcagcggaaggtggatgaatgactttgtggaatccaggcctgagcttgattcctttcctggatgaccagaaatatccacaagggactgctaaccttgaacaagataaaactttgttttattccactgagctttggaggcttagcatgttagaatggttagaattggtagtattagagcataaattaatgtggcaaacttactgagtttttgtgaatactgctatgagtgaattgagcaagtgaataaatgtaatctatatttatgaac

SEQ ID NO: 78564 - DNA, 805 bp, Homo Sapiens
  misc_feature (773)..(773): n is a, c, g, or t
gaatcacaccgtgtcatacccatgacttccattgcacagtgggaaaactgagtctagagaggtgaaataacatgtctaaagtcacaggaagtgaaaaagctgaggacatggagccagttgcccaatgacaggagagctgaaatgtcctcactgctgggggtagaccgggcctcaccagcttcctggagagtcacatgtttgtctgcatcctcagggggctcgccggttctccagcccggactgctgccagaggcttcctggaggtggcagctttcttcaaaggcaccatcccggagcgcaagcccctgatgggcgcagaaaattcgggacagaccacgtagaggtgggctcccaagcaggtgcggacggcaccaggccgcccaaggcatcgctgccacctgagctccagccgcccacaaactgctgcatgagtggctgccccaactgcgtgtgggtggagtacgcggacaggctgctgcagcacttccaggacggtggggagcgggccctggctgccctggaggagcacgtggctgatgagaacctcaaggccttcctcaggatggagatccggctgcacaccaggtgcggaggctgagccatccctgctggactccctaccgcaggacggagtccaggacgcagccgcagcctccttccttcacaccccctcacagactccttgtgtccaacgggaataggaagaattagttactgacttcacctgagaaaaaaataaattctctatggtggttttccccgggcaaatccanaacccccccaccccaatcaaacccttgcgggc

SEQ ID NO: 78565 - DNA, 709 bp, Homo Sapiens
  misc_feature (49)..(49): n is a, c, g, or t
  misc_feature (54)..(54): n is a, c, g, or t
  misc_feature (56)..(56): n is a, c, g, or t
  misc_feature (94)..(94): n is a, c, g, or t
  misc_feature (252)..(266): n is a, c, g, or t
ggacctcttctctgaaacctatcctccttcattcctctggcaggatctntgccntntgtgcctgcaatgccaggccatgtgcccctctgccctntagtctccaaagtccccagcccggccagtggtgccaggcagcttgccacttgggagggcagaagccaggaattccacacccttgtgttgcgcccggagcccgcccttcgcctcccagcccctcaagacaccgctggctgctggacaccctcttcactnnnnnnnnnnnnnnnagcggaaaaggacaagacggtgcagtcggctgcatactcccagtcgggagtgtggtcagtctgcctgctgctgtgcggtagctccagaaccacctcgttcctggttttgtttggattttggcatcttgtttttctaacaacaaacaatggagaaaaagaattgattcttagtgacacagaagattgccttacgctcgtgagcgtgagaagccataagagagagaccgaattctgtggctcagcacacaggactgacccacagcccaggcagcgggtgtgtggagatggcgccctgtcctgccaaggggcgccaggagcagagccagggcctggcgagctggcgtggagcccacaggattcagcagcatggacagtcactcttgcactattccttctccaagccagaaaccacatttaatttcataaataaatttatgaaaagt

SEQ ID NO: 78566 - DNA, 665 bp, Homo Sapiens
ttcggcacgagcatttttcatccattgctgccctgtgtgtgaacaaatgtgactccatatttattacacagcaaggactgctgtgtgtgggtgtgttcctcagaccatctctactctttttggttaggacactaggttcttcccagcatatgagtgagaatattggtggtattttgggctcctctactgcacaagggccagtccccaagtctactctgattgattgtcatgggcacccacacagatcaggacaccctttgaatttttgtttgacatgaactatttaggtgttccaaaaccttgggatctcaatgtgcaaactccttggactccagacccctgtctggttggcactcccagcagtgtgtggtttcatcaggaaatccttgcagcaggggtttagatggttccttcaggaggtgggaagcctccatagcattgaaggccagcctgcatctcgcggtgtgtgtccacttctcccctcactttcccctcacccatccctttaaagtgattggctgtgaggagcacagagggtggcaattccatctgttatgggctcagaagacatagccgccatgttgatttcacattaaactgtgtaaaatgtggaaaagactcagcatgttggtcaaacaataaactgtcctaattctcaaaacaaa

SEQ ID NO: 78567 - DNA, 672 bp, Homo Sapiens
  misc_feature (32)..(32): n is a, c, g, or t
atttattaagcttcttggtattcacttgggtntgataattgatctgagctacctcattgaatgtttttggaaaggtgttttttggtatgcaagtcagctttgcctcacagttgaaaatgttcggtcatgattgcttttgaaaccaaaggggaaggtaccgatatcattgagctatttaaagttgccagtttgggctccagtaatgctttctggtgggtaaaattccacattcaggccacgagagcatctacagtttgtactctggggctgcaggcatcctgggacgctgtacgcaattcagtggtctagtcctttataccgactcagattccttaagcatgcagagtcactcgaatgaaaaaacatactcgacctctccctaaaaagatgttgcaacccagtttctctgaattccaccacaaaaagagaccctgaataagaagagcagttttcctatgcatatagagggtgtgtcaaaggtgagctttttggggaccgggaaaaacaaagttgcctgattccgcgcaggtgcacaggccccggatgtacacccggaaaggggagtgtggctgtagaatcatccatccgtctacagctaaaacaatttgccaataaagtacatgtttttcctaagccaaaaataaatacgttaacagaaaaatgatttaggat

SEQ ID NO: 78568 - DNA, 1561 bp, Homo Sapiens
ggcctgggtggcgaattcggcacgagggcttatatttccaacagagttccacagatgaagaaataacatttgtatttcaagaaaaggaagatcttcctgttacagaggataactgtgtgaaacttcaagttaaagcttgtgctctgagccagataaatacaaagcttctggcagaaatgaagatgaaaaaggatttatttcctgttgggagagaaattgctggaatcgtattagatgtcggaagcaaggtatcattctttcaaccagatgatgaagtagttggaattttgcccctggactctgaagaccctggactttgtgaagttgttagagtacatgagcattacttggttcataaaccagaaaaggtcacatggacggaagcagcaggaagcattcgggatggagtgcgtgcctatacagctctgcattatctttctcatctctctcctggaaaatcagtgctgataatggatggagcaagtgcatttggtacaatagctattcagttagcacatcatagaggagccaaagtgatttcaacagcatgcagccttgaagataagcagtgccttgaaagattcagacctcccatagcccgagtgattgatgtatctaatgggaaagttcatgttgctgaaagctgtttggaagaaacaggtggcctgggagtagatattgtcctagatgctggagtgagattatatagtaaagatgatgaaccagctgtaaaactacaactactaccacataaacatgatatcatcacacttcttggtgttggaggccactgggtaacaacagaagaaaaaccttcagttggatcctccagatagccactgccttttcctcaagggagcaacgttagctttcctgaatgatgaagtttggaatttgtcaaatgtacaacagggaaaatatctttgtatcttaaaggatgtgatggagaagttatcaactggtgttttcagacctcagttggatgaacccattccactgtatgaggcaaaagtttccatggaagctgttcagaaaaatcaaggaagaaaaaagcaagttgttcaattttaattttcttctttctcagacctcagtcggatgaacatattccagtatttgaagccagaattttctttggaaattgttgagaaaaaccaaggaagataaaacaagttgcatttttaagcacgtttctctgctaagacaagatgctcagttgacacatttgaaaagtgtttgaaaaattcttgtgcaaatgatcaagataattctataattaacatcttaagggaatttttctaaaaaccttttcattgtttctatatattttgcccctgctataaaattccttccatgaagaaaactgctgctttcagcaaaagtcacactactcttgataaaagctgttgcaggcctttgctaagctatcaaagtaacgtattaattttgtatcaactccgttctcaacaccttccttaagtctttgctgtcataatttaagcatttgagtatattttgaagtcttaaaagacttagcccataggcacttaaacctcgtgcc

SEQ ID NO: 78569 - DNA, 1039 bp, Homo Sapiens
  misc_feature (98)..(98): n is a, c, g, or t
  misc_feature (104)..(104): n is a, c, g, or t
  misc_feature (140)..(140): n is a, c, g, or t
  misc_feature (193)..(193): n is a, c, g, or t
  misc_feature (221)..(221): n is a, c, g, or t
  misc_feature (223)..(223): n is a, c, g, or t
  misc_feature (244)..(244): n is a, c, g, or t
  misc_feature (266)..(267): n is a, c, g, or t
  misc_feature (283)..(283): n is a, c, g, or t
  misc_feature (319)..(319): n is a, c, g, or t
  misc_feature (327)..(327): n is a, c, g, or t
  misc_feature (376)..(376): n is a, c, g, or t
ctattgatacccctcttagcccccgctaacttttgtccgttgttgttgtggattggcgaaacatttcaccagaaacgtttgactgataggatttatangccccnttaggattgcctcgagccaagatcggcacgagggtncaggaggcccctgttgaaattcccccccttcacctgccagccctccatgactntggctggtctccgcctccaggtttgctntncccagcagccagcaagtgcgnttgggccacactggcttcttcnntgccccatccctgctnttgagtctctgtcttcctgtcctgtgcaggcgcccntgaatctncagtttccctcactcagggaactctgtttctgaagtcttcagttaagtntgagtttatgactgagtggcctgtactgtcagacgtgaatgggcctgacgggcaaatccatccctctctccctcacagttccaggagcggcttccctcgtctccccttactccacagggaccctcccttgccaggaccagggctgcgacggccatgctggggcaggtgagtgctctgttagctgctcccagtgctgtccccaggctgcagttctggtccctggttgtcaggtaggaagggtgcacttgaagcaggtgctcatctcggttccttaacgtttatagtctgacccctcacttaggctttcctctgccaccccggtccagggaagaggctcgctcccgcccatggtcatcactggtctgtctgctctgttgtctgttctttccctgactccctcccaccgaaggcctgatggctactcacccctctgggatggctatgggagaggaggagtgatggggaccgccaccttttctgcaggaaatgtgcccagcagctcttggtcaaagcactgttgctataagctatctctgggatgcctctaggcccccttccctctacacacctctgggaaaagattacactgtattaactctcgaggagtttcctcaccaataaacagacaacctcaactgccagtgccctgcagcctcgggccac

SEQ ID NO: 78570 - DNA, 660 bp, Homo Sapiens
  misc_feature (21)..(21): n is a, c, g, or t
aatagtggtgatactaattancaaagacaaagtatataggatattaaaagtgaattcttaatacctgatcttgattcttattaaatctgacttatgtgtatacaagatattattagatgaagtgtttgtccagtagcttagcttataaataacccccattctagctcattttaaacaatgtagtatgaatgatgccaaaaacaggctagaacattttcttctttccaagatcttagatttggtaaacaagctactgctcctggaactaatctaggtcatcataacccaaaatcttttgaaatatgagagtcccaattaagtctcttaggtactttttagcattttaattttaagaatgtgtttaactcttaaaacagtatattttggttgctgtttggccatttggtttatttgtaccttgttataatgaatgcaagtcagtgggtaatcattgcagcaaatatgattgctaggaatctcatgtaagtggaagtcaatataatgtatggcttaatttatccctgaactgacctaacatcacattttgttttttaataaaaactggtttaatgatatgataaatttctgtattttccacaactgttaataatgttatattttaactattgcttagtcttcattacaaattattcagctgtt

SEQ ID NO: 78571 - DNA, 1291 bp, Homo Sapiens
  misc_feature (861)..(1116): n is a, c, g, or t
  misc_feature (1124)..(1157): n is a, c, g, or t
tgcggccgcgggtccggcccgtgggacgtggatcccgggcttcagcgctgagagaagcagccgcaggcgcaacacgccccggccgcccagcacagccaccatggtcacaggtcgcgatttcccagcagacttttttgaaagggatgcaaaagatgctgttgatttgatgaaggcgctgaagtttaagaaggtttctctgctggggtggagcgatgggggcataaccgcactcattgctgctgcaaaatatccatcttacatccacaagatggtgatctggggcgccaacgcctacgtcactgacgaagacagcatgatatatgagggcatccgagatgtttccaaatggagtgagagaacaagaaagcctctagaagccctctatgggtatgactactttgccagaacctgtgaaaagtgggtggatggcataagacagtttaaacatctcccagatggtaacatctgccggcacctgctgccccgggtccagtgccccgccttgattgtgcacggtgagaaggatcctctggtcccacggtttcatgccgacttcattcataagcacgtgaaaggctcacggctgcatttgatgccagaaggcaaacacaacctgcatttgcgttttgcagatgaattcaacaagttagcagaagacttcctacaatgagaatgcacactccagtcttggtggttccttcgtgtggggcttgatcgtgttgctgcctgttaacatgatgcctttgaaactctccgcctttgaaactttctacccctcccttcaatcttatcctaaccaaatgagaataatgacatattgaaaacagcctctagcttcaggctgggcacggtggctcacannnnnnnnnnnnnnnnnnnnnnnnnnnnnnnnnnnnnnnnnnnnnnnnnnnnnnnnnnnnnnnnnnnnnnnnnnnnnnnnnnnnnnnnnnnnnnnnnnnnnnnnnnnnnnnnnnnnnnnnnnnnnnnnnnnnnnnnnnnnnnnnnnnnnnnnnnnnnnnnnnnnnnnnnnnnnnnnnnnnnnnnnnnnnnnnnnnnnnnnnnnnnnnnnnnnnnnnnnnnnnnnnnnnnnnnnnnnnnnnnnnnnnnnnnnnnnnnttgtcttnnnnnnnnnnnnnnnnnnnnnnnnnnnnnnnnnnggaataaagcctctaacttcaatagctatgaaaattaaatccgattttctaagatgaagttgtgacaagttataccattgtcttaacaggtgaattcctgccataatttattttcaaataaattttaggtggag

SEQ ID NO: 78572 - DNA, 693 bp, Homo Sapiens
gcggccgcgttcggcacctcggtaacctctgccaaagtggctgtgaatggcgttcagctgcattaccagcagactggagagggagatcacgcagtcctgctacttcctgggatgttaggaagtggagagactgattttggacctcagctcaagaacctcaataagaagctcttcacggtggtcgcctgggatcctcgaggctatggacattccaggcccccagatcgcgatttcccagcagacttttttgaaagggatgcaaaagatgctgttgatttgatgaaggcgctgaagtttaagaaggtttctctgctggggtggagtgatgggggcataaccgcactcattgctgctgcaaaatatccatcttacatccacaagatggtgatctggggcgccaacgcctacgtcactgacgaagacagcatgatatatgagggcatccgagatgtttccaaatggagtgagagaacaagaaagcctctagaagccctctatgggtatgactactttgccagaacctgtgaaaagtgggtggatggcataagacagtttaaacatctcccagatggtaacatctgccggcacctgctgccccgggtccagtgccccgccttgattgtgcacggtgagaaggatcctctggtcccacggtttcatgccgacttcattcataagcacgtgaaaggctca

SEQ ID NO: 78573 - DNA, 834 bp, Homo Sapiens
gcatgcccagggccccgtacagtgggagctggagttcagttgtgtggttctagagcttgtgctcggcctagtgacaggagctctggagtctgggagcacaaagaggggcacagggccaccaagtgggtcttggatctgccctccaggtgtgggcccatcgctggatggatctgtcagaacacggctttgggctggccctgctcaacgactgcaagtatggcgcgtcagtgcgaggcagcatcctcagcctctcgctcttgcgggcgcctaaagccccggacgctactgctgacacggggcgccacgagttcacctatgcactgatgccgcacaagggctctttccaggatgctggcgttatccaagctgcctacagcctaaacttccccctgttggctctgccagcccccagcccagcgcccgccacctcctggagtgcgttttccgtgtcttcacccgcggtcgtattggagaccgtcaagcaggcggagagcagcccccagcgccgctcgctggtcctgaggctgtatgaggcccacggcagccacgtggactgctggctgcacttgtcgctgccggttcaggaggccatcctctgcgatctcttggagcgaccagaccctgctggccacttgacccttcgggacaaccgcctgaagctcaccttttctcccttccaagtgctgtccctgttgctcgtgcttcagcctccgccacactgagtccctggggctggggttttgtttgtagaaggctctggggactcctaatttctgcttccccagcctaaagcagggatcagtcttttcttgtggaataaatccttggatcggg

SEQ ID NO: 78574 - DNA, 819 bp, Homo Sapiens
taccaggaggtgtgctggacgtaggctgcccctatgtccgcttccacaccgaggtacactggcatgaggcccacaagttcctgaaggtggagttccctgctcgcgtgcggagttcccaggccacctatgagatccagtttgggcacctgcagcgacctacccactacaatacctcttgggactgggctcgatttgaggtgtgggcccatcgctggatggatctgtcagaacacggctttgggctggccctgctcaacgactgcaagtatggcgcgtcagtgcgaggcagcatcctcagcctctcgctcttgcgggcgcctaaagccccggacgctactgctgacacggggcgccacgagttcacctatgcactgatgccgcacaaggcccacagaccagcgaccaacacctcctggagtgcgttttccgtgtcttcacccgcggtcgtattggagaccgtcaagcaggcggagagcagcccccagcgccgctcgctggtcctgaggctgtatgaggcccacggcagccacgtggactgctggctgcacttgtcgctgccggttcaggaggccatcctctgcgatctcttggagcgaccagaccctgctggccacttgacacttcgggacaaccgcctgaagctcaccttttctcccttccaagtgctgtccctgttgctcgtgcttcagcctccgccacactgagtccctggggctggggttttgtttgtagaaggctctggggactcctaatttctgcttccccagcctaaagcagggatcagtcttttcttgtggaataaatccttggatcgggaaa

SEQ ID NO: 78575 - DNA, 937 bp, Homo Sapiens
ctgcagcacctctggaggctccttcttctgaaccagttccatgatgtggtgactggaagctgcatccagatggtggcagaggaagccatgtgccattatgaagacatccgttcccatggcaatacactgctcagcgctgcagccgcagccctgtgtgctggggagccaggtcctgagggcctcctcatcgtcaacacactgccctggaagcggatcgaagtgatggccctgcccaaaccgggcggggcccacagcctagccctggtgacagtgcccagcatgggctatgctcctgttcctccccccacctcactgcagcccctgctgccccagcagcctgtgttcgtagtgcaagaggtgagtcctgcatgccctggggggcaggaactgtgctgggatactctcttacaactgagggtcctgagctcccctgtctggagcaagtggtgaggcggggctggggttgggggtgggaagacttttggtgtgggaagcccctacagactcagcctcaaggccccctcccacaaagactgatggctccgtgactctggacaatggcatcatccgagtgaagctggacccaactggtcgcctgacgtccttggtcctggtggcctctggcagggaggccattgctgagggcgccgtggggaaccagtttgtgctatttgatgatgtccccttgtactgggatgcatggggacgtcatggactaccacctgggagacacggaaagcctggggctgggccaggcagggaacccctggcagtgggggcaccccaggggcggcctgggggggcaaaccccctgggttcttgcttaaagatcagcccccaacaattcggttttaccccgaaaggttgtggctggaaagtttggcctgcccccaatggcccccttcccaccccggggtacactgggcatggagggccc

SEQ ID NO: 78576 - DNA, 730 bp, Homo Sapiens
gggggtaatactccttgttactccaccttaggtctgcaagcagaaaaacggacacagataacaactgagtggtcagtggcagccacatgcgggcagccagcggcacgagcaaggtccctttggtcagtggcagccacaaaggcccaggctttggggaggccctggttggtgcccttggggttgcctgcctggtttcggcaataaataacatgaggacccaaaaaccaaaccagaacaaaaaatacaaccagtatctcttggggtaggtggtgggagactgtttaaattatcggccttccctgggccactaggtggttgccggcgcagggctaggcaggcggtcatcggcacgtgtgcaactccacgagccgctggcactgccggcacttgacgaagcagcaccagtggaatttgcagctgcagcgttcagccagctccacctgcgccgtgtggaagccgcggccacagcacagcagctcacagccgtcgatggccttggacgtcttgttgcatgtgcggcccctcgtgcccagcacgccgctgcgcatgtcctgctcacagaagtcggggctaggctccaagtacaccaggtcctcatctgtgtgcggcttgaactgtgcgttgcgtggcaccagtgccctggaggagcccacgcggcgtggctccacctcagtggcaccatcaaacttctccttcagtgcgtgacccacctggcggaagggcggccgca

SEQ ID NO: 78577 - DNA, 886 bp, Homo Sapiens
cggcaactgcttcggatgcagctccatcatggtctgaattgaggatgaggcagaagagcagagaatagctgatgcccaggtggcagcaacttcactctttccctgtggagttgcagggtctccccacctccactgcgttgggacatgccgtgtgccatctctttatccatagctgcctccggcatcagcagagaaagtcatgggcagatggagctttggattagttcttttttccagtcttcctttactttatctggataagattgggcagattgaatttgatcttctatactggggccagggagcagagtggatctagaccatgcagcttttccctactgtcaccagattgggagcagggattggctgccattgtcctctccagcctctgtgttcctgggacaccgctgactggaggctgctcctcttctaagggggtccggcacagagcgccacccagagcacatggcaccttctctctcctcctgcaccagtctccttgccctctgtattgtcatcatactgaagcaaaccatccaactcaccagcgtctctggactcgtttcattgattcctctccctgaaactcttcctcattctccttttagcccttcacatcctcagccgaagatctcacttcctcccagaggcctttgctgactgacccctcaggtaggctaaatccccatcctgcgcttccatgacagcctgtagcagatgctgttttctgcaggtggccacagccctatctcccatcccacacactcctctcataacatgaccgtgtcacttcttccatcgcgtggtcggggttatgtctcttttctttgagcctatgcacatctttgtgattgccctgaccaataaataaagtaggacagaagcg

SEQ ID NO: 78578 - DNA, 1923 bp, Homo Sapiens
  misc_feature (129)..(191): n is a, c, g, or t
gggaccggtccggaattcccgggatgtccgccgcggcgtccagggtcggcagcaaccgcagccgagcccgagcgggtggcggcgccatggcgtgcgcggggctgctcaccgtgtgcctgctccggccgnnnnnnnnnnnnnnnnnnnnnnnnnnnnnnnnnnnnnnnnnnnnnnnnnnnnnnnnnnnnnnngccggacacacgctcttccaggacgttttccgcagagcagacaagaatgatgatgggaagctctcatttgaggaattccagaattactttgccgatggggttctcagcctgggggagctgcaggaactgttcagcggcattgatgggcatctcaccgacaatttagaaacagaaaaactgtgtgactacttctcagagcacctgggtgtctaccggccggtgctggctgcattggaatcgctgaaccgtgcagtgctcgctgccatggatgccaccaagctggagtacgagagggcctccaaagtggaccagtttgtgacgcgcttcctgctgcgggagacggtgagccagctgcaagcccttcagagctcgctggagggggcgtcagataccctggaggcccaggcccatggctggcggtcagatgcagagagcgtggaggcgcagagcaggctctgcggcagccggcgggcaggacgccgagccctgaggagtgtcagccggtcatccacctggtcccccggctcttctgacacagggcgcagctcagaggccgagatgcagtggcggctccaggtgaaccgcctccaggagctcatcgaccagctcgagtgcaaggccccccggctggaacccctgcgtgaagaggacctggccaaggggcctgacttgcacatcctcatggcccagaggcaggtccaggtggcagaggaaggcctgcaggacttccaccgagccctgcgctgctatgtggacttcacaggggcccagagccattgtctgcatgtgtccgcccagaagatgctggacggtgcctccttcaccctgtatgagttctggcaggatgaggcctcctggagaaggcaccagcagtcgcctggcagcaaggccttccagcgcatcctcatcgaccacctgcgggccccggacaccctcaccactgtgttcttcccagcctcctggtggataatgaataacaactgagccagacctgcacacgccgagggccccgggaccctgcctgcctccctctggagccttctggactggccagcccagcgcaaagaccagggcttgtctcctcctggacttgggcctggtggaagggctctcagcccagggatcagggactgggctgcttgctttctatttattattgatttatttatccctgtattttattgtttgtcacttcagcctccaagctactttggcttctgcctggctcaggagacctggattctggtccctgctgtccctgcctggctgagcgacccagggcaggtcccgtccctgtctgggtgggcctcaggccatctggccgcctagcgagggtcctgctttcttcctgctgtcttgggaccaggcttctgctcctcctcagccagcggcagaagcagggctgatgctcagggaccccccaaccctcaaaccttgcctccgaggctgggcctgagctgggtgccccgtcgccctcccaggccactaggctctgactcttccagcacccatggatgtgccagaggcctctgggttggtttgcatgtcatttgcatatcgtttgcatgccctcatcccacccattctcagggcagtatgggaagccccaaggtgacctggccaagtagcaataatttgggtccagggtcacctattgcccccagaggcctctgaaccccaggctgggaccccagcacagaggcaataaaggcagtggtcccttccaaaaaaa

SEQ ID NO: 78579 - DNA, 1119 bp, Homo Sapiens
ccaaaaggtaatatccccgatgaaagccaagtggagaaactgaacgttttcctttctcctcctgatgtcatcaactatctgctctcacagaagccacaggacggatatgtgtgtctcagtgggaaggccccccacgtttgggatgcatattttgccacggagatcatcttctggcagtgaatgacctgaaaccccagagcctggaggaggtctccctgtttcttacccggtccatccagaaggagaaattaaagcttaccatcggcaggatcccaaattcagagacattccatgccgcatcctgtatgtgtccctcaaaatgccaaagtgctgcaccttctcagctggataagcctagactgaacagagctcccaagaggagtccggccattaaaaagagccagcagaaaggagccagggagtaacgcaccccagacccatggcagcagaaccaggatggagctgggactgtccagctctgccccctgctgctgccatgtgataggagacagtcggcacccccctctgaatttctgtatctgcatcttaacaatggggatgactatcccctctctggttattgtatcagagatgttaagagggtcatgtggcatgattggagaacctgggggaattggaaggccttattatctcagctattgtcccaaacaccacagacacagattgggtcagtccttcatgtaatacatgctgtgttctgtgaggatgtggtccacacaattccttctttgttaagggacatacagttgcaaatactcactgcaagaaggcaagattcccaagggagatgtgatagctgatcaggcttcccagacacctccttcccaaacacctccttcccaacacctccttccccaacatccttcccaacacctcccttcccaacaccttcctttcccaaaaacctcctttcccaaacaccttcctttcccaacaccctccttcccccaacaacctccgttccccaacaacctcctttcccaaaacgaccttctttccccagaaaccctccctttcccaaaaccctcccttccccaaacacctccgtttcccaaaaccccctccttttcccaaaaaccctcccgttcccccaataac

SEQ ID NO: 78580 - DNA, 1027 bp, Homo Sapiens
  misc_feature (71)..(71): n is a, c, g, or t
  misc_feature (112)..(112): n is a, c, g, or t
  misc_feature (137)..(137): n is a, c, g, or t
  misc_feature (164)..(164): n is a, c, g, or t
  misc_feature (208)..(208): n is a, c, g, or t
  misc_feature (277)..(277): n is a, c, g, or t
  misc_feature (373)..(373): n is a, c, g, or t
caccaccttccccggtgcgatatatcatgccgcagtccgatggagcgcgtgcccaccatatggggtgctcncatagcacccagttacattatctccgtctatgtgtttgatntgacgatacattcaaccaggacagnttgcatgatacgatttatcgactcatntagggattgccctcgagccagaatcggcacgagcgaagtgtctntagagtggatatatcatgctccagtgatctggtgatccattgaaatgatgtccagaccagtctctggangaatggtgtcatatgagccaatggatcctattttcaaaagagaatcccatgagtctgtggtagcagcaaagagaaccccagacccttccagagacncaggatgggacctccacctgcaagaacaaggctcaggaattgattggttctttcccctgccgatgtggaagcacagaccacaaatgaccaaaagggtaatatccccgatgaaagccaagtggagaaactgaacgttttcctttctcctcctgatgtcatcaactatcttgctctcacagaagccacaggacggatatgtgtgtctcagtgggaaggccccccacgtttgggatgcatattttgccacggagatcatcttctggcagtgaatgacctgaaaccccagagcctggaggaggtctccctgtttcttacccggtccatccagaaggaggactctttcaggattctttcatatcaagtagcatttggagaaggcactgagctaagagacagagcacctgggttcaggacctcagatcggcatgatgtagcaaaaagagcttgcatggaatcagactggtgcagggattccaaaacagctccttcaaccaatttgtgcctcagttttcttttctgtaaaattatgactaatgatggtgctggttgttggataattaaatgaggtaatatgtgtaacgtgcttacaaaggtgactggcacatattaggtgctcaataaagctactagttacttttacttctactacaactg

SEQ ID NO: 78581 - DNA, 962 bp, Homo Sapiens
  misc_feature (216)..(216): n is a, c, g, or t
ccataccaccatattatgccactagccccgctacatttgtcgctctttgttgatgtacgaacattcccagacagttactgatcgattatcgatccttaggattgcctgagccagatcgcacgagagagccaggtaggagtgatatgcagagatggattagattcatgcccttgtaaggtgttaattgactgcttgagggaaggttagctcctatgntagtgacagaggaaacaatatctaaacagaagagatagtctacttcagaggtgtgccacgtgacctagaatcaggagaccctgcgtgccctgccctcctggccagctgagcctcacactggtattggatgttgtattcccactgcagtgtgtctcagtgggaaggccccccacgtttgggatgcatattttgccacggagatcatcttctggcagtgaatgacctgaaaccccagagcctggaggaggtctccctgtttcttacccggtccatccagaaggaggtgagtcgtactgaccagccctgaacagggcaaatcagtaccagaaggaaaaagatcagggtcttagatggagtctgagaagtaccctgaatacaaataaggttcctcattcttccaccatcaagtgcaaataacagaatgtgctttcaggactctttcaggattctttcatatcaagtagcatttggagaaggcactgagctaagagacagagcacctgggttcaggacctcagatcggcatgatgtagcaaaaagagcttgcatggaatcagactggtgcagggattccaaaacagctccttcaaccaatttgtgcctcagttttcttttctgtaaaattatgactaatgatggtgctggttgttggataattaaatgaggtaatatgtgtaacgtgcttacaaaggtgactggcacatattaggtgctcaataaagctactagttacttttacttctact

SEQ ID NO: 78582 - DNA, 509 bp, Homo Sapiens
atagttttagctccaagccaagcaagtttgtgtttggatagaggggaacttaactattaactacaagttgtatgtctgtggtatcttgattttcccatttctaaagatgaatttcacaaagccataaagcgtgaaattagagctggacttaagactcattggccgaccatcctgtgtcctggcctggccctgcagtaagaagcgtgtctgggtctggagaagggtgcttccgagagtgtgcaggtggcccttccccttggaggcgagaagagagaatgtgctgtctatcttcctggttttcagtccacagagtcggtagaccaggggttacgtgactggggaaaatctcacatctccttgtctgaaaacatttcccctgctgttctctttctaacatgttgtggtaaatctgttcagatactgctcatctgactgttttgtacatgtgacaattgccttaaaacctagcacagtcctcagaaatgaataccgtgtttccactggaaaaa

SEQ ID NO: 78583 - DNA, 126 bp, Homo Sapiens
ccaaccatcagaaggtaacagcaggggaaatgttttcagacactgctcatctgactgttttgtacatgtgacaattgccttaaaacctagcacagtcctcagaaatgaataccgtgtttcccctgg

SEQ ID NO: 78584 - DNA, 995 bp, Homo Sapiens
  misc_feature (56)..(56): n is a, c, g, or t
  misc_feature (149)..(149): n is a, c, g, or t
  misc_feature (180)..(180): n is a, c, g, or t
  misc_feature (234)..(234): n is a, c, g, or t
  misc_feature (253)..(253): n is a, c, g, or t
ttatcagtgcagacgttccgatgaagcgcgtagccacgcatatgtgatagtcatcnagcaccccgcttacctttgctccgctgtatgtgtgtgaattgacggatacaattccacaggaacagcttgactgatacgattatacgactccntataggaattgccctcgagccagaaatcgcnacgaggagatgtcactccacgcaagctcaaactgacactctttaaagcgacgtntctaaaatcaggaggactntgtacctttatgaggaattttcatttcttcctggctgggttgatgtggaaaccagagctgtctgtggagctgttttccagaccccaggcccattcctgggatctctccaacaggacctgtcctgtgttctgggcttgtctcgggtctgaccaggagatggaggatgtgtccttggcagagccaaggggagacagaggtttctggatgccatgacaggctgtcggggtccaggtggcactcatgggccccctgccccatgtgaatgctgctggcacctggtggggggttgcccagggatggaccctgggcatggcttctgggctgcttagtccagggggagcaacttgtggccaaatccatgagttcagaggaaaaggggaaggcactgaaacgtcaccagagagacagctgttgagaccgctcagaaaccctctgtctgtcacactctgccctggctgctgtgtggtcagggcaccatgagggtgtacagatgtgctgtgtcctcagagcctcgcaggtgccctcacttactgcctgggcccctgcccagcagcctcaaggacaggcctttgtccctcacggttgtggacaggaggtcgcaccactggcctgcgagagcctctggtgggcccgtggcttcccccagttatctgctaaggaaaactgtgctcttcgaagggcagagccaagaagtcagccctgacttttgtaaaattttactaaataaaaccacctggataaa

SEQ ID NO: 78585 - DNA, 1216 bp, Homo Sapiens
ccaactcagtgccagcatcggtagacaccagtcagtgctgatcgctttttaaccctcttttgttgtgcattaattagaaagaaaggtattgaattgcggctagccagtaagccttgctaatctcttttattttgtaactgaagatgagacccaaagaaagggaaagctgagattttgtgccattccttttaaaatattcatcaggttaggtggggctgtgggggaaaagctactacagggaagagtgttctctgctgtctcttcactggaaaacagggaggggggatttcagactgtgaagaaagttgaatggtggtttttaaattataaagtaatgtattaaaaggtgcattaggctgtagttctaatattgagttcaactgtgaaatccatcagatgtgccaaatggagaagacagaaagcaacaaagtgaattgttctttagcccaagtggtacagtgaatttgctttaacagatgttgaaaactaaattttctactgtattcccagcacgggtgacttctttttctcttcattagccagagatgactaatttaaatttagaaccagattttaatttaaattaatatttccattaataacctattcattgcagatacctattatactgtgtaacagttgttttggaaattttatgtaaaattaaaactatcagtattttacagatgttttaattagacattgttattaacaggaacagtgcagaaactagaatcaagccttataatatcttatagaccatgcatttttgaagttagtgtccactagggtcctattaactgtacatttgcaagatttcattatttttgcctctgacactatgggaaaaattttttagaagctattgggacagattcaagcttttatgcacttggttactacagctgtaaaatgaaatctcgtcttgtagcatggattattcttctcatgttaaacccaccaaaataaaggggactaaataggtaatgattttcctagtgcatttgcatactgtgataatcctgggccttgcaatagttctacagggctcttgggcattgaattattaggatgtaattgtacatcattgtagtgttcaccttattgaagctcactctgatgttaatgagcttcgggttttgatgcttgtttagagatcagcagtcttggatgggagggaacaaagctaaataaatgttagtttggtgaaaaaaaa

SEQ ID NO: 78586 - DNA, 1016 bp, Homo Sapiens
  misc_feature (979)..(979): n is a, c, g, or t
gggagtattatttattcaaataaacaaaaatgttttatttccctttcaatggtatatatcttaaattgctggaacatacaagtataaaaataagattattttagaaaactccagttttgaagggcacgacaatagttcagacatttgtcagtagctatgaagccacttttaacatggaatgaatatccctttactccaactcttggtcttattacatttttaaatcaaatcagcgtgctggaaatagagaaaaattcccaaagggaaatataaaataattttaagcattttcagaaatacaagttacacttaagaaacttgtattaaaggatgttaatctgagataaacagaaaacaaacgttttgcaaagcactactttttgcatctgtttgaggatacacagtttgcagctctcctgccagaagcaaaatactgactctagcacagcagaaaaggcatcaactttaagaaaaaaatgagtggtcgctttcaatgactgaacataacatattaaactttaagaatttttaacaatgcaaattaacagcaatagtagaaaatacatcattttagattacaaaaattcagcttttattagcacatgacaaatctcattcattcgctgccctctcatatgtgctgagtaactgctacacagaatttcaaacctcactgatataaatgtgagagatgacatctacaatgagaaaaatgagggaaaaaaatctcgttttataccactagcaacaaagaacacaaaattgtattaaatttgttaagaaatgttattttgtgcaattttcattatagattaattagctttgttcactttttttcctccatcttaaaaagagataatcttttaatgttttcttaaacatttcattcgggaacactaatcttagaaatgcgaggcttgtgtaaaattttactttaataggcacaatgtagcaagcgaaaccatactcatatcagggnacttgcaataacctccacatatagcactcaacagaaa

SEQ ID NO: 78587 - DNA, 721 bp, Homo Sapiens
caactggagtctaaagaattgcacccactgaagtcaatgacatatggaagtatgaagatgataaaaaagaatgggctgggatgttgaaggaaatacgttatgcttcaggagctagttgcctagcaacacgtttaaatctcttcaaactgtctaaactgtgaacaaggtgacaaaacataatagattgggaggtggtttgtttggtgaatggggctttaatttattctgttttttaaaagcttgtacagacactcatgtagaaattattcaagaagttattgtctaagagatgagcagtaggtaagaaaacctcagtcattgactcttcaatgtaatgatcagagtttaaaaccattttctaataataaattaaatcttcagttgaacaaattattttgtgaatctgtttcactcaatggattgtaaagaaggctcctaaatttgagttgtttgctaatcatttcatttgcatcattagggtatccttaaactgattttctattacaattggaagtggagaatatgtgcatctacactaaaaaaatgtttaagatatcaaaaacctctcctcgtgcttcaaaatgacaggaatcctgtgcattatactaagaattacatgccataagatgacttcagaaatcctacttcagaagtgtaataaatggatggggaaatcgtttgatggggaaaagtctcttgtaagtaaaagtagtcaaattca

SEQ ID NO: 78588 - DNA, 652 bp, Homo Sapiens
  misc_feature (603)..(603): n is a, c, g, or t
  misc_feature (620)..(620): n is a, c, g, or t
ggatgataaaatctatgtagttgcaggcaaagaccttcaaacagaggcttcgctggattcagtattatgctatgatcctgtggctgcaaaatggaacgaagtaaaaaaactccctatcaaagtctatggccataatgtgatttcacataaagggatgatatattgtctaggaggaaagacagatgacaaaaaatgtacaaacagggtgtttatcttcaaccccaaaaaaggagattggaaagatctggctccaatgaaaattcctcgttccatgtttggagtagcagtccataaaggcaaaattgtgattgcaggaggtgtcactgaagatggtctttcagcttcagttgaagcttttgaccttacaacaaataaatgggatgtaatgaccgaatttccccaagaaagaagctccatcagtttggtcagcctggctggatctctgtatgcaattggtggttttgctatgattcaactggagtctaaagaatttgcacccactgaagtcaatgacatatggaagtatgaagatgataaaaaagaatggggctggggatgttgaaaggaaataccgttatgcttccaggagctagtttgcctagncaccacggtttaaatcnccttccaacctggtcctaaacctgtggaccaa

SEQ ID NO: 78589 - DNA, 754 bp, Homo Sapiens
aggtggaagaacttattgacttaacacaacaatgttcctggagctgtccctttgtgtctttcaaacactggggccaggacatacagttctggggtggccattatggagcctgtgtgaccaactccagggtggtcatgtgagtccatctgtcctaatcaaggactacccttctggcaagacagcctaaccatgccttccaggacctgggattattggctgggacccctcattaactaagtgcttgtacctccctggcacgctgggaactcctgggtctggtcaaaggtctttctgggcctgtcttcagggtctggaaactactagaagaaagttcttccatccgatctgcctacagctgctgctttgcactgtacaaatccatgttgttacctctcacctctggaattcaggtccctccacctttggctccttgagaaatctctattccatttctagctccattctgcattttctattcctactgtcagatgggactgcaatttcctggccatttgagcaccagacaagatctacgcttatcaaaattgccaagccagcaaagtctatgattagaagtaggtaaatttttttaggactccctctccatttcttggagcactgtgcgtcttctccctttttcttgtaaaatctcctctttgctcttcagtaccataggtcaaaatgtgcttttaaaggtctttgtcatttcacatggtctaagcttaattaaagcagtgattttcaaacattaaaa

SEQ ID NO: 78590 - DNA, 689 bp, Homo Sapiens
  misc_feature (242)..(250): n is a, c, g, or t
ttttagttttaaacttttttaaggcaaagcaagctccccaatccctgttctccaatatgtgtatgatgtgacttccatgtagatataaaaatgattgtgccctaaccaaacttcctcagattgtgcactgtttgtttaaaataatcacgtattttagtctgatgctgttgtattttttcattttatttaaaacactacttacttcttattctcttaacaaattttaaaaggtagtgatcttnnnnnnnnntcactggataactaggaaatatttttgttgttgttttgtttcttaaagagtacagaggccattgaagccttttgctcctcttaccgtgaaaatgaaatgttagccattgtatggctaggaaccaatgcacttggcagttaatggatctgctgttgctggagtgtgagcgtggacttgatgcagtgatgacaaatcattgcttagaattaatgttttcaaatgtgcaactctagtttttaaaacaaaatttggttctttacattcattatttcgtttttgtttccctttagtatttaatggtctttggagaaaaaataataaaacagagtgttatatatatattttttggtgcaagataagattttctgttttttgaaataagtctgtagcataaaggttaaactattttaagacaaaataaaatagagtgtatttaaac

SEQ ID NO: 78591 - DNA, 686 bp, Homo Sapiens
  misc_feature (584)..(584): n is a, c, g, or t
cagctcagaagtcctagagaaattctgatgcctctcctcacatttgctctgtcggcaaatcctggtgtcacaaagagggctcaggagggtttctggatgccaacgagaccccagccacagccggtccccagattcttgacatcatcacaagaaagaattcacagatggtgcacaagaaggctctcgccagatgctggtcttgtgatcttggacttcccagcctccagaactgtcagcgttgcttccactgcacctctgaaagtactcagctgtgccccaaacctggagagtgccgcatttctccagactgcaagaaacagtgtggatgactcagtggagatcataatggcatctgagtgatcaacgacagcctccagttgccacttggtgagagaacaaaggaaccggggcatgctcagctatggctgcaagcccttcaagtgaagctgggcacttacccccttcattccattctcctcaggataacagattaaaattccagaagtgtgcacctgttgtgtattcaggagattctcgttgtgcataaagagaccacttgaggccctgtaagcaaagactaatgngggctgagtcaaaatcttgggaatctgatgaactaacacactcaaatgaaactgatttgtgggcaagtacgaatagaataaatgccctggggttgtgacgac

SEQ ID NO: 78592 - DNA, 921 bp, Homo Sapiens
ggggggctgagtggaagcagatgcctgcacaagccaagtgtgtcttattgatctgtacaagctgatagaaggaccatctgctgaaatccagggctcctgagttggtgggtttgcttgtgaagcttctaggacaaggcgcagccagatggaagggagagggtccagggcttcctaaatgcagccgcatcacctgtcaactcgctgcagtttcagagacagtggaagctgctcttaacctcaaaagcacaaagcagaattggcaacttcacttgtctcaagagctccaagatcctttggtctcgtgtcctttggcaccccgtaactggactggggacaaatttgttacgtgtttccaaggctacagacatggcgccatcctcacaggcctagctcatgtcatggatcaggtgctttgctggggggatacaatgacccatgtggtctgcgtcttctgccattggcttgaactgggcaccccctgaagtctccatctcagctgtatattctagtccaaattttcctggctcccctgctccctcccaggtcctgcacactgtctttttgccaacacctcagccctgtttgctatttcatgtctgcatggtacgagacaccccttcacggcatacactgccatggtatgtacatatgcatccacgtgtgtgtatgtgtagcatgtagctcattctgctcagcctctggcgccgttccacattgctcccagccccattgctgtcactgtcgtcccagatgtccttgccatggccacagacaatctgccgtctcctggaaacgctggggctgcccttcagagagctggcagccccagcagtcagggcctgctttgcagaatagaatgtgaacccaactcctgatggcctacttgacttatttaattaaagatgaaatcatgcaatgagc

SEQ ID NO: 78593 - DNA, 951 bp, Homo Sapiens
cggattgcctgaacaaattgccgatgacgagaagaggagggtattaaggccatgtaccaacagtggatcttggggagagttcagctgagttggacttgctggcccttgaatgcatttaccttggagagtccagattttgggagtggccaggatttcctttcttcccaccccctgtttttaaccagaataaatcattggtgctccataacccagcccgctcttttggccctgcggtgtcatgaacggttcagccccgctcactggtttttttggtagggcccatcgtggggccgtcctgggtcccatcctttaattatacctgctcttccccaactccctgagcctgagtgagcgtgtggccatcatcaaaggcacgtatgagcctgacgaggaatgggaggagcagcgggaagagcggaagaagaccatggagctgaccacccgctgaccagtgtcaggcaggggccagcccctcagcccctgagccaagggggaaaagaagaaaaagtacctaacacaagcttcctttttgcacaaccggtcctcttggctgaggaggaggagctggtcaccctggctgcacagttagagaggggagaaggaacccatgatgggactcctggggtaggggccaggggctggggtctgctggggacaggtctctctgggacagacctcagagattgtgaatgcagttccaagctcacaggctgcaagggccaggccagaaaagggtgggcctgcagcctgcaccccccaccttccccaacccttcctcaagagctgaagggatcccagcccctaggtgggcagaggcagaccctccccagagctccttaggaagaagacagactggttcattgaatgccgccttatttatttctggtgaggatgcatgcgtggggctgctggtgtttagagtgggggctacccaataaatcactgatactc

SEQ ID NO: 78594 - DNA, 668 bp, Homo Sapiens
tgggaggtgagtgcggatggatctaaatatatctcttcccagccactttgaaaactgtttttctaacttgtgctttttctgaaagagttttttctctttgttaccaaattatgcaggcagaggtagacatttctgtacagacttgcctagtggtgttagtggaggcggtgtcatcacttgtctttctttctttcagaccggaacatgaacattttgcagtactgcccctcttccgacatgtggacgctctttgaaacatgtgacgtccacattcgcaagcagcagatggtgtctgtggaagagaccatctacatcgtgggggggtgtctccacgagctggggcccaaccgcaggagcagccagagcgaggacatgctcaccgtgcagtcctacaacaccgtcacccgccagtggctctacctcaaggagaacacgtccaaatcgggtcttaacttgacttgtgcgctccataacgacggcatctacatcatgagcagagacgtcaccctgtcgaccagcttggaacaccgagtgttcctcaagtacaacatcttttcagatagttgggaagcatttcggcgttttccagcttttggacataacttgctggtttcttctctttatctgcccaataaagcagaaacatgactgaattgaattggtagatg

SEQ ID NO: 78595 - DNA, 660 bp, Homo Sapiens
aaagctccgaagtggtcaacagtttcacttccaacttttttaaaagatacacaattttctaaaaaattttctttatgggcgattgaatagttgggctttggctaattcctcattagcaatagaattatgtatattttgcaaactctaatacagaacacttaatgtatcagacaaccatgattatgatgtatatacctggtataaacaatcttttttgcatattgaattctgcatttttttcttccttgatacgtatgagattcaccagtaccagtttttctcttgtggtggcatatagttgattgtcatttgcattatctattaaaaacctgtggcagctcatggtattattgaccatatgttctagtgtcttcttgcagatttaaatattttattgcagtgtaaagtttaatatttagatgtgtgatacatctttggataatctgtaattaaattgatcttttgtaatggtgatagtgattagcacacactgaaaatccagcaaagcaattatttttctctttttaactggaaatcatattcgtaagttgtggtagatattatcatcagtgtattcatgattcgatttatattttgtgttatctggttataaattttatatagcattcaatttgacaaaatataaatctatttgatttg

SEQ ID NO: 78596 - DNA, 1330 bp, Homo Sapiens
  misc_feature (528)..(528): n is a, c, g, or t
gggtggatgttgtacttgagaatgggtctcagtacaggtgtcaaccttttagaagcgaccttgttcttcctttccttccgagagctcgagcagagaggactgtgatgagacaggataacagagatactgtggatgatactgttagtagcgaatcgcttcagtctttgttctcagaatgggacaatccagtatttgcccgttatccagaggttgctgttgatgtaagcagtggccaggctgagagcttagcagttaaaattcacaacatcttgtatccctatcgtttcaccaaaggaatgattcattcaatgcaggttctccagcaagtagataacaagtttattgcctgtttgatgagcactaagactgaagagaatggcgaggcagattcctacgagaagcaacaggcacaaggctctggtcggaaaaaattactgtcttctactctaattcctccgctagagataacagtgacagaggaacaaaggagactcttatggtgttaccacaaaaatctggaagatctgngccttgaatttgtatttccagacactagtgattctctggtccttgtgggaaaagcaccactatgttttgtggaaagagaagccaatgaacttcggagaggaagatctactgtgaccaagagtattgtggaagaatttatccgagaacaactggagctactccagaccaccggaagcatccaagggacattgccactgactgtccagaaggtgttggcatcccaagcctgccatggggccattaagtttaatgatggcctgagcttacaggaaagttgccgccttattgaagctctgtcctcatgccagctgccattccagtgtgctcacgggagaccttctatgctgccgttagctgacatagaccacttggaacaggaaaaacagattaaacccaacctcactaaacttcgcaaaatggcccaggcctggcgtctctttggaaaagcagagtgtgatacaaggcagagcctgcagcagtccatgcctccctgtgagccaccatgagaacagaatcactggtctaaaaggaacaaagggatgttcactgtatgcctctgagcagagagcagcagcagcaggtaccagcacggccctgactgaatcagcccagtgtccctgagcagcttagacagcagggctctctgtatcagtctttcttgagcagatgattcccctagttgagtagccagatgaaattcaagcctaaagacaattcattcatttgcatccatgggcacagaaggttgctatatagtatctaccttttgctacttatttaatgataaaatttaatgacagtt

SEQ ID NO: 78597 - DNA, 1929 bp, Homo Sapiens
aacttagctagtacgaggcctggttggaattcggcacgagggtccccggtgacactgggagaaaggccacttggatgggggcgtttctgttttgttccgctttgtgatgtcaccaattgggaaacagcgagggtgggtggggacttttacagaatattctcaggtgtgtacccgagaggcagagagagggacgtggccggcagctctgtgcgtggccttgtcccaagcacttgcgcccgcccccgagcgccgcccccggggagcgggaagccagcactcgcactttggccaggggcgcgtggaaggtggtggcaggcaccggcctgggcagcttccaggcctggctggccacgaccacggcccgagggggagcccgccaggccacgccgcactgagccacagccccgggggccgcctcccggggccccttgaggcactgaggcaccgagactggttctccccgagagactcggaaggtggggaacgaggggactgtgtttggggaggtggctttttcgtctgctgttgactgaacactacagcgccctgtggttccgggcttcgcacagctgtcccagggatggatcgcctgtgctgccttcgcccgccgccacaccgggaccctgcacggctgcttctggcctcgacagatgacaaaagaaacagccccaaaatacgaccactccaaccagcagttcccgcctgcctgcccgccactgtcaggcctgccctggcctcctcgtccgcagggctgtctgctggcttctgggggcagaagagcggggagccccgtggaagggtcaggggagaccaggtcagggcagctacatttctggtgatcagccccatggggagacggggctggcgggacaccgcccccccggcttccccacaccacttctgtctcacccggaagcgtcctttttttgtgccaggtgtctacctaagagggttggtgccagaagccccccatggcgagtgctggggcccggcggtgccctgggggagcagatggggccacccctggcagggccgctacaactttttccagcagcggagccctctggggggcctgtgcttgtggcatctctgagggcccagattgcacaaggtgacctggccgtggcctgagggtggagtcgcccagcacgcaggccggggcgctgcggggctaagtattaggccttcccagggagggggcgtgccaagcatcccagagccgggctgggaccgccaaaacgtcgtggcctggatcctctgggtctgagtgcctgatcccctgccccccaaaaaagcagaggtaggtgttgcaggcccagggcaggggtgcctgccccaggagagtcccaggcagtggttctcgtgccagtggcacccaggggcaaggacagccaacccccacccttgccacgtgtggggccacgtgggcatgtggggtgtgtgtttttaccttggtgaatctcacctgccaacgatttctcgtgagtgccgaccaccttctccgaccatgttacgcccgggcggcagcagcccccggccactgcaaacccatgccctgggtcccccggctcccccagggaggcatccccgtgccaatgtcccccagtggtggcagcagatcctgtggccggcctggcggacgggacccagtgatacttgtatattacacagtcctgatttcagacaatttcaaccttaatctatttaaaaaagaattttctatacaagctgtttttaacccttttaccatttgaaatgcatgtgttgtgcgcgttggggatgggaggaggggctgaggagcggctcagtgtcacctcccacagccaccggccctgacccttaatccagacaccgatggaagtcgacttttcatatctttctcctgaaatgaactctgttttaaattggaataaattttgttcgtaaaaa

SEQ ID NO: 78598 - DNA, 700 bp, Homo Sapiens
  misc_feature (40)..(40): n is a, c, g, or t
cagtgagaggagagggctgggcgctccgctgagccactcntgcgcccccctggccttgtctacctcttgccccccgaagggttagtgtccagctcaccccagcatcctacaacctcctggtggccttgacgcccccacaaacccgaggtataaagccaggtacaccaggcaggggacgcaccaaggatggagatgttccaggggctgctgctgttgctgctgctgagcatgggcgggacatgggcatccaaggagacgcttcggccacggtgccgccccatcaatgccaccctggctgtggagaaggagggctgccccgtgtgcatcaccgtcaacaccaccatctgtgccggctactgccccaccatgacccgcgtgctgcagggggtcctgccggccctgcctcaggtggtgtgcaactaccgcgatgtgcgcttcgagtccatccggctccctggctgcccgcgcggcgtgaaccccgtggtctcctacgccgtggctctcagctgtcaatgtgcactctgccgccgcagcaccactgactgcgggggtcccaaggaccaccccttgacctgtgatgacccccgcttccaggactcctcttcctcaaaggcccctccccccagccttccaagtccatcccgactcccggggccctcagacaccccgatcctcccacaataaaggcttctcaatccgc

SEQ ID NO: 78599 - DNA, 2013 bp, Homo Sapiens
  misc_feature (61)..(191): n is a, c, g, or t
  misc_feature (1936)..(1936): n is a, c, g, or t
  misc_feature (1968)..(1968): n is a, c, g, or t
  misc_feature (1974)..(1974): n is a, c, g, or t
  misc_feature (1986)..(1986): n is a, c, g, or t
  misc_feature (1991)..(1991): n is a, c, g, or t
gtgccaagctaaaattaaccctcactgaaagggaataagcttgcggccgcatacgcggtcnnnnnnnnnnnnnnnnnnnnnnnnnnnnnnnnnnnnnnnnnnnnnnnnnnnnnnnnnnnnnnnnnnnnnnnnnnnnnnnnnnnnnnnnnnnnnnnnnnnnnnnnnnnnnnnnnnnnnnnnnnnnnnnnnnncagccaagatgaactccttaaggacaggatttggtaagtgattgacttctttttagttccatgatcttgagattatttttagctttataaatttagcagtggcagggcccgtggagaatcaggttaatgaggtaaaggctttctgggtatttgctgccaaggccacatcaccaattttctcgatttaaaaaactgtcaagagatttatttttccattgcaggttttaaagtggagattctgaagtggaaaataggtactgtcagaacaaagctacctggaaacagcatagagtgaagcctttcgtgagggcttgcaggccgctgctgagtggcagtttacagaagaggtcgcggggtgagcctcttagcaggacagaaaacaaggcagcagcgcacctgccaccccttcacgagctgctccttgagcctaaaaagtaggctttattcatcccttctgttcatttaccaacctgggggattgatacgaccggggaaaatgttcctaaaccaggaagctgcgttagccgatcaggctttgtaagatctcgccaacagctagctgcttaggagtacccccacgatacgcacagcacaccactgtcccttcactgcactttcttcctgccttaggtagttgggcttgcccaccctagtttgcttttgtagtggtttggcaaggttagaaggcctcggcctctctgtcatgctgggaagtgcctactctctgggccactgctgcagaggccgtggcacttgtcatgggtttggaagacccagccatctgcagcagaggcagcctatcccattgcaaggagaggaactgaacggagtaattattctactcttctttttacataaatgtttatttaaatattctaaattggattttctttcacagatactgattattctttccagttcttaaataaaactgcacttgatttcactcaaccacagtgtgattgtctgggatgtgaaactctgaggtcactcttgggtaagaagcgtcttaagcctttagcctcaaacgacgtgtgtttggcctcctcaatttctttctgaattcctacctctaaccagttgtaatgataattccttttgccctgcaggccaccacataggtttgtaaggccttggaacaggagcctcagtgcccctgaagtagcaggtgcagggacagtggacgtcaatgtgagtgatgtgttatgtgttgaatgtgctgccatgttagcacgtagacccatttgctgttaatcactgaatcaagctgaatatttgcttaaatgtgactatctgggcatcattttgccacaaaaacttgtaaaattttacgtcacgtgggttactttttaaaaagcatttattaagctcctctaaatgaaaaggatactgtggagaaatggaaaactgctgggaaaaaactactagaaaaaaggttgctgccacccagtgccttgctatcaacggaagtcggactcaggagggctgcaggagtttgggaaagcagcgaagttgtaactgagaccatctgccacataagctggccaggtgctaacccctggctttaggagctctgcccttgctggaaagggagagaagctggagcaaacgttcctcatccttccatgagtcactgctcagattactgtgtggaacttcccagtagcaccaggttaacagtgggactgttattccggaggaactggattcctttgcaatagggcaggtgccactcagtgtggagnttgttactaaaacggacacctgacatacaaantgccanacagggctgganacgcntcgtcgtagtgtgatacgagga

SEQ ID NO: 78600 - DNA, 699 bp, Homo Sapiens
  misc_feature (15)..(15): n is a, c, g, or t
  misc_feature (31)..(31): n is a, c, g, or t
catggtgctagtcanacccccaatcctgctntattcttttagtgtcccagagagtttgttcccaggcctgagagacattctaaacacctgggagaaggacctcagaacccgatttaggactcagaatgactttgctgatctcagcatctcctctgagatagtcacactgccggctgtggccctctgactttaactctcctcccatatagaaggtactcagtaaatgatcatctctaggttggggatggcaaataatcatctcaactgccaattccaagtgtcttgaatacactaaggcacaatgctgtagatcagttggccacaaatgcaaagggcatgtaaataggtaatggtggtgctagtagcaaattggtagatagtacatacttgccatttctatactaggaagtcctcttagtggagatgttttcattttcactggataaaagatagaaggaaggagatgatagaggaaaagcagggtgatggaagacaagccaaacactcttgcatggtaaccttgtaaatatacctgctctatgtgggtgctgcatgctaggaaagtagggctgggggcttttctgcatgtttatatgcctccaactgaatttgaggagagtagaccaccagtatgcttaaatatgtgatacttgttaatgtaatacaccattcaggaataaactgagagttctgaggaac

SEQ ID NO: 78601 - DNA, 674 bp, Homo Sapiens
  misc_feature (454)..(471): n is a, c, g, or t
agccagcccaatagggggcggatgtgagtggggagctgggtcgcatgaaggtgggggtgatgccgaaggggaagggatcgccagtggggattggtgcgtgtgcggaaacggggacagaagtgaaggttcatcgcctataacgaagatgtaggtaggcatataggggcttctggaaagctagaggctgggctgagccaggagtcctctcccagaagttggggggcggtgcagaggtgtgggtcgagcccgcatgcgtgcctgctggggagggggtgagtggtgaggaccaggcccgctgggtcctgggggcgcggtggctggcgcgcaggtcccggagggggcggctggcgcgcactacacgcttggggacaaggaaaacatccgccggaggcccggccgggcggcgctccagcctcggggcaggtgcgcggagaggaagtgagagcattccggnnnnnnnnnnnnnnnnnnggccgctggccctccggtagaagggagcctgctggtctctgtgtaacggatggcttaaaagcaaggttgtctgcgtcttggattactgtctgccattcagcctttgccaaaaaatttggcactgatctgcacatttttatagtcatttaaaattgtatgactctgtcaaatgatttaagtaattttggtgggatttttaaaat

SEQ ID NO: 78602 - DNA, 2017 bp, Homo Sapiens
  misc_feature (1861)..(1861): n is a, c, g, or t
gggaaaccgaggcgcgggacgcaatggccatgcagacaggccggccagagggtcatctgcgtccggcacccagtgaggctcgtggtccgcctttgcctgggctgagggtctctggccccgcagcctctcttggaggcgggcctgtccctaagcccgccaaggggcgccgcgccgaggggctgcggagtgggggacggacgcccccgacccgggaaggggcgtccggcggggccggaggagagggctctccccgctcaggaggtgcccctgggcgggggaccgggagtcctcaaccccggactgaggcaggggtctctgggggcgaggagggcgcgtcgccctctgcccccgccggcaccctggccatgacaggcaagtcggtgaaggacgtggatcggtaccaggctgtcctggccaacctgctgctggaggaggataacaagttttgtgcagattgccagtctaaagggccgcgatgggcctcttggaacattggtgtgttcatctgcattcgatgtgctggaatccacaggaatctgggggtgcacatatccagggtaaagtcagttaacctcgaccagtggactcaagaacagattcagtgcatgcaagagatgggaaatggaaaggcaaaccgactttatgaagcctatcttcctgagacctttcggcgacctcagatagacccagctgttgaaggatttattcgagacaaatatgagaagaagaaatacatggaccgaagtctggacatcaatgcctttaggaaagaaaaagatgacaagtggaaaagagggagcgaaccagttccagaaaaaaaattggaacctgttgtttttgagaaggtgaaaatgccacagaaaaaagaagacccacagctacctcggaaaagctccccgaaatccacagcgcctgtcatggatttgttgggccttgatgctcctgtggcctgctccattgcaaatagtaagaccagcaataccctagagaaggatttagatctgttggcctctgttccatccccttcttcttcgggttccagaaaggttgtaggttccatgccaactgcagggagtgccggctctgttcctgaaaatctgaacctgtttccggagccagggagcaaatcagaagaaataggcaagaaacagctctctaaagactccattctttcactgtatggatcccagacgcctcaaatgcctactcaagcaatgttcatggctcccgctcagatggcatatcccacagcctaccccagcttccccggggttacacctcctaacagcataatggggagcatgatgcctccaccagtaggcatggttgctcagccaggagcttctgggatggttgcccccatggccatgcctgcaggctatatgggtggcatgcaggcatcaatgatgggtgtgccgaatggaatgatgaccacccagcaggctggctacatggcaggcatggcagctatgccccagactgtgtatggggtccagccagctcagcagctgcaatggaaccttactcagatgacccagcagatggctgggatgaacttctatggagccaatggcatgatgaactatggacagtcaatgagtggcggaaatggacaggcagcaaatcagactctcagtcctcagatgtggaaataaaaacaaaacacctgtatggctgccattctcttcagccctcgctctcccctttccacagcctccacccctgacccccatcctcttttcctacctctctgtttggtttagaaattgctcaataagtcatttggggtttggcatcctgcccagccacttcccaaacatgaagacctctccggtggctttaggtggacatgccccatagnccatccaacgtcctcccccatccctctcctggcaccagccaccttaaaaattggttggaagaaaggcccttaaactgggggaagaaatggggcccccttttgaagtcccttcccctcaagggttaaggctcctgtcgaactctcaaaaagggtcct

SEQ ID NO: 78603 - DNA, 1158 bp, Homo Sapiens
  misc_feature (62)..(62): n is a, c, g, or t
  misc_feature (166)..(166): n is a, c, g, or t
  misc_feature (168)..(170): n is a, c, g, or t
  misc_feature (186)..(186): n is a, c, g, or t
tctccgtctttttttgattggcggtacattccccggaacgttgactgttcgattaccgaccnttaggattgcctcgagccagaatcgccgagttttatacggcacagcgcacacgtccactggatgccccacgtgcctcgcctccccccatcttggcctcgtcctntnnnactatccccgagttcncagtgccaagtcagccagagcaaagtaccaggggacagtaccccacccgggctggctatgagccatcttgaagagcagaaggtcagagcatgttcgtggagaacaagccttttccatggatgagccggttgcagctaagaggccggtgtcaccatacagcgggtacaatgggcagctgctgaccagtgtgtaccagcccactgagatggccctgatgcacaaagttccgtccgaaggagcttacgacatcatcctcccacgggccaccgccaacagccaggtgatgggcagtgccaactcgaccctgcgggctgaagacatgtactcggcccagagccaccaggcggccacaccgccgaaagacggcaagaactctcaggtctttagaaacccctacgtgtgggactgagtcagcggtggcgaggagaggcggtcggatttggggagggccctgaggacctggccccgggcaagggactctccaggctcctcctccccctggcaggcccagcaacatgtgccccagatgtggaagggcctccctctctgccagtgtttgggtgggtgtcatgggtgtccccacccactcctcagtgtttgtggagtcgaggagccaaccccagcctcctgccaggatcacctcggcggtcacactccagccaaatagtgttctcggggtggtggctgggcagcgcctatgtttctctggagattcctgcaacctcaagagacttcccaggcgctcaggcctggatcttgctcctctgtgaggaacaagggtgcctaataaatacatttctgctttattaactcttgctctgggattgtggtttctgacctggcctcctggtttctgatgaacgtctcctccaccatggcctgtgggtgacttctctttcttccctccaaatccagctcacatttaaagctgctgcagatttttcctgtgcaattaagtagctgatgcctctc

SEQ ID NO: 78604 - DNA, 511 bp, Homo Sapiens
tccaactctatgtctggacctgtgttaggcacttcagataccacacgagtaagacaagggccctgcaggggtggtcctttggtggaaagctggtcttaagggttgggcttgggaataggcagggtcagattccagggcatggctctggactcagctggtttatacctatatgaccattacagttgtctacagatcacatccattctggctggtcaacatgcatgctgtactggctgttaaataaaaatattctgaatgtcactccttttgagggacagcacagccttccctaggcattctcctatattccccagccaagcaggggagactagagagcaccaatggccaacacagctgcctggctggggaggctgtgctgtttcccctggagacctgactggtctgtggttcccacaggaacagggttgtcttttgagcccccagtgtctggtttcattcatctcagacttgttatttcactcatctctaataaaggattggggggtcagaa

SEQ ID NO: 78605 - DNA, 683 bp, Homo Sapiens
tttatacctagatgaccattacagttgtctacagatcacatccattctggctggtcaacatgcatgctgtactggctgttaaataaaaatattctgaatgtcactccttttgagggacagcacagccttccctaggcattctcctatattccccagccaaattgtagagtcagatgcacccacatttgcctgtgtccttgatttagcaggaaggaaaggaatagtcggggttgatggatgcccacttctcttctctttctcttggtcaactcaggagccttttagtctgagggaatggagaggcaaagaaagaagggagagtaatagaattgggagggcagagacttaagggttctgcttcccagccctagaaattctatcattgctcagccccaatgagaaagcagatacacctaagccatcatcaaccactaacatctcaacttgccagttgctgggtgctgggccctggcaggaatgggccaagccaagcaggggagactagagagcaccaatggccaacacagctgcctggctggggaggctgtgctgtttcccctggagacctgactggtctgtggttcccacaggaacagggttgtcttttgagcccccagtgtctggtttcattcatctcagacttgttatttcactcatctctaataaaggattggggggtcaaa

SEQ ID NO: 78606 - DNA, 1210 bp, Homo Sapiens
  misc_feature (44)..(78): n is a, c, g, or t
aaacgaccgagcgcagcagagtctgtgagcgaggaagcggccgnnnnnnnnnnnnnnnnnnnnnnnnnnnnnnnnnnncagtcgacggtaccggacatatgcccgggaattcggccattacggccgggggcttcgcagtagacggacagaggagtcgtagcggtcgaggcttttgcggctccggcgtgccggaaagtatgttatgcataaaagtggataatttacatgataaatgaaaatggccaattctttaagaggagaagtactaaaactttataaaaatctgctgtatcttggacgagactatccaaaaggagcagactattttaaaaagcgtttgaagaacattttccttaaaaacaaagatgtgaagaatccagagaagatcaaagaacttattgcacagggcgaatttgtaatgaaagagctagaagctttgtacttccttaggaaatacagagctatgaaacaacgctattattcagataccaacaaaactaattgatcattactactttaatttagctatcagtgccagctgtttatgtataccagatgttgtaaaataattctaacttaaaatgggaagatatacatgttgtgtaaaaaatccctgagctgccctactgaactaaataggtttcaacttctgttcatacggagaaagtatcagcaactttatgctcaattttgatacaaacatagcaatttagctatactaccgatcataaattaatgagcacccaattttgaatgaaaatataatacacttaatcctctaacttaataggacttagccaattatttttagcttatttctccattttactgacgagaatgccatttaccgaacatttaataagcaaaataatttcttacacacttcttctcttaacttttgaaaggaatcccttattttttcacccaatttggtatattaacagcacatactcaaggttcactacaaaacaaacagttcctggtaatgatttaaatgtagttatagaaataaataatatgtatggagtcattacttctgaccttgaaatagcctgctggtgactggcattaacatacataactaactattcaattatttccattattaatgttgctgctgctacctttgggcctaaaaccaagtcacctgttgtgtatcaattaccttctttgataaaaggaaataaataaataatgttatcctaaaaaa

SEQ ID NO: 78607 - DNA, 961 bp, Homo Sapiens
  misc_feature (599)..(599): n is a, c, g, or t
  misc_feature (744)..(744): n is a, c, g, or t
  misc_feature (796)..(796): n is a, c, g, or t
  misc_feature (805)..(805): n is a, c, g, or t
  misc_feature (852)..(852): n is a, c, g, or t
cttaaaaatataaatgtatttatctgcattatcacgtccctggggcacccagctggccggcccgtgggccacagggcaggaagggaacagggcgtaagtctcagcaaggcggaggagagctccgccaggtggggatgtggggcagcctcacagggccccgtgctgggcctggtatcgggacagcacggcgcggtagtgggacagctcctggcgcacggccacaacttcctgccgcagcagggcgttctccttctccaggaaggccgcccgcaccgatatctggttctccttgagccgccgggcgtcacgggaccgcttggctgcaatcgttgttcttgtaccgccggctccagtatttctcatcctgcaggagaagagggggagagcactgaggtccagagggacccaggtcccagcgagagaggaagggagccccagcagcggggcctaaaccacaccaggtctctgctgggataggtacccaagggtctgcctttctagggccctggttgctaaggagagtgggcccctagcaacagtaaaggcatgagatagaccccccaccctcaagcaactcgcttcaagtctccactctgcanagcggaccccagccctccccacatgataaaggcctgcatgcagttagctcttgcttgctaaggatgcttgttccctagcaacaagccttcatggtctgagggttctcccaatgaagagcatgccctgcctgcacattgctttccnattctggttgctaaggaagcttggtgcctggtgatgggttgggtgtccatanatctcgcanagctgggcctctgactgggtgccaagcactcatcatcctggcaacanatgaggctagtggttcatgacgtggcagcctgactgctggctgactgagcaagaaactctccccatagctactaaaaaacttcctaggaaggacatctaacccaaagat

SEQ ID NO: 78608 - DNA, 1641 bp, Homo Sapiens
  misc_feature (768)..(817): n is a, c, g, or t
ggtccggaattcccgggatcaagcgccttccgttgcgagagctgcagattttgcaagagccaggctcgcccaccttgtagaaggagcgccttgagtcccctctcaccctcggttgcaaagagccgaccgcttgatctggacaccccctcgcccagattgcatgatctcccgggaccctcttgagttgcacgtttctgcaccgaggacctcaaatccccgtcgctcctaggatttgcagcgttctggatactggagggttgcaggctacactcgcccgcccctgggcagacactcgtccaaaccactggagtgtgctggtgactggcaggccagcccttcgcctctccatgaacccgtgagcctgggggcaggtgccaggcgatggcgcggcctgtgagcgacaggaccccggcccctctgctgctgggcggcccggccgggacaccccctggcgggggagcgctgcttgggttgcggagccttctgcaggggaccagcaagcccaaagagccggccagctgtctcctgaaggaaaaggagcgcaaggcggccctgcctgcagccacaacccctgggccaggcctggagactgcgggcccggcggatgccccggctggggcagtggtgggcggagggtccccgcgggggcgcccggggccggtgcccgccccgggtctgttggcgccactgctgtgggagcgcacgctgccgttcggcgatgtggagtacgtagacctggacgccttcctgctggagcacgggctcccnnnnnnnnnnnnnnnnnnnnnnnnnnnnnnnnnnnnnnnnnnnnnnnnnnggacgcccgcaccctccccagggccgggttcgtgcggctcggcttccccccgctcctctcctgggcacgcccccgcccgggctgccctcgggaccgccagcggccaccgcgcaggcctgacctctcgggacacacccagccctgtggacccagacaccgtggaggtgttgatgacctttgaacccgacccagctgatcttgccctatcaagcattcctggccacgagacctttgaccctcgaagacatcgcttctcagaagaggaacttaagccccagccaatcatgaagaaggcaagaaaaatccaggtgccggaggagcagaaggatgagaaatactggagccggcggtacaagaacaacgaggcagccaagcggtcccgtgacgcccggcggctcaaggagaaccagatatcggtgcgggcggccttcctggagaaggagaacgccctgctgcggcaggaagttgtggccgtgcgccaggagctgtcccactaccgcgccgtgctgtcccgataccaggcccagcacggggccctgtgaggctgccccacatccccacctggcggagctctcctccgccttgctgagacttacgccctgttcccttcctgccctgtggcccacgggccggccagctgggtgccccagggacgtgataatgcagataaatacatttatatttttaagaaaaagcgagcctcccccctcccttgcgggggcggggagggttctctgtgtgtgtccccggcacgtcagggaccctatcctcccaccgcctccgttaacacgatcctgaataaatcttgagaaccccaaaaaaaa

SEQ ID NO: 78609 - DNA, 1433 bp, Homo Sapiens
  misc_feature (97)..(97): n is a, c, g, or t
  misc_feature (107)..(107): n is a, c, g, or t
  misc_feature (161)..(161): n is a, c, g, or t
  misc_feature (183)..(183): n is a, c, g, or t
  misc_feature (197)..(197): n is a, c, g, or t
  misc_feature (207)..(207): n is a, c, g, or t
  misc_feature (241)..(241): n is a, c, g, or t
  misc_feature (246)..(247): n is a, c, g, or t
  misc_feature (319)..(321): n is a, c, g, or t
  misc_feature (328)..(328): n is a, c, g, or t
  misc_feature (330)..(331): n is a, c, g, or t
  misc_feature (345)..(345): n is a, c, g, or t
gcgcctgggagggtcgactccatgatccccgcgcttgagctgcacgcaatctgcaaccctttccaggagtacgtgcagccgcatagatcacccaggntgtgcattcntgccatgtagtacgccctgctcagcagaggagtgtagatctgcaggctaaactntattggaatgatatgtgatatntagtaaagccatgntacagctagnaatgagccttagctgcatcaagtacgaagtgatnattcnntttcagcaaactccgggagtccagaaatgagtcttcctgacaggtgtcttcaatggggcgttggggcccccnnnaggcccncnnaccgcgtcttcccntaatgagggccctgccgaggcatcagctgctctgctcagttagttttattcccggggtaccaagcagctgcacagtcggtgcctgggaggcacgtagaggcccagagagtccctgggggttctgctctgaccgtgtgggtggtgatccttgtcaggatgtacagtccttgctcccaccccatccgggatggccgcctgtccctgactattgagtcctgttgttgtaagccaggcatggagggctcctgcccttctgctgagccacagcccattgcagcactgtgctggccagacttcagctgccttgggaactgaagccctgccactgttgctagtcaggggcttggttctcccacttacactgttgacatctattttctgaagtgtgtttaaattattcagtgctaatcattgttttttcctttgtaaatgttgattcagaaaaggaaagcacaggctaagcagttgaaggttccccaccattcagtgagagcagaacccccattccccagcctctgctggtagcatgtcgcagtttccatgtgtttcaggatcttcgggctgtcgttagacaggttaatgaagaacacttctcaacagtttcctttttgttttcctttataattcactaaaataaagcatctattagtgtctgatttaggaatgtaaaatgattctgtattaatgtaaataagattatctattgcaaaaagatatttcaaacctaaattgtggtcatttcttctttgaaagaattcagacagcctctgcaggtggcttatgggggttacaggagacttggctggcctcatcctgtgctcacagccacccagagcacatagaggcagatgggtctggggtgccgacagtgctgaccctcacttggattccagagcagggtgcttgccatgacacaacagtcccctgtgagtgaatgttctagaatctggatgtgacttttttcttgggagcccatgctgtgagagctggccaatgtccctgggtccctgcatttcagtctccctcactggattgtttcccttcattctttccagtctttgcatcttttacattcaattgtattttat

SEQ ID NO: 78610 - DNA, 682 bp, Homo Sapiens
gcggccgctgctgaagggcgggagaagttgcggcgtggcgataggtctgggtgttctgggaggacccctaaaagggagcagctctgccaggtcagagcttgaggtagcatgtgtgccgcttccaggaggccaggatggagacagcagttcgaggaatgcccttggaatgccctcctaggccggagcggctcaatgcctacgagcgcgaagtgatggtgaacatgctgaactcactgtcgcggaaccagcagctgccgcggatcacgccccgatgcgggtgcgtggacccgctgcccggccgcctgcccttccatggttacgaaagtgcttgctcgggccgccactactgtctgcgcgggatggactactacgccagcggggcgccctgcaccgaccgccgcctgcggccttggtgccgggagcaaccgactatgtgtacctccctacgagcaccggcccggaatgcagtgtgctgttacaactcccccgccgtcatactacccatatccgaaccttagatgggacacaagtcacttcaagaagtctggtggtccccagagaaacaactatgttatccatcctgagtttgtgtctgagacctatcccgactatcgttgctggtagagcctgggcttgctgtgccaagggggcagagcaataaataaactcttcaaccccaaaa
